United States Patent Application Publication US 2004/0241651 A1 - sequence listing, part 4

SEQ ID NO: 88283 - DNA, 13 bp, Artificial Sequence
  Oligonucleotide for detection of SNP TSC0022179
atgagtcgttgty

SEQ ID NO: 88284 - DNA, 13 bp, Artificial Sequence
  Oligonucleotide for detection of SNP TSC0022179
racaacgactcat

SEQ ID NO: 88285 - DNA, 13 bp, Artificial Sequence
  Oligonucleotide for detection of SNP TSC0022185
attaaagtgtttt

SEQ ID NO: 88286 - DNA, 13 bp, Artificial Sequence
  Oligonucleotide for detection of SNP TSC0022185
aaaacactttaat

SEQ ID NO: 88287 - DNA, 13 bp, Artificial Sequence
  Oligonucleotide for detection of SNP TSC0022185
attaaaatgtttt

SEQ ID NO: 88288 - DNA, 13 bp, Artificial Sequence
  Oligonucleotide for detection of SNP TSC0022185
aaaacattttaat

SEQ ID NO: 88289 - DNA, 13 bp, Artificial Sequence
  Oligonucleotide for detection of SNP TSC0022186
taagtatttatta

SEQ ID NO: 88290 - DNA, 13 bp, Artificial Sequence
  Oligonucleotide for detection of SNP TSC0022186
taataaatactta

SEQ ID NO: 88291 - DNA, 13 bp, Artificial Sequence
  Oligonucleotide for detection of SNP TSC0022186
taagtagttatta

SEQ ID NO: 88292 - DNA, 13 bp, Artificial Sequence
  Oligonucleotide for detection of SNP TSC0022186
taataactactta

SEQ ID NO: 88293 - DNA, 13 bp, Artificial Sequence
  Oligonucleotide for detection of SNP TSC0022186
tagtgagtgtttg

SEQ ID NO: 88294 - DNA, 13 bp, Artificial Sequence
  Oligonucleotide for detection of SNP TSC0022186
caaacactcacta

SEQ ID NO: 88295 - DNA, 13 bp, Artificial Sequence
  Oligonucleotide for detection of SNP TSC0022186
tagtgattgtttg

SEQ ID NO: 88296 - DNA, 13 bp, Artificial Sequence
  Oligonucleotide for detection of SNP TSC0022186
caaacaatcacta

SEQ ID NO: 88297 - DNA, 13 bp, Artificial Sequence
  Oligonucleotide for detection of SNP TSC0022187
ttattaatgagta

SEQ ID NO: 88298 - DNA, 13 bp, Artificial Sequence
  Oligonucleotide for detection of SNP TSC0022187
tactcattaataa

SEQ ID NO: 88299 - DNA, 13 bp, Artificial Sequence
  Oligonucleotide for detection of SNP TSC0022187
ttattagtgagta

SEQ ID NO: 88300 - DNA, 13 bp, Artificial Sequence
  Oligonucleotide for detection of SNP TSC0022187
tactcactaataa

SEQ ID NO: 88301 - DNA, 13 bp, Artificial Sequence
  Oligonucleotide for detection of SNP TSC0022189
ttatttattatgg

SEQ ID NO: 88302 - DNA, 13 bp, Artificial Sequence
  Oligonucleotide for detection of SNP TSC0022189
ccataataaataa

SEQ ID NO: 88303 - DNA, 13 bp, Artificial Sequence
  Oligonucleotide for detection of SNP TSC0022189
ttattttttatgg

SEQ ID NO: 88304 - DNA, 13 bp, Artificial Sequence
  Oligonucleotide for detection of SNP TSC0022189
ccataaaaaataa

SEQ ID NO: 88305 - DNA, 13 bp, Artificial Sequence
  Oligonucleotide for detection of SNP TSC0022189
ttatggtaagtaa

SEQ ID NO: 88306 - DNA, 13 bp, Artificial Sequence
  Oligonucleotide for detection of SNP TSC0022189
ttacttaccataa

SEQ ID NO: 88307 - DNA, 13 bp, Artificial Sequence
  Oligonucleotide for detection of SNP TSC0022189
ttatgggaagtaa

SEQ ID NO: 88308 - DNA, 13 bp, Artificial Sequence
  Oligonucleotide for detection of SNP TSC0022189
ttacttcccataa

SEQ ID NO: 88309 - DNA, 13 bp, Artificial Sequence
  Oligonucleotide for detection of SNP TSC0022190
agttaaatagatt

SEQ ID NO: 88310 - DNA, 13 bp, Artificial Sequence
  Oligonucleotide for detection of SNP TSC0022190
aatctatttaact

SEQ ID NO: 88311 - DNA, 13 bp, Artificial Sequence
  Oligonucleotide for detection of SNP TSC0022190
agttaagtagatt

SEQ ID NO: 88312 - DNA, 13 bp, Artificial Sequence
  Oligonucleotide for detection of SNP TSC0022190
aatctacttaact

SEQ ID NO: 88313 - DNA, 13 bp, Artificial Sequence
  Oligonucleotide for detection of SNP TSC0022191
agagggagaaagt

SEQ ID NO: 88314 - DNA, 13 bp, Artificial Sequence
  Oligonucleotide for detection of SNP TSC0022191
actttctccctct

SEQ ID NO: 88315 - DNA, 13 bp, Artificial Sequence
  Oligonucleotide for detection of SNP TSC0022191
agagggggaaagt

SEQ ID NO: 88316 - DNA, 13 bp, Artificial Sequence
  Oligonucleotide for detection of SNP TSC0022191
actttccccctct

SEQ ID NO: 88317 - DNA, 13 bp, Artificial Sequence
  Oligonucleotide for detection of SNP TSC0022192
gataggattttta

SEQ ID NO: 88318 - DNA, 13 bp, Artificial Sequence
  Oligonucleotide for detection of SNP TSC0022192
taaaaatcctatc

SEQ ID NO: 88319 - DNA, 13 bp, Artificial Sequence
  Oligonucleotide for detection of SNP TSC0022192
gatagggttttta

SEQ ID NO: 88320 - DNA, 13 bp, Artificial Sequence
  Oligonucleotide for detection of SNP TSC0022192
taaaaaccctatc

SEQ ID NO: 88321 - DNA, 13 bp, Artificial Sequence
  Oligonucleotide for detection of SNP TSC0022195
tgatatattttty

SEQ ID NO: 88322 - DNA, 13 bp, Artificial Sequence
  Oligonucleotide for detection of SNP TSC0022195
raaaaatatatca

SEQ ID NO: 88323 - DNA, 13 bp, Artificial Sequence
  Oligonucleotide for detection of SNP TSC0022195
tgatatgttttty

SEQ ID NO: 88324 - DNA, 13 bp, Artificial Sequence
  Oligonucleotide for detection of SNP TSC0022195
raaaaacatatca

SEQ ID NO: 88325 - DNA, 13 bp, Artificial Sequence
  Oligonucleotide for detection of SNP TSC0022195
tgatacgttttty

SEQ ID NO: 88326 - DNA, 13 bp, Artificial Sequence
  Oligonucleotide for detection of SNP TSC0022195
raaaaacgtatca

SEQ ID NO: 88327 - DNA, 13 bp, Artificial Sequence
  Oligonucleotide for detection of SNP TSC0022195
gagaagtgtgtta

SEQ ID NO: 88328 - DNA, 13 bp, Artificial Sequence
  Oligonucleotide for detection of SNP TSC0022195
taacacacttctc

SEQ ID NO: 88329 - DNA, 13 bp, Artificial Sequence
  Oligonucleotide for detection of SNP TSC0022195
gagaagcgtgtta

SEQ ID NO: 88330 - DNA, 13 bp, Artificial Sequence
  Oligonucleotide for detection of SNP TSC0022195
taacacgcttctc

SEQ ID NO: 88331 - DNA, 13 bp, Artificial Sequence
  Oligonucleotide for detection of SNP TSC0022196
aaagaaattgaaa

SEQ ID NO: 88332 - DNA, 13 bp, Artificial Sequence
  Oligonucleotide for detection of SNP TSC0022196
tttcaatttcttt

SEQ ID NO: 88333 - DNA, 13 bp, Artificial Sequence
  Oligonucleotide for detection of SNP TSC0022196
aaagaagttgaaa

SEQ ID NO: 88334 - DNA, 13 bp, Artificial Sequence
  Oligonucleotide for detection of SNP TSC0022196
tttcaacttcttt

SEQ ID NO: 88335 - DNA, 13 bp, Artificial Sequence
  Oligonucleotide for detection of SNP TSC0022198
aggagggaggtty

SEQ ID NO: 88336 - DNA, 13 bp, Artificial Sequence
  Oligonucleotide for detection of SNP TSC0022198
raacctccctcct

SEQ ID NO: 88337 - DNA, 13 bp, Artificial Sequence
  Oligonucleotide for detection of SNP TSC0022198
aggaggtaggtty

SEQ ID NO: 88338 - DNA, 13 bp, Artificial Sequence
  Oligonucleotide for detection of SNP TSC0022198
raacctacctcct

SEQ ID NO: 88339 - DNA, 13 bp, Artificial Sequence
  Oligonucleotide for detection of SNP TSC0022199
taatttatagtgg

SEQ ID NO: 88340 - DNA, 13 bp, Artificial Sequence
  Oligonucleotide for detection of SNP TSC0022199
ccactataaatta

SEQ ID NO: 88341 - DNA, 13 bp, Artificial Sequence
  Oligonucleotide for detection of SNP TSC0022199
taatttgtagtgg

SEQ ID NO: 88342 - DNA, 13 bp, Artificial Sequence
  Oligonucleotide for detection of SNP TSC0022199
ccactacaaatta

SEQ ID NO: 88343 - DNA, 13 bp, Artificial Sequence
  Oligonucleotide for detection of SNP TSC0022199
taattcgtagtgg

SEQ ID NO: 88344 - DNA, 13 bp, Artificial Sequence
  Oligonucleotide for detection of SNP TSC0022199
ccactacgaatta

SEQ ID NO: 88345 - DNA, 13 bp, Artificial Sequence
  Oligonucleotide for detection of SNP TSC0022199
ttattatgaatta

SEQ ID NO: 88346 - DNA, 13 bp, Artificial Sequence
  Oligonucleotide for detection of SNP TSC0022199
taattcataataa

SEQ ID NO: 88347 - DNA, 13 bp, Artificial Sequence
  Oligonucleotide for detection of SNP TSC0022199
ttattacgaatta

SEQ ID NO: 88348 - DNA, 13 bp, Artificial Sequence
  Oligonucleotide for detection of SNP TSC0022199
taattcgtaataa

SEQ ID NO: 88349 - DNA, 13 bp, Artificial Sequence
  Oligonucleotide for detection of SNP TSC0022204
tatatttgtaaty

SEQ ID NO: 88350 - DNA, 13 bp, Artificial Sequence
  Oligonucleotide for detection of SNP TSC0022204
rattacaaatata

SEQ ID NO: 88351 - DNA, 13 bp, Artificial Sequence
  Oligonucleotide for detection of SNP TSC0022204
tatattcgtaaty

SEQ ID NO: 88352 - DNA, 13 bp, Artificial Sequence
  Oligonucleotide for detection of SNP TSC0022204
rattacgaatata

SEQ ID NO: 88353 - DNA, 13 bp, Artificial Sequence
  Oligonucleotide for detection of SNP TSC0022204
gattatgggtatg

SEQ ID NO: 88354 - DNA, 13 bp, Artificial Sequence
  Oligonucleotide for detection of SNP TSC0022204
catacccataatc

SEQ ID NO: 88355 - DNA, 13 bp, Artificial Sequence
  Oligonucleotide for detection of SNP TSC0022204
gattataggtatg

SEQ ID NO: 88356 - DNA, 13 bp, Artificial Sequence
  Oligonucleotide for detection of SNP TSC0022204
catacctataatc

SEQ ID NO: 88357 - DNA, 13 bp, Artificial Sequence
  Oligonucleotide for detection of SNP TSC0022204
gattacgggtatg

SEQ ID NO: 88358 - DNA, 13 bp, Artificial Sequence
  Oligonucleotide for detection of SNP TSC0022204
catacccgtaatc

SEQ ID NO: 88359 - DNA, 13 bp, Artificial Sequence
  Oligonucleotide for detection of SNP TSC0022206
tgttatatagaty

SEQ ID NO: 88360 - DNA, 13 bp, Artificial Sequence
  Oligonucleotide for detection of SNP TSC0022206
ratctatataaca

SEQ ID NO: 88361 - DNA, 13 bp, Artificial Sequence
  Oligonucleotide for detection of SNP TSC0022206
tgttatgtagaty

SEQ ID NO: 88362 - DNA, 13 bp, Artificial Sequence
  Oligonucleotide for detection of SNP TSC0022206
ratctacataaca

SEQ ID NO: 88363 - DNA, 13 bp, Artificial Sequence
  Oligonucleotide for detection of SNP TSC0022206
cgttatatagaty

SEQ ID NO: 88364 - DNA, 13 bp, Artificial Sequence
  Oligonucleotide for detection of SNP TSC0022206
ratctatataacg

SEQ ID NO: 88365 - DNA, 13 bp, Artificial Sequence
  Oligonucleotide for detection of SNP TSC0022206
cgttatgtagaty

SEQ ID NO: 88366 - DNA, 13 bp, Artificial Sequence
  Oligonucleotide for detection of SNP TSC0022206
ratctacataacg

SEQ ID NO: 88367 - DNA, 13 bp, Artificial Sequence
  Oligonucleotide for detection of SNP TSC0022206
tgttacgtagaty

SEQ ID NO: 88368 - DNA, 13 bp, Artificial Sequence
  Oligonucleotide for detection of SNP TSC0022206
ratctacgtaaca

SEQ ID NO: 88369 - DNA, 13 bp, Artificial Sequence
  Oligonucleotide for detection of SNP TSC0022206
cgttacgtagaty

SEQ ID NO: 88370 - DNA, 13 bp, Artificial Sequence
  Oligonucleotide for detection of SNP TSC0022206
ratctacgtaacg

SEQ ID NO: 88371 - DNA, 13 bp, Artificial Sequence
  Oligonucleotide for detection of SNP TSC0022206
ggtttgtgtggtg

SEQ ID NO: 88372 - DNA, 13 bp, Artificial Sequence
  Oligonucleotide for detection of SNP TSC0022206
caccacacaaacc

SEQ ID NO: 88373 - DNA, 13 bp, Artificial Sequence
  Oligonucleotide for detection of SNP TSC0022206
ggtttgtgtggcg

SEQ ID NO: 88374 - DNA, 13 bp, Artificial Sequence
  Oligonucleotide for detection of SNP TSC0022206
cgccacacaaacc

SEQ ID NO: 88375 - DNA, 13 bp, Artificial Sequence
  Oligonucleotide for detection of SNP TSC0022206
ggtttgcgtggtg

SEQ ID NO: 88376 - DNA, 13 bp, Artificial Sequence
  Oligonucleotide for detection of SNP TSC0022206
caccacgcaaacc

SEQ ID NO: 88377 - DNA, 13 bp, Artificial Sequence
  Oligonucleotide for detection of SNP TSC0022206
ggtttgcgtggcg

SEQ ID NO: 88378 - DNA, 13 bp, Artificial Sequence
  Oligonucleotide for detection of SNP TSC0022206
cgccacgcaaacc

SEQ ID NO: 88379 - DNA, 13 bp, Artificial Sequence
  Oligonucleotide for detection of SNP TSC0022207
gattttaaagata

SEQ ID NO: 88380 - DNA, 13 bp, Artificial Sequence
  Oligonucleotide for detection of SNP TSC0022207
tatctttaaaatc

SEQ ID NO: 88381 - DNA, 13 bp, Artificial Sequence
  Oligonucleotide for detection of SNP TSC0022207
gattttgaagata

SEQ ID NO: 88382 - DNA, 13 bp, Artificial Sequence
  Oligonucleotide for detection of SNP TSC0022207
tatcttcaaaatc

SEQ ID NO: 88383 - DNA, 13 bp, Artificial Sequence
  Oligonucleotide for detection of SNP TSC0022207
gatttcgaagata

SEQ ID NO: 88384 - DNA, 13 bp, Artificial Sequence
  Oligonucleotide for detection of SNP TSC0022207
tatcttcgaaatc

SEQ ID NO: 88385 - DNA, 13 bp, Artificial Sequence
  Oligonucleotide for detection of SNP TSC0022207
tgtttttgaggty

SEQ ID NO: 88386 - DNA, 13 bp, Artificial Sequence
  Oligonucleotide for detection of SNP TSC0022207
racctcaaaaaca

SEQ ID NO: 88387 - DNA, 13 bp, Artificial Sequence
  Oligonucleotide for detection of SNP TSC0022207
tgttttcgaggty

SEQ ID NO: 88388 - DNA, 13 bp, Artificial Sequence
  Oligonucleotide for detection of SNP TSC0022207
racctcgaaaaca

SEQ ID NO: 88389 - DNA, 13 bp, Artificial Sequence
  Oligonucleotide for detection of SNP TSC0022209
tttatggaattat

SEQ ID NO: 88390 - DNA, 13 bp, Artificial Sequence
  Oligonucleotide for detection of SNP TSC0022209
ataattccataaa

SEQ ID NO: 88391 - DNA, 13 bp, Artificial Sequence
  Oligonucleotide for detection of SNP TSC0022209
tttatgtaattat

SEQ ID NO: 88392 - DNA, 13 bp, Artificial Sequence
  Oligonucleotide for detection of SNP TSC0022209
ataattacataaa

SEQ ID NO: 88393 - DNA, 13 bp, Artificial Sequence
  Oligonucleotide for detection of SNP TSC0022209
atggttttataag

SEQ ID NO: 88394 - DNA, 13 bp, Artificial Sequence
  Oligonucleotide for detection of SNP TSC0022209
cttataaaaccat

SEQ ID NO: 88395 - DNA, 13 bp, Artificial Sequence
  Oligonucleotide for detection of SNP TSC0022209
atggttatataag

SEQ ID NO: 88396 - DNA, 13 bp, Artificial Sequence
  Oligonucleotide for detection of SNP TSC0022209
cttatataaccat

SEQ ID NO: 88397 - DNA, 13 bp, Artificial Sequence
  Oligonucleotide for detection of SNP TSC0022210
taaggagtggaty

SEQ ID NO: 88398 - DNA, 13 bp, Artificial Sequence
  Oligonucleotide for detection of SNP TSC0022210
ratccactcctta

SEQ ID NO: 88399 - DNA, 13 bp, Artificial Sequence
  Oligonucleotide for detection of SNP TSC0022210
taaggaatggaty

SEQ ID NO: 88400 - DNA, 13 bp, Artificial Sequence
  Oligonucleotide for detection of SNP TSC0022210
ratccattcctta

SEQ ID NO: 88401 - DNA, 13 bp, Artificial Sequence
  Oligonucleotide for detection of SNP TSC0022211
tttagaaatattt

SEQ ID NO: 88402 - DNA, 13 bp, Artificial Sequence
  Oligonucleotide for detection of SNP TSC0022211
aaatatttctaaa

SEQ ID NO: 88403 - DNA, 13 bp, Artificial Sequence
  Oligonucleotide for detection of SNP TSC0022211
tttagagatattt

SEQ ID NO: 88404 - DNA, 13 bp, Artificial Sequence
  Oligonucleotide for detection of SNP TSC0022211
aaatatctctaaa

SEQ ID NO: 88405 - DNA, 13 bp, Artificial Sequence
  Oligonucleotide for detection of SNP TSC0022213
ttttggggaatta

SEQ ID NO: 88406 - DNA, 13 bp, Artificial Sequence
  Oligonucleotide for detection of SNP TSC0022213
taattccccaaaa

SEQ ID NO: 88407 - DNA, 13 bp, Artificial Sequence
  Oligonucleotide for detection of SNP TSC0022213
ttttggtgaatta

SEQ ID NO: 88408 - DNA, 13 bp, Artificial Sequence
  Oligonucleotide for detection of SNP TSC0022213
taattcaccaaaa

SEQ ID NO: 88409 - DNA, 13 bp, Artificial Sequence
  Oligonucleotide for detection of SNP TSC0022213
taattttttaagg

SEQ ID NO: 88410 - DNA, 13 bp, Artificial Sequence
  Oligonucleotide for detection of SNP TSC0022213
ccttaaaaaatta

SEQ ID NO: 88411 - DNA, 13 bp, Artificial Sequence
  Oligonucleotide for detection of SNP TSC0022213
taatttattaagg

SEQ ID NO: 88412 - DNA, 13 bp, Artificial Sequence
  Oligonucleotide for detection of SNP TSC0022213
ccttaataaatta

SEQ ID NO: 88413 - DNA, 13 bp, Artificial Sequence
  Oligonucleotide for detection of SNP TSC0022214
aaaaaatttgttt

SEQ ID NO: 88414 - DNA, 13 bp, Artificial Sequence
  Oligonucleotide for detection of SNP TSC0022214
aaacaaatttttt

SEQ ID NO: 88415 - DNA, 13 bp, Artificial Sequence
  Oligonucleotide for detection of SNP TSC0022214
aaaaaaattgttt

SEQ ID NO: 88416 - DNA, 13 bp, Artificial Sequence
  Oligonucleotide for detection of SNP TSC0022214
aaacaattttttt

SEQ ID NO: 88417 - DNA, 13 bp, Artificial Sequence
  Oligonucleotide for detection of SNP TSC0022218
gagtttatatatt

SEQ ID NO: 88418 - DNA, 13 bp, Artificial Sequence
  Oligonucleotide for detection of SNP TSC0022218
aatatataaactc

SEQ ID NO: 88419 - DNA, 13 bp, Artificial Sequence
  Oligonucleotide for detection of SNP TSC0022218
gagttcgtatatt

SEQ ID NO: 88420 - DNA, 13 bp, Artificial Sequence
  Oligonucleotide for detection of SNP TSC0022218
aatatacgaactc

SEQ ID NO: 88421 - DNA, 13 bp, Artificial Sequence
  Oligonucleotide for detection of SNP TSC0022218
aatgtatgagtty

SEQ ID NO: 88422 - DNA, 13 bp, Artificial Sequence
  Oligonucleotide for detection of SNP TSC0022218
raactcatacatt

SEQ ID NO: 88423 - DNA, 13 bp, Artificial Sequence
  Oligonucleotide for detection of SNP TSC0022218
aatgtacgagtty

SEQ ID NO: 88424 - DNA, 13 bp, Artificial Sequence
  Oligonucleotide for detection of SNP TSC0022218
raactcgtacatt

SEQ ID NO: 88425 - DNA, 13 bp, Artificial Sequence
  Oligonucleotide for detection of SNP TSC0022219
ttttagtggaaat

SEQ ID NO: 88426 - DNA, 13 bp, Artificial Sequence
  Oligonucleotide for detection of SNP TSC0022219
atttccactaaaa

SEQ ID NO: 88427 - DNA, 13 bp, Artificial Sequence
  Oligonucleotide for detection of SNP TSC0022219
ttttagcggaaat

SEQ ID NO: 88428 - DNA, 13 bp, Artificial Sequence
  Oligonucleotide for detection of SNP TSC0022219
atttccgctaaaa

SEQ ID NO: 88429 - DNA, 13 bp, Artificial Sequence
  Oligonucleotide for detection of SNP TSC0022219
atttttgttagag

SEQ ID NO: 88430 - DNA, 13 bp, Artificial Sequence
  Oligonucleotide for detection of SNP TSC0022219
ctctaacaaaaat

SEQ ID NO: 88431 - DNA, 13 bp, Artificial Sequence
  Oligonucleotide for detection of SNP TSC0022219
atttttattagag

SEQ ID NO: 88432 - DNA, 13 bp, Artificial Sequence
  Oligonucleotide for detection of SNP TSC0022219
ctctaataaaaat

SEQ ID NO: 88433 - DNA, 13 bp, Artificial Sequence
  Oligonucleotide for detection of SNP TSC0022219
attttcgttagag

SEQ ID NO: 88434 - DNA, 13 bp, Artificial Sequence
  Oligonucleotide for detection of SNP TSC0022219
ctctaacgaaaat

SEQ ID NO: 88435 - DNA, 13 bp, Artificial Sequence
  Oligonucleotide for detection of SNP TSC0022225
tgtaagggtttta

SEQ ID NO: 88436 - DNA, 13 bp, Artificial Sequence
  Oligonucleotide for detection of SNP TSC0022225
taaaacccttaca

SEQ ID NO: 88437 - DNA, 13 bp, Artificial Sequence
  Oligonucleotide for detection of SNP TSC0022225
tgtaagtgtttta

SEQ ID NO: 88438 - DNA, 13 bp, Artificial Sequence
  Oligonucleotide for detection of SNP TSC0022225
taaaacacttaca

SEQ ID NO: 88439 - DNA, 13 bp, Artificial Sequence
  Oligonucleotide for detection of SNP TSC0022225
tagagtttttgta

SEQ ID NO: 88440 - DNA, 13 bp, Artificial Sequence
  Oligonucleotide for detection of SNP TSC0022225
tacaaaaactcta

SEQ ID NO: 88441 - DNA, 13 bp, Artificial Sequence
  Oligonucleotide for detection of SNP TSC0022225
tagagtatttgta

SEQ ID NO: 88442 - DNA, 13 bp, Artificial Sequence
  Oligonucleotide for detection of SNP TSC0022225
tacaaatactcta

SEQ ID NO: 88443 - DNA, 13 bp, Artificial Sequence
  Oligonucleotide for detection of SNP TSC0022226
ttttaatgagtat

SEQ ID NO: 88444 - DNA, 13 bp, Artificial Sequence
  Oligonucleotide for detection of SNP TSC0022226
atactcattaaaa

SEQ ID NO: 88445 - DNA, 13 bp, Artificial Sequence
  Oligonucleotide for detection of SNP TSC0022226
ttttaacgagtat

SEQ ID NO: 88446 - DNA, 13 bp, Artificial Sequence
  Oligonucleotide for detection of SNP TSC0022226
atactcgttaaaa

SEQ ID NO: 88447 - DNA, 13 bp, Artificial Sequence
  Oligonucleotide for detection of SNP TSC0022226
atgtttgttagag

SEQ ID NO: 88448 - DNA, 13 bp, Artificial Sequence
  Oligonucleotide for detection of SNP TSC0022226
ctctaacaaacat

SEQ ID NO: 88449 - DNA, 13 bp, Artificial Sequence
  Oligonucleotide for detection of SNP TSC0022226
atgtttattagag

SEQ ID NO: 88450 - DNA, 13 bp, Artificial Sequence
  Oligonucleotide for detection of SNP TSC0022226
ctctaataaacat

SEQ ID NO: 88451 - DNA, 13 bp, Artificial Sequence
  Oligonucleotide for detection of SNP TSC0022226
atgttcgttagag

SEQ ID NO: 88452 - DNA, 13 bp, Artificial Sequence
  Oligonucleotide for detection of SNP TSC0022226
ctctaacgaacat

SEQ ID NO: 88453 - DNA, 13 bp, Artificial Sequence
  Oligonucleotide for detection of SNP TSC0022228
atgaaggggtaaa

SEQ ID NO: 88454 - DNA, 13 bp, Artificial Sequence
  Oligonucleotide for detection of SNP TSC0022228
tttaccccttcat

SEQ ID NO: 88455 - DNA, 13 bp, Artificial Sequence
  Oligonucleotide for detection of SNP TSC0022228
atgaagaggtaaa

SEQ ID NO: 88456 - DNA, 13 bp, Artificial Sequence
  Oligonucleotide for detection of SNP TSC0022228
tttacctcttcat

SEQ ID NO: 88457 - DNA, 13 bp, Artificial Sequence
  Oligonucleotide for detection of SNP TSC0022229
tttattatttcgt

SEQ ID NO: 88458 - DNA, 13 bp, Artificial Sequence
  Oligonucleotide for detection of SNP TSC0022229
acgaaataataaa

SEQ ID NO: 88459 - DNA, 13 bp, Artificial Sequence
  Oligonucleotide for detection of SNP TSC0022229
tttattgtttcgt

SEQ ID NO: 88460 - DNA, 13 bp, Artificial Sequence
  Oligonucleotide for detection of SNP TSC0022229
acgaaacaataaa

SEQ ID NO: 88461 - DNA, 13 bp, Artificial Sequence
  Oligonucleotide for detection of SNP TSC0022229
tttatcgtttcgt

SEQ ID NO: 88462 - DNA, 13 bp, Artificial Sequence
  Oligonucleotide for detection of SNP TSC0022229
acgaaacgataaa

SEQ ID NO: 88463 - DNA, 13 bp, Artificial Sequence
  Oligonucleotide for detection of SNP TSC0022229
atggagtggtgga

SEQ ID NO: 88464 - DNA, 13 bp, Artificial Sequence
  Oligonucleotide for detection of SNP TSC0022229
tccaccactccat

SEQ ID NO: 88465 - DNA, 13 bp, Artificial Sequence
  Oligonucleotide for detection of SNP TSC0022229
acggagtggtgga

SEQ ID NO: 88466 - DNA, 13 bp, Artificial Sequence
  Oligonucleotide for detection of SNP TSC0022229
tccaccactccgt

SEQ ID NO: 88467 - DNA, 13 bp, Artificial Sequence
  Oligonucleotide for detection of SNP TSC0022229
atggagcggtgga

SEQ ID NO: 88468 - DNA, 13 bp, Artificial Sequence
  Oligonucleotide for detection of SNP TSC0022229
tccaccgctccat

SEQ ID NO: 88469 - DNA, 13 bp, Artificial Sequence
  Oligonucleotide for detection of SNP TSC0022229
acggagcggtgga

SEQ ID NO: 88470 - DNA, 13 bp, Artificial Sequence
  Oligonucleotide for detection of SNP TSC0022229
tccaccgctccgt

SEQ ID NO: 88471 - DNA, 13 bp, Artificial Sequence
  Oligonucleotide for detection of SNP TSC0022230
attattttagtty

SEQ ID NO: 88472 - DNA, 13 bp, Artificial Sequence
  Oligonucleotide for detection of SNP TSC0022230
raactaaaataat

SEQ ID NO: 88473 - DNA, 13 bp, Artificial Sequence
  Oligonucleotide for detection of SNP TSC0022230
attattgtagtty

SEQ ID NO: 88474 - DNA, 13 bp, Artificial Sequence
  Oligonucleotide for detection of SNP TSC0022230
raactacaataat

SEQ ID NO: 88475 - DNA, 13 bp, Artificial Sequence
  Oligonucleotide for detection of SNP TSC0022230
attatcgtagtty

SEQ ID NO: 88476 - DNA, 13 bp, Artificial Sequence
  Oligonucleotide for detection of SNP TSC0022230
raactacgataat

SEQ ID NO: 88477 - DNA, 13 bp, Artificial Sequence
  Oligonucleotide for detection of SNP TSC0022230
gggttagggtaat

SEQ ID NO: 88478 - DNA, 13 bp, Artificial Sequence
  Oligonucleotide for detection of SNP TSC0022230
attaccctaaccc

SEQ ID NO: 88479 - DNA, 13 bp, Artificial Sequence
  Oligonucleotide for detection of SNP TSC0022230
gggttatggtaat

SEQ ID NO: 88480 - DNA, 13 bp, Artificial Sequence
  Oligonucleotide for detection of SNP TSC0022230
attaccataaccc

SEQ ID NO: 88481 - DNA, 13 bp, Artificial Sequence
  Oligonucleotide for detection of SNP TSC0022230
gggttacggtaat

SEQ ID NO: 88482 - DNA, 13 bp, Artificial Sequence
  Oligonucleotide for detection of SNP TSC0022230
attaccgtaaccc

SEQ ID NO: 88483 - DNA, 13 bp, Artificial Sequence
  Oligonucleotide for detection of SNP TSC0022232
agaaaaggggtta

SEQ ID NO: 88484 - DNA, 13 bp, Artificial Sequence
  Oligonucleotide for detection of SNP TSC0022232
taaccccttttct

SEQ ID NO: 88485 - DNA, 13 bp, Artificial Sequence
  Oligonucleotide for detection of SNP TSC0022232
agaaaaagggtta

SEQ ID NO: 88486 - DNA, 13 bp, Artificial Sequence
  Oligonucleotide for detection of SNP TSC0022232
taaccctttttct

SEQ ID NO: 88487 - DNA, 13 bp, Artificial Sequence
  Oligonucleotide for detection of SNP TSC0022233
ggggaaggggaga

SEQ ID NO: 88488 - DNA, 13 bp, Artificial Sequence
  Oligonucleotide for detection of SNP TSC0022233
tctccccttcccc

SEQ ID NO: 88489 - DNA, 13 bp, Artificial Sequence
  Oligonucleotide for detection of SNP TSC0022233
ggggaaagggaga

SEQ ID NO: 88490 - DNA, 13 bp, Artificial Sequence
  Oligonucleotide for detection of SNP TSC0022233
tctccctttcccc

SEQ ID NO: 88491 - DNA, 13 bp, Artificial Sequence
  Oligonucleotide for detection of SNP TSC0022234
gtaaaaataaggt

SEQ ID NO: 88492 - DNA, 13 bp, Artificial Sequence
  Oligonucleotide for detection of SNP TSC0022234
accttatttttac

SEQ ID NO: 88493 - DNA, 13 bp, Artificial Sequence
  Oligonucleotide for detection of SNP TSC0022234
gtaaaattaaggt

SEQ ID NO: 88494 - DNA, 13 bp, Artificial Sequence
  Oligonucleotide for detection of SNP TSC0022234
accttaattttac

SEQ ID NO: 88495 - DNA, 13 bp, Artificial Sequence
  Oligonucleotide for detection of SNP TSC0022234
attttatttttgy

SEQ ID NO: 88496 - DNA, 13 bp, Artificial Sequence
  Oligonucleotide for detection of SNP TSC0022234
rcaaaaataaaat

SEQ ID NO: 88497 - DNA, 13 bp, Artificial Sequence
  Oligonucleotide for detection of SNP TSC0022234
attttaattttgy

SEQ ID NO: 88498 - DNA, 13 bp, Artificial Sequence
  Oligonucleotide for detection of SNP TSC0022234
rcaaaattaaaat

SEQ ID NO: 88499 - DNA, 13 bp, Artificial Sequence
  Oligonucleotide for detection of SNP TSC0022235
gaattgggggagg

SEQ ID NO: 88500 - DNA, 13 bp, Artificial Sequence
  Oligonucleotide for detection of SNP TSC0022235
cctcccccaattc

SEQ ID NO: 88501 - DNA, 13 bp, Artificial Sequence
  Oligonucleotide for detection of SNP TSC0022235
gaattgtgggagg

SEQ ID NO: 88502 - DNA, 13 bp, Artificial Sequence
  Oligonucleotide for detection of SNP TSC0022235
cctcccacaattc

SEQ ID NO: 88503 - DNA, 13 bp, Artificial Sequence
  Oligonucleotide for detection of SNP TSC0022243
tttagtgtgattg

SEQ ID NO: 88504 - DNA, 13 bp, Artificial Sequence
  Oligonucleotide for detection of SNP TSC0022243
caatcacactaaa

SEQ ID NO: 88505 - DNA, 13 bp, Artificial Sequence
  Oligonucleotide for detection of SNP TSC0022243
tttagtatgattg

SEQ ID NO: 88506 - DNA, 13 bp, Artificial Sequence
  Oligonucleotide for detection of SNP TSC0022243
caatcatactaaa

SEQ ID NO: 88507 - DNA, 13 bp, Artificial Sequence
  Oligonucleotide for detection of SNP TSC0022244
gtatagggggggg

SEQ ID NO: 88508 - DNA, 13 bp, Artificial Sequence
  Oligonucleotide for detection of SNP TSC0022244
cccccccctatac

SEQ ID NO: 88509 - DNA, 13 bp, Artificial Sequence
  Oligonucleotide for detection of SNP TSC0022244
gtatagtgggggg

SEQ ID NO: 88510 - DNA, 13 bp, Artificial Sequence
  Oligonucleotide for detection of SNP TSC0022244
ccccccactatac

SEQ ID NO: 88511 - DNA, 13 bp, Artificial Sequence
  Oligonucleotide for detection of SNP TSC0022244
tttttttttgtgy

SEQ ID NO: 88512 - DNA, 13 bp, Artificial Sequence
  Oligonucleotide for detection of SNP TSC0022244
rcacaaaaaaaaa

SEQ ID NO: 88513 - DNA, 13 bp, Artificial Sequence
  Oligonucleotide for detection of SNP TSC0022244
ttttttattgtgy

SEQ ID NO: 88514 - DNA, 13 bp, Artificial Sequence
  Oligonucleotide for detection of SNP TSC0022244
rcacaataaaaaa

SEQ ID NO: 88515 - DNA, 13 bp, Artificial Sequence
  Oligonucleotide for detection of SNP TSC0022247
atggttgggggga

SEQ ID NO: 88516 - DNA, 13 bp, Artificial Sequence
  Oligonucleotide for detection of SNP TSC0022247
tccccccaaccat

SEQ ID NO: 88517 - DNA, 13 bp, Artificial Sequence
  Oligonucleotide for detection of SNP TSC0022247
atggttaggggga

SEQ ID NO: 88518 - DNA, 13 bp, Artificial Sequence
  Oligonucleotide for detection of SNP TSC0022247
tccccctaaccat

SEQ ID NO: 88519 - DNA, 13 bp, Artificial Sequence
  Oligonucleotide for detection of SNP TSC0022247
acggttgggggga

SEQ ID NO: 88520 - DNA, 13 bp, Artificial Sequence
  Oligonucleotide for detection of SNP TSC0022247
tccccccaaccgt

SEQ ID NO: 88521 - DNA, 13 bp, Artificial Sequence
  Oligonucleotide for detection of SNP TSC0022247
acggttaggggga

SEQ ID NO: 88522 - DNA, 13 bp, Artificial Sequence
  Oligonucleotide for detection of SNP TSC0022247
tccccctaaccgt

SEQ ID NO: 88523 - DNA, 13 bp, Artificial Sequence
  Oligonucleotide for detection of SNP TSC0022248
gagataaaagtay

SEQ ID NO: 88524 - DNA, 13 bp, Artificial Sequence
  Oligonucleotide for detection of SNP TSC0022248
rtacttttatctc

SEQ ID NO: 88525 - DNA, 13 bp, Artificial Sequence
  Oligonucleotide for detection of SNP TSC0022248
gagatagaagtay

SEQ ID NO: 88526 - DNA, 13 bp, Artificial Sequence
  Oligonucleotide for detection of SNP TSC0022248
rtacttctatctc

SEQ ID NO: 88527 - DNA, 13 bp, Artificial Sequence
  Oligonucleotide for detection of SNP TSC0022249
aaagtgattaatg

SEQ ID NO: 88528 - DNA, 13 bp, Artificial Sequence
  Oligonucleotide for detection of SNP TSC0022249
cattaatcacttt

SEQ ID NO: 88529 - DNA, 13 bp, Artificial Sequence
  Oligonucleotide for detection of SNP TSC0022249
aaagtgtttaatg

SEQ ID NO: 88530 - DNA, 13 bp, Artificial Sequence
  Oligonucleotide for detection of SNP TSC0022249
cattaaacacttt

SEQ ID NO: 88531 - DNA, 13 bp, Artificial Sequence
  Oligonucleotide for detection of SNP TSC0022249
tattaattatttt

SEQ ID NO: 88532 - DNA, 13 bp, Artificial Sequence
  Oligonucleotide for detection of SNP TSC0022249
aaaataattaata

SEQ ID NO: 88533 - DNA, 13 bp, Artificial Sequence
  Oligonucleotide for detection of SNP TSC0022249
tattaaatatttt

SEQ ID NO: 88534 - DNA, 13 bp, Artificial Sequence
  Oligonucleotide for detection of SNP TSC0022249
aaaatatttaata

SEQ ID NO: 88535 - DNA, 13 bp, Artificial Sequence
  Oligonucleotide for detection of SNP TSC0022250
aaagttagtttgt

SEQ ID NO: 88536 - DNA, 13 bp, Artificial Sequence
  Oligonucleotide for detection of SNP TSC0022250
acaaactaacttt

SEQ ID NO: 88537 - DNA, 13 bp, Artificial Sequence
  Oligonucleotide for detection of SNP TSC0022250
aaagtttgtttgt

SEQ ID NO: 88538 - DNA, 13 bp, Artificial Sequence
  Oligonucleotide for detection of SNP TSC0022250
acaaacaaacttt

SEQ ID NO: 88539 - DNA, 13 bp, Artificial Sequence
  Oligonucleotide for detection of SNP TSC0022250
ataaattgatttt

SEQ ID NO: 88540 - DNA, 13 bp, Artificial Sequence
  Oligonucleotide for detection of SNP TSC0022250
aaaatcaatttat

SEQ ID NO: 88541 - DNA, 13 bp, Artificial Sequence
  Oligonucleotide for detection of SNP TSC0022250
ataaatagatttt

SEQ ID NO: 88542 - DNA, 13 bp, Artificial Sequence
  Oligonucleotide for detection of SNP TSC0022250
aaaatctatttat

SEQ ID NO: 88543 - DNA, 13 bp, Artificial Sequence
  Oligonucleotide for detection of SNP TSC0022251
tttttttggtaay

SEQ ID NO: 88544 - DNA, 13 bp, Artificial Sequence
  Oligonucleotide for detection of SNP TSC0022251
rttaccaaaaaaa

SEQ ID NO: 88545 - DNA, 13 bp, Artificial Sequence
  Oligonucleotide for detection of SNP TSC0022251
ttttttcggtaay

SEQ ID NO: 88546 - DNA, 13 bp, Artificial Sequence
  Oligonucleotide for detection of SNP TSC0022251
rttaccgaaaaaa

SEQ ID NO: 88547 - DNA, 13 bp, Artificial Sequence
  Oligonucleotide for detection of SNP TSC0022251
gttattgaagggg

SEQ ID NO: 88548 - DNA, 13 bp, Artificial Sequence
  Oligonucleotide for detection of SNP TSC0022251
ccccttcaataac

SEQ ID NO: 88549 - DNA, 13 bp, Artificial Sequence
  Oligonucleotide for detection of SNP TSC0022251
gttattaaagggg

SEQ ID NO: 88550 - DNA, 13 bp, Artificial Sequence
  Oligonucleotide for detection of SNP TSC0022251
cccctttaataac

SEQ ID NO: 88551 - DNA, 13 bp, Artificial Sequence
  Oligonucleotide for detection of SNP TSC0022251
gttatcgaagggg

SEQ ID NO: 88552 - DNA, 13 bp, Artificial Sequence
  Oligonucleotide for detection of SNP TSC0022251
ccccttcgataac

SEQ ID NO: 88553 - DNA, 13 bp, Artificial Sequence
  Oligonucleotide for detection of SNP TSC0022252
gttgtatattttg

SEQ ID NO: 88554 - DNA, 13 bp, Artificial Sequence
  Oligonucleotide for detection of SNP TSC0022252
caaaatatacaac

SEQ ID NO: 88555 - DNA, 13 bp, Artificial Sequence
  Oligonucleotide for detection of SNP TSC0022252
gttgtagattttg

SEQ ID NO: 88556 - DNA, 13 bp, Artificial Sequence
  Oligonucleotide for detection of SNP TSC0022252
caaaatctacaac

SEQ ID NO: 88557 - DNA, 13 bp, Artificial Sequence
  Oligonucleotide for detection of SNP TSC0022252
tagaatgtgtagy

SEQ ID NO: 88558 - DNA, 13 bp, Artificial Sequence
  Oligonucleotide for detection of SNP TSC0022252
rctacacattcta

SEQ ID NO: 88559 - DNA, 13 bp, Artificial Sequence
  Oligonucleotide for detection of SNP TSC0022252
tagaatttgtagy

SEQ ID NO: 88560 - DNA, 13 bp, Artificial Sequence
  Oligonucleotide for detection of SNP TSC0022252
rctacaaattcta

SEQ ID NO: 88561 - DNA, 13 bp, Artificial Sequence
  Oligonucleotide for detection of SNP TSC0022253
aaagatattatty

SEQ ID NO: 88562 - DNA, 13 bp, Artificial Sequence
  Oligonucleotide for detection of SNP TSC0022253
raataatatcttt

SEQ ID NO: 88563 - DNA, 13 bp, Artificial Sequence
  Oligonucleotide for detection of SNP TSC0022253
aaagattttatty

SEQ ID NO: 88564 - DNA, 13 bp, Artificial Sequence
  Oligonucleotide for detection of SNP TSC0022253
raataaaatcttt

SEQ ID NO: 88565 - DNA, 13 bp, Artificial Sequence
  Oligonucleotide for detection of SNP TSC0022253
gaatggtattttt

SEQ ID NO: 88566 - DNA, 13 bp, Artificial Sequence
  Oligonucleotide for detection of SNP TSC0022253
aaaaataccattc

SEQ ID NO: 88567 - DNA, 13 bp, Artificial Sequence
  Oligonucleotide for detection of SNP TSC0022253
gaatggaattttt

SEQ ID NO: 88568 - DNA, 13 bp, Artificial Sequence
  Oligonucleotide for detection of SNP TSC0022253
aaaaattccattc

SEQ ID NO: 88569 - DNA, 13 bp, Artificial Sequence
  Oligonucleotide for detection of SNP TSC0022254
aagaaatgaaaty

SEQ ID NO: 88570 - DNA, 13 bp, Artificial Sequence
  Oligonucleotide for detection of SNP TSC0022254
ratttcatttctt

SEQ ID NO: 88571 - DNA, 13 bp, Artificial Sequence
  Oligonucleotide for detection of SNP TSC0022254
aagaaaggaaaty

SEQ ID NO: 88572 - DNA, 13 bp, Artificial Sequence
  Oligonucleotide for detection of SNP TSC0022254
ratttcctttctt

SEQ ID NO: 88573 - DNA, 13 bp, Artificial Sequence
  Oligonucleotide for detection of SNP TSC0022260
attaaggaggagy

SEQ ID NO: 88574 - DNA, 13 bp, Artificial Sequence
  Oligonucleotide for detection of SNP TSC0022260
rctcctccttaat

SEQ ID NO: 88575 - DNA, 13 bp, Artificial Sequence
  Oligonucleotide for detection of SNP TSC0022260
attaagaaggagy

SEQ ID NO: 88576 - DNA, 13 bp, Artificial Sequence
  Oligonucleotide for detection of SNP TSC0022260
rctccttcttaat

SEQ ID NO: 88577 - DNA, 13 bp, Artificial Sequence
  Oligonucleotide for detection of SNP TSC0022261
gtatttggttttg

SEQ ID NO: 88578 - DNA, 13 bp, Artificial Sequence
  Oligonucleotide for detection of SNP TSC0022261
caaaaccaaatac

SEQ ID NO: 88579 - DNA, 13 bp, Artificial Sequence
  Oligonucleotide for detection of SNP TSC0022261
gtatttagttttg

SEQ ID NO: 88580 - DNA, 13 bp, Artificial Sequence
  Oligonucleotide for detection of SNP TSC0022261
caaaactaaatac

SEQ ID NO: 88581 - DNA, 13 bp, Artificial Sequence
  Oligonucleotide for detection of SNP TSC0022265
gtaggtagatggt

SEQ ID NO: 88582 - DNA, 13 bp, Artificial Sequence
  Oligonucleotide for detection of SNP TSC0022265
accatctacctac

SEQ ID NO: 88583 - DNA, 13 bp, Artificial Sequence
  Oligonucleotide for detection of SNP TSC0022265
gtaggttgatggt

SEQ ID NO: 88584 - DNA, 13 bp, Artificial Sequence
  Oligonucleotide for detection of SNP TSC0022265
accatcaacctac

SEQ ID NO: 88585 - DNA, 13 bp, Artificial Sequence
  Oligonucleotide for detection of SNP TSC0022265
gtaggtcgatggt

SEQ ID NO: 88586 - DNA, 13 bp, Artificial Sequence
  Oligonucleotide for detection of SNP TSC0022265
accatcgacctac

SEQ ID NO: 88587 - DNA, 13 bp, Artificial Sequence
  Oligonucleotide for detection of SNP TSC0022265
attatttgtttay

SEQ ID NO: 88588 - DNA, 13 bp, Artificial Sequence
  Oligonucleotide for detection of SNP TSC0022265
rtaaacaaataat

SEQ ID NO: 88589 - DNA, 13 bp, Artificial Sequence
  Oligonucleotide for detection of SNP TSC0022265
attattggtttay

SEQ ID NO: 88590 - DNA, 13 bp, Artificial Sequence
  Oligonucleotide for detection of SNP TSC0022265
rtaaaccaataat

SEQ ID NO: 88591 - DNA, 13 bp, Artificial Sequence
  Oligonucleotide for detection of SNP TSC0022265
attatcggtttay

SEQ ID NO: 88592 - DNA, 13 bp, Artificial Sequence
  Oligonucleotide for detection of SNP TSC0022265
rtaaaccgataat

SEQ ID NO: 88593 - DNA, 13 bp, Artificial Sequence
  Oligonucleotide for detection of SNP TSC0022266
gaaattattaatt

SEQ ID NO: 88594 - DNA, 13 bp, Artificial Sequence
  Oligonucleotide for detection of SNP TSC0022266
aattaataatttc

SEQ ID NO: 88595 - DNA, 13 bp, Artificial Sequence
  Oligonucleotide for detection of SNP TSC0022266
gaaattgttaatt

SEQ ID NO: 88596 - DNA, 13 bp, Artificial Sequence
  Oligonucleotide for detection of SNP TSC0022266
aattaacaatttc

SEQ ID NO: 88597 - DNA, 13 bp, Artificial Sequence
  Oligonucleotide for detection of SNP TSC0022266
gaaatcgttaatt

SEQ ID NO: 88598 - DNA, 13 bp, Artificial Sequence
  Oligonucleotide for detection of SNP TSC0022266
aattaacgatttc

SEQ ID NO: 88599 - DNA, 13 bp, Artificial Sequence
  Oligonucleotide for detection of SNP TSC0022266
aattggtgattty

SEQ ID NO: 88600 - DNA, 13 bp, Artificial Sequence
  Oligonucleotide for detection of SNP TSC0022266
raaatcaccaatt

SEQ ID NO: 88601 - DNA, 13 bp, Artificial Sequence
  Oligonucleotide for detection of SNP TSC0022266
aattggcgattty

SEQ ID NO: 88602 - DNA, 13 bp, Artificial Sequence
  Oligonucleotide for detection of SNP TSC0022266
raaatcgccaatt

SEQ ID NO: 88603 - DNA, 13 bp, Artificial Sequence
  Oligonucleotide for detection of SNP TSC0022268
gtaaggagtgtgt

SEQ ID NO: 88604 - DNA, 13 bp, Artificial Sequence
  Oligonucleotide for detection of SNP TSC0022268
acacactccttac

SEQ ID NO: 88605 - DNA, 13 bp, Artificial Sequence
  Oligonucleotide for detection of SNP TSC0022268
gtaaggggtgtgt

SEQ ID NO: 88606 - DNA, 13 bp, Artificial Sequence
  Oligonucleotide for detection of SNP TSC0022268
acacaccccttac

SEQ ID NO: 88607 - DNA, 13 bp, Artificial Sequence
  Oligonucleotide for detection of SNP TSC0022270
tagtttagaggaa

SEQ ID NO: 88608 - DNA, 13 bp, Artificial Sequence
  Oligonucleotide for detection of SNP TSC0022270
ttcctctaaacta

SEQ ID NO: 88609 - DNA, 13 bp, Artificial Sequence
  Oligonucleotide for detection of SNP TSC0022270
tagtttggaggaa

SEQ ID NO: 88610 - DNA, 13 bp, Artificial Sequence
  Oligonucleotide for detection of SNP TSC0022270
ttcctccaaacta

SEQ ID NO: 88611 - DNA, 13 bp, Artificial Sequence
  Oligonucleotide for detection of SNP TSC0022271
aaagttaaaatty

SEQ ID NO: 88612 - DNA, 13 bp, Artificial Sequence
  Oligonucleotide for detection of SNP TSC0022271
raattttaacttt

SEQ ID NO: 88613 - DNA, 13 bp, Artificial Sequence
  Oligonucleotide for detection of SNP TSC0022271
aaagtttaaatty

SEQ ID NO: 88614 - DNA, 13 bp, Artificial Sequence
  Oligonucleotide for detection of SNP TSC0022271
raatttaaacttt

SEQ ID NO: 88615 - DNA, 13 bp, Artificial Sequence
  Oligonucleotide for detection of SNP TSC0022271
gagttttggtttt

SEQ ID NO: 88616 - DNA, 13 bp, Artificial Sequence
  Oligonucleotide for detection of SNP TSC0022271
aaaaccaaaactc

SEQ ID NO: 88617 - DNA, 13 bp, Artificial Sequence
  Oligonucleotide for detection of SNP TSC0022271
gagtttgggtttt

SEQ ID NO: 88618 - DNA, 13 bp, Artificial Sequence
  Oligonucleotide for detection of SNP TSC0022271
aaaacccaaactc

SEQ ID NO: 88619 - DNA, 13 bp, Artificial Sequence
  Oligonucleotide for detection of SNP TSC0022272
tatttttgaggay

SEQ ID NO: 88620 - DNA, 13 bp, Artificial Sequence
  Oligonucleotide for detection of SNP TSC0022272
rtcctcaaaaata

SEQ ID NO: 88621 - DNA, 13 bp, Artificial Sequence
  Oligonucleotide for detection of SNP TSC0022272
tattttcgaggay

SEQ ID NO: 88622 - DNA, 13 bp, Artificial Sequence
  Oligonucleotide for detection of SNP TSC0022272
rtcctcgaaaata

SEQ ID NO: 88623 - DNA, 13 bp, Artificial Sequence
  Oligonucleotide for detection of SNP TSC0022272
gtttttgggaata

SEQ ID NO: 88624 - DNA, 13 bp, Artificial Sequence
  Oligonucleotide for detection of SNP TSC0022272
tattcccaaaaac

SEQ ID NO: 88625 - DNA, 13 bp, Artificial Sequence
  Oligonucleotide for detection of SNP TSC0022272
gtttttaggaata

SEQ ID NO: 88626 - DNA, 13 bp, Artificial Sequence
  Oligonucleotide for detection of SNP TSC0022272
tattcctaaaaac

SEQ ID NO: 88627 - DNA, 13 bp, Artificial Sequence
  Oligonucleotide for detection of SNP TSC0022272
gttttcgggaata

SEQ ID NO: 88628 - DNA, 13 bp, Artificial Sequence
  Oligonucleotide for detection of SNP TSC0022272
tattcccgaaaac

SEQ ID NO: 88629 - DNA, 13 bp, Artificial Sequence
  Oligonucleotide for detection of SNP TSC0022275
tagggtatgatgg

SEQ ID NO: 88630 - DNA, 13 bp, Artificial Sequence
  Oligonucleotide for detection of SNP TSC0022275
ccatcatacccta

SEQ ID NO: 88631 - DNA, 13 bp, Artificial Sequence
  Oligonucleotide for detection of SNP TSC0022275
tagggtttgatgg

SEQ ID NO: 88632 - DNA, 13 bp, Artificial Sequence
  Oligonucleotide for detection of SNP TSC0022275
ccatcaaacccta

SEQ ID NO: 88633 - DNA, 13 bp, Artificial Sequence
  Oligonucleotide for detection of SNP TSC0022275
ttattaagttttg

SEQ ID NO: 88634 - DNA, 13 bp, Artificial Sequence
  Oligonucleotide for detection of SNP TSC0022275
caaaacttaataa

SEQ ID NO: 88635 - DNA, 13 bp, Artificial Sequence
  Oligonucleotide for detection of SNP TSC0022276
tggttggaaggga

SEQ ID NO: 88636 - DNA, 13 bp, Artificial Sequence
  Oligonucleotide for detection of SNP TSC0022276
tcccttccaacca

SEQ ID NO: 88637 - DNA, 13 bp, Artificial Sequence
  Oligonucleotide for detection of SNP TSC0022276
tggttgaaaggga

SEQ ID NO: 88638 - DNA, 13 bp, Artificial Sequence
  Oligonucleotide for detection of SNP TSC0022276
tccctttcaacca

SEQ ID NO: 88639 - DNA, 13 bp, Artificial Sequence
  Oligonucleotide for detection of SNP TSC0022277
ggggtgagtatgt

SEQ ID NO: 88640 - DNA, 13 bp, Artificial Sequence
  Oligonucleotide for detection of SNP TSC0022277
acatactcacccc

SEQ ID NO: 88641 - DNA, 13 bp, Artificial Sequence
  Oligonucleotide for detection of SNP TSC0022277
ggggtgggtatgt

SEQ ID NO: 88642 - DNA, 13 bp, Artificial Sequence
  Oligonucleotide for detection of SNP TSC0022277
acatacccacccc

SEQ ID NO: 88643 - DNA, 13 bp, Artificial Sequence
  Oligonucleotide for detection of SNP TSC0022280
taaataatttgay

SEQ ID NO: 88644 - DNA, 13 bp, Artificial Sequence
  Oligonucleotide for detection of SNP TSC0022280
rtcaaattattta

SEQ ID NO: 88645 - DNA, 13 bp, Artificial Sequence
  Oligonucleotide for detection of SNP TSC0022280
taaatagtttgay

SEQ ID NO: 88646 - DNA, 13 bp, Artificial Sequence
  Oligonucleotide for detection of SNP TSC0022280
rtcaaactattta

SEQ ID NO: 88647 - DNA, 13 bp, Artificial Sequence
  Oligonucleotide for detection of SNP TSC0022281
taataaataagtg

SEQ ID NO: 88648 - DNA, 13 bp, Artificial Sequence
  Oligonucleotide for detection of SNP TSC0022281
cacttatttatta

SEQ ID NO: 88649 - DNA, 13 bp, Artificial Sequence
  Oligonucleotide for detection of SNP TSC0022281
taataagtaagtg

SEQ ID NO: 88650 - DNA, 13 bp, Artificial Sequence
  Oligonucleotide for detection of SNP TSC0022281
cacttacttatta

SEQ ID NO: 88651 - DNA, 13 bp, Artificial Sequence
  Oligonucleotide for detection of SNP TSC0022282
gtttgtgtttttg

SEQ ID NO: 88652 - DNA, 13 bp, Artificial Sequence
  Oligonucleotide for detection of SNP TSC0022282
caaaaacacaaac

SEQ ID NO: 88653 - DNA, 13 bp, Artificial Sequence
  Oligonucleotide for detection of SNP TSC0022282
gtttgtttttttg

SEQ ID NO: 88654 - DNA, 13 bp, Artificial Sequence
  Oligonucleotide for detection of SNP TSC0022282
caaaaaaacaaac

SEQ ID NO: 88655 - DNA, 13 bp, Artificial Sequence
  Oligonucleotide for detection of SNP TSC0022282
gtttgcgtttttg

SEQ ID NO: 88656 - DNA, 13 bp, Artificial Sequence
  Oligonucleotide for detection of SNP TSC0022282
caaaaacgcaaac

SEQ ID NO: 88657 - DNA, 13 bp, Artificial Sequence
  Oligonucleotide for detection of SNP TSC0022282
tagggatgtagay

SEQ ID NO: 88658 - DNA, 13 bp, Artificial Sequence
  Oligonucleotide for detection of SNP TSC0022282
rtctacatcccta

SEQ ID NO: 88659 - DNA, 13 bp, Artificial Sequence
  Oligonucleotide for detection of SNP TSC0022282
tagggaagtagay

SEQ ID NO: 88660 - DNA, 13 bp, Artificial Sequence
  Oligonucleotide for detection of SNP TSC0022282
rtctacttcccta

SEQ ID NO: 88661 - DNA, 13 bp, Artificial Sequence
  Oligonucleotide for detection of SNP TSC0022282
tagggacgtagay

SEQ ID NO: 88662 - DNA, 13 bp, Artificial Sequence
  Oligonucleotide for detection of SNP TSC0022282
rtctacgtcccta

SEQ ID NO: 88663 - DNA, 13 bp, Artificial Sequence
  Oligonucleotide for detection of SNP TSC0022283
atttgaaggttgy

SEQ ID NO: 88664 - DNA, 13 bp, Artificial Sequence
  Oligonucleotide for detection of SNP TSC0022283
rcaaccttcaaat

SEQ ID NO: 88665 - DNA, 13 bp, Artificial Sequence
  Oligonucleotide for detection of SNP TSC0022283
atttgagggttgy

SEQ ID NO: 88666 - DNA, 13 bp, Artificial Sequence
  Oligonucleotide for detection of SNP TSC0022283
rcaaccctcaaat

SEQ ID NO: 88667 - DNA, 13 bp, Artificial Sequence
  Oligonucleotide for detection of SNP TSC0022284
aattttgatttgt

SEQ ID NO: 88668 - DNA, 13 bp, Artificial Sequence
  Oligonucleotide for detection of SNP TSC0022284
acaaatcaaaatt

SEQ ID NO: 88669 - DNA, 13 bp, Artificial Sequence
  Oligonucleotide for detection of SNP TSC0022284
aatttcgatttgt

SEQ ID NO: 88670 - DNA, 13 bp, Artificial Sequence
  Oligonucleotide for detection of SNP TSC0022284
acaaatcgaaatt

SEQ ID NO: 88671 - DNA, 13 bp, Artificial Sequence
  Oligonucleotide for detection of SNP TSC0022284
ataaattgggatt

SEQ ID NO: 88672 - DNA, 13 bp, Artificial Sequence
  Oligonucleotide for detection of SNP TSC0022284
aatcccaatttat

SEQ ID NO: 88673 - DNA, 13 bp, Artificial Sequence
  Oligonucleotide for detection of SNP TSC0022284
ataaatcgggatt

SEQ ID NO: 88674 - DNA, 13 bp, Artificial Sequence
  Oligonucleotide for detection of SNP TSC0022284
aatcccgatttat

SEQ ID NO: 88675 - DNA, 13 bp, Artificial Sequence
  Oligonucleotide for detection of SNP TSC0022285
tggtgagagtttg

SEQ ID NO: 88676 - DNA, 13 bp, Artificial Sequence
  Oligonucleotide for detection of SNP TSC0022285
caaactctcacca

SEQ ID NO: 88677 - DNA, 13 bp, Artificial Sequence
  Oligonucleotide for detection of SNP TSC0022285
tggtgaaagtttg

SEQ ID NO: 88678 - DNA, 13 bp, Artificial Sequence
  Oligonucleotide for detection of SNP TSC0022285
caaactttcacca

SEQ ID NO: 88679 - DNA, 13 bp, Artificial Sequence
  Oligonucleotide for detection of SNP TSC0022289
tttatagagaggt

SEQ ID NO: 88680 - DNA, 13 bp, Artificial Sequence
  Oligonucleotide for detection of SNP TSC0022289
acctctctataaa

SEQ ID NO: 88681 - DNA, 13 bp, Artificial Sequence
  Oligonucleotide for detection of SNP TSC0022289
tttataaagaggt

SEQ ID NO: 88682 - DNA, 13 bp, Artificial Sequence
  Oligonucleotide for detection of SNP TSC0022289
acctctttataaa

SEQ ID NO: 88683 - DNA, 13 bp, Artificial Sequence
  Oligonucleotide for detection of SNP TSC0022290
agatttattagty

SEQ ID NO: 88684 - DNA, 13 bp, Artificial Sequence
  Oligonucleotide for detection of SNP TSC0022290
ractaataaatct

SEQ ID NO: 88685 - DNA, 13 bp, Artificial Sequence
  Oligonucleotide for detection of SNP TSC0022290
agatttgttagty

SEQ ID NO: 88686 - DNA, 13 bp, Artificial Sequence
  Oligonucleotide for detection of SNP TSC0022290
ractaacaaatct

SEQ ID NO: 88687 - DNA, 13 bp, Artificial Sequence
  Oligonucleotide for detection of SNP TSC0022290
agattcgttagty

SEQ ID NO: 88688 - DNA, 13 bp, Artificial Sequence
  Oligonucleotide for detection of SNP TSC0022290
ractaacgaatct

SEQ ID NO: 88689 - DNA, 13 bp, Artificial Sequence
  Oligonucleotide for detection of SNP TSC0022290
ggttggtggattt

SEQ ID NO: 88690 - DNA, 13 bp, Artificial Sequence
  Oligonucleotide for detection of SNP TSC0022290
aaatccaccaacc

SEQ ID NO: 88691 - DNA, 13 bp, Artificial Sequence
  Oligonucleotide for detection of SNP TSC0022290
ggttggcggattt

SEQ ID NO: 88692 - DNA, 13 bp, Artificial Sequence
  Oligonucleotide for detection of SNP TSC0022290
aaatccgccaacc

SEQ ID NO: 88693 - DNA, 13 bp, Artificial Sequence
  Oligonucleotide for detection of SNP TSC0022291
tttaggagggtgy

SEQ ID NO: 88694 - DNA, 13 bp, Artificial Sequence
  Oligonucleotide for detection of SNP TSC0022291
rcaccctcctaaa

SEQ ID NO: 88695 - DNA, 13 bp, Artificial Sequence
  Oligonucleotide for detection of SNP TSC0022291
tttaggggggtgy

SEQ ID NO: 88696 - DNA, 13 bp, Artificial Sequence
  Oligonucleotide for detection of SNP TSC0022291
rcacccccctaaa

SEQ ID NO: 88697 - DNA, 13 bp, Artificial Sequence
  Oligonucleotide for detection of SNP TSC0022292
gatgggatttttg

SEQ ID NO: 88698 - DNA, 13 bp, Artificial Sequence
  Oligonucleotide for detection of SNP TSC0022292
caaaaatcccatc

SEQ ID NO: 88699 - DNA, 13 bp, Artificial Sequence
  Oligonucleotide for detection of SNP TSC0022292
gatggggtttttg

SEQ ID NO: 88700 - DNA, 13 bp, Artificial Sequence
  Oligonucleotide for detection of SNP TSC0022292
caaaaaccccatc

SEQ ID NO: 88701 - DNA, 13 bp, Artificial Sequence
  Oligonucleotide for detection of SNP TSC0022292
gacgggatttttg

SEQ ID NO: 88702 - DNA, 13 bp, Artificial Sequence
  Oligonucleotide for detection of SNP TSC0022292
caaaaatcccgtc

SEQ ID NO: 88703 - DNA, 13 bp, Artificial Sequence
  Oligonucleotide for detection of SNP TSC0022292
gacggggtttttg

SEQ ID NO: 88704 - DNA, 13 bp, Artificial Sequence
  Oligonucleotide for detection of SNP TSC0022292
caaaaaccccgtc

SEQ ID NO: 88705 - DNA, 13 bp, Artificial Sequence
  Oligonucleotide for detection of SNP TSC0022293
ttttaaaggttat

SEQ ID NO: 88706 - DNA, 13 bp, Artificial Sequence
  Oligonucleotide for detection of SNP TSC0022293
ataacctttaaaa

SEQ ID NO: 88707 - DNA, 13 bp, Artificial Sequence
  Oligonucleotide for detection of SNP TSC0022293
ttttaatggttat

SEQ ID NO: 88708 - DNA, 13 bp, Artificial Sequence
  Oligonucleotide for detection of SNP TSC0022293
ataaccattaaaa

SEQ ID NO: 88709 - DNA, 13 bp, Artificial Sequence
  Oligonucleotide for detection of SNP TSC0022293
atggtttttgaga

SEQ ID NO: 88710 - DNA, 13 bp, Artificial Sequence
  Oligonucleotide for detection of SNP TSC0022293
tctcaaaaaccat

SEQ ID NO: 88711 - DNA, 13 bp, Artificial Sequence
  Oligonucleotide for detection of SNP TSC0022293
atggttattgaga

SEQ ID NO: 88712 - DNA, 13 bp, Artificial Sequence
  Oligonucleotide for detection of SNP TSC0022293
tctcaataaccat

SEQ ID NO: 88713 - DNA, 13 bp, Artificial Sequence
  Oligonucleotide for detection of SNP TSC0022295
ttttaatgtattt

SEQ ID NO: 88714 - DNA, 13 bp, Artificial Sequence
  Oligonucleotide for detection of SNP TSC0022295
aaatacattaaaa

SEQ ID NO: 88715 - DNA, 13 bp, Artificial Sequence
  Oligonucleotide for detection of SNP TSC0022295
ttttaacgtattt

SEQ ID NO: 88716 - DNA, 13 bp, Artificial Sequence
  Oligonucleotide for detection of SNP TSC0022295
aaatacgttaaaa

SEQ ID NO: 88717 - DNA, 13 bp, Artificial Sequence
  Oligonucleotide for detection of SNP TSC0022295
aagtgtgttggga

SEQ ID NO: 88718 - DNA, 13 bp, Artificial Sequence
  Oligonucleotide for detection of SNP TSC0022295
tcccaacacactt

SEQ ID NO: 88719 - DNA, 13 bp, Artificial Sequence
  Oligonucleotide for detection of SNP TSC0022295
aagtgtattggga

SEQ ID NO: 88720 - DNA, 13 bp, Artificial Sequence
  Oligonucleotide for detection of SNP TSC0022295
tcccaatacactt

SEQ ID NO: 88721 - DNA, 13 bp, Artificial Sequence
  Oligonucleotide for detection of SNP TSC0022295
aagtgcgttggga

SEQ ID NO: 88722 - DNA, 13 bp, Artificial Sequence
  Oligonucleotide for detection of SNP TSC0022295
tcccaacgcactt

SEQ ID NO: 88723 - DNA, 13 bp, Artificial Sequence
  Oligonucleotide for detection of SNP TSC0022298
tgtagggtttgag

SEQ ID NO: 88724 - DNA, 13 bp, Artificial Sequence
  Oligonucleotide for detection of SNP TSC0022298
ctcaaaccctaca

SEQ ID NO: 88725 - DNA, 13 bp, Artificial Sequence
  Oligonucleotide for detection of SNP TSC0022298
tgtaggatttgag

SEQ ID NO: 88726 - DNA, 13 bp, Artificial Sequence
  Oligonucleotide for detection of SNP TSC0022298
ctcaaatcctaca

SEQ ID NO: 88727 - DNA, 13 bp, Artificial Sequence
  Oligonucleotide for detection of SNP TSC0022298
cgtagggtttgag

SEQ ID NO: 88728 - DNA, 13 bp, Artificial Sequence
  Oligonucleotide for detection of SNP TSC0022298
ctcaaaccctacg

SEQ ID NO: 88729 - DNA, 13 bp, Artificial Sequence
  Oligonucleotide for detection of SNP TSC0022298
cgtaggatttgag

SEQ ID NO: 88730 - DNA, 13 bp, Artificial Sequence
  Oligonucleotide for detection of SNP TSC0022298
ctcaaatcctacg

SEQ ID NO: 88731 - DNA, 13 bp, Artificial Sequence
  Oligonucleotide for detection of SNP TSC0022298
tgtagggttcgag

SEQ ID NO: 88732 - DNA, 13 bp, Artificial Sequence
  Oligonucleotide for detection of SNP TSC0022298
ctcgaaccctaca

SEQ ID NO: 88733 - DNA, 13 bp, Artificial Sequence
  Oligonucleotide for detection of SNP TSC0022298
tgtaggattcgag

SEQ ID NO: 88734 - DNA, 13 bp, Artificial Sequence
  Oligonucleotide for detection of SNP TSC0022298
ctcgaatcctaca

SEQ ID NO: 88735 - DNA, 13 bp, Artificial Sequence
  Oligonucleotide for detection of SNP TSC0022298
cgtagggttcgag

SEQ ID NO: 88736 - DNA, 13 bp, Artificial Sequence
  Oligonucleotide for detection of SNP TSC0022298
ctcgaaccctacg

SEQ ID NO: 88737 - DNA, 13 bp, Artificial Sequence
  Oligonucleotide for detection of SNP TSC0022298
cgtaggattcgag

SEQ ID NO: 88738 - DNA, 13 bp, Artificial Sequence
  Oligonucleotide for detection of SNP TSC0022298
ctcgaatcctacg

SEQ ID NO: 88739 - DNA, 13 bp, Artificial Sequence
  Oligonucleotide for detection of SNP TSC0022299
atttttaaaaata

SEQ ID NO: 88740 - DNA, 13 bp, Artificial Sequence
  Oligonucleotide for detection of SNP TSC0022299
tatttttaaaaat

SEQ ID NO: 88741 - DNA, 13 bp, Artificial Sequence
  Oligonucleotide for detection of SNP TSC0022299
atttttgaaaata

SEQ ID NO: 88742 - DNA, 13 bp, Artificial Sequence
  Oligonucleotide for detection of SNP TSC0022299
tattttcaaaaat

SEQ ID NO: 88743 - DNA, 13 bp, Artificial Sequence
  Oligonucleotide for detection of SNP TSC0022300
taggatgggataa

SEQ ID NO: 88744 - DNA, 13 bp, Artificial Sequence
  Oligonucleotide for detection of SNP TSC0022300
ttatcccatccta

SEQ ID NO: 88745 - DNA, 13 bp, Artificial Sequence
  Oligonucleotide for detection of SNP TSC0022300
taggataggataa

SEQ ID NO: 88746 - DNA, 13 bp, Artificial Sequence
  Oligonucleotide for detection of SNP TSC0022300
ttatcctatccta

SEQ ID NO: 88747 - DNA, 13 bp, Artificial Sequence
  Oligonucleotide for detection of SNP TSC0022300
taggacgggataa

SEQ ID NO: 88748 - DNA, 13 bp, Artificial Sequence
  Oligonucleotide for detection of SNP TSC0022300
ttatcccgtccta

SEQ ID NO: 88749 - DNA, 13 bp, Artificial Sequence
  Oligonucleotide for detection of SNP TSC0022304
ggaattaagtatg

SEQ ID NO: 88750 - DNA, 13 bp, Artificial Sequence
  Oligonucleotide for detection of SNP TSC0022304
catacttaattcc

SEQ ID NO: 88751 - DNA, 13 bp, Artificial Sequence
  Oligonucleotide for detection of SNP TSC0022304
ggaattgagtatg

SEQ ID NO: 88752 - DNA, 13 bp, Artificial Sequence
  Oligonucleotide for detection of SNP TSC0022304
catactcaattcc

SEQ ID NO: 88753 - DNA, 13 bp, Artificial Sequence
  Oligonucleotide for detection of SNP TSC0022304
ggaattaagtacg

SEQ ID NO: 88754 - DNA, 13 bp, Artificial Sequence
  Oligonucleotide for detection of SNP TSC0022304
cgtacttaattcc

SEQ ID NO: 88755 - DNA, 13 bp, Artificial Sequence
  Oligonucleotide for detection of SNP TSC0022304
ggaattgagtacg

SEQ ID NO: 88756 - DNA, 13 bp, Artificial Sequence
  Oligonucleotide for detection of SNP TSC0022304
cgtactcaattcc

SEQ ID NO: 88757 - DNA, 13 bp, Artificial Sequence
  Oligonucleotide for detection of SNP TSC0022305
tattagtgattag

SEQ ID NO: 88758 - DNA, 13 bp, Artificial Sequence
  Oligonucleotide for detection of SNP TSC0022305
ctaatcactaata

SEQ ID NO: 88759 - DNA, 13 bp, Artificial Sequence
  Oligonucleotide for detection of SNP TSC0022305
tattagcgattag

SEQ ID NO: 88760 - DNA, 13 bp, Artificial Sequence
  Oligonucleotide for detection of SNP TSC0022305
ctaatcgctaata

SEQ ID NO: 88761 - DNA, 13 bp, Artificial Sequence
  Oligonucleotide for detection of SNP TSC0022305
ttgattgttggtg

SEQ ID NO: 88762 - DNA, 13 bp, Artificial Sequence
  Oligonucleotide for detection of SNP TSC0022305
caccaacaatcaa

SEQ ID NO: 88763 - DNA, 13 bp, Artificial Sequence
  Oligonucleotide for detection of SNP TSC0022305
ttgattattggtg

SEQ ID NO: 88764 - DNA, 13 bp, Artificial Sequence
  Oligonucleotide for detection of SNP TSC0022305
caccaataatcaa

SEQ ID NO: 88765 - DNA, 13 bp, Artificial Sequence
  Oligonucleotide for detection of SNP TSC0022305
ttgatcgttggtg

SEQ ID NO: 88766 - DNA, 13 bp, Artificial Sequence
  Oligonucleotide for detection of SNP TSC0022305
caccaacgatcaa

SEQ ID NO: 88767 - DNA, 13 bp, Artificial Sequence
  Oligonucleotide for detection of SNP TSC0022306
ttagagattttgy

SEQ ID NO: 88768 - DNA, 13 bp, Artificial Sequence
  Oligonucleotide for detection of SNP TSC0022306
rcaaaatctctaa

SEQ ID NO: 88769 - DNA, 13 bp, Artificial Sequence
  Oligonucleotide for detection of SNP TSC0022306
ttagaggttttgy

SEQ ID NO: 88770 - DNA, 13 bp, Artificial Sequence
  Oligonucleotide for detection of SNP TSC0022306
rcaaaacctctaa

SEQ ID NO: 88771 - DNA, 13 bp, Artificial Sequence
  Oligonucleotide for detection of SNP TSC0022307
aagagaaaaagaa

SEQ ID NO: 88772 - DNA, 13 bp, Artificial Sequence
  Oligonucleotide for detection of SNP TSC0022307
ttctttttctctt

SEQ ID NO: 88773 - DNA, 13 bp, Artificial Sequence
  Oligonucleotide for detection of SNP TSC0022307
aagagagaaagaa

SEQ ID NO: 88774 - DNA, 13 bp, Artificial Sequence
  Oligonucleotide for detection of SNP TSC0022307
ttctttctctctt

SEQ ID NO: 88775 - DNA, 13 bp, Artificial Sequence
  Oligonucleotide for detection of SNP TSC0022308
taggatatttgty

SEQ ID NO: 88776 - DNA, 13 bp, Artificial Sequence
  Oligonucleotide for detection of SNP TSC0022308
racaaatatccta

SEQ ID NO: 88777 - DNA, 13 bp, Artificial Sequence
  Oligonucleotide for detection of SNP TSC0022308
taggatgtttgty

SEQ ID NO: 88778 - DNA, 13 bp, Artificial Sequence
  Oligonucleotide for detection of SNP TSC0022308
racaaacatccta

SEQ ID NO: 88779 - DNA, 13 bp, Artificial Sequence
  Oligonucleotide for detection of SNP TSC0022308
taggatattcgty

SEQ ID NO: 88780 - DNA, 13 bp, Artificial Sequence
  Oligonucleotide for detection of SNP TSC0022308
racgaatatccta

SEQ ID NO: 88781 - DNA, 13 bp, Artificial Sequence
  Oligonucleotide for detection of SNP TSC0022308
taggacgtttgty

SEQ ID NO: 88782 - DNA, 13 bp, Artificial Sequence
  Oligonucleotide for detection of SNP TSC0022308
racaaacgtccta

SEQ ID NO: 88783 - DNA, 13 bp, Artificial Sequence
  Oligonucleotide for detection of SNP TSC0022308
taggatgttcgty

SEQ ID NO: 88784 - DNA, 13 bp, Artificial Sequence
  Oligonucleotide for detection of SNP TSC0022308
racgaacatccta

SEQ ID NO: 88785 - DNA, 13 bp, Artificial Sequence
  Oligonucleotide for detection of SNP TSC0022308
taggacgttcgty

SEQ ID NO: 88786 - DNA, 13 bp, Artificial Sequence
  Oligonucleotide for detection of SNP TSC0022308
racgaacgtccta

SEQ ID NO: 88787 - DNA, 13 bp, Artificial Sequence
  Oligonucleotide for detection of SNP TSC0022308
ggtgagtgttttg

SEQ ID NO: 88788 - DNA, 13 bp, Artificial Sequence
  Oligonucleotide for detection of SNP TSC0022308
caaaacactcacc

SEQ ID NO: 88789 - DNA, 13 bp, Artificial Sequence
  Oligonucleotide for detection of SNP TSC0022308
ggcgagtgttttg

SEQ ID NO: 88790 - DNA, 13 bp, Artificial Sequence
  Oligonucleotide for detection of SNP TSC0022308
caaaacactcgcc

SEQ ID NO: 88791 - DNA, 13 bp, Artificial Sequence
  Oligonucleotide for detection of SNP TSC0022308
ggtgagcgttttg

SEQ ID NO: 88792 - DNA, 13 bp, Artificial Sequence
  Oligonucleotide for detection of SNP TSC0022308
caaaacgctcacc

SEQ ID NO: 88793 - DNA, 13 bp, Artificial Sequence
  Oligonucleotide for detection of SNP TSC0022308
ggcgagcgttttg

SEQ ID NO: 88794 - DNA, 13 bp, Artificial Sequence
  Oligonucleotide for detection of SNP TSC0022308
caaaacgctcgcc

SEQ ID NO: 88795 - DNA, 13 bp, Artificial Sequence
  Oligonucleotide for detection of SNP TSC0022312
atgaaagtggaaa

SEQ ID NO: 88796 - DNA, 13 bp, Artificial Sequence
  Oligonucleotide for detection of SNP TSC0022312
tttccactttcat

SEQ ID NO: 88797 - DNA, 13 bp, Artificial Sequence
  Oligonucleotide for detection of SNP TSC0022312
atgaaaatggaaa

SEQ ID NO: 88798 - DNA, 13 bp, Artificial Sequence
  Oligonucleotide for detection of SNP TSC0022312
tttccattttcat

SEQ ID NO: 88799 - DNA, 13 bp, Artificial Sequence
  Oligonucleotide for detection of SNP TSC0022312
acgaaagtggaaa

SEQ ID NO: 88800 - DNA, 13 bp, Artificial Sequence
  Oligonucleotide for detection of SNP TSC0022312
tttccactttcgt

SEQ ID NO: 88801 - DNA, 13 bp, Artificial Sequence
  Oligonucleotide for detection of SNP TSC0022312
acgaaaatggaaa

SEQ ID NO: 88802 - DNA, 13 bp, Artificial Sequence
  Oligonucleotide for detection of SNP TSC0022312
tttccattttcgt

SEQ ID NO: 88803 - DNA, 13 bp, Artificial Sequence
  Oligonucleotide for detection of SNP TSC0022313
gaatttggagttt

SEQ ID NO: 88804 - DNA, 13 bp, Artificial Sequence
  Oligonucleotide for detection of SNP TSC0022313
aaactccaaattc

SEQ ID NO: 88805 - DNA, 13 bp, Artificial Sequence
  Oligonucleotide for detection of SNP TSC0022313
gaatttagagttt

SEQ ID NO: 88806 - DNA, 13 bp, Artificial Sequence
  Oligonucleotide for detection of SNP TSC0022313
aaactctaaattc

SEQ ID NO: 88807 - DNA, 13 bp, Artificial Sequence
  Oligonucleotide for detection of SNP TSC0022314
tttttagggagaa

SEQ ID NO: 88808 - DNA, 13 bp, Artificial Sequence
  Oligonucleotide for detection of SNP TSC0022314
ttctccctaaaaa

SEQ ID NO: 88809 - DNA, 13 bp, Artificial Sequence
  Oligonucleotide for detection of SNP TSC0022314
tttttaaggagaa

SEQ ID NO: 88810 - DNA, 13 bp, Artificial Sequence
  Oligonucleotide for detection of SNP TSC0022314
ttctccttaaaaa

SEQ ID NO: 88811 - DNA, 13 bp, Artificial Sequence
  Oligonucleotide for detection of SNP TSC0022318
tagtagtaggttg

SEQ ID NO: 88812 - DNA, 13 bp, Artificial Sequence
  Oligonucleotide for detection of SNP TSC0022318
caacctactacta

SEQ ID NO: 88813 - DNA, 13 bp, Artificial Sequence
  Oligonucleotide for detection of SNP TSC0022318
tagtaggaggttg

SEQ ID NO: 88814 - DNA, 13 bp, Artificial Sequence
  Oligonucleotide for detection of SNP TSC0022318
caacctcctacta

SEQ ID NO: 88815 - DNA, 13 bp, Artificial Sequence
  Oligonucleotide for detection of SNP TSC0022318
tagtagtaggtcg

SEQ ID NO: 88816 - DNA, 13 bp, Artificial Sequence
  Oligonucleotide for detection of SNP TSC0022318
cgacctactacta

SEQ ID NO: 88817 - DNA, 13 bp, Artificial Sequence
  Oligonucleotide for detection of SNP TSC0022318
tagtaggaggtcg

SEQ ID NO: 88818 - DNA, 13 bp, Artificial Sequence
  Oligonucleotide for detection of SNP TSC0022318
cgacctcctacta

SEQ ID NO: 88819 - DNA, 13 bp, Artificial Sequence
  Oligonucleotide for detection of SNP TSC0022318
tggtttgttgttg

SEQ ID NO: 88820 - DNA, 13 bp, Artificial Sequence
  Oligonucleotide for detection of SNP TSC0022318
caacaacaaacca

SEQ ID NO: 88821 - DNA, 13 bp, Artificial Sequence
  Oligonucleotide for detection of SNP TSC0022318
tggttttttgttg

SEQ ID NO: 88822 - DNA, 13 bp, Artificial Sequence
  Oligonucleotide for detection of SNP TSC0022318
caacaaaaaacca

SEQ ID NO: 88823 - DNA, 13 bp, Artificial Sequence
  Oligonucleotide for detection of SNP TSC0022318
cggtttgttgttg

SEQ ID NO: 88824 - DNA, 13 bp, Artificial Sequence
  Oligonucleotide for detection of SNP TSC0022318
caacaacaaaccg

SEQ ID NO: 88825 - DNA, 13 bp, Artificial Sequence
  Oligonucleotide for detection of SNP TSC0022318
cggttttttgttg

SEQ ID NO: 88826 - DNA, 13 bp, Artificial Sequence
  Oligonucleotide for detection of SNP TSC0022318
caacaaaaaaccg

SEQ ID NO: 88827 - DNA, 13 bp, Artificial Sequence
  Oligonucleotide for detection of SNP TSC0022319
tgtaatgtgtaat

SEQ ID NO: 88828 - DNA, 13 bp, Artificial Sequence
  Oligonucleotide for detection of SNP TSC0022319
attacacattaca

SEQ ID NO: 88829 - DNA, 13 bp, Artificial Sequence
  Oligonucleotide for detection of SNP TSC0022319
tgtaatatgtaat

SEQ ID NO: 88830 - DNA, 13 bp, Artificial Sequence
  Oligonucleotide for detection of SNP TSC0022319
attacatattaca

SEQ ID NO: 88831 - DNA, 13 bp, Artificial Sequence
  Oligonucleotide for detection of SNP TSC0022320
atatataatatat

SEQ ID NO: 88832 - DNA, 13 bp, Artificial Sequence
  Oligonucleotide for detection of SNP TSC0022320
atatattatatat

SEQ ID NO: 88833 - DNA, 13 bp, Artificial Sequence
  Oligonucleotide for detection of SNP TSC0022320
atatattatatgt

SEQ ID NO: 88834 - DNA, 13 bp, Artificial Sequence
  Oligonucleotide for detection of SNP TSC0022320
acatataatatat

SEQ ID NO: 88835 - DNA, 13 bp, Artificial Sequence
  Oligonucleotide for detection of SNP TSC0022320
atatataatatgt

SEQ ID NO: 88836 - DNA, 13 bp, Artificial Sequence
  Oligonucleotide for detection of SNP TSC0022320
acatattatatat

SEQ ID NO: 88837 - DNA, 13 bp, Artificial Sequence
  Oligonucleotide for detection of SNP TSC0022322
tattagggtgtgg

SEQ ID NO: 88838 - DNA, 13 bp, Artificial Sequence
  Oligonucleotide for detection of SNP TSC0022322
ccacaccctaata

SEQ ID NO: 88839 - DNA, 13 bp, Artificial Sequence
  Oligonucleotide for detection of SNP TSC0022322
tattagtgtgtgg

SEQ ID NO: 88840 - DNA, 13 bp, Artificial Sequence
  Oligonucleotide for detection of SNP TSC0022322
ccacacactaata

SEQ ID NO: 88841 - DNA, 13 bp, Artificial Sequence
  Oligonucleotide for detection of SNP TSC0022322
ttatattttgata

SEQ ID NO: 88842 - DNA, 13 bp, Artificial Sequence
  Oligonucleotide for detection of SNP TSC0022322
tatcaaaatataa

SEQ ID NO: 88843 - DNA, 13 bp, Artificial Sequence
  Oligonucleotide for detection of SNP TSC0022322
ttatatattgata

SEQ ID NO: 88844 - DNA, 13 bp, Artificial Sequence
  Oligonucleotide for detection of SNP TSC0022322
tatcaatatataa

SEQ ID NO: 88845 - DNA, 13 bp, Artificial Sequence
  Oligonucleotide for detection of SNP TSC0022326
aagtttatgttgt

SEQ ID NO: 88846 - DNA, 13 bp, Artificial Sequence
  Oligonucleotide for detection of SNP TSC0022326
acaacataaactt

SEQ ID NO: 88847 - DNA, 13 bp, Artificial Sequence
  Oligonucleotide for detection of SNP TSC0022326
aagtttgtgttgt

SEQ ID NO: 88848 - DNA, 13 bp, Artificial Sequence
  Oligonucleotide for detection of SNP TSC0022326
acaacacaaactt

SEQ ID NO: 88849 - DNA, 13 bp, Artificial Sequence
  Oligonucleotide for detection of SNP TSC0022327
aggtgatgaggaa

SEQ ID NO: 88850 - DNA, 13 bp, Artificial Sequence
  Oligonucleotide for detection of SNP TSC0022327
ttcctcatcacct

SEQ ID NO: 88851 - DNA, 13 bp, Artificial Sequence
  Oligonucleotide for detection of SNP TSC0022327
aggtgacgaggaa

SEQ ID NO: 88852 - DNA, 13 bp, Artificial Sequence
  Oligonucleotide for detection of SNP TSC0022327
ttcctcgtcacct

SEQ ID NO: 88853 - DNA, 13 bp, Artificial Sequence
  Oligonucleotide for detection of SNP TSC0022327
tttttcgttattt

SEQ ID NO: 88854 - DNA, 13 bp, Artificial Sequence
  Oligonucleotide for detection of SNP TSC0022327
aaataacgaaaaa

SEQ ID NO: 88855 - DNA, 13 bp, Artificial Sequence
  Oligonucleotide for detection of SNP TSC0022331
ttagagagggtat

SEQ ID NO: 88856 - DNA, 13 bp, Artificial Sequence
  Oligonucleotide for detection of SNP TSC0022331
ataccctctctaa

SEQ ID NO: 88857 - DNA, 13 bp, Artificial Sequence
  Oligonucleotide for detection of SNP TSC0022331
ttagagggggtat

SEQ ID NO: 88858 - DNA, 13 bp, Artificial Sequence
  Oligonucleotide for detection of SNP TSC0022331
ataccccctctaa

SEQ ID NO: 88859 - DNA, 13 bp, Artificial Sequence
  Oligonucleotide for detection of SNP TSC0022332
tatgggatagtty

SEQ ID NO: 88860 - DNA, 13 bp, Artificial Sequence
  Oligonucleotide for detection of SNP TSC0022332
raactatcccata

SEQ ID NO: 88861 - DNA, 13 bp, Artificial Sequence
  Oligonucleotide for detection of SNP TSC0022332
tatggggtagtty

SEQ ID NO: 88862 - DNA, 13 bp, Artificial Sequence
  Oligonucleotide for detection of SNP TSC0022332
raactaccccata

SEQ ID NO: 88863 - DNA, 13 bp, Artificial Sequence
  Oligonucleotide for detection of SNP TSC0022336
aggagatgtaaat

SEQ ID NO: 88864 - DNA, 13 bp, Artificial Sequence
  Oligonucleotide for detection of SNP TSC0022336
atttacatctcct

SEQ ID NO: 88865 - DNA, 13 bp, Artificial Sequence
  Oligonucleotide for detection of SNP TSC0022336
aggagacgtaaat

SEQ ID NO: 88866 - DNA, 13 bp, Artificial Sequence
  Oligonucleotide for detection of SNP TSC0022336
atttacgtctcct

SEQ ID NO: 88867 - DNA, 13 bp, Artificial Sequence
  Oligonucleotide for detection of SNP TSC0022337
gtgaatatttggy

SEQ ID NO: 88868 - DNA, 13 bp, Artificial Sequence
  Oligonucleotide for detection of SNP TSC0022337
rccaaatattcac

SEQ ID NO: 88869 - DNA, 13 bp, Artificial Sequence
  Oligonucleotide for detection of SNP TSC0022337
gtgaatgtttggy

SEQ ID NO: 88870 - DNA, 13 bp, Artificial Sequence
  Oligonucleotide for detection of SNP TSC0022337
rccaaacattcac

SEQ ID NO: 88871 - DNA, 13 bp, Artificial Sequence
  Oligonucleotide for detection of SNP TSC0022337
gcgaatatttggy

SEQ ID NO: 88872 - DNA, 13 bp, Artificial Sequence
  Oligonucleotide for detection of SNP TSC0022337
rccaaatattcgc

SEQ ID NO: 88873 - DNA, 13 bp, Artificial Sequence
  Oligonucleotide for detection of SNP TSC0022337
gcgaatgtttggy

SEQ ID NO: 88874 - DNA, 13 bp, Artificial Sequence
  Oligonucleotide for detection of SNP TSC0022337
rccaaacattcgc

SEQ ID NO: 88875 - DNA, 13 bp, Artificial Sequence
  Oligonucleotide for detection of SNP TSC0022337
gtgaacgtttggy

SEQ ID NO: 88876 - DNA, 13 bp, Artificial Sequence
  Oligonucleotide for detection of SNP TSC0022337
rccaaacgttcac

SEQ ID NO: 88877 - DNA, 13 bp, Artificial Sequence
  Oligonucleotide for detection of SNP TSC0022337
gcgaacgtttggy

SEQ ID NO: 88878 - DNA, 13 bp, Artificial Sequence
  Oligonucleotide for detection of SNP TSC0022337
rccaaacgttcgc

SEQ ID NO: 88879 - DNA, 13 bp, Artificial Sequence
  Oligonucleotide for detection of SNP TSC0022337
gttaagtgtttgy

SEQ ID NO: 88880 - DNA, 13 bp, Artificial Sequence
  Oligonucleotide for detection of SNP TSC0022337
rcaaacacttaac

SEQ ID NO: 88881 - DNA, 13 bp, Artificial Sequence
  Oligonucleotide for detection of SNP TSC0022337
gttaagtgttcgy

SEQ ID NO: 88882 - DNA, 13 bp, Artificial Sequence
  Oligonucleotide for detection of SNP TSC0022337
rcgaacacttaac

SEQ ID NO: 88883 - DNA, 13 bp, Artificial Sequence
  Oligonucleotide for detection of SNP TSC0022337
gttaagcgtttgy

SEQ ID NO: 88884 - DNA, 13 bp, Artificial Sequence
  Oligonucleotide for detection of SNP TSC0022337
rcaaacgcttaac

SEQ ID NO: 88885 - DNA, 13 bp, Artificial Sequence
  Oligonucleotide for detection of SNP TSC0022337
gttaagcgttcgy

SEQ ID NO: 88886 - DNA, 13 bp, Artificial Sequence
  Oligonucleotide for detection of SNP TSC0022337
rcgaacgcttaac

SEQ ID NO: 88887 - DNA, 13 bp, Artificial Sequence
  Oligonucleotide for detection of SNP TSC0022339
ttggagtgggtga

SEQ ID NO: 88888 - DNA, 13 bp, Artificial Sequence
  Oligonucleotide for detection of SNP TSC0022339
tcacccactccaa

SEQ ID NO: 88889 - DNA, 13 bp, Artificial Sequence
  Oligonucleotide for detection of SNP TSC0022339
ttggagggggtga

SEQ ID NO: 88890 - DNA, 13 bp, Artificial Sequence
  Oligonucleotide for detection of SNP TSC0022339
tcaccccctccaa

SEQ ID NO: 88891 - DNA, 13 bp, Artificial Sequence
  Oligonucleotide for detection of SNP TSC0022339
ttggagcgggtga

SEQ ID NO: 88892 - DNA, 13 bp, Artificial Sequence
  Oligonucleotide for detection of SNP TSC0022339
tcacccgctccaa

SEQ ID NO: 88893 - DNA, 13 bp, Artificial Sequence
  Oligonucleotide for detection of SNP TSC0022339
ttatttgttttaa

SEQ ID NO: 88894 - DNA, 13 bp, Artificial Sequence
  Oligonucleotide for detection of SNP TSC0022339
ttaaaacaaataa

SEQ ID NO: 88895 - DNA, 13 bp, Artificial Sequence
  Oligonucleotide for detection of SNP TSC0022339
ttattttttttaa

SEQ ID NO: 88896 - DNA, 13 bp, Artificial Sequence
  Oligonucleotide for detection of SNP TSC0022339
ttaaaaaaaataa

SEQ ID NO: 88897 - DNA, 13 bp, Artificial Sequence
  Oligonucleotide for detection of SNP TSC0022339
ttattcgttttaa

SEQ ID NO: 88898 - DNA, 13 bp, Artificial Sequence
  Oligonucleotide for detection of SNP TSC0022339
ttaaaacgaataa

SEQ ID NO: 88899 - DNA, 13 bp, Artificial Sequence
  Oligonucleotide for detection of SNP TSC0022340
aaaattgaaaaat

SEQ ID NO: 88900 - DNA, 13 bp, Artificial Sequence
  Oligonucleotide for detection of SNP TSC0022340
atttttcaatttt

SEQ ID NO: 88901 - DNA, 13 bp, Artificial Sequence
  Oligonucleotide for detection of SNP TSC0022342
aaatgtattaagt

SEQ ID NO: 88902 - DNA, 13 bp, Artificial Sequence
  Oligonucleotide for detection of SNP TSC0022342
acttaatacattt

SEQ ID NO: 88903 - DNA, 13 bp, Artificial Sequence
  Oligonucleotide for detection of SNP TSC0022342
aaatgtgttaagt

SEQ ID NO: 88904 - DNA, 13 bp, Artificial Sequence
  Oligonucleotide for detection of SNP TSC0022342
acttaacacattt

SEQ ID NO: 88905 - DNA, 13 bp, Artificial Sequence
  Oligonucleotide for detection of SNP TSC0022343
gtgggtgggtttg

SEQ ID NO: 88906 - DNA, 13 bp, Artificial Sequence
  Oligonucleotide for detection of SNP TSC0022343
caaacccacccac

SEQ ID NO: 88907 - DNA, 13 bp, Artificial Sequence
  Oligonucleotide for detection of SNP TSC0022343
gtgggtaggtttg

SEQ ID NO: 88908 - DNA, 13 bp, Artificial Sequence
  Oligonucleotide for detection of SNP TSC0022343
caaacctacccac

SEQ ID NO: 88909 - DNA, 13 bp, Artificial Sequence
  Oligonucleotide for detection of SNP TSC0022343
gtgggcgggtttg

SEQ ID NO: 88910 - DNA, 13 bp, Artificial Sequence
  Oligonucleotide for detection of SNP TSC0022343
caaacccgcccac

SEQ ID NO: 88911 - DNA, 13 bp, Artificial Sequence
  Oligonucleotide for detection of SNP TSC0022344
taattttagagtt

SEQ ID NO: 88912 - DNA, 13 bp, Artificial Sequence
  Oligonucleotide for detection of SNP TSC0022344
aactctaaaatta

SEQ ID NO: 88913 - DNA, 13 bp, Artificial Sequence
  Oligonucleotide for detection of SNP TSC0022344
taatttgagagtt

SEQ ID NO: 88914 - DNA, 13 bp, Artificial Sequence
  Oligonucleotide for detection of SNP TSC0022344
aactctcaaatta

SEQ ID NO: 88915 - DNA, 13 bp, Artificial Sequence
  Oligonucleotide for detection of SNP TSC0022344
taattcgagagtt

SEQ ID NO: 88916 - DNA, 13 bp, Artificial Sequence
  Oligonucleotide for detection of SNP TSC0022344
aactctcgaatta

SEQ ID NO: 88917 - DNA, 13 bp, Artificial Sequence
  Oligonucleotide for detection of SNP TSC0022344
agttttggaatta

SEQ ID NO: 88918 - DNA, 13 bp, Artificial Sequence
  Oligonucleotide for detection of SNP TSC0022344
taattccaaaact

SEQ ID NO: 88919 - DNA, 13 bp, Artificial Sequence
  Oligonucleotide for detection of SNP TSC0022344
agtttttgaatta

SEQ ID NO: 88920 - DNA, 13 bp, Artificial Sequence
  Oligonucleotide for detection of SNP TSC0022344
taattcaaaaact

SEQ ID NO: 88921 - DNA, 13 bp, Artificial Sequence
  Oligonucleotide for detection of SNP TSC0022344
agttttcgaatta

SEQ ID NO: 88922 - DNA, 13 bp, Artificial Sequence
  Oligonucleotide for detection of SNP TSC0022344
taattcgaaaact

SEQ ID NO: 88923 - DNA, 13 bp, Artificial Sequence
  Oligonucleotide for detection of SNP TSC0022348
agtatagattata

SEQ ID NO: 88924 - DNA, 13 bp, Artificial Sequence
  Oligonucleotide for detection of SNP TSC0022348
tataatctatact

SEQ ID NO: 88925 - DNA, 13 bp, Artificial Sequence
  Oligonucleotide for detection of SNP TSC0022348
agtataaattata

SEQ ID NO: 88926 - DNA, 13 bp, Artificial Sequence
  Oligonucleotide for detection of SNP TSC0022348
tataatttatact

SEQ ID NO: 88927 - DNA, 13 bp, Artificial Sequence
  Oligonucleotide for detection of SNP TSC0022353
tattttataaagy

SEQ ID NO: 88928 - DNA, 13 bp, Artificial Sequence
  Oligonucleotide for detection of SNP TSC0022353
rctttataaaata

SEQ ID NO: 88929 - DNA, 13 bp, Artificial Sequence
  Oligonucleotide for detection of SNP TSC0022353
tattttttaaagy

SEQ ID NO: 88930 - DNA, 13 bp, Artificial Sequence
  Oligonucleotide for detection of SNP TSC0022353
rctttaaaaaata

SEQ ID NO: 88931 - DNA, 13 bp, Artificial Sequence
  Oligonucleotide for detection of SNP TSC0022353
gttttatggggta

SEQ ID NO: 88932 - DNA, 13 bp, Artificial Sequence
  Oligonucleotide for detection of SNP TSC0022353
taccccataaaac

SEQ ID NO: 88933 - DNA, 13 bp, Artificial Sequence
  Oligonucleotide for detection of SNP TSC0022353
gttttagggggta

SEQ ID NO: 88934 - DNA, 13 bp, Artificial Sequence
  Oligonucleotide for detection of SNP TSC0022353
taccccctaaaac

SEQ ID NO: 88935 - DNA, 13 bp, Artificial Sequence
  Oligonucleotide for detection of SNP TSC0022354
gtgagatggggga

SEQ ID NO: 88936 - DNA, 13 bp, Artificial Sequence
  Oligonucleotide for detection of SNP TSC0022354
tcccccatctcac

SEQ ID NO: 88937 - DNA, 13 bp, Artificial Sequence
  Oligonucleotide for detection of SNP TSC0022354
gtgagacggggga

SEQ ID NO: 88938 - DNA, 13 bp, Artificial Sequence
  Oligonucleotide for detection of SNP TSC0022354
tcccccgtctcac

SEQ ID NO: 88939 - DNA, 13 bp, Artificial Sequence
  Oligonucleotide for detection of SNP TSC0022355
ttgttggtggtgg

SEQ ID NO: 88940 - DNA, 13 bp, Artificial Sequence
  Oligonucleotide for detection of SNP TSC0022355
ccaccaccaacaa

SEQ ID NO: 88941 - DNA, 13 bp, Artificial Sequence
  Oligonucleotide for detection of SNP TSC0022355
ttgttgttggtgg

SEQ ID NO: 88942 - DNA, 13 bp, Artificial Sequence
  Oligonucleotide for detection of SNP TSC0022355
ccaccaacaacaa

SEQ ID NO: 88943 - DNA, 13 bp, Artificial Sequence
  Oligonucleotide for detection of SNP TSC0022356
ttgtgtggttgtg

SEQ ID NO: 88944 - DNA, 13 bp, Artificial Sequence
  Oligonucleotide for detection of SNP TSC0022356
cacaaccacacaa

SEQ ID NO: 88945 - DNA, 13 bp, Artificial Sequence
  Oligonucleotide for detection of SNP TSC0022356
ttgtgttgttgtg

SEQ ID NO: 88946 - DNA, 13 bp, Artificial Sequence
  Oligonucleotide for detection of SNP TSC0022356
cacaacaacacaa

SEQ ID NO: 88947 - DNA, 13 bp, Artificial Sequence
  Oligonucleotide for detection of SNP TSC0022356
tcgtgtggttgtg

SEQ ID NO: 88948 - DNA, 13 bp, Artificial Sequence
  Oligonucleotide for detection of SNP TSC0022356
cacaaccacacga

SEQ ID NO: 88949 - DNA, 13 bp, Artificial Sequence
  Oligonucleotide for detection of SNP TSC0022356
tcgtgttgttgtg

SEQ ID NO: 88950 - DNA, 13 bp, Artificial Sequence
  Oligonucleotide for detection of SNP TSC0022356
cacaacaacacga

SEQ ID NO: 88951 - DNA, 13 bp, Artificial Sequence
  Oligonucleotide for detection of SNP TSC0022356
ttgcgtggttgtg

SEQ ID NO: 88952 - DNA, 13 bp, Artificial Sequence
  Oligonucleotide for detection of SNP TSC0022356
cacaaccacgcaa

SEQ ID NO: 88953 - DNA, 13 bp, Artificial Sequence
  Oligonucleotide for detection of SNP TSC0022356
ttgcgttgttgtg

SEQ ID NO: 88954 - DNA, 13 bp, Artificial Sequence
  Oligonucleotide for detection of SNP TSC0022356
cacaacaacgcaa

SEQ ID NO: 88955 - DNA, 13 bp, Artificial Sequence
  Oligonucleotide for detection of SNP TSC0022356
ttgtgcggttgtg

SEQ ID NO: 88956 - DNA, 13 bp, Artificial Sequence
  Oligonucleotide for detection of SNP TSC0022356
cacaaccgcacaa

SEQ ID NO: 88957 - DNA, 13 bp, Artificial Sequence
  Oligonucleotide for detection of SNP TSC0022356
ttgtgttgttgcg

SEQ ID NO: 88958 - DNA, 13 bp, Artificial Sequence
  Oligonucleotide for detection of SNP TSC0022356
cgcaacaacacaa

SEQ ID NO: 88959 - DNA, 13 bp, Artificial Sequence
  Oligonucleotide for detection of SNP TSC0022356
ttgtgtggttgcg

SEQ ID NO: 88960 - DNA, 13 bp, Artificial Sequence
  Oligonucleotide for detection of SNP TSC0022356
cgcaaccacacaa

SEQ ID NO: 88961 - DNA, 13 bp, Artificial Sequence
  Oligonucleotide for detection of SNP TSC0022356
tcgcgttgttgtg

SEQ ID NO: 88962 - DNA, 13 bp, Artificial Sequence
  Oligonucleotide for detection of SNP TSC0022356
cacaacaacgcga

SEQ ID NO: 88963 - DNA, 13 bp, Artificial Sequence
  Oligonucleotide for detection of SNP TSC0022356
tcgcgtggttgtg

SEQ ID NO: 88964 - DNA, 13 bp, Artificial Sequence
  Oligonucleotide for detection of SNP TSC0022356
cacaaccacgcga

SEQ ID NO: 88965 - DNA, 13 bp, Artificial Sequence
  Oligonucleotide for detection of SNP TSC0022356
tcgtgttgttgcg

SEQ ID NO: 88966 - DNA, 13 bp, Artificial Sequence
  Oligonucleotide for detection of SNP TSC0022356
cgcaacaacacga

SEQ ID NO: 88967 - DNA, 13 bp, Artificial Sequence
  Oligonucleotide for detection of SNP TSC0022356
tcgtgcggttgtg

SEQ ID NO: 88968 - DNA, 13 bp, Artificial Sequence
  Oligonucleotide for detection of SNP TSC0022356
cacaaccgcacga

SEQ ID NO: 88969 - DNA, 13 bp, Artificial Sequence
  Oligonucleotide for detection of SNP TSC0022356
ttgcgttgttgcg

SEQ ID NO: 88970 - DNA, 13 bp, Artificial Sequence
  Oligonucleotide for detection of SNP TSC0022356
cgcaacaacgcaa

SEQ ID NO: 88971 - DNA, 13 bp, Artificial Sequence
  Oligonucleotide for detection of SNP TSC0022356
tcgtgtggttgcg

SEQ ID NO: 88972 - DNA, 13 bp, Artificial Sequence
  Oligonucleotide for detection of SNP TSC0022356
cgcaaccacacga

SEQ ID NO: 88973 - DNA, 13 bp, Artificial Sequence
  Oligonucleotide for detection of SNP TSC0022356
tcgcgttgttgcg

SEQ ID NO: 88974 - DNA, 13 bp, Artificial Sequence
  Oligonucleotide for detection of SNP TSC0022356
cgcaacaacgcga

SEQ ID NO: 88975 - DNA, 13 bp, Artificial Sequence
  Oligonucleotide for detection of SNP TSC0022356
ttgcgcggttgtg

SEQ ID NO: 88976 - DNA, 13 bp, Artificial Sequence
  Oligonucleotide for detection of SNP TSC0022356
cacaaccgcgcaa

SEQ ID NO: 88977 - DNA, 13 bp, Artificial Sequence
  Oligonucleotide for detection of SNP TSC0022356
ttgcgtggttgcg

SEQ ID NO: 88978 - DNA, 13 bp, Artificial Sequence
  Oligonucleotide for detection of SNP TSC0022356
cgcaaccacgcaa

SEQ ID NO: 88979 - DNA, 13 bp, Artificial Sequence
  Oligonucleotide for detection of SNP TSC0022356
ttgtgcggttgcg

SEQ ID NO: 88980 - DNA, 13 bp, Artificial Sequence
  Oligonucleotide for detection of SNP TSC0022356
cgcaaccgcacaa

SEQ ID NO: 88981 - DNA, 13 bp, Artificial Sequence
  Oligonucleotide for detection of SNP TSC0022356
tcgcgcggttgtg

SEQ ID NO: 88982 - DNA, 13 bp, Artificial Sequence
  Oligonucleotide for detection of SNP TSC0022356
cacaaccgcgcga

SEQ ID NO: 88983 - DNA, 13 bp, Artificial Sequence
  Oligonucleotide for detection of SNP TSC0022356
tcgcgtggttgcg

SEQ ID NO: 88984 - DNA, 13 bp, Artificial Sequence
  Oligonucleotide for detection of SNP TSC0022356
cgcaaccacgcga

SEQ ID NO: 88985 - DNA, 13 bp, Artificial Sequence
  Oligonucleotide for detection of SNP TSC0022356
tcgtgcggttgcg

SEQ ID NO: 88986 - DNA, 13 bp, Artificial Sequence
  Oligonucleotide for detection of SNP TSC0022356
cgcaaccgcacga

SEQ ID NO: 88987 - DNA, 13 bp, Artificial Sequence
  Oligonucleotide for detection of SNP TSC0022356
ttgcgcggttgcg

SEQ ID NO: 88988 - DNA, 13 bp, Artificial Sequence
  Oligonucleotide for detection of SNP TSC0022356
cgcaaccgcgcaa

SEQ ID NO: 88989 - DNA, 13 bp, Artificial Sequence
  Oligonucleotide for detection of SNP TSC0022356
tcgcgcggttgcg

SEQ ID NO: 88990 - DNA, 13 bp, Artificial Sequence
  Oligonucleotide for detection of SNP TSC0022356
cgcaaccgcgcga

SEQ ID NO: 88991 - DNA, 13 bp, Artificial Sequence
  Oligonucleotide for detection of SNP TSC0022356
tgtagttgtgtgg

SEQ ID NO: 88992 - DNA, 13 bp, Artificial Sequence
  Oligonucleotide for detection of SNP TSC0022356
ccacacaactaca

SEQ ID NO: 88993 - DNA, 13 bp, Artificial Sequence
  Oligonucleotide for detection of SNP TSC0022356
tgtagtagtgtgg

SEQ ID NO: 88994 - DNA, 13 bp, Artificial Sequence
  Oligonucleotide for detection of SNP TSC0022356
ccacactactaca

SEQ ID NO: 88995 - DNA, 13 bp, Artificial Sequence
  Oligonucleotide for detection of SNP TSC0022356
cgtagttgtgtgg

SEQ ID NO: 88996 - DNA, 13 bp, Artificial Sequence
  Oligonucleotide for detection of SNP TSC0022356
ccacacaactacg

SEQ ID NO: 88997 - DNA, 13 bp, Artificial Sequence
  Oligonucleotide for detection of SNP TSC0022356
cgtagtagtgtgg

SEQ ID NO: 88998 - DNA, 13 bp, Artificial Sequence
  Oligonucleotide for detection of SNP TSC0022356
ccacactactacg

SEQ ID NO: 88999 - DNA, 13 bp, Artificial Sequence
  Oligonucleotide for detection of SNP TSC0022356
tgtagtcgtgtgg

SEQ ID NO: 89000 - DNA, 13 bp, Artificial Sequence
  Oligonucleotide for detection of SNP TSC0022356
ccacacgactaca

SEQ ID NO: 89001 - DNA, 13 bp, Artificial Sequence
  Oligonucleotide for detection of SNP TSC0022356
tgtagtagcgtgg

SEQ ID NO: 89002 - DNA, 13 bp, Artificial Sequence
  Oligonucleotide for detection of SNP TSC0022356
ccacgctactaca

SEQ ID NO: 89003 - DNA, 13 bp, Artificial Sequence
  Oligonucleotide for detection of SNP TSC0022356
tgtagttgcgtgg

SEQ ID NO: 89004 - DNA, 13 bp, Artificial Sequence
  Oligonucleotide for detection of SNP TSC0022356
ccacgcaactaca

SEQ ID NO: 89005 - DNA, 13 bp, Artificial Sequence
  Oligonucleotide for detection of SNP TSC0022356
tgtagtagtgcgg

SEQ ID NO: 89006 - DNA, 13 bp, Artificial Sequence
  Oligonucleotide for detection of SNP TSC0022356
ccgcactactaca

SEQ ID NO: 89007 - DNA, 13 bp, Artificial Sequence
  Oligonucleotide for detection of SNP TSC0022356
tgtagttgtgcgg

SEQ ID NO: 89008 - DNA, 13 bp, Artificial Sequence
  Oligonucleotide for detection of SNP TSC0022356
ccgcacaactaca

SEQ ID NO: 89009 - DNA, 13 bp, Artificial Sequence
  Oligonucleotide for detection of SNP TSC0022356
cgtagtagcgtgg

SEQ ID NO: 89010 - DNA, 13 bp, Artificial Sequence
  Oligonucleotide for detection of SNP TSC0022356
ccacgctactacg

SEQ ID NO: 89011 - DNA, 13 bp, Artificial Sequence
  Oligonucleotide for detection of SNP TSC0022356
cgtagtcgtgtgg

SEQ ID NO: 89012 - DNA, 13 bp, Artificial Sequence
  Oligonucleotide for detection of SNP TSC0022356
ccacacgactacg

SEQ ID NO: 89013 - DNA, 13 bp, Artificial Sequence
  Oligonucleotide for detection of SNP TSC0022356
cgtagtagtgcgg

SEQ ID NO: 89014 - DNA, 13 bp, Artificial Sequence
  Oligonucleotide for detection of SNP TSC0022356
ccgcactactacg

SEQ ID NO: 89015 - DNA, 13 bp, Artificial Sequence
  Oligonucleotide for detection of SNP TSC0022356
cgtagttgcgtgg

SEQ ID NO: 89016 - DNA, 13 bp, Artificial Sequence
  Oligonucleotide for detection of SNP TSC0022356
ccacgcaactacg

SEQ ID NO: 89017 - DNA, 13 bp, Artificial Sequence
  Oligonucleotide for detection of SNP TSC0022356
tgtagtagcgcgg

SEQ ID NO: 89018 - DNA, 13 bp, Artificial Sequence
  Oligonucleotide for detection of SNP TSC0022356
ccgcgctactaca

SEQ ID NO: 89019 - DNA, 13 bp, Artificial Sequence
  Oligonucleotide for detection of SNP TSC0022356
cgtagttgtgcgg

SEQ ID NO: 89020 - DNA, 13 bp, Artificial Sequence
  Oligonucleotide for detection of SNP TSC0022356
ccgcacaactacg

SEQ ID NO: 89021 - DNA, 13 bp, Artificial Sequence
  Oligonucleotide for detection of SNP TSC0022356
cgtagtagcgcgg

SEQ ID NO: 89022 - DNA, 13 bp, Artificial Sequence
  Oligonucleotide for detection of SNP TSC0022356
ccgcgctactacg

SEQ ID NO: 89023 - DNA, 13 bp, Artificial Sequence
  Oligonucleotide for detection of SNP TSC0022356
tgtagtcgcgtgg

SEQ ID NO: 89024 - DNA, 13 bp, Artificial Sequence
  Oligonucleotide for detection of SNP TSC0022356
ccacgcgactaca

SEQ ID NO: 89025 - DNA, 13 bp, Artificial Sequence
  Oligonucleotide for detection of SNP TSC0022356
tgtagtcgtgcgg

SEQ ID NO: 89026 - DNA, 13 bp, Artificial Sequence
  Oligonucleotide for detection of SNP TSC0022356
ccgcacgactaca

SEQ ID NO: 89027 - DNA, 13 bp, Artificial Sequence
  Oligonucleotide for detection of SNP TSC0022356
tgtagttgcgcgg

SEQ ID NO: 89028 - DNA, 13 bp, Artificial Sequence
  Oligonucleotide for detection of SNP TSC0022356
ccgcgcaactaca

SEQ ID NO: 89029 - DNA, 13 bp, Artificial Sequence
  Oligonucleotide for detection of SNP TSC0022356
cgtagtcgcgtgg

SEQ ID NO: 89030 - DNA, 13 bp, Artificial Sequence
  Oligonucleotide for detection of SNP TSC0022356
ccacgcgactacg

SEQ ID NO: 89031 - DNA, 13 bp, Artificial Sequence
  Oligonucleotide for detection of SNP TSC0022356
cgtagtcgtgcgg

SEQ ID NO: 89032 - DNA, 13 bp, Artificial Sequence
  Oligonucleotide for detection of SNP TSC0022356
ccgcacgactacg

SEQ ID NO: 89033 - DNA, 13 bp, Artificial Sequence
  Oligonucleotide for detection of SNP TSC0022356
cgtagttgcgcgg

SEQ ID NO: 89034 - DNA, 13 bp, Artificial Sequence
  Oligonucleotide for detection of SNP TSC0022356
ccgcgcaactacg

SEQ ID NO: 89035 - DNA, 13 bp, Artificial Sequence
  Oligonucleotide for detection of SNP TSC0022356
tgtagtcgcgcgg

SEQ ID NO: 89036 - DNA, 13 bp, Artificial Sequence
  Oligonucleotide for detection of SNP TSC0022356
ccgcgcgactaca

SEQ ID NO: 89037 - DNA, 13 bp, Artificial Sequence
  Oligonucleotide for detection of SNP TSC0022356
cgtagtcgcgcgg

SEQ ID NO: 89038 - DNA, 13 bp, Artificial Sequence
  Oligonucleotide for detection of SNP TSC0022356
ccgcgcgactacg

SEQ ID NO: 89039 - DNA, 13 bp, Artificial Sequence
  Oligonucleotide for detection of SNP TSC0022357
gagagtggtttgy

SEQ ID NO: 89040 - DNA, 13 bp, Artificial Sequence
  Oligonucleotide for detection of SNP TSC0022357
rcaaaccactctc

SEQ ID NO: 89041 - DNA, 13 bp, Artificial Sequence
  Oligonucleotide for detection of SNP TSC0022357
gagagttgtttgy

SEQ ID NO: 89042 - DNA, 13 bp, Artificial Sequence
  Oligonucleotide for detection of SNP TSC0022357
rcaaacaactctc

SEQ ID NO: 89043 - DNA, 13 bp, Artificial Sequence
  Oligonucleotide for detection of SNP TSC0022357
gagagcggtttgy

SEQ ID NO: 89044 - DNA, 13 bp, Artificial Sequence
  Oligonucleotide for detection of SNP TSC0022357
rcaaaccgctctc

SEQ ID NO: 89045 - DNA, 13 bp, Artificial Sequence
  Oligonucleotide for detection of SNP TSC0022357
gtaagttgtttty

SEQ ID NO: 89046 - DNA, 13 bp, Artificial Sequence
  Oligonucleotide for detection of SNP TSC0022357
raaaacaacttac

SEQ ID NO: 89047 - DNA, 13 bp, Artificial Sequence
  Oligonucleotide for detection of SNP TSC0022357
gtaagtagtttty

SEQ ID NO: 89048 - DNA, 13 bp, Artificial Sequence
  Oligonucleotide for detection of SNP TSC0022357
raaaactacttac

SEQ ID NO: 89049 - DNA, 13 bp, Artificial Sequence
  Oligonucleotide for detection of SNP TSC0022357
gtaagtcgtttty

SEQ ID NO: 89050 - DNA, 13 bp, Artificial Sequence
  Oligonucleotide for detection of SNP TSC0022357
raaaacgacttac

SEQ ID NO: 89051 - DNA, 13 bp, Artificial Sequence
  Oligonucleotide for detection of SNP TSC0022358
tgtattattttga

SEQ ID NO: 89052 - DNA, 13 bp, Artificial Sequence
  Oligonucleotide for detection of SNP TSC0022358
tcaaaataataca

SEQ ID NO: 89053 - DNA, 13 bp, Artificial Sequence
  Oligonucleotide for detection of SNP TSC0022358
tgtatttttttga

SEQ ID NO: 89054 - DNA, 13 bp, Artificial Sequence
  Oligonucleotide for detection of SNP TSC0022358
tcaaaaaaataca

SEQ ID NO: 89055 - DNA, 13 bp, Artificial Sequence
  Oligonucleotide for detection of SNP TSC0022358
ttaaaatgatgta

SEQ ID NO: 89056 - DNA, 13 bp, Artificial Sequence
  Oligonucleotide for detection of SNP TSC0022358
tacatcattttaa

SEQ ID NO: 89057 - DNA, 13 bp, Artificial Sequence
  Oligonucleotide for detection of SNP TSC0022358
ttaaaaagatgta

SEQ ID NO: 89058 - DNA, 13 bp, Artificial Sequence
  Oligonucleotide for detection of SNP TSC0022358
tacatctttttaa

SEQ ID NO: 89059 - DNA, 13 bp, Artificial Sequence
  Oligonucleotide for detection of SNP TSC0022360
ttgttgggggagg

SEQ ID NO: 89060 - DNA, 13 bp, Artificial Sequence
  Oligonucleotide for detection of SNP TSC0022360
cctcccccaacaa

SEQ ID NO: 89061 - DNA, 13 bp, Artificial Sequence
  Oligonucleotide for detection of SNP TSC0022360
ttgttgtgggagg

SEQ ID NO: 89062 - DNA, 13 bp, Artificial Sequence
  Oligonucleotide for detection of SNP TSC0022360
cctcccacaacaa

SEQ ID NO: 89063 - DNA, 13 bp, Artificial Sequence
  Oligonucleotide for detection of SNP TSC0022360
ttgttgcgggagg

SEQ ID NO: 89064 - DNA, 13 bp, Artificial Sequence
  Oligonucleotide for detection of SNP TSC0022360
cctcccgcaacaa

SEQ ID NO: 89065 - DNA, 13 bp, Artificial Sequence
  Oligonucleotide for detection of SNP TSC0022361
aaaaaggaaaaaa

SEQ ID NO: 89066 - DNA, 13 bp, Artificial Sequence
  Oligonucleotide for detection of SNP TSC0022361
ttttttccttttt

SEQ ID NO: 89067 - DNA, 13 bp, Artificial Sequence
  Oligonucleotide for detection of SNP TSC0022361
aaaaagaaaaaaa

SEQ ID NO: 89068 - DNA, 13 bp, Artificial Sequence
  Oligonucleotide for detection of SNP TSC0022361
tttttttcttttt

SEQ ID NO: 89069 - DNA, 13 bp, Artificial Sequence
  Oligonucleotide for detection of SNP TSC0022362
tttgttgtttaaa

SEQ ID NO: 89070 - DNA, 13 bp, Artificial Sequence
  Oligonucleotide for detection of SNP TSC0022362
tttaaacaacaaa

SEQ ID NO: 89071 - DNA, 13 bp, Artificial Sequence
  Oligonucleotide for detection of SNP TSC0022362
tttgttttttaaa

SEQ ID NO: 89072 - DNA, 13 bp, Artificial Sequence
  Oligonucleotide for detection of SNP TSC0022362
tttaaaaaacaaa

SEQ ID NO: 89073 - DNA, 13 bp, Artificial Sequence
  Oligonucleotide for detection of SNP TSC0022362
tttagatagtaga

SEQ ID NO: 89074 - DNA, 13 bp, Artificial Sequence
  Oligonucleotide for detection of SNP TSC0022362
tctactatctaaa

SEQ ID NO: 89075 - DNA, 13 bp, Artificial Sequence
  Oligonucleotide for detection of SNP TSC0022362
tttagaaagtaga

SEQ ID NO: 89076 - DNA, 13 bp, Artificial Sequence
  Oligonucleotide for detection of SNP TSC0022362
tctactttctaaa

SEQ ID NO: 89077 - DNA, 13 bp, Artificial Sequence
  Oligonucleotide for detection of SNP TSC0022363
atatgtatagaaa

SEQ ID NO: 89078 - DNA, 13 bp, Artificial Sequence
  Oligonucleotide for detection of SNP TSC0022363
tttctatacatat

SEQ ID NO: 89079 - DNA, 13 bp, Artificial Sequence
  Oligonucleotide for detection of SNP TSC0022363
atatgtgtagaaa

SEQ ID NO: 89080 - DNA, 13 bp, Artificial Sequence
  Oligonucleotide for detection of SNP TSC0022363
tttctacacatat

SEQ ID NO: 89081 - DNA, 13 bp, Artificial Sequence
  Oligonucleotide for detection of SNP TSC0022364
ggtttagaggggt

SEQ ID NO: 89082 - DNA, 13 bp, Artificial Sequence
  Oligonucleotide for detection of SNP TSC0022364
acccctctaaacc

SEQ ID NO: 89083 - DNA, 13 bp, Artificial Sequence
  Oligonucleotide for detection of SNP TSC0022364
ggtttaaaggggt

SEQ ID NO: 89084 - DNA, 13 bp, Artificial Sequence
  Oligonucleotide for detection of SNP TSC0022364
acccctttaaacc

SEQ ID NO: 89085 - DNA, 13 bp, Artificial Sequence
  Oligonucleotide for detection of SNP TSC0022365
ttaatagatattg

SEQ ID NO: 89086 - DNA, 13 bp, Artificial Sequence
  Oligonucleotide for detection of SNP TSC0022365
caatatctattaa

SEQ ID NO: 89087 - DNA, 13 bp, Artificial Sequence
  Oligonucleotide for detection of SNP TSC0022365
ttaataaatattg

SEQ ID NO: 89088 - DNA, 13 bp, Artificial Sequence
  Oligonucleotide for detection of SNP TSC0022365
caatatttattaa

SEQ ID NO: 89089 - DNA, 13 bp, Artificial Sequence
  Oligonucleotide for detection of SNP TSC0022366
attttaatgttag

SEQ ID NO: 89090 - DNA, 13 bp, Artificial Sequence
  Oligonucleotide for detection of SNP TSC0022366
ctaacattaaaat

SEQ ID NO: 89091 - DNA, 13 bp, Artificial Sequence
  Oligonucleotide for detection of SNP TSC0022366
attttattgttag

SEQ ID NO: 89092 - DNA, 13 bp, Artificial Sequence
  Oligonucleotide for detection of SNP TSC0022366
ctaacaataaaat

SEQ ID NO: 89093 - DNA, 13 bp, Artificial Sequence
  Oligonucleotide for detection of SNP TSC0022366
ttggtattggggt

SEQ ID NO: 89094 - DNA, 13 bp, Artificial Sequence
  Oligonucleotide for detection of SNP TSC0022366
accccaataccaa

SEQ ID NO: 89095 - DNA, 13 bp, Artificial Sequence
  Oligonucleotide for detection of SNP TSC0022366
ttggtaatggggt

SEQ ID NO: 89096 - DNA, 13 bp, Artificial Sequence
  Oligonucleotide for detection of SNP TSC0022366
accccattaccaa

SEQ ID NO: 89097 - DNA, 13 bp, Artificial Sequence
  Oligonucleotide for detection of SNP TSC0022367
ttttttagaatgg

SEQ ID NO: 89098 - DNA, 13 bp, Artificial Sequence
  Oligonucleotide for detection of SNP TSC0022367
ccattctaaaaaa

SEQ ID NO: 89099 - DNA, 13 bp, Artificial Sequence
  Oligonucleotide for detection of SNP TSC0022367
ttttttggaatgg

SEQ ID NO: 89100 - DNA, 13 bp, Artificial Sequence
  Oligonucleotide for detection of SNP TSC0022367
ccattccaaaaaa

SEQ ID NO: 89101 - DNA, 13 bp, Artificial Sequence
  Oligonucleotide for detection of SNP TSC0022367
ttttttagaacgg

SEQ ID NO: 89102 - DNA, 13 bp, Artificial Sequence
  Oligonucleotide for detection of SNP TSC0022367
ccgttctaaaaaa

SEQ ID NO: 89103 - DNA, 13 bp, Artificial Sequence
  Oligonucleotide for detection of SNP TSC0022367
ttttttggaacgg

SEQ ID NO: 89104 - DNA, 13 bp, Artificial Sequence
  Oligonucleotide for detection of SNP TSC0022367
ccgttccaaaaaa

SEQ ID NO: 89105 - DNA, 13 bp, Artificial Sequence
  Oligonucleotide for detection of SNP TSC0022369
gttattaaggttg

SEQ ID NO: 89106 - DNA, 13 bp, Artificial Sequence
  Oligonucleotide for detection of SNP TSC0022369
caaccttaataac

SEQ ID NO: 89107 - DNA, 13 bp, Artificial Sequence
  Oligonucleotide for detection of SNP TSC0022369
gttatttaggttg

SEQ ID NO: 89108 - DNA, 13 bp, Artificial Sequence
  Oligonucleotide for detection of SNP TSC0022369
caacctaaataac

SEQ ID NO: 89109 - DNA, 13 bp, Artificial Sequence
  Oligonucleotide for detection of SNP TSC0022369
tagttttggtgay

SEQ ID NO: 89110 - DNA, 13 bp, Artificial Sequence
  Oligonucleotide for detection of SNP TSC0022369
rtcaccaaaacta

SEQ ID NO: 89111 - DNA, 13 bp, Artificial Sequence
  Oligonucleotide for detection of SNP TSC0022369
tagtttgggtgay

SEQ ID NO: 89112 - DNA, 13 bp, Artificial Sequence
  Oligonucleotide for detection of SNP TSC0022369
rtcacccaaacta

SEQ ID NO: 89113 - DNA, 13 bp, Artificial Sequence
  Oligonucleotide for detection of SNP TSC0022370
tttaaatttttga

SEQ ID NO: 89114 - DNA, 13 bp, Artificial Sequence
  Oligonucleotide for detection of SNP TSC0022370
tcaaaaatttaaa

SEQ ID NO: 89115 - DNA, 13 bp, Artificial Sequence
  Oligonucleotide for detection of SNP TSC0022370
ttaagattttgag

SEQ ID NO: 89116 - DNA, 13 bp, Artificial Sequence
  Oligonucleotide for detection of SNP TSC0022370
ctcaaaatcttaa

SEQ ID NO: 89117 - DNA, 13 bp, Artificial Sequence
  Oligonucleotide for detection of SNP TSC0022370
ttaagagtttgag

SEQ ID NO: 89118 - DNA, 13 bp, Artificial Sequence
  Oligonucleotide for detection of SNP TSC0022370
ctcaaactcttaa

SEQ ID NO: 89119 - DNA, 13 bp, Artificial Sequence
  Oligonucleotide for detection of SNP TSC0022373
agtttttgtgatg

SEQ ID NO: 89120 - DNA, 13 bp, Artificial Sequence
  Oligonucleotide for detection of SNP TSC0022373
catcacaaaaact

SEQ ID NO: 89121 - DNA, 13 bp, Artificial Sequence
  Oligonucleotide for detection of SNP TSC0022373
agttttggtgatg

SEQ ID NO: 89122 - DNA, 13 bp, Artificial Sequence
  Oligonucleotide for detection of SNP TSC0022373
catcaccaaaact

SEQ ID NO: 89123 - DNA, 13 bp, Artificial Sequence
  Oligonucleotide for detection of SNP TSC0022373
agttttcgtgatg

SEQ ID NO: 89124 - DNA, 13 bp, Artificial Sequence
  Oligonucleotide for detection of SNP TSC0022373
catcacgaaaact

SEQ ID NO: 89125 - DNA, 13 bp, Artificial Sequence
  Oligonucleotide for detection of SNP TSC0022373
agtttcggtgatg

SEQ ID NO: 89126 - DNA, 13 bp, Artificial Sequence
  Oligonucleotide for detection of SNP TSC0022373
catcaccgaaact

SEQ ID NO: 89127 - DNA, 13 bp, Artificial Sequence
  Oligonucleotide for detection of SNP TSC0022373
agtttttgcgatg

SEQ ID NO: 89128 - DNA, 13 bp, Artificial Sequence
  Oligonucleotide for detection of SNP TSC0022373
catcgcaaaaact

SEQ ID NO: 89129 - DNA, 13 bp, Artificial Sequence
  Oligonucleotide for detection of SNP TSC0022373
agttttggcgatg

SEQ ID NO: 89130 - DNA, 13 bp, Artificial Sequence
  Oligonucleotide for detection of SNP TSC0022373
catcgccaaaact

SEQ ID NO: 89131 - DNA, 13 bp, Artificial Sequence
  Oligonucleotide for detection of SNP TSC0022373
agttttcgcgatg

SEQ ID NO: 89132 - DNA, 13 bp, Artificial Sequence
  Oligonucleotide for detection of SNP TSC0022373
catcgcgaaaact

SEQ ID NO: 89133 - DNA, 13 bp, Artificial Sequence
  Oligonucleotide for detection of SNP TSC0022373
agtttcggcgatg

SEQ ID NO: 89134 - DNA, 13 bp, Artificial Sequence
  Oligonucleotide for detection of SNP TSC0022373
catcgccgaaact

SEQ ID NO: 89135 - DNA, 13 bp, Artificial Sequence
  Oligonucleotide for detection of SNP TSC0022373
tattgtggagatt

SEQ ID NO: 89136 - DNA, 13 bp, Artificial Sequence
  Oligonucleotide for detection of SNP TSC0022373
aatctccacaata

SEQ ID NO: 89137 - DNA, 13 bp, Artificial Sequence
  Oligonucleotide for detection of SNP TSC0022373
tattgttgagatt

SEQ ID NO: 89138 - DNA, 13 bp, Artificial Sequence
  Oligonucleotide for detection of SNP TSC0022373
aatctcaacaata

SEQ ID NO: 89139 - DNA, 13 bp, Artificial Sequence
  Oligonucleotide for detection of SNP TSC0022373
tatcgtggagatt

SEQ ID NO: 89140 - DNA, 13 bp, Artificial Sequence
  Oligonucleotide for detection of SNP TSC0022373
aatctccacgata

SEQ ID NO: 89141 - DNA, 13 bp, Artificial Sequence
  Oligonucleotide for detection of SNP TSC0022373
tatcgttgagatt

SEQ ID NO: 89142 - DNA, 13 bp, Artificial Sequence
  Oligonucleotide for detection of SNP TSC0022373
aatctcaacgata

SEQ ID NO: 89143 - DNA, 13 bp, Artificial Sequence
  Oligonucleotide for detection of SNP TSC0022373
tattgcggagatt

SEQ ID NO: 89144 - DNA, 13 bp, Artificial Sequence
  Oligonucleotide for detection of SNP TSC0022373
aatctccgcaata

SEQ ID NO: 89145 - DNA, 13 bp, Artificial Sequence
  Oligonucleotide for detection of SNP TSC0022373
tattgtcgagatt

SEQ ID NO: 89146 - DNA, 13 bp, Artificial Sequence
  Oligonucleotide for detection of SNP TSC0022373
aatctcgacaata

SEQ ID NO: 89147 - DNA, 13 bp, Artificial Sequence
  Oligonucleotide for detection of SNP TSC0022373
tatcgcggagatt

SEQ ID NO: 89148 - DNA, 13 bp, Artificial Sequence
  Oligonucleotide for detection of SNP TSC0022373
aatctccgcgata

SEQ ID NO: 89149 - DNA, 13 bp, Artificial Sequence
  Oligonucleotide for detection of SNP TSC0022373
tatcgtcgagatt

SEQ ID NO: 89150 - DNA, 13 bp, Artificial Sequence
  Oligonucleotide for detection of SNP TSC0022373
aatctcgacgata

SEQ ID NO: 89151 - DNA, 13 bp, Artificial Sequence
  Oligonucleotide for detection of SNP TSC0022375
agtaattgggaty

SEQ ID NO: 89152 - DNA, 13 bp, Artificial Sequence
  Oligonucleotide for detection of SNP TSC0022375
ratcccaattact

SEQ ID NO: 89153 - DNA, 13 bp, Artificial Sequence
  Oligonucleotide for detection of SNP TSC0022375
agtaatcgggaty

SEQ ID NO: 89154 - DNA, 13 bp, Artificial Sequence
  Oligonucleotide for detection of SNP TSC0022375
ratcccgattact

SEQ ID NO: 89155 - DNA, 13 bp, Artificial Sequence
  Oligonucleotide for detection of SNP TSC0022375
gattttgattatt

SEQ ID NO: 89156 - DNA, 13 bp, Artificial Sequence
  Oligonucleotide for detection of SNP TSC0022375
aataatcaaaatc

SEQ ID NO: 89157 - DNA, 13 bp, Artificial Sequence
  Oligonucleotide for detection of SNP TSC0022375
gattttaattatt

SEQ ID NO: 89158 - DNA, 13 bp, Artificial Sequence
  Oligonucleotide for detection of SNP TSC0022375
aataattaaaatc

SEQ ID NO: 89159 - DNA, 13 bp, Artificial Sequence
  Oligonucleotide for detection of SNP TSC0022375
gatttcgattatt

SEQ ID NO: 89160 - DNA, 13 bp, Artificial Sequence
  Oligonucleotide for detection of SNP TSC0022375
aataatcgaaatc

SEQ ID NO: 89161 - DNA, 13 bp, Artificial Sequence
  Oligonucleotide for detection of SNP TSC0022376
gatattttggaaa

SEQ ID NO: 89162 - DNA, 13 bp, Artificial Sequence
  Oligonucleotide for detection of SNP TSC0022376
tttccaaaatatc

SEQ ID NO: 89163 - DNA, 13 bp, Artificial Sequence
  Oligonucleotide for detection of SNP TSC0022376
gatattgtggaaa

SEQ ID NO: 89164 - DNA, 13 bp, Artificial Sequence
  Oligonucleotide for detection of SNP TSC0022376
tttccacaatatc

SEQ ID NO: 89165 - DNA, 13 bp, Artificial Sequence
  Oligonucleotide for detection of SNP TSC0022376
tttttagaatgty

SEQ ID NO: 89166 - DNA, 13 bp, Artificial Sequence
  Oligonucleotide for detection of SNP TSC0022376
racattctaaaaa

SEQ ID NO: 89167 - DNA, 13 bp, Artificial Sequence
  Oligonucleotide for detection of SNP TSC0022376
tttttataatgty

SEQ ID NO: 89168 - DNA, 13 bp, Artificial Sequence
  Oligonucleotide for detection of SNP TSC0022376
racattataaaaa

SEQ ID NO: 89169 - DNA, 13 bp, Artificial Sequence
  Oligonucleotide for detection of SNP TSC0022377
atttagttttggt

SEQ ID NO: 89170 - DNA, 13 bp, Artificial Sequence
  Oligonucleotide for detection of SNP TSC0022377
accaaaactaaat

SEQ ID NO: 89171 - DNA, 13 bp, Artificial Sequence
  Oligonucleotide for detection of SNP TSC0022377
atttaggtttggt

SEQ ID NO: 89172 - DNA, 13 bp, Artificial Sequence
  Oligonucleotide for detection of SNP TSC0022377
accaaacctaaat

SEQ ID NO: 89173 - DNA, 13 bp, Artificial Sequence
  Oligonucleotide for detection of SNP TSC0022377
attaaggttggat

SEQ ID NO: 89174 - DNA, 13 bp, Artificial Sequence
  Oligonucleotide for detection of SNP TSC0022377
atccaaccttaat

SEQ ID NO: 89175 - DNA, 13 bp, Artificial Sequence
  Oligonucleotide for detection of SNP TSC0022377
attaagtttggat

SEQ ID NO: 89176 - DNA, 13 bp, Artificial Sequence
  Oligonucleotide for detection of SNP TSC0022377
atccaaacttaat

SEQ ID NO: 89177 - DNA, 13 bp, Artificial Sequence
  Oligonucleotide for detection of SNP TSC0022378
gatttagtaatta

SEQ ID NO: 89178 - DNA, 13 bp, Artificial Sequence
  Oligonucleotide for detection of SNP TSC0022378
taattactaaatc

SEQ ID NO: 89179 - DNA, 13 bp, Artificial Sequence
  Oligonucleotide for detection of SNP TSC0022378
gatttaataatta

SEQ ID NO: 89180 - DNA, 13 bp, Artificial Sequence
  Oligonucleotide for detection of SNP TSC0022378
taattattaaatc

SEQ ID NO: 89181 - DNA, 13 bp, Artificial Sequence
  Oligonucleotide for detection of SNP TSC0022379
aatgtatgtttty

SEQ ID NO: 89182 - DNA, 13 bp, Artificial Sequence
  Oligonucleotide for detection of SNP TSC0022379
raaaacatacatt

SEQ ID NO: 89183 - DNA, 13 bp, Artificial Sequence
  Oligonucleotide for detection of SNP TSC0022379
aatgtacgtttty

SEQ ID NO: 89184 - DNA, 13 bp, Artificial Sequence
  Oligonucleotide for detection of SNP TSC0022379
raaaacgtacatt

SEQ ID NO: 89185 - DNA, 13 bp, Artificial Sequence
  Oligonucleotide for detection of SNP TSC0022379
gaaaatgtatatt

SEQ ID NO: 89186 - DNA, 13 bp, Artificial Sequence
  Oligonucleotide for detection of SNP TSC0022379
aatatacattttc

SEQ ID NO: 89187 - DNA, 13 bp, Artificial Sequence
  Oligonucleotide for detection of SNP TSC0022379
gaaaatatatatt

SEQ ID NO: 89188 - DNA, 13 bp, Artificial Sequence
  Oligonucleotide for detection of SNP TSC0022379
aatatatattttc

SEQ ID NO: 89189 - DNA, 13 bp, Artificial Sequence
  Oligonucleotide for detection of SNP TSC0022379
gaaaacgtatatt

SEQ ID NO: 89190 - DNA, 13 bp, Artificial Sequence
  Oligonucleotide for detection of SNP TSC0022379
aatatacgttttc

SEQ ID NO: 89191 - DNA, 13 bp, Artificial Sequence
  Oligonucleotide for detection of SNP TSC0022380
ttagagtaaagta

SEQ ID NO: 89192 - DNA, 13 bp, Artificial Sequence
  Oligonucleotide for detection of SNP TSC0022380
tactttactctaa

SEQ ID NO: 89193 - DNA, 13 bp, Artificial Sequence
  Oligonucleotide for detection of SNP TSC0022380
ttagagaaaagta

SEQ ID NO: 89194 - DNA, 13 bp, Artificial Sequence
  Oligonucleotide for detection of SNP TSC0022380
tacttttctctaa

SEQ ID NO: 89195 - DNA, 13 bp, Artificial Sequence
  Oligonucleotide for detection of SNP TSC0022381
ttatgtatgtttt

SEQ ID NO: 89196 - DNA, 13 bp, Artificial Sequence
  Oligonucleotide for detection of SNP TSC0022381
aaaacatacataa

SEQ ID NO: 89197 - DNA, 13 bp, Artificial Sequence
  Oligonucleotide for detection of SNP TSC0022381
ttatgtgtgtttt

SEQ ID NO: 89198 - DNA, 13 bp, Artificial Sequence
  Oligonucleotide for detection of SNP TSC0022381
aaaacacacataa

SEQ ID NO: 89199 - DNA, 13 bp, Artificial Sequence
  Oligonucleotide for detection of SNP TSC0022381
ttacgtatgtttt

SEQ ID NO: 89200 - DNA, 13 bp, Artificial Sequence
  Oligonucleotide for detection of SNP TSC0022381
aaaacatacgtaa

SEQ ID NO: 89201 - DNA, 13 bp, Artificial Sequence
  Oligonucleotide for detection of SNP TSC0022381
ttacgtgtgtttt

SEQ ID NO: 89202 - DNA, 13 bp, Artificial Sequence
  Oligonucleotide for detection of SNP TSC0022381
aaaacacacgtaa

SEQ ID NO: 89203 - DNA, 13 bp, Artificial Sequence
  Oligonucleotide for detection of SNP TSC0022385
attagggtaattt

SEQ ID NO: 89204 - DNA, 13 bp, Artificial Sequence
  Oligonucleotide for detection of SNP TSC0022385
aaattaccctaat

SEQ ID NO: 89205 - DNA, 13 bp, Artificial Sequence
  Oligonucleotide for detection of SNP TSC0022386
tttggtttttatg

SEQ ID NO: 89206 - DNA, 13 bp, Artificial Sequence
  Oligonucleotide for detection of SNP TSC0022386
cataaaaaccaaa

SEQ ID NO: 89207 - DNA, 13 bp, Artificial Sequence
  Oligonucleotide for detection of SNP TSC0022386
tttggtgtttatg

SEQ ID NO: 89208 - DNA, 13 bp, Artificial Sequence
  Oligonucleotide for detection of SNP TSC0022386
cataaacaccaaa

SEQ ID NO: 89209 - DNA, 13 bp, Artificial Sequence
  Oligonucleotide for detection of SNP TSC0022386
ttcggtttttatg

SEQ ID NO: 89210 - DNA, 13 bp, Artificial Sequence
  Oligonucleotide for detection of SNP TSC0022386
cataaaaaccgaa

SEQ ID NO: 89211 - DNA, 13 bp, Artificial Sequence
  Oligonucleotide for detection of SNP TSC0022386
ttcggtgtttatg

SEQ ID NO: 89212 - DNA, 13 bp, Artificial Sequence
  Oligonucleotide for detection of SNP TSC0022386
cataaacaccgaa

SEQ ID NO: 89213 - DNA, 13 bp, Artificial Sequence
  Oligonucleotide for detection of SNP TSC0022386
tttggcgtttatg

SEQ ID NO: 89214 - DNA, 13 bp, Artificial Sequence
  Oligonucleotide for detection of SNP TSC0022386
cataaacgccaaa

SEQ ID NO: 89215 - DNA, 13 bp, Artificial Sequence
  Oligonucleotide for detection of SNP TSC0022386
ttcggcgtttatg

SEQ ID NO: 89216 - DNA, 13 bp, Artificial Sequence
  Oligonucleotide for detection of SNP TSC0022386
cataaacgccgaa

SEQ ID NO: 89217 - DNA, 13 bp, Artificial Sequence
  Oligonucleotide for detection of SNP TSC0022386
tatgaaggttgaa

SEQ ID NO: 89218 - DNA, 13 bp, Artificial Sequence
  Oligonucleotide for detection of SNP TSC0022386
ttcaaccttcata

SEQ ID NO: 89219 - DNA, 13 bp, Artificial Sequence
  Oligonucleotide for detection of SNP TSC0022386
tatgaatgttgaa

SEQ ID NO: 89220 - DNA, 13 bp, Artificial Sequence
  Oligonucleotide for detection of SNP TSC0022386
ttcaacattcata

SEQ ID NO: 89221 - DNA, 13 bp, Artificial Sequence
  Oligonucleotide for detection of SNP TSC0022386
tatgaaggtcgaa

SEQ ID NO: 89222 - DNA, 13 bp, Artificial Sequence
  Oligonucleotide for detection of SNP TSC0022386
ttcgaccttcata

SEQ ID NO: 89223 - DNA, 13 bp, Artificial Sequence
  Oligonucleotide for detection of SNP TSC0022386
tatgaacgttgaa

SEQ ID NO: 89224 - DNA, 13 bp, Artificial Sequence
  Oligonucleotide for detection of SNP TSC0022386
ttcaacgttcata

SEQ ID NO: 89225 - DNA, 13 bp, Artificial Sequence
  Oligonucleotide for detection of SNP TSC0022386
tatgaatgtcgaa

SEQ ID NO: 89226 - DNA, 13 bp, Artificial Sequence
  Oligonucleotide for detection of SNP TSC0022386
ttcgacattcata

SEQ ID NO: 89227 - DNA, 13 bp, Artificial Sequence
  Oligonucleotide for detection of SNP TSC0022386
tatgaacgtcgaa

SEQ ID NO: 89228 - DNA, 13 bp, Artificial Sequence
  Oligonucleotide for detection of SNP TSC0022386
ttcgacgttcata

SEQ ID NO: 89229 - DNA, 13 bp, Artificial Sequence
  Oligonucleotide for detection of SNP TSC0022387
agtaattgataag

SEQ ID NO: 89230 - DNA, 13 bp, Artificial Sequence
  Oligonucleotide for detection of SNP TSC0022387
cttatcaattact

SEQ ID NO: 89231 - DNA, 13 bp, Artificial Sequence
  Oligonucleotide for detection of SNP TSC0022387
agtaatcgataag

SEQ ID NO: 89232 - DNA, 13 bp, Artificial Sequence
  Oligonucleotide for detection of SNP TSC0022387
cttatcgattact

SEQ ID NO: 89233 - DNA, 13 bp, Artificial Sequence
  Oligonucleotide for detection of SNP TSC0022387
tttattggttatt

SEQ ID NO: 89234 - DNA, 13 bp, Artificial Sequence
  Oligonucleotide for detection of SNP TSC0022387
aataaccaataaa

SEQ ID NO: 89235 - DNA, 13 bp, Artificial Sequence
  Oligonucleotide for detection of SNP TSC0022387
tttattagttatt

SEQ ID NO: 89236 - DNA, 13 bp, Artificial Sequence
  Oligonucleotide for detection of SNP TSC0022387
aataactaataaa

SEQ ID NO: 89237 - DNA, 13 bp, Artificial Sequence
  Oligonucleotide for detection of SNP TSC0022387
tttatcggttatt

SEQ ID NO: 89238 - DNA, 13 bp, Artificial Sequence
  Oligonucleotide for detection of SNP TSC0022387
aataaccgataaa

SEQ ID NO: 89239 - DNA, 13 bp, Artificial Sequence
  Oligonucleotide for detection of SNP TSC0022388
aaggttgtattga

SEQ ID NO: 89240 - DNA, 13 bp, Artificial Sequence
  Oligonucleotide for detection of SNP TSC0022388
tcaatacaacctt

SEQ ID NO: 89241 - DNA, 13 bp, Artificial Sequence
  Oligonucleotide for detection of SNP TSC0022388
aaggttttattga

SEQ ID NO: 89242 - DNA, 13 bp, Artificial Sequence
  Oligonucleotide for detection of SNP TSC0022388
tcaataaaacctt

SEQ ID NO: 89243 - DNA, 13 bp, Artificial Sequence
  Oligonucleotide for detection of SNP TSC0022388
aaggtcgtattga

SEQ ID NO: 89244 - DNA, 13 bp, Artificial Sequence
  Oligonucleotide for detection of SNP TSC0022388
tcaatacgacctt

SEQ ID NO: 89245 - DNA, 13 bp, Artificial Sequence
  Oligonucleotide for detection of SNP TSC0022388
aaggttttatcga

SEQ ID NO: 89246 - DNA, 13 bp, Artificial Sequence
  Oligonucleotide for detection of SNP TSC0022388
tcgataaaacctt

SEQ ID NO: 89247 - DNA, 13 bp, Artificial Sequence
  Oligonucleotide for detection of SNP TSC0022388
aaggttgtatcga

SEQ ID NO: 89248 - DNA, 13 bp, Artificial Sequence
  Oligonucleotide for detection of SNP TSC0022388
tcgatacaacctt

SEQ ID NO: 89249 - DNA, 13 bp, Artificial Sequence
  Oligonucleotide for detection of SNP TSC0022388
aaggtcgtatcga

SEQ ID NO: 89250 - DNA, 13 bp, Artificial Sequence
  Oligonucleotide for detection of SNP TSC0022388
tcgatacgacctt

SEQ ID NO: 89251 - DNA, 13 bp, Artificial Sequence
  Oligonucleotide for detection of SNP TSC0022388
ttggtgaggtttt

SEQ ID NO: 89252 - DNA, 13 bp, Artificial Sequence
  Oligonucleotide for detection of SNP TSC0022388
aaaacctcaccaa

SEQ ID NO: 89253 - DNA, 13 bp, Artificial Sequence
  Oligonucleotide for detection of SNP TSC0022388
tcggtgtggtttt

SEQ ID NO: 89254 - DNA, 13 bp, Artificial Sequence
  Oligonucleotide for detection of SNP TSC0022388
aaaaccacaccga

SEQ ID NO: 89255 - DNA, 13 bp, Artificial Sequence
  Oligonucleotide for detection of SNP TSC0022388
tcggtgaggtttt

SEQ ID NO: 89256 - DNA, 13 bp, Artificial Sequence
  Oligonucleotide for detection of SNP TSC0022388
aaaacctcaccga

SEQ ID NO: 89257 - DNA, 13 bp, Artificial Sequence
  Oligonucleotide for detection of SNP TSC0022388
tcggtgcggtttt

SEQ ID NO: 89258 - DNA, 13 bp, Artificial Sequence
  Oligonucleotide for detection of SNP TSC0022388
aaaaccgcaccga

SEQ ID NO: 89259 - DNA, 13 bp, Artificial Sequence
  Oligonucleotide for detection of SNP TSC0022389
tttgaggttattg

SEQ ID NO: 89260 - DNA, 13 bp, Artificial Sequence
  Oligonucleotide for detection of SNP TSC0022389
caataacctcaaa

SEQ ID NO: 89261 - DNA, 13 bp, Artificial Sequence
  Oligonucleotide for detection of SNP TSC0022389
tttgagattattg

SEQ ID NO: 89262 - DNA, 13 bp, Artificial Sequence
  Oligonucleotide for detection of SNP TSC0022389
caataatctcaaa

SEQ ID NO: 89263 - DNA, 13 bp, Artificial Sequence
  Oligonucleotide for detection of SNP TSC0022390
agggagagggatg

SEQ ID NO: 89264 - DNA, 13 bp, Artificial Sequence
  Oligonucleotide for detection of SNP TSC0022390
catccctctccct

SEQ ID NO: 89265 - DNA, 13 bp, Artificial Sequence
  Oligonucleotide for detection of SNP TSC0022390
agggagggggatg

SEQ ID NO: 89266 - DNA, 13 bp, Artificial Sequence
  Oligonucleotide for detection of SNP TSC0022390
catccccctccct

SEQ ID NO: 89267 - DNA, 13 bp, Artificial Sequence
  Oligonucleotide for detection of SNP TSC0022390
agggagagggacg

SEQ ID NO: 89268 - DNA, 13 bp, Artificial Sequence
  Oligonucleotide for detection of SNP TSC0022390
cgtccctctccct

SEQ ID NO: 89269 - DNA, 13 bp, Artificial Sequence
  Oligonucleotide for detection of SNP TSC0022390
agggagggggacg

SEQ ID NO: 89270 - DNA, 13 bp, Artificial Sequence
  Oligonucleotide for detection of SNP TSC0022390
cgtccccctccct

SEQ ID NO: 89271 - DNA, 13 bp, Artificial Sequence
  Oligonucleotide for detection of SNP TSC0022391
gagggatgtagga

SEQ ID NO: 89272 - DNA, 13 bp, Artificial Sequence
  Oligonucleotide for detection of SNP TSC0022391
tcctacatccctc

SEQ ID NO: 89273 - DNA, 13 bp, Artificial Sequence
  Oligonucleotide for detection of SNP TSC0022391
gagggaggtagga

SEQ ID NO: 89274 - DNA, 13 bp, Artificial Sequence
  Oligonucleotide for detection of SNP TSC0022391
tcctacctccctc

SEQ ID NO: 89275 - DNA, 13 bp, Artificial Sequence
  Oligonucleotide for detection of SNP TSC0022391
gagggacgtagga

SEQ ID NO: 89276 - DNA, 13 bp, Artificial Sequence
  Oligonucleotide for detection of SNP TSC0022391
tcctacgtccctc

SEQ ID NO: 89277 - DNA, 13 bp, Artificial Sequence
  Oligonucleotide for detection of SNP TSC0022392
atatttggaaaat

SEQ ID NO: 89278 - DNA, 13 bp, Artificial Sequence
  Oligonucleotide for detection of SNP TSC0022392
attttccaaatat

SEQ ID NO: 89279 - DNA, 13 bp, Artificial Sequence
  Oligonucleotide for detection of SNP TSC0022392
atatttagaaaat

SEQ ID NO: 89280 - DNA, 13 bp, Artificial Sequence
  Oligonucleotide for detection of SNP TSC0022392
attttctaaatat

SEQ ID NO: 89281 - DNA, 13 bp, Artificial Sequence
  Oligonucleotide for detection of SNP TSC0022396
gttggtagtggtt

SEQ ID NO: 89282 - DNA, 13 bp, Artificial Sequence
  Oligonucleotide for detection of SNP TSC0022396
aaccactaccaac

SEQ ID NO: 89283 - DNA, 13 bp, Artificial Sequence
  Oligonucleotide for detection of SNP TSC0022396
gttggttgtggtt

SEQ ID NO: 89284 - DNA, 13 bp, Artificial Sequence
  Oligonucleotide for detection of SNP TSC0022396
aaccacaaccaac

SEQ ID NO: 89285 - DNA, 13 bp, Artificial Sequence
  Oligonucleotide for detection of SNP TSC0022396
gttggtcgtggtt

SEQ ID NO: 89286 - DNA, 13 bp, Artificial Sequence
  Oligonucleotide for detection of SNP TSC0022396
aaccacgaccaac

SEQ ID NO: 89287 - DNA, 13 bp, Artificial Sequence
  Oligonucleotide for detection of SNP TSC0022396
agttattgttagy

SEQ ID NO: 89288 - DNA, 13 bp, Artificial Sequence
  Oligonucleotide for detection of SNP TSC0022396
rctaacaataact

SEQ ID NO: 89289 - DNA, 13 bp, Artificial Sequence
  Oligonucleotide for detection of SNP TSC0022396
agttatggttagy

SEQ ID NO: 89290 - DNA, 13 bp, Artificial Sequence
  Oligonucleotide for detection of SNP TSC0022396
rctaaccataact

SEQ ID NO: 89291 - DNA, 13 bp, Artificial Sequence
  Oligonucleotide for detection of SNP TSC0022396
agttacggttagy

SEQ ID NO: 89292 - DNA, 13 bp, Artificial Sequence
  Oligonucleotide for detection of SNP TSC0022396
rctaaccgtaact

SEQ ID NO: 89293 - DNA, 13 bp, Artificial Sequence
  Oligonucleotide for detection of SNP TSC0022397
ggtgttaaagttt

SEQ ID NO: 89294 - DNA, 13 bp, Artificial Sequence
  Oligonucleotide for detection of SNP TSC0022397
aaactttaacacc

SEQ ID NO: 89295 - DNA, 13 bp, Artificial Sequence
  Oligonucleotide for detection of SNP TSC0022397
ggtgtttaagttt

SEQ ID NO: 89296 - DNA, 13 bp, Artificial Sequence
  Oligonucleotide for detection of SNP TSC0022397
aaacttaaacacc

SEQ ID NO: 89297 - DNA, 13 bp, Artificial Sequence
  Oligonucleotide for detection of SNP TSC0022397
aaattttggtaty

SEQ ID NO: 89298 - DNA, 13 bp, Artificial Sequence
  Oligonucleotide for detection of SNP TSC0022397
rataccaaaattt

SEQ ID NO: 89299 - DNA, 13 bp, Artificial Sequence
  Oligonucleotide for detection of SNP TSC0022397
aaatttaggtaty

SEQ ID NO: 89300 - DNA, 13 bp, Artificial Sequence
  Oligonucleotide for detection of SNP TSC0022397
ratacctaaattt

SEQ ID NO: 89301 - DNA, 13 bp, Artificial Sequence
  Oligonucleotide for detection of SNP TSC0022398
agatttagaaaty

SEQ ID NO: 89302 - DNA, 13 bp, Artificial Sequence
  Oligonucleotide for detection of SNP TSC0022398
ratttctaaatct

SEQ ID NO: 89303 - DNA, 13 bp, Artificial Sequence
  Oligonucleotide for detection of SNP TSC0022398
agattttgaaaty

SEQ ID NO: 89304 - DNA, 13 bp, Artificial Sequence
  Oligonucleotide for detection of SNP TSC0022398
ratttcaaaatct

SEQ ID NO: 89305 - DNA, 13 bp, Artificial Sequence
  Oligonucleotide for detection of SNP TSC0022398
gatttttgggttt

SEQ ID NO: 89306 - DNA, 13 bp, Artificial Sequence
  Oligonucleotide for detection of SNP TSC0022398
aaacccaaaaatc

SEQ ID NO: 89307 - DNA, 13 bp, Artificial Sequence
  Oligonucleotide for detection of SNP TSC0022398
gattttagggttt

SEQ ID NO: 89308 - DNA, 13 bp, Artificial Sequence
  Oligonucleotide for detection of SNP TSC0022398
aaaccctaaaatc

SEQ ID NO: 89309 - DNA, 13 bp, Artificial Sequence
  Oligonucleotide for detection of SNP TSC0022399
aagttattttgta

SEQ ID NO: 89310 - DNA, 13 bp, Artificial Sequence
  Oligonucleotide for detection of SNP TSC0022399
tacaaaataactt

SEQ ID NO: 89311 - DNA, 13 bp, Artificial Sequence
  Oligonucleotide for detection of SNP TSC0022399
aagttagtttgta

SEQ ID NO: 89312 - DNA, 13 bp, Artificial Sequence
  Oligonucleotide for detection of SNP TSC0022399
tacaaactaactt

SEQ ID NO: 89313 - DNA, 13 bp, Artificial Sequence
  Oligonucleotide for detection of SNP TSC0022399
tataaagtagttt

SEQ ID NO: 89314 - DNA, 13 bp, Artificial Sequence
  Oligonucleotide for detection of SNP TSC0022399
aaactactttata

SEQ ID NO: 89315 - DNA, 13 bp, Artificial Sequence
  Oligonucleotide for detection of SNP TSC0022399
tataaattagttt

SEQ ID NO: 89316 - DNA, 13 bp, Artificial Sequence
  Oligonucleotide for detection of SNP TSC0022399
aaactaatttata

SEQ ID NO: 89317 - DNA, 13 bp, Artificial Sequence
  Oligonucleotide for detection of SNP TSC0022400
aaattggtgaagy

SEQ ID NO: 89318 - DNA, 13 bp, Artificial Sequence
  Oligonucleotide for detection of SNP TSC0022400
rcttcaccaattt

SEQ ID NO: 89319 - DNA, 13 bp, Artificial Sequence
  Oligonucleotide for detection of SNP TSC0022400
aaattgatgaagy

SEQ ID NO: 89320 - DNA, 13 bp, Artificial Sequence
  Oligonucleotide for detection of SNP TSC0022400
rcttcatcaattt

SEQ ID NO: 89321 - DNA, 13 bp, Artificial Sequence
  Oligonucleotide for detection of SNP TSC0022400
aaatcggtgaagy

SEQ ID NO: 89322 - DNA, 13 bp, Artificial Sequence
  Oligonucleotide for detection of SNP TSC0022400
rcttcaccgattt

SEQ ID NO: 89323 - DNA, 13 bp, Artificial Sequence
  Oligonucleotide for detection of SNP TSC0022400
aaatcgatgaagy

SEQ ID NO: 89324 - DNA, 13 bp, Artificial Sequence
  Oligonucleotide for detection of SNP TSC0022400
rcttcatcgattt

SEQ ID NO: 89325 - DNA, 13 bp, Artificial Sequence
  Oligonucleotide for detection of SNP TSC0022401
taattatggaagy

SEQ ID NO: 89326 - DNA, 13 bp, Artificial Sequence
  Oligonucleotide for detection of SNP TSC0022401
rcttccataatta

SEQ ID NO: 89327 - DNA, 13 bp, Artificial Sequence
  Oligonucleotide for detection of SNP TSC0022401
taattacggaagy

SEQ ID NO: 89328 - DNA, 13 bp, Artificial Sequence
  Oligonucleotide for detection of SNP TSC0022401
rcttccgtaatta

SEQ ID NO: 89329 - DNA, 13 bp, Artificial Sequence
  Oligonucleotide for detection of SNP TSC0022401
gtttttgtggtta

SEQ ID NO: 89330 - DNA, 13 bp, Artificial Sequence
  Oligonucleotide for detection of SNP TSC0022401
taaccacaaaaac

SEQ ID NO: 89331 - DNA, 13 bp, Artificial Sequence
  Oligonucleotide for detection of SNP TSC0022401
gtttttatggtta

SEQ ID NO: 89332 - DNA, 13 bp, Artificial Sequence
  Oligonucleotide for detection of SNP TSC0022401
taaccataaaaac

SEQ ID NO: 89333 - DNA, 13 bp, Artificial Sequence
  Oligonucleotide for detection of SNP TSC0022401
gttttcgtggtta

SEQ ID NO: 89334 - DNA, 13 bp, Artificial Sequence
  Oligonucleotide for detection of SNP TSC0022401
taaccacgaaaac

SEQ ID NO: 89335 - DNA, 13 bp, Artificial Sequence
  Oligonucleotide for detection of SNP TSC0022402
gggagtatatagy

SEQ ID NO: 89336 - DNA, 13 bp, Artificial Sequence
  Oligonucleotide for detection of SNP TSC0022402
rctatatactccc

SEQ ID NO: 89337 - DNA, 13 bp, Artificial Sequence
  Oligonucleotide for detection of SNP TSC0022402
gggagtgtatagy

SEQ ID NO: 89338 - DNA, 13 bp, Artificial Sequence
  Oligonucleotide for detection of SNP TSC0022402
rctatacactccc

SEQ ID NO: 89339 - DNA, 13 bp, Artificial Sequence
  Oligonucleotide for detection of SNP TSC0022402
gggagcgtatagy

SEQ ID NO: 89340 - DNA, 13 bp, Artificial Sequence
  Oligonucleotide for detection of SNP TSC0022402
rctatacgctccc

SEQ ID NO: 89341 - DNA, 13 bp, Artificial Sequence
  Oligonucleotide for detection of SNP TSC0022402
gttgtgtgtttty

SEQ ID NO: 89342 - DNA, 13 bp, Artificial Sequence
  Oligonucleotide for detection of SNP TSC0022402
raaaacacacaac

SEQ ID NO: 89343 - DNA, 13 bp, Artificial Sequence
  Oligonucleotide for detection of SNP TSC0022402
gttgtgcgtttty

SEQ ID NO: 89344 - DNA, 13 bp, Artificial Sequence
  Oligonucleotide for detection of SNP TSC0022402
raaaacgcacaac

SEQ ID NO: 89345 - DNA, 13 bp, Artificial Sequence
  Oligonucleotide for detection of SNP TSC0022403
atgttttttttag

SEQ ID NO: 89346 - DNA, 13 bp, Artificial Sequence
  Oligonucleotide for detection of SNP TSC0022403
ctaaaaaaaacat

SEQ ID NO: 89347 - DNA, 13 bp, Artificial Sequence
  Oligonucleotide for detection of SNP TSC0022403
atgtttgttttag

SEQ ID NO: 89348 - DNA, 13 bp, Artificial Sequence
  Oligonucleotide for detection of SNP TSC0022403
ctaaaacaaacat

SEQ ID NO: 89349 - DNA, 13 bp, Artificial Sequence
  Oligonucleotide for detection of SNP TSC0022403
acgttttttttag

SEQ ID NO: 89350 - DNA, 13 bp, Artificial Sequence
  Oligonucleotide for detection of SNP TSC0022403
ctaaaaaaaacgt

SEQ ID NO: 89351 - DNA, 13 bp, Artificial Sequence
  Oligonucleotide for detection of SNP TSC0022403
acgtttgttttag

SEQ ID NO: 89352 - DNA, 13 bp, Artificial Sequence
  Oligonucleotide for detection of SNP TSC0022403
ctaaaacaaacgt

SEQ ID NO: 89353 - DNA, 13 bp, Artificial Sequence
  Oligonucleotide for detection of SNP TSC0022403
atgttcgttttag

SEQ ID NO: 89354 - DNA, 13 bp, Artificial Sequence
  Oligonucleotide for detection of SNP TSC0022403
ctaaaacgaacat

SEQ ID NO: 89355 - DNA, 13 bp, Artificial Sequence
  Oligonucleotide for detection of SNP TSC0022403
acgttcgttttag

SEQ ID NO: 89356 - DNA, 13 bp, Artificial Sequence
  Oligonucleotide for detection of SNP TSC0022403
ctaaaacgaacgt

SEQ ID NO: 89357 - DNA, 13 bp, Artificial Sequence
  Oligonucleotide for detection of SNP TSC0022403
ttaaaaggaatgt

SEQ ID NO: 89358 - DNA, 13 bp, Artificial Sequence
  Oligonucleotide for detection of SNP TSC0022403
acattccttttaa

SEQ ID NO: 89359 - DNA, 13 bp, Artificial Sequence
  Oligonucleotide for detection of SNP TSC0022403
ttaaaatgaatgt

SEQ ID NO: 89360 - DNA, 13 bp, Artificial Sequence
  Oligonucleotide for detection of SNP TSC0022403
acattcattttaa

SEQ ID NO: 89361 - DNA, 13 bp, Artificial Sequence
  Oligonucleotide for detection of SNP TSC0022403
ttaaaaggaacgt

SEQ ID NO: 89362 - DNA, 13 bp, Artificial Sequence
  Oligonucleotide for detection of SNP TSC0022403
acgttccttttaa

SEQ ID NO: 89363 - DNA, 13 bp, Artificial Sequence
  Oligonucleotide for detection of SNP TSC0022403
ttaaaacgaatgt

SEQ ID NO: 89364 - DNA, 13 bp, Artificial Sequence
  Oligonucleotide for detection of SNP TSC0022403
acattcgttttaa

SEQ ID NO: 89365 - DNA, 13 bp, Artificial Sequence
  Oligonucleotide for detection of SNP TSC0022403
ttaaaatgaacgt

SEQ ID NO: 89366 - DNA, 13 bp, Artificial Sequence
  Oligonucleotide for detection of SNP TSC0022403
acgttcattttaa

SEQ ID NO: 89367 - DNA, 13 bp, Artificial Sequence
  Oligonucleotide for detection of SNP TSC0022403
ttaaaacgaacgt

SEQ ID NO: 89368 - DNA, 13 bp, Artificial Sequence
  Oligonucleotide for detection of SNP TSC0022403
acgttcgttttaa

SEQ ID NO: 89369 - DNA, 13 bp, Artificial Sequence
  Oligonucleotide for detection of SNP TSC0022404
gtttttaaaatat

SEQ ID NO: 89370 - DNA, 13 bp, Artificial Sequence
  Oligonucleotide for detection of SNP TSC0022404
atattttaaaaac

SEQ ID NO: 89371 - DNA, 13 bp, Artificial Sequence
  Oligonucleotide for detection of SNP TSC0022404
gttttttaaatat

SEQ ID NO: 89372 - DNA, 13 bp, Artificial Sequence
  Oligonucleotide for detection of SNP TSC0022404
atatttaaaaaac

SEQ ID NO: 89373 - DNA, 13 bp, Artificial Sequence
  Oligonucleotide for detection of SNP TSC0022404
atattttaggaay

SEQ ID NO: 89374 - DNA, 13 bp, Artificial Sequence
  Oligonucleotide for detection of SNP TSC0022404
rttcctaaaatat

SEQ ID NO: 89375 - DNA, 13 bp, Artificial Sequence
  Oligonucleotide for detection of SNP TSC0022404
atatttaaggaay

SEQ ID NO: 89376 - DNA, 13 bp, Artificial Sequence
  Oligonucleotide for detection of SNP TSC0022404
rttccttaaatat

SEQ ID NO: 89377 - DNA, 13 bp, Artificial Sequence
  Oligonucleotide for detection of SNP TSC0022405
tagttatgtttat

SEQ ID NO: 89378 - DNA, 13 bp, Artificial Sequence
  Oligonucleotide for detection of SNP TSC0022405
ataaacataacta

SEQ ID NO: 89379 - DNA, 13 bp, Artificial Sequence
  Oligonucleotide for detection of SNP TSC0022405
tagttacgtttat

SEQ ID NO: 89380 - DNA, 13 bp, Artificial Sequence
  Oligonucleotide for detection of SNP TSC0022405
ataaacgtaacta

SEQ ID NO: 89381 - DNA, 13 bp, Artificial Sequence
  Oligonucleotide for detection of SNP TSC0022405
ataggtgtggttg

SEQ ID NO: 89382 - DNA, 13 bp, Artificial Sequence
  Oligonucleotide for detection of SNP TSC0022405
caaccacacctat

SEQ ID NO: 89383 - DNA, 13 bp, Artificial Sequence
  Oligonucleotide for detection of SNP TSC0022405
ataggtatggttg

SEQ ID NO: 89384 - DNA, 13 bp, Artificial Sequence
  Oligonucleotide for detection of SNP TSC0022405
caaccatacctat

SEQ ID NO: 89385 - DNA, 13 bp, Artificial Sequence
  Oligonucleotide for detection of SNP TSC0022405
ataggcgtggttg

SEQ ID NO: 89386 - DNA, 13 bp, Artificial Sequence
  Oligonucleotide for detection of SNP TSC0022405
caaccacgcctat

SEQ ID NO: 89387 - DNA, 13 bp, Artificial Sequence
  Oligonucleotide for detection of SNP TSC0022406
ggtataaatgttt

SEQ ID NO: 89388 - DNA, 13 bp, Artificial Sequence
  Oligonucleotide for detection of SNP TSC0022406
aaacatttatacc

SEQ ID NO: 89389 - DNA, 13 bp, Artificial Sequence
  Oligonucleotide for detection of SNP TSC0022406
ggtatagatgttt

SEQ ID NO: 89390 - DNA, 13 bp, Artificial Sequence
  Oligonucleotide for detection of SNP TSC0022406
aaacatctatacc

SEQ ID NO: 89391 - DNA, 13 bp, Artificial Sequence
  Oligonucleotide for detection of SNP TSC0022411
tgtaattttaggt

SEQ ID NO: 89392 - DNA, 13 bp, Artificial Sequence
  Oligonucleotide for detection of SNP TSC0022411
acctaaaattaca

SEQ ID NO: 89393 - DNA, 13 bp, Artificial Sequence
  Oligonucleotide for detection of SNP TSC0022411
tgtaatgttaggt

SEQ ID NO: 89394 - DNA, 13 bp, Artificial Sequence
  Oligonucleotide for detection of SNP TSC0022411
acctaacattaca

SEQ ID NO: 89395 - DNA, 13 bp, Artificial Sequence
  Oligonucleotide for detection of SNP TSC0022411
atttgggattata

SEQ ID NO: 89396 - DNA, 13 bp, Artificial Sequence
  Oligonucleotide for detection of SNP TSC0022411
tataatcccaaat

SEQ ID NO: 89397 - DNA, 13 bp, Artificial Sequence
  Oligonucleotide for detection of SNP TSC0022411
atttggtattata

SEQ ID NO: 89398 - DNA, 13 bp, Artificial Sequence
  Oligonucleotide for detection of SNP TSC0022411
tataataccaaat

SEQ ID NO: 89399 - DNA, 13 bp, Artificial Sequence
  Oligonucleotide for detection of SNP TSC0022412
aggggatagattg

SEQ ID NO: 89400 - DNA, 13 bp, Artificial Sequence
  Oligonucleotide for detection of SNP TSC0022412
caatctatcccct

SEQ ID NO: 89401 - DNA, 13 bp, Artificial Sequence
  Oligonucleotide for detection of SNP TSC0022412
aggggagagattg

SEQ ID NO: 89402 - DNA, 13 bp, Artificial Sequence
  Oligonucleotide for detection of SNP TSC0022412
caatctctcccct

SEQ ID NO: 89403 - DNA, 13 bp, Artificial Sequence
  Oligonucleotide for detection of SNP TSC0022412
tagtttttttttt

SEQ ID NO: 89404 - DNA, 13 bp, Artificial Sequence
  Oligonucleotide for detection of SNP TSC0022412
aaaaaaaaaacta

SEQ ID NO: 89405 - DNA, 13 bp, Artificial Sequence
  Oligonucleotide for detection of SNP TSC0022416
tttaaagtgttgt

SEQ ID NO: 89406 - DNA, 13 bp, Artificial Sequence
  Oligonucleotide for detection of SNP TSC0022416
acaacactttaaa

SEQ ID NO: 89407 - DNA, 13 bp, Artificial Sequence
  Oligonucleotide for detection of SNP TSC0022416
tttaaaatgttgt

SEQ ID NO: 89408 - DNA, 13 bp, Artificial Sequence
  Oligonucleotide for detection of SNP TSC0022416
acaacattttaaa

SEQ ID NO: 89409 - DNA, 13 bp, Artificial Sequence
  Oligonucleotide for detection of SNP TSC0022417
ttgtttgttgtty

SEQ ID NO: 89410 - DNA, 13 bp, Artificial Sequence
  Oligonucleotide for detection of SNP TSC0022417
raacaacaaacaa

SEQ ID NO: 89411 - DNA, 13 bp, Artificial Sequence
  Oligonucleotide for detection of SNP TSC0022417
ttgttttttgtty

SEQ ID NO: 89412 - DNA, 13 bp, Artificial Sequence
  Oligonucleotide for detection of SNP TSC0022417
raacaaaaaacaa

SEQ ID NO: 89413 - DNA, 13 bp, Artificial Sequence
  Oligonucleotide for detection of SNP TSC0022417
gaatagtaagtag

SEQ ID NO: 89414 - DNA, 13 bp, Artificial Sequence
  Oligonucleotide for detection of SNP TSC0022417
ctacttactattc

SEQ ID NO: 89415 - DNA, 13 bp, Artificial Sequence
  Oligonucleotide for detection of SNP TSC0022417
gaatagaaagtag

SEQ ID NO: 89416 - DNA, 13 bp, Artificial Sequence
  Oligonucleotide for detection of SNP TSC0022417
ctactttctattc

SEQ ID NO: 89417 - DNA, 13 bp, Artificial Sequence
  Oligonucleotide for detection of SNP TSC0022418
ttttatggttttg

SEQ ID NO: 89418 - DNA, 13 bp, Artificial Sequence
  Oligonucleotide for detection of SNP TSC0022418
caaaaccataaaa

SEQ ID NO: 89419 - DNA, 13 bp, Artificial Sequence
  Oligonucleotide for detection of SNP TSC0022418
ttttattgttttg

SEQ ID NO: 89420 - DNA, 13 bp, Artificial Sequence
  Oligonucleotide for detection of SNP TSC0022418
caaaacaataaaa

SEQ ID NO: 89421 - DNA, 13 bp, Artificial Sequence
  Oligonucleotide for detection of SNP TSC0022418
taagattatgaaa

SEQ ID NO: 89422 - DNA, 13 bp, Artificial Sequence
  Oligonucleotide for detection of SNP TSC0022418
tttcataatctta

SEQ ID NO: 89423 - DNA, 13 bp, Artificial Sequence
  Oligonucleotide for detection of SNP TSC0022418
taagataatgaaa

SEQ ID NO: 89424 - DNA, 13 bp, Artificial Sequence
  Oligonucleotide for detection of SNP TSC0022418
tttcattatctta

SEQ ID NO: 89425 - DNA, 13 bp, Artificial Sequence
  Oligonucleotide for detection of SNP TSC0022420
aatttagaaatag

SEQ ID NO: 89426 - DNA, 13 bp, Artificial Sequence
  Oligonucleotide for detection of SNP TSC0022420
ctatttctaaatt

SEQ ID NO: 89427 - DNA, 13 bp, Artificial Sequence
  Oligonucleotide for detection of SNP TSC0022420
aatttataaatag

SEQ ID NO: 89428 - DNA, 13 bp, Artificial Sequence
  Oligonucleotide for detection of SNP TSC0022420
ctatttataaatt

SEQ ID NO: 89429 - DNA, 13 bp, Artificial Sequence
  Oligonucleotide for detection of SNP TSC0022420
ttgtttttaggtt

SEQ ID NO: 89430 - DNA, 13 bp, Artificial Sequence
  Oligonucleotide for detection of SNP TSC0022420
aacctaaaaacaa

SEQ ID NO: 89431 - DNA, 13 bp, Artificial Sequence
  Oligonucleotide for detection of SNP TSC0022420
ttgtttataggtt

SEQ ID NO: 89432 - DNA, 13 bp, Artificial Sequence
  Oligonucleotide for detection of SNP TSC0022420
aacctataaacaa

SEQ ID NO: 89433 - DNA, 13 bp, Artificial Sequence
  Oligonucleotide for detection of SNP TSC0022421
ggatataggtaag

SEQ ID NO: 89434 - DNA, 13 bp, Artificial Sequence
  Oligonucleotide for detection of SNP TSC0022421
cttacctatatcc

SEQ ID NO: 89435 - DNA, 13 bp, Artificial Sequence
  Oligonucleotide for detection of SNP TSC0022421
ggatatgggtaag

SEQ ID NO: 89436 - DNA, 13 bp, Artificial Sequence
  Oligonucleotide for detection of SNP TSC0022421
cttacccatatcc

SEQ ID NO: 89437 - DNA, 13 bp, Artificial Sequence
  Oligonucleotide for detection of SNP TSC0022421
ggatacgggtaag

SEQ ID NO: 89438 - DNA, 13 bp, Artificial Sequence
  Oligonucleotide for detection of SNP TSC0022421
cttacccgtatcc

SEQ ID NO: 89439 - DNA, 13 bp, Artificial Sequence
  Oligonucleotide for detection of SNP TSC0022421
tttgtttgtgtty

SEQ ID NO: 89440 - DNA, 13 bp, Artificial Sequence
  Oligonucleotide for detection of SNP TSC0022421
raacacaaacaaa

SEQ ID NO: 89441 - DNA, 13 bp, Artificial Sequence
  Oligonucleotide for detection of SNP TSC0022421
tttgttcgtgtty

SEQ ID NO: 89442 - DNA, 13 bp, Artificial Sequence
  Oligonucleotide for detection of SNP TSC0022421
raacacgaacaaa

SEQ ID NO: 89443 - DNA, 13 bp, Artificial Sequence
  Oligonucleotide for detection of SNP TSC0022422
gtttgtaaagtta

SEQ ID NO: 89444 - DNA, 13 bp, Artificial Sequence
  Oligonucleotide for detection of SNP TSC0022422
taactttacaaac

SEQ ID NO: 89445 - DNA, 13 bp, Artificial Sequence
  Oligonucleotide for detection of SNP TSC0022422
gtttgtgaagtta

SEQ ID NO: 89446 - DNA, 13 bp, Artificial Sequence
  Oligonucleotide for detection of SNP TSC0022422
taacttcacaaac

SEQ ID NO: 89447 - DNA, 13 bp, Artificial Sequence
  Oligonucleotide for detection of SNP TSC0022422
gtttgcgaagtta

SEQ ID NO: 89448 - DNA, 13 bp, Artificial Sequence
  Oligonucleotide for detection of SNP TSC0022422
taacttcgcaaac

SEQ ID NO: 89449 - DNA, 13 bp, Artificial Sequence
  Oligonucleotide for detection of SNP TSC0022422
tggttttgtagay

SEQ ID NO: 89450 - DNA, 13 bp, Artificial Sequence
  Oligonucleotide for detection of SNP TSC0022422
rtctacaaaacca

SEQ ID NO: 89451 - DNA, 13 bp, Artificial Sequence
  Oligonucleotide for detection of SNP TSC0022422
tggtttcgtagay

SEQ ID NO: 89452 - DNA, 13 bp, Artificial Sequence
  Oligonucleotide for detection of SNP TSC0022422
rtctacgaaacca

SEQ ID NO: 89453 - DNA, 13 bp, Artificial Sequence
  Oligonucleotide for detection of SNP TSC0022423
tgtagatggatgg

SEQ ID NO: 89454 - DNA, 13 bp, Artificial Sequence
  Oligonucleotide for detection of SNP TSC0022423
ccatccatctaca

SEQ ID NO: 89455 - DNA, 13 bp, Artificial Sequence
  Oligonucleotide for detection of SNP TSC0022423
tgtagacggatgg

SEQ ID NO: 89456 - DNA, 13 bp, Artificial Sequence
  Oligonucleotide for detection of SNP TSC0022423
ccatccgtctaca

SEQ ID NO: 89457 - DNA, 13 bp, Artificial Sequence
  Oligonucleotide for detection of SNP TSC0022423
tgtagatggacgg

SEQ ID NO: 89458 - DNA, 13 bp, Artificial Sequence
  Oligonucleotide for detection of SNP TSC0022423
ccgtccatctaca

SEQ ID NO: 89459 - DNA, 13 bp, Artificial Sequence
  Oligonucleotide for detection of SNP TSC0022423
tgtagacggacgg

SEQ ID NO: 89460 - DNA, 13 bp, Artificial Sequence
  Oligonucleotide for detection of SNP TSC0022423
ccgtccgtctaca

SEQ ID NO: 89461 - DNA, 13 bp, Artificial Sequence
  Oligonucleotide for detection of SNP TSC0022423
ttgtttgtttgta

SEQ ID NO: 89462 - DNA, 13 bp, Artificial Sequence
  Oligonucleotide for detection of SNP TSC0022423
tacaaacaaacaa

SEQ ID NO: 89463 - DNA, 13 bp, Artificial Sequence
  Oligonucleotide for detection of SNP TSC0022423
ttgtttatttgta

SEQ ID NO: 89464 - DNA, 13 bp, Artificial Sequence
  Oligonucleotide for detection of SNP TSC0022423
tacaaataaacaa

SEQ ID NO: 89465 - DNA, 13 bp, Artificial Sequence
  Oligonucleotide for detection of SNP TSC0022423
tcgtttgtttgta

SEQ ID NO: 89466 - DNA, 13 bp, Artificial Sequence
  Oligonucleotide for detection of SNP TSC0022423
tacaaacaaacga

SEQ ID NO: 89467 - DNA, 13 bp, Artificial Sequence
  Oligonucleotide for detection of SNP TSC0022423
tcgtttatttgta

SEQ ID NO: 89468 - DNA, 13 bp, Artificial Sequence
  Oligonucleotide for detection of SNP TSC0022423
tacaaataaacga

SEQ ID NO: 89469 - DNA, 13 bp, Artificial Sequence
  Oligonucleotide for detection of SNP TSC0022423
ttgttcgtttgta

SEQ ID NO: 89470 - DNA, 13 bp, Artificial Sequence
  Oligonucleotide for detection of SNP TSC0022423
tacaaacgaacaa

SEQ ID NO: 89471 - DNA, 13 bp, Artificial Sequence
  Oligonucleotide for detection of SNP TSC0022423
tcgttcgtttgta

SEQ ID NO: 89472 - DNA, 13 bp, Artificial Sequence
  Oligonucleotide for detection of SNP TSC0022423
tacaaacgaacga

SEQ ID NO: 89473 - DNA, 13 bp, Artificial Sequence
  Oligonucleotide for detection of SNP TSC0022424
taaagttttaggt

SEQ ID NO: 89474 - DNA, 13 bp, Artificial Sequence
  Oligonucleotide for detection of SNP TSC0022424
acctaaaacttta

SEQ ID NO: 89475 - DNA, 13 bp, Artificial Sequence
  Oligonucleotide for detection of SNP TSC0022424
taaagtgttaggt

SEQ ID NO: 89476 - DNA, 13 bp, Artificial Sequence
  Oligonucleotide for detection of SNP TSC0022424
acctaacacttta

SEQ ID NO: 89477 - DNA, 13 bp, Artificial Sequence
  Oligonucleotide for detection of SNP TSC0022424
atttgggattttg

SEQ ID NO: 89478 - DNA, 13 bp, Artificial Sequence
  Oligonucleotide for detection of SNP TSC0022424
caaaatcccaaat

SEQ ID NO: 89479 - DNA, 13 bp, Artificial Sequence
  Oligonucleotide for detection of SNP TSC0022424
atttggtattttg

SEQ ID NO: 89480 - DNA, 13 bp, Artificial Sequence
  Oligonucleotide for detection of SNP TSC0022424
caaaataccaaat

SEQ ID NO: 89481 - DNA, 13 bp, Artificial Sequence
  Oligonucleotide for detection of SNP TSC0022426
aattttatttttg

SEQ ID NO: 89482 - DNA, 13 bp, Artificial Sequence
  Oligonucleotide for detection of SNP TSC0022426
caaaaataaaatt

SEQ ID NO: 89483 - DNA, 13 bp, Artificial Sequence
  Oligonucleotide for detection of SNP TSC0022427
gataagagttatt

SEQ ID NO: 89484 - DNA, 13 bp, Artificial Sequence
  Oligonucleotide for detection of SNP TSC0022427
aataactcttatc

SEQ ID NO: 89485 - DNA, 13 bp, Artificial Sequence
  Oligonucleotide for detection of SNP TSC0022427
gataagtgttatt

SEQ ID NO: 89486 - DNA, 13 bp, Artificial Sequence
  Oligonucleotide for detection of SNP TSC0022427
aataacacttatc

SEQ ID NO: 89487 - DNA, 13 bp, Artificial Sequence
  Oligonucleotide for detection of SNP TSC0022427
gataagcgttatt

SEQ ID NO: 89488 - DNA, 13 bp, Artificial Sequence
  Oligonucleotide for detection of SNP TSC0022427
aataacgcttatc

SEQ ID NO: 89489 - DNA, 13 bp, Artificial Sequence
  Oligonucleotide for detection of SNP TSC0022428
ttgattttgttty

SEQ ID NO: 89490 - DNA, 13 bp, Artificial Sequence
  Oligonucleotide for detection of SNP TSC0022428
raaacaaaatcaa

SEQ ID NO: 89491 - DNA, 13 bp, Artificial Sequence
  Oligonucleotide for detection of SNP TSC0022428
ttgatcgtgttty

SEQ ID NO: 89492 - DNA, 13 bp, Artificial Sequence
  Oligonucleotide for detection of SNP TSC0022428
raaacacgatcaa

SEQ ID NO: 89493 - DNA, 13 bp, Artificial Sequence
  Oligonucleotide for detection of SNP TSC0022428
gaaatagggttaa

SEQ ID NO: 89494 - DNA, 13 bp, Artificial Sequence
  Oligonucleotide for detection of SNP TSC0022428
ttaaccctatttc

SEQ ID NO: 89495 - DNA, 13 bp, Artificial Sequence
  Oligonucleotide for detection of SNP TSC0022428
gaaatatggttaa

SEQ ID NO: 89496 - DNA, 13 bp, Artificial Sequence
  Oligonucleotide for detection of SNP TSC0022428
ttaaccatatttc

SEQ ID NO: 89497 - DNA, 13 bp, Artificial Sequence
  Oligonucleotide for detection of SNP TSC0022428
gaaatacggttaa

SEQ ID NO: 89498 - DNA, 13 bp, Artificial Sequence
  Oligonucleotide for detection of SNP TSC0022428
ttaaccgtatttc

SEQ ID NO: 89499 - DNA, 13 bp, Artificial Sequence
  Oligonucleotide for detection of SNP TSC0022429
tgaaagtgtaatg

SEQ ID NO: 89500 - DNA, 13 bp, Artificial Sequence
  Oligonucleotide for detection of SNP TSC0022429
cattacactttca

SEQ ID NO: 89501 - DNA, 13 bp, Artificial Sequence
  Oligonucleotide for detection of SNP TSC0022429
tgaaagcgtaatg

SEQ ID NO: 89502 - DNA, 13 bp, Artificial Sequence
  Oligonucleotide for detection of SNP TSC0022429
cattacgctttca

SEQ ID NO: 89503 - DNA, 13 bp, Artificial Sequence
  Oligonucleotide for detection of SNP TSC0022429
tattatattttta

SEQ ID NO: 89504 - DNA, 13 bp, Artificial Sequence
  Oligonucleotide for detection of SNP TSC0022429
taaaaatataata

SEQ ID NO: 89505 - DNA, 13 bp, Artificial Sequence
  Oligonucleotide for detection of SNP TSC0022429
tattacgttttta

SEQ ID NO: 89506 - DNA, 13 bp, Artificial Sequence
  Oligonucleotide for detection of SNP TSC0022429
taaaaacgtaata

SEQ ID NO: 89507 - DNA, 13 bp, Artificial Sequence
  Oligonucleotide for detection of SNP TSC0022432
ggaaaagagaaat

SEQ ID NO: 89508 - DNA, 13 bp, Artificial Sequence
  Oligonucleotide for detection of SNP TSC0022432
atttctcttttcc

SEQ ID NO: 89509 - DNA, 13 bp, Artificial Sequence
  Oligonucleotide for detection of SNP TSC0022432
ggaaaatagaaat

SEQ ID NO: 89510 - DNA, 13 bp, Artificial Sequence
  Oligonucleotide for detection of SNP TSC0022432
atttctattttcc

SEQ ID NO: 89511 - DNA, 13 bp, Artificial Sequence
  Oligonucleotide for detection of SNP TSC0022435
aaattagggggga

SEQ ID NO: 89512 - DNA, 13 bp, Artificial Sequence
  Oligonucleotide for detection of SNP TSC0022435
tcccccctaattt

SEQ ID NO: 89513 - DNA, 13 bp, Artificial Sequence
  Oligonucleotide for detection of SNP TSC0022435
aaattaaggggga

SEQ ID NO: 89514 - DNA, 13 bp, Artificial Sequence
  Oligonucleotide for detection of SNP TSC0022435
tcccccttaattt

SEQ ID NO: 89515 - DNA, 13 bp, Artificial Sequence
  Oligonucleotide for detection of SNP TSC0022436
gtttgagttggay

SEQ ID NO: 89516 - DNA, 13 bp, Artificial Sequence
  Oligonucleotide for detection of SNP TSC0022436
rtccaactcaaac

SEQ ID NO: 89517 - DNA, 13 bp, Artificial Sequence
  Oligonucleotide for detection of SNP TSC0022436
gtttgatttggay

SEQ ID NO: 89518 - DNA, 13 bp, Artificial Sequence
  Oligonucleotide for detection of SNP TSC0022436
rtccaaatcaaac

SEQ ID NO: 89519 - DNA, 13 bp, Artificial Sequence
  Oligonucleotide for detection of SNP TSC0022436
gttcgagttggay

SEQ ID NO: 89520 - DNA, 13 bp, Artificial Sequence
  Oligonucleotide for detection of SNP TSC0022436
rtccaactcgaac

SEQ ID NO: 89521 - DNA, 13 bp, Artificial Sequence
  Oligonucleotide for detection of SNP TSC0022436
gttcgatttggay

SEQ ID NO: 89522 - DNA, 13 bp, Artificial Sequence
  Oligonucleotide for detection of SNP TSC0022436
rtccaaatcgaac

SEQ ID NO: 89523 - DNA, 13 bp, Artificial Sequence
  Oligonucleotide for detection of SNP TSC0022436
gtttagtttggay

SEQ ID NO: 89524 - DNA, 13 bp, Artificial Sequence
  Oligonucleotide for detection of SNP TSC0022436
rtccaaactaaac

SEQ ID NO: 89525 - DNA, 13 bp, Artificial Sequence
  Oligonucleotide for detection of SNP TSC0022436
gtttagattggay

SEQ ID NO: 89526 - DNA, 13 bp, Artificial Sequence
  Oligonucleotide for detection of SNP TSC0022436
rtccaatctaaac

SEQ ID NO: 89527 - DNA, 13 bp, Artificial Sequence
  Oligonucleotide for detection of SNP TSC0022436
gtttagttcggay

SEQ ID NO: 89528 - DNA, 13 bp, Artificial Sequence
  Oligonucleotide for detection of SNP TSC0022436
rtccgaactaaac

SEQ ID NO: 89529 - DNA, 13 bp, Artificial Sequence
  Oligonucleotide for detection of SNP TSC0022436
gtttagatcggay

SEQ ID NO: 89530 - DNA, 13 bp, Artificial Sequence
  Oligonucleotide for detection of SNP TSC0022436
rtccgatctaaac

SEQ ID NO: 89531 - DNA, 13 bp, Artificial Sequence
  Oligonucleotide for detection of SNP TSC0022437
gttggatggtgtt

SEQ ID NO: 89532 - DNA, 13 bp, Artificial Sequence
  Oligonucleotide for detection of SNP TSC0022437
aacaccatccaac

SEQ ID NO: 89533 - DNA, 13 bp, Artificial Sequence
  Oligonucleotide for detection of SNP TSC0022437
gttggagggtgtt

SEQ ID NO: 89534 - DNA, 13 bp, Artificial Sequence
  Oligonucleotide for detection of SNP TSC0022437
aacaccctccaac

SEQ ID NO: 89535 - DNA, 13 bp, Artificial Sequence
  Oligonucleotide for detection of SNP TSC0022437
gttggacggtgtt

SEQ ID NO: 89536 - DNA, 13 bp, Artificial Sequence
  Oligonucleotide for detection of SNP TSC0022437
aacaccgtccaac

SEQ ID NO: 89537 - DNA, 13 bp, Artificial Sequence
  Oligonucleotide for detection of SNP TSC0022437
agtattgtttagy

SEQ ID NO: 89538 - DNA, 13 bp, Artificial Sequence
  Oligonucleotide for detection of SNP TSC0022437
rctaaacaatact

SEQ ID NO: 89539 - DNA, 13 bp, Artificial Sequence
  Oligonucleotide for detection of SNP TSC0022437
agtattttttagy

SEQ ID NO: 89540 - DNA, 13 bp, Artificial Sequence
  Oligonucleotide for detection of SNP TSC0022437
rctaaaaaatact

SEQ ID NO: 89541 - DNA, 13 bp, Artificial Sequence
  Oligonucleotide for detection of SNP TSC0022437
agtatcgtttagy

SEQ ID NO: 89542 - DNA, 13 bp, Artificial Sequence
  Oligonucleotide for detection of SNP TSC0022437
rctaaacgatact

SEQ ID NO: 89543 - DNA, 13 bp, Artificial Sequence
  Oligonucleotide for detection of SNP TSC0022438
agggagtgagtat

SEQ ID NO: 89544 - DNA, 13 bp, Artificial Sequence
  Oligonucleotide for detection of SNP TSC0022438
atactcactccct

SEQ ID NO: 89545 - DNA, 13 bp, Artificial Sequence
  Oligonucleotide for detection of SNP TSC0022438
agggagcgagtat

SEQ ID NO: 89546 - DNA, 13 bp, Artificial Sequence
  Oligonucleotide for detection of SNP TSC0022438
atactcgctccct

SEQ ID NO: 89547 - DNA, 13 bp, Artificial Sequence
  Oligonucleotide for detection of SNP TSC0022443
atattggtgatag

SEQ ID NO: 89548 - DNA, 13 bp, Artificial Sequence
  Oligonucleotide for detection of SNP TSC0022443
ctatcaccaatat

SEQ ID NO: 89549 - DNA, 13 bp, Artificial Sequence
  Oligonucleotide for detection of SNP TSC0022443
atattgatgatag

SEQ ID NO: 89550 - DNA, 13 bp, Artificial Sequence
  Oligonucleotide for detection of SNP TSC0022443
ctatcatcaatat

SEQ ID NO: 89551 - DNA, 13 bp, Artificial Sequence
  Oligonucleotide for detection of SNP TSC0022443
atatcggtgatag

SEQ ID NO: 89552 - DNA, 13 bp, Artificial Sequence
  Oligonucleotide for detection of SNP TSC0022443
ctatcaccgatat

SEQ ID NO: 89553 - DNA, 13 bp, Artificial Sequence
  Oligonucleotide for detection of SNP TSC0022443
atatcgatgatag

SEQ ID NO: 89554 - DNA, 13 bp, Artificial Sequence
  Oligonucleotide for detection of SNP TSC0022443
ctatcatcgatat

SEQ ID NO: 89555 - DNA, 13 bp, Artificial Sequence
  Oligonucleotide for detection of SNP TSC0022443
atattggcgatag

SEQ ID NO: 89556 - DNA, 13 bp, Artificial Sequence
  Oligonucleotide for detection of SNP TSC0022443
ctatcgccaatat

SEQ ID NO: 89557 - DNA, 13 bp, Artificial Sequence
  Oligonucleotide for detection of SNP TSC0022443
atattgacgatag

SEQ ID NO: 89558 - DNA, 13 bp, Artificial Sequence
  Oligonucleotide for detection of SNP TSC0022443
ctatcgtcaatat

SEQ ID NO: 89559 - DNA, 13 bp, Artificial Sequence
  Oligonucleotide for detection of SNP TSC0022443
atatcggcgatag

SEQ ID NO: 89560 - DNA, 13 bp, Artificial Sequence
  Oligonucleotide for detection of SNP TSC0022443
ctatcgccgatat

SEQ ID NO: 89561 - DNA, 13 bp, Artificial Sequence
  Oligonucleotide for detection of SNP TSC0022443
atatcgacgatag

SEQ ID NO: 89562 - DNA, 13 bp, Artificial Sequence
  Oligonucleotide for detection of SNP TSC0022443
ctatcgtcgatat

SEQ ID NO: 89563 - DNA, 13 bp, Artificial Sequence
  Oligonucleotide for detection of SNP TSC0022444
gggagtatttatt

SEQ ID NO: 89564 - DNA, 13 bp, Artificial Sequence
  Oligonucleotide for detection of SNP TSC0022444
aataaatactccc

SEQ ID NO: 89565 - DNA, 13 bp, Artificial Sequence
  Oligonucleotide for detection of SNP TSC0022444
gggagtttttatt

SEQ ID NO: 89566 - DNA, 13 bp, Artificial Sequence
  Oligonucleotide for detection of SNP TSC0022444
aataaaaactccc

SEQ ID NO: 89567 - DNA, 13 bp, Artificial Sequence
  Oligonucleotide for detection of SNP TSC0022444
aataagtatttty

SEQ ID NO: 89568 - DNA, 13 bp, Artificial Sequence
  Oligonucleotide for detection of SNP TSC0022444
raaaatacttatt

SEQ ID NO: 89569 - DNA, 13 bp, Artificial Sequence
  Oligonucleotide for detection of SNP TSC0022444
aataagaatttty

SEQ ID NO: 89570 - DNA, 13 bp, Artificial Sequence
  Oligonucleotide for detection of SNP TSC0022444
raaaattcttatt

SEQ ID NO: 89571 - DNA, 13 bp, Artificial Sequence
  Oligonucleotide for detection of SNP TSC0022452
tataatagtttaa

SEQ ID NO: 89572 - DNA, 13 bp, Artificial Sequence
  Oligonucleotide for detection of SNP TSC0022452
ttaaactattata

SEQ ID NO: 89573 - DNA, 13 bp, Artificial Sequence
  Oligonucleotide for detection of SNP TSC0022452
tataatggtttaa

SEQ ID NO: 89574 - DNA, 13 bp, Artificial Sequence
  Oligonucleotide for detection of SNP TSC0022452
ttaaaccattata

SEQ ID NO: 89575 - DNA, 13 bp, Artificial Sequence
  Oligonucleotide for detection of SNP TSC0022452
tataacggtttaa

SEQ ID NO: 89576 - DNA, 13 bp, Artificial Sequence
  Oligonucleotide for detection of SNP TSC0022452
ttaaaccgttata

SEQ ID NO: 89577 - DNA, 13 bp, Artificial Sequence
  Oligonucleotide for detection of SNP TSC0022452
ttagattgttgta

SEQ ID NO: 89578 - DNA, 13 bp, Artificial Sequence
  Oligonucleotide for detection of SNP TSC0022452
tacaacaatctaa

SEQ ID NO: 89579 - DNA, 13 bp, Artificial Sequence
  Oligonucleotide for detection of SNP TSC0022452
ttagatcgttgta

SEQ ID NO: 89580 - DNA, 13 bp, Artificial Sequence
  Oligonucleotide for detection of SNP TSC0022452
tacaacgatctaa

SEQ ID NO: 89581 - DNA, 13 bp, Artificial Sequence
  Oligonucleotide for detection of SNP TSC0022453
tagtgatgagggg

SEQ ID NO: 89582 - DNA, 13 bp, Artificial Sequence
  Oligonucleotide for detection of SNP TSC0022453
cccctcatcacta

SEQ ID NO: 89583 - DNA, 13 bp, Artificial Sequence
  Oligonucleotide for detection of SNP TSC0022453
tagtgacgagggg

SEQ ID NO: 89584 - DNA, 13 bp, Artificial Sequence
  Oligonucleotide for detection of SNP TSC0022453
cccctcgtcacta

SEQ ID NO: 89585 - DNA, 13 bp, Artificial Sequence
  Oligonucleotide for detection of SNP TSC0022456
ttaggtattatag

SEQ ID NO: 89586 - DNA, 13 bp, Artificial Sequence
  Oligonucleotide for detection of SNP TSC0022456
ctataatacctaa

SEQ ID NO: 89587 - DNA, 13 bp, Artificial Sequence
  Oligonucleotide for detection of SNP TSC0022456
ttaggttttatag

SEQ ID NO: 89588 - DNA, 13 bp, Artificial Sequence
  Oligonucleotide for detection of SNP TSC0022456
ctataaaacctaa

SEQ ID NO: 89589 - DNA, 13 bp, Artificial Sequence
  Oligonucleotide for detection of SNP TSC0022456
ttatgatgtttaa

SEQ ID NO: 89590 - DNA, 13 bp, Artificial Sequence
  Oligonucleotide for detection of SNP TSC0022456
ttaaacatcataa

SEQ ID NO: 89591 - DNA, 13 bp, Artificial Sequence
  Oligonucleotide for detection of SNP TSC0022456
ttatgaagtttaa

SEQ ID NO: 89592 - DNA, 13 bp, Artificial Sequence
  Oligonucleotide for detection of SNP TSC0022456
ttaaacttcataa

SEQ ID NO: 89593 - DNA, 13 bp, Artificial Sequence
  Oligonucleotide for detection of SNP TSC0022461
agtatttgtgtay

SEQ ID NO: 89594 - DNA, 13 bp, Artificial Sequence
  Oligonucleotide for detection of SNP TSC0022461
rtacacaaatact

SEQ ID NO: 89595 - DNA, 13 bp, Artificial Sequence
  Oligonucleotide for detection of SNP TSC0022461
agtattcgtgtay

SEQ ID NO: 89596 - DNA, 13 bp, Artificial Sequence
  Oligonucleotide for detection of SNP TSC0022461
rtacacgaatact

SEQ ID NO: 89597 - DNA, 13 bp, Artificial Sequence
  Oligonucleotide for detection of SNP TSC0022461
agtatttgcgtay

SEQ ID NO: 89598 - DNA, 13 bp, Artificial Sequence
  Oligonucleotide for detection of SNP TSC0022461
rtacgcaaatact

SEQ ID NO: 89599 - DNA, 13 bp, Artificial Sequence
  Oligonucleotide for detection of SNP TSC0022461
agtattcgcgtay

SEQ ID NO: 89600 - DNA, 13 bp, Artificial Sequence
  Oligonucleotide for detection of SNP TSC0022461
rtacgcgaatact

SEQ ID NO: 89601 - DNA, 13 bp, Artificial Sequence
  Oligonucleotide for detection of SNP TSC0022461
gtatgtgggtatt

SEQ ID NO: 89602 - DNA, 13 bp, Artificial Sequence
  Oligonucleotide for detection of SNP TSC0022461
aatacccacatac

SEQ ID NO: 89603 - DNA, 13 bp, Artificial Sequence
  Oligonucleotide for detection of SNP TSC0022461
gtatgtaggtatt

SEQ ID NO: 89604 - DNA, 13 bp, Artificial Sequence
  Oligonucleotide for detection of SNP TSC0022461
aatacctacatac

SEQ ID NO: 89605 - DNA, 13 bp, Artificial Sequence
  Oligonucleotide for detection of SNP TSC0022461
gtacgtgggtatt

SEQ ID NO: 89606 - DNA, 13 bp, Artificial Sequence
  Oligonucleotide for detection of SNP TSC0022461
aatacccacgtac

SEQ ID NO: 89607 - DNA, 13 bp, Artificial Sequence
  Oligonucleotide for detection of SNP TSC0022461
gtacgtaggtatt

SEQ ID NO: 89608 - DNA, 13 bp, Artificial Sequence
  Oligonucleotide for detection of SNP TSC0022461
aatacctacgtac

SEQ ID NO: 89609 - DNA, 13 bp, Artificial Sequence
  Oligonucleotide for detection of SNP TSC0022461
gtatgcgggtatt

SEQ ID NO: 89610 - DNA, 13 bp, Artificial Sequence
  Oligonucleotide for detection of SNP TSC0022461
aatacccgcatac

SEQ ID NO: 89611 - DNA, 13 bp, Artificial Sequence
  Oligonucleotide for detection of SNP TSC0022461
gtacgcgggtatt

SEQ ID NO: 89612 - DNA, 13 bp, Artificial Sequence
  Oligonucleotide for detection of SNP TSC0022461
aatacccgcgtac

SEQ ID NO: 89613 - DNA, 13 bp, Artificial Sequence
  Oligonucleotide for detection of SNP TSC0022466
tgaatgggggatt

SEQ ID NO: 89614 - DNA, 13 bp, Artificial Sequence
  Oligonucleotide for detection of SNP TSC0022466
aatcccccattca

SEQ ID NO: 89615 - DNA, 13 bp, Artificial Sequence
  Oligonucleotide for detection of SNP TSC0022466
tgaatgagggatt

SEQ ID NO: 89616 - DNA, 13 bp, Artificial Sequence
  Oligonucleotide for detection of SNP TSC0022466
aatccctcattca

SEQ ID NO: 89617 - DNA, 13 bp, Artificial Sequence
  Oligonucleotide for detection of SNP TSC0022467
tatataaatatgy

SEQ ID NO: 89618 - DNA, 13 bp, Artificial Sequence
  Oligonucleotide for detection of SNP TSC0022467
rcatatttatata

SEQ ID NO: 89619 - DNA, 13 bp, Artificial Sequence
  Oligonucleotide for detection of SNP TSC0022467
tatatatatatgy

SEQ ID NO: 89620 - DNA, 13 bp, Artificial Sequence
  Oligonucleotide for detection of SNP TSC0022467
rcatatatatata

SEQ ID NO: 89621 - DNA, 13 bp, Artificial Sequence
  Oligonucleotide for detection of SNP TSC0022467
gtatgtttgtgtg

SEQ ID NO: 89622 - DNA, 13 bp, Artificial Sequence
  Oligonucleotide for detection of SNP TSC0022467
cacacaaacatac

SEQ ID NO: 89623 - DNA, 13 bp, Artificial Sequence
  Oligonucleotide for detection of SNP TSC0022468
atatatgtaatay

SEQ ID NO: 89624 - DNA, 13 bp, Artificial Sequence
  Oligonucleotide for detection of SNP TSC0022468
rtattacatatat

SEQ ID NO: 89625 - DNA, 13 bp, Artificial Sequence
  Oligonucleotide for detection of SNP TSC0022468
atatatataatay

SEQ ID NO: 89626 - DNA, 13 bp, Artificial Sequence
  Oligonucleotide for detection of SNP TSC0022468
rtattatatatat

SEQ ID NO: 89627 - DNA, 13 bp, Artificial Sequence
  Oligonucleotide for detection of SNP TSC0022469
tattttaaaaaat

SEQ ID NO: 89628 - DNA, 13 bp, Artificial Sequence
  Oligonucleotide for detection of SNP TSC0022469
attttttaaaata

SEQ ID NO: 89629 - DNA, 13 bp, Artificial Sequence
  Oligonucleotide for detection of SNP TSC0022476
tgtgtatgttttg

SEQ ID NO: 89630 - DNA, 13 bp, Artificial Sequence
  Oligonucleotide for detection of SNP TSC0022476
caaaacatacaca

SEQ ID NO: 89631 - DNA, 13 bp, Artificial Sequence
  Oligonucleotide for detection of SNP TSC0022476
tgtgtaggttttg

SEQ ID NO: 89632 - DNA, 13 bp, Artificial Sequence
  Oligonucleotide for detection of SNP TSC0022476
caaaacctacaca

SEQ ID NO: 89633 - DNA, 13 bp, Artificial Sequence
  Oligonucleotide for detection of SNP TSC0022476
tgtgtacgttttg

SEQ ID NO: 89634 - DNA, 13 bp, Artificial Sequence
  Oligonucleotide for detection of SNP TSC0022476
caaaacgtacaca

SEQ ID NO: 89635 - DNA, 13 bp, Artificial Sequence
  Oligonucleotide for detection of SNP TSC0022476
tagaatgtatata

SEQ ID NO: 89636 - DNA, 13 bp, Artificial Sequence
  Oligonucleotide for detection of SNP TSC0022476
tatatacattcta

SEQ ID NO: 89637 - DNA, 13 bp, Artificial Sequence
  Oligonucleotide for detection of SNP TSC0022476
tagaatttatata

SEQ ID NO: 89638 - DNA, 13 bp, Artificial Sequence
  Oligonucleotide for detection of SNP TSC0022476
tatataaattcta

SEQ ID NO: 89639 - DNA, 13 bp, Artificial Sequence
  Oligonucleotide for detection of SNP TSC0022476
tagaacgtatata

SEQ ID NO: 89640 - DNA, 13 bp, Artificial Sequence
  Oligonucleotide for detection of SNP TSC0022476
tatatacgttcta

SEQ ID NO: 89641 - DNA, 13 bp, Artificial Sequence
  Oligonucleotide for detection of SNP TSC0022477
aagagtatttatt

SEQ ID NO: 89642 - DNA, 13 bp, Artificial Sequence
  Oligonucleotide for detection of SNP TSC0022477
aataaatactctt

SEQ ID NO: 89643 - DNA, 13 bp, Artificial Sequence
  Oligonucleotide for detection of SNP TSC0022477
aagagtgtttatt

SEQ ID NO: 89644 - DNA, 13 bp, Artificial Sequence
  Oligonucleotide for detection of SNP TSC0022477
aataaacactctt

SEQ ID NO: 89645 - DNA, 13 bp, Artificial Sequence
  Oligonucleotide for detection of SNP TSC0022477
aagagcgtttatt

SEQ ID NO: 89646 - DNA, 13 bp, Artificial Sequence
  Oligonucleotide for detection of SNP TSC0022477
aataaacgctctt

SEQ ID NO: 89647 - DNA, 13 bp, Artificial Sequence
  Oligonucleotide for detection of SNP TSC0022477
aatgagtgttttt

SEQ ID NO: 89648 - DNA, 13 bp, Artificial Sequence
  Oligonucleotide for detection of SNP TSC0022477
aaaaacactcatt

SEQ ID NO: 89649 - DNA, 13 bp, Artificial Sequence
  Oligonucleotide for detection of SNP TSC0022477
aatgagcgttttt

SEQ ID NO: 89650 - DNA, 13 bp, Artificial Sequence
  Oligonucleotide for detection of SNP TSC0022477
aaaaacgctcatt

SEQ ID NO: 89651 - DNA, 13 bp, Artificial Sequence
  Oligonucleotide for detection of SNP TSC0022478
ttttgattaggag

SEQ ID NO: 89652 - DNA, 13 bp, Artificial Sequence
  Oligonucleotide for detection of SNP TSC0022478
ctcctaatcaaaa

SEQ ID NO: 89653 - DNA, 13 bp, Artificial Sequence
  Oligonucleotide for detection of SNP TSC0022478
ttttgagtaggag

SEQ ID NO: 89654 - DNA, 13 bp, Artificial Sequence
  Oligonucleotide for detection of SNP TSC0022478
ctcctactcaaaa

SEQ ID NO: 89655 - DNA, 13 bp, Artificial Sequence
  Oligonucleotide for detection of SNP TSC0022478
tttttagttaagg

SEQ ID NO: 89656 - DNA, 13 bp, Artificial Sequence
  Oligonucleotide for detection of SNP TSC0022478
ccttaactaaaaa

SEQ ID NO: 89657 - DNA, 13 bp, Artificial Sequence
  Oligonucleotide for detection of SNP TSC0022478
tttttatttaagg

SEQ ID NO: 89658 - DNA, 13 bp, Artificial Sequence
  Oligonucleotide for detection of SNP TSC0022478
ccttaaataaaaa

SEQ ID NO: 89659 - DNA, 13 bp, Artificial Sequence
  Oligonucleotide for detection of SNP TSC0022479
tattttattgttg

SEQ ID NO: 89660 - DNA, 13 bp, Artificial Sequence
  Oligonucleotide for detection of SNP TSC0022479
caacaataaaata

SEQ ID NO: 89661 - DNA, 13 bp, Artificial Sequence
  Oligonucleotide for detection of SNP TSC0022479
tattttgttgttg

SEQ ID NO: 89662 - DNA, 13 bp, Artificial Sequence
  Oligonucleotide for detection of SNP TSC0022479
caacaacaaaata

SEQ ID NO: 89663 - DNA, 13 bp, Artificial Sequence
  Oligonucleotide for detection of SNP TSC0022479
tatttcgttgttg

SEQ ID NO: 89664 - DNA, 13 bp, Artificial Sequence
  Oligonucleotide for detection of SNP TSC0022479
caacaacgaaata

SEQ ID NO: 89665 - DNA, 13 bp, Artificial Sequence
  Oligonucleotide for detection of SNP TSC0022479
tagtagtgagatg

SEQ ID NO: 89666 - DNA, 13 bp, Artificial Sequence
  Oligonucleotide for detection of SNP TSC0022479
catctcactacta

SEQ ID NO: 89667 - DNA, 13 bp, Artificial Sequence
  Oligonucleotide for detection of SNP TSC0022479
tagtagcgagatg

SEQ ID NO: 89668 - DNA, 13 bp, Artificial Sequence
  Oligonucleotide for detection of SNP TSC0022479
catctcgctacta

SEQ ID NO: 89669 - DNA, 13 bp, Artificial Sequence
  Oligonucleotide for detection of SNP TSC0022482
ttttttggtgaat

SEQ ID NO: 89670 - DNA, 13 bp, Artificial Sequence
  Oligonucleotide for detection of SNP TSC0022482
attcaccaaaaaa

SEQ ID NO: 89671 - DNA, 13 bp, Artificial Sequence
  Oligonucleotide for detection of SNP TSC0022482
ttttttagtgaat

SEQ ID NO: 89672 - DNA, 13 bp, Artificial Sequence
  Oligonucleotide for detection of SNP TSC0022482
attcactaaaaaa

SEQ ID NO: 89673 - DNA, 13 bp, Artificial Sequence
  Oligonucleotide for detection of SNP TSC0022483
atattaattatat

SEQ ID NO: 89674 - DNA, 13 bp, Artificial Sequence
  Oligonucleotide for detection of SNP TSC0022483
atataattaatat

SEQ ID NO: 89675 - DNA, 13 bp, Artificial Sequence
  Oligonucleotide for detection of SNP TSC0022483
atattagttatat

SEQ ID NO: 89676 - DNA, 13 bp, Artificial Sequence
  Oligonucleotide for detection of SNP TSC0022483
atataactaatat

SEQ ID NO: 89677 - DNA, 13 bp, Artificial Sequence
  Oligonucleotide for detection of SNP TSC0022484
gaggatatttttt

SEQ ID NO: 89678 - DNA, 13 bp, Artificial Sequence
  Oligonucleotide for detection of SNP TSC0022484
aaaaaatatcctc

SEQ ID NO: 89679 - DNA, 13 bp, Artificial Sequence
  Oligonucleotide for detection of SNP TSC0022484
gaggatttttttt

SEQ ID NO: 89680 - DNA, 13 bp, Artificial Sequence
  Oligonucleotide for detection of SNP TSC0022484
aaaaaaaatcctc

SEQ ID NO: 89681 - DNA, 13 bp, Artificial Sequence
  Oligonucleotide for detection of SNP TSC0022484
aagggatatttty

SEQ ID NO: 89682 - DNA, 13 bp, Artificial Sequence
  Oligonucleotide for detection of SNP TSC0022484
raaaatatccctt

SEQ ID NO: 89683 - DNA, 13 bp, Artificial Sequence
  Oligonucleotide for detection of SNP TSC0022484
aagggaaatttty

SEQ ID NO: 89684 - DNA, 13 bp, Artificial Sequence
  Oligonucleotide for detection of SNP TSC0022484
raaaatttccctt

SEQ ID NO: 89685 - DNA, 13 bp, Artificial Sequence
  Oligonucleotide for detection of SNP TSC0022485
atttcgattttty

SEQ ID NO: 89686 - DNA, 13 bp, Artificial Sequence
  Oligonucleotide for detection of SNP TSC0022485
raaaaatcgaaat

SEQ ID NO: 89687 - DNA, 13 bp, Artificial Sequence
  Oligonucleotide for detection of SNP TSC0022489
tttagtaattgga

SEQ ID NO: 89688 - DNA, 13 bp, Artificial Sequence
  Oligonucleotide for detection of SNP TSC0022489
tccaattactaaa

SEQ ID NO: 89689 - DNA, 13 bp, Artificial Sequence
  Oligonucleotide for detection of SNP TSC0022489
tttagtgattgga

SEQ ID NO: 89690 - DNA, 13 bp, Artificial Sequence
  Oligonucleotide for detection of SNP TSC0022489
tccaatcactaaa

SEQ ID NO: 89691 - DNA, 13 bp, Artificial Sequence
  Oligonucleotide for detection of SNP TSC0022489
tttagcgattgga

SEQ ID NO: 89692 - DNA, 13 bp, Artificial Sequence
  Oligonucleotide for detection of SNP TSC0022489
tccaatcgctaaa

SEQ ID NO: 89693 - DNA, 13 bp, Artificial Sequence
  Oligonucleotide for detection of SNP TSC0022489
tttagttgttggg

SEQ ID NO: 89694 - DNA, 13 bp, Artificial Sequence
  Oligonucleotide for detection of SNP TSC0022489
cccaacaactaaa

SEQ ID NO: 89695 - DNA, 13 bp, Artificial Sequence
  Oligonucleotide for detection of SNP TSC0022489
tttagtcgttggg

SEQ ID NO: 89696 - DNA, 13 bp, Artificial Sequence
  Oligonucleotide for detection of SNP TSC0022489
cccaacgactaaa

SEQ ID NO: 89697 - DNA, 13 bp, Artificial Sequence
  Oligonucleotide for detection of SNP TSC0022490
gggtattgtaggt

SEQ ID NO: 89698 - DNA, 13 bp, Artificial Sequence
  Oligonucleotide for detection of SNP TSC0022490
acctacaataccc

SEQ ID NO: 89699 - DNA, 13 bp, Artificial Sequence
  Oligonucleotide for detection of SNP TSC0022490
gggtatcgtaggt

SEQ ID NO: 89700 - DNA, 13 bp, Artificial Sequence
  Oligonucleotide for detection of SNP TSC0022490
acctacgataccc

SEQ ID NO: 89701 - DNA, 13 bp, Artificial Sequence
  Oligonucleotide for detection of SNP TSC0022490
atttgtggtgtty

SEQ ID NO: 89702 - DNA, 13 bp, Artificial Sequence
  Oligonucleotide for detection of SNP TSC0022490
raacaccacaaat

SEQ ID NO: 89703 - DNA, 13 bp, Artificial Sequence
  Oligonucleotide for detection of SNP TSC0022490
atttgtagtgtty

SEQ ID NO: 89704 - DNA, 13 bp, Artificial Sequence
  Oligonucleotide for detection of SNP TSC0022490
raacactacaaat

SEQ ID NO: 89705 - DNA, 13 bp, Artificial Sequence
  Oligonucleotide for detection of SNP TSC0022490
atttgcggtgtty

SEQ ID NO: 89706 - DNA, 13 bp, Artificial Sequence
  Oligonucleotide for detection of SNP TSC0022490
raacaccgcaaat

SEQ ID NO: 89707 - DNA, 13 bp, Artificial Sequence
  Oligonucleotide for detection of SNP TSC0022491
attgagatttttt

SEQ ID NO: 89708 - DNA, 13 bp, Artificial Sequence
  Oligonucleotide for detection of SNP TSC0022491
aaaaaatctcaat

SEQ ID NO: 89709 - DNA, 13 bp, Artificial Sequence
  Oligonucleotide for detection of SNP TSC0022491
attgaggtttttt

SEQ ID NO: 89710 - DNA, 13 bp, Artificial Sequence
  Oligonucleotide for detection of SNP TSC0022491
aaaaaacctcaat

SEQ ID NO: 89711 - DNA, 13 bp, Artificial Sequence
  Oligonucleotide for detection of SNP TSC0022491
atcgagatttttt

SEQ ID NO: 89712 - DNA, 13 bp, Artificial Sequence
  Oligonucleotide for detection of SNP TSC0022491
aaaaaatctcgat

SEQ ID NO: 89713 - DNA, 13 bp, Artificial Sequence
  Oligonucleotide for detection of SNP TSC0022491
atcgaggtttttt

SEQ ID NO: 89714 - DNA, 13 bp, Artificial Sequence
  Oligonucleotide for detection of SNP TSC0022491
aaaaaacctcgat

SEQ ID NO: 89715 - DNA, 13 bp, Artificial Sequence
  Oligonucleotide for detection of SNP TSC0022492
ggttgggggatta

SEQ ID NO: 89716 - DNA, 13 bp, Artificial Sequence
  Oligonucleotide for detection of SNP TSC0022492
taatcccccaacc

SEQ ID NO: 89717 - DNA, 13 bp, Artificial Sequence
  Oligonucleotide for detection of SNP TSC0022492
ggttggaggatta

SEQ ID NO: 89718 - DNA, 13 bp, Artificial Sequence
  Oligonucleotide for detection of SNP TSC0022492
taatcctccaacc

SEQ ID NO: 89719 - DNA, 13 bp, Artificial Sequence
  Oligonucleotide for detection of SNP TSC0022492
ggtcgggggatta

SEQ ID NO: 89720 - DNA, 13 bp, Artificial Sequence
  Oligonucleotide for detection of SNP TSC0022492
taatcccccgacc

SEQ ID NO: 89721 - DNA, 13 bp, Artificial Sequence
  Oligonucleotide for detection of SNP TSC0022492
ggtcggaggatta

SEQ ID NO: 89722 - DNA, 13 bp, Artificial Sequence
  Oligonucleotide for detection of SNP TSC0022492
taatcctccgacc

SEQ ID NO: 89723 - DNA, 13 bp, Artificial Sequence
  Oligonucleotide for detection of SNP TSC0022493
ttaatagttgaaa

SEQ ID NO: 89724 - DNA, 13 bp, Artificial Sequence
  Oligonucleotide for detection of SNP TSC0022493
tttcaactattaa

SEQ ID NO: 89725 - DNA, 13 bp, Artificial Sequence
  Oligonucleotide for detection of SNP TSC0022493
ttaataattgaaa

SEQ ID NO: 89726 - DNA, 13 bp, Artificial Sequence
  Oligonucleotide for detection of SNP TSC0022493
tttcaattattaa

SEQ ID NO: 89727 - DNA, 13 bp, Artificial Sequence
  Oligonucleotide for detection of SNP TSC0022494
tatttatgtagtt

SEQ ID NO: 89728 - DNA, 13 bp, Artificial Sequence
  Oligonucleotide for detection of SNP TSC0022494
aactacataaata

SEQ ID NO: 89729 - DNA, 13 bp, Artificial Sequence
  Oligonucleotide for detection of SNP TSC0022494
tatttacgtagtt

SEQ ID NO: 89730 - DNA, 13 bp, Artificial Sequence
  Oligonucleotide for detection of SNP TSC0022494
aactacgtaaata

SEQ ID NO: 89731 - DNA, 13 bp, Artificial Sequence
  Oligonucleotide for detection of SNP TSC0022494
agttgtgtgagtg

SEQ ID NO: 89732 - DNA, 13 bp, Artificial Sequence
  Oligonucleotide for detection of SNP TSC0022494
cactcacacaact

SEQ ID NO: 89733 - DNA, 13 bp, Artificial Sequence
  Oligonucleotide for detection of SNP TSC0022494
agttgtatgagtg

SEQ ID NO: 89734 - DNA, 13 bp, Artificial Sequence
  Oligonucleotide for detection of SNP TSC0022494
cactcatacaact

SEQ ID NO: 89735 - DNA, 13 bp, Artificial Sequence
  Oligonucleotide for detection of SNP TSC0022494
agttgcgtgagtg

SEQ ID NO: 89736 - DNA, 13 bp, Artificial Sequence
  Oligonucleotide for detection of SNP TSC0022494
cactcacgcaact

SEQ ID NO: 89737 - DNA, 13 bp, Artificial Sequence
  Oligonucleotide for detection of SNP TSC0022495
tgtggatggtagg

SEQ ID NO: 89738 - DNA, 13 bp, Artificial Sequence
  Oligonucleotide for detection of SNP TSC0022495
cctaccatccaca

SEQ ID NO: 89739 - DNA, 13 bp, Artificial Sequence
  Oligonucleotide for detection of SNP TSC0022495
cgtggatggtagg

SEQ ID NO: 89740 - DNA, 13 bp, Artificial Sequence
  Oligonucleotide for detection of SNP TSC0022495
cctaccatccacg

SEQ ID NO: 89741 - DNA, 13 bp, Artificial Sequence
  Oligonucleotide for detection of SNP TSC0022495
tgtggacggtagg

SEQ ID NO: 89742 - DNA, 13 bp, Artificial Sequence
  Oligonucleotide for detection of SNP TSC0022495
cctaccgtccaca

SEQ ID NO: 89743 - DNA, 13 bp, Artificial Sequence
  Oligonucleotide for detection of SNP TSC0022495
cgtggacggtagg

SEQ ID NO: 89744 - DNA, 13 bp, Artificial Sequence
  Oligonucleotide for detection of SNP TSC0022495
cctaccgtccacg

SEQ ID NO: 89745 - DNA, 13 bp, Artificial Sequence
  Oligonucleotide for detection of SNP TSC0022495
tttgttgtttatg

SEQ ID NO: 89746 - DNA, 13 bp, Artificial Sequence
  Oligonucleotide for detection of SNP TSC0022495
cataaacaacaaa

SEQ ID NO: 89747 - DNA, 13 bp, Artificial Sequence
  Oligonucleotide for detection of SNP TSC0022495
tttgttatttatg

SEQ ID NO: 89748 - DNA, 13 bp, Artificial Sequence
  Oligonucleotide for detection of SNP TSC0022495
cataaataacaaa

SEQ ID NO: 89749 - DNA, 13 bp, Artificial Sequence
  Oligonucleotide for detection of SNP TSC0022495
tttgtcgtttatg

SEQ ID NO: 89750 - DNA, 13 bp, Artificial Sequence
  Oligonucleotide for detection of SNP TSC0022495
cataaacgacaaa

SEQ ID NO: 89751 - DNA, 13 bp, Artificial Sequence
  Oligonucleotide for detection of SNP TSC0022495
tttgttatttacg

SEQ ID NO: 89752 - DNA, 13 bp, Artificial Sequence
  Oligonucleotide for detection of SNP TSC0022495
cgtaaataacaaa

SEQ ID NO: 89753 - DNA, 13 bp, Artificial Sequence
  Oligonucleotide for detection of SNP TSC0022495
tttgttgtttacg

SEQ ID NO: 89754 - DNA, 13 bp, Artificial Sequence
  Oligonucleotide for detection of SNP TSC0022495
cgtaaacaacaaa

SEQ ID NO: 89755 - DNA, 13 bp, Artificial Sequence
  Oligonucleotide for detection of SNP TSC0022495
tttgtcgtttacg

SEQ ID NO: 89756 - DNA, 13 bp, Artificial Sequence
  Oligonucleotide for detection of SNP TSC0022495
cgtaaacgacaaa

SEQ ID NO: 89757 - DNA, 13 bp, Artificial Sequence
  Oligonucleotide for detection of SNP TSC0022496
gtttgtagatata

SEQ ID NO: 89758 - DNA, 13 bp, Artificial Sequence
  Oligonucleotide for detection of SNP TSC0022496
tatatctacaaac

SEQ ID NO: 89759 - DNA, 13 bp, Artificial Sequence
  Oligonucleotide for detection of SNP TSC0022496
gtttgtggatata

SEQ ID NO: 89760 - DNA, 13 bp, Artificial Sequence
  Oligonucleotide for detection of SNP TSC0022496
tatatccacaaac

SEQ ID NO: 89761 - DNA, 13 bp, Artificial Sequence
  Oligonucleotide for detection of SNP TSC0022496
gtttgcggatata

SEQ ID NO: 89762 - DNA, 13 bp, Artificial Sequence
  Oligonucleotide for detection of SNP TSC0022496
tatatccgcaaac

SEQ ID NO: 89763 - DNA, 13 bp, Artificial Sequence
  Oligonucleotide for detection of SNP TSC0022496
tgtgtttgtaggy

SEQ ID NO: 89764 - DNA, 13 bp, Artificial Sequence
  Oligonucleotide for detection of SNP TSC0022496
rcctacaaacaca

SEQ ID NO: 89765 - DNA, 13 bp, Artificial Sequence
  Oligonucleotide for detection of SNP TSC0022496
tgtgttcgtaggy

SEQ ID NO: 89766 - DNA, 13 bp, Artificial Sequence
  Oligonucleotide for detection of SNP TSC0022496
rcctacgaacaca

SEQ ID NO: 89767 - DNA, 13 bp, Artificial Sequence
  Oligonucleotide for detection of SNP TSC0022497
ggagttaataatt

SEQ ID NO: 89768 - DNA, 13 bp, Artificial Sequence
  Oligonucleotide for detection of SNP TSC0022497
aattattaactcc

SEQ ID NO: 89769 - DNA, 13 bp, Artificial Sequence
  Oligonucleotide for detection of SNP TSC0022497
ggagtttataatt

SEQ ID NO: 89770 - DNA, 13 bp, Artificial Sequence
  Oligonucleotide for detection of SNP TSC0022497
aattataaactcc

SEQ ID NO: 89771 - DNA, 13 bp, Artificial Sequence
  Oligonucleotide for detection of SNP TSC0022497
agttattaattty

SEQ ID NO: 89772 - DNA, 13 bp, Artificial Sequence
  Oligonucleotide for detection of SNP TSC0022497
raaattaataact

SEQ ID NO: 89773 - DNA, 13 bp, Artificial Sequence
  Oligonucleotide for detection of SNP TSC0022497
agttatgaattty

SEQ ID NO: 89774 - DNA, 13 bp, Artificial Sequence
  Oligonucleotide for detection of SNP TSC0022497
raaattcataact

SEQ ID NO: 89775 - DNA, 13 bp, Artificial Sequence
  Oligonucleotide for detection of SNP TSC0022505
gattaagaataaa

SEQ ID NO: 89776 - DNA, 13 bp, Artificial Sequence
  Oligonucleotide for detection of SNP TSC0022505
tttattcttaatc

SEQ ID NO: 89777 - DNA, 13 bp, Artificial Sequence
  Oligonucleotide for detection of SNP TSC0022505
gattaataataaa

SEQ ID NO: 89778 - DNA, 13 bp, Artificial Sequence
  Oligonucleotide for detection of SNP TSC0022505
tttattattaatc

SEQ ID NO: 89779 - DNA, 13 bp, Artificial Sequence
  Oligonucleotide for detection of SNP TSC0022505
tttgtttttgaty

SEQ ID NO: 89780 - DNA, 13 bp, Artificial Sequence
  Oligonucleotide for detection of SNP TSC0022505
ratcaaaaacaaa

SEQ ID NO: 89781 - DNA, 13 bp, Artificial Sequence
  Oligonucleotide for detection of SNP TSC0022505
tttgttattgaty

SEQ ID NO: 89782 - DNA, 13 bp, Artificial Sequence
  Oligonucleotide for detection of SNP TSC0022505
ratcaataacaaa

SEQ ID NO: 89783 - DNA, 13 bp, Artificial Sequence
  Oligonucleotide for detection of SNP TSC0022506
tattagattgttt

SEQ ID NO: 89784 - DNA, 13 bp, Artificial Sequence
  Oligonucleotide for detection of SNP TSC0022506
aaacaatctaata

SEQ ID NO: 89785 - DNA, 13 bp, Artificial Sequence
  Oligonucleotide for detection of SNP TSC0022506
tattaggttgttt

SEQ ID NO: 89786 - DNA, 13 bp, Artificial Sequence
  Oligonucleotide for detection of SNP TSC0022506
aaacaacctaata

SEQ ID NO: 89787 - DNA, 13 bp, Artificial Sequence
  Oligonucleotide for detection of SNP TSC0022507
aagttagattttt

SEQ ID NO: 89788 - DNA, 13 bp, Artificial Sequence
  Oligonucleotide for detection of SNP TSC0022507
aaaaatctaactt

SEQ ID NO: 89789 - DNA, 13 bp, Artificial Sequence
  Oligonucleotide for detection of SNP TSC0022507
aagttatattttt

SEQ ID NO: 89790 - DNA, 13 bp, Artificial Sequence
  Oligonucleotide for detection of SNP TSC0022507
aaaaatataactt

SEQ ID NO: 89791 - DNA, 13 bp, Artificial Sequence
  Oligonucleotide for detection of SNP TSC0022507
agagatttaattt

SEQ ID NO: 89792 - DNA, 13 bp, Artificial Sequence
  Oligonucleotide for detection of SNP TSC0022507
aaattaaatctct

SEQ ID NO: 89793 - DNA, 13 bp, Artificial Sequence
  Oligonucleotide for detection of SNP TSC0022507
agagatataattt

SEQ ID NO: 89794 - DNA, 13 bp, Artificial Sequence
  Oligonucleotide for detection of SNP TSC0022507
aaattatatctct

SEQ ID NO: 89795 - DNA, 13 bp, Artificial Sequence
  Oligonucleotide for detection of SNP TSC0022508
gttagtgggttat

SEQ ID NO: 89796 - DNA, 13 bp, Artificial Sequence
  Oligonucleotide for detection of SNP TSC0022508
ataacccactaac

SEQ ID NO: 89797 - DNA, 13 bp, Artificial Sequence
  Oligonucleotide for detection of SNP TSC0022508
gttagtaggttat

SEQ ID NO: 89798 - DNA, 13 bp, Artificial Sequence
  Oligonucleotide for detection of SNP TSC0022508
ataacctactaac

SEQ ID NO: 89799 - DNA, 13 bp, Artificial Sequence
  Oligonucleotide for detection of SNP TSC0022509
tagggtggagtgg

SEQ ID NO: 89800 - DNA, 13 bp, Artificial Sequence
  Oligonucleotide for detection of SNP TSC0022509
ccactccacccta

SEQ ID NO: 89801 - DNA, 13 bp, Artificial Sequence
  Oligonucleotide for detection of SNP TSC0022509
tagggtagagtgg

SEQ ID NO: 89802 - DNA, 13 bp, Artificial Sequence
  Oligonucleotide for detection of SNP TSC0022509
ccactctacccta

SEQ ID NO: 89803 - DNA, 13 bp, Artificial Sequence
  Oligonucleotide for detection of SNP TSC0022509
tagggcggagtgg

SEQ ID NO: 89804 - DNA, 13 bp, Artificial Sequence
  Oligonucleotide for detection of SNP TSC0022509
ccactccgcccta

SEQ ID NO: 89805 - DNA, 13 bp, Artificial Sequence
  Oligonucleotide for detection of SNP TSC0022510
tatgtatgtatay

SEQ ID NO: 89806 - DNA, 13 bp, Artificial Sequence
  Oligonucleotide for detection of SNP TSC0022510
rtatacatacata

SEQ ID NO: 89807 - DNA, 13 bp, Artificial Sequence
  Oligonucleotide for detection of SNP TSC0022510
tatgtacgtatay

SEQ ID NO: 89808 - DNA, 13 bp, Artificial Sequence
  Oligonucleotide for detection of SNP TSC0022510
rtatacgtacata

SEQ ID NO: 89809 - DNA, 13 bp, Artificial Sequence
  Oligonucleotide for detection of SNP TSC0022510
gtgtatgtgtatg

SEQ ID NO: 89810 - DNA, 13 bp, Artificial Sequence
  Oligonucleotide for detection of SNP TSC0022510
catacacatacac

SEQ ID NO: 89811 - DNA, 13 bp, Artificial Sequence
  Oligonucleotide for detection of SNP TSC0022510
gtgtatatgtatg

SEQ ID NO: 89812 - DNA, 13 bp, Artificial Sequence
  Oligonucleotide for detection of SNP TSC0022510
catacatatacac

SEQ ID NO: 89813 - DNA, 13 bp, Artificial Sequence
  Oligonucleotide for detection of SNP TSC0022510
gtgtacgtgtatg

SEQ ID NO: 89814 - DNA, 13 bp, Artificial Sequence
  Oligonucleotide for detection of SNP TSC0022510
catacacgtacac

SEQ ID NO: 89815 - DNA, 13 bp, Artificial Sequence
  Oligonucleotide for detection of SNP TSC0022511
ggattaatgaagt

SEQ ID NO: 89816 - DNA, 13 bp, Artificial Sequence
  Oligonucleotide for detection of SNP TSC0022511
acttcattaatcc

SEQ ID NO: 89817 - DNA, 13 bp, Artificial Sequence
  Oligonucleotide for detection of SNP TSC0022511
ggattagtgaagt

SEQ ID NO: 89818 - DNA, 13 bp, Artificial Sequence
  Oligonucleotide for detection of SNP TSC0022511
acttcactaatcc

SEQ ID NO: 89819 - DNA, 13 bp, Artificial Sequence
  Oligonucleotide for detection of SNP TSC0022511
ggattaacgaagt

SEQ ID NO: 89820 - DNA, 13 bp, Artificial Sequence
  Oligonucleotide for detection of SNP TSC0022511
acttcgttaatcc

SEQ ID NO: 89821 - DNA, 13 bp, Artificial Sequence
  Oligonucleotide for detection of SNP TSC0022511
ggattagcgaagt

SEQ ID NO: 89822 - DNA, 13 bp, Artificial Sequence
  Oligonucleotide for detection of SNP TSC0022511
acttcgctaatcc

SEQ ID NO: 89823 - DNA, 13 bp, Artificial Sequence
  Oligonucleotide for detection of SNP TSC0022512
ttaatggtattgt

SEQ ID NO: 89824 - DNA, 13 bp, Artificial Sequence
  Oligonucleotide for detection of SNP TSC0022512
acaataccattaa

SEQ ID NO: 89825 - DNA, 13 bp, Artificial Sequence
  Oligonucleotide for detection of SNP TSC0022512
ttaatgatattgt

SEQ ID NO: 89826 - DNA, 13 bp, Artificial Sequence
  Oligonucleotide for detection of SNP TSC0022512
acaatatcattaa

SEQ ID NO: 89827 - DNA, 13 bp, Artificial Sequence
  Oligonucleotide for detection of SNP TSC0022513
atatttatttgta

SEQ ID NO: 89828 - DNA, 13 bp, Artificial Sequence
  Oligonucleotide for detection of SNP TSC0022513
tacaaataaatat

SEQ ID NO: 89829 - DNA, 13 bp, Artificial Sequence
  Oligonucleotide for detection of SNP TSC0022513
atatttgtttgta

SEQ ID NO: 89830 - DNA, 13 bp, Artificial Sequence
  Oligonucleotide for detection of SNP TSC0022513
tacaaacaaatat

SEQ ID NO: 89831 - DNA, 13 bp, Artificial Sequence
  Oligonucleotide for detection of SNP TSC0022513
atattcgtttgta

SEQ ID NO: 89832 - DNA, 13 bp, Artificial Sequence
  Oligonucleotide for detection of SNP TSC0022513
tacaaacgaatat

SEQ ID NO: 89833 - DNA, 13 bp, Artificial Sequence
  Oligonucleotide for detection of SNP TSC0022513
tgtaggtgggtgt

SEQ ID NO: 89834 - DNA, 13 bp, Artificial Sequence
  Oligonucleotide for detection of SNP TSC0022513
acacccacctaca

SEQ ID NO: 89835 - DNA, 13 bp, Artificial Sequence
  Oligonucleotide for detection of SNP TSC0022513
tgtaggcgggtgt

SEQ ID NO: 89836 - DNA, 13 bp, Artificial Sequence
  Oligonucleotide for detection of SNP TSC0022513
acacccgcctaca

SEQ ID NO: 89837 - DNA, 13 bp, Artificial Sequence
  Oligonucleotide for detection of SNP TSC0022514
agatagaagaaty

SEQ ID NO: 89838 - DNA, 13 bp, Artificial Sequence
  Oligonucleotide for detection of SNP TSC0022514
rattcttctatct

SEQ ID NO: 89839 - DNA, 13 bp, Artificial Sequence
  Oligonucleotide for detection of SNP TSC0022514
agataggagaaty

SEQ ID NO: 89840 - DNA, 13 bp, Artificial Sequence
  Oligonucleotide for detection of SNP TSC0022514
rattctcctatct

SEQ ID NO: 89841 - DNA, 13 bp, Artificial Sequence
  Oligonucleotide for detection of SNP TSC0022515
aagaattgtttga

SEQ ID NO: 89842 - DNA, 13 bp, Artificial Sequence
  Oligonucleotide for detection of SNP TSC0022515
tcaaacaattctt

SEQ ID NO: 89843 - DNA, 13 bp, Artificial Sequence
  Oligonucleotide for detection of SNP TSC0022515
aagaatggtttga

SEQ ID NO: 89844 - DNA, 13 bp, Artificial Sequence
  Oligonucleotide for detection of SNP TSC0022515
tcaaaccattctt

SEQ ID NO: 89845 - DNA, 13 bp, Artificial Sequence
  Oligonucleotide for detection of SNP TSC0022515
aagaatcgtttga

SEQ ID NO: 89846 - DNA, 13 bp, Artificial Sequence
  Oligonucleotide for detection of SNP TSC0022515
tcaaacgattctt

SEQ ID NO: 89847 - DNA, 13 bp, Artificial Sequence
  Oligonucleotide for detection of SNP TSC0022515
ttaagtgattttt

SEQ ID NO: 89848 - DNA, 13 bp, Artificial Sequence
  Oligonucleotide for detection of SNP TSC0022515
aaaaatcacttaa

SEQ ID NO: 89849 - DNA, 13 bp, Artificial Sequence
  Oligonucleotide for detection of SNP TSC0022515
ttaagttattttt

SEQ ID NO: 89850 - DNA, 13 bp, Artificial Sequence
  Oligonucleotide for detection of SNP TSC0022515
aaaaataacttaa

SEQ ID NO: 89851 - DNA, 13 bp, Artificial Sequence
  Oligonucleotide for detection of SNP TSC0022515
ttaagcgattttt

SEQ ID NO: 89852 - DNA, 13 bp, Artificial Sequence
  Oligonucleotide for detection of SNP TSC0022515
aaaaatcgcttaa

SEQ ID NO: 89853 - DNA, 13 bp, Artificial Sequence
  Oligonucleotide for detection of SNP TSC0022516
ttttaagataaty

SEQ ID NO: 89854 - DNA, 13 bp, Artificial Sequence
  Oligonucleotide for detection of SNP TSC0022516
rattatcttaaaa

SEQ ID NO: 89855 - DNA, 13 bp, Artificial Sequence
  Oligonucleotide for detection of SNP TSC0022516
ttttaaaataaty

SEQ ID NO: 89856 - DNA, 13 bp, Artificial Sequence
  Oligonucleotide for detection of SNP TSC0022516
rattattttaaaa

SEQ ID NO: 89857 - DNA, 13 bp, Artificial Sequence
  Oligonucleotide for detection of SNP TSC0022519
tgaatttgtttty

SEQ ID NO: 89858 - DNA, 13 bp, Artificial Sequence
  Oligonucleotide for detection of SNP TSC0022519
raaaacaaattca

SEQ ID NO: 89859 - DNA, 13 bp, Artificial Sequence
  Oligonucleotide for detection of SNP TSC0022519
tgaattcgtttty

SEQ ID NO: 89860 - DNA, 13 bp, Artificial Sequence
  Oligonucleotide for detection of SNP TSC0022519
raaaacgaattca

SEQ ID NO: 89861 - DNA, 13 bp, Artificial Sequence
  Oligonucleotide for detection of SNP TSC0022520
tttaagataaagt

SEQ ID NO: 89862 - DNA, 13 bp, Artificial Sequence
  Oligonucleotide for detection of SNP TSC0022520
actttatcttaaa

SEQ ID NO: 89863 - DNA, 13 bp, Artificial Sequence
  Oligonucleotide for detection of SNP TSC0022520
tttaaggtaaagt

SEQ ID NO: 89864 - DNA, 13 bp, Artificial Sequence
  Oligonucleotide for detection of SNP TSC0022520
actttaccttaaa

SEQ ID NO: 89865 - DNA, 13 bp, Artificial Sequence
  Oligonucleotide for detection of SNP TSC0022521
ttttttttaagta

SEQ ID NO: 89866 - DNA, 13 bp, Artificial Sequence
  Oligonucleotide for detection of SNP TSC0022521
tacttaaaaaaaa

SEQ ID NO: 89867 - DNA, 13 bp, Artificial Sequence
  Oligonucleotide for detection of SNP TSC0022521
ttttttgtaagta

SEQ ID NO: 89868 - DNA, 13 bp, Artificial Sequence
  Oligonucleotide for detection of SNP TSC0022521
tacttacaaaaaa

SEQ ID NO: 89869 - DNA, 13 bp, Artificial Sequence
  Oligonucleotide for detection of SNP TSC0022521
tatttggaagaaa

SEQ ID NO: 89870 - DNA, 13 bp, Artificial Sequence
  Oligonucleotide for detection of SNP TSC0022521
tttcttccaaata

SEQ ID NO: 89871 - DNA, 13 bp, Artificial Sequence
  Oligonucleotide for detection of SNP TSC0022521
tatttgtaagaaa

SEQ ID NO: 89872 - DNA, 13 bp, Artificial Sequence
  Oligonucleotide for detection of SNP TSC0022521
tttcttacaaata

SEQ ID NO: 89873 - DNA, 13 bp, Artificial Sequence
  Oligonucleotide for detection of SNP TSC0022522
aaaattgtaggaa

SEQ ID NO: 89874 - DNA, 13 bp, Artificial Sequence
  Oligonucleotide for detection of SNP TSC0022522
ttcctacaatttt

SEQ ID NO: 89875 - DNA, 13 bp, Artificial Sequence
  Oligonucleotide for detection of SNP TSC0022522
aaaattttaggaa

SEQ ID NO: 89876 - DNA, 13 bp, Artificial Sequence
  Oligonucleotide for detection of SNP TSC0022522
ttcctaaaatttt

SEQ ID NO: 89877 - DNA, 13 bp, Artificial Sequence
  Oligonucleotide for detection of SNP TSC0022522
aaaatcgtaggaa

SEQ ID NO: 89878 - DNA, 13 bp, Artificial Sequence
  Oligonucleotide for detection of SNP TSC0022522
ttcctacgatttt

SEQ ID NO: 89879 - DNA, 13 bp, Artificial Sequence
  Oligonucleotide for detection of SNP TSC0022522
tttttgtggtttt

SEQ ID NO: 89880 - DNA, 13 bp, Artificial Sequence
  Oligonucleotide for detection of SNP TSC0022522
aaaaccacaaaaa

SEQ ID NO: 89881 - DNA, 13 bp, Artificial Sequence
  Oligonucleotide for detection of SNP TSC0022522
tttttgaggtttt

SEQ ID NO: 89882 - DNA, 13 bp, Artificial Sequence
  Oligonucleotide for detection of SNP TSC0022522
aaaacctcaaaaa

SEQ ID NO: 89883 - DNA, 13 bp, Artificial Sequence
  Oligonucleotide for detection of SNP TSC0022522
tttttgcggtttt

SEQ ID NO: 89884 - DNA, 13 bp, Artificial Sequence
  Oligonucleotide for detection of SNP TSC0022522
aaaaccgcaaaaa

SEQ ID NO: 89885 - DNA, 13 bp, Artificial Sequence
  Oligonucleotide for detection of SNP TSC0022526
gggaaatgggatg

SEQ ID NO: 89886 - DNA, 13 bp, Artificial Sequence
  Oligonucleotide for detection of SNP TSC0022526
catcccatttccc

SEQ ID NO: 89887 - DNA, 13 bp, Artificial Sequence
  Oligonucleotide for detection of SNP TSC0022526
gggaaaagggatg

SEQ ID NO: 89888 - DNA, 13 bp, Artificial Sequence
  Oligonucleotide for detection of SNP TSC0022526
catcccttttccc

SEQ ID NO: 89889 - DNA, 13 bp, Artificial Sequence
  Oligonucleotide for detection of SNP TSC0022527
gtgtagagttgtg

SEQ ID NO: 89890 - DNA, 13 bp, Artificial Sequence
  Oligonucleotide for detection of SNP TSC0022527
cacaactctacac

SEQ ID NO: 89891 - DNA, 13 bp, Artificial Sequence
  Oligonucleotide for detection of SNP TSC0022527
gtgtagggttgtg

SEQ ID NO: 89892 - DNA, 13 bp, Artificial Sequence
  Oligonucleotide for detection of SNP TSC0022527
cacaaccctacac

SEQ ID NO: 89893 - DNA, 13 bp, Artificial Sequence
  Oligonucleotide for detection of SNP TSC0022528
taagaaataagta

SEQ ID NO: 89894 - DNA, 13 bp, Artificial Sequence
  Oligonucleotide for detection of SNP TSC0022528
tacttatttctta

SEQ ID NO: 89895 - DNA, 13 bp, Artificial Sequence
  Oligonucleotide for detection of SNP TSC0022528
taagaagtaagta

SEQ ID NO: 89896 - DNA, 13 bp, Artificial Sequence
  Oligonucleotide for detection of SNP TSC0022528
tacttacttctta

SEQ ID NO: 89897 - DNA, 13 bp, Artificial Sequence
  Oligonucleotide for detection of SNP TSC0022529
ggtgggtggatta

SEQ ID NO: 89898 - DNA, 13 bp, Artificial Sequence
  Oligonucleotide for detection of SNP TSC0022529
taatccacccacc

SEQ ID NO: 89899 - DNA, 13 bp, Artificial Sequence
  Oligonucleotide for detection of SNP TSC0022529
ggtgggcggatta

SEQ ID NO: 89900 - DNA, 13 bp, Artificial Sequence
  Oligonucleotide for detection of SNP TSC0022529
taatccgcccacc

SEQ ID NO: 89901 - DNA, 13 bp, Artificial Sequence
  Oligonucleotide for detection of SNP TSC0022530
ataaaattatgga

SEQ ID NO: 89902 - DNA, 13 bp, Artificial Sequence
  Oligonucleotide for detection of SNP TSC0022530
tccataattttat

SEQ ID NO: 89903 - DNA, 13 bp, Artificial Sequence
  Oligonucleotide for detection of SNP TSC0022530
ataaaagtatgga

SEQ ID NO: 89904 - DNA, 13 bp, Artificial Sequence
  Oligonucleotide for detection of SNP TSC0022530
tccatacttttat

SEQ ID NO: 89905 - DNA, 13 bp, Artificial Sequence
  Oligonucleotide for detection of SNP TSC0022531
aattttatttata

SEQ ID NO: 89906 - DNA, 13 bp, Artificial Sequence
  Oligonucleotide for detection of SNP TSC0022531
tataaataaaatt

SEQ ID NO: 89907 - DNA, 13 bp, Artificial Sequence
  Oligonucleotide for detection of SNP TSC0022531
aattttttttata

SEQ ID NO: 89908 - DNA, 13 bp, Artificial Sequence
  Oligonucleotide for detection of SNP TSC0022531
tataaaaaaaatt

SEQ ID NO: 89909 - DNA, 13 bp, Artificial Sequence
  Oligonucleotide for detection of SNP TSC0022531
tataaatagaatt

SEQ ID NO: 89910 - DNA, 13 bp, Artificial Sequence
  Oligonucleotide for detection of SNP TSC0022531
aattctatttata

SEQ ID NO: 89911 - DNA, 13 bp, Artificial Sequence
  Oligonucleotide for detection of SNP TSC0022531
tataaaaagaatt

SEQ ID NO: 89912 - DNA, 13 bp, Artificial Sequence
  Oligonucleotide for detection of SNP TSC0022531
aattctttttata

SEQ ID NO: 89913 - DNA, 13 bp, Artificial Sequence
  Oligonucleotide for detection of SNP TSC0022534
taaaatgtgaaga

SEQ ID NO: 89914 - DNA, 13 bp, Artificial Sequence
  Oligonucleotide for detection of SNP TSC0022534
tcttcacatttta

SEQ ID NO: 89915 - DNA, 13 bp, Artificial Sequence
  Oligonucleotide for detection of SNP TSC0022534
taaaatatgaaga

SEQ ID NO: 89916 - DNA, 13 bp, Artificial Sequence
  Oligonucleotide for detection of SNP TSC0022534
tcttcatatttta

SEQ ID NO: 89917 - DNA, 13 bp, Artificial Sequence
  Oligonucleotide for detection of SNP TSC0022534
taaaacgtgaaga

SEQ ID NO: 89918 - DNA, 13 bp, Artificial Sequence
  Oligonucleotide for detection of SNP TSC0022534
tcttcacgtttta

SEQ ID NO: 89919 - DNA, 13 bp, Artificial Sequence
  Oligonucleotide for detection of SNP TSC0022535
atttttttgtagy

SEQ ID NO: 89920 - DNA, 13 bp, Artificial Sequence
  Oligonucleotide for detection of SNP TSC0022535
rctacaaaaaaat

SEQ ID NO: 89921 - DNA, 13 bp, Artificial Sequence
  Oligonucleotide for detection of SNP TSC0022535
atttttgtgtagy

SEQ ID NO: 89922 - DNA, 13 bp, Artificial Sequence
  Oligonucleotide for detection of SNP TSC0022535
rctacacaaaaat

SEQ ID NO: 89923 - DNA, 13 bp, Artificial Sequence
  Oligonucleotide for detection of SNP TSC0022535
gttgtagaagagt

SEQ ID NO: 89924 - DNA, 13 bp, Artificial Sequence
  Oligonucleotide for detection of SNP TSC0022535
actcttctacaac

SEQ ID NO: 89925 - DNA, 13 bp, Artificial Sequence
  Oligonucleotide for detection of SNP TSC0022535
gttgtataagagt

SEQ ID NO: 89926 - DNA, 13 bp, Artificial Sequence
  Oligonucleotide for detection of SNP TSC0022535
actcttatacaac

SEQ ID NO: 89927 - DNA, 13 bp, Artificial Sequence
  Oligonucleotide for detection of SNP TSC0022537
ttaataaggatat

SEQ ID NO: 89928 - DNA, 13 bp, Artificial Sequence
  Oligonucleotide for detection of SNP TSC0022537
atatccttattaa

SEQ ID NO: 89929 - DNA, 13 bp, Artificial Sequence
  Oligonucleotide for detection of SNP TSC0022537
ttaatagggatat

SEQ ID NO: 89930 - DNA, 13 bp, Artificial Sequence
  Oligonucleotide for detection of SNP TSC0022537
atatccctattaa

SEQ ID NO: 89931 - DNA, 13 bp, Artificial Sequence
  Oligonucleotide for detection of SNP TSC0022538
ggttttggtttga

SEQ ID NO: 89932 - DNA, 13 bp, Artificial Sequence
  Oligonucleotide for detection of SNP TSC0022538
tcaaaccaaaacc

SEQ ID NO: 89933 - DNA, 13 bp, Artificial Sequence
  Oligonucleotide for detection of SNP TSC0022538
ggtttttgtttga

SEQ ID NO: 89934 - DNA, 13 bp, Artificial Sequence
  Oligonucleotide for detection of SNP TSC0022538
tcaaacaaaaacc

SEQ ID NO: 89935 - DNA, 13 bp, Artificial Sequence
  Oligonucleotide for detection of SNP TSC0022538
ggtttcggtttga

SEQ ID NO: 89936 - DNA, 13 bp, Artificial Sequence
  Oligonucleotide for detection of SNP TSC0022538
tcaaaccgaaacc

SEQ ID NO: 89937 - DNA, 13 bp, Artificial Sequence
  Oligonucleotide for detection of SNP TSC0022538
ttagattggagty

SEQ ID NO: 89938 - DNA, 13 bp, Artificial Sequence
  Oligonucleotide for detection of SNP TSC0022538
ractccaatctaa

SEQ ID NO: 89939 - DNA, 13 bp, Artificial Sequence
  Oligonucleotide for detection of SNP TSC0022538
ttagataggagty

SEQ ID NO: 89940 - DNA, 13 bp, Artificial Sequence
  Oligonucleotide for detection of SNP TSC0022538
ractcctatctaa

SEQ ID NO: 89941 - DNA, 13 bp, Artificial Sequence
  Oligonucleotide for detection of SNP TSC0022538
ttagatcggagty

SEQ ID NO: 89942 - DNA, 13 bp, Artificial Sequence
  Oligonucleotide for detection of SNP TSC0022538
ractccgatctaa

SEQ ID NO: 89943 - DNA, 13 bp, Artificial Sequence
  Oligonucleotide for detection of SNP TSC0022540
atgtggtggtaty

SEQ ID NO: 89944 - DNA, 13 bp, Artificial Sequence
  Oligonucleotide for detection of SNP TSC0022540
rataccaccacat

SEQ ID NO: 89945 - DNA, 13 bp, Artificial Sequence
  Oligonucleotide for detection of SNP TSC0022540
atgtggcggtaty

SEQ ID NO: 89946 - DNA, 13 bp, Artificial Sequence
  Oligonucleotide for detection of SNP TSC0022540
rataccgccacat

SEQ ID NO: 89947 - DNA, 13 bp, Artificial Sequence
  Oligonucleotide for detection of SNP TSC0022540
gatgttgttatat

SEQ ID NO: 89948 - DNA, 13 bp, Artificial Sequence
  Oligonucleotide for detection of SNP TSC0022540
atataacaacatc

SEQ ID NO: 89949 - DNA, 13 bp, Artificial Sequence
  Oligonucleotide for detection of SNP TSC0022540
gatgttattatat

SEQ ID NO: 89950 - DNA, 13 bp, Artificial Sequence
  Oligonucleotide for detection of SNP TSC0022540
atataataacatc

SEQ ID NO: 89951 - DNA, 13 bp, Artificial Sequence
  Oligonucleotide for detection of SNP TSC0022540
gatgtcgttatat

SEQ ID NO: 89952 - DNA, 13 bp, Artificial Sequence
  Oligonucleotide for detection of SNP TSC0022540
atataacgacatc

SEQ ID NO: 89953 - DNA, 13 bp, Artificial Sequence
  Oligonucleotide for detection of SNP TSC0022541
tgtggtggtatty

SEQ ID NO: 89954 - DNA, 13 bp, Artificial Sequence
  Oligonucleotide for detection of SNP TSC0022541
raataccaccaca

SEQ ID NO: 89955 - DNA, 13 bp, Artificial Sequence
  Oligonucleotide for detection of SNP TSC0022541
tgtggttgtatty

SEQ ID NO: 89956 - DNA, 13 bp, Artificial Sequence
  Oligonucleotide for detection of SNP TSC0022541
raatacaaccaca

SEQ ID NO: 89957 - DNA, 13 bp, Artificial Sequence
  Oligonucleotide for detection of SNP TSC0022541
tgtggcggtatty

SEQ ID NO: 89958 - DNA, 13 bp, Artificial Sequence
  Oligonucleotide for detection of SNP TSC0022541
raataccgccaca

SEQ ID NO: 89959 - DNA, 13 bp, Artificial Sequence
  Oligonucleotide for detection of SNP TSC0022541
ggatgttgttata

SEQ ID NO: 89960 - DNA, 13 bp, Artificial Sequence
  Oligonucleotide for detection of SNP TSC0022541
tataacaacatcc

SEQ ID NO: 89961 - DNA, 13 bp, Artificial Sequence
  Oligonucleotide for detection of SNP TSC0022541
ggatgtagttata

SEQ ID NO: 89962 - DNA, 13 bp, Artificial Sequence
  Oligonucleotide for detection of SNP TSC0022541
tataactacatcc

SEQ ID NO: 89963 - DNA, 13 bp, Artificial Sequence
  Oligonucleotide for detection of SNP TSC0022541
ggatgtcgttata

SEQ ID NO: 89964 - DNA, 13 bp, Artificial Sequence
  Oligonucleotide for detection of SNP TSC0022541
tataacgacatcc

SEQ ID NO: 89965 - DNA, 13 bp, Artificial Sequence
  Oligonucleotide for detection of SNP TSC0022542
ttttagatgattg

SEQ ID NO: 89966 - DNA, 13 bp, Artificial Sequence
  Oligonucleotide for detection of SNP TSC0022542
caatcatctaaaa

SEQ ID NO: 89967 - DNA, 13 bp, Artificial Sequence
  Oligonucleotide for detection of SNP TSC0022542
ttttaggtgattg

SEQ ID NO: 89968 - DNA, 13 bp, Artificial Sequence
  Oligonucleotide for detection of SNP TSC0022542
caatcacctaaaa

SEQ ID NO: 89969 - DNA, 13 bp, Artificial Sequence
  Oligonucleotide for detection of SNP TSC0022542
ttttagatgatcg

SEQ ID NO: 89970 - DNA, 13 bp, Artificial Sequence
  Oligonucleotide for detection of SNP TSC0022542
cgatcatctaaaa

SEQ ID NO: 89971 - DNA, 13 bp, Artificial Sequence
  Oligonucleotide for detection of SNP TSC0022542
ttttaggtgatcg

SEQ ID NO: 89972 - DNA, 13 bp, Artificial Sequence
  Oligonucleotide for detection of SNP TSC0022542
cgatcacctaaaa

SEQ ID NO: 89973 - DNA, 13 bp, Artificial Sequence
  Oligonucleotide for detection of SNP TSC0022543
agggtatggtgty

SEQ ID NO: 89974 - DNA, 13 bp, Artificial Sequence
  Oligonucleotide for detection of SNP TSC0022543
racaccataccct

SEQ ID NO: 89975 - DNA, 13 bp, Artificial Sequence
  Oligonucleotide for detection of SNP TSC0022543
agggtagggtgty

SEQ ID NO: 89976 - DNA, 13 bp, Artificial Sequence
  Oligonucleotide for detection of SNP TSC0022543
racaccctaccct

SEQ ID NO: 89977 - DNA, 13 bp, Artificial Sequence
  Oligonucleotide for detection of SNP TSC0022543
agggtacggtgty

SEQ ID NO: 89978 - DNA, 13 bp, Artificial Sequence
  Oligonucleotide for detection of SNP TSC0022543
racaccgtaccct

SEQ ID NO: 89979 - DNA, 13 bp, Artificial Sequence
  Oligonucleotide for detection of SNP TSC0022543
gatattgtgtttt

SEQ ID NO: 89980 - DNA, 13 bp, Artificial Sequence
  Oligonucleotide for detection of SNP TSC0022543
aaaacacaatatc

SEQ ID NO: 89981 - DNA, 13 bp, Artificial Sequence
  Oligonucleotide for detection of SNP TSC0022543
gatattttgtttt

SEQ ID NO: 89982 - DNA, 13 bp, Artificial Sequence
  Oligonucleotide for detection of SNP TSC0022543
aaaacaaaatatc

SEQ ID NO: 89983 - DNA, 13 bp, Artificial Sequence
  Oligonucleotide for detection of SNP TSC0022543
gatatcgtgtttt

SEQ ID NO: 89984 - DNA, 13 bp, Artificial Sequence
  Oligonucleotide for detection of SNP TSC0022543
aaaacacgatatc

SEQ ID NO: 89985 - DNA, 13 bp, Artificial Sequence
  Oligonucleotide for detection of SNP TSC0022544
taaatgtattgat

SEQ ID NO: 89986 - DNA, 13 bp, Artificial Sequence
  Oligonucleotide for detection of SNP TSC0022544
atcaatacattta

SEQ ID NO: 89987 - DNA, 13 bp, Artificial Sequence
  Oligonucleotide for detection of SNP TSC0022544
taaatggattgat

SEQ ID NO: 89988 - DNA, 13 bp, Artificial Sequence
  Oligonucleotide for detection of SNP TSC0022544
atcaatccattta

SEQ ID NO: 89989 - DNA, 13 bp, Artificial Sequence
  Oligonucleotide for detection of SNP TSC0022544
attagtgtatttg

SEQ ID NO: 89990 - DNA, 13 bp, Artificial Sequence
  Oligonucleotide for detection of SNP TSC0022544
caaatacactaat

SEQ ID NO: 89991 - DNA, 13 bp, Artificial Sequence
  Oligonucleotide for detection of SNP TSC0022544
attagtttatttg

SEQ ID NO: 89992 - DNA, 13 bp, Artificial Sequence
  Oligonucleotide for detection of SNP TSC0022544
caaataaactaat

SEQ ID NO: 89993 - DNA, 13 bp, Artificial Sequence
  Oligonucleotide for detection of SNP TSC0022547
gtatagatatgta

SEQ ID NO: 89994 - DNA, 13 bp, Artificial Sequence
  Oligonucleotide for detection of SNP TSC0022547
tacatatctatac

SEQ ID NO: 89995 - DNA, 13 bp, Artificial Sequence
  Oligonucleotide for detection of SNP TSC0022547
gtataggtatgta

SEQ ID NO: 89996 - DNA, 13 bp, Artificial Sequence
  Oligonucleotide for detection of SNP TSC0022547
tacatacctatac

SEQ ID NO: 89997 - DNA, 13 bp, Artificial Sequence
  Oligonucleotide for detection of SNP TSC0022550
taagagaggtagg

SEQ ID NO: 89998 - DNA, 13 bp, Artificial Sequence
  Oligonucleotide for detection of SNP TSC0022550
cctacctctctta

SEQ ID NO: 89999 - DNA, 13 bp, Artificial Sequence
  Oligonucleotide for detection of SNP TSC0022550
taagaggggtagg

SEQ ID NO: 90000 - DNA, 13 bp, Artificial Sequence
  Oligonucleotide for detection of SNP TSC0022550
cctacccctctta

SEQ ID NO: 90001 - DNA, 13 bp, Artificial Sequence
  Oligonucleotide for detection of SNP TSC0022559
tattgtaaggatg

SEQ ID NO: 90002 - DNA, 13 bp, Artificial Sequence
  Oligonucleotide for detection of SNP TSC0022559
catccttacaata

SEQ ID NO: 90003 - DNA, 13 bp, Artificial Sequence
  Oligonucleotide for detection of SNP TSC0022559
tattgtgaggatg

SEQ ID NO: 90004 - DNA, 13 bp, Artificial Sequence
  Oligonucleotide for detection of SNP TSC0022559
catcctcacaata

SEQ ID NO: 90005 - DNA, 13 bp, Artificial Sequence
  Oligonucleotide for detection of SNP TSC0022559
tattgcgaggatg

SEQ ID NO: 90006 - DNA, 13 bp, Artificial Sequence
  Oligonucleotide for detection of SNP TSC0022559
catcctcgcaata

SEQ ID NO: 90007 - DNA, 13 bp, Artificial Sequence
  Oligonucleotide for detection of SNP TSC0022559
tatttttgtagtg

SEQ ID NO: 90008 - DNA, 13 bp, Artificial Sequence
  Oligonucleotide for detection of SNP TSC0022559
cactacaaaaata

SEQ ID NO: 90009 - DNA, 13 bp, Artificial Sequence
  Oligonucleotide for detection of SNP TSC0022559
tattttcgtagtg

SEQ ID NO: 90010 - DNA, 13 bp, Artificial Sequence
  Oligonucleotide for detection of SNP TSC0022559
cactacgaaaata

SEQ ID NO: 90011 - DNA, 13 bp, Artificial Sequence
  Oligonucleotide for detection of SNP TSC0022560
taggttattgttg

SEQ ID NO: 90012 - DNA, 13 bp, Artificial Sequence
  Oligonucleotide for detection of SNP TSC0022560
caacaataaccta

SEQ ID NO: 90013 - DNA, 13 bp, Artificial Sequence
  Oligonucleotide for detection of SNP TSC0022560
taggttgttgttg

SEQ ID NO: 90014 - DNA, 13 bp, Artificial Sequence
  Oligonucleotide for detection of SNP TSC0022560
caacaacaaccta

SEQ ID NO: 90015 - DNA, 13 bp, Artificial Sequence
  Oligonucleotide for detection of SNP TSC0022560
taggtcgttgttg

SEQ ID NO: 90016 - DNA, 13 bp, Artificial Sequence
  Oligonucleotide for detection of SNP TSC0022560
caacaacgaccta

SEQ ID NO: 90017 - DNA, 13 bp, Artificial Sequence
  Oligonucleotide for detection of SNP TSC0022560
tagtaatgatttg

SEQ ID NO: 90018 - DNA, 13 bp, Artificial Sequence
  Oligonucleotide for detection of SNP TSC0022560
caaatcattacta

SEQ ID NO: 90019 - DNA, 13 bp, Artificial Sequence
  Oligonucleotide for detection of SNP TSC0022560
tagtaacgatttg

SEQ ID NO: 90020 - DNA, 13 bp, Artificial Sequence
  Oligonucleotide for detection of SNP TSC0022560
caaatcgttacta

SEQ ID NO: 90021 - DNA, 13 bp, Artificial Sequence
  Oligonucleotide for detection of SNP TSC0022562
atgtggatgttty

SEQ ID NO: 90022 - DNA, 13 bp, Artificial Sequence
  Oligonucleotide for detection of SNP TSC0022562
raaacatccacat

SEQ ID NO: 90023 - DNA, 13 bp, Artificial Sequence
  Oligonucleotide for detection of SNP TSC0022563
atttttggttgta

SEQ ID NO: 90024 - DNA, 13 bp, Artificial Sequence
  Oligonucleotide for detection of SNP TSC0022563
tacaaccaaaaat

SEQ ID NO: 90025 - DNA, 13 bp, Artificial Sequence
  Oligonucleotide for detection of SNP TSC0022563
atttttagttgta

SEQ ID NO: 90026 - DNA, 13 bp, Artificial Sequence
  Oligonucleotide for detection of SNP TSC0022563
tacaactaaaaat

SEQ ID NO: 90027 - DNA, 13 bp, Artificial Sequence
  Oligonucleotide for detection of SNP TSC0022563
atttttggtcgta

SEQ ID NO: 90028 - DNA, 13 bp, Artificial Sequence
  Oligonucleotide for detection of SNP TSC0022563
tacgaccaaaaat

SEQ ID NO: 90029 - DNA, 13 bp, Artificial Sequence
  Oligonucleotide for detection of SNP TSC0022563
atttttagtcgta

SEQ ID NO: 90030 - DNA, 13 bp, Artificial Sequence
  Oligonucleotide for detection of SNP TSC0022563
tacgactaaaaat

SEQ ID NO: 90031 - DNA, 13 bp, Artificial Sequence
  Oligonucleotide for detection of SNP TSC0022568
tgataggtatttg

SEQ ID NO: 90032 - DNA, 13 bp, Artificial Sequence
  Oligonucleotide for detection of SNP TSC0022568
caaatacctatca

SEQ ID NO: 90033 - DNA, 13 bp, Artificial Sequence
  Oligonucleotide for detection of SNP TSC0022568
tgatagatatttg

SEQ ID NO: 90034 - DNA, 13 bp, Artificial Sequence
  Oligonucleotide for detection of SNP TSC0022568
caaatatctatca

SEQ ID NO: 90035 - DNA, 13 bp, Artificial Sequence
  Oligonucleotide for detection of SNP TSC0022571
taggtgggttaty

SEQ ID NO: 90036 - DNA, 13 bp, Artificial Sequence
  Oligonucleotide for detection of SNP TSC0022571
rataacccaccta

SEQ ID NO: 90037 - DNA, 13 bp, Artificial Sequence
  Oligonucleotide for detection of SNP TSC0022571
taggtgtgttaty

SEQ ID NO: 90038 - DNA, 13 bp, Artificial Sequence
  Oligonucleotide for detection of SNP TSC0022571
rataacacaccta

SEQ ID NO: 90039 - DNA, 13 bp, Artificial Sequence
  Oligonucleotide for detection of SNP TSC0022571
ggtaatttatttg

SEQ ID NO: 90040 - DNA, 13 bp, Artificial Sequence
  Oligonucleotide for detection of SNP TSC0022571
caaataaattacc

SEQ ID NO: 90041 - DNA, 13 bp, Artificial Sequence
  Oligonucleotide for detection of SNP TSC0022571
ggtaatatatttg

SEQ ID NO: 90042 - DNA, 13 bp, Artificial Sequence
  Oligonucleotide for detection of SNP TSC0022571
caaatatattacc

SEQ ID NO: 90043 - DNA, 13 bp, Artificial Sequence
  Oligonucleotide for detection of SNP TSC0022572
atatatattttta

SEQ ID NO: 90044 - DNA, 13 bp, Artificial Sequence
  Oligonucleotide for detection of SNP TSC0022572
taaaaatatatat

SEQ ID NO: 90045 - DNA, 13 bp, Artificial Sequence
  Oligonucleotide for detection of SNP TSC0022572
tagggatgtatgt

SEQ ID NO: 90046 - DNA, 13 bp, Artificial Sequence
  Oligonucleotide for detection of SNP TSC0022572
acatacatcccta

SEQ ID NO: 90047 - DNA, 13 bp, Artificial Sequence
  Oligonucleotide for detection of SNP TSC0022572
tagggaggtatgt

SEQ ID NO: 90048 - DNA, 13 bp, Artificial Sequence
  Oligonucleotide for detection of SNP TSC0022572
acatacctcccta

SEQ ID NO: 90049 - DNA, 13 bp, Artificial Sequence
  Oligonucleotide for detection of SNP TSC0022575
aatatatggtgay

SEQ ID NO: 90050 - DNA, 13 bp, Artificial Sequence
  Oligonucleotide for detection of SNP TSC0022575
rtcaccatatatt

SEQ ID NO: 90051 - DNA, 13 bp, Artificial Sequence
  Oligonucleotide for detection of SNP TSC0022575
aatatacggtgay

SEQ ID NO: 90052 - DNA, 13 bp, Artificial Sequence
  Oligonucleotide for detection of SNP TSC0022575
rtcaccgtatatt

SEQ ID NO: 90053 - DNA, 13 bp, Artificial Sequence
  Oligonucleotide for detection of SNP TSC0022575
gttattgtatgtt

SEQ ID NO: 90054 - DNA, 13 bp, Artificial Sequence
  Oligonucleotide for detection of SNP TSC0022575
aacatacaataac

SEQ ID NO: 90055 - DNA, 13 bp, Artificial Sequence
  Oligonucleotide for detection of SNP TSC0022575
gttattatatgtt

SEQ ID NO: 90056 - DNA, 13 bp, Artificial Sequence
  Oligonucleotide for detection of SNP TSC0022575
aacatataataac

SEQ ID NO: 90057 - DNA, 13 bp, Artificial Sequence
  Oligonucleotide for detection of SNP TSC0022575
gttatcgtatgtt

SEQ ID NO: 90058 - DNA, 13 bp, Artificial Sequence
  Oligonucleotide for detection of SNP TSC0022575
aacatacgataac

SEQ ID NO: 90059 - DNA, 13 bp, Artificial Sequence
  Oligonucleotide for detection of SNP TSC0022578
gtgatgagattgy

SEQ ID NO: 90060 - DNA, 13 bp, Artificial Sequence
  Oligonucleotide for detection of SNP TSC0022578
rcaatctcatcac

SEQ ID NO: 90061 - DNA, 13 bp, Artificial Sequence
  Oligonucleotide for detection of SNP TSC0022578
gtgatgggattgy

SEQ ID NO: 90062 - DNA, 13 bp, Artificial Sequence
  Oligonucleotide for detection of SNP TSC0022578
rcaatcccatcac

SEQ ID NO: 90063 - DNA, 13 bp, Artificial Sequence
  Oligonucleotide for detection of SNP TSC0022578
gtgacgagattgy

SEQ ID NO: 90064 - DNA, 13 bp, Artificial Sequence
  Oligonucleotide for detection of SNP TSC0022578
rcaatctcgtcac

SEQ ID NO: 90065 - DNA, 13 bp, Artificial Sequence
  Oligonucleotide for detection of SNP TSC0022578
gtgacgggattgy

SEQ ID NO: 90066 - DNA, 13 bp, Artificial Sequence
  Oligonucleotide for detection of SNP TSC0022578
rcaatcccgtcac

SEQ ID NO: 90067 - DNA, 13 bp, Artificial Sequence
  Oligonucleotide for detection of SNP TSC0022579
gttattagtgtty

SEQ ID NO: 90068 - DNA, 13 bp, Artificial Sequence
  Oligonucleotide for detection of SNP TSC0022579
raacactaataac

SEQ ID NO: 90069 - DNA, 13 bp, Artificial Sequence
  Oligonucleotide for detection of SNP TSC0022579
gttattggtgtty

SEQ ID NO: 90070 - DNA, 13 bp, Artificial Sequence
  Oligonucleotide for detection of SNP TSC0022579
raacaccaataac

SEQ ID NO: 90071 - DNA, 13 bp, Artificial Sequence
  Oligonucleotide for detection of SNP TSC0022579
gttatcggtgtty

SEQ ID NO: 90072 - DNA, 13 bp, Artificial Sequence
  Oligonucleotide for detection of SNP TSC0022579
raacaccgataac

SEQ ID NO: 90073 - DNA, 13 bp, Artificial Sequence
  Oligonucleotide for detection of SNP TSC0022579
gagtattgatggy

SEQ ID NO: 90074 - DNA, 13 bp, Artificial Sequence
  Oligonucleotide for detection of SNP TSC0022579
rccatcaatactc

SEQ ID NO: 90075 - DNA, 13 bp, Artificial Sequence
  Oligonucleotide for detection of SNP TSC0022579
gagtatcgatggy

SEQ ID NO: 90076 - DNA, 13 bp, Artificial Sequence
  Oligonucleotide for detection of SNP TSC0022579
rccatcgatactc

SEQ ID NO: 90077 - DNA, 13 bp, Artificial Sequence
  Oligonucleotide for detection of SNP TSC0022580
ttttttttaattg

SEQ ID NO: 90078 - DNA, 13 bp, Artificial Sequence
  Oligonucleotide for detection of SNP TSC0022580
caattaaaaaaaa

SEQ ID NO: 90079 - DNA, 13 bp, Artificial Sequence
  Oligonucleotide for detection of SNP TSC0022580
ttttttgtaattg

SEQ ID NO: 90080 - DNA, 13 bp, Artificial Sequence
  Oligonucleotide for detection of SNP TSC0022580
caattacaaaaaa

SEQ ID NO: 90081 - DNA, 13 bp, Artificial Sequence
  Oligonucleotide for detection of SNP TSC0022580
ttttttttaatcg

SEQ ID NO: 90082 - DNA, 13 bp, Artificial Sequence
  Oligonucleotide for detection of SNP TSC0022580
cgattaaaaaaaa

SEQ ID NO: 90083 - DNA, 13 bp, Artificial Sequence
  Oligonucleotide for detection of SNP TSC0022580
tttttcgtaattg

SEQ ID NO: 90084 - DNA, 13 bp, Artificial Sequence
  Oligonucleotide for detection of SNP TSC0022580
caattacgaaaaa

SEQ ID NO: 90085 - DNA, 13 bp, Artificial Sequence
  Oligonucleotide for detection of SNP TSC0022580
ttttttgtaatcg

SEQ ID NO: 90086 - DNA, 13 bp, Artificial Sequence
  Oligonucleotide for detection of SNP TSC0022580
cgattacaaaaaa

SEQ ID NO: 90087 - DNA, 13 bp, Artificial Sequence
  Oligonucleotide for detection of SNP TSC0022580
tttttcgtaatcg

SEQ ID NO: 90088 - DNA, 13 bp, Artificial Sequence
  Oligonucleotide for detection of SNP TSC0022580
cgattacgaaaaa

SEQ ID NO: 90089 - DNA, 13 bp, Artificial Sequence
  Oligonucleotide for detection of SNP TSC0022580
tggttggggggag

SEQ ID NO: 90090 - DNA, 13 bp, Artificial Sequence
  Oligonucleotide for detection of SNP TSC0022580
ctccccccaacca

SEQ ID NO: 90091 - DNA, 13 bp, Artificial Sequence
  Oligonucleotide for detection of SNP TSC0022580
tggttgtggggag

SEQ ID NO: 90092 - DNA, 13 bp, Artificial Sequence
  Oligonucleotide for detection of SNP TSC0022580
ctccccacaacca

SEQ ID NO: 90093 - DNA, 13 bp, Artificial Sequence
  Oligonucleotide for detection of SNP TSC0022580
cggttggggggag

SEQ ID NO: 90094 - DNA, 13 bp, Artificial Sequence
  Oligonucleotide for detection of SNP TSC0022580
ctccccccaaccg

SEQ ID NO: 90095 - DNA, 13 bp, Artificial Sequence
  Oligonucleotide for detection of SNP TSC0022580
cggttgtggggag

SEQ ID NO: 90096 - DNA, 13 bp, Artificial Sequence
  Oligonucleotide for detection of SNP TSC0022580
ctccccacaaccg

SEQ ID NO: 90097 - DNA, 13 bp, Artificial Sequence
  Oligonucleotide for detection of SNP TSC0022580
tggttgcggggag

SEQ ID NO: 90098 - DNA, 13 bp, Artificial Sequence
  Oligonucleotide for detection of SNP TSC0022580
ctccccgcaacca

SEQ ID NO: 90099 - DNA, 13 bp, Artificial Sequence
  Oligonucleotide for detection of SNP TSC0022580
cggttgcggggag

SEQ ID NO: 90100 - DNA, 13 bp, Artificial Sequence
  Oligonucleotide for detection of SNP TSC0022580
ctccccgcaaccg

SEQ ID NO: 90101 - DNA, 13 bp, Artificial Sequence
  Oligonucleotide for detection of SNP TSC0022581
ttgtaggagttta

SEQ ID NO: 90102 - DNA, 13 bp, Artificial Sequence
  Oligonucleotide for detection of SNP TSC0022581
taaactcctacaa

SEQ ID NO: 90103 - DNA, 13 bp, Artificial Sequence
  Oligonucleotide for detection of SNP TSC0022581
ttgtagaagttta

SEQ ID NO: 90104 - DNA, 13 bp, Artificial Sequence
  Oligonucleotide for detection of SNP TSC0022581
taaacttctacaa

SEQ ID NO: 90105 - DNA, 13 bp, Artificial Sequence
  Oligonucleotide for detection of SNP TSC0022582
tgtttttgttaaa

SEQ ID NO: 90106 - DNA, 13 bp, Artificial Sequence
  Oligonucleotide for detection of SNP TSC0022582
tttaacaaaaaca

SEQ ID NO: 90107 - DNA, 13 bp, Artificial Sequence
  Oligonucleotide for detection of SNP TSC0022582
tgttttcgttaaa

SEQ ID NO: 90108 - DNA, 13 bp, Artificial Sequence
  Oligonucleotide for detection of SNP TSC0022582
tttaacgaaaaca

SEQ ID NO: 90109 - DNA, 13 bp, Artificial Sequence
  Oligonucleotide for detection of SNP TSC0022582
tttgatggaagta

SEQ ID NO: 90110 - DNA, 13 bp, Artificial Sequence
  Oligonucleotide for detection of SNP TSC0022582
tacttccatcaaa

SEQ ID NO: 90111 - DNA, 13 bp, Artificial Sequence
  Oligonucleotide for detection of SNP TSC0022582
tttgatagaagta

SEQ ID NO: 90112 - DNA, 13 bp, Artificial Sequence
  Oligonucleotide for detection of SNP TSC0022582
tacttctatcaaa

SEQ ID NO: 90113 - DNA, 13 bp, Artificial Sequence
  Oligonucleotide for detection of SNP TSC0022582
tttgacggaagta

SEQ ID NO: 90114 - DNA, 13 bp, Artificial Sequence
  Oligonucleotide for detection of SNP TSC0022582
tacttccgtcaaa

SEQ ID NO: 90115 - DNA, 13 bp, Artificial Sequence
  Oligonucleotide for detection of SNP TSC0022583
aggggttggtttt

SEQ ID NO: 90116 - DNA, 13 bp, Artificial Sequence
  Oligonucleotide for detection of SNP TSC0022583
aaaaccaacccct

SEQ ID NO: 90117 - DNA, 13 bp, Artificial Sequence
  Oligonucleotide for detection of SNP TSC0022583
aggggtcggtttt

SEQ ID NO: 90118 - DNA, 13 bp, Artificial Sequence
  Oligonucleotide for detection of SNP TSC0022583
aaaaccgacccct

SEQ ID NO: 90119 - DNA, 13 bp, Artificial Sequence
  Oligonucleotide for detection of SNP TSC0022583
agaattggttttt

SEQ ID NO: 90120 - DNA, 13 bp, Artificial Sequence
  Oligonucleotide for detection of SNP TSC0022583
aaaaaccaattct

SEQ ID NO: 90121 - DNA, 13 bp, Artificial Sequence
  Oligonucleotide for detection of SNP TSC0022583
agaattagttttt

SEQ ID NO: 90122 - DNA, 13 bp, Artificial Sequence
  Oligonucleotide for detection of SNP TSC0022583
aaaaactaattct

SEQ ID NO: 90123 - DNA, 13 bp, Artificial Sequence
  Oligonucleotide for detection of SNP TSC0022583
agaatcggttttt

SEQ ID NO: 90124 - DNA, 13 bp, Artificial Sequence
  Oligonucleotide for detection of SNP TSC0022583
aaaaaccgattct

SEQ ID NO: 90125 - DNA, 13 bp, Artificial Sequence
  Oligonucleotide for detection of SNP TSC0022584
tattttaattttg

SEQ ID NO: 90126 - DNA, 13 bp, Artificial Sequence
  Oligonucleotide for detection of SNP TSC0022584
caaaattaaaata

SEQ ID NO: 90127 - DNA, 13 bp, Artificial Sequence
  Oligonucleotide for detection of SNP TSC0022585
aatttcgttttgt

SEQ ID NO: 90128 - DNA, 13 bp, Artificial Sequence
  Oligonucleotide for detection of SNP TSC0022585
acaaaacgaaatt

SEQ ID NO: 90129 - DNA, 13 bp, Artificial Sequence
  Oligonucleotide for detection of SNP TSC0022585
atagagtggggtt

SEQ ID NO: 90130 - DNA, 13 bp, Artificial Sequence
  Oligonucleotide for detection of SNP TSC0022585
aaccccactctat

SEQ ID NO: 90131 - DNA, 13 bp, Artificial Sequence
  Oligonucleotide for detection of SNP TSC0022585
atagagaggggtt

SEQ ID NO: 90132 - DNA, 13 bp, Artificial Sequence
  Oligonucleotide for detection of SNP TSC0022585
aacccctctctat

SEQ ID NO: 90133 - DNA, 13 bp, Artificial Sequence
  Oligonucleotide for detection of SNP TSC0022585
atagagcggggtt

SEQ ID NO: 90134 - DNA, 13 bp, Artificial Sequence
  Oligonucleotide for detection of SNP TSC0022585
aaccccgctctat

SEQ ID NO: 90135 - DNA, 13 bp, Artificial Sequence
  Oligonucleotide for detection of SNP TSC0022591
atagtatgtaggt

SEQ ID NO: 90136 - DNA, 13 bp, Artificial Sequence
  Oligonucleotide for detection of SNP TSC0022591
acctacatactat

SEQ ID NO: 90137 - DNA, 13 bp, Artificial Sequence
  Oligonucleotide for detection of SNP TSC0022591
atagtacgtaggt

SEQ ID NO: 90138 - DNA, 13 bp, Artificial Sequence
  Oligonucleotide for detection of SNP TSC0022591
acctacgtactat

SEQ ID NO: 90139 - DNA, 13 bp, Artificial Sequence
  Oligonucleotide for detection of SNP TSC0022591
atttgtgtgttgt

SEQ ID NO: 90140 - DNA, 13 bp, Artificial Sequence
  Oligonucleotide for detection of SNP TSC0022591
acaacacacaaat

SEQ ID NO: 90141 - DNA, 13 bp, Artificial Sequence
  Oligonucleotide for detection of SNP TSC0022591
atttgtatgttgt

SEQ ID NO: 90142 - DNA, 13 bp, Artificial Sequence
  Oligonucleotide for detection of SNP TSC0022591
acaacatacaaat

SEQ ID NO: 90143 - DNA, 13 bp, Artificial Sequence
  Oligonucleotide for detection of SNP TSC0022591
atttgcgtgttgt

SEQ ID NO: 90144 - DNA, 13 bp, Artificial Sequence
  Oligonucleotide for detection of SNP TSC0022591
acaacacgcaaat

SEQ ID NO: 90145 - DNA, 13 bp, Artificial Sequence
  Oligonucleotide for detection of SNP TSC0022593
aaataatttgggt

SEQ ID NO: 90146 - DNA, 13 bp, Artificial Sequence
  Oligonucleotide for detection of SNP TSC0022593
acccaaattattt

SEQ ID NO: 90147 - DNA, 13 bp, Artificial Sequence
  Oligonucleotide for detection of SNP TSC0022593
aaataagttgggt

SEQ ID NO: 90148 - DNA, 13 bp, Artificial Sequence
  Oligonucleotide for detection of SNP TSC0022593
acccaacttattt

SEQ ID NO: 90149 - DNA, 13 bp, Artificial Sequence
  Oligonucleotide for detection of SNP TSC0022593
atttaggttattt

SEQ ID NO: 90150 - DNA, 13 bp, Artificial Sequence
  Oligonucleotide for detection of SNP TSC0022593
aaataacctaaat

SEQ ID NO: 90151 - DNA, 13 bp, Artificial Sequence
  Oligonucleotide for detection of SNP TSC0022593
atttagtttattt

SEQ ID NO: 90152 - DNA, 13 bp, Artificial Sequence
  Oligonucleotide for detection of SNP TSC0022593
aaataaactaaat

SEQ ID NO: 90153 - DNA, 13 bp, Artificial Sequence
  Oligonucleotide for detection of SNP TSC0022594
tttgtagtttgty

SEQ ID NO: 90154 - DNA, 13 bp, Artificial Sequence
  Oligonucleotide for detection of SNP TSC0022594
racaaactacaaa

SEQ ID NO: 90155 - DNA, 13 bp, Artificial Sequence
  Oligonucleotide for detection of SNP TSC0022594
tttgtattttgty

SEQ ID NO: 90156 - DNA, 13 bp, Artificial Sequence
  Oligonucleotide for detection of SNP TSC0022594
racaaaatacaaa

SEQ ID NO: 90157 - DNA, 13 bp, Artificial Sequence
  Oligonucleotide for detection of SNP TSC0022594
gataggttgtaag

SEQ ID NO: 90158 - DNA, 13 bp, Artificial Sequence
  Oligonucleotide for detection of SNP TSC0022594
cttacaacctatc

SEQ ID NO: 90159 - DNA, 13 bp, Artificial Sequence
  Oligonucleotide for detection of SNP TSC0022594
gataggatgtaag

SEQ ID NO: 90160 - DNA, 13 bp, Artificial Sequence
  Oligonucleotide for detection of SNP TSC0022594
cttacatcctatc

SEQ ID NO: 90161 - DNA, 13 bp, Artificial Sequence
  Oligonucleotide for detection of SNP TSC0022597
agtgtaatggtay

SEQ ID NO: 90162 - DNA, 13 bp, Artificial Sequence
  Oligonucleotide for detection of SNP TSC0022597
rtaccattacact

SEQ ID NO: 90163 - DNA, 13 bp, Artificial Sequence
  Oligonucleotide for detection of SNP TSC0022597
agtgtagtggtay

SEQ ID NO: 90164 - DNA, 13 bp, Artificial Sequence
  Oligonucleotide for detection of SNP TSC0022597
rtaccactacact

SEQ ID NO: 90165 - DNA, 13 bp, Artificial Sequence
  Oligonucleotide for detection of SNP TSC0022598
ggtggtgggagty

SEQ ID NO: 90166 - DNA, 13 bp, Artificial Sequence
  Oligonucleotide for detection of SNP TSC0022598
ractcccaccacc

SEQ ID NO: 90167 - DNA, 13 bp, Artificial Sequence
  Oligonucleotide for detection of SNP TSC0022598
ggtggtaggagty

SEQ ID NO: 90168 - DNA, 13 bp, Artificial Sequence
  Oligonucleotide for detection of SNP TSC0022598
ractcctaccacc

SEQ ID NO: 90169 - DNA, 13 bp, Artificial Sequence
  Oligonucleotide for detection of SNP TSC0022598
ggtggcgggagty

SEQ ID NO: 90170 - DNA, 13 bp, Artificial Sequence
  Oligonucleotide for detection of SNP TSC0022598
ractcccgccacc

SEQ ID NO: 90171 - DNA, 13 bp, Artificial Sequence
  Oligonucleotide for detection of SNP TSC0022599
ttatgaagagtty

SEQ ID NO: 90172 - DNA, 13 bp, Artificial Sequence
  Oligonucleotide for detection of SNP TSC0022599
raactcttcataa

SEQ ID NO: 90173 - DNA, 13 bp, Artificial Sequence
  Oligonucleotide for detection of SNP TSC0022599
ttatgatgagtty

SEQ ID NO: 90174 - DNA, 13 bp, Artificial Sequence
  Oligonucleotide for detection of SNP TSC0022599
raactcatcataa

SEQ ID NO: 90175 - DNA, 13 bp, Artificial Sequence
  Oligonucleotide for detection of SNP TSC0022599
ttacgaagagtty

SEQ ID NO: 90176 - DNA, 13 bp, Artificial Sequence
  Oligonucleotide for detection of SNP TSC0022599
raactcttcgtaa

SEQ ID NO: 90177 - DNA, 13 bp, Artificial Sequence
  Oligonucleotide for detection of SNP TSC0022599
ttacgatgagtty

SEQ ID NO: 90178 - DNA, 13 bp, Artificial Sequence
  Oligonucleotide for detection of SNP TSC0022599
raactcatcgtaa

SEQ ID NO: 90179 - DNA, 13 bp, Artificial Sequence
  Oligonucleotide for detection of SNP TSC0022599
ttatgacgagtty

SEQ ID NO: 90180 - DNA, 13 bp, Artificial Sequence
  Oligonucleotide for detection of SNP TSC0022599
raactcgtcataa

SEQ ID NO: 90181 - DNA, 13 bp, Artificial Sequence
  Oligonucleotide for detection of SNP TSC0022599
ttacgacgagtty

SEQ ID NO: 90182 - DNA, 13 bp, Artificial Sequence
  Oligonucleotide for detection of SNP TSC0022599
raactcgtcgtaa

SEQ ID NO: 90183 - DNA, 13 bp, Artificial Sequence
  Oligonucleotide for detection of SNP TSC0022599
gaattttttgtag

SEQ ID NO: 90184 - DNA, 13 bp, Artificial Sequence
  Oligonucleotide for detection of SNP TSC0022599
ctacaaaaaattc

SEQ ID NO: 90185 - DNA, 13 bp, Artificial Sequence
  Oligonucleotide for detection of SNP TSC0022599
gaatttgttgtag

SEQ ID NO: 90186 - DNA, 13 bp, Artificial Sequence
  Oligonucleotide for detection of SNP TSC0022599
ctacaacaaattc

SEQ ID NO: 90187 - DNA, 13 bp, Artificial Sequence
  Oligonucleotide for detection of SNP TSC0022599
gaatttttcgtag

SEQ ID NO: 90188 - DNA, 13 bp, Artificial Sequence
  Oligonucleotide for detection of SNP TSC0022599
ctacgaaaaattc

SEQ ID NO: 90189 - DNA, 13 bp, Artificial Sequence
  Oligonucleotide for detection of SNP TSC0022599
gaattcgttgtag

SEQ ID NO: 90190 - DNA, 13 bp, Artificial Sequence
  Oligonucleotide for detection of SNP TSC0022599
ctacaacgaattc

SEQ ID NO: 90191 - DNA, 13 bp, Artificial Sequence
  Oligonucleotide for detection of SNP TSC0022599
gaatttgtcgtag

SEQ ID NO: 90192 - DNA, 13 bp, Artificial Sequence
  Oligonucleotide for detection of SNP TSC0022599
ctacgacaaattc

SEQ ID NO: 90193 - DNA, 13 bp, Artificial Sequence
  Oligonucleotide for detection of SNP TSC0022599
gaattcgtcgtag

SEQ ID NO: 90194 - DNA, 13 bp, Artificial Sequence
  Oligonucleotide for detection of SNP TSC0022599
ctacgacgaattc

SEQ ID NO: 90195 - DNA, 13 bp, Artificial Sequence
  Oligonucleotide for detection of SNP TSC0022602
agatttggtatga

SEQ ID NO: 90196 - DNA, 13 bp, Artificial Sequence
  Oligonucleotide for detection of SNP TSC0022602
tcataccaaatct

SEQ ID NO: 90197 - DNA, 13 bp, Artificial Sequence
  Oligonucleotide for detection of SNP TSC0022602
agattttgtatga

SEQ ID NO: 90198 - DNA, 13 bp, Artificial Sequence
  Oligonucleotide for detection of SNP TSC0022602
tcatacaaaatct

SEQ ID NO: 90199 - DNA, 13 bp, Artificial Sequence
  Oligonucleotide for detection of SNP TSC0022602
agattcggtatga

SEQ ID NO: 90200 - DNA, 13 bp, Artificial Sequence
  Oligonucleotide for detection of SNP TSC0022602
tcataccgaatct

SEQ ID NO: 90201 - DNA, 13 bp, Artificial Sequence
  Oligonucleotide for detection of SNP TSC0022602
ttatattgaattt

SEQ ID NO: 90202 - DNA, 13 bp, Artificial Sequence
  Oligonucleotide for detection of SNP TSC0022602
aaattcaatataa

SEQ ID NO: 90203 - DNA, 13 bp, Artificial Sequence
  Oligonucleotide for detection of SNP TSC0022602
ttatatagaattt

SEQ ID NO: 90204 - DNA, 13 bp, Artificial Sequence
  Oligonucleotide for detection of SNP TSC0022602
aaattctatataa

SEQ ID NO: 90205 - DNA, 13 bp, Artificial Sequence
  Oligonucleotide for detection of SNP TSC0022602
ttatatcgaattt

SEQ ID NO: 90206 - DNA, 13 bp, Artificial Sequence
  Oligonucleotide for detection of SNP TSC0022602
aaattcgatataa

SEQ ID NO: 90207 - DNA, 13 bp, Artificial Sequence
  Oligonucleotide for detection of SNP TSC0022603
ttaggatatttgg

SEQ ID NO: 90208 - DNA, 13 bp, Artificial Sequence
  Oligonucleotide for detection of SNP TSC0022603
ccaaatatcctaa

SEQ ID NO: 90209 - DNA, 13 bp, Artificial Sequence
  Oligonucleotide for detection of SNP TSC0022603
ttaggagatttgg

SEQ ID NO: 90210 - DNA, 13 bp, Artificial Sequence
  Oligonucleotide for detection of SNP TSC0022603
ccaaatctcctaa

SEQ ID NO: 90211 - DNA, 13 bp, Artificial Sequence
  Oligonucleotide for detection of SNP TSC0022603
ttaagtgttttga

SEQ ID NO: 90212 - DNA, 13 bp, Artificial Sequence
  Oligonucleotide for detection of SNP TSC0022603
tcaaaacacttaa

SEQ ID NO: 90213 - DNA, 13 bp, Artificial Sequence
  Oligonucleotide for detection of SNP TSC0022603
ttaagttttttga

SEQ ID NO: 90214 - DNA, 13 bp, Artificial Sequence
  Oligonucleotide for detection of SNP TSC0022603
tcaaaaaacttaa

SEQ ID NO: 90215 - DNA, 13 bp, Artificial Sequence
  Oligonucleotide for detection of SNP TSC0022606
aagtttgttaaat

SEQ ID NO: 90216 - DNA, 13 bp, Artificial Sequence
  Oligonucleotide for detection of SNP TSC0022606
atttaacaaactt

SEQ ID NO: 90217 - DNA, 13 bp, Artificial Sequence
  Oligonucleotide for detection of SNP TSC0022606
aagtttattaaat

SEQ ID NO: 90218 - DNA, 13 bp, Artificial Sequence
  Oligonucleotide for detection of SNP TSC0022606
atttaataaactt

SEQ ID NO: 90219 - DNA, 13 bp, Artificial Sequence
  Oligonucleotide for detection of SNP TSC0022608
atataggttagag

SEQ ID NO: 90220 - DNA, 13 bp, Artificial Sequence
  Oligonucleotide for detection of SNP TSC0022608
ctctaacctatat

SEQ ID NO: 90221 - DNA, 13 bp, Artificial Sequence
  Oligonucleotide for detection of SNP TSC0022608
atatagtttagag

SEQ ID NO: 90222 - DNA, 13 bp, Artificial Sequence
  Oligonucleotide for detection of SNP TSC0022608
ctctaaactatat

SEQ ID NO: 90223 - DNA, 13 bp, Artificial Sequence
  Oligonucleotide for detection of SNP TSC0022608
ttttagtttatgt

SEQ ID NO: 90224 - DNA, 13 bp, Artificial Sequence
  Oligonucleotide for detection of SNP TSC0022608
acataaactaaaa

SEQ ID NO: 90225 - DNA, 13 bp, Artificial Sequence
  Oligonucleotide for detection of SNP TSC0022608
ttttagattatgt

SEQ ID NO: 90226 - DNA, 13 bp, Artificial Sequence
  Oligonucleotide for detection of SNP TSC0022608
acataatctaaaa

SEQ ID NO: 90227 - DNA, 13 bp, Artificial Sequence
  Oligonucleotide for detection of SNP TSC0022609
taaatagttgaat

SEQ ID NO: 90228 - DNA, 13 bp, Artificial Sequence
  Oligonucleotide for detection of SNP TSC0022609
attcaactattta

SEQ ID NO: 90229 - DNA, 13 bp, Artificial Sequence
  Oligonucleotide for detection of SNP TSC0022609
taaatatttgaat

SEQ ID NO: 90230 - DNA, 13 bp, Artificial Sequence
  Oligonucleotide for detection of SNP TSC0022609
attcaaatattta

SEQ ID NO: 90231 - DNA, 13 bp, Artificial Sequence
  Oligonucleotide for detection of SNP TSC0022609
atttaattatttg

SEQ ID NO: 90232 - DNA, 13 bp, Artificial Sequence
  Oligonucleotide for detection of SNP TSC0022609
caaataattaaat

SEQ ID NO: 90233 - DNA, 13 bp, Artificial Sequence
  Oligonucleotide for detection of SNP TSC0022609
atttaaatatttg

SEQ ID NO: 90234 - DNA, 13 bp, Artificial Sequence
  Oligonucleotide for detection of SNP TSC0022609
caaatatttaaat

SEQ ID NO: 90235 - DNA, 13 bp, Artificial Sequence
  Oligonucleotide for detection of SNP TSC0022610
ttaggagttttag

SEQ ID NO: 90236 - DNA, 13 bp, Artificial Sequence
  Oligonucleotide for detection of SNP TSC0022610
ctaaaactcctaa

SEQ ID NO: 90237 - DNA, 13 bp, Artificial Sequence
  Oligonucleotide for detection of SNP TSC0022610
ttaggaattttag

SEQ ID NO: 90238 - DNA, 13 bp, Artificial Sequence
  Oligonucleotide for detection of SNP TSC0022610
ctaaaattcctaa

SEQ ID NO: 90239 - DNA, 13 bp, Artificial Sequence
  Oligonucleotide for detection of SNP TSC0022615
tgtttagttaata

SEQ ID NO: 90240 - DNA, 13 bp, Artificial Sequence
  Oligonucleotide for detection of SNP TSC0022615
tattaactaaaca

SEQ ID NO: 90241 - DNA, 13 bp, Artificial Sequence
  Oligonucleotide for detection of SNP TSC0022615
tgtttaattaata

SEQ ID NO: 90242 - DNA, 13 bp, Artificial Sequence
  Oligonucleotide for detection of SNP TSC0022615
tattaattaaaca

SEQ ID NO: 90243 - DNA, 13 bp, Artificial Sequence
  Oligonucleotide for detection of SNP TSC0022616
taatatatgtatg

SEQ ID NO: 90244 - DNA, 13 bp, Artificial Sequence
  Oligonucleotide for detection of SNP TSC0022616
catacatatatta

SEQ ID NO: 90245 - DNA, 13 bp, Artificial Sequence
  Oligonucleotide for detection of SNP TSC0022616
taatatgtgtatg

SEQ ID NO: 90246 - DNA, 13 bp, Artificial Sequence
  Oligonucleotide for detection of SNP TSC0022616
catacacatatta

SEQ ID NO: 90247 - DNA, 13 bp, Artificial Sequence
  Oligonucleotide for detection of SNP TSC0022616
taatatatgtacg

SEQ ID NO: 90248 - DNA, 13 bp, Artificial Sequence
  Oligonucleotide for detection of SNP TSC0022616
cgtacatatatta

SEQ ID NO: 90249 - DNA, 13 bp, Artificial Sequence
  Oligonucleotide for detection of SNP TSC0022616
taatacgtgtatg

SEQ ID NO: 90250 - DNA, 13 bp, Artificial Sequence
  Oligonucleotide for detection of SNP TSC0022616
catacacgtatta

SEQ ID NO: 90251 - DNA, 13 bp, Artificial Sequence
  Oligonucleotide for detection of SNP TSC0022616
taatatgtgtacg

SEQ ID NO: 90252 - DNA, 13 bp, Artificial Sequence
  Oligonucleotide for detection of SNP TSC0022616
cgtacacatatta

SEQ ID NO: 90253 - DNA, 13 bp, Artificial Sequence
  Oligonucleotide for detection of SNP TSC0022616
taatacgtgtacg

SEQ ID NO: 90254 - DNA, 13 bp, Artificial Sequence
  Oligonucleotide for detection of SNP TSC0022616
cgtacacgtatta

SEQ ID NO: 90255 - DNA, 13 bp, Artificial Sequence
  Oligonucleotide for detection of SNP TSC0022616
tgtgtatgtattg

SEQ ID NO: 90256 - DNA, 13 bp, Artificial Sequence
  Oligonucleotide for detection of SNP TSC0022616
caatacatacaca

SEQ ID NO: 90257 - DNA, 13 bp, Artificial Sequence
  Oligonucleotide for detection of SNP TSC0022616
cgtgtatgtattg

SEQ ID NO: 90258 - DNA, 13 bp, Artificial Sequence
  Oligonucleotide for detection of SNP TSC0022616
caatacatacacg

SEQ ID NO: 90259 - DNA, 13 bp, Artificial Sequence
  Oligonucleotide for detection of SNP TSC0022616
tgtgtacgtattg

SEQ ID NO: 90260 - DNA, 13 bp, Artificial Sequence
  Oligonucleotide for detection of SNP TSC0022616
caatacgtacaca

SEQ ID NO: 90261 - DNA, 13 bp, Artificial Sequence
  Oligonucleotide for detection of SNP TSC0022616
cgtgtacgtattg

SEQ ID NO: 90262 - DNA, 13 bp, Artificial Sequence
  Oligonucleotide for detection of SNP TSC0022616
caatacgtacacg

SEQ ID NO: 90263 - DNA, 13 bp, Artificial Sequence
  Oligonucleotide for detection of SNP TSC0022617
ttgggtagtatty

SEQ ID NO: 90264 - DNA, 13 bp, Artificial Sequence
  Oligonucleotide for detection of SNP TSC0022617
raatactacccaa

SEQ ID NO: 90265 - DNA, 13 bp, Artificial Sequence
  Oligonucleotide for detection of SNP TSC0022617
ttgggttgtatty

SEQ ID NO: 90266 - DNA, 13 bp, Artificial Sequence
  Oligonucleotide for detection of SNP TSC0022617
raatacaacccaa

SEQ ID NO: 90267 - DNA, 13 bp, Artificial Sequence
  Oligonucleotide for detection of SNP TSC0022617
tcgggtagtatty

SEQ ID NO: 90268 - DNA, 13 bp, Artificial Sequence
  Oligonucleotide for detection of SNP TSC0022617
raatactacccga

SEQ ID NO: 90269 - DNA, 13 bp, Artificial Sequence
  Oligonucleotide for detection of SNP TSC0022617
tcgggttgtatty

SEQ ID NO: 90270 - DNA, 13 bp, Artificial Sequence
  Oligonucleotide for detection of SNP TSC0022617
raatacaacccga

SEQ ID NO: 90271 - DNA, 13 bp, Artificial Sequence
  Oligonucleotide for detection of SNP TSC0022617
ggatgttatttga

SEQ ID NO: 90272 - DNA, 13 bp, Artificial Sequence
  Oligonucleotide for detection of SNP TSC0022617
tcaaataacatcc

SEQ ID NO: 90273 - DNA, 13 bp, Artificial Sequence
  Oligonucleotide for detection of SNP TSC0022617
ggatgtaatttga

SEQ ID NO: 90274 - DNA, 13 bp, Artificial Sequence
  Oligonucleotide for detection of SNP TSC0022617
tcaaattacatcc

SEQ ID NO: 90275 - DNA, 13 bp, Artificial Sequence
  Oligonucleotide for detection of SNP TSC0022617
ggatgttattcga

SEQ ID NO: 90276 - DNA, 13 bp, Artificial Sequence
  Oligonucleotide for detection of SNP TSC0022617
tcgaataacatcc

SEQ ID NO: 90277 - DNA, 13 bp, Artificial Sequence
  Oligonucleotide for detection of SNP TSC0022617
ggatgtaattcga

SEQ ID NO: 90278 - DNA, 13 bp, Artificial Sequence
  Oligonucleotide for detection of SNP TSC0022617
tcgaattacatcc

SEQ ID NO: 90279 - DNA, 13 bp, Artificial Sequence
  Oligonucleotide for detection of SNP TSC0022618
ttggttgtttaaa

SEQ ID NO: 90280 - DNA, 13 bp, Artificial Sequence
  Oligonucleotide for detection of SNP TSC0022618
tttaaacaaccaa

SEQ ID NO: 90281 - DNA, 13 bp, Artificial Sequence
  Oligonucleotide for detection of SNP TSC0022618
ttggtcgtttaaa

SEQ ID NO: 90282 - DNA, 13 bp, Artificial Sequence
  Oligonucleotide for detection of SNP TSC0022618
tttaaacgaccaa

SEQ ID NO: 90283 - DNA, 13 bp, Artificial Sequence
  Oligonucleotide for detection of SNP TSC0022618
tttggaggattaa

SEQ ID NO: 90284 - DNA, 13 bp, Artificial Sequence
  Oligonucleotide for detection of SNP TSC0022618
ttaatcctccaaa

SEQ ID NO: 90285 - DNA, 13 bp, Artificial Sequence
  Oligonucleotide for detection of SNP TSC0022618
tttggatgattaa

SEQ ID NO: 90286 - DNA, 13 bp, Artificial Sequence
  Oligonucleotide for detection of SNP TSC0022618
ttaatcatccaaa

SEQ ID NO: 90287 - DNA, 13 bp, Artificial Sequence
  Oligonucleotide for detection of SNP TSC0022618
tttggacgattaa

SEQ ID NO: 90288 - DNA, 13 bp, Artificial Sequence
  Oligonucleotide for detection of SNP TSC0022618
ttaatcgtccaaa

SEQ ID NO: 90289 - DNA, 13 bp, Artificial Sequence
  Oligonucleotide for detection of SNP TSC0022619
ttatatgattttt

SEQ ID NO: 90290 - DNA, 13 bp, Artificial Sequence
  Oligonucleotide for detection of SNP TSC0022619
aaaaatcatataa

SEQ ID NO: 90291 - DNA, 13 bp, Artificial Sequence
  Oligonucleotide for detection of SNP TSC0022619
ttatattattttt

SEQ ID NO: 90292 - DNA, 13 bp, Artificial Sequence
  Oligonucleotide for detection of SNP TSC0022619
aaaaataatataa

SEQ ID NO: 90293 - DNA, 13 bp, Artificial Sequence
  Oligonucleotide for detection of SNP TSC0022619
aaaagttatataa

SEQ ID NO: 90294 - DNA, 13 bp, Artificial Sequence
  Oligonucleotide for detection of SNP TSC0022619
ttatataactttt

SEQ ID NO: 90295 - DNA, 13 bp, Artificial Sequence
  Oligonucleotide for detection of SNP TSC0022619
aaaagtaatataa

SEQ ID NO: 90296 - DNA, 13 bp, Artificial Sequence
  Oligonucleotide for detection of SNP TSC0022619
ttatattactttt

SEQ ID NO: 90297 - DNA, 13 bp, Artificial Sequence
  Oligonucleotide for detection of SNP TSC0022620
gagttgagtaggy

SEQ ID NO: 90298 - DNA, 13 bp, Artificial Sequence
  Oligonucleotide for detection of SNP TSC0022620
rcctactcaactc

SEQ ID NO: 90299 - DNA, 13 bp, Artificial Sequence
  Oligonucleotide for detection of SNP TSC0022620
gagttgggtaggy

SEQ ID NO: 90300 - DNA, 13 bp, Artificial Sequence
  Oligonucleotide for detection of SNP TSC0022620
rcctacccaactc

SEQ ID NO: 90301 - DNA, 13 bp, Artificial Sequence
  Oligonucleotide for detection of SNP TSC0022624
taattaatttttg

SEQ ID NO: 90302 - DNA, 13 bp, Artificial Sequence
  Oligonucleotide for detection of SNP TSC0022624
caaaaattaatta

SEQ ID NO: 90303 - DNA, 13 bp, Artificial Sequence
  Oligonucleotide for detection of SNP TSC0022624
taattagtttttg

SEQ ID NO: 90304 - DNA, 13 bp, Artificial Sequence
  Oligonucleotide for detection of SNP TSC0022624
caaaaactaatta

SEQ ID NO: 90305 - DNA, 13 bp, Artificial Sequence
  Oligonucleotide for detection of SNP TSC0022625
ttatattagtagy

SEQ ID NO: 90306 - DNA, 13 bp, Artificial Sequence
  Oligonucleotide for detection of SNP TSC0022625
rctactaatataa

SEQ ID NO: 90307 - DNA, 13 bp, Artificial Sequence
  Oligonucleotide for detection of SNP TSC0022625
ttatatgagtagy

SEQ ID NO: 90308 - DNA, 13 bp, Artificial Sequence
  Oligonucleotide for detection of SNP TSC0022625
rctactcatataa

SEQ ID NO: 90309 - DNA, 13 bp, Artificial Sequence
  Oligonucleotide for detection of SNP TSC0022625
gttattgatgtga

SEQ ID NO: 90310 - DNA, 13 bp, Artificial Sequence
  Oligonucleotide for detection of SNP TSC0022625
tcacatcaataac

SEQ ID NO: 90311 - DNA, 13 bp, Artificial Sequence
  Oligonucleotide for detection of SNP TSC0022625
gttatttatgtga

SEQ ID NO: 90312 - DNA, 13 bp, Artificial Sequence
  Oligonucleotide for detection of SNP TSC0022625
tcacataaataac

SEQ ID NO: 90313 - DNA, 13 bp, Artificial Sequence
  Oligonucleotide for detection of SNP TSC0022629
atgtttatagttt

SEQ ID NO: 90314 - DNA, 13 bp, Artificial Sequence
  Oligonucleotide for detection of SNP TSC0022629
aaactataaacat

SEQ ID NO: 90315 - DNA, 13 bp, Artificial Sequence
  Oligonucleotide for detection of SNP TSC0022629
atgtttgtagttt

SEQ ID NO: 90316 - DNA, 13 bp, Artificial Sequence
  Oligonucleotide for detection of SNP TSC0022629
aaactacaaacat

SEQ ID NO: 90317 - DNA, 13 bp, Artificial Sequence
  Oligonucleotide for detection of SNP TSC0022632
ttttggaaagagy

SEQ ID NO: 90318 - DNA, 13 bp, Artificial Sequence
  Oligonucleotide for detection of SNP TSC0022632
rctctttccaaaa

SEQ ID NO: 90319 - DNA, 13 bp, Artificial Sequence
  Oligonucleotide for detection of SNP TSC0022632
ttttgggaagagy

SEQ ID NO: 90320 - DNA, 13 bp, Artificial Sequence
  Oligonucleotide for detection of SNP TSC0022632
rctcttcccaaaa

SEQ ID NO: 90321 - DNA, 13 bp, Artificial Sequence
  Oligonucleotide for detection of SNP TSC0022637
gtaagagtatagt

SEQ ID NO: 90322 - DNA, 13 bp, Artificial Sequence
  Oligonucleotide for detection of SNP TSC0022637
actatactcttac

SEQ ID NO: 90323 - DNA, 13 bp, Artificial Sequence
  Oligonucleotide for detection of SNP TSC0022637
gtaagaatatagt

SEQ ID NO: 90324 - DNA, 13 bp, Artificial Sequence
  Oligonucleotide for detection of SNP TSC0022637
actatattcttac

SEQ ID NO: 90325 - DNA, 13 bp, Artificial Sequence
  Oligonucleotide for detection of SNP TSC0022638
tggttgataggaa

SEQ ID NO: 90326 - DNA, 13 bp, Artificial Sequence
  Oligonucleotide for detection of SNP TSC0022638
ttcctatcaacca

SEQ ID NO: 90327 - DNA, 13 bp, Artificial Sequence
  Oligonucleotide for detection of SNP TSC0022638
tggttgttaggaa

SEQ ID NO: 90328 - DNA, 13 bp, Artificial Sequence
  Oligonucleotide for detection of SNP TSC0022638
ttcctaacaacca

SEQ ID NO: 90329 - DNA, 13 bp, Artificial Sequence
  Oligonucleotide for detection of SNP TSC0022638
tttttattagtta

SEQ ID NO: 90330 - DNA, 13 bp, Artificial Sequence
  Oligonucleotide for detection of SNP TSC0022638
taactaataaaaa

SEQ ID NO: 90331 - DNA, 13 bp, Artificial Sequence
  Oligonucleotide for detection of SNP TSC0022638
tttttaatagtta

SEQ ID NO: 90332 - DNA, 13 bp, Artificial Sequence
  Oligonucleotide for detection of SNP TSC0022638
taactattaaaaa

SEQ ID NO: 90333 - DNA, 13 bp, Artificial Sequence
  Oligonucleotide for detection of SNP TSC0022643
aaggtaataggtt

SEQ ID NO: 90334 - DNA, 13 bp, Artificial Sequence
  Oligonucleotide for detection of SNP TSC0022643
aacctattacctt

SEQ ID NO: 90335 - DNA, 13 bp, Artificial Sequence
  Oligonucleotide for detection of SNP TSC0022643
aaggtagtaggtt

SEQ ID NO: 90336 - DNA, 13 bp, Artificial Sequence
  Oligonucleotide for detection of SNP TSC0022643
aacctactacctt

SEQ ID NO: 90337 - DNA, 13 bp, Artificial Sequence
  Oligonucleotide for detection of SNP TSC0022645
tgttttaaaggag

SEQ ID NO: 90338 - DNA, 13 bp, Artificial Sequence
  Oligonucleotide for detection of SNP TSC0022645
ctcctttaaaaca

SEQ ID NO: 90339 - DNA, 13 bp, Artificial Sequence
  Oligonucleotide for detection of SNP TSC0022645
tgttttgaaggag

SEQ ID NO: 90340 - DNA, 13 bp, Artificial Sequence
  Oligonucleotide for detection of SNP TSC0022645
ctccttcaaaaca

SEQ ID NO: 90341 - DNA, 13 bp, Artificial Sequence
  Oligonucleotide for detection of SNP TSC0022646
gattataatattt

SEQ ID NO: 90342 - DNA, 13 bp, Artificial Sequence
  Oligonucleotide for detection of SNP TSC0022646
aaatattataatc

SEQ ID NO: 90343 - DNA, 13 bp, Artificial Sequence
  Oligonucleotide for detection of SNP TSC0022646
gattatgatattt

SEQ ID NO: 90344 - DNA, 13 bp, Artificial Sequence
  Oligonucleotide for detection of SNP TSC0022646
aaatatcataatc

SEQ ID NO: 90345 - DNA, 13 bp, Artificial Sequence
  Oligonucleotide for detection of SNP TSC0022647
gggttttgaagga

SEQ ID NO: 90346 - DNA, 13 bp, Artificial Sequence
  Oligonucleotide for detection of SNP TSC0022647
tccttcaaaaccc

SEQ ID NO: 90347 - DNA, 13 bp, Artificial Sequence
  Oligonucleotide for detection of SNP TSC0022647
gggtttcgaagga

SEQ ID NO: 90348 - DNA, 13 bp, Artificial Sequence
  Oligonucleotide for detection of SNP TSC0022647
tccttcgaaaccc

SEQ ID NO: 90349 - DNA, 13 bp, Artificial Sequence
  Oligonucleotide for detection of SNP TSC0022647
tttttcgaaatty

SEQ ID NO: 90350 - DNA, 13 bp, Artificial Sequence
  Oligonucleotide for detection of SNP TSC0022647
raatttcgaaaaa

SEQ ID NO: 90351 - DNA, 13 bp, Artificial Sequence
  Oligonucleotide for detection of SNP TSC0022648
gagtaagattgta

SEQ ID NO: 90352 - DNA, 13 bp, Artificial Sequence
  Oligonucleotide for detection of SNP TSC0022648
tacaatcttactc

SEQ ID NO: 90353 - DNA, 13 bp, Artificial Sequence
  Oligonucleotide for detection of SNP TSC0022648
gagtaaaattgta

SEQ ID NO: 90354 - DNA, 13 bp, Artificial Sequence
  Oligonucleotide for detection of SNP TSC0022648
tacaattttactc

SEQ ID NO: 90355 - DNA, 13 bp, Artificial Sequence
  Oligonucleotide for detection of SNP TSC0022649
taaaagtttttta

SEQ ID NO: 90356 - DNA, 13 bp, Artificial Sequence
  Oligonucleotide for detection of SNP TSC0022649
taaaaaactttta

SEQ ID NO: 90357 - DNA, 13 bp, Artificial Sequence
  Oligonucleotide for detection of SNP TSC0022649
taaaaatttttta

SEQ ID NO: 90358 - DNA, 13 bp, Artificial Sequence
  Oligonucleotide for detection of SNP TSC0022649
taaaaaattttta

SEQ ID NO: 90359 - DNA, 13 bp, Artificial Sequence
  Oligonucleotide for detection of SNP TSC0022650
ttaaaaagttttt

SEQ ID NO: 90360 - DNA, 13 bp, Artificial Sequence
  Oligonucleotide for detection of SNP TSC0022650
aaaaactttttaa

SEQ ID NO: 90361 - DNA, 13 bp, Artificial Sequence
  Oligonucleotide for detection of SNP TSC0022650
ttaaaatgttttt

SEQ ID NO: 90362 - DNA, 13 bp, Artificial Sequence
  Oligonucleotide for detection of SNP TSC0022650
aaaaacattttaa

SEQ ID NO: 90363 - DNA, 13 bp, Artificial Sequence
  Oligonucleotide for detection of SNP TSC0022650
agaaattttttgg

SEQ ID NO: 90364 - DNA, 13 bp, Artificial Sequence
  Oligonucleotide for detection of SNP TSC0022650
ccaaaaaatttct

SEQ ID NO: 90365 - DNA, 13 bp, Artificial Sequence
  Oligonucleotide for detection of SNP TSC0022650
agaaatattttgg

SEQ ID NO: 90366 - DNA, 13 bp, Artificial Sequence
  Oligonucleotide for detection of SNP TSC0022650
ccaaaatatttct

SEQ ID NO: 90367 - DNA, 13 bp, Artificial Sequence
  Oligonucleotide for detection of SNP TSC0022651
gtttttatttggy

SEQ ID NO: 90368 - DNA, 13 bp, Artificial Sequence
  Oligonucleotide for detection of SNP TSC0022651
rccaaataaaaac

SEQ ID NO: 90369 - DNA, 13 bp, Artificial Sequence
  Oligonucleotide for detection of SNP TSC0022651
gtttttgtttggy

SEQ ID NO: 90370 - DNA, 13 bp, Artificial Sequence
  Oligonucleotide for detection of SNP TSC0022651
rccaaacaaaaac

SEQ ID NO: 90371 - DNA, 13 bp, Artificial Sequence
  Oligonucleotide for detection of SNP TSC0022651
gttttcgtttggy

SEQ ID NO: 90372 - DNA, 13 bp, Artificial Sequence
  Oligonucleotide for detection of SNP TSC0022651
rccaaacgaaaac

SEQ ID NO: 90373 - DNA, 13 bp, Artificial Sequence
  Oligonucleotide for detection of SNP TSC0022651
gttagatgaaggy

SEQ ID NO: 90374 - DNA, 13 bp, Artificial Sequence
  Oligonucleotide for detection of SNP TSC0022651
rccttcatctaac

SEQ ID NO: 90375 - DNA, 13 bp, Artificial Sequence
  Oligonucleotide for detection of SNP TSC0022651
gttagacgaaggy

SEQ ID NO: 90376 - DNA, 13 bp, Artificial Sequence
  Oligonucleotide for detection of SNP TSC0022651
rccttcgtctaac

SEQ ID NO: 90377 - DNA, 13 bp, Artificial Sequence
  Oligonucleotide for detection of SNP TSC0022652
taggattttattt

SEQ ID NO: 90378 - DNA, 13 bp, Artificial Sequence
  Oligonucleotide for detection of SNP TSC0022652
aaataaaatccta

SEQ ID NO: 90379 - DNA, 13 bp, Artificial Sequence
  Oligonucleotide for detection of SNP TSC0022652
taggatgttattt

SEQ ID NO: 90380 - DNA, 13 bp, Artificial Sequence
  Oligonucleotide for detection of SNP TSC0022652
aaataacatccta

SEQ ID NO: 90381 - DNA, 13 bp, Artificial Sequence
  Oligonucleotide for detection of SNP TSC0022652
taggacgttattt

SEQ ID NO: 90382 - DNA, 13 bp, Artificial Sequence
  Oligonucleotide for detection of SNP TSC0022652
aaataacgtccta

SEQ ID NO: 90383 - DNA, 13 bp, Artificial Sequence
  Oligonucleotide for detection of SNP TSC0022652
aggtggggttttg

SEQ ID NO: 90384 - DNA, 13 bp, Artificial Sequence
  Oligonucleotide for detection of SNP TSC0022652
caaaaccccacct

SEQ ID NO: 90385 - DNA, 13 bp, Artificial Sequence
  Oligonucleotide for detection of SNP TSC0022652
aggtggtgttttg

SEQ ID NO: 90386 - DNA, 13 bp, Artificial Sequence
  Oligonucleotide for detection of SNP TSC0022652
caaaacaccacct

SEQ ID NO: 90387 - DNA, 13 bp, Artificial Sequence
  Oligonucleotide for detection of SNP TSC0022652
aggtggcgttttg

SEQ ID NO: 90388 - DNA, 13 bp, Artificial Sequence
  Oligonucleotide for detection of SNP TSC0022652
caaaacgccacct

SEQ ID NO: 90389 - DNA, 13 bp, Artificial Sequence
  Oligonucleotide for detection of SNP TSC0022653
ttggtttatgggg

SEQ ID NO: 90390 - DNA, 13 bp, Artificial Sequence
  Oligonucleotide for detection of SNP TSC0022653
ccccataaaccaa

SEQ ID NO: 90391 - DNA, 13 bp, Artificial Sequence
  Oligonucleotide for detection of SNP TSC0022653
ttggttaatgggg

SEQ ID NO: 90392 - DNA, 13 bp, Artificial Sequence
  Oligonucleotide for detection of SNP TSC0022653
ccccattaaccaa

SEQ ID NO: 90393 - DNA, 13 bp, Artificial Sequence
  Oligonucleotide for detection of SNP TSC0022654
ttggagatgttaa

SEQ ID NO: 90394 - DNA, 13 bp, Artificial Sequence
  Oligonucleotide for detection of SNP TSC0022654
ttaacatctccaa

SEQ ID NO: 90395 - DNA, 13 bp, Artificial Sequence
  Oligonucleotide for detection of SNP TSC0022654
ttggaggtgttaa

SEQ ID NO: 90396 - DNA, 13 bp, Artificial Sequence
  Oligonucleotide for detection of SNP TSC0022654
ttaacacctccaa

SEQ ID NO: 90397 - DNA, 13 bp, Artificial Sequence
  Oligonucleotide for detection of SNP TSC0022654
tcggagatgttaa

SEQ ID NO: 90398 - DNA, 13 bp, Artificial Sequence
  Oligonucleotide for detection of SNP TSC0022654
ttaacatctccga

SEQ ID NO: 90399 - DNA, 13 bp, Artificial Sequence
  Oligonucleotide for detection of SNP TSC0022654
tcggaggtgttaa

SEQ ID NO: 90400 - DNA, 13 bp, Artificial Sequence
  Oligonucleotide for detection of SNP TSC0022654
ttaacacctccga

SEQ ID NO: 90401 - DNA, 13 bp, Artificial Sequence
  Oligonucleotide for detection of SNP TSC0022655
tgtattgggtttt

SEQ ID NO: 90402 - DNA, 13 bp, Artificial Sequence
  Oligonucleotide for detection of SNP TSC0022655
aaaacccaataca

SEQ ID NO: 90403 - DNA, 13 bp, Artificial Sequence
  Oligonucleotide for detection of SNP TSC0022655
tgtatttggtttt

SEQ ID NO: 90404 - DNA, 13 bp, Artificial Sequence
  Oligonucleotide for detection of SNP TSC0022655
aaaaccaaataca

SEQ ID NO: 90405 - DNA, 13 bp, Artificial Sequence
  Oligonucleotide for detection of SNP TSC0022655
agagtttagtgta

SEQ ID NO: 90406 - DNA, 13 bp, Artificial Sequence
  Oligonucleotide for detection of SNP TSC0022655
tacactaaactct

SEQ ID NO: 90407 - DNA, 13 bp, Artificial Sequence
  Oligonucleotide for detection of SNP TSC0022655
agagttaagtgta

SEQ ID NO: 90408 - DNA, 13 bp, Artificial Sequence
  Oligonucleotide for detection of SNP TSC0022655
tacacttaactct

SEQ ID NO: 90409 - DNA, 13 bp, Artificial Sequence
  Oligonucleotide for detection of SNP TSC0022656
aagagtttagtgy

SEQ ID NO: 90410 - DNA, 13 bp, Artificial Sequence
  Oligonucleotide for detection of SNP TSC0022656
rcactaaactctt

SEQ ID NO: 90411 - DNA, 13 bp, Artificial Sequence
  Oligonucleotide for detection of SNP TSC0022656
aagagtatagtgy

SEQ ID NO: 90412 - DNA, 13 bp, Artificial Sequence
  Oligonucleotide for detection of SNP TSC0022656
rcactatactctt

SEQ ID NO: 90413 - DNA, 13 bp, Artificial Sequence
  Oligonucleotide for detection of SNP TSC0022657
ttttagtgtattg

SEQ ID NO: 90414 - DNA, 13 bp, Artificial Sequence
  Oligonucleotide for detection of SNP TSC0022657
caatacactaaaa

SEQ ID NO: 90415 - DNA, 13 bp, Artificial Sequence
  Oligonucleotide for detection of SNP TSC0022657
ttttagggtattg

SEQ ID NO: 90416 - DNA, 13 bp, Artificial Sequence
  Oligonucleotide for detection of SNP TSC0022657
caataccctaaaa

SEQ ID NO: 90417 - DNA, 13 bp, Artificial Sequence
  Oligonucleotide for detection of SNP TSC0022657
ttttagcgtattg

SEQ ID NO: 90418 - DNA, 13 bp, Artificial Sequence
  Oligonucleotide for detection of SNP TSC0022657
caatacgctaaaa

SEQ ID NO: 90419 - DNA, 13 bp, Artificial Sequence
  Oligonucleotide for detection of SNP TSC0022657
tagtgttttgggg

SEQ ID NO: 90420 - DNA, 13 bp, Artificial Sequence
  Oligonucleotide for detection of SNP TSC0022657
ccccaaaacacta

SEQ ID NO: 90421 - DNA, 13 bp, Artificial Sequence
  Oligonucleotide for detection of SNP TSC0022658
tgtttgtgtattt

SEQ ID NO: 90422 - DNA, 13 bp, Artificial Sequence
  Oligonucleotide for detection of SNP TSC0022658
aaatacacaaaca

SEQ ID NO: 90423 - DNA, 13 bp, Artificial Sequence
  Oligonucleotide for detection of SNP TSC0022658
tgtttgcgtattt

SEQ ID NO: 90424 - DNA, 13 bp, Artificial Sequence
  Oligonucleotide for detection of SNP TSC0022658
aaatacgcaaaca

SEQ ID NO: 90425 - DNA, 13 bp, Artificial Sequence
  Oligonucleotide for detection of SNP TSC0022658
aaatatgtaggta

SEQ ID NO: 90426 - DNA, 13 bp, Artificial Sequence
  Oligonucleotide for detection of SNP TSC0022658
tacctacatattt

SEQ ID NO: 90427 - DNA, 13 bp, Artificial Sequence
  Oligonucleotide for detection of SNP TSC0022658
aaatatataggta

SEQ ID NO: 90428 - DNA, 13 bp, Artificial Sequence
  Oligonucleotide for detection of SNP TSC0022658
tacctatatattt

SEQ ID NO: 90429 - DNA, 13 bp, Artificial Sequence
  Oligonucleotide for detection of SNP TSC0022658
aaatacgtaggta

SEQ ID NO: 90430 - DNA, 13 bp, Artificial Sequence
  Oligonucleotide for detection of SNP TSC0022658
tacctacgtattt

SEQ ID NO: 90431 - DNA, 13 bp, Artificial Sequence
  Oligonucleotide for detection of SNP TSC0022659
gatttttgtttta

SEQ ID NO: 90432 - DNA, 13 bp, Artificial Sequence
  Oligonucleotide for detection of SNP TSC0022659
taaaacaaaaatc

SEQ ID NO: 90433 - DNA, 13 bp, Artificial Sequence
  Oligonucleotide for detection of SNP TSC0022659
gattttcgtttta

SEQ ID NO: 90434 - DNA, 13 bp, Artificial Sequence
  Oligonucleotide for detection of SNP TSC0022659
taaaacgaaaatc

SEQ ID NO: 90435 - DNA, 13 bp, Artificial Sequence
  Oligonucleotide for detection of SNP TSC0022659
taaaatgaaagty

SEQ ID NO: 90436 - DNA, 13 bp, Artificial Sequence
  Oligonucleotide for detection of SNP TSC0022659
ractttcatttta

SEQ ID NO: 90437 - DNA, 13 bp, Artificial Sequence
  Oligonucleotide for detection of SNP TSC0022659
taaaataaaagty

SEQ ID NO: 90438 - DNA, 13 bp, Artificial Sequence
  Oligonucleotide for detection of SNP TSC0022659
racttttatttta

SEQ ID NO: 90439 - DNA, 13 bp, Artificial Sequence
  Oligonucleotide for detection of SNP TSC0022659
taaaacgaaagty

SEQ ID NO: 90440 - DNA, 13 bp, Artificial Sequence
  Oligonucleotide for detection of SNP TSC0022659
ractttcgtttta

SEQ ID NO: 90441 - DNA, 13 bp, Artificial Sequence
  Oligonucleotide for detection of SNP TSC0022660
ttttggtgttttg

SEQ ID NO: 90442 - DNA, 13 bp, Artificial Sequence
  Oligonucleotide for detection of SNP TSC0022660
caaaacaccaaaa

SEQ ID NO: 90443 - DNA, 13 bp, Artificial Sequence
  Oligonucleotide for detection of SNP TSC0022660
ttttggggttttg

SEQ ID NO: 90444 - DNA, 13 bp, Artificial Sequence
  Oligonucleotide for detection of SNP TSC0022660
caaaaccccaaaa

SEQ ID NO: 90445 - DNA, 13 bp, Artificial Sequence
  Oligonucleotide for detection of SNP TSC0022660
ttttggcgttttg

SEQ ID NO: 90446 - DNA, 13 bp, Artificial Sequence
  Oligonucleotide for detection of SNP TSC0022660
caaaacgccaaaa

SEQ ID NO: 90447 - DNA, 13 bp, Artificial Sequence
  Oligonucleotide for detection of SNP TSC0022660
ttttggggtttcg

SEQ ID NO: 90448 - DNA, 13 bp, Artificial Sequence
  Oligonucleotide for detection of SNP TSC0022660
cgaaaccccaaaa

SEQ ID NO: 90449 - DNA, 13 bp, Artificial Sequence
  Oligonucleotide for detection of SNP TSC0022660
ttttggtgtttcg

SEQ ID NO: 90450 - DNA, 13 bp, Artificial Sequence
  Oligonucleotide for detection of SNP TSC0022660
cgaaacaccaaaa

SEQ ID NO: 90451 - DNA, 13 bp, Artificial Sequence
  Oligonucleotide for detection of SNP TSC0022660
ttttggcgtttcg

SEQ ID NO: 90452 - DNA, 13 bp, Artificial Sequence
  Oligonucleotide for detection of SNP TSC0022660
cgaaacgccaaaa

SEQ ID NO: 90453 - DNA, 13 bp, Artificial Sequence
  Oligonucleotide for detection of SNP TSC0022660
tgagatgttagag

SEQ ID NO: 90454 - DNA, 13 bp, Artificial Sequence
  Oligonucleotide for detection of SNP TSC0022660
ctctaacatctca

SEQ ID NO: 90455 - DNA, 13 bp, Artificial Sequence
  Oligonucleotide for detection of SNP TSC0022660
tgagattttagag

SEQ ID NO: 90456 - DNA, 13 bp, Artificial Sequence
  Oligonucleotide for detection of SNP TSC0022660
ctctaaaatctca

SEQ ID NO: 90457 - DNA, 13 bp, Artificial Sequence
  Oligonucleotide for detection of SNP TSC0022660
cgagatgttagag

SEQ ID NO: 90458 - DNA, 13 bp, Artificial Sequence
  Oligonucleotide for detection of SNP TSC0022660
ctctaacatctcg

SEQ ID NO: 90459 - DNA, 13 bp, Artificial Sequence
  Oligonucleotide for detection of SNP TSC0022660
cgagattttagag

SEQ ID NO: 90460 - DNA, 13 bp, Artificial Sequence
  Oligonucleotide for detection of SNP TSC0022660
ctctaaaatctcg

SEQ ID NO: 90461 - DNA, 13 bp, Artificial Sequence
  Oligonucleotide for detection of SNP TSC0022660
tgagacgttagag

SEQ ID NO: 90462 - DNA, 13 bp, Artificial Sequence
  Oligonucleotide for detection of SNP TSC0022660
ctctaacgtctca

SEQ ID NO: 90463 - DNA, 13 bp, Artificial Sequence
  Oligonucleotide for detection of SNP TSC0022660
cgagacgttagag

SEQ ID NO: 90464 - DNA, 13 bp, Artificial Sequence
  Oligonucleotide for detection of SNP TSC0022660
ctctaacgtctcg

SEQ ID NO: 90465 - DNA, 13 bp, Artificial Sequence
  Oligonucleotide for detection of SNP TSC0022661
atgaaaaagttay

SEQ ID NO: 90466 - DNA, 13 bp, Artificial Sequence
  Oligonucleotide for detection of SNP TSC0022661
rtaactttttcat

SEQ ID NO: 90467 - DNA, 13 bp, Artificial Sequence
  Oligonucleotide for detection of SNP TSC0022661
atgaaagagttay

SEQ ID NO: 90468 - DNA, 13 bp, Artificial Sequence
  Oligonucleotide for detection of SNP TSC0022661
rtaactctttcat

SEQ ID NO: 90469 - DNA, 13 bp, Artificial Sequence
  Oligonucleotide for detection of SNP TSC0022662
ggtgatatttata

SEQ ID NO: 90470 - DNA, 13 bp, Artificial Sequence
  Oligonucleotide for detection of SNP TSC0022662
tataaatatcacc

SEQ ID NO: 90471 - DNA, 13 bp, Artificial Sequence
  Oligonucleotide for detection of SNP TSC0022662
ggtgatgtttata

SEQ ID NO: 90472 - DNA, 13 bp, Artificial Sequence
  Oligonucleotide for detection of SNP TSC0022662
tataaacatcacc

SEQ ID NO: 90473 - DNA, 13 bp, Artificial Sequence
  Oligonucleotide for detection of SNP TSC0022662
ggcgatatttata

SEQ ID NO: 90474 - DNA, 13 bp, Artificial Sequence
  Oligonucleotide for detection of SNP TSC0022662
tataaatatcgcc

SEQ ID NO: 90475 - DNA, 13 bp, Artificial Sequence
  Oligonucleotide for detection of SNP TSC0022662
ggcgatgtttata

SEQ ID NO: 90476 - DNA, 13 bp, Artificial Sequence
  Oligonucleotide for detection of SNP TSC0022662
tataaacatcgcc

SEQ ID NO: 90477 - DNA, 13 bp, Artificial Sequence
  Oligonucleotide for detection of SNP TSC0022662
ggtgacgtttata

SEQ ID NO: 90478 - DNA, 13 bp, Artificial Sequence
  Oligonucleotide for detection of SNP TSC0022662
tataaacgtcacc

SEQ ID NO: 90479 - DNA, 13 bp, Artificial Sequence
  Oligonucleotide for detection of SNP TSC0022662
ggcgacgtttata

SEQ ID NO: 90480 - DNA, 13 bp, Artificial Sequence
  Oligonucleotide for detection of SNP TSC0022662
tataaacgtcgcc

SEQ ID NO: 90481 - DNA, 13 bp, Artificial Sequence
  Oligonucleotide for detection of SNP TSC0022662
tgtgggtgttgty

SEQ ID NO: 90482 - DNA, 13 bp, Artificial Sequence
  Oligonucleotide for detection of SNP TSC0022662
racaacacccaca

SEQ ID NO: 90483 - DNA, 13 bp, Artificial Sequence
  Oligonucleotide for detection of SNP TSC0022662
tgtgggtgtcgty

SEQ ID NO: 90484 - DNA, 13 bp, Artificial Sequence
  Oligonucleotide for detection of SNP TSC0022662
racgacacccaca

SEQ ID NO: 90485 - DNA, 13 bp, Artificial Sequence
  Oligonucleotide for detection of SNP TSC0022662
tgtgggcgttgty

SEQ ID NO: 90486 - DNA, 13 bp, Artificial Sequence
  Oligonucleotide for detection of SNP TSC0022662
racaacgcccaca

SEQ ID NO: 90487 - DNA, 13 bp, Artificial Sequence
  Oligonucleotide for detection of SNP TSC0022662
tgtgggcgtcgty

SEQ ID NO: 90488 - DNA, 13 bp, Artificial Sequence
  Oligonucleotide for detection of SNP TSC0022662
racgacgcccaca

SEQ ID NO: 90489 - DNA, 13 bp, Artificial Sequence
  Oligonucleotide for detection of SNP TSC0022666
aagagtggatttt

SEQ ID NO: 90490 - DNA, 13 bp, Artificial Sequence
  Oligonucleotide for detection of SNP TSC0022666
aaaatccactctt

SEQ ID NO: 90491 - DNA, 13 bp, Artificial Sequence
  Oligonucleotide for detection of SNP TSC0022666
aagagtagatttt

SEQ ID NO: 90492 - DNA, 13 bp, Artificial Sequence
  Oligonucleotide for detection of SNP TSC0022666
aaaatctactctt

SEQ ID NO: 90493 - DNA, 13 bp, Artificial Sequence
  Oligonucleotide for detection of SNP TSC0022670
gttttagaaggga

SEQ ID NO: 90494 - DNA, 13 bp, Artificial Sequence
  Oligonucleotide for detection of SNP TSC0022670
tcccttctaaaac

SEQ ID NO: 90495 - DNA, 13 bp, Artificial Sequence
  Oligonucleotide for detection of SNP TSC0022670
gttttaaaaggga

SEQ ID NO: 90496 - DNA, 13 bp, Artificial Sequence
  Oligonucleotide for detection of SNP TSC0022670
tcccttttaaaac

SEQ ID NO: 90497 - DNA, 13 bp, Artificial Sequence
  Oligonucleotide for detection of SNP TSC0022674
ttggagatgtaaa

SEQ ID NO: 90498 - DNA, 13 bp, Artificial Sequence
  Oligonucleotide for detection of SNP TSC0022674
tttacatctccaa

SEQ ID NO: 90499 - DNA, 13 bp, Artificial Sequence
  Oligonucleotide for detection of SNP TSC0022674
ttggagttgtaaa

SEQ ID NO: 90500 - DNA, 13 bp, Artificial Sequence
  Oligonucleotide for detection of SNP TSC0022674
tttacaactccaa

SEQ ID NO: 90501 - DNA, 13 bp, Artificial Sequence
  Oligonucleotide for detection of SNP TSC0022676
aggattggtagat

SEQ ID NO: 90502 - DNA, 13 bp, Artificial Sequence
  Oligonucleotide for detection of SNP TSC0022676
atctaccaatcct

SEQ ID NO: 90503 - DNA, 13 bp, Artificial Sequence
  Oligonucleotide for detection of SNP TSC0022676
aggattagtagat

SEQ ID NO: 90504 - DNA, 13 bp, Artificial Sequence
  Oligonucleotide for detection of SNP TSC0022676
atctactaatcct

SEQ ID NO: 90505 - DNA, 13 bp, Artificial Sequence
  Oligonucleotide for detection of SNP TSC0022679
tttttaataggta

SEQ ID NO: 90506 - DNA, 13 bp, Artificial Sequence
  Oligonucleotide for detection of SNP TSC0022679
tacctattaaaaa

SEQ ID NO: 90507 - DNA, 13 bp, Artificial Sequence
  Oligonucleotide for detection of SNP TSC0022679
tttttagtaggta

SEQ ID NO: 90508 - DNA, 13 bp, Artificial Sequence
  Oligonucleotide for detection of SNP TSC0022679
tacctactaaaaa

SEQ ID NO: 90509 - DNA, 13 bp, Artificial Sequence
  Oligonucleotide for detection of SNP TSC0022680
aattatagggggt

SEQ ID NO: 90510 - DNA, 13 bp, Artificial Sequence
  Oligonucleotide for detection of SNP TSC0022680
accccctataatt

SEQ ID NO: 90511 - DNA, 13 bp, Artificial Sequence
  Oligonucleotide for detection of SNP TSC0022680
aattatggggggt

SEQ ID NO: 90512 - DNA, 13 bp, Artificial Sequence
  Oligonucleotide for detection of SNP TSC0022680
accccccataatt

SEQ ID NO: 90513 - DNA, 13 bp, Artificial Sequence
  Oligonucleotide for detection of SNP TSC0022680
aattacggggggt

SEQ ID NO: 90514 - DNA, 13 bp, Artificial Sequence
  Oligonucleotide for detection of SNP TSC0022680
accccccgtaatt

SEQ ID NO: 90515 - DNA, 13 bp, Artificial Sequence
  Oligonucleotide for detection of SNP TSC0022680
attttttgtggtt

SEQ ID NO: 90516 - DNA, 13 bp, Artificial Sequence
  Oligonucleotide for detection of SNP TSC0022680
aaccacaaaaaat

SEQ ID NO: 90517 - DNA, 13 bp, Artificial Sequence
  Oligonucleotide for detection of SNP TSC0022680
atttttcgtggtt

SEQ ID NO: 90518 - DNA, 13 bp, Artificial Sequence
  Oligonucleotide for detection of SNP TSC0022680
aaccacgaaaaat

SEQ ID NO: 90519 - DNA, 13 bp, Artificial Sequence
  Oligonucleotide for detection of SNP TSC0022681
attattaggagtt

SEQ ID NO: 90520 - DNA, 13 bp, Artificial Sequence
  Oligonucleotide for detection of SNP TSC0022681
aactcctaataat

SEQ ID NO: 90521 - DNA, 13 bp, Artificial Sequence
  Oligonucleotide for detection of SNP TSC0022681
attatttggagtt

SEQ ID NO: 90522 - DNA, 13 bp, Artificial Sequence
  Oligonucleotide for detection of SNP TSC0022681
aactccaaataat

SEQ ID NO: 90523 - DNA, 13 bp, Artificial Sequence
  Oligonucleotide for detection of SNP TSC0022681
aatttttgatagt

SEQ ID NO: 90524 - DNA, 13 bp, Artificial Sequence
  Oligonucleotide for detection of SNP TSC0022681
actatcaaaaatt

SEQ ID NO: 90525 - DNA, 13 bp, Artificial Sequence
  Oligonucleotide for detection of SNP TSC0022681
aattttagatagt

SEQ ID NO: 90526 - DNA, 13 bp, Artificial Sequence
  Oligonucleotide for detection of SNP TSC0022681
actatctaaaatt

SEQ ID NO: 90527 - DNA, 13 bp, Artificial Sequence
  Oligonucleotide for detection of SNP TSC0022684
aggttgggggtta

SEQ ID NO: 90528 - DNA, 13 bp, Artificial Sequence
  Oligonucleotide for detection of SNP TSC0022684
taacccccaacct

SEQ ID NO: 90529 - DNA, 13 bp, Artificial Sequence
  Oligonucleotide for detection of SNP TSC0022684
aggttgagggtta

SEQ ID NO: 90530 - DNA, 13 bp, Artificial Sequence
  Oligonucleotide for detection of SNP TSC0022684
taaccctcaacct

SEQ ID NO: 90531 - DNA, 13 bp, Artificial Sequence
  Oligonucleotide for detection of SNP TSC0022685
agttagttattty

SEQ ID NO: 90532 - DNA, 13 bp, Artificial Sequence
  Oligonucleotide for detection of SNP TSC0022685
raaataactaact

SEQ ID NO: 90533 - DNA, 13 bp, Artificial Sequence
  Oligonucleotide for detection of SNP TSC0022685
agttaggtattty

SEQ ID NO: 90534 - DNA, 13 bp, Artificial Sequence
  Oligonucleotide for detection of SNP TSC0022685
raaatacctaact

SEQ ID NO: 90535 - DNA, 13 bp, Artificial Sequence
  Oligonucleotide for detection of SNP TSC0022685
gaggtggttggtt

SEQ ID NO: 90536 - DNA, 13 bp, Artificial Sequence
  Oligonucleotide for detection of SNP TSC0022685
aaccaaccacctc

SEQ ID NO: 90537 - DNA, 13 bp, Artificial Sequence
  Oligonucleotide for detection of SNP TSC0022685
gaggtgtttggtt

SEQ ID NO: 90538 - DNA, 13 bp, Artificial Sequence
  Oligonucleotide for detection of SNP TSC0022685
aaccaaacacctc

SEQ ID NO: 90539 - DNA, 13 bp, Artificial Sequence
  Oligonucleotide for detection of SNP TSC0022686
tgggagtagtagg

SEQ ID NO: 90540 - DNA, 13 bp, Artificial Sequence
  Oligonucleotide for detection of SNP TSC0022686
cctactactccca

SEQ ID NO: 90541 - DNA, 13 bp, Artificial Sequence
  Oligonucleotide for detection of SNP TSC0022686
tgggagaagtagg

SEQ ID NO: 90542 - DNA, 13 bp, Artificial Sequence
  Oligonucleotide for detection of SNP TSC0022686
cctacttctccca

SEQ ID NO: 90543 - DNA, 13 bp, Artificial Sequence
  Oligonucleotide for detection of SNP TSC0022688
ttgaggtttatty

SEQ ID NO: 90544 - DNA, 13 bp, Artificial Sequence
  Oligonucleotide for detection of SNP TSC0022688
raataaacctcaa

SEQ ID NO: 90545 - DNA, 13 bp, Artificial Sequence
  Oligonucleotide for detection of SNP TSC0022688
gagtaggttttag

SEQ ID NO: 90546 - DNA, 13 bp, Artificial Sequence
  Oligonucleotide for detection of SNP TSC0022688
ctaaaacctactc

SEQ ID NO: 90547 - DNA, 13 bp, Artificial Sequence
  Oligonucleotide for detection of SNP TSC0022688
gagtagtttttag

SEQ ID NO: 90548 - DNA, 13 bp, Artificial Sequence
  Oligonucleotide for detection of SNP TSC0022688
ctaaaaactactc

SEQ ID NO: 90549 - DNA, 13 bp, Artificial Sequence
  Oligonucleotide for detection of SNP TSC0022689
tatttatgagaty

SEQ ID NO: 90550 - DNA, 13 bp, Artificial Sequence
  Oligonucleotide for detection of SNP TSC0022689
ratctcataaata

SEQ ID NO: 90551 - DNA, 13 bp, Artificial Sequence
  Oligonucleotide for detection of SNP TSC0022689
tatttaggagaty

SEQ ID NO: 90552 - DNA, 13 bp, Artificial Sequence
  Oligonucleotide for detection of SNP TSC0022689
ratctcctaaata

SEQ ID NO: 90553 - DNA, 13 bp, Artificial Sequence
  Oligonucleotide for detection of SNP TSC0022689
tatttacgagaty

SEQ ID NO: 90554 - DNA, 13 bp, Artificial Sequence
  Oligonucleotide for detection of SNP TSC0022689
ratctcgtaaata

SEQ ID NO: 90555 - DNA, 13 bp, Artificial Sequence
  Oligonucleotide for detection of SNP TSC0022689
ggttttgtaaata

SEQ ID NO: 90556 - DNA, 13 bp, Artificial Sequence
  Oligonucleotide for detection of SNP TSC0022689
tatttacaaaacc

SEQ ID NO: 90557 - DNA, 13 bp, Artificial Sequence
  Oligonucleotide for detection of SNP TSC0022689
ggttttttaaata

SEQ ID NO: 90558 - DNA, 13 bp, Artificial Sequence
  Oligonucleotide for detection of SNP TSC0022689
tatttaaaaaacc

SEQ ID NO: 90559 - DNA, 13 bp, Artificial Sequence
  Oligonucleotide for detection of SNP TSC0022689
ggtttcgtaaata

SEQ ID NO: 90560 - DNA, 13 bp, Artificial Sequence
  Oligonucleotide for detection of SNP TSC0022689
tatttacgaaacc

SEQ ID NO: 90561 - DNA, 13 bp, Artificial Sequence
  Oligonucleotide for detection of SNP TSC0022697
gtatgttggtaaa

SEQ ID NO: 90562 - DNA, 13 bp, Artificial Sequence
  Oligonucleotide for detection of SNP TSC0022697
tttaccaacatac

SEQ ID NO: 90563 - DNA, 13 bp, Artificial Sequence
  Oligonucleotide for detection of SNP TSC0022697
gtatgtcggtaaa

SEQ ID NO: 90564 - DNA, 13 bp, Artificial Sequence
  Oligonucleotide for detection of SNP TSC0022697
tttaccgacatac

SEQ ID NO: 90565 - DNA, 13 bp, Artificial Sequence
  Oligonucleotide for detection of SNP TSC0022697
tttattgatatay

SEQ ID NO: 90566 - DNA, 13 bp, Artificial Sequence
  Oligonucleotide for detection of SNP TSC0022697
rtatatcaataaa

SEQ ID NO: 90567 - DNA, 13 bp, Artificial Sequence
  Oligonucleotide for detection of SNP TSC0022697
tttattaatatay

SEQ ID NO: 90568 - DNA, 13 bp, Artificial Sequence
  Oligonucleotide for detection of SNP TSC0022697
rtatattaataaa

SEQ ID NO: 90569 - DNA, 13 bp, Artificial Sequence
  Oligonucleotide for detection of SNP TSC0022697
tttatcgatatay

SEQ ID NO: 90570 - DNA, 13 bp, Artificial Sequence
  Oligonucleotide for detection of SNP TSC0022697
rtatatcgataaa

SEQ ID NO: 90571 - DNA, 13 bp, Artificial Sequence
  Oligonucleotide for detection of SNP TSC0022698
gtagtggaaatat

SEQ ID NO: 90572 - DNA, 13 bp, Artificial Sequence
  Oligonucleotide for detection of SNP TSC0022698
atatttccactac

SEQ ID NO: 90573 - DNA, 13 bp, Artificial Sequence
  Oligonucleotide for detection of SNP TSC0022698
gtagtgtaaatat

SEQ ID NO: 90574 - DNA, 13 bp, Artificial Sequence
  Oligonucleotide for detection of SNP TSC0022698
atatttacactac

SEQ ID NO: 90575 - DNA, 13 bp, Artificial Sequence
  Oligonucleotide for detection of SNP TSC0022698
atgtttttattay

SEQ ID NO: 90576 - DNA, 13 bp, Artificial Sequence
  Oligonucleotide for detection of SNP TSC0022698
rtaataaaaacat

SEQ ID NO: 90577 - DNA, 13 bp, Artificial Sequence
  Oligonucleotide for detection of SNP TSC0022698
atgtttatattay

SEQ ID NO: 90578 - DNA, 13 bp, Artificial Sequence
  Oligonucleotide for detection of SNP TSC0022698
rtaatataaacat

SEQ ID NO: 90579 - DNA, 13 bp, Artificial Sequence
  Oligonucleotide for detection of SNP TSC0022699
gttgttaaataaa

SEQ ID NO: 90580 - DNA, 13 bp, Artificial Sequence
  Oligonucleotide for detection of SNP TSC0022699
tttatttaacaac

SEQ ID NO: 90581 - DNA, 13 bp, Artificial Sequence
  Oligonucleotide for detection of SNP TSC0022699
gttgttgaataaa

SEQ ID NO: 90582 - DNA, 13 bp, Artificial Sequence
  Oligonucleotide for detection of SNP TSC0022699
tttattcaacaac

SEQ ID NO: 90583 - DNA, 13 bp, Artificial Sequence
  Oligonucleotide for detection of SNP TSC0022700
agtgattggaagt

SEQ ID NO: 90584 - DNA, 13 bp, Artificial Sequence
  Oligonucleotide for detection of SNP TSC0022700
acttccaatcact

SEQ ID NO: 90585 - DNA, 13 bp, Artificial Sequence
  Oligonucleotide for detection of SNP TSC0022700
agtgatcggaagt

SEQ ID NO: 90586 - DNA, 13 bp, Artificial Sequence
  Oligonucleotide for detection of SNP TSC0022700
acttccgatcact

SEQ ID NO: 90587 - DNA, 13 bp, Artificial Sequence
  Oligonucleotide for detection of SNP TSC0022700
atttttgattatt

SEQ ID NO: 90588 - DNA, 13 bp, Artificial Sequence
  Oligonucleotide for detection of SNP TSC0022700
aataatcaaaaat

SEQ ID NO: 90589 - DNA, 13 bp, Artificial Sequence
  Oligonucleotide for detection of SNP TSC0022700
atttttaattatt

SEQ ID NO: 90590 - DNA, 13 bp, Artificial Sequence
  Oligonucleotide for detection of SNP TSC0022700
aataattaaaaat

SEQ ID NO: 90591 - DNA, 13 bp, Artificial Sequence
  Oligonucleotide for detection of SNP TSC0022700
attttcgattatt

SEQ ID NO: 90592 - DNA, 13 bp, Artificial Sequence
  Oligonucleotide for detection of SNP TSC0022700
aataatcgaaaat

SEQ ID NO: 90593 - DNA, 13 bp, Artificial Sequence
  Oligonucleotide for detection of SNP TSC0022701
gaggatattgtty

SEQ ID NO: 90594 - DNA, 13 bp, Artificial Sequence
  Oligonucleotide for detection of SNP TSC0022701
raacaatatcctc

SEQ ID NO: 90595 - DNA, 13 bp, Artificial Sequence
  Oligonucleotide for detection of SNP TSC0022701
gaggatgttgtty

SEQ ID NO: 90596 - DNA, 13 bp, Artificial Sequence
  Oligonucleotide for detection of SNP TSC0022701
raacaacatcctc

SEQ ID NO: 90597 - DNA, 13 bp, Artificial Sequence
  Oligonucleotide for detection of SNP TSC0022702
aattttatgataa

SEQ ID NO: 90598 - DNA, 13 bp, Artificial Sequence
  Oligonucleotide for detection of SNP TSC0022702
ttatcataaaatt

SEQ ID NO: 90599 - DNA, 13 bp, Artificial Sequence
  Oligonucleotide for detection of SNP TSC0022702
aattttgtgataa

SEQ ID NO: 90600 - DNA, 13 bp, Artificial Sequence
  Oligonucleotide for detection of SNP TSC0022702
ttatcacaaaatt

SEQ ID NO: 90601 - DNA, 13 bp, Artificial Sequence
  Oligonucleotide for detection of SNP TSC0022702
aatttcgtgataa

SEQ ID NO: 90602 - DNA, 13 bp, Artificial Sequence
  Oligonucleotide for detection of SNP TSC0022702
ttatcacgaaatt

SEQ ID NO: 90603 - DNA, 13 bp, Artificial Sequence
  Oligonucleotide for detection of SNP TSC0022702
ttgttatggagtt

SEQ ID NO: 90604 - DNA, 13 bp, Artificial Sequence
  Oligonucleotide for detection of SNP TSC0022702
aactccataacaa

SEQ ID NO: 90605 - DNA, 13 bp, Artificial Sequence
  Oligonucleotide for detection of SNP TSC0022702
ttgttacggagtt

SEQ ID NO: 90606 - DNA, 13 bp, Artificial Sequence
  Oligonucleotide for detection of SNP TSC0022702
aactccgtaacaa

SEQ ID NO: 90607 - DNA, 13 bp, Artificial Sequence
  Oligonucleotide for detection of SNP TSC0022704
tatttgtgttgta

SEQ ID NO: 90608 - DNA, 13 bp, Artificial Sequence
  Oligonucleotide for detection of SNP TSC0022704
tacaacacaaata

SEQ ID NO: 90609 - DNA, 13 bp, Artificial Sequence
  Oligonucleotide for detection of SNP TSC0022704
tatttgcgttgta

SEQ ID NO: 90610 - DNA, 13 bp, Artificial Sequence
  Oligonucleotide for detection of SNP TSC0022704
tacaacgcaaata

SEQ ID NO: 90611 - DNA, 13 bp, Artificial Sequence
  Oligonucleotide for detection of SNP TSC0022704
tgtaatgtaggtg

SEQ ID NO: 90612 - DNA, 13 bp, Artificial Sequence
  Oligonucleotide for detection of SNP TSC0022704
cacctacattaca

SEQ ID NO: 90613 - DNA, 13 bp, Artificial Sequence
  Oligonucleotide for detection of SNP TSC0022704
tgtaatataggtg

SEQ ID NO: 90614 - DNA, 13 bp, Artificial Sequence
  Oligonucleotide for detection of SNP TSC0022704
cacctatattaca

SEQ ID NO: 90615 - DNA, 13 bp, Artificial Sequence
  Oligonucleotide for detection of SNP TSC0022704
tgtaacgtaggtg

SEQ ID NO: 90616 - DNA, 13 bp, Artificial Sequence
  Oligonucleotide for detection of SNP TSC0022704
cacctacgttaca

SEQ ID NO: 90617 - DNA, 13 bp, Artificial Sequence
  Oligonucleotide for detection of SNP TSC0022705
gggttaggtagag

SEQ ID NO: 90618 - DNA, 13 bp, Artificial Sequence
  Oligonucleotide for detection of SNP TSC0022705
ctctacctaaccc

SEQ ID NO: 90619 - DNA, 13 bp, Artificial Sequence
  Oligonucleotide for detection of SNP TSC0022705
gggttaagtagag

SEQ ID NO: 90620 - DNA, 13 bp, Artificial Sequence
  Oligonucleotide for detection of SNP TSC0022705
ctctacttaaccc

SEQ ID NO: 90621 - DNA, 13 bp, Artificial Sequence
  Oligonucleotide for detection of SNP TSC0022708
aaagaagaagaaa

SEQ ID NO: 90622 - DNA, 13 bp, Artificial Sequence
  Oligonucleotide for detection of SNP TSC0022708
tttcttcttcttt

SEQ ID NO: 90623 - DNA, 13 bp, Artificial Sequence
  Oligonucleotide for detection of SNP TSC0022708
aaagaaaaagaaa

SEQ ID NO: 90624 - DNA, 13 bp, Artificial Sequence
  Oligonucleotide for detection of SNP TSC0022708
tttctttttcttt

SEQ ID NO: 90625 - DNA, 13 bp, Artificial Sequence
  Oligonucleotide for detection of SNP TSC0022709
aagaaagaagaag

SEQ ID NO: 90626 - DNA, 13 bp, Artificial Sequence
  Oligonucleotide for detection of SNP TSC0022709
cttcttctttctt

SEQ ID NO: 90627 - DNA, 13 bp, Artificial Sequence
  Oligonucleotide for detection of SNP TSC0022709
aagaaaaaagaag

SEQ ID NO: 90628 - DNA, 13 bp, Artificial Sequence
  Oligonucleotide for detection of SNP TSC0022709
cttcttttttctt

SEQ ID NO: 90629 - DNA, 13 bp, Artificial Sequence
  Oligonucleotide for detection of SNP TSC0022710
gagtttatttgga

SEQ ID NO: 90630 - DNA, 13 bp, Artificial Sequence
  Oligonucleotide for detection of SNP TSC0022710
tccaaataaactc

SEQ ID NO: 90631 - DNA, 13 bp, Artificial Sequence
  Oligonucleotide for detection of SNP TSC0022710
gagtttgtttgga

SEQ ID NO: 90632 - DNA, 13 bp, Artificial Sequence
  Oligonucleotide for detection of SNP TSC0022710
tccaaacaaactc

SEQ ID NO: 90633 - DNA, 13 bp, Artificial Sequence
  Oligonucleotide for detection of SNP TSC0022710
gagttcgtttgga

SEQ ID NO: 90634 - DNA, 13 bp, Artificial Sequence
  Oligonucleotide for detection of SNP TSC0022710
tccaaacgaactc

SEQ ID NO: 90635 - DNA, 13 bp, Artificial Sequence
  Oligonucleotide for detection of SNP TSC0022710
tttaggtgggtty

SEQ ID NO: 90636 - DNA, 13 bp, Artificial Sequence
  Oligonucleotide for detection of SNP TSC0022710
raacccacctaaa

SEQ ID NO: 90637 - DNA, 13 bp, Artificial Sequence
  Oligonucleotide for detection of SNP TSC0022710
tttaggcgggtty

SEQ ID NO: 90638 - DNA, 13 bp, Artificial Sequence
  Oligonucleotide for detection of SNP TSC0022710
raacccgcctaaa

SEQ ID NO: 90639 - DNA, 13 bp, Artificial Sequence
  Oligonucleotide for detection of SNP TSC0022717
atttttatagaga

SEQ ID NO: 90640 - DNA, 13 bp, Artificial Sequence
  Oligonucleotide for detection of SNP TSC0022717
tctctataaaaat

SEQ ID NO: 90641 - DNA, 13 bp, Artificial Sequence
  Oligonucleotide for detection of SNP TSC0022717
atttttgtagaga

SEQ ID NO: 90642 - DNA, 13 bp, Artificial Sequence
  Oligonucleotide for detection of SNP TSC0022717
tctctacaaaaat

SEQ ID NO: 90643 - DNA, 13 bp, Artificial Sequence
  Oligonucleotide for detection of SNP TSC0022717
attttcgtagaga

SEQ ID NO: 90644 - DNA, 13 bp, Artificial Sequence
  Oligonucleotide for detection of SNP TSC0022717
tctctacgaaaat

SEQ ID NO: 90645 - DNA, 13 bp, Artificial Sequence
  Oligonucleotide for detection of SNP TSC0022717
tttttatggaaat

SEQ ID NO: 90646 - DNA, 13 bp, Artificial Sequence
  Oligonucleotide for detection of SNP TSC0022717
atttccataaaaa

SEQ ID NO: 90647 - DNA, 13 bp, Artificial Sequence
  Oligonucleotide for detection of SNP TSC0022717
tttttacggaaat

SEQ ID NO: 90648 - DNA, 13 bp, Artificial Sequence
  Oligonucleotide for detection of SNP TSC0022717
atttccgtaaaaa

SEQ ID NO: 90649 - DNA, 13 bp, Artificial Sequence
  Oligonucleotide for detection of SNP TSC0022718
ttttggattttgt

SEQ ID NO: 90650 - DNA, 13 bp, Artificial Sequence
  Oligonucleotide for detection of SNP TSC0022718
acaaaatccaaaa

SEQ ID NO: 90651 - DNA, 13 bp, Artificial Sequence
  Oligonucleotide for detection of SNP TSC0022718
ttttgggttttgt

SEQ ID NO: 90652 - DNA, 13 bp, Artificial Sequence
  Oligonucleotide for detection of SNP TSC0022718
acaaaacccaaaa

SEQ ID NO: 90653 - DNA, 13 bp, Artificial Sequence
  Oligonucleotide for detection of SNP TSC0022721
ttatagtaaatgy

SEQ ID NO: 90654 - DNA, 13 bp, Artificial Sequence
  Oligonucleotide for detection of SNP TSC0022721
rcatttactataa

SEQ ID NO: 90655 - DNA, 13 bp, Artificial Sequence
  Oligonucleotide for detection of SNP TSC0022721
ttataggaaatgy

SEQ ID NO: 90656 - DNA, 13 bp, Artificial Sequence
  Oligonucleotide for detection of SNP TSC0022721
rcatttcctataa

SEQ ID NO: 90657 - DNA, 13 bp, Artificial Sequence
  Oligonucleotide for detection of SNP TSC0022721
gtatttgttatga

SEQ ID NO: 90658 - DNA, 13 bp, Artificial Sequence
  Oligonucleotide for detection of SNP TSC0022721
tcataacaaatac

SEQ ID NO: 90659 - DNA, 13 bp, Artificial Sequence
  Oligonucleotide for detection of SNP TSC0022721
gtattttttatga

SEQ ID NO: 90660 - DNA, 13 bp, Artificial Sequence
  Oligonucleotide for detection of SNP TSC0022721
tcataaaaaatac

SEQ ID NO: 90661 - DNA, 13 bp, Artificial Sequence
  Oligonucleotide for detection of SNP TSC0022723
gaaggaatgaggg

SEQ ID NO: 90662 - DNA, 13 bp, Artificial Sequence
  Oligonucleotide for detection of SNP TSC0022723
ccctcattccttc

SEQ ID NO: 90663 - DNA, 13 bp, Artificial Sequence
  Oligonucleotide for detection of SNP TSC0022723
gaaggagtgaggg

SEQ ID NO: 90664 - DNA, 13 bp, Artificial Sequence
  Oligonucleotide for detection of SNP TSC0022723
ccctcactccttc

SEQ ID NO: 90665 - DNA, 13 bp, Artificial Sequence
  Oligonucleotide for detection of SNP TSC0022724
gtttttttgagaa

SEQ ID NO: 90666 - DNA, 13 bp, Artificial Sequence
  Oligonucleotide for detection of SNP TSC0022724
ttctcaaaaaaac

SEQ ID NO: 90667 - DNA, 13 bp, Artificial Sequence
  Oligonucleotide for detection of SNP TSC0022724
gtttttgtgagaa

SEQ ID NO: 90668 - DNA, 13 bp, Artificial Sequence
  Oligonucleotide for detection of SNP TSC0022724
ttctcacaaaaac

SEQ ID NO: 90669 - DNA, 13 bp, Artificial Sequence
  Oligonucleotide for detection of SNP TSC0022724
tttttagagaaay

SEQ ID NO: 90670 - DNA, 13 bp, Artificial Sequence
  Oligonucleotide for detection of SNP TSC0022724
rtttctctaaaaa

SEQ ID NO: 90671 - DNA, 13 bp, Artificial Sequence
  Oligonucleotide for detection of SNP TSC0022724
tttttatagaaay

SEQ ID NO: 90672 - DNA, 13 bp, Artificial Sequence
  Oligonucleotide for detection of SNP TSC0022724
rtttctataaaaa

SEQ ID NO: 90673 - DNA, 13 bp, Artificial Sequence
  Oligonucleotide for detection of SNP TSC0022725
gaaatatgtgtta

SEQ ID NO: 90674 - DNA, 13 bp, Artificial Sequence
  Oligonucleotide for detection of SNP TSC0022725
taacacatatttc

SEQ ID NO: 90675 - DNA, 13 bp, Artificial Sequence
  Oligonucleotide for detection of SNP TSC0022725
gaaatacgtgtta

SEQ ID NO: 90676 - DNA, 13 bp, Artificial Sequence
  Oligonucleotide for detection of SNP TSC0022725
taacacgtatttc

SEQ ID NO: 90677 - DNA, 13 bp, Artificial Sequence
  Oligonucleotide for detection of SNP TSC0022725
taatatgtattty

SEQ ID NO: 90678 - DNA, 13 bp, Artificial Sequence
  Oligonucleotide for detection of SNP TSC0022725
raaatacatatta

SEQ ID NO: 90679 - DNA, 13 bp, Artificial Sequence
  Oligonucleotide for detection of SNP TSC0022725
taatatatattty

SEQ ID NO: 90680 - DNA, 13 bp, Artificial Sequence
  Oligonucleotide for detection of SNP TSC0022725
raaatatatatta

SEQ ID NO: 90681 - DNA, 13 bp, Artificial Sequence
  Oligonucleotide for detection of SNP TSC0022725
taatacgtattty

SEQ ID NO: 90682 - DNA, 13 bp, Artificial Sequence
  Oligonucleotide for detection of SNP TSC0022725
raaatacgtatta

SEQ ID NO: 90683 - DNA, 13 bp, Artificial Sequence
  Oligonucleotide for detection of SNP TSC0022726
aagttaataatat

SEQ ID NO: 90684 - DNA, 13 bp, Artificial Sequence
  Oligonucleotide for detection of SNP TSC0022726
atattattaactt

SEQ ID NO: 90685 - DNA, 13 bp, Artificial Sequence
  Oligonucleotide for detection of SNP TSC0022726
aagttagtaatat

SEQ ID NO: 90686 - DNA, 13 bp, Artificial Sequence
  Oligonucleotide for detection of SNP TSC0022726
atattactaactt

SEQ ID NO: 90687 - DNA, 13 bp, Artificial Sequence
  Oligonucleotide for detection of SNP TSC0022728
aagagagtaattt

SEQ ID NO: 90688 - DNA, 13 bp, Artificial Sequence
  Oligonucleotide for detection of SNP TSC0022728
aaattactctctt

SEQ ID NO: 90689 - DNA, 13 bp, Artificial Sequence
  Oligonucleotide for detection of SNP TSC0022728
aagagaataattt

SEQ ID NO: 90690 - DNA, 13 bp, Artificial Sequence
  Oligonucleotide for detection of SNP TSC0022728
aaattattctctt

SEQ ID NO: 90691 - DNA, 13 bp, Artificial Sequence
  Oligonucleotide for detection of SNP TSC0022735
ggttttaagttag

SEQ ID NO: 90692 - DNA, 13 bp, Artificial Sequence
  Oligonucleotide for detection of SNP TSC0022735
ctaacttaaaacc

SEQ ID NO: 90693 - DNA, 13 bp, Artificial Sequence
  Oligonucleotide for detection of SNP TSC0022735
ggttttgagttag

SEQ ID NO: 90694 - DNA, 13 bp, Artificial Sequence
  Oligonucleotide for detection of SNP TSC0022735
ctaactcaaaacc

SEQ ID NO: 90695 - DNA, 13 bp, Artificial Sequence
  Oligonucleotide for detection of SNP TSC0022735
ggtttttagttag

SEQ ID NO: 90696 - DNA, 13 bp, Artificial Sequence
  Oligonucleotide for detection of SNP TSC0022735
ctaactaaaaacc

SEQ ID NO: 90697 - DNA, 13 bp, Artificial Sequence
  Oligonucleotide for detection of SNP TSC0022735
ggtttcgagttag

SEQ ID NO: 90698 - DNA, 13 bp, Artificial Sequence
  Oligonucleotide for detection of SNP TSC0022735
ctaactcgaaacc

SEQ ID NO: 90699 - DNA, 13 bp, Artificial Sequence
  Oligonucleotide for detection of SNP TSC0022735
ttaatttgggaty

SEQ ID NO: 90700 - DNA, 13 bp, Artificial Sequence
  Oligonucleotide for detection of SNP TSC0022735
ratcccaaattaa

SEQ ID NO: 90701 - DNA, 13 bp, Artificial Sequence
  Oligonucleotide for detection of SNP TSC0022735
ttaattagggaty

SEQ ID NO: 90702 - DNA, 13 bp, Artificial Sequence
  Oligonucleotide for detection of SNP TSC0022735
ratccctaattaa

SEQ ID NO: 90703 - DNA, 13 bp, Artificial Sequence
  Oligonucleotide for detection of SNP TSC0022735
ttaattcgggaty

SEQ ID NO: 90704 - DNA, 13 bp, Artificial Sequence
  Oligonucleotide for detection of SNP TSC0022735
ratcccgaattaa

SEQ ID NO: 90705 - DNA, 13 bp, Artificial Sequence
  Oligonucleotide for detection of SNP TSC0022736
ataaatatgaatt

SEQ ID NO: 90706 - DNA, 13 bp, Artificial Sequence
  Oligonucleotide for detection of SNP TSC0022736
aattcatatttat

SEQ ID NO: 90707 - DNA, 13 bp, Artificial Sequence
  Oligonucleotide for detection of SNP TSC0022736
ataaatgtgaatt

SEQ ID NO: 90708 - DNA, 13 bp, Artificial Sequence
  Oligonucleotide for detection of SNP TSC0022736
aattcacatttat

SEQ ID NO: 90709 - DNA, 13 bp, Artificial Sequence
  Oligonucleotide for detection of SNP TSC0022737
tgtttttgtagtt

SEQ ID NO: 90710 - DNA, 13 bp, Artificial Sequence
  Oligonucleotide for detection of SNP TSC0022737
aactacaaaaaca

SEQ ID NO: 90711 - DNA, 13 bp, Artificial Sequence
  Oligonucleotide for detection of SNP TSC0022737
cgtttttgtagtt

SEQ ID NO: 90712 - DNA, 13 bp, Artificial Sequence
  Oligonucleotide for detection of SNP TSC0022737
aactacaaaaacg

SEQ ID NO: 90713 - DNA, 13 bp, Artificial Sequence
  Oligonucleotide for detection of SNP TSC0022737
tgttttcgtagtt

SEQ ID NO: 90714 - DNA, 13 bp, Artificial Sequence
  Oligonucleotide for detection of SNP TSC0022737
aactacgaaaaca

SEQ ID NO: 90715 - DNA, 13 bp, Artificial Sequence
  Oligonucleotide for detection of SNP TSC0022737
cgttttcgtagtt

SEQ ID NO: 90716 - DNA, 13 bp, Artificial Sequence
  Oligonucleotide for detection of SNP TSC0022737
aactacgaaaacg

SEQ ID NO: 90717 - DNA, 13 bp, Artificial Sequence
  Oligonucleotide for detection of SNP TSC0022737
agttgtggaaatg

SEQ ID NO: 90718 - DNA, 13 bp, Artificial Sequence
  Oligonucleotide for detection of SNP TSC0022737
catttccacaact

SEQ ID NO: 90719 - DNA, 13 bp, Artificial Sequence
  Oligonucleotide for detection of SNP TSC0022737
agttgtagaaatg

SEQ ID NO: 90720 - DNA, 13 bp, Artificial Sequence
  Oligonucleotide for detection of SNP TSC0022737
catttctacaact

SEQ ID NO: 90721 - DNA, 13 bp, Artificial Sequence
  Oligonucleotide for detection of SNP TSC0022737
agttgcggaaatg

SEQ ID NO: 90722 - DNA, 13 bp, Artificial Sequence
  Oligonucleotide for detection of SNP TSC0022737
catttccgcaact

SEQ ID NO: 90723 - DNA, 13 bp, Artificial Sequence
  Oligonucleotide for detection of SNP TSC0022737
agttgtagaaacg

SEQ ID NO: 90724 - DNA, 13 bp, Artificial Sequence
  Oligonucleotide for detection of SNP TSC0022737
cgtttctacaact

SEQ ID NO: 90725 - DNA, 13 bp, Artificial Sequence
  Oligonucleotide for detection of SNP TSC0022737
agttgtggaaacg

SEQ ID NO: 90726 - DNA, 13 bp, Artificial Sequence
  Oligonucleotide for detection of SNP TSC0022737
cgtttccacaact

SEQ ID NO: 90727 - DNA, 13 bp, Artificial Sequence
  Oligonucleotide for detection of SNP TSC0022737
agttgcggaaacg

SEQ ID NO: 90728 - DNA, 13 bp, Artificial Sequence
  Oligonucleotide for detection of SNP TSC0022737
cgtttccgcaact

SEQ ID NO: 90729 - DNA, 13 bp, Artificial Sequence
  Oligonucleotide for detection of SNP TSC0022738
taggtttgttttt

SEQ ID NO: 90730 - DNA, 13 bp, Artificial Sequence
  Oligonucleotide for detection of SNP TSC0022738
aaaaacaaaccta

SEQ ID NO: 90731 - DNA, 13 bp, Artificial Sequence
  Oligonucleotide for detection of SNP TSC0022738
taggttcgttttt

SEQ ID NO: 90732 - DNA, 13 bp, Artificial Sequence
  Oligonucleotide for detection of SNP TSC0022738
aaaaacgaaccta

SEQ ID NO: 90733 - DNA, 13 bp, Artificial Sequence
  Oligonucleotide for detection of SNP TSC0022738
agaagtgaatttg

SEQ ID NO: 90734 - DNA, 13 bp, Artificial Sequence
  Oligonucleotide for detection of SNP TSC0022738
caaattcacttct

SEQ ID NO: 90735 - DNA, 13 bp, Artificial Sequence
  Oligonucleotide for detection of SNP TSC0022738
agaagtaaatttg

SEQ ID NO: 90736 - DNA, 13 bp, Artificial Sequence
  Oligonucleotide for detection of SNP TSC0022738
caaatttacttct

SEQ ID NO: 90737 - DNA, 13 bp, Artificial Sequence
  Oligonucleotide for detection of SNP TSC0022738
agaagcgaatttg

SEQ ID NO: 90738 - DNA, 13 bp, Artificial Sequence
  Oligonucleotide for detection of SNP TSC0022738
caaattcgcttct

SEQ ID NO: 90739 - DNA, 13 bp, Artificial Sequence
  Oligonucleotide for detection of SNP TSC0022740
tttttagtttgtt

SEQ ID NO: 90740 - DNA, 13 bp, Artificial Sequence
  Oligonucleotide for detection of SNP TSC0022740
aacaaactaaaaa

SEQ ID NO: 90741 - DNA, 13 bp, Artificial Sequence
  Oligonucleotide for detection of SNP TSC0022741
ttaattattggty

SEQ ID NO: 90742 - DNA, 13 bp, Artificial Sequence
  Oligonucleotide for detection of SNP TSC0022741
raccaataattaa

SEQ ID NO: 90743 - DNA, 13 bp, Artificial Sequence
  Oligonucleotide for detection of SNP TSC0022741
ttaatttttggty

SEQ ID NO: 90744 - DNA, 13 bp, Artificial Sequence
  Oligonucleotide for detection of SNP TSC0022741
raccaaaaattaa

SEQ ID NO: 90745 - DNA, 13 bp, Artificial Sequence
  Oligonucleotide for detection of SNP TSC0022741
ttaattatcggty

SEQ ID NO: 90746 - DNA, 13 bp, Artificial Sequence
  Oligonucleotide for detection of SNP TSC0022741
raccgataattaa

SEQ ID NO: 90747 - DNA, 13 bp, Artificial Sequence
  Oligonucleotide for detection of SNP TSC0022741
ttaattttcggty

SEQ ID NO: 90748 - DNA, 13 bp, Artificial Sequence
  Oligonucleotide for detection of SNP TSC0022741
raccgaaaattaa

SEQ ID NO: 90749 - DNA, 13 bp, Artificial Sequence
  Oligonucleotide for detection of SNP TSC0022741
ggttggtaattga

SEQ ID NO: 90750 - DNA, 13 bp, Artificial Sequence
  Oligonucleotide for detection of SNP TSC0022741
tcaattaccaacc

SEQ ID NO: 90751 - DNA, 13 bp, Artificial Sequence
  Oligonucleotide for detection of SNP TSC0022741
ggttggaaattga

SEQ ID NO: 90752 - DNA, 13 bp, Artificial Sequence
  Oligonucleotide for detection of SNP TSC0022741
tcaatttccaacc

SEQ ID NO: 90753 - DNA, 13 bp, Artificial Sequence
  Oligonucleotide for detection of SNP TSC0022741
ggtcggtaattga

SEQ ID NO: 90754 - DNA, 13 bp, Artificial Sequence
  Oligonucleotide for detection of SNP TSC0022741
tcaattaccgacc

SEQ ID NO: 90755 - DNA, 13 bp, Artificial Sequence
  Oligonucleotide for detection of SNP TSC0022741
ggtcggaaattga

SEQ ID NO: 90756 - DNA, 13 bp, Artificial Sequence
  Oligonucleotide for detection of SNP TSC0022741
tcaatttccgacc

SEQ ID NO: 90757 - DNA, 13 bp, Artificial Sequence
  Oligonucleotide for detection of SNP TSC0022748
ttggaaatatatg

SEQ ID NO: 90758 - DNA, 13 bp, Artificial Sequence
  Oligonucleotide for detection of SNP TSC0022748
catatatttccaa

SEQ ID NO: 90759 - DNA, 13 bp, Artificial Sequence
  Oligonucleotide for detection of SNP TSC0022748
ttggaattatatg

SEQ ID NO: 90760 - DNA, 13 bp, Artificial Sequence
  Oligonucleotide for detection of SNP TSC0022748
catataattccaa

SEQ ID NO: 90761 - DNA, 13 bp, Artificial Sequence
  Oligonucleotide for detection of SNP TSC0022748
tatgtgtttttag

SEQ ID NO: 90762 - DNA, 13 bp, Artificial Sequence
  Oligonucleotide for detection of SNP TSC0022748
ctaaaaacacata

SEQ ID NO: 90763 - DNA, 13 bp, Artificial Sequence
  Oligonucleotide for detection of SNP TSC0022748
tatgtggttttag

SEQ ID NO: 90764 - DNA, 13 bp, Artificial Sequence
  Oligonucleotide for detection of SNP TSC0022748
ctaaaaccacata

SEQ ID NO: 90765 - DNA, 13 bp, Artificial Sequence
  Oligonucleotide for detection of SNP TSC0022750
agtattatgtttt

SEQ ID NO: 90766 - DNA, 13 bp, Artificial Sequence
  Oligonucleotide for detection of SNP TSC0022750
aaaacataatact

SEQ ID NO: 90767 - DNA, 13 bp, Artificial Sequence
  Oligonucleotide for detection of SNP TSC0022750
agtattgtgtttt

SEQ ID NO: 90768 - DNA, 13 bp, Artificial Sequence
  Oligonucleotide for detection of SNP TSC0022750
aaaacacaatact

SEQ ID NO: 90769 - DNA, 13 bp, Artificial Sequence
  Oligonucleotide for detection of SNP TSC0022750
agtatcgtgtttt

SEQ ID NO: 90770 - DNA, 13 bp, Artificial Sequence
  Oligonucleotide for detection of SNP TSC0022750
aaaacacgatact

SEQ ID NO: 90771 - DNA, 13 bp, Artificial Sequence
  Oligonucleotide for detection of SNP TSC0022750
aggatatgatgtt

SEQ ID NO: 90772 - DNA, 13 bp, Artificial Sequence
  Oligonucleotide for detection of SNP TSC0022750
aacatcatatcct

SEQ ID NO: 90773 - DNA, 13 bp, Artificial Sequence
  Oligonucleotide for detection of SNP TSC0022750
aggatacgatgtt

SEQ ID NO: 90774 - DNA, 13 bp, Artificial Sequence
  Oligonucleotide for detection of SNP TSC0022750
aacatcgtatcct

SEQ ID NO: 90775 - DNA, 13 bp, Artificial Sequence
  Oligonucleotide for detection of SNP TSC0022751
tttaaggttagta

SEQ ID NO: 90776 - DNA, 13 bp, Artificial Sequence
  Oligonucleotide for detection of SNP TSC0022751
tactaaccttaaa

SEQ ID NO: 90777 - DNA, 13 bp, Artificial Sequence
  Oligonucleotide for detection of SNP TSC0022751
tttaagtttagta

SEQ ID NO: 90778 - DNA, 13 bp, Artificial Sequence
  Oligonucleotide for detection of SNP TSC0022751
tactaaacttaaa

SEQ ID NO: 90779 - DNA, 13 bp, Artificial Sequence
  Oligonucleotide for detection of SNP TSC0022751
tgttaattttgaa

SEQ ID NO: 90780 - DNA, 13 bp, Artificial Sequence
  Oligonucleotide for detection of SNP TSC0022751
ttcaaaattaaca

SEQ ID NO: 90781 - DNA, 13 bp, Artificial Sequence
  Oligonucleotide for detection of SNP TSC0022751
tgttaaatttgaa

SEQ ID NO: 90782 - DNA, 13 bp, Artificial Sequence
  Oligonucleotide for detection of SNP TSC0022751
ttcaaatttaaca

SEQ ID NO: 90783 - DNA, 13 bp, Artificial Sequence
  Oligonucleotide for detection of SNP TSC0022752
aaattgaaattta

SEQ ID NO: 90784 - DNA, 13 bp, Artificial Sequence
  Oligonucleotide for detection of SNP TSC0022752
taaatttcaattt

SEQ ID NO: 90785 - DNA, 13 bp, Artificial Sequence
  Oligonucleotide for detection of SNP TSC0022752
aaattggaattta

SEQ ID NO: 90786 - DNA, 13 bp, Artificial Sequence
  Oligonucleotide for detection of SNP TSC0022752
taaattccaattt

SEQ ID NO: 90787 - DNA, 13 bp, Artificial Sequence
  Oligonucleotide for detection of SNP TSC0022756
ggtggtgagattt

SEQ ID NO: 90788 - DNA, 13 bp, Artificial Sequence
  Oligonucleotide for detection of SNP TSC0022756
aaatctcaccacc

SEQ ID NO: 90789 - DNA, 13 bp, Artificial Sequence
  Oligonucleotide for detection of SNP TSC0022756
ggtggtaagattt

SEQ ID NO: 90790 - DNA, 13 bp, Artificial Sequence
  Oligonucleotide for detection of SNP TSC0022756
aaatcttaccacc

SEQ ID NO: 90791 - DNA, 13 bp, Artificial Sequence
  Oligonucleotide for detection of SNP TSC0022756
ggcggtgagattt

SEQ ID NO: 90792 - DNA, 13 bp, Artificial Sequence
  Oligonucleotide for detection of SNP TSC0022756
aaatctcaccgcc

SEQ ID NO: 90793 - DNA, 13 bp, Artificial Sequence
  Oligonucleotide for detection of SNP TSC0022756
ggcggtaagattt

SEQ ID NO: 90794 - DNA, 13 bp, Artificial Sequence
  Oligonucleotide for detection of SNP TSC0022756
aaatcttaccgcc

SEQ ID NO: 90795 - DNA, 13 bp, Artificial Sequence
  Oligonucleotide for detection of SNP TSC0022757
aatagtagtttgg

SEQ ID NO: 90796 - DNA, 13 bp, Artificial Sequence
  Oligonucleotide for detection of SNP TSC0022757
ccaaactactatt

SEQ ID NO: 90797 - DNA, 13 bp, Artificial Sequence
  Oligonucleotide for detection of SNP TSC0022757
aatagttgtttgg

SEQ ID NO: 90798 - DNA, 13 bp, Artificial Sequence
  Oligonucleotide for detection of SNP TSC0022757
ccaaacaactatt

SEQ ID NO: 90799 - DNA, 13 bp, Artificial Sequence
  Oligonucleotide for detection of SNP TSC0022757
aatagtcgtttgg

SEQ ID NO: 90800 - DNA, 13 bp, Artificial Sequence
  Oligonucleotide for detection of SNP TSC0022757
ccaaacgactatt

SEQ ID NO: 90801 - DNA, 13 bp, Artificial Sequence
  Oligonucleotide for detection of SNP TSC0022757
ttaagttattgtt

SEQ ID NO: 90802 - DNA, 13 bp, Artificial Sequence
  Oligonucleotide for detection of SNP TSC0022757
aacaataacttaa

SEQ ID NO: 90803 - DNA, 13 bp, Artificial Sequence
  Oligonucleotide for detection of SNP TSC0022757
ttaagtgattgtt

SEQ ID NO: 90804 - DNA, 13 bp, Artificial Sequence
  Oligonucleotide for detection of SNP TSC0022757
aacaatcacttaa

SEQ ID NO: 90805 - DNA, 13 bp, Artificial Sequence
  Oligonucleotide for detection of SNP TSC0022757
ttaagcgattgtt

SEQ ID NO: 90806 - DNA, 13 bp, Artificial Sequence
  Oligonucleotide for detection of SNP TSC0022757
aacaatcgcttaa

SEQ ID NO: 90807 - DNA, 13 bp, Artificial Sequence
  Oligonucleotide for detection of SNP TSC0022758
attttttattatt

SEQ ID NO: 90808 - DNA, 13 bp, Artificial Sequence
  Oligonucleotide for detection of SNP TSC0022758
aataataaaaaat

SEQ ID NO: 90809 - DNA, 13 bp, Artificial Sequence
  Oligonucleotide for detection of SNP TSC0022758
agtagttgagaat

SEQ ID NO: 90810 - DNA, 13 bp, Artificial Sequence
  Oligonucleotide for detection of SNP TSC0022758
attctcaactact

SEQ ID NO: 90811 - DNA, 13 bp, Artificial Sequence
  Oligonucleotide for detection of SNP TSC0022758
agtagtagagaat

SEQ ID NO: 90812 - DNA, 13 bp, Artificial Sequence
  Oligonucleotide for detection of SNP TSC0022758
attctctactact

SEQ ID NO: 90813 - DNA, 13 bp, Artificial Sequence
  Oligonucleotide for detection of SNP TSC0022761
tattgaagttttg

SEQ ID NO: 90814 - DNA, 13 bp, Artificial Sequence
  Oligonucleotide for detection of SNP TSC0022761
caaaacttcaata

SEQ ID NO: 90815 - DNA, 13 bp, Artificial Sequence
  Oligonucleotide for detection of SNP TSC0022761
tattgaggttttg

SEQ ID NO: 90816 - DNA, 13 bp, Artificial Sequence
  Oligonucleotide for detection of SNP TSC0022761
caaaacctcaata

SEQ ID NO: 90817 - DNA, 13 bp, Artificial Sequence
  Oligonucleotide for detection of SNP TSC0022762
atttgatgtagtg

SEQ ID NO: 90818 - DNA, 13 bp, Artificial Sequence
  Oligonucleotide for detection of SNP TSC0022762
cactacatcaaat

SEQ ID NO: 90819 - DNA, 13 bp, Artificial Sequence
  Oligonucleotide for detection of SNP TSC0022762
atttgacgtagtg

SEQ ID NO: 90820 - DNA, 13 bp, Artificial Sequence
  Oligonucleotide for detection of SNP TSC0022762
cactacgtcaaat

SEQ ID NO: 90821 - DNA, 13 bp, Artificial Sequence
  Oligonucleotide for detection of SNP TSC0022762
tattatgttaagt

SEQ ID NO: 90822 - DNA, 13 bp, Artificial Sequence
  Oligonucleotide for detection of SNP TSC0022762
acttaacataata

SEQ ID NO: 90823 - DNA, 13 bp, Artificial Sequence
  Oligonucleotide for detection of SNP TSC0022762
tattatattaagt

SEQ ID NO: 90824 - DNA, 13 bp, Artificial Sequence
  Oligonucleotide for detection of SNP TSC0022762
acttaatataata

SEQ ID NO: 90825 - DNA, 13 bp, Artificial Sequence
  Oligonucleotide for detection of SNP TSC0022762
tattacgttaagt

SEQ ID NO: 90826 - DNA, 13 bp, Artificial Sequence
  Oligonucleotide for detection of SNP TSC0022762
acttaacgtaata

SEQ ID NO: 90827 - DNA, 13 bp, Artificial Sequence
  Oligonucleotide for detection of SNP TSC0022764
gttaaaaaatttg

SEQ ID NO: 90828 - DNA, 13 bp, Artificial Sequence
  Oligonucleotide for detection of SNP TSC0022764
caaattttttaac

SEQ ID NO: 90829 - DNA, 13 bp, Artificial Sequence
  Oligonucleotide for detection of SNP TSC0022764
gttaaataatttg

SEQ ID NO: 90830 - DNA, 13 bp, Artificial Sequence
  Oligonucleotide for detection of SNP TSC0022764
caaattatttaac

SEQ ID NO: 90831 - DNA, 13 bp, Artificial Sequence
  Oligonucleotide for detection of SNP TSC0022764
taagttttttaay

SEQ ID NO: 90832 - DNA, 13 bp, Artificial Sequence
  Oligonucleotide for detection of SNP TSC0022764
rttaaaaaactta

SEQ ID NO: 90833 - DNA, 13 bp, Artificial Sequence
  Oligonucleotide for detection of SNP TSC0022764
taagttatttaay

SEQ ID NO: 90834 - DNA, 13 bp, Artificial Sequence
  Oligonucleotide for detection of SNP TSC0022764
rttaaataactta

SEQ ID NO: 90835 - DNA, 13 bp, Artificial Sequence
  Oligonucleotide for detection of SNP TSC0022770
tgggttgttttaa

SEQ ID NO: 90836 - DNA, 13 bp, Artificial Sequence
  Oligonucleotide for detection of SNP TSC0022770
ttaaaacaaccca

SEQ ID NO: 90837 - DNA, 13 bp, Artificial Sequence
  Oligonucleotide for detection of SNP TSC0022770
tgggtttttttaa

SEQ ID NO: 90838 - DNA, 13 bp, Artificial Sequence
  Oligonucleotide for detection of SNP TSC0022770
ttaaaaaaaccca

SEQ ID NO: 90839 - DNA, 13 bp, Artificial Sequence
  Oligonucleotide for detection of SNP TSC0022770
ttggggtaattta

SEQ ID NO: 90840 - DNA, 13 bp, Artificial Sequence
  Oligonucleotide for detection of SNP TSC0022770
taaattaccccaa

SEQ ID NO: 90841 - DNA, 13 bp, Artificial Sequence
  Oligonucleotide for detection of SNP TSC0022770
ttggggaaattta

SEQ ID NO: 90842 - DNA, 13 bp, Artificial Sequence
  Oligonucleotide for detection of SNP TSC0022770
taaatttccccaa

SEQ ID NO: 90843 - DNA, 13 bp, Artificial Sequence
  Oligonucleotide for detection of SNP TSC0022775
ttattggtagaaa

SEQ ID NO: 90844 - DNA, 13 bp, Artificial Sequence
  Oligonucleotide for detection of SNP TSC0022775
tttctaccaataa

SEQ ID NO: 90845 - DNA, 13 bp, Artificial Sequence
  Oligonucleotide for detection of SNP TSC0022784
gggagattttgtg

SEQ ID NO: 90846 - DNA, 13 bp, Artificial Sequence
  Oligonucleotide for detection of SNP TSC0022784
cacaaaatctccc

SEQ ID NO: 90847 - DNA, 13 bp, Artificial Sequence
  Oligonucleotide for detection of SNP TSC0022784
gggagagtttgtg

SEQ ID NO: 90848 - DNA, 13 bp, Artificial Sequence
  Oligonucleotide for detection of SNP TSC0022784
cacaaactctccc

SEQ ID NO: 90849 - DNA, 13 bp, Artificial Sequence
  Oligonucleotide for detection of SNP TSC0022784
gggagattttgcg

SEQ ID NO: 90850 - DNA, 13 bp, Artificial Sequence
  Oligonucleotide for detection of SNP TSC0022784
cgcaaaatctccc

SEQ ID NO: 90851 - DNA, 13 bp, Artificial Sequence
  Oligonucleotide for detection of SNP TSC0022784
gggagagtttgcg

SEQ ID NO: 90852 - DNA, 13 bp, Artificial Sequence
  Oligonucleotide for detection of SNP TSC0022784
cgcaaactctccc

SEQ ID NO: 90853 - DNA, 13 bp, Artificial Sequence
  Oligonucleotide for detection of SNP TSC0022784
tgtaaagttttty

SEQ ID NO: 90854 - DNA, 13 bp, Artificial Sequence
  Oligonucleotide for detection of SNP TSC0022784
raaaaactttaca

SEQ ID NO: 90855 - DNA, 13 bp, Artificial Sequence
  Oligonucleotide for detection of SNP TSC0022784
tgtaaatttttty

SEQ ID NO: 90856 - DNA, 13 bp, Artificial Sequence
  Oligonucleotide for detection of SNP TSC0022784
raaaaaatttaca

SEQ ID NO: 90857 - DNA, 13 bp, Artificial Sequence
  Oligonucleotide for detection of SNP TSC0022784
cgtaaagttttty

SEQ ID NO: 90858 - DNA, 13 bp, Artificial Sequence
  Oligonucleotide for detection of SNP TSC0022784
raaaaactttacg

SEQ ID NO: 90859 - DNA, 13 bp, Artificial Sequence
  Oligonucleotide for detection of SNP TSC0022784
cgtaaatttttty

SEQ ID NO: 90860 - DNA, 13 bp, Artificial Sequence
  Oligonucleotide for detection of SNP TSC0022784
raaaaaatttacg

SEQ ID NO: 90861 - DNA, 13 bp, Artificial Sequence
  Oligonucleotide for detection of SNP TSC0022785
atggggatagaga

SEQ ID NO: 90862 - DNA, 13 bp, Artificial Sequence
  Oligonucleotide for detection of SNP TSC0022785
tctctatccccat

SEQ ID NO: 90863 - DNA, 13 bp, Artificial Sequence
  Oligonucleotide for detection of SNP TSC0022785
atggggttagaga

SEQ ID NO: 90864 - DNA, 13 bp, Artificial Sequence
  Oligonucleotide for detection of SNP TSC0022785
tctctaaccccat

SEQ ID NO: 90865 - DNA, 13 bp, Artificial Sequence
  Oligonucleotide for detection of SNP TSC0022785
acggggatagaga

SEQ ID NO: 90866 - DNA, 13 bp, Artificial Sequence
  Oligonucleotide for detection of SNP TSC0022785
tctctatccccgt

SEQ ID NO: 90867 - DNA, 13 bp, Artificial Sequence
  Oligonucleotide for detection of SNP TSC0022785
acggggttagaga

SEQ ID NO: 90868 - DNA, 13 bp, Artificial Sequence
  Oligonucleotide for detection of SNP TSC0022785
tctctaaccccgt

SEQ ID NO: 90869 - DNA, 13 bp, Artificial Sequence
  Oligonucleotide for detection of SNP TSC0022785
tttttgttttcgt

SEQ ID NO: 90870 - DNA, 13 bp, Artificial Sequence
  Oligonucleotide for detection of SNP TSC0022785
acgaaaacaaaaa

SEQ ID NO: 90871 - DNA, 13 bp, Artificial Sequence
  Oligonucleotide for detection of SNP TSC0022785
tttttggtttcgt

SEQ ID NO: 90872 - DNA, 13 bp, Artificial Sequence
  Oligonucleotide for detection of SNP TSC0022785
acgaaaccaaaaa

SEQ ID NO: 90873 - DNA, 13 bp, Artificial Sequence
  Oligonucleotide for detection of SNP TSC0022788
ggttttgtttgty

SEQ ID NO: 90874 - DNA, 13 bp, Artificial Sequence
  Oligonucleotide for detection of SNP TSC0022788
racaaacaaaacc

SEQ ID NO: 90875 - DNA, 13 bp, Artificial Sequence
  Oligonucleotide for detection of SNP TSC0022788
ggttttatttgty

SEQ ID NO: 90876 - DNA, 13 bp, Artificial Sequence
  Oligonucleotide for detection of SNP TSC0022788
racaaataaaacc

SEQ ID NO: 90877 - DNA, 13 bp, Artificial Sequence
  Oligonucleotide for detection of SNP TSC0022788
ggttttgttcgty

SEQ ID NO: 90878 - DNA, 13 bp, Artificial Sequence
  Oligonucleotide for detection of SNP TSC0022788
racgaacaaaacc

SEQ ID NO: 90879 - DNA, 13 bp, Artificial Sequence
  Oligonucleotide for detection of SNP TSC0022788
ggttttattcgty

SEQ ID NO: 90880 - DNA, 13 bp, Artificial Sequence
  Oligonucleotide for detection of SNP TSC0022788
racgaataaaacc

SEQ ID NO: 90881 - DNA, 13 bp, Artificial Sequence
  Oligonucleotide for detection of SNP TSC0022793
gtgtaaggggttt

SEQ ID NO: 90882 - DNA, 13 bp, Artificial Sequence
  Oligonucleotide for detection of SNP TSC0022793
aaaccccttacac

SEQ ID NO: 90883 - DNA, 13 bp, Artificial Sequence
  Oligonucleotide for detection of SNP TSC0022793
gtgtaaagggttt

SEQ ID NO: 90884 - DNA, 13 bp, Artificial Sequence
  Oligonucleotide for detection of SNP TSC0022793
aaaccctttacac

SEQ ID NO: 90885 - DNA, 13 bp, Artificial Sequence
  Oligonucleotide for detection of SNP TSC0022794
gaagtattatgag

SEQ ID NO: 90886 - DNA, 13 bp, Artificial Sequence
  Oligonucleotide for detection of SNP TSC0022794
ctcataatacttc

SEQ ID NO: 90887 - DNA, 13 bp, Artificial Sequence
  Oligonucleotide for detection of SNP TSC0022794
gaagtagtatgag

SEQ ID NO: 90888 - DNA, 13 bp, Artificial Sequence
  Oligonucleotide for detection of SNP TSC0022794
ctcatactacttc

SEQ ID NO: 90889 - DNA, 13 bp, Artificial Sequence
  Oligonucleotide for detection of SNP TSC0022794
tttatggtgttty

SEQ ID NO: 90890 - DNA, 13 bp, Artificial Sequence
  Oligonucleotide for detection of SNP TSC0022794
raaacaccataaa

SEQ ID NO: 90891 - DNA, 13 bp, Artificial Sequence
  Oligonucleotide for detection of SNP TSC0022794
tttatgttgttty

SEQ ID NO: 90892 - DNA, 13 bp, Artificial Sequence
  Oligonucleotide for detection of SNP TSC0022794
raaacaacataaa

SEQ ID NO: 90893 - DNA, 13 bp, Artificial Sequence
  Oligonucleotide for detection of SNP TSC0022795
gtgatttgagatt

SEQ ID NO: 90894 - DNA, 13 bp, Artificial Sequence
  Oligonucleotide for detection of SNP TSC0022795
aatctcaaatcac

SEQ ID NO: 90895 - DNA, 13 bp, Artificial Sequence
  Oligonucleotide for detection of SNP TSC0022795
gtgattcgagatt

SEQ ID NO: 90896 - DNA, 13 bp, Artificial Sequence
  Oligonucleotide for detection of SNP TSC0022795
aatctcgaatcac

SEQ ID NO: 90897 - DNA, 13 bp, Artificial Sequence
  Oligonucleotide for detection of SNP TSC0022795
aattttggattay

SEQ ID NO: 90898 - DNA, 13 bp, Artificial Sequence
  Oligonucleotide for detection of SNP TSC0022795
rtaatccaaaatt

SEQ ID NO: 90899 - DNA, 13 bp, Artificial Sequence
  Oligonucleotide for detection of SNP TSC0022795
aattttagattay

SEQ ID NO: 90900 - DNA, 13 bp, Artificial Sequence
  Oligonucleotide for detection of SNP TSC0022795
rtaatctaaaatt

SEQ ID NO: 90901 - DNA, 13 bp, Artificial Sequence
  Oligonucleotide for detection of SNP TSC0022795
aatttcggattay

SEQ ID NO: 90902 - DNA, 13 bp, Artificial Sequence
  Oligonucleotide for detection of SNP TSC0022795
rtaatccgaaatt

SEQ ID NO: 90903 - DNA, 13 bp, Artificial Sequence
  Oligonucleotide for detection of SNP TSC0022796
agggttgtggaty

SEQ ID NO: 90904 - DNA, 13 bp, Artificial Sequence
  Oligonucleotide for detection of SNP TSC0022796
ratccacaaccct

SEQ ID NO: 90905 - DNA, 13 bp, Artificial Sequence
  Oligonucleotide for detection of SNP TSC0022796
agggttatggaty

SEQ ID NO: 90906 - DNA, 13 bp, Artificial Sequence
  Oligonucleotide for detection of SNP TSC0022796
ratccataaccct

SEQ ID NO: 90907 - DNA, 13 bp, Artificial Sequence
  Oligonucleotide for detection of SNP TSC0022796
agggtcgtggaty

SEQ ID NO: 90908 - DNA, 13 bp, Artificial Sequence
  Oligonucleotide for detection of SNP TSC0022796
ratccacgaccct

SEQ ID NO: 90909 - DNA, 13 bp, Artificial Sequence
  Oligonucleotide for detection of SNP TSC0022798
tagttgtgattat

SEQ ID NO: 90910 - DNA, 13 bp, Artificial Sequence
  Oligonucleotide for detection of SNP TSC0022798
ataatcacaacta

SEQ ID NO: 90911 - DNA, 13 bp, Artificial Sequence
  Oligonucleotide for detection of SNP TSC0022798
tagttgggattat

SEQ ID NO: 90912 - DNA, 13 bp, Artificial Sequence
  Oligonucleotide for detection of SNP TSC0022798
ataatcccaacta

SEQ ID NO: 90913 - DNA, 13 bp, Artificial Sequence
  Oligonucleotide for detection of SNP TSC0022798
tagttgcgattat

SEQ ID NO: 90914 - DNA, 13 bp, Artificial Sequence
  Oligonucleotide for detection of SNP TSC0022798
ataatcgcaacta

SEQ ID NO: 90915 - DNA, 13 bp, Artificial Sequence
  Oligonucleotide for detection of SNP TSC0022798
ataattttagtta

SEQ ID NO: 90916 - DNA, 13 bp, Artificial Sequence
  Oligonucleotide for detection of SNP TSC0022798
taactaaaattat

SEQ ID NO: 90917 - DNA, 13 bp, Artificial Sequence
  Oligonucleotide for detection of SNP TSC0022799
ggatgtgttatty

SEQ ID NO: 90918 - DNA, 13 bp, Artificial Sequence
  Oligonucleotide for detection of SNP TSC0022799
raataacacatcc

SEQ ID NO: 90919 - DNA, 13 bp, Artificial Sequence
  Oligonucleotide for detection of SNP TSC0022799
ggatgtattatty

SEQ ID NO: 90920 - DNA, 13 bp, Artificial Sequence
  Oligonucleotide for detection of SNP TSC0022799
raataatacatcc

SEQ ID NO: 90921 - DNA, 13 bp, Artificial Sequence
  Oligonucleotide for detection of SNP TSC0022801
tgtgagtggggtt

SEQ ID NO: 90922 - DNA, 13 bp, Artificial Sequence
  Oligonucleotide for detection of SNP TSC0022801
aaccccactcaca

SEQ ID NO: 90923 - DNA, 13 bp, Artificial Sequence
  Oligonucleotide for detection of SNP TSC0022801
tgtgagcggggtt

SEQ ID NO: 90924 - DNA, 13 bp, Artificial Sequence
  Oligonucleotide for detection of SNP TSC0022801
aaccccgctcaca

SEQ ID NO: 90925 - DNA, 13 bp, Artificial Sequence
  Oligonucleotide for detection of SNP TSC0022801
agttttgtttata

SEQ ID NO: 90926 - DNA, 13 bp, Artificial Sequence
  Oligonucleotide for detection of SNP TSC0022801
tataaacaaaact

SEQ ID NO: 90927 - DNA, 13 bp, Artificial Sequence
  Oligonucleotide for detection of SNP TSC0022801
agttttatttata

SEQ ID NO: 90928 - DNA, 13 bp, Artificial Sequence
  Oligonucleotide for detection of SNP TSC0022801
tataaataaaact

SEQ ID NO: 90929 - DNA, 13 bp, Artificial Sequence
  Oligonucleotide for detection of SNP TSC0022801
agtttcgtttata

SEQ ID NO: 90930 - DNA, 13 bp, Artificial Sequence
  Oligonucleotide for detection of SNP TSC0022801
tataaacgaaact

SEQ ID NO: 90931 - DNA, 13 bp, Artificial Sequence
  Oligonucleotide for detection of SNP TSC0022802
agtgtaagtatay

SEQ ID NO: 90932 - DNA, 13 bp, Artificial Sequence
  Oligonucleotide for detection of SNP TSC0022802
rtatacttacact

SEQ ID NO: 90933 - DNA, 13 bp, Artificial Sequence
  Oligonucleotide for detection of SNP TSC0022802
agtgtaggtatay

SEQ ID NO: 90934 - DNA, 13 bp, Artificial Sequence
  Oligonucleotide for detection of SNP TSC0022802
rtatacctacact

SEQ ID NO: 90935 - DNA, 13 bp, Artificial Sequence
  Oligonucleotide for detection of SNP TSC0022803
gaaatagaatata

SEQ ID NO: 90936 - DNA, 13 bp, Artificial Sequence
  Oligonucleotide for detection of SNP TSC0022803
tatattctatttc

SEQ ID NO: 90937 - DNA, 13 bp, Artificial Sequence
  Oligonucleotide for detection of SNP TSC0022803
gaaataaaatata

SEQ ID NO: 90938 - DNA, 13 bp, Artificial Sequence
  Oligonucleotide for detection of SNP TSC0022803
tatattttatttc

SEQ ID NO: 90939 - DNA, 13 bp, Artificial Sequence
  Oligonucleotide for detection of SNP TSC0022804
aaaagtatgtata

SEQ ID NO: 90940 - DNA, 13 bp, Artificial Sequence
  Oligonucleotide for detection of SNP TSC0022804
tatacatactttt

SEQ ID NO: 90941 - DNA, 13 bp, Artificial Sequence
  Oligonucleotide for detection of SNP TSC0022804
aaaagtgtgtata

SEQ ID NO: 90942 - DNA, 13 bp, Artificial Sequence
  Oligonucleotide for detection of SNP TSC0022804
tatacacactttt

SEQ ID NO: 90943 - DNA, 13 bp, Artificial Sequence
  Oligonucleotide for detection of SNP TSC0022804
aaaagcgtgtata

SEQ ID NO: 90944 - DNA, 13 bp, Artificial Sequence
  Oligonucleotide for detection of SNP TSC0022804
tatacacgctttt

SEQ ID NO: 90945 - DNA, 13 bp, Artificial Sequence
  Oligonucleotide for detection of SNP TSC0022805
atgtataaagtgy

SEQ ID NO: 90946 - DNA, 13 bp, Artificial Sequence
  Oligonucleotide for detection of SNP TSC0022805
rcactttatacat

SEQ ID NO: 90947 - DNA, 13 bp, Artificial Sequence
  Oligonucleotide for detection of SNP TSC0022805
atgtatgaagtgy

SEQ ID NO: 90948 - DNA, 13 bp, Artificial Sequence
  Oligonucleotide for detection of SNP TSC0022805
rcacttcatacat

SEQ ID NO: 90949 - DNA, 13 bp, Artificial Sequence
  Oligonucleotide for detection of SNP TSC0022805
atgtacgaagtgy

SEQ ID NO: 90950 - DNA, 13 bp, Artificial Sequence
  Oligonucleotide for detection of SNP TSC0022805
rcacttcgtacat

SEQ ID NO: 90951 - DNA, 13 bp, Artificial Sequence
  Oligonucleotide for detection of SNP TSC0022805
gtattttgtgtat

SEQ ID NO: 90952 - DNA, 13 bp, Artificial Sequence
  Oligonucleotide for detection of SNP TSC0022805
atacacaaaatac

SEQ ID NO: 90953 - DNA, 13 bp, Artificial Sequence
  Oligonucleotide for detection of SNP TSC0022805
gtatttcgtgtat

SEQ ID NO: 90954 - DNA, 13 bp, Artificial Sequence
  Oligonucleotide for detection of SNP TSC0022805
atacacgaaatac

SEQ ID NO: 90955 - DNA, 13 bp, Artificial Sequence
  Oligonucleotide for detection of SNP TSC0022810
taaatagtttata

SEQ ID NO: 90956 - DNA, 13 bp, Artificial Sequence
  Oligonucleotide for detection of SNP TSC0022810
tataaactattta

SEQ ID NO: 90957 - DNA, 13 bp, Artificial Sequence
  Oligonucleotide for detection of SNP TSC0022810
tataaagtattta

SEQ ID NO: 90958 - DNA, 13 bp, Artificial Sequence
  Oligonucleotide for detection of SNP TSC0022810
taaatactttata

SEQ ID NO: 90959 - DNA, 13 bp, Artificial Sequence
  Oligonucleotide for detection of SNP TSC0022811
ggagtatgaatta

SEQ ID NO: 90960 - DNA, 13 bp, Artificial Sequence
  Oligonucleotide for detection of SNP TSC0022811
taattcatactcc

SEQ ID NO: 90961 - DNA, 13 bp, Artificial Sequence
  Oligonucleotide for detection of SNP TSC0022811
ggagtacgaatta

SEQ ID NO: 90962 - DNA, 13 bp, Artificial Sequence
  Oligonucleotide for detection of SNP TSC0022811
taattcgtactcc

SEQ ID NO: 90963 - DNA, 13 bp, Artificial Sequence
  Oligonucleotide for detection of SNP TSC0022811
tggtttgtgttty

SEQ ID NO: 90964 - DNA, 13 bp, Artificial Sequence
  Oligonucleotide for detection of SNP TSC0022811
raaacacaaacca

SEQ ID NO: 90965 - DNA, 13 bp, Artificial Sequence
  Oligonucleotide for detection of SNP TSC0022811
tggtttatgttty

SEQ ID NO: 90966 - DNA, 13 bp, Artificial Sequence
  Oligonucleotide for detection of SNP TSC0022811
raaacataaacca

SEQ ID NO: 90967 - DNA, 13 bp, Artificial Sequence
  Oligonucleotide for detection of SNP TSC0022811
tggttcgtgttty

SEQ ID NO: 90968 - DNA, 13 bp, Artificial Sequence
  Oligonucleotide for detection of SNP TSC0022811
raaacacgaacca

SEQ ID NO: 90969 - DNA, 13 bp, Artificial Sequence
  Oligonucleotide for detection of SNP TSC0022815
agaattaagtaay

SEQ ID NO: 90970 - DNA, 13 bp, Artificial Sequence
  Oligonucleotide for detection of SNP TSC0022815
rttacttaattct

SEQ ID NO: 90971 - DNA, 13 bp, Artificial Sequence
  Oligonucleotide for detection of SNP TSC0022815
agaatttagtaay

SEQ ID NO: 90972 - DNA, 13 bp, Artificial Sequence
  Oligonucleotide for detection of SNP TSC0022815
rttactaaattct

SEQ ID NO: 90973 - DNA, 13 bp, Artificial Sequence
  Oligonucleotide for detection of SNP TSC0022815
gttgtttaatttt

SEQ ID NO: 90974 - DNA, 13 bp, Artificial Sequence
  Oligonucleotide for detection of SNP TSC0022815
aaaattaaacaac

SEQ ID NO: 90975 - DNA, 13 bp, Artificial Sequence
  Oligonucleotide for detection of SNP TSC0022815
gttgttaaatttt

SEQ ID NO: 90976 - DNA, 13 bp, Artificial Sequence
  Oligonucleotide for detection of SNP TSC0022815
aaaatttaacaac

SEQ ID NO: 90977 - DNA, 13 bp, Artificial Sequence
  Oligonucleotide for detection of SNP TSC0022816
tagagtgtgttta

SEQ ID NO: 90978 - DNA, 13 bp, Artificial Sequence
  Oligonucleotide for detection of SNP TSC0022816
taaacacactcta

SEQ ID NO: 90979 - DNA, 13 bp, Artificial Sequence
  Oligonucleotide for detection of SNP TSC0022816
tagagtttgttta

SEQ ID NO: 90980 - DNA, 13 bp, Artificial Sequence
  Oligonucleotide for detection of SNP TSC0022816
taaacaaactcta

SEQ ID NO: 90981 - DNA, 13 bp, Artificial Sequence
  Oligonucleotide for detection of SNP TSC0022816
taagtatatttta

SEQ ID NO: 90982 - DNA, 13 bp, Artificial Sequence
  Oligonucleotide for detection of SNP TSC0022816
taaaatatactta

SEQ ID NO: 90983 - DNA, 13 bp, Artificial Sequence
  Oligonucleotide for detection of SNP TSC0022816
taagtaaatttta

SEQ ID NO: 90984 - DNA, 13 bp, Artificial Sequence
  Oligonucleotide for detection of SNP TSC0022816
taaaatttactta

SEQ ID NO: 90985 - DNA, 13 bp, Artificial Sequence
  Oligonucleotide for detection of SNP TSC0022819
ttatttgtttgtt

SEQ ID NO: 90986 - DNA, 13 bp, Artificial Sequence
  Oligonucleotide for detection of SNP TSC0022819
aacaaacaaataa

SEQ ID NO: 90987 - DNA, 13 bp, Artificial Sequence
  Oligonucleotide for detection of SNP TSC0022819
ttatttttttgtt

SEQ ID NO: 90988 - DNA, 13 bp, Artificial Sequence
  Oligonucleotide for detection of SNP TSC0022819
aacaaaaaaataa

SEQ ID NO: 90989 - DNA, 13 bp, Artificial Sequence
  Oligonucleotide for detection of SNP TSC0022819
ttattcgtttgtt

SEQ ID NO: 90990 - DNA, 13 bp, Artificial Sequence
  Oligonucleotide for detection of SNP TSC0022819
aacaaacgaataa

SEQ ID NO: 90991 - DNA, 13 bp, Artificial Sequence
  Oligonucleotide for detection of SNP TSC0022819
aataagtggatag

SEQ ID NO: 90992 - DNA, 13 bp, Artificial Sequence
  Oligonucleotide for detection of SNP TSC0022819
ctatccacttatt

SEQ ID NO: 90993 - DNA, 13 bp, Artificial Sequence
  Oligonucleotide for detection of SNP TSC0022819
aataagaggatag

SEQ ID NO: 90994 - DNA, 13 bp, Artificial Sequence
  Oligonucleotide for detection of SNP TSC0022819
ctatcctcttatt

SEQ ID NO: 90995 - DNA, 13 bp, Artificial Sequence
  Oligonucleotide for detection of SNP TSC0022819
aataagcggatag

SEQ ID NO: 90996 - DNA, 13 bp, Artificial Sequence
  Oligonucleotide for detection of SNP TSC0022819
ctatccgcttatt

SEQ ID NO: 90997 - DNA, 13 bp, Artificial Sequence
  Oligonucleotide for detection of SNP TSC0022820
atttgtagttaty

SEQ ID NO: 90998 - DNA, 13 bp, Artificial Sequence
  Oligonucleotide for detection of SNP TSC0022820
rataactacaaat

SEQ ID NO: 90999 - DNA, 13 bp, Artificial Sequence
  Oligonucleotide for detection of SNP TSC0022820
atttgttgttaty

SEQ ID NO: 91000 - DNA, 13 bp, Artificial Sequence
  Oligonucleotide for detection of SNP TSC0022820
rataacaacaaat

SEQ ID NO: 91001 - DNA, 13 bp, Artificial Sequence
  Oligonucleotide for detection of SNP TSC0022820
atttgtcgttaty

SEQ ID NO: 91002 - DNA, 13 bp, Artificial Sequence
  Oligonucleotide for detection of SNP TSC0022820
rataacgacaaat

SEQ ID NO: 91003 - DNA, 13 bp, Artificial Sequence
  Oligonucleotide for detection of SNP TSC0022820
gataattgtagat

SEQ ID NO: 91004 - DNA, 13 bp, Artificial Sequence
  Oligonucleotide for detection of SNP TSC0022820
atctacaattatc

SEQ ID NO: 91005 - DNA, 13 bp, Artificial Sequence
  Oligonucleotide for detection of SNP TSC0022820
gataatggtagat

SEQ ID NO: 91006 - DNA, 13 bp, Artificial Sequence
  Oligonucleotide for detection of SNP TSC0022820
atctaccattatc

SEQ ID NO: 91007 - DNA, 13 bp, Artificial Sequence
  Oligonucleotide for detection of SNP TSC0022820
gataacggtagat

SEQ ID NO: 91008 - DNA, 13 bp, Artificial Sequence
  Oligonucleotide for detection of SNP TSC0022820
atctaccgttatc

SEQ ID NO: 91009 - DNA, 13 bp, Artificial Sequence
  Oligonucleotide for detection of SNP TSC0022821
agaaggatagtaa

SEQ ID NO: 91010 - DNA, 13 bp, Artificial Sequence
  Oligonucleotide for detection of SNP TSC0022821
ttactatccttct

SEQ ID NO: 91011 - DNA, 13 bp, Artificial Sequence
  Oligonucleotide for detection of SNP TSC0022821
agaagggtagtaa

SEQ ID NO: 91012 - DNA, 13 bp, Artificial Sequence
  Oligonucleotide for detection of SNP TSC0022821
ttactacccttct

SEQ ID NO: 91013 - DNA, 13 bp, Artificial Sequence
  Oligonucleotide for detection of SNP TSC0022822
gttagtagtttgg

SEQ ID NO: 91014 - DNA, 13 bp, Artificial Sequence
  Oligonucleotide for detection of SNP TSC0022822
ccaaactactaac

SEQ ID NO: 91015 - DNA, 13 bp, Artificial Sequence
  Oligonucleotide for detection of SNP TSC0022822
gttagttgtttgg

SEQ ID NO: 91016 - DNA, 13 bp, Artificial Sequence
  Oligonucleotide for detection of SNP TSC0022822
ccaaacaactaac

SEQ ID NO: 91017 - DNA, 13 bp, Artificial Sequence
  Oligonucleotide for detection of SNP TSC0022822
ttaaattattgay

SEQ ID NO: 91018 - DNA, 13 bp, Artificial Sequence
  Oligonucleotide for detection of SNP TSC0022822
rtcaataatttaa

SEQ ID NO: 91019 - DNA, 13 bp, Artificial Sequence
  Oligonucleotide for detection of SNP TSC0022822
ttaaataattgay

SEQ ID NO: 91020 - DNA, 13 bp, Artificial Sequence
  Oligonucleotide for detection of SNP TSC0022822
rtcaattatttaa

SEQ ID NO: 91021 - DNA, 13 bp, Artificial Sequence
  Oligonucleotide for detection of SNP TSC0022825
attttaaggtgta

SEQ ID NO: 91022 - DNA, 13 bp, Artificial Sequence
  Oligonucleotide for detection of SNP TSC0022825
tacaccttaaaat

SEQ ID NO: 91023 - DNA, 13 bp, Artificial Sequence
  Oligonucleotide for detection of SNP TSC0022825
attttagggtgta

SEQ ID NO: 91024 - DNA, 13 bp, Artificial Sequence
  Oligonucleotide for detection of SNP TSC0022825
tacaccctaaaat

SEQ ID NO: 91025 - DNA, 13 bp, Artificial Sequence
  Oligonucleotide for detection of SNP TSC0022826
tagtttaaggtta

SEQ ID NO: 91026 - DNA, 13 bp, Artificial Sequence
  Oligonucleotide for detection of SNP TSC0022826
taaccttaaacta

SEQ ID NO: 91027 - DNA, 13 bp, Artificial Sequence
  Oligonucleotide for detection of SNP TSC0022826
tagtttgaggtta

SEQ ID NO: 91028 - DNA, 13 bp, Artificial Sequence
  Oligonucleotide for detection of SNP TSC0022826
taacctcaaacta

SEQ ID NO: 91029 - DNA, 13 bp, Artificial Sequence
  Oligonucleotide for detection of SNP TSC0022826
tagttcgaggtta

SEQ ID NO: 91030 - DNA, 13 bp, Artificial Sequence
  Oligonucleotide for detection of SNP TSC0022826
taacctcgaacta

SEQ ID NO: 91031 - DNA, 13 bp, Artificial Sequence
  Oligonucleotide for detection of SNP TSC0022826
tgattttggattg

SEQ ID NO: 91032 - DNA, 13 bp, Artificial Sequence
  Oligonucleotide for detection of SNP TSC0022826
caatccaaaatca

SEQ ID NO: 91033 - DNA, 13 bp, Artificial Sequence
  Oligonucleotide for detection of SNP TSC0022826
tgatttcggattg

SEQ ID NO: 91034 - DNA, 13 bp, Artificial Sequence
  Oligonucleotide for detection of SNP TSC0022826
caatccgaaatca

SEQ ID NO: 91035 - DNA, 13 bp, Artificial Sequence
  Oligonucleotide for detection of SNP TSC0022827
tatttttggtaay

SEQ ID NO: 91036 - DNA, 13 bp, Artificial Sequence
  Oligonucleotide for detection of SNP TSC0022827
rttaccaaaaata

SEQ ID NO: 91037 - DNA, 13 bp, Artificial Sequence
  Oligonucleotide for detection of SNP TSC0022827
tattttcggtaay

SEQ ID NO: 91038 - DNA, 13 bp, Artificial Sequence
  Oligonucleotide for detection of SNP TSC0022827
rttaccgaaaata

SEQ ID NO: 91039 - DNA, 13 bp, Artificial Sequence
  Oligonucleotide for detection of SNP TSC0022828
gtgtattaattty

SEQ ID NO: 91040 - DNA, 13 bp, Artificial Sequence
  Oligonucleotide for detection of SNP TSC0022828
raaattaatacac

SEQ ID NO: 91041 - DNA, 13 bp, Artificial Sequence
  Oligonucleotide for detection of SNP TSC0022828
gtgtatgaattty

SEQ ID NO: 91042 - DNA, 13 bp, Artificial Sequence
  Oligonucleotide for detection of SNP TSC0022828
raaattcatacac

SEQ ID NO: 91043 - DNA, 13 bp, Artificial Sequence
  Oligonucleotide for detection of SNP TSC0022828
gtgtacgaattty

SEQ ID NO: 91044 - DNA, 13 bp, Artificial Sequence
  Oligonucleotide for detection of SNP TSC0022828
raaattcgtacac

SEQ ID NO: 91045 - DNA, 13 bp, Artificial Sequence
  Oligonucleotide for detection of SNP TSC0022828
gaagttggtgtay

SEQ ID NO: 91046 - DNA, 13 bp, Artificial Sequence
  Oligonucleotide for detection of SNP TSC0022828
rtacaccaacttc

SEQ ID NO: 91047 - DNA, 13 bp, Artificial Sequence
  Oligonucleotide for detection of SNP TSC0022828
gaagtttgtgtay

SEQ ID NO: 91048 - DNA, 13 bp, Artificial Sequence
  Oligonucleotide for detection of SNP TSC0022828
rtacacaaacttc

SEQ ID NO: 91049 - DNA, 13 bp, Artificial Sequence
  Oligonucleotide for detection of SNP TSC0022828
gaagttcgtgtay

SEQ ID NO: 91050 - DNA, 13 bp, Artificial Sequence
  Oligonucleotide for detection of SNP TSC0022828
rtacacgaacttc

SEQ ID NO: 91051 - DNA, 13 bp, Artificial Sequence
  Oligonucleotide for detection of SNP TSC0022830
ttattaatttgtg

SEQ ID NO: 91052 - DNA, 13 bp, Artificial Sequence
  Oligonucleotide for detection of SNP TSC0022830
cacaaattaataa

SEQ ID NO: 91053 - DNA, 13 bp, Artificial Sequence
  Oligonucleotide for detection of SNP TSC0022830
ttattattttgtg

SEQ ID NO: 91054 - DNA, 13 bp, Artificial Sequence
  Oligonucleotide for detection of SNP TSC0022830
cacaaaataataa

SEQ ID NO: 91055 - DNA, 13 bp, Artificial Sequence
  Oligonucleotide for detection of SNP TSC0022830
tataaattggtgg

SEQ ID NO: 91056 - DNA, 13 bp, Artificial Sequence
  Oligonucleotide for detection of SNP TSC0022830
ccaccaatttata

SEQ ID NO: 91057 - DNA, 13 bp, Artificial Sequence
  Oligonucleotide for detection of SNP TSC0022830
tataaaatggtgg

SEQ ID NO: 91058 - DNA, 13 bp, Artificial Sequence
  Oligonucleotide for detection of SNP TSC0022830
ccaccattttata

SEQ ID NO: 91059 - DNA, 13 bp, Artificial Sequence
  Oligonucleotide for detection of SNP TSC0022833
gttgaaaatgtat

SEQ ID NO: 91060 - DNA, 13 bp, Artificial Sequence
  Oligonucleotide for detection of SNP TSC0022833
atacattttcaac

SEQ ID NO: 91061 - DNA, 13 bp, Artificial Sequence
  Oligonucleotide for detection of SNP TSC0022833
gttgaagatgtat

SEQ ID NO: 91062 - DNA, 13 bp, Artificial Sequence
  Oligonucleotide for detection of SNP TSC0022833
atacatcttcaac

SEQ ID NO: 91063 - DNA, 13 bp, Artificial Sequence
  Oligonucleotide for detection of SNP TSC0022833
gtcgaaaatgtat

SEQ ID NO: 91064 - DNA, 13 bp, Artificial Sequence
  Oligonucleotide for detection of SNP TSC0022833
atacattttcgac

SEQ ID NO: 91065 - DNA, 13 bp, Artificial Sequence
  Oligonucleotide for detection of SNP TSC0022833
gtcgaagatgtat

SEQ ID NO: 91066 - DNA, 13 bp, Artificial Sequence
  Oligonucleotide for detection of SNP TSC0022833
atacatcttcgac

SEQ ID NO: 91067 - DNA, 13 bp, Artificial Sequence
  Oligonucleotide for detection of SNP TSC0022833
gttgaaaacgtat

SEQ ID NO: 91068 - DNA, 13 bp, Artificial Sequence
  Oligonucleotide for detection of SNP TSC0022833
atacgttttcaac

SEQ ID NO: 91069 - DNA, 13 bp, Artificial Sequence
  Oligonucleotide for detection of SNP TSC0022833
gttgaagacgtat

SEQ ID NO: 91070 - DNA, 13 bp, Artificial Sequence
  Oligonucleotide for detection of SNP TSC0022833
atacgtcttcaac

SEQ ID NO: 91071 - DNA, 13 bp, Artificial Sequence
  Oligonucleotide for detection of SNP TSC0022833
gtcgaaaacgtat

SEQ ID NO: 91072 - DNA, 13 bp, Artificial Sequence
  Oligonucleotide for detection of SNP TSC0022833
atacgttttcgac

SEQ ID NO: 91073 - DNA, 13 bp, Artificial Sequence
  Oligonucleotide for detection of SNP TSC0022833
gtcgaagacgtat

SEQ ID NO: 91074 - DNA, 13 bp, Artificial Sequence
  Oligonucleotide for detection of SNP TSC0022833
atacgtcttcgac

SEQ ID NO: 91075 - DNA, 13 bp, Artificial Sequence
  Oligonucleotide for detection of SNP TSC0022834
aaatgttgaagty

SEQ ID NO: 91076 - DNA, 13 bp, Artificial Sequence
  Oligonucleotide for detection of SNP TSC0022834
racttcaacattt

SEQ ID NO: 91077 - DNA, 13 bp, Artificial Sequence
  Oligonucleotide for detection of SNP TSC0022834
aaatgtcgaagty

SEQ ID NO: 91078 - DNA, 13 bp, Artificial Sequence
  Oligonucleotide for detection of SNP TSC0022834
racttcgacattt

SEQ ID NO: 91079 - DNA, 13 bp, Artificial Sequence
  Oligonucleotide for detection of SNP TSC0022834
ggttttggtattt

SEQ ID NO: 91080 - DNA, 13 bp, Artificial Sequence
  Oligonucleotide for detection of SNP TSC0022834
aaataccaaaacc

SEQ ID NO: 91081 - DNA, 13 bp, Artificial Sequence
  Oligonucleotide for detection of SNP TSC0022834
ggttttagtattt

SEQ ID NO: 91082 - DNA, 13 bp, Artificial Sequence
  Oligonucleotide for detection of SNP TSC0022834
aaatactaaaacc

SEQ ID NO: 91083 - DNA, 13 bp, Artificial Sequence
  Oligonucleotide for detection of SNP TSC0022834
ggtttcggtattt

SEQ ID NO: 91084 - DNA, 13 bp, Artificial Sequence
  Oligonucleotide for detection of SNP TSC0022834
aaataccgaaacc

SEQ ID NO: 91085 - DNA, 13 bp, Artificial Sequence
  Oligonucleotide for detection of SNP TSC0022835
tttgaaatgattt

SEQ ID NO: 91086 - DNA, 13 bp, Artificial Sequence
  Oligonucleotide for detection of SNP TSC0022835
aaatcatttcaaa

SEQ ID NO: 91087 - DNA, 13 bp, Artificial Sequence
  Oligonucleotide for detection of SNP TSC0022835
tttgaagtgattt

SEQ ID NO: 91088 - DNA, 13 bp, Artificial Sequence
  Oligonucleotide for detection of SNP TSC0022835
aaatcacttcaaa

SEQ ID NO: 91089 - DNA, 13 bp, Artificial Sequence
  Oligonucleotide for detection of SNP TSC0022836
atgatgagattay

SEQ ID NO: 91090 - DNA, 13 bp, Artificial Sequence
  Oligonucleotide for detection of SNP TSC0022836
rtaatctcatcat

SEQ ID NO: 91091 - DNA, 13 bp, Artificial Sequence
  Oligonucleotide for detection of SNP TSC0022836
atgatgtgattay

SEQ ID NO: 91092 - DNA, 13 bp, Artificial Sequence
  Oligonucleotide for detection of SNP TSC0022836
rtaatcacatcat

SEQ ID NO: 91093 - DNA, 13 bp, Artificial Sequence
  Oligonucleotide for detection of SNP TSC0022836
gtgattttattat

SEQ ID NO: 91094 - DNA, 13 bp, Artificial Sequence
  Oligonucleotide for detection of SNP TSC0022836
ataataaaatcac

SEQ ID NO: 91095 - DNA, 13 bp, Artificial Sequence
  Oligonucleotide for detection of SNP TSC0022836
gtgattatattat

SEQ ID NO: 91096 - DNA, 13 bp, Artificial Sequence
  Oligonucleotide for detection of SNP TSC0022836
ataatataatcac

SEQ ID NO: 91097 - DNA, 13 bp, Artificial Sequence
  Oligonucleotide for detection of SNP TSC0022837
tttgtttgtattt

SEQ ID NO: 91098 - DNA, 13 bp, Artificial Sequence
  Oligonucleotide for detection of SNP TSC0022837
aaatacaaacaaa

SEQ ID NO: 91099 - DNA, 13 bp, Artificial Sequence
  Oligonucleotide for detection of SNP TSC0022837
tttgttcgtattt

SEQ ID NO: 91100 - DNA, 13 bp, Artificial Sequence
  Oligonucleotide for detection of SNP TSC0022837
aaatacgaacaaa

SEQ ID NO: 91101 - DNA, 13 bp, Artificial Sequence
  Oligonucleotide for detection of SNP TSC0022837
agatgtggataga

SEQ ID NO: 91102 - DNA, 13 bp, Artificial Sequence
  Oligonucleotide for detection of SNP TSC0022837
tctatccacatct

SEQ ID NO: 91103 - DNA, 13 bp, Artificial Sequence
  Oligonucleotide for detection of SNP TSC0022837
agatgtagataga

SEQ ID NO: 91104 - DNA, 13 bp, Artificial Sequence
  Oligonucleotide for detection of SNP TSC0022837
tctatctacatct

SEQ ID NO: 91105 - DNA, 13 bp, Artificial Sequence
  Oligonucleotide for detection of SNP TSC0022837
agatgcggataga

SEQ ID NO: 91106 - DNA, 13 bp, Artificial Sequence
  Oligonucleotide for detection of SNP TSC0022837
tctatccgcatct

SEQ ID NO: 91107 - DNA, 13 bp, Artificial Sequence
  Oligonucleotide for detection of SNP TSC0022838
agtattattagat

SEQ ID NO: 91108 - DNA, 13 bp, Artificial Sequence
  Oligonucleotide for detection of SNP TSC0022838
atctaataatact

SEQ ID NO: 91109 - DNA, 13 bp, Artificial Sequence
  Oligonucleotide for detection of SNP TSC0022838
agtattgttagat

SEQ ID NO: 91110 - DNA, 13 bp, Artificial Sequence
  Oligonucleotide for detection of SNP TSC0022838
atctaacaatact

SEQ ID NO: 91111 - DNA, 13 bp, Artificial Sequence
  Oligonucleotide for detection of SNP TSC0022838
agtatcgttagat

SEQ ID NO: 91112 - DNA, 13 bp, Artificial Sequence
  Oligonucleotide for detection of SNP TSC0022838
atctaacgatact

SEQ ID NO: 91113 - DNA, 13 bp, Artificial Sequence
  Oligonucleotide for detection of SNP TSC0022838
atttgatggtgtt

SEQ ID NO: 91114 - DNA, 13 bp, Artificial Sequence
  Oligonucleotide for detection of SNP TSC0022838
aacaccatcaaat

SEQ ID NO: 91115 - DNA, 13 bp, Artificial Sequence
  Oligonucleotide for detection of SNP TSC0022838
atttgacggtgtt

SEQ ID NO: 91116 - DNA, 13 bp, Artificial Sequence
  Oligonucleotide for detection of SNP TSC0022838
aacaccgtcaaat

SEQ ID NO: 91117 - DNA, 13 bp, Artificial Sequence
  Oligonucleotide for detection of SNP TSC0022845
aaaaaagttatay

SEQ ID NO: 91118 - DNA, 13 bp, Artificial Sequence
  Oligonucleotide for detection of SNP TSC0022845
rtataactttttt

SEQ ID NO: 91119 - DNA, 13 bp, Artificial Sequence
  Oligonucleotide for detection of SNP TSC0022845
aaaaaaattatay

SEQ ID NO: 91120 - DNA, 13 bp, Artificial Sequence
  Oligonucleotide for detection of SNP TSC0022845
rtataattttttt

SEQ ID NO: 91121 - DNA, 13 bp, Artificial Sequence
  Oligonucleotide for detection of SNP TSC0022846
ggtgggattttgy

SEQ ID NO: 91122 - DNA, 13 bp, Artificial Sequence
  Oligonucleotide for detection of SNP TSC0022846
rcaaaatcccacc

SEQ ID NO: 91123 - DNA, 13 bp, Artificial Sequence
  Oligonucleotide for detection of SNP TSC0022846
ggtggggttttgy

SEQ ID NO: 91124 - DNA, 13 bp, Artificial Sequence
  Oligonucleotide for detection of SNP TSC0022846
rcaaaaccccacc

SEQ ID NO: 91125 - DNA, 13 bp, Artificial Sequence
  Oligonucleotide for detection of SNP TSC0022847
tattttatttgtt

SEQ ID NO: 91126 - DNA, 13 bp, Artificial Sequence
  Oligonucleotide for detection of SNP TSC0022847
aacaaataaaata

SEQ ID NO: 91127 - DNA, 13 bp, Artificial Sequence
  Oligonucleotide for detection of SNP TSC0022847
tattttttttgtt

SEQ ID NO: 91128 - DNA, 13 bp, Artificial Sequence
  Oligonucleotide for detection of SNP TSC0022847
aacaaaaaaaata

SEQ ID NO: 91129 - DNA, 13 bp, Artificial Sequence
  Oligonucleotide for detection of SNP TSC0022847
agtaggtagggtg

SEQ ID NO: 91130 - DNA, 13 bp, Artificial Sequence
  Oligonucleotide for detection of SNP TSC0022847
caccctacctact

SEQ ID NO: 91131 - DNA, 13 bp, Artificial Sequence
  Oligonucleotide for detection of SNP TSC0022847
agtagggagggtg

SEQ ID NO: 91132 - DNA, 13 bp, Artificial Sequence
  Oligonucleotide for detection of SNP TSC0022847
caccctccctact

SEQ ID NO: 91133 - DNA, 13 bp, Artificial Sequence
  Oligonucleotide for detection of SNP TSC0022848
tttggtattttta

SEQ ID NO: 91134 - DNA, 13 bp, Artificial Sequence
  Oligonucleotide for detection of SNP TSC0022848
taaaaataccaaa

SEQ ID NO: 91135 - DNA, 13 bp, Artificial Sequence
  Oligonucleotide for detection of SNP TSC0022848
tttggttttttta

SEQ ID NO: 91136 - DNA, 13 bp, Artificial Sequence
  Oligonucleotide for detection of SNP TSC0022848
taaaaaaaccaaa

SEQ ID NO: 91137 - DNA, 13 bp, Artificial Sequence
  Oligonucleotide for detection of SNP TSC0022848
tgggggtgttagg

SEQ ID NO: 91138 - DNA, 13 bp, Artificial Sequence
  Oligonucleotide for detection of SNP TSC0022848
cctaacaccccca

SEQ ID NO: 91139 - DNA, 13 bp, Artificial Sequence
  Oligonucleotide for detection of SNP TSC0022848
tgggggggttagg

SEQ ID NO: 91140 - DNA, 13 bp, Artificial Sequence
  Oligonucleotide for detection of SNP TSC0022848
cctaaccccccca

SEQ ID NO: 91141 - DNA, 13 bp, Artificial Sequence
  Oligonucleotide for detection of SNP TSC0022849
gttttgtagggtt

SEQ ID NO: 91142 - DNA, 13 bp, Artificial Sequence
  Oligonucleotide for detection of SNP TSC0022849
aaccctacaaaac

SEQ ID NO: 91143 - DNA, 13 bp, Artificial Sequence
  Oligonucleotide for detection of SNP TSC0022849
aattttttagagy

SEQ ID NO: 91144 - DNA, 13 bp, Artificial Sequence
  Oligonucleotide for detection of SNP TSC0022849
rctctaaaaaatt

SEQ ID NO: 91145 - DNA, 13 bp, Artificial Sequence
  Oligonucleotide for detection of SNP TSC0022849
aattttgtagagy

SEQ ID NO: 91146 - DNA, 13 bp, Artificial Sequence
  Oligonucleotide for detection of SNP TSC0022849
rctctacaaaatt

SEQ ID NO: 91147 - DNA, 13 bp, Artificial Sequence
  Oligonucleotide for detection of SNP TSC0022850
gtatatagaaagy

SEQ ID NO: 91148 - DNA, 13 bp, Artificial Sequence
  Oligonucleotide for detection of SNP TSC0022850
rctttctatatac

SEQ ID NO: 91149 - DNA, 13 bp, Artificial Sequence
  Oligonucleotide for detection of SNP TSC0022850
gtatatggaaagy

SEQ ID NO: 91150 - DNA, 13 bp, Artificial Sequence
  Oligonucleotide for detection of SNP TSC0022850
rctttccatatac

SEQ ID NO: 91151 - DNA, 13 bp, Artificial Sequence
  Oligonucleotide for detection of SNP TSC0022851
ttttttagtttay

SEQ ID NO: 91152 - DNA, 13 bp, Artificial Sequence
  Oligonucleotide for detection of SNP TSC0022851
rtaaactaaaaaa

SEQ ID NO: 91153 - DNA, 13 bp, Artificial Sequence
  Oligonucleotide for detection of SNP TSC0022851
ttttttggtttay

SEQ ID NO: 91154 - DNA, 13 bp, Artificial Sequence
  Oligonucleotide for detection of SNP TSC0022851
rtaaaccaaaaaa

SEQ ID NO: 91155 - DNA, 13 bp, Artificial Sequence
  Oligonucleotide for detection of SNP TSC0022851
tttttcggtttay

SEQ ID NO: 91156 - DNA, 13 bp, Artificial Sequence
  Oligonucleotide for detection of SNP TSC0022851
rtaaaccgaaaaa

SEQ ID NO: 91157 - DNA, 13 bp, Artificial Sequence
  Oligonucleotide for detection of SNP TSC0022851
gtaggttgaggag

SEQ ID NO: 91158 - DNA, 13 bp, Artificial Sequence
  Oligonucleotide for detection of SNP TSC0022851
ctcctcaacctac

SEQ ID NO: 91159 - DNA, 13 bp, Artificial Sequence
  Oligonucleotide for detection of SNP TSC0022851
gtaggtcgaggag

SEQ ID NO: 91160 - DNA, 13 bp, Artificial Sequence
  Oligonucleotide for detection of SNP TSC0022851
ctcctcgacctac

SEQ ID NO: 91161 - DNA, 13 bp, Artificial Sequence
  Oligonucleotide for detection of SNP TSC0022855
tattatttggtty

SEQ ID NO: 91162 - DNA, 13 bp, Artificial Sequence
  Oligonucleotide for detection of SNP TSC0022855
raaccaaataata

SEQ ID NO: 91163 - DNA, 13 bp, Artificial Sequence
  Oligonucleotide for detection of SNP TSC0022855
tattatgtggtty

SEQ ID NO: 91164 - DNA, 13 bp, Artificial Sequence
  Oligonucleotide for detection of SNP TSC0022855
raaccacataata

SEQ ID NO: 91165 - DNA, 13 bp, Artificial Sequence
  Oligonucleotide for detection of SNP TSC0022855
tattattcggtty

SEQ ID NO: 91166 - DNA, 13 bp, Artificial Sequence
  Oligonucleotide for detection of SNP TSC0022855
raaccgaataata

SEQ ID NO: 91167 - DNA, 13 bp, Artificial Sequence
  Oligonucleotide for detection of SNP TSC0022855
tattacgtggtty

SEQ ID NO: 91168 - DNA, 13 bp, Artificial Sequence
  Oligonucleotide for detection of SNP TSC0022855
raaccacgtaata

SEQ ID NO: 91169 - DNA, 13 bp, Artificial Sequence
  Oligonucleotide for detection of SNP TSC0022855
tattatgcggtty

SEQ ID NO: 91170 - DNA, 13 bp, Artificial Sequence
  Oligonucleotide for detection of SNP TSC0022855
raaccgcataata

SEQ ID NO: 91171 - DNA, 13 bp, Artificial Sequence
  Oligonucleotide for detection of SNP TSC0022855
tattacgcggtty

SEQ ID NO: 91172 - DNA, 13 bp, Artificial Sequence
  Oligonucleotide for detection of SNP TSC0022855
raaccgcgtaata

SEQ ID NO: 91173 - DNA, 13 bp, Artificial Sequence
  Oligonucleotide for detection of SNP TSC0022855
gggttgggtggtg

SEQ ID NO: 91174 - DNA, 13 bp, Artificial Sequence
  Oligonucleotide for detection of SNP TSC0022855
caccacccaaccc

SEQ ID NO: 91175 - DNA, 13 bp, Artificial Sequence
  Oligonucleotide for detection of SNP TSC0022855
gggttgtgtggtg

SEQ ID NO: 91176 - DNA, 13 bp, Artificial Sequence
  Oligonucleotide for detection of SNP TSC0022855
caccacacaaccc

SEQ ID NO: 91177 - DNA, 13 bp, Artificial Sequence
  Oligonucleotide for detection of SNP TSC0022855
gggtcgggtggtg

SEQ ID NO: 91178 - DNA, 13 bp, Artificial Sequence
  Oligonucleotide for detection of SNP TSC0022855
caccacccgaccc

SEQ ID NO: 91179 - DNA, 13 bp, Artificial Sequence
  Oligonucleotide for detection of SNP TSC0022855
gggtcgtgtggtg

SEQ ID NO: 91180 - DNA, 13 bp, Artificial Sequence
  Oligonucleotide for detection of SNP TSC0022855
caccacacgaccc

SEQ ID NO: 91181 - DNA, 13 bp, Artificial Sequence
  Oligonucleotide for detection of SNP TSC0022855
gggttgcgtggtg

SEQ ID NO: 91182 - DNA, 13 bp, Artificial Sequence
  Oligonucleotide for detection of SNP TSC0022855
caccacgcaaccc

SEQ ID NO: 91183 - DNA, 13 bp, Artificial Sequence
  Oligonucleotide for detection of SNP TSC0022855
gggtcgcgtggtg

SEQ ID NO: 91184 - DNA, 13 bp, Artificial Sequence
  Oligonucleotide for detection of SNP TSC0022855
caccacgcgaccc

SEQ ID NO: 91185 - DNA, 13 bp, Artificial Sequence
  Oligonucleotide for detection of SNP TSC0022857
attggggagtaay

SEQ ID NO: 91186 - DNA, 13 bp, Artificial Sequence
  Oligonucleotide for detection of SNP TSC0022857
rttactccccaat

SEQ ID NO: 91187 - DNA, 13 bp, Artificial Sequence
  Oligonucleotide for detection of SNP TSC0022857
attgggtagtaay

SEQ ID NO: 91188 - DNA, 13 bp, Artificial Sequence
  Oligonucleotide for detection of SNP TSC0022857
rttactacccaat

SEQ ID NO: 91189 - DNA, 13 bp, Artificial Sequence
  Oligonucleotide for detection of SNP TSC0022857
gttattttttagt

SEQ ID NO: 91190 - DNA, 13 bp, Artificial Sequence
  Oligonucleotide for detection of SNP TSC0022857
actaaaaaataac

SEQ ID NO: 91191 - DNA, 13 bp, Artificial Sequence
  Oligonucleotide for detection of SNP TSC0022857
gttattatttagt

SEQ ID NO: 91192 - DNA, 13 bp, Artificial Sequence
  Oligonucleotide for detection of SNP TSC0022857
actaaataataac

SEQ ID NO: 91193 - DNA, 13 bp, Artificial Sequence
  Oligonucleotide for detection of SNP TSC0022858
tttgggtgtattt

SEQ ID NO: 91194 - DNA, 13 bp, Artificial Sequence
  Oligonucleotide for detection of SNP TSC0022858
aaatacacccaaa

SEQ ID NO: 91195 - DNA, 13 bp, Artificial Sequence
  Oligonucleotide for detection of SNP TSC0022858
tttgggcgtattt

SEQ ID NO: 91196 - DNA, 13 bp, Artificial Sequence
  Oligonucleotide for detection of SNP TSC0022858
aaatacgcccaaa

SEQ ID NO: 91197 - DNA, 13 bp, Artificial Sequence
  Oligonucleotide for detection of SNP TSC0022858
aaatatgtttaga

SEQ ID NO: 91198 - DNA, 13 bp, Artificial Sequence
  Oligonucleotide for detection of SNP TSC0022858
tctaaacatattt

SEQ ID NO: 91199 - DNA, 13 bp, Artificial Sequence
  Oligonucleotide for detection of SNP TSC0022858
aaatatatttaga

SEQ ID NO: 91200 - DNA, 13 bp, Artificial Sequence
  Oligonucleotide for detection of SNP TSC0022858
tctaaatatattt

SEQ ID NO: 91201 - DNA, 13 bp, Artificial Sequence
  Oligonucleotide for detection of SNP TSC0022858
aaatacgtttaga

SEQ ID NO: 91202 - DNA, 13 bp, Artificial Sequence
  Oligonucleotide for detection of SNP TSC0022858
tctaaacgtattt

SEQ ID NO: 91203 - DNA, 13 bp, Artificial Sequence
  Oligonucleotide for detection of SNP TSC0022861
ttttatgagaaaa

SEQ ID NO: 91204 - DNA, 13 bp, Artificial Sequence
  Oligonucleotide for detection of SNP TSC0022861
ttttctcataaaa

SEQ ID NO: 91205 - DNA, 13 bp, Artificial Sequence
  Oligonucleotide for detection of SNP TSC0022861
ttttataagaaaa

SEQ ID NO: 91206 - DNA, 13 bp, Artificial Sequence
  Oligonucleotide for detection of SNP TSC0022861
ttttcttataaaa

SEQ ID NO: 91207 - DNA, 13 bp, Artificial Sequence
  Oligonucleotide for detection of SNP TSC0022864
ttttttagggaay

SEQ ID NO: 91208 - DNA, 13 bp, Artificial Sequence
  Oligonucleotide for detection of SNP TSC0022864
rttccctaaaaaa

SEQ ID NO: 91209 - DNA, 13 bp, Artificial Sequence
  Oligonucleotide for detection of SNP TSC0022864
ttttttggggaay

SEQ ID NO: 91210 - DNA, 13 bp, Artificial Sequence
  Oligonucleotide for detection of SNP TSC0022864
rttccccaaaaaa

SEQ ID NO: 91211 - DNA, 13 bp, Artificial Sequence
  Oligonucleotide for detection of SNP TSC0022864
tttttcggggaay

SEQ ID NO: 91212 - DNA, 13 bp, Artificial Sequence
  Oligonucleotide for detection of SNP TSC0022864
rttccccgaaaaa

SEQ ID NO: 91213 - DNA, 13 bp, Artificial Sequence
  Oligonucleotide for detection of SNP TSC0022864
gttttttggaaga

SEQ ID NO: 91214 - DNA, 13 bp, Artificial Sequence
  Oligonucleotide for detection of SNP TSC0022864
tcttccaaaaaac

SEQ ID NO: 91215 - DNA, 13 bp, Artificial Sequence
  Oligonucleotide for detection of SNP TSC0022864
gtttttcggaaga

SEQ ID NO: 91216 - DNA, 13 bp, Artificial Sequence
  Oligonucleotide for detection of SNP TSC0022864
tcttccgaaaaac

SEQ ID NO: 91217 - DNA, 13 bp, Artificial Sequence
  Oligonucleotide for detection of SNP TSC0022865
attgttaaagtaa

SEQ ID NO: 91218 - DNA, 13 bp, Artificial Sequence
  Oligonucleotide for detection of SNP TSC0022865
ttactttaacaat

SEQ ID NO: 91219 - DNA, 13 bp, Artificial Sequence
  Oligonucleotide for detection of SNP TSC0022865
attgttgaagtaa

SEQ ID NO: 91220 - DNA, 13 bp, Artificial Sequence
  Oligonucleotide for detection of SNP TSC0022865
ttacttcaacaat

SEQ ID NO: 91221 - DNA, 13 bp, Artificial Sequence
  Oligonucleotide for detection of SNP TSC0022865
attgtcgaagtaa

SEQ ID NO: 91222 - DNA, 13 bp, Artificial Sequence
  Oligonucleotide for detection of SNP TSC0022865
ttacttcgacaat

SEQ ID NO: 91223 - DNA, 13 bp, Artificial Sequence
  Oligonucleotide for detection of SNP TSC0022865
ttattttggtaat

SEQ ID NO: 91224 - DNA, 13 bp, Artificial Sequence
  Oligonucleotide for detection of SNP TSC0022865
attaccaaaataa

SEQ ID NO: 91225 - DNA, 13 bp, Artificial Sequence
  Oligonucleotide for detection of SNP TSC0022865
ttatttcggtaat

SEQ ID NO: 91226 - DNA, 13 bp, Artificial Sequence
  Oligonucleotide for detection of SNP TSC0022865
attaccgaaataa

SEQ ID NO: 91227 - DNA, 13 bp, Artificial Sequence
  Oligonucleotide for detection of SNP TSC0022866
tataaatgggtay

SEQ ID NO: 91228 - DNA, 13 bp, Artificial Sequence
  Oligonucleotide for detection of SNP TSC0022866
rtacccatttata

SEQ ID NO: 91229 - DNA, 13 bp, Artificial Sequence
  Oligonucleotide for detection of SNP TSC0022866
tataaacgggtay

SEQ ID NO: 91230 - DNA, 13 bp, Artificial Sequence
  Oligonucleotide for detection of SNP TSC0022866
rtacccgtttata

SEQ ID NO: 91231 - DNA, 13 bp, Artificial Sequence
  Oligonucleotide for detection of SNP TSC0022866
gtgtttgtttgtg

SEQ ID NO: 91232 - DNA, 13 bp, Artificial Sequence
  Oligonucleotide for detection of SNP TSC0022866
cacaaacaaacac

SEQ ID NO: 91233 - DNA, 13 bp, Artificial Sequence
  Oligonucleotide for detection of SNP TSC0022866
gtgtttatttgtg

SEQ ID NO: 91234 - DNA, 13 bp, Artificial Sequence
  Oligonucleotide for detection of SNP TSC0022866
cacaaataaacac

SEQ ID NO: 91235 - DNA, 13 bp, Artificial Sequence
  Oligonucleotide for detection of SNP TSC0022866
gtgttcgtttgtg

SEQ ID NO: 91236 - DNA, 13 bp, Artificial Sequence
  Oligonucleotide for detection of SNP TSC0022866
cacaaacgaacac

SEQ ID NO: 91237 - DNA, 13 bp, Artificial Sequence
  Oligonucleotide for detection of SNP TSC0022867
ggatttaagaata

SEQ ID NO: 91238 - DNA, 13 bp, Artificial Sequence
  Oligonucleotide for detection of SNP TSC0022867
tattcttaaatcc

SEQ ID NO: 91239 - DNA, 13 bp, Artificial Sequence
  Oligonucleotide for detection of SNP TSC0022867
ggatttgagaata

SEQ ID NO: 91240 - DNA, 13 bp, Artificial Sequence
  Oligonucleotide for detection of SNP TSC0022867
tattctcaaatcc

SEQ ID NO: 91241 - DNA, 13 bp, Artificial Sequence
  Oligonucleotide for detection of SNP TSC0022867
ggattcgagaata

SEQ ID NO: 91242 - DNA, 13 bp, Artificial Sequence
  Oligonucleotide for detection of SNP TSC0022867
tattctcgaatcc

SEQ ID NO: 91243 - DNA, 13 bp, Artificial Sequence
  Oligonucleotide for detection of SNP TSC0022867
tgtttttggatty

SEQ ID NO: 91244 - DNA, 13 bp, Artificial Sequence
  Oligonucleotide for detection of SNP TSC0022867
raatccaaaaaca

SEQ ID NO: 91245 - DNA, 13 bp, Artificial Sequence
  Oligonucleotide for detection of SNP TSC0022867
tgttttcggatty

SEQ ID NO: 91246 - DNA, 13 bp, Artificial Sequence
  Oligonucleotide for detection of SNP TSC0022867
raatccgaaaaca

SEQ ID NO: 91247 - DNA, 13 bp, Artificial Sequence
  Oligonucleotide for detection of SNP TSC0022868
gagtgggaaaaaa

SEQ ID NO: 91248 - DNA, 13 bp, Artificial Sequence
  Oligonucleotide for detection of SNP TSC0022868
ttttttcccactc

SEQ ID NO: 91249 - DNA, 13 bp, Artificial Sequence
  Oligonucleotide for detection of SNP TSC0022868
gagtggaaaaaaa

SEQ ID NO: 91250 - DNA, 13 bp, Artificial Sequence
  Oligonucleotide for detection of SNP TSC0022868
tttttttccactc

SEQ ID NO: 91251 - DNA, 13 bp, Artificial Sequence
  Oligonucleotide for detection of SNP TSC0022869
tatggagttttty

SEQ ID NO: 91252 - DNA, 13 bp, Artificial Sequence
  Oligonucleotide for detection of SNP TSC0022869
raaaaactccata

SEQ ID NO: 91253 - DNA, 13 bp, Artificial Sequence
  Oligonucleotide for detection of SNP TSC0022869
tatggatttttty

SEQ ID NO: 91254 - DNA, 13 bp, Artificial Sequence
  Oligonucleotide for detection of SNP TSC0022869
raaaaaatccata

SEQ ID NO: 91255 - DNA, 13 bp, Artificial Sequence
  Oligonucleotide for detection of SNP TSC0022869
tacggagttttty

SEQ ID NO: 91256 - DNA, 13 bp, Artificial Sequence
  Oligonucleotide for detection of SNP TSC0022869
raaaaactccgta

SEQ ID NO: 91257 - DNA, 13 bp, Artificial Sequence
  Oligonucleotide for detection of SNP TSC0022869
tacggatttttty

SEQ ID NO: 91258 - DNA, 13 bp, Artificial Sequence
  Oligonucleotide for detection of SNP TSC0022869
raaaaaatccgta

SEQ ID NO: 91259 - DNA, 13 bp, Artificial Sequence
  Oligonucleotide for detection of SNP TSC0022869
gaggggttttgtg

SEQ ID NO: 91260 - DNA, 13 bp, Artificial Sequence
  Oligonucleotide for detection of SNP TSC0022869
cacaaaacccctc

SEQ ID NO: 91261 - DNA, 13 bp, Artificial Sequence
  Oligonucleotide for detection of SNP TSC0022869
gaggggatttgtg

SEQ ID NO: 91262 - DNA, 13 bp, Artificial Sequence
  Oligonucleotide for detection of SNP TSC0022869
cacaaatcccctc

SEQ ID NO: 91263 - DNA, 13 bp, Artificial Sequence
  Oligonucleotide for detection of SNP TSC0022869
gaggggtttcgtg

SEQ ID NO: 91264 - DNA, 13 bp, Artificial Sequence
  Oligonucleotide for detection of SNP TSC0022869
cacgaaacccctc

SEQ ID NO: 91265 - DNA, 13 bp, Artificial Sequence
  Oligonucleotide for detection of SNP TSC0022869
gaggggattcgtg

SEQ ID NO: 91266 - DNA, 13 bp, Artificial Sequence
  Oligonucleotide for detection of SNP TSC0022869
cacgaatcccctc

SEQ ID NO: 91267 - DNA, 13 bp, Artificial Sequence
  Oligonucleotide for detection of SNP TSC0022871
tgaaaggggggag

SEQ ID NO: 91268 - DNA, 13 bp, Artificial Sequence
  Oligonucleotide for detection of SNP TSC0022871
ctcccccctttca

SEQ ID NO: 91269 - DNA, 13 bp, Artificial Sequence
  Oligonucleotide for detection of SNP TSC0022871
tgaaagaggggag

SEQ ID NO: 91270 - DNA, 13 bp, Artificial Sequence
  Oligonucleotide for detection of SNP TSC0022871
ctcccctctttca

SEQ ID NO: 91271 - DNA, 13 bp, Artificial Sequence
  Oligonucleotide for detection of SNP TSC0022873
gtagttatgtaty

SEQ ID NO: 91272 - DNA, 13 bp, Artificial Sequence
  Oligonucleotide for detection of SNP TSC0022873
ratacataactac

SEQ ID NO: 91273 - DNA, 13 bp, Artificial Sequence
  Oligonucleotide for detection of SNP TSC0022873
gtagttgtgtaty

SEQ ID NO: 91274 - DNA, 13 bp, Artificial Sequence
  Oligonucleotide for detection of SNP TSC0022873
ratacacaactac

SEQ ID NO: 91275 - DNA, 13 bp, Artificial Sequence
  Oligonucleotide for detection of SNP TSC0022873
gtagtcgtgtaty

SEQ ID NO: 91276 - DNA, 13 bp, Artificial Sequence
  Oligonucleotide for detection of SNP TSC0022873
ratacacgactac

SEQ ID NO: 91277 - DNA, 13 bp, Artificial Sequence
  Oligonucleotide for detection of SNP TSC0022873
gatgtatgattgy

SEQ ID NO: 91278 - DNA, 13 bp, Artificial Sequence
  Oligonucleotide for detection of SNP TSC0022873
rcaatcatacatc

SEQ ID NO: 91279 - DNA, 13 bp, Artificial Sequence
  Oligonucleotide for detection of SNP TSC0022873
gatgtacgattgy

SEQ ID NO: 91280 - DNA, 13 bp, Artificial Sequence
  Oligonucleotide for detection of SNP TSC0022873
rcaatcgtacatc

SEQ ID NO: 91281 - DNA, 13 bp, Artificial Sequence
  Oligonucleotide for detection of SNP TSC0022877
ttttgggtttttg

SEQ ID NO: 91282 - DNA, 13 bp, Artificial Sequence
  Oligonucleotide for detection of SNP TSC0022877
caaaaacccaaaa

SEQ ID NO: 91283 - DNA, 13 bp, Artificial Sequence
  Oligonucleotide for detection of SNP TSC0022877
ttttggtttttcg

SEQ ID NO: 91284 - DNA, 13 bp, Artificial Sequence
  Oligonucleotide for detection of SNP TSC0022877
cgaaaaaccaaaa

SEQ ID NO: 91285 - DNA, 13 bp, Artificial Sequence
  Oligonucleotide for detection of SNP TSC0022877
ttttgggttttcg

SEQ ID NO: 91286 - DNA, 13 bp, Artificial Sequence
  Oligonucleotide for detection of SNP TSC0022877
cgaaaacccaaaa

SEQ ID NO: 91287 - DNA, 13 bp, Artificial Sequence
  Oligonucleotide for detection of SNP TSC0022877
tggggggttaagg

SEQ ID NO: 91288 - DNA, 13 bp, Artificial Sequence
  Oligonucleotide for detection of SNP TSC0022877
ccttaacccccca

SEQ ID NO: 91289 - DNA, 13 bp, Artificial Sequence
  Oligonucleotide for detection of SNP TSC0022877
tgggggtttaagg

SEQ ID NO: 91290 - DNA, 13 bp, Artificial Sequence
  Oligonucleotide for detection of SNP TSC0022877
ccttaaaccccca

SEQ ID NO: 91291 - DNA, 13 bp, Artificial Sequence
  Oligonucleotide for detection of SNP TSC0022877
cggggggttaagg

SEQ ID NO: 91292 - DNA, 13 bp, Artificial Sequence
  Oligonucleotide for detection of SNP TSC0022877
ccttaaccccccg

SEQ ID NO: 91293 - DNA, 13 bp, Artificial Sequence
  Oligonucleotide for detection of SNP TSC0022877
cgggggtttaagg

SEQ ID NO: 91294 - DNA, 13 bp, Artificial Sequence
  Oligonucleotide for detection of SNP TSC0022877
ccttaaacccccg

SEQ ID NO: 91295 - DNA, 13 bp, Artificial Sequence
  Oligonucleotide for detection of SNP TSC0022878
ttatcgtgttcgg

SEQ ID NO: 91296 - DNA, 13 bp, Artificial Sequence
  Oligonucleotide for detection of SNP TSC0022878
ccgaacacgataa

SEQ ID NO: 91297 - DNA, 13 bp, Artificial Sequence
  Oligonucleotide for detection of SNP TSC0022878
ttatcgcgttcgg

SEQ ID NO: 91298 - DNA, 13 bp, Artificial Sequence
  Oligonucleotide for detection of SNP TSC0022878
ccgaacgcgataa

SEQ ID NO: 91299 - DNA, 13 bp, Artificial Sequence
  Oligonucleotide for detection of SNP TSC0022878
tcgggtgtggtgg

SEQ ID NO: 91300 - DNA, 13 bp, Artificial Sequence
  Oligonucleotide for detection of SNP TSC0022878
ccaccacacccga

SEQ ID NO: 91301 - DNA, 13 bp, Artificial Sequence
  Oligonucleotide for detection of SNP TSC0022878
tcgggtatggtgg

SEQ ID NO: 91302 - DNA, 13 bp, Artificial Sequence
  Oligonucleotide for detection of SNP TSC0022878
ccaccatacccga

SEQ ID NO: 91303 - DNA, 13 bp, Artificial Sequence
  Oligonucleotide for detection of SNP TSC0022878
ttgggtgcggtgg

SEQ ID NO: 91304 - DNA, 13 bp, Artificial Sequence
  Oligonucleotide for detection of SNP TSC0022878
ccaccgcacccaa

SEQ ID NO: 91305 - DNA, 13 bp, Artificial Sequence
  Oligonucleotide for detection of SNP TSC0022878
tcgggtacggtgg

SEQ ID NO: 91306 - DNA, 13 bp, Artificial Sequence
  Oligonucleotide for detection of SNP TSC0022878
ccaccgtacccga

SEQ ID NO: 91307 - DNA, 13 bp, Artificial Sequence
  Oligonucleotide for detection of SNP TSC0022878
tcgggcgtggtgg

SEQ ID NO: 91308 - DNA, 13 bp, Artificial Sequence
  Oligonucleotide for detection of SNP TSC0022878
ccaccacgcccga

SEQ ID NO: 91309 - DNA, 13 bp, Artificial Sequence
  Oligonucleotide for detection of SNP TSC0022878
tcgggtgcggtgg

SEQ ID NO: 91310 - DNA, 13 bp, Artificial Sequence
  Oligonucleotide for detection of SNP TSC0022878
ccaccgcacccga

SEQ ID NO: 91311 - DNA, 13 bp, Artificial Sequence
  Oligonucleotide for detection of SNP TSC0022878
ttgggcgcggtgg

SEQ ID NO: 91312 - DNA, 13 bp, Artificial Sequence
  Oligonucleotide for detection of SNP TSC0022878
ccaccgcgcccaa

SEQ ID NO: 91313 - DNA, 13 bp, Artificial Sequence
  Oligonucleotide for detection of SNP TSC0022878
tcgggcgcggtgg

SEQ ID NO: 91314 - DNA, 13 bp, Artificial Sequence
  Oligonucleotide for detection of SNP TSC0022878
ccaccgcgcccga

SEQ ID NO: 91315 - DNA, 13 bp, Artificial Sequence
  Oligonucleotide for detection of SNP TSC0022879
tgataaaattgay

SEQ ID NO: 91316 - DNA, 13 bp, Artificial Sequence
  Oligonucleotide for detection of SNP TSC0022879
rtcaattttatca

SEQ ID NO: 91317 - DNA, 13 bp, Artificial Sequence
  Oligonucleotide for detection of SNP TSC0022879
tgataagattgay

SEQ ID NO: 91318 - DNA, 13 bp, Artificial Sequence
  Oligonucleotide for detection of SNP TSC0022879
rtcaatcttatca

SEQ ID NO: 91319 - DNA, 13 bp, Artificial Sequence
  Oligonucleotide for detection of SNP TSC0022880
ttatggatttgty

SEQ ID NO: 91320 - DNA, 13 bp, Artificial Sequence
  Oligonucleotide for detection of SNP TSC0022880
racaaatccataa

SEQ ID NO: 91321 - DNA, 13 bp, Artificial Sequence
  Oligonucleotide for detection of SNP TSC0022880
ttatggttttgty

SEQ ID NO: 91322 - DNA, 13 bp, Artificial Sequence
  Oligonucleotide for detection of SNP TSC0022880
racaaaaccataa

SEQ ID NO: 91323 - DNA, 13 bp, Artificial Sequence
  Oligonucleotide for detection of SNP TSC0022880
ttacggatttgty

SEQ ID NO: 91324 - DNA, 13 bp, Artificial Sequence
  Oligonucleotide for detection of SNP TSC0022880
racaaatccgtaa

SEQ ID NO: 91325 - DNA, 13 bp, Artificial Sequence
  Oligonucleotide for detection of SNP TSC0022880
ttacggttttgty

SEQ ID NO: 91326 - DNA, 13 bp, Artificial Sequence
  Oligonucleotide for detection of SNP TSC0022880
racaaaaccgtaa

SEQ ID NO: 91327 - DNA, 13 bp, Artificial Sequence
  Oligonucleotide for detection of SNP TSC0022880
ggtaggtttgtga

SEQ ID NO: 91328 - DNA, 13 bp, Artificial Sequence
  Oligonucleotide for detection of SNP TSC0022880
tcacaaacctacc

SEQ ID NO: 91329 - DNA, 13 bp, Artificial Sequence
  Oligonucleotide for detection of SNP TSC0022880
ggtaggattgtga

SEQ ID NO: 91330 - DNA, 13 bp, Artificial Sequence
  Oligonucleotide for detection of SNP TSC0022880
tcacaatcctacc

SEQ ID NO: 91331 - DNA, 13 bp, Artificial Sequence
  Oligonucleotide for detection of SNP TSC0022880
ggtaggttcgtga

SEQ ID NO: 91332 - DNA, 13 bp, Artificial Sequence
  Oligonucleotide for detection of SNP TSC0022880
tcacgaacctacc

SEQ ID NO: 91333 - DNA, 13 bp, Artificial Sequence
  Oligonucleotide for detection of SNP TSC0022880
ggtaggatcgtga

SEQ ID NO: 91334 - DNA, 13 bp, Artificial Sequence
  Oligonucleotide for detection of SNP TSC0022880
tcacgatcctacc

SEQ ID NO: 91335 - DNA, 13 bp, Artificial Sequence
  Oligonucleotide for detection of SNP TSC0022881
tagttttagttgg

SEQ ID NO: 91336 - DNA, 13 bp, Artificial Sequence
  Oligonucleotide for detection of SNP TSC0022881
ccaactaaaacta

SEQ ID NO: 91337 - DNA, 13 bp, Artificial Sequence
  Oligonucleotide for detection of SNP TSC0022881
tagtttgagttgg

SEQ ID NO: 91338 - DNA, 13 bp, Artificial Sequence
  Oligonucleotide for detection of SNP TSC0022881
ccaactcaaacta

SEQ ID NO: 91339 - DNA, 13 bp, Artificial Sequence
  Oligonucleotide for detection of SNP TSC0022881
ttaattgaagtta

SEQ ID NO: 91340 - DNA, 13 bp, Artificial Sequence
  Oligonucleotide for detection of SNP TSC0022881
taacttcaattaa

SEQ ID NO: 91341 - DNA, 13 bp, Artificial Sequence
  Oligonucleotide for detection of SNP TSC0022881
ttaatttaagtta

SEQ ID NO: 91342 - DNA, 13 bp, Artificial Sequence
  Oligonucleotide for detection of SNP TSC0022881
taacttaaattaa

SEQ ID NO: 91343 - DNA, 13 bp, Artificial Sequence
  Oligonucleotide for detection of SNP TSC0022882
aaagtatggtaaa

SEQ ID NO: 91344 - DNA, 13 bp, Artificial Sequence
  Oligonucleotide for detection of SNP TSC0022882
tttaccatacttt

SEQ ID NO: 91345 - DNA, 13 bp, Artificial Sequence
  Oligonucleotide for detection of SNP TSC0022882
aaagtacggtaaa

SEQ ID NO: 91346 - DNA, 13 bp, Artificial Sequence
  Oligonucleotide for detection of SNP TSC0022882
tttaccgtacttt

SEQ ID NO: 91347 - DNA, 13 bp, Artificial Sequence
  Oligonucleotide for detection of SNP TSC0022883
gtattttggatay

SEQ ID NO: 91348 - DNA, 13 bp, Artificial Sequence
  Oligonucleotide for detection of SNP TSC0022883
rtatccaaaatac

SEQ ID NO: 91349 - DNA, 13 bp, Artificial Sequence
  Oligonucleotide for detection of SNP TSC0022883
gtatttcggatay

SEQ ID NO: 91350 - DNA, 13 bp, Artificial Sequence
  Oligonucleotide for detection of SNP TSC0022883
rtatccgaaatac

SEQ ID NO: 91351 - DNA, 13 bp, Artificial Sequence
  Oligonucleotide for detection of SNP TSC0022883
gtgtttgaagtgy

SEQ ID NO: 91352 - DNA, 13 bp, Artificial Sequence
  Oligonucleotide for detection of SNP TSC0022883
rcacttcaaacac

SEQ ID NO: 91353 - DNA, 13 bp, Artificial Sequence
  Oligonucleotide for detection of SNP TSC0022883
gtgtttaaagtgy

SEQ ID NO: 91354 - DNA, 13 bp, Artificial Sequence
  Oligonucleotide for detection of SNP TSC0022883
rcactttaaacac

SEQ ID NO: 91355 - DNA, 13 bp, Artificial Sequence
  Oligonucleotide for detection of SNP TSC0022883
gtgttcgaagtgy

SEQ ID NO: 91356 - DNA, 13 bp, Artificial Sequence
  Oligonucleotide for detection of SNP TSC0022883
rcacttcgaacac

SEQ ID NO: 91357 - DNA, 13 bp, Artificial Sequence
  Oligonucleotide for detection of SNP TSC0022884
tttttgattttay

SEQ ID NO: 91358 - DNA, 13 bp, Artificial Sequence
  Oligonucleotide for detection of SNP TSC0022884
rtaaaatcaaaaa

SEQ ID NO: 91359 - DNA, 13 bp, Artificial Sequence
  Oligonucleotide for detection of SNP TSC0022884
ttttcggttttay

SEQ ID NO: 91360 - DNA, 13 bp, Artificial Sequence
  Oligonucleotide for detection of SNP TSC0022884
rtaaaaccgaaaa

SEQ ID NO: 91361 - DNA, 13 bp, Artificial Sequence
  Oligonucleotide for detection of SNP TSC0022884
ttttcgattttay

SEQ ID NO: 91362 - DNA, 13 bp, Artificial Sequence
  Oligonucleotide for detection of SNP TSC0022884
rtaaaatcgaaaa

SEQ ID NO: 91363 - DNA, 13 bp, Artificial Sequence
  Oligonucleotide for detection of SNP TSC0022885
tggggttgggggy

SEQ ID NO: 91364 - DNA, 13 bp, Artificial Sequence
  Oligonucleotide for detection of SNP TSC0022885
rcccccaacccca

SEQ ID NO: 91365 - DNA, 13 bp, Artificial Sequence
  Oligonucleotide for detection of SNP TSC0022885
tggggtggggggy

SEQ ID NO: 91366 - DNA, 13 bp, Artificial Sequence
  Oligonucleotide for detection of SNP TSC0022885
rccccccacccca

SEQ ID NO: 91367 - DNA, 13 bp, Artificial Sequence
  Oligonucleotide for detection of SNP TSC0022885
tggggtcgggggy

SEQ ID NO: 91368 - DNA, 13 bp, Artificial Sequence
  Oligonucleotide for detection of SNP TSC0022885
rcccccgacccca

SEQ ID NO: 91369 - DNA, 13 bp, Artificial Sequence
  Oligonucleotide for detection of SNP TSC0022885
tggggcggggggy

SEQ ID NO: 91370 - DNA, 13 bp, Artificial Sequence
  Oligonucleotide for detection of SNP TSC0022885
rccccccgcccca

SEQ ID NO: 91371 - DNA, 13 bp, Artificial Sequence
  Oligonucleotide for detection of SNP TSC0022885
gttttttgtttta

SEQ ID NO: 91372 - DNA, 13 bp, Artificial Sequence
  Oligonucleotide for detection of SNP TSC0022885
taaaacaaaaaac

SEQ ID NO: 91373 - DNA, 13 bp, Artificial Sequence
  Oligonucleotide for detection of SNP TSC0022885
gtttttcgtttta

SEQ ID NO: 91374 - DNA, 13 bp, Artificial Sequence
  Oligonucleotide for detection of SNP TSC0022885
taaaacgaaaaac

SEQ ID NO: 91375 - DNA, 13 bp, Artificial Sequence
  Oligonucleotide for detection of SNP TSC0022886
tgggggtgggggg

SEQ ID NO: 91376 - DNA, 13 bp, Artificial Sequence
  Oligonucleotide for detection of SNP TSC0022886
ccccccaccccca

SEQ ID NO: 91377 - DNA, 13 bp, Artificial Sequence
  Oligonucleotide for detection of SNP TSC0022886
tgggggggggggg

SEQ ID NO: 91378 - DNA, 13 bp, Artificial Sequence
  Oligonucleotide for detection of SNP TSC0022886
cccccccccccca

SEQ ID NO: 91379 - DNA, 13 bp, Artificial Sequence
  Oligonucleotide for detection of SNP TSC0022886
cgggggtgggggg

SEQ ID NO: 91380 - DNA, 13 bp, Artificial Sequence
  Oligonucleotide for detection of SNP TSC0022886
ccccccacccccg

SEQ ID NO: 91381 - DNA, 13 bp, Artificial Sequence
  Oligonucleotide for detection of SNP TSC0022886
cgggggggggggg

SEQ ID NO: 91382 - DNA, 13 bp, Artificial Sequence
  Oligonucleotide for detection of SNP TSC0022886
ccccccccccccg

SEQ ID NO: 91383 - DNA, 13 bp, Artificial Sequence
  Oligonucleotide for detection of SNP TSC0022886
tgggggcgggggg

SEQ ID NO: 91384 - DNA, 13 bp, Artificial Sequence
  Oligonucleotide for detection of SNP TSC0022886
ccccccgccccca

SEQ ID NO: 91385 - DNA, 13 bp, Artificial Sequence
  Oligonucleotide for detection of SNP TSC0022886
cgggggcgggggg

SEQ ID NO: 91386 - DNA, 13 bp, Artificial Sequence
  Oligonucleotide for detection of SNP TSC0022886
ccccccgcccccg

SEQ ID NO: 91387 - DNA, 13 bp, Artificial Sequence
  Oligonucleotide for detection of SNP TSC0022886
ttttttgttttcg

SEQ ID NO: 91388 - DNA, 13 bp, Artificial Sequence
  Oligonucleotide for detection of SNP TSC0022886
cgaaaacaaaaaa

SEQ ID NO: 91389 - DNA, 13 bp, Artificial Sequence
  Oligonucleotide for detection of SNP TSC0022886
tttttcgttttcg

SEQ ID NO: 91390 - DNA, 13 bp, Artificial Sequence
  Oligonucleotide for detection of SNP TSC0022886
cgaaaacgaaaaa

SEQ ID NO: 91391 - DNA, 13 bp, Artificial Sequence
  Oligonucleotide for detection of SNP TSC0022887
agtttgtgtttaa

SEQ ID NO: 91392 - DNA, 13 bp, Artificial Sequence
  Oligonucleotide for detection of SNP TSC0022887
ttaaacacaaact

SEQ ID NO: 91393 - DNA, 13 bp, Artificial Sequence
  Oligonucleotide for detection of SNP TSC0022887
agttcgtgtttaa

SEQ ID NO: 91394 - DNA, 13 bp, Artificial Sequence
  Oligonucleotide for detection of SNP TSC0022887
ttaaacacgaact

SEQ ID NO: 91395 - DNA, 13 bp, Artificial Sequence
  Oligonucleotide for detection of SNP TSC0022887
agtttgcgtttaa

SEQ ID NO: 91396 - DNA, 13 bp, Artificial Sequence
  Oligonucleotide for detection of SNP TSC0022887
ttaaacgcaaact

SEQ ID NO: 91397 - DNA, 13 bp, Artificial Sequence
  Oligonucleotide for detection of SNP TSC0022887
agttcgcgtttaa

SEQ ID NO: 91398 - DNA, 13 bp, Artificial Sequence
  Oligonucleotide for detection of SNP TSC0022887
ttaaacgcgaact

SEQ ID NO: 91399 - DNA, 13 bp, Artificial Sequence
  Oligonucleotide for detection of SNP TSC0022887
ttgaatgtgggtt

SEQ ID NO: 91400 - DNA, 13 bp, Artificial Sequence
  Oligonucleotide for detection of SNP TSC0022887
aacccacattcaa

SEQ ID NO: 91401 - DNA, 13 bp, Artificial Sequence
  Oligonucleotide for detection of SNP TSC0022887
ttgaatatgggtt

SEQ ID NO: 91402 - DNA, 13 bp, Artificial Sequence
  Oligonucleotide for detection of SNP TSC0022887
aacccatattcaa

SEQ ID NO: 91403 - DNA, 13 bp, Artificial Sequence
  Oligonucleotide for detection of SNP TSC0022887
ttgaacgtgggtt

SEQ ID NO: 91404 - DNA, 13 bp, Artificial Sequence
  Oligonucleotide for detection of SNP TSC0022887
aacccacgttcaa

SEQ ID NO: 91405 - DNA, 13 bp, Artificial Sequence
  Oligonucleotide for detection of SNP TSC0022887
ttgaatacgggtt

SEQ ID NO: 91406 - DNA, 13 bp, Artificial Sequence
  Oligonucleotide for detection of SNP TSC0022887
aacccgtattcaa

SEQ ID NO: 91407 - DNA, 13 bp, Artificial Sequence
  Oligonucleotide for detection of SNP TSC0022887
ttgaatgcgggtt

SEQ ID NO: 91408 - DNA, 13 bp, Artificial Sequence
  Oligonucleotide for detection of SNP TSC0022887
aacccgcattcaa

SEQ ID NO: 91409 - DNA, 13 bp, Artificial Sequence
  Oligonucleotide for detection of SNP TSC0022887
ttgaacgcgggtt

SEQ ID NO: 91410 - DNA, 13 bp, Artificial Sequence
  Oligonucleotide for detection of SNP TSC0022887
aacccgcgttcaa

SEQ ID NO: 91411 - DNA, 13 bp, Artificial Sequence
  Oligonucleotide for detection of SNP TSC0022889
atattatatgggg

SEQ ID NO: 91412 - DNA, 13 bp, Artificial Sequence
  Oligonucleotide for detection of SNP TSC0022889
ccccatataatat

SEQ ID NO: 91413 - DNA, 13 bp, Artificial Sequence
  Oligonucleotide for detection of SNP TSC0022889
atattagatgggg

SEQ ID NO: 91414 - DNA, 13 bp, Artificial Sequence
  Oligonucleotide for detection of SNP TSC0022889
ccccatctaatat

SEQ ID NO: 91415 - DNA, 13 bp, Artificial Sequence
  Oligonucleotide for detection of SNP TSC0022889
ttttatgtggtat

SEQ ID NO: 91416 - DNA, 13 bp, Artificial Sequence
  Oligonucleotide for detection of SNP TSC0022889
ataccacataaaa

SEQ ID NO: 91417 - DNA, 13 bp, Artificial Sequence
  Oligonucleotide for detection of SNP TSC0022889
ttttatttggtat

SEQ ID NO: 91418 - DNA, 13 bp, Artificial Sequence
  Oligonucleotide for detection of SNP TSC0022889
ataccaaataaaa

SEQ ID NO: 91419 - DNA, 13 bp, Artificial Sequence
  Oligonucleotide for detection of SNP TSC0022890
ggtgagggggttg

SEQ ID NO: 91420 - DNA, 13 bp, Artificial Sequence
  Oligonucleotide for detection of SNP TSC0022890
caaccccctcacc

SEQ ID NO: 91421 - DNA, 13 bp, Artificial Sequence
  Oligonucleotide for detection of SNP TSC0022890
ggtgagagggttg

SEQ ID NO: 91422 - DNA, 13 bp, Artificial Sequence
  Oligonucleotide for detection of SNP TSC0022890
caaccctctcacc

SEQ ID NO: 91423 - DNA, 13 bp, Artificial Sequence
  Oligonucleotide for detection of SNP TSC0022891
atagatagagaaa

SEQ ID NO: 91424 - DNA, 13 bp, Artificial Sequence
  Oligonucleotide for detection of SNP TSC0022891
tttctctatctat

SEQ ID NO: 91425 - DNA, 13 bp, Artificial Sequence
  Oligonucleotide for detection of SNP TSC0022891
atagatggagaaa

SEQ ID NO: 91426 - DNA, 13 bp, Artificial Sequence
  Oligonucleotide for detection of SNP TSC0022891
tttctccatctat

SEQ ID NO: 91427 - DNA, 13 bp, Artificial Sequence
  Oligonucleotide for detection of SNP TSC0022893
attgtaattaata

SEQ ID NO: 91428 - DNA, 13 bp, Artificial Sequence
  Oligonucleotide for detection of SNP TSC0022893
tattaattacaat

SEQ ID NO: 91429 - DNA, 13 bp, Artificial Sequence
  Oligonucleotide for detection of SNP TSC0022893
attgtagttaata

SEQ ID NO: 91430 - DNA, 13 bp, Artificial Sequence
  Oligonucleotide for detection of SNP TSC0022893
tattaactacaat

SEQ ID NO: 91431 - DNA, 13 bp, Artificial Sequence
  Oligonucleotide for detection of SNP TSC0022893
atcgtaattaata

SEQ ID NO: 91432 - DNA, 13 bp, Artificial Sequence
  Oligonucleotide for detection of SNP TSC0022893
tattaattacgat

SEQ ID NO: 91433 - DNA, 13 bp, Artificial Sequence
  Oligonucleotide for detection of SNP TSC0022893
atcgtagttaata

SEQ ID NO: 91434 - DNA, 13 bp, Artificial Sequence
  Oligonucleotide for detection of SNP TSC0022893
tattaactacgat

SEQ ID NO: 91435 - DNA, 13 bp, Artificial Sequence
  Oligonucleotide for detection of SNP TSC0022894
tattagagtaatt

SEQ ID NO: 91436 - DNA, 13 bp, Artificial Sequence
  Oligonucleotide for detection of SNP TSC0022894
aattactctaata

SEQ ID NO: 91437 - DNA, 13 bp, Artificial Sequence
  Oligonucleotide for detection of SNP TSC0022894
tattagggtaatt

SEQ ID NO: 91438 - DNA, 13 bp, Artificial Sequence
  Oligonucleotide for detection of SNP TSC0022894
aattaccctaata

SEQ ID NO: 91439 - DNA, 13 bp, Artificial Sequence
  Oligonucleotide for detection of SNP TSC0022895
ttagagtaggtag

SEQ ID NO: 91440 - DNA, 13 bp, Artificial Sequence
  Oligonucleotide for detection of SNP TSC0022895
ctacctactctaa

SEQ ID NO: 91441 - DNA, 13 bp, Artificial Sequence
  Oligonucleotide for detection of SNP TSC0022895
ttagagaaggtag

SEQ ID NO: 91442 - DNA, 13 bp, Artificial Sequence
  Oligonucleotide for detection of SNP TSC0022895
ctaccttctctaa

SEQ ID NO: 91443 - DNA, 13 bp, Artificial Sequence
  Oligonucleotide for detection of SNP TSC0022896
atataggggaatt

SEQ ID NO: 91444 - DNA, 13 bp, Artificial Sequence
  Oligonucleotide for detection of SNP TSC0022896
aattcccctatat

SEQ ID NO: 91445 - DNA, 13 bp, Artificial Sequence
  Oligonucleotide for detection of SNP TSC0022896
atatagtggaatt

SEQ ID NO: 91446 - DNA, 13 bp, Artificial Sequence
  Oligonucleotide for detection of SNP TSC0022896
aattccactatat

SEQ ID NO: 91447 - DNA, 13 bp, Artificial Sequence
  Oligonucleotide for detection of SNP TSC0022896
aatttttttgtat

SEQ ID NO: 91448 - DNA, 13 bp, Artificial Sequence
  Oligonucleotide for detection of SNP TSC0022896
atacaaaaaaatt

SEQ ID NO: 91449 - DNA, 13 bp, Artificial Sequence
  Oligonucleotide for detection of SNP TSC0022896
aattttattgtat

SEQ ID NO: 91450 - DNA, 13 bp, Artificial Sequence
  Oligonucleotide for detection of SNP TSC0022896
atacaataaaatt

SEQ ID NO: 91451 - DNA, 13 bp, Artificial Sequence
  Oligonucleotide for detection of SNP TSC0022898
aatgttatgaata

SEQ ID NO: 91452 - DNA, 13 bp, Artificial Sequence
  Oligonucleotide for detection of SNP TSC0022898
tattcataacatt

SEQ ID NO: 91453 - DNA, 13 bp, Artificial Sequence
  Oligonucleotide for detection of SNP TSC0022898
aatgttgtgaata

SEQ ID NO: 91454 - DNA, 13 bp, Artificial Sequence
  Oligonucleotide for detection of SNP TSC0022898
tattcacaacatt

SEQ ID NO: 91455 - DNA, 13 bp, Artificial Sequence
  Oligonucleotide for detection of SNP TSC0022899
tggttttgttagt

SEQ ID NO: 91456 - DNA, 13 bp, Artificial Sequence
  Oligonucleotide for detection of SNP TSC0022899
actaacaaaacca

SEQ ID NO: 91457 - DNA, 13 bp, Artificial Sequence
  Oligonucleotide for detection of SNP TSC0022899
tggtttcgttagt

SEQ ID NO: 91458 - DNA, 13 bp, Artificial Sequence
  Oligonucleotide for detection of SNP TSC0022899
actaacgaaacca

SEQ ID NO: 91459 - DNA, 13 bp, Artificial Sequence
  Oligonucleotide for detection of SNP TSC0022899
attgatgagatta

SEQ ID NO: 91460 - DNA, 13 bp, Artificial Sequence
  Oligonucleotide for detection of SNP TSC0022899
taatctcatcaat

SEQ ID NO: 91461 - DNA, 13 bp, Artificial Sequence
  Oligonucleotide for detection of SNP TSC0022899
attgataagatta

SEQ ID NO: 91462 - DNA, 13 bp, Artificial Sequence
  Oligonucleotide for detection of SNP TSC0022899
taatcttatcaat

SEQ ID NO: 91463 - DNA, 13 bp, Artificial Sequence
  Oligonucleotide for detection of SNP TSC0022899
attgacgagatta

SEQ ID NO: 91464 - DNA, 13 bp, Artificial Sequence
  Oligonucleotide for detection of SNP TSC0022899
taatctcgtcaat

SEQ ID NO: 91465 - DNA, 13 bp, Artificial Sequence
  Oligonucleotide for detection of SNP TSC0022901
tatgttggttata

SEQ ID NO: 91466 - DNA, 13 bp, Artificial Sequence
  Oligonucleotide for detection of SNP TSC0022901
tataaccaacata

SEQ ID NO: 91467 - DNA, 13 bp, Artificial Sequence
  Oligonucleotide for detection of SNP TSC0022901
tatgtttgttata

SEQ ID NO: 91468 - DNA, 13 bp, Artificial Sequence
  Oligonucleotide for detection of SNP TSC0022901
tataacaaacata

SEQ ID NO: 91469 - DNA, 13 bp, Artificial Sequence
  Oligonucleotide for detection of SNP TSC0022901
tatggttagtata

SEQ ID NO: 91470 - DNA, 13 bp, Artificial Sequence
  Oligonucleotide for detection of SNP TSC0022901
tatactaaccata

SEQ ID NO: 91471 - DNA, 13 bp, Artificial Sequence
  Oligonucleotide for detection of SNP TSC0022901
tatggtaagtata

SEQ ID NO: 91472 - DNA, 13 bp, Artificial Sequence
  Oligonucleotide for detection of SNP TSC0022901
tatacttaccata

SEQ ID NO: 91473 - DNA, 13 bp, Artificial Sequence
  Oligonucleotide for detection of SNP TSC0022902
ggtgtttgtgtty

SEQ ID NO: 91474 - DNA, 13 bp, Artificial Sequence
  Oligonucleotide for detection of SNP TSC0022902
raacacaaacacc

SEQ ID NO: 91475 - DNA, 13 bp, Artificial Sequence
  Oligonucleotide for detection of SNP TSC0022902
ggtgttcgtgtty

SEQ ID NO: 91476 - DNA, 13 bp, Artificial Sequence
  Oligonucleotide for detection of SNP TSC0022902
raacacgaacacc

SEQ ID NO: 91477 - DNA, 13 bp, Artificial Sequence
  Oligonucleotide for detection of SNP TSC0022902
gagtatgggtaty

SEQ ID NO: 91478 - DNA, 13 bp, Artificial Sequence
  Oligonucleotide for detection of SNP TSC0022902
ratacccatactc

SEQ ID NO: 91479 - DNA, 13 bp, Artificial Sequence
  Oligonucleotide for detection of SNP TSC0022902
gagtataggtaty

SEQ ID NO: 91480 - DNA, 13 bp, Artificial Sequence
  Oligonucleotide for detection of SNP TSC0022902
ratacctatactc

SEQ ID NO: 91481 - DNA, 13 bp, Artificial Sequence
  Oligonucleotide for detection of SNP TSC0022902
gagtacgggtaty

SEQ ID NO: 91482 - DNA, 13 bp, Artificial Sequence
  Oligonucleotide for detection of SNP TSC0022902
ratacccgtactc

SEQ ID NO: 91483 - DNA, 13 bp, Artificial Sequence
  Oligonucleotide for detection of SNP TSC0022905
gatttagttttta

SEQ ID NO: 91484 - DNA, 13 bp, Artificial Sequence
  Oligonucleotide for detection of SNP TSC0022905
taaaaactaaatc

SEQ ID NO: 91485 - DNA, 13 bp, Artificial Sequence
  Oligonucleotide for detection of SNP TSC0022905
gatttaattttta

SEQ ID NO: 91486 - DNA, 13 bp, Artificial Sequence
  Oligonucleotide for detection of SNP TSC0022905
taaaaattaaatc

SEQ ID NO: 91487 - DNA, 13 bp, Artificial Sequence
  Oligonucleotide for detection of SNP TSC0022906
taaggggatagag

SEQ ID NO: 91488 - DNA, 13 bp, Artificial Sequence
  Oligonucleotide for detection of SNP TSC0022906
ctctatcccctta

SEQ ID NO: 91489 - DNA, 13 bp, Artificial Sequence
  Oligonucleotide for detection of SNP TSC0022906
taagggaatagag

SEQ ID NO: 91490 - DNA, 13 bp, Artificial Sequence
  Oligonucleotide for detection of SNP TSC0022906
ctctattccctta

SEQ ID NO: 91491 - DNA, 13 bp, Artificial Sequence
  Oligonucleotide for detection of SNP TSC0022907
aaaaatgtaagta

SEQ ID NO: 91492 - DNA, 13 bp, Artificial Sequence
  Oligonucleotide for detection of SNP TSC0022907
tacttacattttt

SEQ ID NO: 91493 - DNA, 13 bp, Artificial Sequence
  Oligonucleotide for detection of SNP TSC0022907
aaaaatataagta

SEQ ID NO: 91494 - DNA, 13 bp, Artificial Sequence
  Oligonucleotide for detection of SNP TSC0022907
tacttatattttt

SEQ ID NO: 91495 - DNA, 13 bp, Artificial Sequence
  Oligonucleotide for detection of SNP TSC0022909
ggtaatttttttt

SEQ ID NO: 91496 - DNA, 13 bp, Artificial Sequence
  Oligonucleotide for detection of SNP TSC0022909
aaaaaaaattacc

SEQ ID NO: 91497 - DNA, 13 bp, Artificial Sequence
  Oligonucleotide for detection of SNP TSC0022909
ggtaatgtttttt

SEQ ID NO: 91498 - DNA, 13 bp, Artificial Sequence
  Oligonucleotide for detection of SNP TSC0022909
aaaaaacattacc

SEQ ID NO: 91499 - DNA, 13 bp, Artificial Sequence
  Oligonucleotide for detection of SNP TSC0022909
aagggagattgty

SEQ ID NO: 91500 - DNA, 13 bp, Artificial Sequence
  Oligonucleotide for detection of SNP TSC0022909
racaatctccctt

SEQ ID NO: 91501 - DNA, 13 bp, Artificial Sequence
  Oligonucleotide for detection of SNP TSC0022909
aagggatattgty

SEQ ID NO: 91502 - DNA, 13 bp, Artificial Sequence
  Oligonucleotide for detection of SNP TSC0022909
racaatatccctt

SEQ ID NO: 91503 - DNA, 13 bp, Artificial Sequence
  Oligonucleotide for detection of SNP TSC0022910
gtttttatgttay

SEQ ID NO: 91504 - DNA, 13 bp, Artificial Sequence
  Oligonucleotide for detection of SNP TSC0022910
rtaacataaaaac

SEQ ID NO: 91505 - DNA, 13 bp, Artificial Sequence
  Oligonucleotide for detection of SNP TSC0022910
gtttttgtgttay

SEQ ID NO: 91506 - DNA, 13 bp, Artificial Sequence
  Oligonucleotide for detection of SNP TSC0022910
rtaacacaaaaac

SEQ ID NO: 91507 - DNA, 13 bp, Artificial Sequence
  Oligonucleotide for detection of SNP TSC0022910
gttttcgtgttay

SEQ ID NO: 91508 - DNA, 13 bp, Artificial Sequence
  Oligonucleotide for detection of SNP TSC0022910
rtaacacgaaaac

SEQ ID NO: 91509 - DNA, 13 bp, Artificial Sequence
  Oligonucleotide for detection of SNP TSC0022910
gtggtatggagay

SEQ ID NO: 91510 - DNA, 13 bp, Artificial Sequence
  Oligonucleotide for detection of SNP TSC0022910
rtctccataccac

SEQ ID NO: 91511 - DNA, 13 bp, Artificial Sequence
  Oligonucleotide for detection of SNP TSC0022910
gtggtacggagay

SEQ ID NO: 91512 - DNA, 13 bp, Artificial Sequence
  Oligonucleotide for detection of SNP TSC0022910
rtctccgtaccac

SEQ ID NO: 91513 - DNA, 13 bp, Artificial Sequence
  Oligonucleotide for detection of SNP TSC0022911
gatagaaagaagy

SEQ ID NO: 91514 - DNA, 13 bp, Artificial Sequence
  Oligonucleotide for detection of SNP TSC0022911
rcttctttctatc

SEQ ID NO: 91515 - DNA, 13 bp, Artificial Sequence
  Oligonucleotide for detection of SNP TSC0022911
gatagagagaagy

SEQ ID NO: 91516 - DNA, 13 bp, Artificial Sequence
  Oligonucleotide for detection of SNP TSC0022911
rcttctctctatc

SEQ ID NO: 91517 - DNA, 13 bp, Artificial Sequence
  Oligonucleotide for detection of SNP TSC0022912
ttattgtgggttt

SEQ ID NO: 91518 - DNA, 13 bp, Artificial Sequence
  Oligonucleotide for detection of SNP TSC0022912
aaacccacaataa

SEQ ID NO: 91519 - DNA, 13 bp, Artificial Sequence
  Oligonucleotide for detection of SNP TSC0022912
ttattgggggttt

SEQ ID NO: 91520 - DNA, 13 bp, Artificial Sequence
  Oligonucleotide for detection of SNP TSC0022912
aaacccccaataa

SEQ ID NO: 91521 - DNA, 13 bp, Artificial Sequence
  Oligonucleotide for detection of SNP TSC0022912
ttatcgtgggttt

SEQ ID NO: 91522 - DNA, 13 bp, Artificial Sequence
  Oligonucleotide for detection of SNP TSC0022912
aaacccacgataa

SEQ ID NO: 91523 - DNA, 13 bp, Artificial Sequence
  Oligonucleotide for detection of SNP TSC0022912
ttatcgggggttt

SEQ ID NO: 91524 - DNA, 13 bp, Artificial Sequence
  Oligonucleotide for detection of SNP TSC0022912
aaacccccgataa

SEQ ID NO: 91525 - DNA, 13 bp, Artificial Sequence
  Oligonucleotide for detection of SNP TSC0022912
ttattgcgggttt

SEQ ID NO: 91526 - DNA, 13 bp, Artificial Sequence
  Oligonucleotide for detection of SNP TSC0022912
aaacccgcaataa

SEQ ID NO: 91527 - DNA, 13 bp, Artificial Sequence
  Oligonucleotide for detection of SNP TSC0022912
ttatcgcgggttt

SEQ ID NO: 91528 - DNA, 13 bp, Artificial Sequence
  Oligonucleotide for detection of SNP TSC0022912
aaacccgcgataa

SEQ ID NO: 91529 - DNA, 13 bp, Artificial Sequence
  Oligonucleotide for detection of SNP TSC0022912
aggtttgtgataa

SEQ ID NO: 91530 - DNA, 13 bp, Artificial Sequence
  Oligonucleotide for detection of SNP TSC0022912
ttatcacaaacct

SEQ ID NO: 91531 - DNA, 13 bp, Artificial Sequence
  Oligonucleotide for detection of SNP TSC0022912
aggtttttgataa

SEQ ID NO: 91532 - DNA, 13 bp, Artificial Sequence
  Oligonucleotide for detection of SNP TSC0022912
ttatcaaaaacct

SEQ ID NO: 91533 - DNA, 13 bp, Artificial Sequence
  Oligonucleotide for detection of SNP TSC0022912
aggttcgtgataa

SEQ ID NO: 91534 - DNA, 13 bp, Artificial Sequence
  Oligonucleotide for detection of SNP TSC0022912
ttatcacgaacct

SEQ ID NO: 91535 - DNA, 13 bp, Artificial Sequence
  Oligonucleotide for detection of SNP TSC0022912
aggttttcgataa

SEQ ID NO: 91536 - DNA, 13 bp, Artificial Sequence
  Oligonucleotide for detection of SNP TSC0022912
ttatcgaaaacct

SEQ ID NO: 91537 - DNA, 13 bp, Artificial Sequence
  Oligonucleotide for detection of SNP TSC0022912
aggtttgcgataa

SEQ ID NO: 91538 - DNA, 13 bp, Artificial Sequence
  Oligonucleotide for detection of SNP TSC0022912
ttatcgcaaacct

SEQ ID NO: 91539 - DNA, 13 bp, Artificial Sequence
  Oligonucleotide for detection of SNP TSC0022912
aggttcgcgataa

SEQ ID NO: 91540 - DNA, 13 bp, Artificial Sequence
  Oligonucleotide for detection of SNP TSC0022912
ttatcgcgaacct

SEQ ID NO: 91541 - DNA, 13 bp, Artificial Sequence
  Oligonucleotide for detection of SNP TSC0022913
attgataggtgty

SEQ ID NO: 91542 - DNA, 13 bp, Artificial Sequence
  Oligonucleotide for detection of SNP TSC0022913
racacctatcaat

SEQ ID NO: 91543 - DNA, 13 bp, Artificial Sequence
  Oligonucleotide for detection of SNP TSC0022913
attgatgggtgty

SEQ ID NO: 91544 - DNA, 13 bp, Artificial Sequence
  Oligonucleotide for detection of SNP TSC0022913
racacccatcaat

SEQ ID NO: 91545 - DNA, 13 bp, Artificial Sequence
  Oligonucleotide for detection of SNP TSC0022913
attgacgggtgty

SEQ ID NO: 91546 - DNA, 13 bp, Artificial Sequence
  Oligonucleotide for detection of SNP TSC0022913
racacccgtcaat

SEQ ID NO: 91547 - DNA, 13 bp, Artificial Sequence
  Oligonucleotide for detection of SNP TSC0022913
ggtatttgttagt

SEQ ID NO: 91548 - DNA, 13 bp, Artificial Sequence
  Oligonucleotide for detection of SNP TSC0022913
actaacaaatacc

SEQ ID NO: 91549 - DNA, 13 bp, Artificial Sequence
  Oligonucleotide for detection of SNP TSC0022913
ggtattcgttagt

SEQ ID NO: 91550 - DNA, 13 bp, Artificial Sequence
  Oligonucleotide for detection of SNP TSC0022913
actaacgaatacc

SEQ ID NO: 91551 - DNA, 13 bp, Artificial Sequence
  Oligonucleotide for detection of SNP TSC0022914
gtgtttgtggtgy

SEQ ID NO: 91552 - DNA, 13 bp, Artificial Sequence
  Oligonucleotide for detection of SNP TSC0022914
rcaccacaaacac

SEQ ID NO: 91553 - DNA, 13 bp, Artificial Sequence
  Oligonucleotide for detection of SNP TSC0022914
gtgtttttggtgy

SEQ ID NO: 91554 - DNA, 13 bp, Artificial Sequence
  Oligonucleotide for detection of SNP TSC0022914
rcaccaaaaacac

SEQ ID NO: 91555 - DNA, 13 bp, Artificial Sequence
  Oligonucleotide for detection of SNP TSC0022914
gtattataggtay

SEQ ID NO: 91556 - DNA, 13 bp, Artificial Sequence
  Oligonucleotide for detection of SNP TSC0022914
rtacctataatac

SEQ ID NO: 91557 - DNA, 13 bp, Artificial Sequence
  Oligonucleotide for detection of SNP TSC0022914
gtattaaaggtay

SEQ ID NO: 91558 - DNA, 13 bp, Artificial Sequence
  Oligonucleotide for detection of SNP TSC0022914
rtacctttaatac

SEQ ID NO: 91559 - DNA, 13 bp, Artificial Sequence
  Oligonucleotide for detection of SNP TSC0022915
ttatgttgttaty

SEQ ID NO: 91560 - DNA, 13 bp, Artificial Sequence
  Oligonucleotide for detection of SNP TSC0022915
rataacaacataa

SEQ ID NO: 91561 - DNA, 13 bp, Artificial Sequence
  Oligonucleotide for detection of SNP TSC0022915
ttatgtcgttaty

SEQ ID NO: 91562 - DNA, 13 bp, Artificial Sequence
  Oligonucleotide for detection of SNP TSC0022915
rataacgacataa

SEQ ID NO: 91563 - DNA, 13 bp, Artificial Sequence
  Oligonucleotide for detection of SNP TSC0022915
ggtagtggtatgg

SEQ ID NO: 91564 - DNA, 13 bp, Artificial Sequence
  Oligonucleotide for detection of SNP TSC0022915
ccataccactacc

SEQ ID NO: 91565 - DNA, 13 bp, Artificial Sequence
  Oligonucleotide for detection of SNP TSC0022915
ggtagtagtatgg

SEQ ID NO: 91566 - DNA, 13 bp, Artificial Sequence
  Oligonucleotide for detection of SNP TSC0022915
ccatactactacc

SEQ ID NO: 91567 - DNA, 13 bp, Artificial Sequence
  Oligonucleotide for detection of SNP TSC0022915
ggtagcggtatgg

SEQ ID NO: 91568 - DNA, 13 bp, Artificial Sequence
  Oligonucleotide for detection of SNP TSC0022915
ccataccgctacc

SEQ ID NO: 91569 - DNA, 13 bp, Artificial Sequence
  Oligonucleotide for detection of SNP TSC0022917
tagtagggagttt

SEQ ID NO: 91570 - DNA, 13 bp, Artificial Sequence
  Oligonucleotide for detection of SNP TSC0022917
aaactccctacta

SEQ ID NO: 91571 - DNA, 13 bp, Artificial Sequence
  Oligonucleotide for detection of SNP TSC0022917
tagtagtgagttt

SEQ ID NO: 91572 - DNA, 13 bp, Artificial Sequence
  Oligonucleotide for detection of SNP TSC0022917
aaactcactacta

SEQ ID NO: 91573 - DNA, 13 bp, Artificial Sequence
  Oligonucleotide for detection of SNP TSC0022917
aagttttttgtta

SEQ ID NO: 91574 - DNA, 13 bp, Artificial Sequence
  Oligonucleotide for detection of SNP TSC0022917
taacaaaaaactt

SEQ ID NO: 91575 - DNA, 13 bp, Artificial Sequence
  Oligonucleotide for detection of SNP TSC0022917
aagtttattgtta

SEQ ID NO: 91576 - DNA, 13 bp, Artificial Sequence
  Oligonucleotide for detection of SNP TSC0022917
taacaataaactt

SEQ ID NO: 91577 - DNA, 13 bp, Artificial Sequence
  Oligonucleotide for detection of SNP TSC0022918
ggtttgggaggty

SEQ ID NO: 91578 - DNA, 13 bp, Artificial Sequence
  Oligonucleotide for detection of SNP TSC0022918
racctcccaaacc

SEQ ID NO: 91579 - DNA, 13 bp, Artificial Sequence
  Oligonucleotide for detection of SNP TSC0022918
ggtttgagaggty

SEQ ID NO: 91580 - DNA, 13 bp, Artificial Sequence
  Oligonucleotide for detection of SNP TSC0022918
racctctcaaacc

SEQ ID NO: 91581 - DNA, 13 bp, Artificial Sequence
  Oligonucleotide for detection of SNP TSC0022920
gaaatgttagtty

SEQ ID NO: 91582 - DNA, 13 bp, Artificial Sequence
  Oligonucleotide for detection of SNP TSC0022920
raactaacatttc

SEQ ID NO: 91583 - DNA, 13 bp, Artificial Sequence
  Oligonucleotide for detection of SNP TSC0022920
gaaatggtagtty

SEQ ID NO: 91584 - DNA, 13 bp, Artificial Sequence
  Oligonucleotide for detection of SNP TSC0022920
raactaccatttc

SEQ ID NO: 91585 - DNA, 13 bp, Artificial Sequence
  Oligonucleotide for detection of SNP TSC0022920
ggattggtattty

SEQ ID NO: 91586 - DNA, 13 bp, Artificial Sequence
  Oligonucleotide for detection of SNP TSC0022920
raaataccaatcc

SEQ ID NO: 91587 - DNA, 13 bp, Artificial Sequence
  Oligonucleotide for detection of SNP TSC0022920
ggattgttattty

SEQ ID NO: 91588 - DNA, 13 bp, Artificial Sequence
  Oligonucleotide for detection of SNP TSC0022920
raaataacaatcc

SEQ ID NO: 91589 - DNA, 13 bp, Artificial Sequence
  Oligonucleotide for detection of SNP TSC0022922
gggtggggaagag

SEQ ID NO: 91590 - DNA, 13 bp, Artificial Sequence
  Oligonucleotide for detection of SNP TSC0022922
ctcttccccaccc

SEQ ID NO: 91591 - DNA, 13 bp, Artificial Sequence
  Oligonucleotide for detection of SNP TSC0022922
gggtggagaagag

SEQ ID NO: 91592 - DNA, 13 bp, Artificial Sequence
  Oligonucleotide for detection of SNP TSC0022922
ctcttctccaccc

SEQ ID NO: 91593 - DNA, 13 bp, Artificial Sequence
  Oligonucleotide for detection of SNP TSC0022923
tggtattgggaay

SEQ ID NO: 91594 - DNA, 13 bp, Artificial Sequence
  Oligonucleotide for detection of SNP TSC0022923
rttcccaatacca

SEQ ID NO: 91595 - DNA, 13 bp, Artificial Sequence
  Oligonucleotide for detection of SNP TSC0022923
tggtatcgggaay

SEQ ID NO: 91596 - DNA, 13 bp, Artificial Sequence
  Oligonucleotide for detection of SNP TSC0022923
rttcccgatacca

SEQ ID NO: 91597 - DNA, 13 bp, Artificial Sequence
  Oligonucleotide for detection of SNP TSC0022923
gtttttggtatta

SEQ ID NO: 91598 - DNA, 13 bp, Artificial Sequence
  Oligonucleotide for detection of SNP TSC0022923
taataccaaaaac

SEQ ID NO: 91599 - DNA, 13 bp, Artificial Sequence
  Oligonucleotide for detection of SNP TSC0022923
gtttttagtatta

SEQ ID NO: 91600 - DNA, 13 bp, Artificial Sequence
  Oligonucleotide for detection of SNP TSC0022923
taatactaaaaac

SEQ ID NO: 91601 - DNA, 13 bp, Artificial Sequence
  Oligonucleotide for detection of SNP TSC0022923
gttttcggtatta

SEQ ID NO: 91602 - DNA, 13 bp, Artificial Sequence
  Oligonucleotide for detection of SNP TSC0022923
taataccgaaaac

SEQ ID NO: 91603 - DNA, 13 bp, Artificial Sequence
  Oligonucleotide for detection of SNP TSC0022924
gggaatggtatay

SEQ ID NO: 91604 - DNA, 13 bp, Artificial Sequence
  Oligonucleotide for detection of SNP TSC0022924
rtataccattccc

SEQ ID NO: 91605 - DNA, 13 bp, Artificial Sequence
  Oligonucleotide for detection of SNP TSC0022924
gggaattgtatay

SEQ ID NO: 91606 - DNA, 13 bp, Artificial Sequence
  Oligonucleotide for detection of SNP TSC0022924
rtatacaattccc

SEQ ID NO: 91607 - DNA, 13 bp, Artificial Sequence
  Oligonucleotide for detection of SNP TSC0022924
gggaacggtatay

SEQ ID NO: 91608 - DNA, 13 bp, Artificial Sequence
  Oligonucleotide for detection of SNP TSC0022924
rtataccgttccc

SEQ ID NO: 91609 - DNA, 13 bp, Artificial Sequence
  Oligonucleotide for detection of SNP TSC0022924
gtgtgtagtttty

SEQ ID NO: 91610 - DNA, 13 bp, Artificial Sequence
  Oligonucleotide for detection of SNP TSC0022924
raaaactacacac

SEQ ID NO: 91611 - DNA, 13 bp, Artificial Sequence
  Oligonucleotide for detection of SNP TSC0022926
ggggttagttagy

SEQ ID NO: 91612 - DNA, 13 bp, Artificial Sequence
  Oligonucleotide for detection of SNP TSC0022926
rctaactaacccc

SEQ ID NO: 91613 - DNA, 13 bp, Artificial Sequence
  Oligonucleotide for detection of SNP TSC0022926
ggggttggttagy

SEQ ID NO: 91614 - DNA, 13 bp, Artificial Sequence
  Oligonucleotide for detection of SNP TSC0022926
rctaaccaacccc

SEQ ID NO: 91615 - DNA, 13 bp, Artificial Sequence
  Oligonucleotide for detection of SNP TSC0022927
atttgtataatag

SEQ ID NO: 91616 - DNA, 13 bp, Artificial Sequence
  Oligonucleotide for detection of SNP TSC0022927
ctattatacaaat

SEQ ID NO: 91617 - DNA, 13 bp, Artificial Sequence
  Oligonucleotide for detection of SNP TSC0022927
atttgtgtaatag

SEQ ID NO: 91618 - DNA, 13 bp, Artificial Sequence
  Oligonucleotide for detection of SNP TSC0022927
ctattacacaaat

SEQ ID NO: 91619 - DNA, 13 bp, Artificial Sequence
  Oligonucleotide for detection of SNP TSC0022927
atttgcgtaatag

SEQ ID NO: 91620 - DNA, 13 bp, Artificial Sequence
  Oligonucleotide for detection of SNP TSC0022927
ctattacgcaaat

SEQ ID NO: 91621 - DNA, 13 bp, Artificial Sequence
  Oligonucleotide for detection of SNP TSC0022927
ttattatgtagat

SEQ ID NO: 91622 - DNA, 13 bp, Artificial Sequence
  Oligonucleotide for detection of SNP TSC0022927
atctacataataa

SEQ ID NO: 91623 - DNA, 13 bp, Artificial Sequence
  Oligonucleotide for detection of SNP TSC0022927
ttattacgtagat

SEQ ID NO: 91624 - DNA, 13 bp, Artificial Sequence
  Oligonucleotide for detection of SNP TSC0022927
atctacgtaataa

SEQ ID NO: 91625 - DNA, 13 bp, Artificial Sequence
  Oligonucleotide for detection of SNP TSC0022930
ttgggtagggaag

SEQ ID NO: 91626 - DNA, 13 bp, Artificial Sequence
  Oligonucleotide for detection of SNP TSC0022930
cttccctacccaa

SEQ ID NO: 91627 - DNA, 13 bp, Artificial Sequence
  Oligonucleotide for detection of SNP TSC0022930
ttgggtggggaag

SEQ ID NO: 91628 - DNA, 13 bp, Artificial Sequence
  Oligonucleotide for detection of SNP TSC0022930
cttccccacccaa

SEQ ID NO: 91629 - DNA, 13 bp, Artificial Sequence
  Oligonucleotide for detection of SNP TSC0022931
agggaaagtgagg

SEQ ID NO: 91630 - DNA, 13 bp, Artificial Sequence
  Oligonucleotide for detection of SNP TSC0022931
cctcactttccct

SEQ ID NO: 91631 - DNA, 13 bp, Artificial Sequence
  Oligonucleotide for detection of SNP TSC0022931
agggaaggtgagg

SEQ ID NO: 91632 - DNA, 13 bp, Artificial Sequence
  Oligonucleotide for detection of SNP TSC0022931
cctcaccttccct

SEQ ID NO: 91633 - DNA, 13 bp, Artificial Sequence
  Oligonucleotide for detection of SNP TSC0022935
ttagagggaaaga

SEQ ID NO: 91634 - DNA, 13 bp, Artificial Sequence
  Oligonucleotide for detection of SNP TSC0022935
tctttccctctaa

SEQ ID NO: 91635 - DNA, 13 bp, Artificial Sequence
  Oligonucleotide for detection of SNP TSC0022935
ttagagagaaaga

SEQ ID NO: 91636 - DNA, 13 bp, Artificial Sequence
  Oligonucleotide for detection of SNP TSC0022935
tctttctctctaa

SEQ ID NO: 91637 - DNA, 13 bp, Artificial Sequence
  Oligonucleotide for detection of SNP TSC0022937
ttataggtgtaaa

SEQ ID NO: 91638 - DNA, 13 bp, Artificial Sequence
  Oligonucleotide for detection of SNP TSC0022937
tttacacctataa

SEQ ID NO: 91639 - DNA, 13 bp, Artificial Sequence
  Oligonucleotide for detection of SNP TSC0022937
ttatagatgtaaa

SEQ ID NO: 91640 - DNA, 13 bp, Artificial Sequence
  Oligonucleotide for detection of SNP TSC0022937
tttacatctataa

SEQ ID NO: 91641 - DNA, 13 bp, Artificial Sequence
  Oligonucleotide for detection of SNP TSC0022938
gaagttatttatg

SEQ ID NO: 91642 - DNA, 13 bp, Artificial Sequence
  Oligonucleotide for detection of SNP TSC0022938
cataaataacttc

SEQ ID NO: 91643 - DNA, 13 bp, Artificial Sequence
  Oligonucleotide for detection of SNP TSC0022938
gaagttgtttatg

SEQ ID NO: 91644 - DNA, 13 bp, Artificial Sequence
  Oligonucleotide for detection of SNP TSC0022938
cataaacaacttc

SEQ ID NO: 91645 - DNA, 13 bp, Artificial Sequence
  Oligonucleotide for detection of SNP TSC0022938
gaagttatttacg

SEQ ID NO: 91646 - DNA, 13 bp, Artificial Sequence
  Oligonucleotide for detection of SNP TSC0022938
cgtaaataacttc

SEQ ID NO: 91647 - DNA, 13 bp, Artificial Sequence
  Oligonucleotide for detection of SNP TSC0022938
gaagtcgtttatg

SEQ ID NO: 91648 - DNA, 13 bp, Artificial Sequence
  Oligonucleotide for detection of SNP TSC0022938
cataaacgacttc

SEQ ID NO: 91649 - DNA, 13 bp, Artificial Sequence
  Oligonucleotide for detection of SNP TSC0022938
gaagttgtttacg

SEQ ID NO: 91650 - DNA, 13 bp, Artificial Sequence
  Oligonucleotide for detection of SNP TSC0022938
cgtaaacaacttc

SEQ ID NO: 91651 - DNA, 13 bp, Artificial Sequence
  Oligonucleotide for detection of SNP TSC0022938
gaagtcgtttacg

SEQ ID NO: 91652 - DNA, 13 bp, Artificial Sequence
  Oligonucleotide for detection of SNP TSC0022938
cgtaaacgacttc

SEQ ID NO: 91653 - DNA, 13 bp, Artificial Sequence
  Oligonucleotide for detection of SNP TSC0022938
tgtggatgattty

SEQ ID NO: 91654 - DNA, 13 bp, Artificial Sequence
  Oligonucleotide for detection of SNP TSC0022938
raaatcatccaca

SEQ ID NO: 91655 - DNA, 13 bp, Artificial Sequence
  Oligonucleotide for detection of SNP TSC0022938
cgtggatgattty

SEQ ID NO: 91656 - DNA, 13 bp, Artificial Sequence
  Oligonucleotide for detection of SNP TSC0022938
raaatcatccacg

SEQ ID NO: 91657 - DNA, 13 bp, Artificial Sequence
  Oligonucleotide for detection of SNP TSC0022938
tgtggacgattty

SEQ ID NO: 91658 - DNA, 13 bp, Artificial Sequence
  Oligonucleotide for detection of SNP TSC0022938
raaatcgtccaca

SEQ ID NO: 91659 - DNA, 13 bp, Artificial Sequence
  Oligonucleotide for detection of SNP TSC0022938
cgtggacgattty

SEQ ID NO: 91660 - DNA, 13 bp, Artificial Sequence
  Oligonucleotide for detection of SNP TSC0022938
raaatcgtccacg

SEQ ID NO: 91661 - DNA, 13 bp, Artificial Sequence
  Oligonucleotide for detection of SNP TSC0022939
gttgggtggtagg

SEQ ID NO: 91662 - DNA, 13 bp, Artificial Sequence
  Oligonucleotide for detection of SNP TSC0022939
cctaccacccaac

SEQ ID NO: 91663 - DNA, 13 bp, Artificial Sequence
  Oligonucleotide for detection of SNP TSC0022939
gtcgggtggtagg

SEQ ID NO: 91664 - DNA, 13 bp, Artificial Sequence
  Oligonucleotide for detection of SNP TSC0022939
cctaccacccgac

SEQ ID NO: 91665 - DNA, 13 bp, Artificial Sequence
  Oligonucleotide for detection of SNP TSC0022939
gttgggcggtagg

SEQ ID NO: 91666 - DNA, 13 bp, Artificial Sequence
  Oligonucleotide for detection of SNP TSC0022939
cctaccgcccaac

SEQ ID NO: 91667 - DNA, 13 bp, Artificial Sequence
  Oligonucleotide for detection of SNP TSC0022939
gtcgggcggtagg

SEQ ID NO: 91668 - DNA, 13 bp, Artificial Sequence
  Oligonucleotide for detection of SNP TSC0022939
cctaccgcccgac

SEQ ID NO: 91669 - DNA, 13 bp, Artificial Sequence
  Oligonucleotide for detection of SNP TSC0022939
tttgttgtttgay

SEQ ID NO: 91670 - DNA, 13 bp, Artificial Sequence
  Oligonucleotide for detection of SNP TSC0022939
rtcaaacaacaaa

SEQ ID NO: 91671 - DNA, 13 bp, Artificial Sequence
  Oligonucleotide for detection of SNP TSC0022939
tttgttatttgay

SEQ ID NO: 91672 - DNA, 13 bp, Artificial Sequence
  Oligonucleotide for detection of SNP TSC0022939
rtcaaataacaaa

SEQ ID NO: 91673 - DNA, 13 bp, Artificial Sequence
  Oligonucleotide for detection of SNP TSC0022939
tttgtcgtttgay

SEQ ID NO: 91674 - DNA, 13 bp, Artificial Sequence
  Oligonucleotide for detection of SNP TSC0022939
rtcaaacgacaaa

SEQ ID NO: 91675 - DNA, 13 bp, Artificial Sequence
  Oligonucleotide for detection of SNP TSC0022939
tttgttattcgay

SEQ ID NO: 91676 - DNA, 13 bp, Artificial Sequence
  Oligonucleotide for detection of SNP TSC0022939
rtcgaataacaaa

SEQ ID NO: 91677 - DNA, 13 bp, Artificial Sequence
  Oligonucleotide for detection of SNP TSC0022939
tttgttgttcgay

SEQ ID NO: 91678 - DNA, 13 bp, Artificial Sequence
  Oligonucleotide for detection of SNP TSC0022939
rtcgaacaacaaa

SEQ ID NO: 91679 - DNA, 13 bp, Artificial Sequence
  Oligonucleotide for detection of SNP TSC0022939
tttgtcgttcgay

SEQ ID NO: 91680 - DNA, 13 bp, Artificial Sequence
  Oligonucleotide for detection of SNP TSC0022939
rtcgaacgacaaa

SEQ ID NO: 91681 - DNA, 13 bp, Artificial Sequence
  Oligonucleotide for detection of SNP TSC0022940
tatttttttgaty

SEQ ID NO: 91682 - DNA, 13 bp, Artificial Sequence
  Oligonucleotide for detection of SNP TSC0022940
ratcaaaaaaata

SEQ ID NO: 91683 - DNA, 13 bp, Artificial Sequence
  Oligonucleotide for detection of SNP TSC0022940
tattttgttgaty

SEQ ID NO: 91684 - DNA, 13 bp, Artificial Sequence
  Oligonucleotide for detection of SNP TSC0022940
ratcaacaaaata

SEQ ID NO: 91685 - DNA, 13 bp, Artificial Sequence
  Oligonucleotide for detection of SNP TSC0022940
gattaggagggtg

SEQ ID NO: 91686 - DNA, 13 bp, Artificial Sequence
  Oligonucleotide for detection of SNP TSC0022940
caccctcctaatc

SEQ ID NO: 91687 - DNA, 13 bp, Artificial Sequence
  Oligonucleotide for detection of SNP TSC0022940
gattagtagggtg

SEQ ID NO: 91688 - DNA, 13 bp, Artificial Sequence
  Oligonucleotide for detection of SNP TSC0022940
caccctactaatc

SEQ ID NO: 91689 - DNA, 13 bp, Artificial Sequence
  Oligonucleotide for detection of SNP TSC0022941
tttgtgagttaga

SEQ ID NO: 91690 - DNA, 13 bp, Artificial Sequence
  Oligonucleotide for detection of SNP TSC0022941
tctaactcacaaa

SEQ ID NO: 91691 - DNA, 13 bp, Artificial Sequence
  Oligonucleotide for detection of SNP TSC0022941
tttgtgggttaga

SEQ ID NO: 91692 - DNA, 13 bp, Artificial Sequence
  Oligonucleotide for detection of SNP TSC0022941
tctaacccacaaa

SEQ ID NO: 91693 - DNA, 13 bp, Artificial Sequence
  Oligonucleotide for detection of SNP TSC0022941
tttgcgagttaga

SEQ ID NO: 91694 - DNA, 13 bp, Artificial Sequence
  Oligonucleotide for detection of SNP TSC0022941
tctaactcgcaaa

SEQ ID NO: 91695 - DNA, 13 bp, Artificial Sequence
  Oligonucleotide for detection of SNP TSC0022941
tttgcgggttaga

SEQ ID NO: 91696 - DNA, 13 bp, Artificial Sequence
  Oligonucleotide for detection of SNP TSC0022941
tctaacccgcaaa

SEQ ID NO: 91697 - DNA, 13 bp, Artificial Sequence
  Oligonucleotide for detection of SNP TSC0022942
tttagggaaaaat

SEQ ID NO: 91698 - DNA, 13 bp, Artificial Sequence
  Oligonucleotide for detection of SNP TSC0022942
atttttccctaaa

SEQ ID NO: 91699 - DNA, 13 bp, Artificial Sequence
  Oligonucleotide for detection of SNP TSC0022942
tttaggtaaaaat

SEQ ID NO: 91700 - DNA, 13 bp, Artificial Sequence
  Oligonucleotide for detection of SNP TSC0022942
atttttacctaaa

SEQ ID NO: 91701 - DNA, 13 bp, Artificial Sequence
  Oligonucleotide for detection of SNP TSC0022943
gatttagtagtaa

SEQ ID NO: 91702 - DNA, 13 bp, Artificial Sequence
  Oligonucleotide for detection of SNP TSC0022943
ttactactaaatc

SEQ ID NO: 91703 - DNA, 13 bp, Artificial Sequence
  Oligonucleotide for detection of SNP TSC0022943
gatttaatagtaa

SEQ ID NO: 91704 - DNA, 13 bp, Artificial Sequence
  Oligonucleotide for detection of SNP TSC0022943
ttactattaaatc

SEQ ID NO: 91705 - DNA, 13 bp, Artificial Sequence
  Oligonucleotide for detection of SNP TSC0022944
gaaaggagtataa

SEQ ID NO: 91706 - DNA, 13 bp, Artificial Sequence
  Oligonucleotide for detection of SNP TSC0022944
ttatactcctttc

SEQ ID NO: 91707 - DNA, 13 bp, Artificial Sequence
  Oligonucleotide for detection of SNP TSC0022944
gaaaggggtataa

SEQ ID NO: 91708 - DNA, 13 bp, Artificial Sequence
  Oligonucleotide for detection of SNP TSC0022944
ttatacccctttc

SEQ ID NO: 91709 - DNA, 13 bp, Artificial Sequence
  Oligonucleotide for detection of SNP TSC0022946
aagtgtatatttt

SEQ ID NO: 91710 - DNA, 13 bp, Artificial Sequence
  Oligonucleotide for detection of SNP TSC0022946
aaaatatacactt

SEQ ID NO: 91711 - DNA, 13 bp, Artificial Sequence
  Oligonucleotide for detection of SNP TSC0022946
aagtgtgtatttt

SEQ ID NO: 91712 - DNA, 13 bp, Artificial Sequence
  Oligonucleotide for detection of SNP TSC0022946
aaaatacacactt

SEQ ID NO: 91713 - DNA, 13 bp, Artificial Sequence
  Oligonucleotide for detection of SNP TSC0022946
aagtgcgtatttt

SEQ ID NO: 91714 - DNA, 13 bp, Artificial Sequence
  Oligonucleotide for detection of SNP TSC0022946
aaaatacgcactt

SEQ ID NO: 91715 - DNA, 13 bp, Artificial Sequence
  Oligonucleotide for detection of SNP TSC0022946
aagatgtgtattt

SEQ ID NO: 91716 - DNA, 13 bp, Artificial Sequence
  Oligonucleotide for detection of SNP TSC0022946
aaatacacatctt

SEQ ID NO: 91717 - DNA, 13 bp, Artificial Sequence
  Oligonucleotide for detection of SNP TSC0022946
aagatgcgtattt

SEQ ID NO: 91718 - DNA, 13 bp, Artificial Sequence
  Oligonucleotide for detection of SNP TSC0022946
aaatacgcatctt

SEQ ID NO: 91719 - DNA, 13 bp, Artificial Sequence
  Oligonucleotide for detection of SNP TSC0022947
taggagtgtaaay

SEQ ID NO: 91720 - DNA, 13 bp, Artificial Sequence
  Oligonucleotide for detection of SNP TSC0022947
rtttacactccta

SEQ ID NO: 91721 - DNA, 13 bp, Artificial Sequence
  Oligonucleotide for detection of SNP TSC0022947
taggagcgtaaay

SEQ ID NO: 91722 - DNA, 13 bp, Artificial Sequence
  Oligonucleotide for detection of SNP TSC0022947
rtttacgctccta

SEQ ID NO: 91723 - DNA, 13 bp, Artificial Sequence
  Oligonucleotide for detection of SNP TSC0022947
gtttgtattttta

SEQ ID NO: 91724 - DNA, 13 bp, Artificial Sequence
  Oligonucleotide for detection of SNP TSC0022947
taaaaatacaaac

SEQ ID NO: 91725 - DNA, 13 bp, Artificial Sequence
  Oligonucleotide for detection of SNP TSC0022947
gtttgcgttttta

SEQ ID NO: 91726 - DNA, 13 bp, Artificial Sequence
  Oligonucleotide for detection of SNP TSC0022947
taaaaacgcaaac

SEQ ID NO: 91727 - DNA, 13 bp, Artificial Sequence
  Oligonucleotide for detection of SNP TSC0022949
gtggtgtgtgtay

SEQ ID NO: 91728 - DNA, 13 bp, Artificial Sequence
  Oligonucleotide for detection of SNP TSC0022949
rtacacacaccac

SEQ ID NO: 91729 - DNA, 13 bp, Artificial Sequence
  Oligonucleotide for detection of SNP TSC0022949
gtggtgcgtgtay

SEQ ID NO: 91730 - DNA, 13 bp, Artificial Sequence
  Oligonucleotide for detection of SNP TSC0022949
rtacacgcaccac

SEQ ID NO: 91731 - DNA, 13 bp, Artificial Sequence
  Oligonucleotide for detection of SNP TSC0022949
gtatatgtattay

SEQ ID NO: 91732 - DNA, 13 bp, Artificial Sequence
  Oligonucleotide for detection of SNP TSC0022949
rtaatacatatac

SEQ ID NO: 91733 - DNA, 13 bp, Artificial Sequence
  Oligonucleotide for detection of SNP TSC0022949
gtatatatattay

SEQ ID NO: 91734 - DNA, 13 bp, Artificial Sequence
  Oligonucleotide for detection of SNP TSC0022949
rtaatatatatac

SEQ ID NO: 91735 - DNA, 13 bp, Artificial Sequence
  Oligonucleotide for detection of SNP TSC0022949
gtatacgtattay

SEQ ID NO: 91736 - DNA, 13 bp, Artificial Sequence
  Oligonucleotide for detection of SNP TSC0022949
rtaatacgtatac

SEQ ID NO: 91737 - DNA, 13 bp, Artificial Sequence
  Oligonucleotide for detection of SNP TSC0022950
gtattaatattta

SEQ ID NO: 91738 - DNA, 13 bp, Artificial Sequence
  Oligonucleotide for detection of SNP TSC0022950
taaatattaatac

SEQ ID NO: 91739 - DNA, 13 bp, Artificial Sequence
  Oligonucleotide for detection of SNP TSC0022950
gtattagtattta

SEQ ID NO: 91740 - DNA, 13 bp, Artificial Sequence
  Oligonucleotide for detection of SNP TSC0022950
taaatactaatac

SEQ ID NO: 91741 - DNA, 13 bp, Artificial Sequence
  Oligonucleotide for detection of SNP TSC0022951
ataaatgtaaggg

SEQ ID NO: 91742 - DNA, 13 bp, Artificial Sequence
  Oligonucleotide for detection of SNP TSC0022951
cccttacatttat

SEQ ID NO: 91743 - DNA, 13 bp, Artificial Sequence
  Oligonucleotide for detection of SNP TSC0022951
ataaatataaggg

SEQ ID NO: 91744 - DNA, 13 bp, Artificial Sequence
  Oligonucleotide for detection of SNP TSC0022951
cccttatatttat

SEQ ID NO: 91745 - DNA, 13 bp, Artificial Sequence
  Oligonucleotide for detection of SNP TSC0022954
ttttagagttgga

SEQ ID NO: 91746 - DNA, 13 bp, Artificial Sequence
  Oligonucleotide for detection of SNP TSC0022954
tccaactctaaaa

SEQ ID NO: 91747 - DNA, 13 bp, Artificial Sequence
  Oligonucleotide for detection of SNP TSC0022954
ttttagtgttgga

SEQ ID NO: 91748 - DNA, 13 bp, Artificial Sequence
  Oligonucleotide for detection of SNP TSC0022954
tccaacactaaaa

SEQ ID NO: 91749 - DNA, 13 bp, Artificial Sequence
  Oligonucleotide for detection of SNP TSC0022954
tttagttttaaag

SEQ ID NO: 91750 - DNA, 13 bp, Artificial Sequence
  Oligonucleotide for detection of SNP TSC0022954
ctttaaaactaaa

SEQ ID NO: 91751 - DNA, 13 bp, Artificial Sequence
  Oligonucleotide for detection of SNP TSC0022954
tttagtattaaag

SEQ ID NO: 91752 - DNA, 13 bp, Artificial Sequence
  Oligonucleotide for detection of SNP TSC0022954
ctttaatactaaa

SEQ ID NO: 91753 - DNA, 13 bp, Artificial Sequence
  Oligonucleotide for detection of SNP TSC0022955
gaaataatttttt

SEQ ID NO: 91754 - DNA, 13 bp, Artificial Sequence
  Oligonucleotide for detection of SNP TSC0022955
aaaaaattatttc

SEQ ID NO: 91755 - DNA, 13 bp, Artificial Sequence
  Oligonucleotide for detection of SNP TSC0022955
gaaatattttttt

SEQ ID NO: 91756 - DNA, 13 bp, Artificial Sequence
  Oligonucleotide for detection of SNP TSC0022955
aaaaaaatatttc

SEQ ID NO: 91757 - DNA, 13 bp, Artificial Sequence
  Oligonucleotide for detection of SNP TSC0022955
aggaaattgttty

SEQ ID NO: 91758 - DNA, 13 bp, Artificial Sequence
  Oligonucleotide for detection of SNP TSC0022955
raaacaatttcct

SEQ ID NO: 91759 - DNA, 13 bp, Artificial Sequence
  Oligonucleotide for detection of SNP TSC0022955
aggaaagtgttty

SEQ ID NO: 91760 - DNA, 13 bp, Artificial Sequence
  Oligonucleotide for detection of SNP TSC0022955
raaacactttcct

SEQ ID NO: 91761 - DNA, 13 bp, Artificial Sequence
  Oligonucleotide for detection of SNP TSC0022955
aggaaaatgttty

SEQ ID NO: 91762 - DNA, 13 bp, Artificial Sequence
  Oligonucleotide for detection of SNP TSC0022955
raaacattttcct

SEQ ID NO: 91763 - DNA, 13 bp, Artificial Sequence
  Oligonucleotide for detection of SNP TSC0022956
ttagtgatttaaa

SEQ ID NO: 91764 - DNA, 13 bp, Artificial Sequence
  Oligonucleotide for detection of SNP TSC0022956
tttaaatcactaa

SEQ ID NO: 91765 - DNA, 13 bp, Artificial Sequence
  Oligonucleotide for detection of SNP TSC0022956
ttagtgttttaaa

SEQ ID NO: 91766 - DNA, 13 bp, Artificial Sequence
  Oligonucleotide for detection of SNP TSC0022956
tttaaaacactaa

SEQ ID NO: 91767 - DNA, 13 bp, Artificial Sequence
  Oligonucleotide for detection of SNP TSC0022956
ttagcgatttaaa

SEQ ID NO: 91768 - DNA, 13 bp, Artificial Sequence
  Oligonucleotide for detection of SNP TSC0022956
tttaaatcgctaa

SEQ ID NO: 91769 - DNA, 13 bp, Artificial Sequence
  Oligonucleotide for detection of SNP TSC0022956
ttagcgttttaaa

SEQ ID NO: 91770 - DNA, 13 bp, Artificial Sequence
  Oligonucleotide for detection of SNP TSC0022956
tttaaaacgctaa

SEQ ID NO: 91771 - DNA, 13 bp, Artificial Sequence
  Oligonucleotide for detection of SNP TSC0022956
tttaaaatgttgg

SEQ ID NO: 91772 - DNA, 13 bp, Artificial Sequence
  Oligonucleotide for detection of SNP TSC0022956
ccaacattttaaa

SEQ ID NO: 91773 - DNA, 13 bp, Artificial Sequence
  Oligonucleotide for detection of SNP TSC0022956
tttaaatcgttgg

SEQ ID NO: 91774 - DNA, 13 bp, Artificial Sequence
  Oligonucleotide for detection of SNP TSC0022956
ccaacgatttaaa

SEQ ID NO: 91775 - DNA, 13 bp, Artificial Sequence
  Oligonucleotide for detection of SNP TSC0022956
tttaaaacgttgg

SEQ ID NO: 91776 - DNA, 13 bp, Artificial Sequence
  Oligonucleotide for detection of SNP TSC0022956
ccaacgttttaaa

SEQ ID NO: 91777 - DNA, 13 bp, Artificial Sequence
  Oligonucleotide for detection of SNP TSC0022957
atgtttagtatta

SEQ ID NO: 91778 - DNA, 13 bp, Artificial Sequence
  Oligonucleotide for detection of SNP TSC0022957
taatactaaacat

SEQ ID NO: 91779 - DNA, 13 bp, Artificial Sequence
  Oligonucleotide for detection of SNP TSC0022957
atgtttggtatta

SEQ ID NO: 91780 - DNA, 13 bp, Artificial Sequence
  Oligonucleotide for detection of SNP TSC0022957
taataccaaacat

SEQ ID NO: 91781 - DNA, 13 bp, Artificial Sequence
  Oligonucleotide for detection of SNP TSC0022957
atgttcggtatta

SEQ ID NO: 91782 - DNA, 13 bp, Artificial Sequence
  Oligonucleotide for detection of SNP TSC0022957
taataccgaacat

SEQ ID NO: 91783 - DNA, 13 bp, Artificial Sequence
  Oligonucleotide for detection of SNP TSC0022957
tgatattgggtat

SEQ ID NO: 91784 - DNA, 13 bp, Artificial Sequence
  Oligonucleotide for detection of SNP TSC0022957
atacccaatatca

SEQ ID NO: 91785 - DNA, 13 bp, Artificial Sequence
  Oligonucleotide for detection of SNP TSC0022957
tgatatcgggtat

SEQ ID NO: 91786 - DNA, 13 bp, Artificial Sequence
  Oligonucleotide for detection of SNP TSC0022957
atacccgatatca

SEQ ID NO: 91787 - DNA, 13 bp, Artificial Sequence
  Oligonucleotide for detection of SNP TSC0022958
taataaataagta

SEQ ID NO: 91788 - DNA, 13 bp, Artificial Sequence
  Oligonucleotide for detection of SNP TSC0022958
tacttatttatta

SEQ ID NO: 91789 - DNA, 13 bp, Artificial Sequence
  Oligonucleotide for detection of SNP TSC0022958
taataagtaagta

SEQ ID NO: 91790 - DNA, 13 bp, Artificial Sequence
  Oligonucleotide for detection of SNP TSC0022958
tacttacttatta

SEQ ID NO: 91791 - DNA, 13 bp, Artificial Sequence
  Oligonucleotide for detection of SNP TSC0022962
tttttatgtgtga

SEQ ID NO: 91792 - DNA, 13 bp, Artificial Sequence
  Oligonucleotide for detection of SNP TSC0022962
tcacacataaaaa

SEQ ID NO: 91793 - DNA, 13 bp, Artificial Sequence
  Oligonucleotide for detection of SNP TSC0022962
tttttacgtgtga

SEQ ID NO: 91794 - DNA, 13 bp, Artificial Sequence
  Oligonucleotide for detection of SNP TSC0022962
tcacacgtaaaaa

SEQ ID NO: 91795 - DNA, 13 bp, Artificial Sequence
  Oligonucleotide for detection of SNP TSC0022962
ttatatgtaagga

SEQ ID NO: 91796 - DNA, 13 bp, Artificial Sequence
  Oligonucleotide for detection of SNP TSC0022962
tccttacatataa

SEQ ID NO: 91797 - DNA, 13 bp, Artificial Sequence
  Oligonucleotide for detection of SNP TSC0022962
ttatatataagga

SEQ ID NO: 91798 - DNA, 13 bp, Artificial Sequence
  Oligonucleotide for detection of SNP TSC0022962
tccttatatataa

SEQ ID NO: 91799 - DNA, 13 bp, Artificial Sequence
  Oligonucleotide for detection of SNP TSC0022962
ttatacgtaagga

SEQ ID NO: 91800 - DNA, 13 bp, Artificial Sequence
  Oligonucleotide for detection of SNP TSC0022962
tccttacgtataa

SEQ ID NO: 91801 - DNA, 13 bp, Artificial Sequence
  Oligonucleotide for detection of SNP TSC0022963
tattatatttagg

SEQ ID NO: 91802 - DNA, 13 bp, Artificial Sequence
  Oligonucleotide for detection of SNP TSC0022963
cctaaatataata

SEQ ID NO: 91803 - DNA, 13 bp, Artificial Sequence
  Oligonucleotide for detection of SNP TSC0022963
tattatgtttagg

SEQ ID NO: 91804 - DNA, 13 bp, Artificial Sequence
  Oligonucleotide for detection of SNP TSC0022963
cctaaacataata

SEQ ID NO: 91805 - DNA, 13 bp, Artificial Sequence
  Oligonucleotide for detection of SNP TSC0022963
tattacgtttagg

SEQ ID NO: 91806 - DNA, 13 bp, Artificial Sequence
  Oligonucleotide for detection of SNP TSC0022963
cctaaacgtaata

SEQ ID NO: 91807 - DNA, 13 bp, Artificial Sequence
  Oligonucleotide for detection of SNP TSC0022963
tttaaatgtgatg

SEQ ID NO: 91808 - DNA, 13 bp, Artificial Sequence
  Oligonucleotide for detection of SNP TSC0022963
catcacatttaaa

SEQ ID NO: 91809 - DNA, 13 bp, Artificial Sequence
  Oligonucleotide for detection of SNP TSC0022963
tttaaacgtgatg

SEQ ID NO: 91810 - DNA, 13 bp, Artificial Sequence
  Oligonucleotide for detection of SNP TSC0022963
catcacgtttaaa

SEQ ID NO: 91811 - DNA, 13 bp, Artificial Sequence
  Oligonucleotide for detection of SNP TSC0022965
gtgtaggggtgat

SEQ ID NO: 91812 - DNA, 13 bp, Artificial Sequence
  Oligonucleotide for detection of SNP TSC0022965
atcacccctacac

SEQ ID NO: 91813 - DNA, 13 bp, Artificial Sequence
  Oligonucleotide for detection of SNP TSC0022965
gtgtagaggtgat

SEQ ID NO: 91814 - DNA, 13 bp, Artificial Sequence
  Oligonucleotide for detection of SNP TSC0022965
atcacctctacac

SEQ ID NO: 91815 - DNA, 13 bp, Artificial Sequence
  Oligonucleotide for detection of SNP TSC0022966
ttagttgtgagay

SEQ ID NO: 91816 - DNA, 13 bp, Artificial Sequence
  Oligonucleotide for detection of SNP TSC0022966
rtctcacaactaa

SEQ ID NO: 91817 - DNA, 13 bp, Artificial Sequence
  Oligonucleotide for detection of SNP TSC0022966
ttagttttgagay

SEQ ID NO: 91818 - DNA, 13 bp, Artificial Sequence
  Oligonucleotide for detection of SNP TSC0022966
rtctcaaaactaa

SEQ ID NO: 91819 - DNA, 13 bp, Artificial Sequence
  Oligonucleotide for detection of SNP TSC0022966
ttagtcgtgagay

SEQ ID NO: 91820 - DNA, 13 bp, Artificial Sequence
  Oligonucleotide for detection of SNP TSC0022966
rtctcacgactaa

SEQ ID NO: 91821 - DNA, 13 bp, Artificial Sequence
  Oligonucleotide for detection of SNP TSC0022966
gttttatggttga

SEQ ID NO: 91822 - DNA, 13 bp, Artificial Sequence
  Oligonucleotide for detection of SNP TSC0022966
tcaaccataaaac

SEQ ID NO: 91823 - DNA, 13 bp, Artificial Sequence
  Oligonucleotide for detection of SNP TSC0022966
gttttaaggttga

SEQ ID NO: 91824 - DNA, 13 bp, Artificial Sequence
  Oligonucleotide for detection of SNP TSC0022966
tcaaccttaaaac

SEQ ID NO: 91825 - DNA, 13 bp, Artificial Sequence
  Oligonucleotide for detection of SNP TSC0022966
gttttacggttga

SEQ ID NO: 91826 - DNA, 13 bp, Artificial Sequence
  Oligonucleotide for detection of SNP TSC0022966
tcaaccgtaaaac

SEQ ID NO: 91827 - DNA, 13 bp, Artificial Sequence
  Oligonucleotide for detection of SNP TSC0022969
tatgttaaattgt

SEQ ID NO: 91828 - DNA, 13 bp, Artificial Sequence
  Oligonucleotide for detection of SNP TSC0022969
acaatttaacata

SEQ ID NO: 91829 - DNA, 13 bp, Artificial Sequence
  Oligonucleotide for detection of SNP TSC0022969
tatgttgaattgt

SEQ ID NO: 91830 - DNA, 13 bp, Artificial Sequence
  Oligonucleotide for detection of SNP TSC0022969
acaattcaacata

SEQ ID NO: 91831 - DNA, 13 bp, Artificial Sequence
  Oligonucleotide for detection of SNP TSC0022969
tatgtcgaattgt

SEQ ID NO: 91832 - DNA, 13 bp, Artificial Sequence
  Oligonucleotide for detection of SNP TSC0022969
acaattcgacata

SEQ ID NO: 91833 - DNA, 13 bp, Artificial Sequence
  Oligonucleotide for detection of SNP TSC0022969
ataatttgatatg

SEQ ID NO: 91834 - DNA, 13 bp, Artificial Sequence
  Oligonucleotide for detection of SNP TSC0022969
catatcaaattat

SEQ ID NO: 91835 - DNA, 13 bp, Artificial Sequence
  Oligonucleotide for detection of SNP TSC0022969
ataattcgatatg

SEQ ID NO: 91836 - DNA, 13 bp, Artificial Sequence
  Oligonucleotide for detection of SNP TSC0022969
catatcgaattat

SEQ ID NO: 91837 - DNA, 13 bp, Artificial Sequence
  Oligonucleotide for detection of SNP TSC0022970
agttatggttgtt

SEQ ID NO: 91838 - DNA, 13 bp, Artificial Sequence
  Oligonucleotide for detection of SNP TSC0022970
aacaaccataact

SEQ ID NO: 91839 - DNA, 13 bp, Artificial Sequence
  Oligonucleotide for detection of SNP TSC0022970
agttattgttgtt

SEQ ID NO: 91840 - DNA, 13 bp, Artificial Sequence
  Oligonucleotide for detection of SNP TSC0022970
aacaacaataact

SEQ ID NO: 91841 - DNA, 13 bp, Artificial Sequence
  Oligonucleotide for detection of SNP TSC0022970
aatagttataatt

SEQ ID NO: 91842 - DNA, 13 bp, Artificial Sequence
  Oligonucleotide for detection of SNP TSC0022970
aattataactatt

SEQ ID NO: 91843 - DNA, 13 bp, Artificial Sequence
  Oligonucleotide for detection of SNP TSC0022970
aatagtaataatt

SEQ ID NO: 91844 - DNA, 13 bp, Artificial Sequence
  Oligonucleotide for detection of SNP TSC0022970
aattattactatt

SEQ ID NO: 91845 - DNA, 13 bp, Artificial Sequence
  Oligonucleotide for detection of SNP TSC0022971
ttaaaaataataa

SEQ ID NO: 91846 - DNA, 13 bp, Artificial Sequence
  Oligonucleotide for detection of SNP TSC0022971
ttattatttttaa

SEQ ID NO: 91847 - DNA, 13 bp, Artificial Sequence
  Oligonucleotide for detection of SNP TSC0022971
ttaaaattaataa

SEQ ID NO: 91848 - DNA, 13 bp, Artificial Sequence
  Oligonucleotide for detection of SNP TSC0022971
ttattaattttaa

SEQ ID NO: 91849 - DNA, 13 bp, Artificial Sequence
  Oligonucleotide for detection of SNP TSC0022971
ttgttgtttttaa

SEQ ID NO: 91850 - DNA, 13 bp, Artificial Sequence
  Oligonucleotide for detection of SNP TSC0022971
ttaaaaacaacaa

SEQ ID NO: 91851 - DNA, 13 bp, Artificial Sequence
  Oligonucleotide for detection of SNP TSC0022971
ttgttggttttaa

SEQ ID NO: 91852 - DNA, 13 bp, Artificial Sequence
  Oligonucleotide for detection of SNP TSC0022971
ttaaaaccaacaa

SEQ ID NO: 91853 - DNA, 13 bp, Artificial Sequence
  Oligonucleotide for detection of SNP TSC0022972
gttatttggttty

SEQ ID NO: 91854 - DNA, 13 bp, Artificial Sequence
  Oligonucleotide for detection of SNP TSC0022972
raaaccaaataac

SEQ ID NO: 91855 - DNA, 13 bp, Artificial Sequence
  Oligonucleotide for detection of SNP TSC0022972
gttattcggttty

SEQ ID NO: 91856 - DNA, 13 bp, Artificial Sequence
  Oligonucleotide for detection of SNP TSC0022972
raaaccgaataac

SEQ ID NO: 91857 - DNA, 13 bp, Artificial Sequence
  Oligonucleotide for detection of SNP TSC0022972
gaggttgggtagy

SEQ ID NO: 91858 - DNA, 13 bp, Artificial Sequence
  Oligonucleotide for detection of SNP TSC0022972
rctacccaacctc

SEQ ID NO: 91859 - DNA, 13 bp, Artificial Sequence
  Oligonucleotide for detection of SNP TSC0022972
gaggttaggtagy

SEQ ID NO: 91860 - DNA, 13 bp, Artificial Sequence
  Oligonucleotide for detection of SNP TSC0022972
rctacctaacctc

SEQ ID NO: 91861 - DNA, 13 bp, Artificial Sequence
  Oligonucleotide for detection of SNP TSC0022972
gaggtcgggtagy

SEQ ID NO: 91862 - DNA, 13 bp, Artificial Sequence
  Oligonucleotide for detection of SNP TSC0022972
rctacccgacctc

SEQ ID NO: 91863 - DNA, 13 bp, Artificial Sequence
  Oligonucleotide for detection of SNP TSC0022975
tatgtaagttgtg

SEQ ID NO: 91864 - DNA, 13 bp, Artificial Sequence
  Oligonucleotide for detection of SNP TSC0022975
cacaacttacata

SEQ ID NO: 91865 - DNA, 13 bp, Artificial Sequence
  Oligonucleotide for detection of SNP TSC0022975
tatgtatgttgtg

SEQ ID NO: 91866 - DNA, 13 bp, Artificial Sequence
  Oligonucleotide for detection of SNP TSC0022975
cacaacatacata

SEQ ID NO: 91867 - DNA, 13 bp, Artificial Sequence
  Oligonucleotide for detection of SNP TSC0022975
tacgtaagttgtg

SEQ ID NO: 91868 - DNA, 13 bp, Artificial Sequence
  Oligonucleotide for detection of SNP TSC0022975
cacaacttacgta

SEQ ID NO: 91869 - DNA, 13 bp, Artificial Sequence
  Oligonucleotide for detection of SNP TSC0022975
tacgtatgttgtg

SEQ ID NO: 91870 - DNA, 13 bp, Artificial Sequence
  Oligonucleotide for detection of SNP TSC0022975
cacaacatacgta

SEQ ID NO: 91871 - DNA, 13 bp, Artificial Sequence
  Oligonucleotide for detection of SNP TSC0022975
tatagtttgtgtg

SEQ ID NO: 91872 - DNA, 13 bp, Artificial Sequence
  Oligonucleotide for detection of SNP TSC0022975
cacacaaactata

SEQ ID NO: 91873 - DNA, 13 bp, Artificial Sequence
  Oligonucleotide for detection of SNP TSC0022975
tatagtatgtgtg

SEQ ID NO: 91874 - DNA, 13 bp, Artificial Sequence
  Oligonucleotide for detection of SNP TSC0022975
cacacatactata

SEQ ID NO: 91875 - DNA, 13 bp, Artificial Sequence
  Oligonucleotide for detection of SNP TSC0022975
tatagtttgcgtg

SEQ ID NO: 91876 - DNA, 13 bp, Artificial Sequence
  Oligonucleotide for detection of SNP TSC0022975
cacgcaaactata

SEQ ID NO: 91877 - DNA, 13 bp, Artificial Sequence
  Oligonucleotide for detection of SNP TSC0022975
tatagtatgcgtg

SEQ ID NO: 91878 - DNA, 13 bp, Artificial Sequence
  Oligonucleotide for detection of SNP TSC0022975
cacgcatactata

SEQ ID NO: 91879 - DNA, 13 bp, Artificial Sequence
  Oligonucleotide for detection of SNP TSC0022981
ttatagatttgta

SEQ ID NO: 91880 - DNA, 13 bp, Artificial Sequence
  Oligonucleotide for detection of SNP TSC0022981
tacaaatctataa

SEQ ID NO: 91881 - DNA, 13 bp, Artificial Sequence
  Oligonucleotide for detection of SNP TSC0022982
attagttattgaa

SEQ ID NO: 91882 - DNA, 13 bp, Artificial Sequence
  Oligonucleotide for detection of SNP TSC0022982
ttcaataactaat

SEQ ID NO: 91883 - DNA, 13 bp, Artificial Sequence
  Oligonucleotide for detection of SNP TSC0022982
attagtgattgaa

SEQ ID NO: 91884 - DNA, 13 bp, Artificial Sequence
  Oligonucleotide for detection of SNP TSC0022982
ttcaatcactaat

SEQ ID NO: 91885 - DNA, 13 bp, Artificial Sequence
  Oligonucleotide for detection of SNP TSC0022982
attagcgattgaa

SEQ ID NO: 91886 - DNA, 13 bp, Artificial Sequence
  Oligonucleotide for detection of SNP TSC0022982
ttcaatcgctaat

SEQ ID NO: 91887 - DNA, 13 bp, Artificial Sequence
  Oligonucleotide for detection of SNP TSC0022982
tttaatggttgat

SEQ ID NO: 91888 - DNA, 13 bp, Artificial Sequence
  Oligonucleotide for detection of SNP TSC0022982
atcaaccattaaa

SEQ ID NO: 91889 - DNA, 13 bp, Artificial Sequence
  Oligonucleotide for detection of SNP TSC0022982
tttaattgttgat

SEQ ID NO: 91890 - DNA, 13 bp, Artificial Sequence
  Oligonucleotide for detection of SNP TSC0022982
atcaacaattaaa

SEQ ID NO: 91891 - DNA, 13 bp, Artificial Sequence
  Oligonucleotide for detection of SNP TSC0022982
tttaatcgttgat

SEQ ID NO: 91892 - DNA, 13 bp, Artificial Sequence
  Oligonucleotide for detection of SNP TSC0022982
atcaacgattaaa

SEQ ID NO: 91893 - DNA, 13 bp, Artificial Sequence
  Oligonucleotide for detection of SNP TSC0022983
ttagttattgaaa

SEQ ID NO: 91894 - DNA, 13 bp, Artificial Sequence
  Oligonucleotide for detection of SNP TSC0022983
tttcaataactaa

SEQ ID NO: 91895 - DNA, 13 bp, Artificial Sequence
  Oligonucleotide for detection of SNP TSC0022983
ttagtttttgaaa

SEQ ID NO: 91896 - DNA, 13 bp, Artificial Sequence
  Oligonucleotide for detection of SNP TSC0022983
tttcaaaaactaa

SEQ ID NO: 91897 - DNA, 13 bp, Artificial Sequence
  Oligonucleotide for detection of SNP TSC0022983
ttttaatggttga

SEQ ID NO: 91898 - DNA, 13 bp, Artificial Sequence
  Oligonucleotide for detection of SNP TSC0022983
tcaaccattaaaa

SEQ ID NO: 91899 - DNA, 13 bp, Artificial Sequence
  Oligonucleotide for detection of SNP TSC0022983
ttttaaaggttga

SEQ ID NO: 91900 - DNA, 13 bp, Artificial Sequence
  Oligonucleotide for detection of SNP TSC0022983
tcaacctttaaaa

SEQ ID NO: 91901 - DNA, 13 bp, Artificial Sequence
  Oligonucleotide for detection of SNP TSC0022986
ttttttttaaagt

SEQ ID NO: 91902 - DNA, 13 bp, Artificial Sequence
  Oligonucleotide for detection of SNP TSC0022986
actttaaaaaaaa

SEQ ID NO: 91903 - DNA, 13 bp, Artificial Sequence
  Oligonucleotide for detection of SNP TSC0022986
attttgtaaaggg

SEQ ID NO: 91904 - DNA, 13 bp, Artificial Sequence
  Oligonucleotide for detection of SNP TSC0022986
ccctttacaaaat

SEQ ID NO: 91905 - DNA, 13 bp, Artificial Sequence
  Oligonucleotide for detection of SNP TSC0022986
attttgaaaaggg

SEQ ID NO: 91906 - DNA, 13 bp, Artificial Sequence
  Oligonucleotide for detection of SNP TSC0022986
cccttttcaaaat

SEQ ID NO: 91907 - DNA, 13 bp, Artificial Sequence
  Oligonucleotide for detection of SNP TSC0022987
taaattataagtg

SEQ ID NO: 91908 - DNA, 13 bp, Artificial Sequence
  Oligonucleotide for detection of SNP TSC0022987
cacttataattta

SEQ ID NO: 91909 - DNA, 13 bp, Artificial Sequence
  Oligonucleotide for detection of SNP TSC0022987
taaattgtaagtg

SEQ ID NO: 91910 - DNA, 13 bp, Artificial Sequence
  Oligonucleotide for detection of SNP TSC0022987
cacttacaattta

SEQ ID NO: 91911 - DNA, 13 bp, Artificial Sequence
  Oligonucleotide for detection of SNP TSC0022987
taaatcgtaagtg

SEQ ID NO: 91912 - DNA, 13 bp, Artificial Sequence
  Oligonucleotide for detection of SNP TSC0022987
cacttacgattta

SEQ ID NO: 91913 - DNA, 13 bp, Artificial Sequence
  Oligonucleotide for detection of SNP TSC0022987
tatttgtggtttg

SEQ ID NO: 91914 - DNA, 13 bp, Artificial Sequence
  Oligonucleotide for detection of SNP TSC0022987
caaaccacaaata

SEQ ID NO: 91915 - DNA, 13 bp, Artificial Sequence
  Oligonucleotide for detection of SNP TSC0022987
tatttgcggtttg

SEQ ID NO: 91916 - DNA, 13 bp, Artificial Sequence
  Oligonucleotide for detection of SNP TSC0022987
caaaccgcaaata

SEQ ID NO: 91917 - DNA, 13 bp, Artificial Sequence
  Oligonucleotide for detection of SNP TSC0022988
gtatttgtttgty

SEQ ID NO: 91918 - DNA, 13 bp, Artificial Sequence
  Oligonucleotide for detection of SNP TSC0022988
racaaacaaatac

SEQ ID NO: 91919 - DNA, 13 bp, Artificial Sequence
  Oligonucleotide for detection of SNP TSC0022988
gtatttatttgty

SEQ ID NO: 91920 - DNA, 13 bp, Artificial Sequence
  Oligonucleotide for detection of SNP TSC0022988
racaaataaatac

SEQ ID NO: 91921 - DNA, 13 bp, Artificial Sequence
  Oligonucleotide for detection of SNP TSC0022989
aggggtgtttgta

SEQ ID NO: 91922 - DNA, 13 bp, Artificial Sequence
  Oligonucleotide for detection of SNP TSC0022989
tacaaacacccct

SEQ ID NO: 91923 - DNA, 13 bp, Artificial Sequence
  Oligonucleotide for detection of SNP TSC0022989
aggggtttttgta

SEQ ID NO: 91924 - DNA, 13 bp, Artificial Sequence
  Oligonucleotide for detection of SNP TSC0022989
tacaaaaacccct

SEQ ID NO: 91925 - DNA, 13 bp, Artificial Sequence
  Oligonucleotide for detection of SNP TSC0022989
tatagatattttt

SEQ ID NO: 91926 - DNA, 13 bp, Artificial Sequence
  Oligonucleotide for detection of SNP TSC0022989
aaaaatatctata

SEQ ID NO: 91927 - DNA, 13 bp, Artificial Sequence
  Oligonucleotide for detection of SNP TSC0022989
tatagaaattttt

SEQ ID NO: 91928 - DNA, 13 bp, Artificial Sequence
  Oligonucleotide for detection of SNP TSC0022989
aaaaatttctata

SEQ ID NO: 91929 - DNA, 13 bp, Artificial Sequence
  Oligonucleotide for detection of SNP TSC0022994
aaattaatatggt

SEQ ID NO: 91930 - DNA, 13 bp, Artificial Sequence
  Oligonucleotide for detection of SNP TSC0022994
accatattaattt

SEQ ID NO: 91931 - DNA, 13 bp, Artificial Sequence
  Oligonucleotide for detection of SNP TSC0022994
aaattattatggt

SEQ ID NO: 91932 - DNA, 13 bp, Artificial Sequence
  Oligonucleotide for detection of SNP TSC0022994
accataataattt

SEQ ID NO: 91933 - DNA, 13 bp, Artificial Sequence
  Oligonucleotide for detection of SNP TSC0022994
attatgttggttt

SEQ ID NO: 91934 - DNA, 13 bp, Artificial Sequence
  Oligonucleotide for detection of SNP TSC0022994
aaaccaacataat

SEQ ID NO: 91935 - DNA, 13 bp, Artificial Sequence
  Oligonucleotide for detection of SNP TSC0022994
attatggtggttt

SEQ ID NO: 91936 - DNA, 13 bp, Artificial Sequence
  Oligonucleotide for detection of SNP TSC0022994
aaaccaccataat

SEQ ID NO: 91937 - DNA, 13 bp, Artificial Sequence
  Oligonucleotide for detection of SNP TSC0022996
ttgttttattgga

SEQ ID NO: 91938 - DNA, 13 bp, Artificial Sequence
  Oligonucleotide for detection of SNP TSC0022996
tccaataaaacaa

SEQ ID NO: 91939 - DNA, 13 bp, Artificial Sequence
  Oligonucleotide for detection of SNP TSC0022996
ttgtttgattgga

SEQ ID NO: 91940 - DNA, 13 bp, Artificial Sequence
  Oligonucleotide for detection of SNP TSC0022996
tccaatcaaacaa

SEQ ID NO: 91941 - DNA, 13 bp, Artificial Sequence
  Oligonucleotide for detection of SNP TSC0022996
ttgttcgattgga

SEQ ID NO: 91942 - DNA, 13 bp, Artificial Sequence
  Oligonucleotide for detection of SNP TSC0022996
tccaatcgaacaa

SEQ ID NO: 91943 - DNA, 13 bp, Artificial Sequence
  Oligonucleotide for detection of SNP TSC0022996
tttaatggggtag

SEQ ID NO: 91944 - DNA, 13 bp, Artificial Sequence
  Oligonucleotide for detection of SNP TSC0022996
ctaccccattaaa

SEQ ID NO: 91945 - DNA, 13 bp, Artificial Sequence
  Oligonucleotide for detection of SNP TSC0022996
tttaattgggtag

SEQ ID NO: 91946 - DNA, 13 bp, Artificial Sequence
  Oligonucleotide for detection of SNP TSC0022996
ctacccaattaaa

SEQ ID NO: 91947 - DNA, 13 bp, Artificial Sequence
  Oligonucleotide for detection of SNP TSC0022996
tttaatcgggtag

SEQ ID NO: 91948 - DNA, 13 bp, Artificial Sequence
  Oligonucleotide for detection of SNP TSC0022996
ctacccgattaaa

SEQ ID NO: 91949 - DNA, 13 bp, Artificial Sequence
  Oligonucleotide for detection of SNP TSC0022998
ttttaaatataty

SEQ ID NO: 91950 - DNA, 13 bp, Artificial Sequence
  Oligonucleotide for detection of SNP TSC0022998
ratatatttaaaa

SEQ ID NO: 91951 - DNA, 13 bp, Artificial Sequence
  Oligonucleotide for detection of SNP TSC0022998
ttttaagtataty

SEQ ID NO: 91952 - DNA, 13 bp, Artificial Sequence
  Oligonucleotide for detection of SNP TSC0022998
ratatacttaaaa

SEQ ID NO: 91953 - DNA, 13 bp, Artificial Sequence
  Oligonucleotide for detection of SNP TSC0022999
ttggttttgttat

SEQ ID NO: 91954 - DNA, 13 bp, Artificial Sequence
  Oligonucleotide for detection of SNP TSC0022999
ataacaaaaccaa

SEQ ID NO: 91955 - DNA, 13 bp, Artificial Sequence
  Oligonucleotide for detection of SNP TSC0022999
ttggttgtgttat

SEQ ID NO: 91956 - DNA, 13 bp, Artificial Sequence
  Oligonucleotide for detection of SNP TSC0022999
ataacacaaccaa

SEQ ID NO: 91957 - DNA, 13 bp, Artificial Sequence
  Oligonucleotide for detection of SNP TSC0022999
ataatagagttaa

SEQ ID NO: 91958 - DNA, 13 bp, Artificial Sequence
  Oligonucleotide for detection of SNP TSC0022999
ttaactctattat

SEQ ID NO: 91959 - DNA, 13 bp, Artificial Sequence
  Oligonucleotide for detection of SNP TSC0022999
ataatatagttaa

SEQ ID NO: 91960 - DNA, 13 bp, Artificial Sequence
  Oligonucleotide for detection of SNP TSC0022999
ttaactatattat

SEQ ID NO: 91961 - DNA, 13 bp, Artificial Sequence
  Oligonucleotide for detection of SNP TSC0023001
ttgtttaaagtaa

SEQ ID NO: 91962 - DNA, 13 bp, Artificial Sequence
  Oligonucleotide for detection of SNP TSC0023001
ttactttaaacaa

SEQ ID NO: 91963 - DNA, 13 bp, Artificial Sequence
  Oligonucleotide for detection of SNP TSC0023001
ttgttttaagtaa

SEQ ID NO: 91964 - DNA, 13 bp, Artificial Sequence
  Oligonucleotide for detection of SNP TSC0023001
ttacttaaaacaa

SEQ ID NO: 91965 - DNA, 13 bp, Artificial Sequence
  Oligonucleotide for detection of SNP TSC0023001
ttattttaaatag

SEQ ID NO: 91966 - DNA, 13 bp, Artificial Sequence
  Oligonucleotide for detection of SNP TSC0023001
ctatttaaaataa

SEQ ID NO: 91967 - DNA, 13 bp, Artificial Sequence
  Oligonucleotide for detection of SNP TSC0023001
ttatttgaaatag

SEQ ID NO: 91968 - DNA, 13 bp, Artificial Sequence
  Oligonucleotide for detection of SNP TSC0023001
ctatttcaaataa

SEQ ID NO: 91969 - DNA, 13 bp, Artificial Sequence
  Oligonucleotide for detection of SNP TSC0023002
ttgaatgtttttg

SEQ ID NO: 91970 - DNA, 13 bp, Artificial Sequence
  Oligonucleotide for detection of SNP TSC0023002
caaaaacattcaa

SEQ ID NO: 91971 - DNA, 13 bp, Artificial Sequence
  Oligonucleotide for detection of SNP TSC0023002
ttgaatatttttg

SEQ ID NO: 91972 - DNA, 13 bp, Artificial Sequence
  Oligonucleotide for detection of SNP TSC0023002
caaaaatattcaa

SEQ ID NO: 91973 - DNA, 13 bp, Artificial Sequence
  Oligonucleotide for detection of SNP TSC0023003
taaggtgagaggg

SEQ ID NO: 91974 - DNA, 13 bp, Artificial Sequence
  Oligonucleotide for detection of SNP TSC0023003
ccctctcacctta

SEQ ID NO: 91975 - DNA, 13 bp, Artificial Sequence
  Oligonucleotide for detection of SNP TSC0023003
taaggtaagaggg

SEQ ID NO: 91976 - DNA, 13 bp, Artificial Sequence
  Oligonucleotide for detection of SNP TSC0023003
ccctcttacctta

SEQ ID NO: 91977 - DNA, 13 bp, Artificial Sequence
  Oligonucleotide for detection of SNP TSC0023006
tagggtaattttt

SEQ ID NO: 91978 - DNA, 13 bp, Artificial Sequence
  Oligonucleotide for detection of SNP TSC0023006
aaaaattacccta

SEQ ID NO: 91979 - DNA, 13 bp, Artificial Sequence
  Oligonucleotide for detection of SNP TSC0023006
tagggtgattttt

SEQ ID NO: 91980 - DNA, 13 bp, Artificial Sequence
  Oligonucleotide for detection of SNP TSC0023006
aaaaatcacccta

SEQ ID NO: 91981 - DNA, 13 bp, Artificial Sequence
  Oligonucleotide for detection of SNP TSC0023007
tttttatgaggty

SEQ ID NO: 91982 - DNA, 13 bp, Artificial Sequence
  Oligonucleotide for detection of SNP TSC0023007
racctcataaaaa

SEQ ID NO: 91983 - DNA, 13 bp, Artificial Sequence
  Oligonucleotide for detection of SNP TSC0023007
tttttacgaggty

SEQ ID NO: 91984 - DNA, 13 bp, Artificial Sequence
  Oligonucleotide for detection of SNP TSC0023007
racctcgtaaaaa

SEQ ID NO: 91985 - DNA, 13 bp, Artificial Sequence
  Oligonucleotide for detection of SNP TSC0023007
ggttttgtggaga

SEQ ID NO: 91986 - DNA, 13 bp, Artificial Sequence
  Oligonucleotide for detection of SNP TSC0023007
tctccacaaaacc

SEQ ID NO: 91987 - DNA, 13 bp, Artificial Sequence
  Oligonucleotide for detection of SNP TSC0023007
ggttttatggaga

SEQ ID NO: 91988 - DNA, 13 bp, Artificial Sequence
  Oligonucleotide for detection of SNP TSC0023007
tctccataaaacc

SEQ ID NO: 91989 - DNA, 13 bp, Artificial Sequence
  Oligonucleotide for detection of SNP TSC0023007
ggtttcgtggaga

SEQ ID NO: 91990 - DNA, 13 bp, Artificial Sequence
  Oligonucleotide for detection of SNP TSC0023007
tctccacgaaacc

SEQ ID NO: 91991 - DNA, 13 bp, Artificial Sequence
  Oligonucleotide for detection of SNP TSC0023008
ttattttgtgtat

SEQ ID NO: 91992 - DNA, 13 bp, Artificial Sequence
  Oligonucleotide for detection of SNP TSC0023008
atacacaaaataa

SEQ ID NO: 91993 - DNA, 13 bp, Artificial Sequence
  Oligonucleotide for detection of SNP TSC0023008
ttatttcgtgtat

SEQ ID NO: 91994 - DNA, 13 bp, Artificial Sequence
  Oligonucleotide for detection of SNP TSC0023008
atacacgaaataa

SEQ ID NO: 91995 - DNA, 13 bp, Artificial Sequence
  Oligonucleotide for detection of SNP TSC0023008
ttattttgcgtat

SEQ ID NO: 91996 - DNA, 13 bp, Artificial Sequence
  Oligonucleotide for detection of SNP TSC0023008
atacgcaaaataa

SEQ ID NO: 91997 - DNA, 13 bp, Artificial Sequence
  Oligonucleotide for detection of SNP TSC0023008
ttatttcgcgtat

SEQ ID NO: 91998 - DNA, 13 bp, Artificial Sequence
  Oligonucleotide for detection of SNP TSC0023008
atacgcgaaataa

SEQ ID NO: 91999 - DNA, 13 bp, Artificial Sequence
  Oligonucleotide for detection of SNP TSC0023008
atatgtgagataa

SEQ ID NO: 92000 - DNA, 13 bp, Artificial Sequence
  Oligonucleotide for detection of SNP TSC0023008
ttatctcacatat

SEQ ID NO: 92001 - DNA, 13 bp, Artificial Sequence
  Oligonucleotide for detection of SNP TSC0023008
atatgtaagataa

SEQ ID NO: 92002 - DNA, 13 bp, Artificial Sequence
  Oligonucleotide for detection of SNP TSC0023008
ttatcttacatat

SEQ ID NO: 92003 - DNA, 13 bp, Artificial Sequence
  Oligonucleotide for detection of SNP TSC0023008
atacgtgagataa

SEQ ID NO: 92004 - DNA, 13 bp, Artificial Sequence
  Oligonucleotide for detection of SNP TSC0023008
ttatctcacgtat

SEQ ID NO: 92005 - DNA, 13 bp, Artificial Sequence
  Oligonucleotide for detection of SNP TSC0023008
atacgtaagataa

SEQ ID NO: 92006 - DNA, 13 bp, Artificial Sequence
  Oligonucleotide for detection of SNP TSC0023008
ttatcttacgtat

SEQ ID NO: 92007 - DNA, 13 bp, Artificial Sequence
  Oligonucleotide for detection of SNP TSC0023008
atatgcgagataa

SEQ ID NO: 92008 - DNA, 13 bp, Artificial Sequence
  Oligonucleotide for detection of SNP TSC0023008
ttatctcgcatat

SEQ ID NO: 92009 - DNA, 13 bp, Artificial Sequence
  Oligonucleotide for detection of SNP TSC0023008
atacgcgagataa

SEQ ID NO: 92010 - DNA, 13 bp, Artificial Sequence
  Oligonucleotide for detection of SNP TSC0023008
ttatctcgcgtat

SEQ ID NO: 92011 - DNA, 13 bp, Artificial Sequence
  Oligonucleotide for detection of SNP TSC0023009
atagagttttgtg

SEQ ID NO: 92012 - DNA, 13 bp, Artificial Sequence
  Oligonucleotide for detection of SNP TSC0023009
cacaaaactctat

SEQ ID NO: 92013 - DNA, 13 bp, Artificial Sequence
  Oligonucleotide for detection of SNP TSC0023009
atagaggtttgtg

SEQ ID NO: 92014 - DNA, 13 bp, Artificial Sequence
  Oligonucleotide for detection of SNP TSC0023009
cacaaacctctat

SEQ ID NO: 92015 - DNA, 13 bp, Artificial Sequence
  Oligonucleotide for detection of SNP TSC0023009
tatagggttttgt

SEQ ID NO: 92016 - DNA, 13 bp, Artificial Sequence
  Oligonucleotide for detection of SNP TSC0023009
acaaaaccctata

SEQ ID NO: 92017 - DNA, 13 bp, Artificial Sequence
  Oligonucleotide for detection of SNP TSC0023009
tataggtttttgt

SEQ ID NO: 92018 - DNA, 13 bp, Artificial Sequence
  Oligonucleotide for detection of SNP TSC0023009
acaaaaacctata

SEQ ID NO: 92019 - DNA, 13 bp, Artificial Sequence
  Oligonucleotide for detection of SNP TSC0023011
gatgttaaagagy

SEQ ID NO: 92020 - DNA, 13 bp, Artificial Sequence
  Oligonucleotide for detection of SNP TSC0023011
rctctttaacatc

SEQ ID NO: 92021 - DNA, 13 bp, Artificial Sequence
  Oligonucleotide for detection of SNP TSC0023011
gatgttgaagagy

SEQ ID NO: 92022 - DNA, 13 bp, Artificial Sequence
  Oligonucleotide for detection of SNP TSC0023011
rctcttcaacatc

SEQ ID NO: 92023 - DNA, 13 bp, Artificial Sequence
  Oligonucleotide for detection of SNP TSC0023011
gatgtcgaagagy

SEQ ID NO: 92024 - DNA, 13 bp, Artificial Sequence
  Oligonucleotide for detection of SNP TSC0023011
rctcttcgacatc

SEQ ID NO: 92025 - DNA, 13 bp, Artificial Sequence
  Oligonucleotide for detection of SNP TSC0023011
gttttttggtaty

SEQ ID NO: 92026 - DNA, 13 bp, Artificial Sequence
  Oligonucleotide for detection of SNP TSC0023011
rataccaaaaaac

SEQ ID NO: 92027 - DNA, 13 bp, Artificial Sequence
  Oligonucleotide for detection of SNP TSC0023011
gtttttcggtaty

SEQ ID NO: 92028 - DNA, 13 bp, Artificial Sequence
  Oligonucleotide for detection of SNP TSC0023011
rataccgaaaaac

SEQ ID NO: 92029 - DNA, 13 bp, Artificial Sequence
  Oligonucleotide for detection of SNP TSC0023013
tattaatgtttag

SEQ ID NO: 92030 - DNA, 13 bp, Artificial Sequence
  Oligonucleotide for detection of SNP TSC0023013
ctaaacattaata

SEQ ID NO: 92031 - DNA, 13 bp, Artificial Sequence
  Oligonucleotide for detection of SNP TSC0023013
tattaacgtttag

SEQ ID NO: 92032 - DNA, 13 bp, Artificial Sequence
  Oligonucleotide for detection of SNP TSC0023013
ctaaacgttaata

SEQ ID NO: 92033 - DNA, 13 bp, Artificial Sequence
  Oligonucleotide for detection of SNP TSC0023013
ttgggtgttaatg

SEQ ID NO: 92034 - DNA, 13 bp, Artificial Sequence
  Oligonucleotide for detection of SNP TSC0023013
cattaacacccaa

SEQ ID NO: 92035 - DNA, 13 bp, Artificial Sequence
  Oligonucleotide for detection of SNP TSC0023013
ttgggtattaatg

SEQ ID NO: 92036 - DNA, 13 bp, Artificial Sequence
  Oligonucleotide for detection of SNP TSC0023013
cattaatacccaa

SEQ ID NO: 92037 - DNA, 13 bp, Artificial Sequence
  Oligonucleotide for detection of SNP TSC0023013
ttgggcgttaatg

SEQ ID NO: 92038 - DNA, 13 bp, Artificial Sequence
  Oligonucleotide for detection of SNP TSC0023013
cattaacgcccaa

SEQ ID NO: 92039 - DNA, 13 bp, Artificial Sequence
  Oligonucleotide for detection of SNP TSC0023015
attgaaggagggy

SEQ ID NO: 92040 - DNA, 13 bp, Artificial Sequence
  Oligonucleotide for detection of SNP TSC0023015
rccctccttcaat

SEQ ID NO: 92041 - DNA, 13 bp, Artificial Sequence
  Oligonucleotide for detection of SNP TSC0023015
attgaatgagggy

SEQ ID NO: 92042 - DNA, 13 bp, Artificial Sequence
  Oligonucleotide for detection of SNP TSC0023015
rccctcattcaat

SEQ ID NO: 92043 - DNA, 13 bp, Artificial Sequence
  Oligonucleotide for detection of SNP TSC0023015
gtttttttttaat

SEQ ID NO: 92044 - DNA, 13 bp, Artificial Sequence
  Oligonucleotide for detection of SNP TSC0023015
attaaaaaaaaac

SEQ ID NO: 92045 - DNA, 13 bp, Artificial Sequence
  Oligonucleotide for detection of SNP TSC0023015
gtttttatttaat

SEQ ID NO: 92046 - DNA, 13 bp, Artificial Sequence
  Oligonucleotide for detection of SNP TSC0023015
attaaataaaaac

SEQ ID NO: 92047 - DNA, 13 bp, Artificial Sequence
  Oligonucleotide for detection of SNP TSC0023016
ttttaggtgagtt

SEQ ID NO: 92048 - DNA, 13 bp, Artificial Sequence
  Oligonucleotide for detection of SNP TSC0023016
aactcacctaaaa

SEQ ID NO: 92049 - DNA, 13 bp, Artificial Sequence
  Oligonucleotide for detection of SNP TSC0023016
ttttagatgagtt

SEQ ID NO: 92050 - DNA, 13 bp, Artificial Sequence
  Oligonucleotide for detection of SNP TSC0023016
aactcatctaaaa

SEQ ID NO: 92051 - DNA, 13 bp, Artificial Sequence
  Oligonucleotide for detection of SNP TSC0023018
ttgaaagggttag

SEQ ID NO: 92052 - DNA, 13 bp, Artificial Sequence
  Oligonucleotide for detection of SNP TSC0023018
ctaaccctttcaa

SEQ ID NO: 92053 - DNA, 13 bp, Artificial Sequence
  Oligonucleotide for detection of SNP TSC0023018
ttgaaaaggttag

SEQ ID NO: 92054 - DNA, 13 bp, Artificial Sequence
  Oligonucleotide for detection of SNP TSC0023018
ctaaccttttcaa

SEQ ID NO: 92055 - DNA, 13 bp, Artificial Sequence
  Oligonucleotide for detection of SNP TSC0023019
ttaatgggtatgt

SEQ ID NO: 92056 - DNA, 13 bp, Artificial Sequence
  Oligonucleotide for detection of SNP TSC0023019
acatacccattaa

SEQ ID NO: 92057 - DNA, 13 bp, Artificial Sequence
  Oligonucleotide for detection of SNP TSC0023019
ttaatgtgtatgt

SEQ ID NO: 92058 - DNA, 13 bp, Artificial Sequence
  Oligonucleotide for detection of SNP TSC0023019
acatacacattaa

SEQ ID NO: 92059 - DNA, 13 bp, Artificial Sequence
  Oligonucleotide for detection of SNP TSC0023019
atatatttattaa

SEQ ID NO: 92060 - DNA, 13 bp, Artificial Sequence
  Oligonucleotide for detection of SNP TSC0023019
ttaataaatatat

SEQ ID NO: 92061 - DNA, 13 bp, Artificial Sequence
  Oligonucleotide for detection of SNP TSC0023019
atatatatattaa

SEQ ID NO: 92062 - DNA, 13 bp, Artificial Sequence
  Oligonucleotide for detection of SNP TSC0023019
ttaatatatatat

SEQ ID NO: 92063 - DNA, 13 bp, Artificial Sequence
  Oligonucleotide for detection of SNP TSC0023020
tttagttaaataa

SEQ ID NO: 92064 - DNA, 13 bp, Artificial Sequence
  Oligonucleotide for detection of SNP TSC0023020
ttatttaactaaa

SEQ ID NO: 92065 - DNA, 13 bp, Artificial Sequence
  Oligonucleotide for detection of SNP TSC0023020
tttagtgaaataa

SEQ ID NO: 92066 - DNA, 13 bp, Artificial Sequence
  Oligonucleotide for detection of SNP TSC0023020
ttatttcactaaa

SEQ ID NO: 92067 - DNA, 13 bp, Artificial Sequence
  Oligonucleotide for detection of SNP TSC0023020
ttgtttgattgaa

SEQ ID NO: 92068 - DNA, 13 bp, Artificial Sequence
  Oligonucleotide for detection of SNP TSC0023020
ttcaatcaaacaa

SEQ ID NO: 92069 - DNA, 13 bp, Artificial Sequence
  Oligonucleotide for detection of SNP TSC0023020
ttgttttattgaa

SEQ ID NO: 92070 - DNA, 13 bp, Artificial Sequence
  Oligonucleotide for detection of SNP TSC0023020
ttcaataaaacaa

SEQ ID NO: 92071 - DNA, 13 bp, Artificial Sequence
  Oligonucleotide for detection of SNP TSC0023021
taattaatgtttg

SEQ ID NO: 92072 - DNA, 13 bp, Artificial Sequence
  Oligonucleotide for detection of SNP TSC0023021
caaacattaatta

SEQ ID NO: 92073 - DNA, 13 bp, Artificial Sequence
  Oligonucleotide for detection of SNP TSC0023021
taattagtgtttg

SEQ ID NO: 92074 - DNA, 13 bp, Artificial Sequence
  Oligonucleotide for detection of SNP TSC0023021
caaacactaatta

SEQ ID NO: 92075 - DNA, 13 bp, Artificial Sequence
  Oligonucleotide for detection of SNP TSC0023022
tatggagagggtg

SEQ ID NO: 92076 - DNA, 13 bp, Artificial Sequence
  Oligonucleotide for detection of SNP TSC0023022
caccctctccata

SEQ ID NO: 92077 - DNA, 13 bp, Artificial Sequence
  Oligonucleotide for detection of SNP TSC0023022
tatggaaagggtg

SEQ ID NO: 92078 - DNA, 13 bp, Artificial Sequence
  Oligonucleotide for detection of SNP TSC0023022
caccctttccata

SEQ ID NO: 92079 - DNA, 13 bp, Artificial Sequence
  Oligonucleotide for detection of SNP TSC0023023
aaatagtgagagy

SEQ ID NO: 92080 - DNA, 13 bp, Artificial Sequence
  Oligonucleotide for detection of SNP TSC0023023
rctctcactattt

SEQ ID NO: 92081 - DNA, 13 bp, Artificial Sequence
  Oligonucleotide for detection of SNP TSC0023023
aaatagcgagagy

SEQ ID NO: 92082 - DNA, 13 bp, Artificial Sequence
  Oligonucleotide for detection of SNP TSC0023023
rctctcgctattt

SEQ ID NO: 92083 - DNA, 13 bp, Artificial Sequence
  Oligonucleotide for detection of SNP TSC0023031
ttatttaaattgt

SEQ ID NO: 92084 - DNA, 13 bp, Artificial Sequence
  Oligonucleotide for detection of SNP TSC0023031
acaatttaaataa

SEQ ID NO: 92085 - DNA, 13 bp, Artificial Sequence
  Oligonucleotide for detection of SNP TSC0023031
ttatttgaattgt

SEQ ID NO: 92086 - DNA, 13 bp, Artificial Sequence
  Oligonucleotide for detection of SNP TSC0023031
acaattcaaataa

SEQ ID NO: 92087 - DNA, 13 bp, Artificial Sequence
  Oligonucleotide for detection of SNP TSC0023031
ttattcgaattgt

SEQ ID NO: 92088 - DNA, 13 bp, Artificial Sequence
  Oligonucleotide for detection of SNP TSC0023031
acaattcgaataa

SEQ ID NO: 92089 - DNA, 13 bp, Artificial Sequence
  Oligonucleotide for detection of SNP TSC0023031
ataatttgagtgg

SEQ ID NO: 92090 - DNA, 13 bp, Artificial Sequence
  Oligonucleotide for detection of SNP TSC0023031
ccactcaaattat

SEQ ID NO: 92091 - DNA, 13 bp, Artificial Sequence
  Oligonucleotide for detection of SNP TSC0023031
ataattcgagtgg

SEQ ID NO: 92092 - DNA, 13 bp, Artificial Sequence
  Oligonucleotide for detection of SNP TSC0023031
ccactcgaattat

SEQ ID NO: 92093 - DNA, 13 bp, Artificial Sequence
  Oligonucleotide for detection of SNP TSC0023032
gtttagaggatay

SEQ ID NO: 92094 - DNA, 13 bp, Artificial Sequence
  Oligonucleotide for detection of SNP TSC0023032
rtatcctctaaac

SEQ ID NO: 92095 - DNA, 13 bp, Artificial Sequence
  Oligonucleotide for detection of SNP TSC0023032
gtttaggggatay

SEQ ID NO: 92096 - DNA, 13 bp, Artificial Sequence
  Oligonucleotide for detection of SNP TSC0023032
rtatcccctaaac

SEQ ID NO: 92097 - DNA, 13 bp, Artificial Sequence
  Oligonucleotide for detection of SNP TSC0023033
taatttagtatat

SEQ ID NO: 92098 - DNA, 13 bp, Artificial Sequence
  Oligonucleotide for detection of SNP TSC0023033
atatactaaatta

SEQ ID NO: 92099 - DNA, 13 bp, Artificial Sequence
  Oligonucleotide for detection of SNP TSC0023033
taatttggtatat

SEQ ID NO: 92100 - DNA, 13 bp, Artificial Sequence
  Oligonucleotide for detection of SNP TSC0023033
atataccaaatta

SEQ ID NO: 92101 - DNA, 13 bp, Artificial Sequence
  Oligonucleotide for detection of SNP TSC0023034
tgatggaatatat

SEQ ID NO: 92102 - DNA, 13 bp, Artificial Sequence
  Oligonucleotide for detection of SNP TSC0023034
atatattccatca

SEQ ID NO: 92103 - DNA, 13 bp, Artificial Sequence
  Oligonucleotide for detection of SNP TSC0023034
tgatgggatatat

SEQ ID NO: 92104 - DNA, 13 bp, Artificial Sequence
  Oligonucleotide for detection of SNP TSC0023034
atatatcccatca

SEQ ID NO: 92105 - DNA, 13 bp, Artificial Sequence
  Oligonucleotide for detection of SNP TSC0023036
tgaaaagtagtty

SEQ ID NO: 92106 - DNA, 13 bp, Artificial Sequence
  Oligonucleotide for detection of SNP TSC0023036
raactacttttca

SEQ ID NO: 92107 - DNA, 13 bp, Artificial Sequence
  Oligonucleotide for detection of SNP TSC0023036
tgaaaaatagtty

SEQ ID NO: 92108 - DNA, 13 bp, Artificial Sequence
  Oligonucleotide for detection of SNP TSC0023036
raactatttttca

SEQ ID NO: 92109 - DNA, 13 bp, Artificial Sequence
  Oligonucleotide for detection of SNP TSC0023039
attggaaatattt

SEQ ID NO: 92110 - DNA, 13 bp, Artificial Sequence
  Oligonucleotide for detection of SNP TSC0023039
aaatatttccaat

SEQ ID NO: 92111 - DNA, 13 bp, Artificial Sequence
  Oligonucleotide for detection of SNP TSC0023039
attggagatattt

SEQ ID NO: 92112 - DNA, 13 bp, Artificial Sequence
  Oligonucleotide for detection of SNP TSC0023039
aaatatctccaat

SEQ ID NO: 92113 - DNA, 13 bp, Artificial Sequence
  Oligonucleotide for detection of SNP TSC0023040
gtttttaagaaga

SEQ ID NO: 92114 - DNA, 13 bp, Artificial Sequence
  Oligonucleotide for detection of SNP TSC0023040
tcttcttaaaaac

SEQ ID NO: 92115 - DNA, 13 bp, Artificial Sequence
  Oligonucleotide for detection of SNP TSC0023040
gttttttagaaga

SEQ ID NO: 92116 - DNA, 13 bp, Artificial Sequence
  Oligonucleotide for detection of SNP TSC0023040
tcttctaaaaaac

SEQ ID NO: 92117 - DNA, 13 bp, Artificial Sequence
  Oligonucleotide for detection of SNP TSC0023040
tttttttgagagy

SEQ ID NO: 92118 - DNA, 13 bp, Artificial Sequence
  Oligonucleotide for detection of SNP TSC0023040
rctctcaaaaaaa

SEQ ID NO: 92119 - DNA, 13 bp, Artificial Sequence
  Oligonucleotide for detection of SNP TSC0023040
ttttttagagagy

SEQ ID NO: 92120 - DNA, 13 bp, Artificial Sequence
  Oligonucleotide for detection of SNP TSC0023040
rctctctaaaaaa

SEQ ID NO: 92121 - DNA, 13 bp, Artificial Sequence
  Oligonucleotide for detection of SNP TSC0023041
aagtttggttaat

SEQ ID NO: 92122 - DNA, 13 bp, Artificial Sequence
  Oligonucleotide for detection of SNP TSC0023041
attaaccaaactt

SEQ ID NO: 92123 - DNA, 13 bp, Artificial Sequence
  Oligonucleotide for detection of SNP TSC0023041
aagtttagttaat

SEQ ID NO: 92124 - DNA, 13 bp, Artificial Sequence
  Oligonucleotide for detection of SNP TSC0023041
attaactaaactt

SEQ ID NO: 92125 - DNA, 13 bp, Artificial Sequence
  Oligonucleotide for detection of SNP TSC0023043
gggaaagaatgaa

SEQ ID NO: 92126 - DNA, 13 bp, Artificial Sequence
  Oligonucleotide for detection of SNP TSC0023043
ttcattctttccc

SEQ ID NO: 92127 - DNA, 13 bp, Artificial Sequence
  Oligonucleotide for detection of SNP TSC0023043
gggaaataatgaa

SEQ ID NO: 92128 - DNA, 13 bp, Artificial Sequence
  Oligonucleotide for detection of SNP TSC0023043
ttcattatttccc

SEQ ID NO: 92129 - DNA, 13 bp, Artificial Sequence
  Oligonucleotide for detection of SNP TSC0023043
gggaaagaacgaa

SEQ ID NO: 92130 - DNA, 13 bp, Artificial Sequence
  Oligonucleotide for detection of SNP TSC0023043
ttcgttctttccc

SEQ ID NO: 92131 - DNA, 13 bp, Artificial Sequence
  Oligonucleotide for detection of SNP TSC0023043
gggaaataacgaa

SEQ ID NO: 92132 - DNA, 13 bp, Artificial Sequence
  Oligonucleotide for detection of SNP TSC0023043
ttcgttatttccc

SEQ ID NO: 92133 - DNA, 13 bp, Artificial Sequence
  Oligonucleotide for detection of SNP TSC0023043
ttcgttattttty

SEQ ID NO: 92134 - DNA, 13 bp, Artificial Sequence
  Oligonucleotide for detection of SNP TSC0023043
raaaaataacgaa

SEQ ID NO: 92135 - DNA, 13 bp, Artificial Sequence
  Oligonucleotide for detection of SNP TSC0023044
ttttttaagttat

SEQ ID NO: 92136 - DNA, 13 bp, Artificial Sequence
  Oligonucleotide for detection of SNP TSC0023044
ataacttaaaaaa

SEQ ID NO: 92137 - DNA, 13 bp, Artificial Sequence
  Oligonucleotide for detection of SNP TSC0023045
ggatagaggtttt

SEQ ID NO: 92138 - DNA, 13 bp, Artificial Sequence
  Oligonucleotide for detection of SNP TSC0023045
aaaacctctatcc

SEQ ID NO: 92139 - DNA, 13 bp, Artificial Sequence
  Oligonucleotide for detection of SNP TSC0023045
ggataggggtttt

SEQ ID NO: 92140 - DNA, 13 bp, Artificial Sequence
  Oligonucleotide for detection of SNP TSC0023045
aaaacccctatcc

SEQ ID NO: 92141 - DNA, 13 bp, Artificial Sequence
  Oligonucleotide for detection of SNP TSC0023047
ttaggtatataga

SEQ ID NO: 92142 - DNA, 13 bp, Artificial Sequence
  Oligonucleotide for detection of SNP TSC0023047
tctatatacctaa

SEQ ID NO: 92143 - DNA, 13 bp, Artificial Sequence
  Oligonucleotide for detection of SNP TSC0023047
ttaggtgtataga

SEQ ID NO: 92144 - DNA, 13 bp, Artificial Sequence
  Oligonucleotide for detection of SNP TSC0023047
tctatacacctaa

SEQ ID NO: 92145 - DNA, 13 bp, Artificial Sequence
  Oligonucleotide for detection of SNP TSC0023047
ttaggcgtataga

SEQ ID NO: 92146 - DNA, 13 bp, Artificial Sequence
  Oligonucleotide for detection of SNP TSC0023047
tctatacgcctaa

SEQ ID NO: 92147 - DNA, 13 bp, Artificial Sequence
  Oligonucleotide for detection of SNP TSC0023047
tttgtatgtttag

SEQ ID NO: 92148 - DNA, 13 bp, Artificial Sequence
  Oligonucleotide for detection of SNP TSC0023047
ctaaacatacaaa

SEQ ID NO: 92149 - DNA, 13 bp, Artificial Sequence
  Oligonucleotide for detection of SNP TSC0023047
tttgtacgtttag

SEQ ID NO: 92150 - DNA, 13 bp, Artificial Sequence
  Oligonucleotide for detection of SNP TSC0023047
ctaaacgtacaaa

SEQ ID NO: 92151 - DNA, 13 bp, Artificial Sequence
  Oligonucleotide for detection of SNP TSC0023048
tttattttttgag

SEQ ID NO: 92152 - DNA, 13 bp, Artificial Sequence
  Oligonucleotide for detection of SNP TSC0023048
ctcaaaaaataaa

SEQ ID NO: 92153 - DNA, 13 bp, Artificial Sequence
  Oligonucleotide for detection of SNP TSC0023048
tttaaaggataag

SEQ ID NO: 92154 - DNA, 13 bp, Artificial Sequence
  Oligonucleotide for detection of SNP TSC0023048
cttatcctttaaa

SEQ ID NO: 92155 - DNA, 13 bp, Artificial Sequence
  Oligonucleotide for detection of SNP TSC0023048
tttaaatgataag

SEQ ID NO: 92156 - DNA, 13 bp, Artificial Sequence
  Oligonucleotide for detection of SNP TSC0023048
cttatcatttaaa

SEQ ID NO: 92157 - DNA, 13 bp, Artificial Sequence
  Oligonucleotide for detection of SNP TSC0023048
tttaaacgataag

SEQ ID NO: 92158 - DNA, 13 bp, Artificial Sequence
  Oligonucleotide for detection of SNP TSC0023048
cttatcgtttaaa

SEQ ID NO: 92159 - DNA, 13 bp, Artificial Sequence
  Oligonucleotide for detection of SNP TSC0023049
atggaagtatgty

SEQ ID NO: 92160 - DNA, 13 bp, Artificial Sequence
  Oligonucleotide for detection of SNP TSC0023049
racatacttccat

SEQ ID NO: 92161 - DNA, 13 bp, Artificial Sequence
  Oligonucleotide for detection of SNP TSC0023049
atggaaatatgty

SEQ ID NO: 92162 - DNA, 13 bp, Artificial Sequence
  Oligonucleotide for detection of SNP TSC0023049
racatatttccat

SEQ ID NO: 92163 - DNA, 13 bp, Artificial Sequence
  Oligonucleotide for detection of SNP TSC0023052
aaaaatttaaaat

SEQ ID NO: 92164 - DNA, 13 bp, Artificial Sequence
  Oligonucleotide for detection of SNP TSC0023052
attttaaattttt

SEQ ID NO: 92165 - DNA, 13 bp, Artificial Sequence
  Oligonucleotide for detection of SNP TSC0023052
aaaaatgtaaaat

SEQ ID NO: 92166 - DNA, 13 bp, Artificial Sequence
  Oligonucleotide for detection of SNP TSC0023052
attttacattttt

SEQ ID NO: 92167 - DNA, 13 bp, Artificial Sequence
  Oligonucleotide for detection of SNP TSC0023052
attttgggttttt

SEQ ID NO: 92168 - DNA, 13 bp, Artificial Sequence
  Oligonucleotide for detection of SNP TSC0023052
aaaaacccaaaat

SEQ ID NO: 92169 - DNA, 13 bp, Artificial Sequence
  Oligonucleotide for detection of SNP TSC0023052
attttgtgttttt

SEQ ID NO: 92170 - DNA, 13 bp, Artificial Sequence
  Oligonucleotide for detection of SNP TSC0023052
aaaaacacaaaat

SEQ ID NO: 92171 - DNA, 13 bp, Artificial Sequence
  Oligonucleotide for detection of SNP TSC0023052
attttgcgttttt

SEQ ID NO: 92172 - DNA, 13 bp, Artificial Sequence
  Oligonucleotide for detection of SNP TSC0023052
aaaaacgcaaaat

SEQ ID NO: 92173 - DNA, 13 bp, Artificial Sequence
  Oligonucleotide for detection of SNP TSC0023053
ttatggggatatt

SEQ ID NO: 92174 - DNA, 13 bp, Artificial Sequence
  Oligonucleotide for detection of SNP TSC0023053
aatatccccataa

SEQ ID NO: 92175 - DNA, 13 bp, Artificial Sequence
  Oligonucleotide for detection of SNP TSC0023053
ttatggtgatatt

SEQ ID NO: 92176 - DNA, 13 bp, Artificial Sequence
  Oligonucleotide for detection of SNP TSC0023053
aatatcaccataa

SEQ ID NO: 92177 - DNA, 13 bp, Artificial Sequence
  Oligonucleotide for detection of SNP TSC0023053
agtgtttttatgg

SEQ ID NO: 92178 - DNA, 13 bp, Artificial Sequence
  Oligonucleotide for detection of SNP TSC0023053
ccataaaaacact

SEQ ID NO: 92179 - DNA, 13 bp, Artificial Sequence
  Oligonucleotide for detection of SNP TSC0023053
agtgttattatgg

SEQ ID NO: 92180 - DNA, 13 bp, Artificial Sequence
  Oligonucleotide for detection of SNP TSC0023053
ccataataacact

SEQ ID NO: 92181 - DNA, 13 bp, Artificial Sequence
  Oligonucleotide for detection of SNP TSC0023054
tgtttatttgtay

SEQ ID NO: 92182 - DNA, 13 bp, Artificial Sequence
  Oligonucleotide for detection of SNP TSC0023054
rtacaaataaaca

SEQ ID NO: 92183 - DNA, 13 bp, Artificial Sequence
  Oligonucleotide for detection of SNP TSC0023054
tgtttagttgtay

SEQ ID NO: 92184 - DNA, 13 bp, Artificial Sequence
  Oligonucleotide for detection of SNP TSC0023054
rtacaactaaaca

SEQ ID NO: 92185 - DNA, 13 bp, Artificial Sequence
  Oligonucleotide for detection of SNP TSC0023054
gtataagtggata

SEQ ID NO: 92186 - DNA, 13 bp, Artificial Sequence
  Oligonucleotide for detection of SNP TSC0023054
tatccacttatac

SEQ ID NO: 92187 - DNA, 13 bp, Artificial Sequence
  Oligonucleotide for detection of SNP TSC0023054
gtataattggata

SEQ ID NO: 92188 - DNA, 13 bp, Artificial Sequence
  Oligonucleotide for detection of SNP TSC0023054
tatccaattatac

SEQ ID NO: 92189 - DNA, 13 bp, Artificial Sequence
  Oligonucleotide for detection of SNP TSC0023055
gttgaagtaggag

SEQ ID NO: 92190 - DNA, 13 bp, Artificial Sequence
  Oligonucleotide for detection of SNP TSC0023055
ctcctacttcaac

SEQ ID NO: 92191 - DNA, 13 bp, Artificial Sequence
  Oligonucleotide for detection of SNP TSC0023055
gttgaaataggag

SEQ ID NO: 92192 - DNA, 13 bp, Artificial Sequence
  Oligonucleotide for detection of SNP TSC0023055
ctcctatttcaac

SEQ ID NO: 92193 - DNA, 13 bp, Artificial Sequence
  Oligonucleotide for detection of SNP TSC0023056
agttaaattttgt

SEQ ID NO: 92194 - DNA, 13 bp, Artificial Sequence
  Oligonucleotide for detection of SNP TSC0023056
acaaaatttaact

SEQ ID NO: 92195 - DNA, 13 bp, Artificial Sequence
  Oligonucleotide for detection of SNP TSC0023056
agttaatttttgt

SEQ ID NO: 92196 - DNA, 13 bp, Artificial Sequence
  Oligonucleotide for detection of SNP TSC0023056
acaaaaattaact

SEQ ID NO: 92197 - DNA, 13 bp, Artificial Sequence
  Oligonucleotide for detection of SNP TSC0023056
ataaaatttaatt

SEQ ID NO: 92198 - DNA, 13 bp, Artificial Sequence
  Oligonucleotide for detection of SNP TSC0023056
aattaaattttat

SEQ ID NO: 92199 - DNA, 13 bp, Artificial Sequence
  Oligonucleotide for detection of SNP TSC0023056
ataaaaattaatt

SEQ ID NO: 92200 - DNA, 13 bp, Artificial Sequence
  Oligonucleotide for detection of SNP TSC0023056
aattaatttttat

SEQ ID NO: 92201 - DNA, 13 bp, Artificial Sequence
  Oligonucleotide for detection of SNP TSC0023057
agaggtagggagg

SEQ ID NO: 92202 - DNA, 13 bp, Artificial Sequence
  Oligonucleotide for detection of SNP TSC0023057
cctccctacctct

SEQ ID NO: 92203 - DNA, 13 bp, Artificial Sequence
  Oligonucleotide for detection of SNP TSC0023057
agaggtggggagg

SEQ ID NO: 92204 - DNA, 13 bp, Artificial Sequence
  Oligonucleotide for detection of SNP TSC0023057
cctccccacctct

SEQ ID NO: 92205 - DNA, 13 bp, Artificial Sequence
  Oligonucleotide for detection of SNP TSC0023057
agaggcggggagg

SEQ ID NO: 92206 - DNA, 13 bp, Artificial Sequence
  Oligonucleotide for detection of SNP TSC0023057
cctccccgcctct

SEQ ID NO: 92207 - DNA, 13 bp, Artificial Sequence
  Oligonucleotide for detection of SNP TSC0023058
ataagaggaaata

SEQ ID NO: 92208 - DNA, 13 bp, Artificial Sequence
  Oligonucleotide for detection of SNP TSC0023058
tatttcctcttat

SEQ ID NO: 92209 - DNA, 13 bp, Artificial Sequence
  Oligonucleotide for detection of SNP TSC0023058
ataagaagaaata

SEQ ID NO: 92210 - DNA, 13 bp, Artificial Sequence
  Oligonucleotide for detection of SNP TSC0023058
tatttcttcttat

SEQ ID NO: 92211 - DNA, 13 bp, Artificial Sequence
  Oligonucleotide for detection of SNP TSC0023059
gtaaataattaag

SEQ ID NO: 92212 - DNA, 13 bp, Artificial Sequence
  Oligonucleotide for detection of SNP TSC0023059
cttaattatttac

SEQ ID NO: 92213 - DNA, 13 bp, Artificial Sequence
  Oligonucleotide for detection of SNP TSC0023059
gtaaattattaag

SEQ ID NO: 92214 - DNA, 13 bp, Artificial Sequence
  Oligonucleotide for detection of SNP TSC0023059
cttaataatttac

SEQ ID NO: 92215 - DNA, 13 bp, Artificial Sequence
  Oligonucleotide for detection of SNP TSC0023059
tttgattgtttay

SEQ ID NO: 92216 - DNA, 13 bp, Artificial Sequence
  Oligonucleotide for detection of SNP TSC0023059
rtaaacaatcaaa

SEQ ID NO: 92217 - DNA, 13 bp, Artificial Sequence
  Oligonucleotide for detection of SNP TSC0023059
tttgatggtttay

SEQ ID NO: 92218 - DNA, 13 bp, Artificial Sequence
  Oligonucleotide for detection of SNP TSC0023059
rtaaaccatcaaa

SEQ ID NO: 92219 - DNA, 13 bp, Artificial Sequence
  Oligonucleotide for detection of SNP TSC0023060
tattatagagata

SEQ ID NO: 92220 - DNA, 13 bp, Artificial Sequence
  Oligonucleotide for detection of SNP TSC0023060
tatctctataata

SEQ ID NO: 92221 - DNA, 13 bp, Artificial Sequence
  Oligonucleotide for detection of SNP TSC0023060
tattatggagata

SEQ ID NO: 92222 - DNA, 13 bp, Artificial Sequence
  Oligonucleotide for detection of SNP TSC0023060
tatctccataata

SEQ ID NO: 92223 - DNA, 13 bp, Artificial Sequence
  Oligonucleotide for detection of SNP TSC0023060
tattacggagata

SEQ ID NO: 92224 - DNA, 13 bp, Artificial Sequence
  Oligonucleotide for detection of SNP TSC0023060
tatctccgtaata

SEQ ID NO: 92225 - DNA, 13 bp, Artificial Sequence
  Oligonucleotide for detection of SNP TSC0023060
tatttttgtggtg

SEQ ID NO: 92226 - DNA, 13 bp, Artificial Sequence
  Oligonucleotide for detection of SNP TSC0023060
caccacaaaaata

SEQ ID NO: 92227 - DNA, 13 bp, Artificial Sequence
  Oligonucleotide for detection of SNP TSC0023060
tattttcgtggtg

SEQ ID NO: 92228 - DNA, 13 bp, Artificial Sequence
  Oligonucleotide for detection of SNP TSC0023060
caccacgaaaata

SEQ ID NO: 92229 - DNA, 13 bp, Artificial Sequence
  Oligonucleotide for detection of SNP TSC0023064
aatttaattttay

SEQ ID NO: 92230 - DNA, 13 bp, Artificial Sequence
  Oligonucleotide for detection of SNP TSC0023064
rtaaaattaaatt

SEQ ID NO: 92231 - DNA, 13 bp, Artificial Sequence
  Oligonucleotide for detection of SNP TSC0023064
aatttatttttay

SEQ ID NO: 92232 - DNA, 13 bp, Artificial Sequence
  Oligonucleotide for detection of SNP TSC0023064
rtaaaaataaatt

SEQ ID NO: 92233 - DNA, 13 bp, Artificial Sequence
  Oligonucleotide for detection of SNP TSC0023064
gtgagattaagtt

SEQ ID NO: 92234 - DNA, 13 bp, Artificial Sequence
  Oligonucleotide for detection of SNP TSC0023064
aacttaatctcac

SEQ ID NO: 92235 - DNA, 13 bp, Artificial Sequence
  Oligonucleotide for detection of SNP TSC0023064
gtgagaataagtt

SEQ ID NO: 92236 - DNA, 13 bp, Artificial Sequence
  Oligonucleotide for detection of SNP TSC0023064
aacttattctcac

SEQ ID NO: 92237 - DNA, 13 bp, Artificial Sequence
  Oligonucleotide for detection of SNP TSC0023065
gttgttatgtata

SEQ ID NO: 92238 - DNA, 13 bp, Artificial Sequence
  Oligonucleotide for detection of SNP TSC0023065
tatacataacaac

SEQ ID NO: 92239 - DNA, 13 bp, Artificial Sequence
  Oligonucleotide for detection of SNP TSC0023065
gttgttgtgtata

SEQ ID NO: 92240 - DNA, 13 bp, Artificial Sequence
  Oligonucleotide for detection of SNP TSC0023065
tatacacaacaac

SEQ ID NO: 92241 - DNA, 13 bp, Artificial Sequence
  Oligonucleotide for detection of SNP TSC0023066
tattgtatggtaa

SEQ ID NO: 92242 - DNA, 13 bp, Artificial Sequence
  Oligonucleotide for detection of SNP TSC0023066
ttaccatacaata

SEQ ID NO: 92243 - DNA, 13 bp, Artificial Sequence
  Oligonucleotide for detection of SNP TSC0023066
tattgtgtggtaa

SEQ ID NO: 92244 - DNA, 13 bp, Artificial Sequence
  Oligonucleotide for detection of SNP TSC0023066
ttaccacacaata

SEQ ID NO: 92245 - DNA, 13 bp, Artificial Sequence
  Oligonucleotide for detection of SNP TSC0023066
tattgcgtggtaa

SEQ ID NO: 92246 - DNA, 13 bp, Artificial Sequence
  Oligonucleotide for detection of SNP TSC0023066
ttaccacgcaata

SEQ ID NO: 92247 - DNA, 13 bp, Artificial Sequence
  Oligonucleotide for detection of SNP TSC0023066
ttgttatgtaata

SEQ ID NO: 92248 - DNA, 13 bp, Artificial Sequence
  Oligonucleotide for detection of SNP TSC0023066
tattacataacaa

SEQ ID NO: 92249 - DNA, 13 bp, Artificial Sequence
  Oligonucleotide for detection of SNP TSC0023066
ttgttacgtaata

SEQ ID NO: 92250 - DNA, 13 bp, Artificial Sequence
  Oligonucleotide for detection of SNP TSC0023066
tattacgtaacaa

SEQ ID NO: 92251 - DNA, 13 bp, Artificial Sequence
  Oligonucleotide for detection of SNP TSC0023067
tagattagaataa

SEQ ID NO: 92252 - DNA, 13 bp, Artificial Sequence
  Oligonucleotide for detection of SNP TSC0023067
ttattctaatcta

SEQ ID NO: 92253 - DNA, 13 bp, Artificial Sequence
  Oligonucleotide for detection of SNP TSC0023067
tagatttgaataa

SEQ ID NO: 92254 - DNA, 13 bp, Artificial Sequence
  Oligonucleotide for detection of SNP TSC0023067
ttattcaaatcta

SEQ ID NO: 92255 - DNA, 13 bp, Artificial Sequence
  Oligonucleotide for detection of SNP TSC0023067
tagattcgaataa

SEQ ID NO: 92256 - DNA, 13 bp, Artificial Sequence
  Oligonucleotide for detection of SNP TSC0023067
ttattcgaatcta

SEQ ID NO: 92257 - DNA, 13 bp, Artificial Sequence
  Oligonucleotide for detection of SNP TSC0023067
ttattttgatttg

SEQ ID NO: 92258 - DNA, 13 bp, Artificial Sequence
  Oligonucleotide for detection of SNP TSC0023067
caaatcaaaataa

SEQ ID NO: 92259 - DNA, 13 bp, Artificial Sequence
  Oligonucleotide for detection of SNP TSC0023067
ttatttggatttg

SEQ ID NO: 92260 - DNA, 13 bp, Artificial Sequence
  Oligonucleotide for detection of SNP TSC0023067
caaatccaaataa

SEQ ID NO: 92261 - DNA, 13 bp, Artificial Sequence
  Oligonucleotide for detection of SNP TSC0023067
ttattcggatttg

SEQ ID NO: 92262 - DNA, 13 bp, Artificial Sequence
  Oligonucleotide for detection of SNP TSC0023067
caaatccgaataa

SEQ ID NO: 92263 - DNA, 13 bp, Artificial Sequence
  Oligonucleotide for detection of SNP TSC0023068
agggaaattttat

SEQ ID NO: 92264 - DNA, 13 bp, Artificial Sequence
  Oligonucleotide for detection of SNP TSC0023068
ataaaatttccct

SEQ ID NO: 92265 - DNA, 13 bp, Artificial Sequence
  Oligonucleotide for detection of SNP TSC0023068
agggaagttttat

SEQ ID NO: 92266 - DNA, 13 bp, Artificial Sequence
  Oligonucleotide for detection of SNP TSC0023068
ataaaacttccct

SEQ ID NO: 92267 - DNA, 13 bp, Artificial Sequence
  Oligonucleotide for detection of SNP TSC0023070
aggtggtgtgtta

SEQ ID NO: 92268 - DNA, 13 bp, Artificial Sequence
  Oligonucleotide for detection of SNP TSC0023070
taacacaccacct

SEQ ID NO: 92269 - DNA, 13 bp, Artificial Sequence
  Oligonucleotide for detection of SNP TSC0023070
aggcggtgtgtta

SEQ ID NO: 92270 - DNA, 13 bp, Artificial Sequence
  Oligonucleotide for detection of SNP TSC0023070
taacacaccgcct

SEQ ID NO: 92271 - DNA, 13 bp, Artificial Sequence
  Oligonucleotide for detection of SNP TSC0023070
aggtggcgtgtta

SEQ ID NO: 92272 - DNA, 13 bp, Artificial Sequence
  Oligonucleotide for detection of SNP TSC0023070
taacacgccacct

SEQ ID NO: 92273 - DNA, 13 bp, Artificial Sequence
  Oligonucleotide for detection of SNP TSC0023070
aggcggcgtgtta

SEQ ID NO: 92274 - DNA, 13 bp, Artificial Sequence
  Oligonucleotide for detection of SNP TSC0023070
taacacgccgcct

SEQ ID NO: 92275 - DNA, 13 bp, Artificial Sequence
  Oligonucleotide for detection of SNP TSC0023070
taatatgttgttt

SEQ ID NO: 92276 - DNA, 13 bp, Artificial Sequence
  Oligonucleotide for detection of SNP TSC0023070
aaacaacatatta

SEQ ID NO: 92277 - DNA, 13 bp, Artificial Sequence
  Oligonucleotide for detection of SNP TSC0023070
taatatattgttt

SEQ ID NO: 92278 - DNA, 13 bp, Artificial Sequence
  Oligonucleotide for detection of SNP TSC0023070
aaacaatatatta

SEQ ID NO: 92279 - DNA, 13 bp, Artificial Sequence
  Oligonucleotide for detection of SNP TSC0023070
taatacgttgttt

SEQ ID NO: 92280 - DNA, 13 bp, Artificial Sequence
  Oligonucleotide for detection of SNP TSC0023070
aaacaacgtatta

SEQ ID NO: 92281 - DNA, 13 bp, Artificial Sequence
  Oligonucleotide for detection of SNP TSC0023070
taatatatcgttt

SEQ ID NO: 92282 - DNA, 13 bp, Artificial Sequence
  Oligonucleotide for detection of SNP TSC0023070
aaacgatatatta

SEQ ID NO: 92283 - DNA, 13 bp, Artificial Sequence
  Oligonucleotide for detection of SNP TSC0023070
taatatgtcgttt

SEQ ID NO: 92284 - DNA, 13 bp, Artificial Sequence
  Oligonucleotide for detection of SNP TSC0023070
aaacgacatatta

SEQ ID NO: 92285 - DNA, 13 bp, Artificial Sequence
  Oligonucleotide for detection of SNP TSC0023070
taatacgtcgttt

SEQ ID NO: 92286 - DNA, 13 bp, Artificial Sequence
  Oligonucleotide for detection of SNP TSC0023070
aaacgacgtatta

SEQ ID NO: 92287 - DNA, 13 bp, Artificial Sequence
  Oligonucleotide for detection of SNP TSC0023071
tgagattggggag

SEQ ID NO: 92288 - DNA, 13 bp, Artificial Sequence
  Oligonucleotide for detection of SNP TSC0023071
ctccccaatctca

SEQ ID NO: 92289 - DNA, 13 bp, Artificial Sequence
  Oligonucleotide for detection of SNP TSC0023071
tgagatgggggag

SEQ ID NO: 92290 - DNA, 13 bp, Artificial Sequence
  Oligonucleotide for detection of SNP TSC0023071
ctcccccatctca

SEQ ID NO: 92291 - DNA, 13 bp, Artificial Sequence
  Oligonucleotide for detection of SNP TSC0023071
tgagatcggggag

SEQ ID NO: 92292 - DNA, 13 bp, Artificial Sequence
  Oligonucleotide for detection of SNP TSC0023071
ctccccgatctca

SEQ ID NO: 92293 - DNA, 13 bp, Artificial Sequence
  Oligonucleotide for detection of SNP TSC0023072
aggtgaggtaagy

SEQ ID NO: 92294 - DNA, 13 bp, Artificial Sequence
  Oligonucleotide for detection of SNP TSC0023072
rcttacctcacct

SEQ ID NO: 92295 - DNA, 13 bp, Artificial Sequence
  Oligonucleotide for detection of SNP TSC0023072
aggtgaagtaagy

SEQ ID NO: 92296 - DNA, 13 bp, Artificial Sequence
  Oligonucleotide for detection of SNP TSC0023072
rcttacttcacct

SEQ ID NO: 92297 - DNA, 13 bp, Artificial Sequence
  Oligonucleotide for detection of SNP TSC0023073
attgtgatttttg

SEQ ID NO: 92298 - DNA, 13 bp, Artificial Sequence
  Oligonucleotide for detection of SNP TSC0023073
caaaaatcacaat

SEQ ID NO: 92299 - DNA, 13 bp, Artificial Sequence
  Oligonucleotide for detection of SNP TSC0023073
attgtgttttttg

SEQ ID NO: 92300 - DNA, 13 bp, Artificial Sequence
  Oligonucleotide for detection of SNP TSC0023073
caaaaaacacaat

SEQ ID NO: 92301 - DNA, 13 bp, Artificial Sequence
  Oligonucleotide for detection of SNP TSC0023073
taaaagttataat

SEQ ID NO: 92302 - DNA, 13 bp, Artificial Sequence
  Oligonucleotide for detection of SNP TSC0023073
attataactttta

SEQ ID NO: 92303 - DNA, 13 bp, Artificial Sequence
  Oligonucleotide for detection of SNP TSC0023073
taaaaggtataat

SEQ ID NO: 92304 - DNA, 13 bp, Artificial Sequence
  Oligonucleotide for detection of SNP TSC0023073
attatacctttta

SEQ ID NO: 92305 - DNA, 13 bp, Artificial Sequence
  Oligonucleotide for detection of SNP TSC0023074
ggatgtgtgatty

SEQ ID NO: 92306 - DNA, 13 bp, Artificial Sequence
  Oligonucleotide for detection of SNP TSC0023074
raatcacacatcc

SEQ ID NO: 92307 - DNA, 13 bp, Artificial Sequence
  Oligonucleotide for detection of SNP TSC0023074
ggatgtatgatty

SEQ ID NO: 92308 - DNA, 13 bp, Artificial Sequence
  Oligonucleotide for detection of SNP TSC0023074
raatcatacatcc

SEQ ID NO: 92309 - DNA, 13 bp, Artificial Sequence
  Oligonucleotide for detection of SNP TSC0023077
aaagaaagttttt

SEQ ID NO: 92310 - DNA, 13 bp, Artificial Sequence
  Oligonucleotide for detection of SNP TSC0023077
aaaaactttcttt

SEQ ID NO: 92311 - DNA, 13 bp, Artificial Sequence
  Oligonucleotide for detection of SNP TSC0023077
aaagaatgttttt

SEQ ID NO: 92312 - DNA, 13 bp, Artificial Sequence
  Oligonucleotide for detection of SNP TSC0023077
aaaaacattcttt

SEQ ID NO: 92313 - DNA, 13 bp, Artificial Sequence
  Oligonucleotide for detection of SNP TSC0023077
aagaatttttttt

SEQ ID NO: 92314 - DNA, 13 bp, Artificial Sequence
  Oligonucleotide for detection of SNP TSC0023077
aaaaaaaattctt

SEQ ID NO: 92315 - DNA, 13 bp, Artificial Sequence
  Oligonucleotide for detection of SNP TSC0023077
aagaatatttttt

SEQ ID NO: 92316 - DNA, 13 bp, Artificial Sequence
  Oligonucleotide for detection of SNP TSC0023077
aaaaaatattctt

SEQ ID NO: 92317 - DNA, 13 bp, Artificial Sequence
  Oligonucleotide for detection of SNP TSC0023078
attttatgatttg

SEQ ID NO: 92318 - DNA, 13 bp, Artificial Sequence
  Oligonucleotide for detection of SNP TSC0023078
caaatcataaaat

SEQ ID NO: 92319 - DNA, 13 bp, Artificial Sequence
  Oligonucleotide for detection of SNP TSC0023078
attttacgatttg

SEQ ID NO: 92320 - DNA, 13 bp, Artificial Sequence
  Oligonucleotide for detection of SNP TSC0023078
caaatcgtaaaat

SEQ ID NO: 92321 - DNA, 13 bp, Artificial Sequence
  Oligonucleotide for detection of SNP TSC0023078
attttatgattcg

SEQ ID NO: 92322 - DNA, 13 bp, Artificial Sequence
  Oligonucleotide for detection of SNP TSC0023078
cgaatcataaaat

SEQ ID NO: 92323 - DNA, 13 bp, Artificial Sequence
  Oligonucleotide for detection of SNP TSC0023078
attttacgattcg

SEQ ID NO: 92324 - DNA, 13 bp, Artificial Sequence
  Oligonucleotide for detection of SNP TSC0023078
cgaatcgtaaaat

SEQ ID NO: 92325 - DNA, 13 bp, Artificial Sequence
  Oligonucleotide for detection of SNP TSC0023078
tgaattgtgaggt

SEQ ID NO: 92326 - DNA, 13 bp, Artificial Sequence
  Oligonucleotide for detection of SNP TSC0023078
acctcacaattca

SEQ ID NO: 92327 - DNA, 13 bp, Artificial Sequence
  Oligonucleotide for detection of SNP TSC0023078
tgaattatgaggt

SEQ ID NO: 92328 - DNA, 13 bp, Artificial Sequence
  Oligonucleotide for detection of SNP TSC0023078
acctcataattca

SEQ ID NO: 92329 - DNA, 13 bp, Artificial Sequence
  Oligonucleotide for detection of SNP TSC0023078
cgaattgtgaggt

SEQ ID NO: 92330 - DNA, 13 bp, Artificial Sequence
  Oligonucleotide for detection of SNP TSC0023078
acctcacaattcg

SEQ ID NO: 92331 - DNA, 13 bp, Artificial Sequence
  Oligonucleotide for detection of SNP TSC0023078
cgaattatgaggt

SEQ ID NO: 92332 - DNA, 13 bp, Artificial Sequence
  Oligonucleotide for detection of SNP TSC0023078
acctcataattcg

SEQ ID NO: 92333 - DNA, 13 bp, Artificial Sequence
  Oligonucleotide for detection of SNP TSC0023078
tgaatcgtgaggt

SEQ ID NO: 92334 - DNA, 13 bp, Artificial Sequence
  Oligonucleotide for detection of SNP TSC0023078
acctcacgattca

SEQ ID NO: 92335 - DNA, 13 bp, Artificial Sequence
  Oligonucleotide for detection of SNP TSC0023078
cgaatcgtgaggt

SEQ ID NO: 92336 - DNA, 13 bp, Artificial Sequence
  Oligonucleotide for detection of SNP TSC0023078
acctcacgattcg

SEQ ID NO: 92337 - DNA, 13 bp, Artificial Sequence
  Oligonucleotide for detection of SNP TSC0023080
atatggagtgaga

SEQ ID NO: 92338 - DNA, 13 bp, Artificial Sequence
  Oligonucleotide for detection of SNP TSC0023080
tctcactccatat

SEQ ID NO: 92339 - DNA, 13 bp, Artificial Sequence
  Oligonucleotide for detection of SNP TSC0023080
atatggtgtgaga

SEQ ID NO: 92340 - DNA, 13 bp, Artificial Sequence
  Oligonucleotide for detection of SNP TSC0023080
tctcacaccatat

SEQ ID NO: 92341 - DNA, 13 bp, Artificial Sequence
  Oligonucleotide for detection of SNP TSC0023080
atacggagtgaga

SEQ ID NO: 92342 - DNA, 13 bp, Artificial Sequence
  Oligonucleotide for detection of SNP TSC0023080
tctcactccgtat

SEQ ID NO: 92343 - DNA, 13 bp, Artificial Sequence
  Oligonucleotide for detection of SNP TSC0023080
atacggtgtgaga

SEQ ID NO: 92344 - DNA, 13 bp, Artificial Sequence
  Oligonucleotide for detection of SNP TSC0023080
tctcacaccgtat

SEQ ID NO: 92345 - DNA, 13 bp, Artificial Sequence
  Oligonucleotide for detection of SNP TSC0023080
ttttattttgtat

SEQ ID NO: 92346 - DNA, 13 bp, Artificial Sequence
  Oligonucleotide for detection of SNP TSC0023080
atacaaaataaaa

SEQ ID NO: 92347 - DNA, 13 bp, Artificial Sequence
  Oligonucleotide for detection of SNP TSC0023080
ttttatattgtat

SEQ ID NO: 92348 - DNA, 13 bp, Artificial Sequence
  Oligonucleotide for detection of SNP TSC0023080
atacaatataaaa

SEQ ID NO: 92349 - DNA, 13 bp, Artificial Sequence
  Oligonucleotide for detection of SNP TSC0023080
ttttatttcgtat

SEQ ID NO: 92350 - DNA, 13 bp, Artificial Sequence
  Oligonucleotide for detection of SNP TSC0023080
atacgaaataaaa

SEQ ID NO: 92351 - DNA, 13 bp, Artificial Sequence
  Oligonucleotide for detection of SNP TSC0023080
ttttatatcgtat

SEQ ID NO: 92352 - DNA, 13 bp, Artificial Sequence
  Oligonucleotide for detection of SNP TSC0023080
atacgatataaaa

SEQ ID NO: 92353 - DNA, 13 bp, Artificial Sequence
  Oligonucleotide for detection of SNP TSC0023082
gatttaatgttag

SEQ ID NO: 92354 - DNA, 13 bp, Artificial Sequence
  Oligonucleotide for detection of SNP TSC0023082
ctaacattaaatc

SEQ ID NO: 92355 - DNA, 13 bp, Artificial Sequence
  Oligonucleotide for detection of SNP TSC0023082
gatttagtgttag

SEQ ID NO: 92356 - DNA, 13 bp, Artificial Sequence
  Oligonucleotide for detection of SNP TSC0023082
ctaacactaaatc

SEQ ID NO: 92357 - DNA, 13 bp, Artificial Sequence
  Oligonucleotide for detection of SNP TSC0023082
gatttaacgttag

SEQ ID NO: 92358 - DNA, 13 bp, Artificial Sequence
  Oligonucleotide for detection of SNP TSC0023082
ctaacgttaaatc

SEQ ID NO: 92359 - DNA, 13 bp, Artificial Sequence
  Oligonucleotide for detection of SNP TSC0023082
gatttagcgttag

SEQ ID NO: 92360 - DNA, 13 bp, Artificial Sequence
  Oligonucleotide for detection of SNP TSC0023082
ctaacgctaaatc

SEQ ID NO: 92361 - DNA, 13 bp, Artificial Sequence
  Oligonucleotide for detection of SNP TSC0023085
tggaaagtttgty

SEQ ID NO: 92362 - DNA, 13 bp, Artificial Sequence
  Oligonucleotide for detection of SNP TSC0023085
racaaactttcca

SEQ ID NO: 92363 - DNA, 13 bp, Artificial Sequence
  Oligonucleotide for detection of SNP TSC0023085
tggaaaatttgty

SEQ ID NO: 92364 - DNA, 13 bp, Artificial Sequence
  Oligonucleotide for detection of SNP TSC0023085
racaaattttcca

SEQ ID NO: 92365 - DNA, 13 bp, Artificial Sequence
  Oligonucleotide for detection of SNP TSC0023086
gtagatatttggy

SEQ ID NO: 92366 - DNA, 13 bp, Artificial Sequence
  Oligonucleotide for detection of SNP TSC0023086
rccaaatatctac

SEQ ID NO: 92367 - DNA, 13 bp, Artificial Sequence
  Oligonucleotide for detection of SNP TSC0023086
gtagatttttggy

SEQ ID NO: 92368 - DNA, 13 bp, Artificial Sequence
  Oligonucleotide for detection of SNP TSC0023086
rccaaaaatctac

SEQ ID NO: 92369 - DNA, 13 bp, Artificial Sequence
  Oligonucleotide for detection of SNP TSC0023086
gttagatgtttay

SEQ ID NO: 92370 - DNA, 13 bp, Artificial Sequence
  Oligonucleotide for detection of SNP TSC0023086
rtaaacatctaac

SEQ ID NO: 92371 - DNA, 13 bp, Artificial Sequence
  Oligonucleotide for detection of SNP TSC0023086
gttagaagtttay

SEQ ID NO: 92372 - DNA, 13 bp, Artificial Sequence
  Oligonucleotide for detection of SNP TSC0023086
rtaaacttctaac

SEQ ID NO: 92373 - DNA, 13 bp, Artificial Sequence
  Oligonucleotide for detection of SNP TSC0023087
tgtttggtttatg

SEQ ID NO: 92374 - DNA, 13 bp, Artificial Sequence
  Oligonucleotide for detection of SNP TSC0023087
cataaaccaaaca

SEQ ID NO: 92375 - DNA, 13 bp, Artificial Sequence
  Oligonucleotide for detection of SNP TSC0023087
tgtttgatttatg

SEQ ID NO: 92376 - DNA, 13 bp, Artificial Sequence
  Oligonucleotide for detection of SNP TSC0023087
cataaatcaaaca

SEQ ID NO: 92377 - DNA, 13 bp, Artificial Sequence
  Oligonucleotide for detection of SNP TSC0023087
tgtttggtttacg

SEQ ID NO: 92378 - DNA, 13 bp, Artificial Sequence
  Oligonucleotide for detection of SNP TSC0023087
cgtaaaccaaaca

SEQ ID NO: 92379 - DNA, 13 bp, Artificial Sequence
  Oligonucleotide for detection of SNP TSC0023087
tgtttgatttacg

SEQ ID NO: 92380 - DNA, 13 bp, Artificial Sequence
  Oligonucleotide for detection of SNP TSC0023087
cgtaaatcaaaca

SEQ ID NO: 92381 - DNA, 13 bp, Artificial Sequence
  Oligonucleotide for detection of SNP TSC0023090
ggggtatggggat

SEQ ID NO: 92382 - DNA, 13 bp, Artificial Sequence
  Oligonucleotide for detection of SNP TSC0023090
atccccatacccc

SEQ ID NO: 92383 - DNA, 13 bp, Artificial Sequence
  Oligonucleotide for detection of SNP TSC0023090
ggggtacggggat

SEQ ID NO: 92384 - DNA, 13 bp, Artificial Sequence
  Oligonucleotide for detection of SNP TSC0023090
atccccgtacccc

SEQ ID NO: 92385 - DNA, 13 bp, Artificial Sequence
  Oligonucleotide for detection of SNP TSC0023093
aatttagtttata

SEQ ID NO: 92386 - DNA, 13 bp, Artificial Sequence
  Oligonucleotide for detection of SNP TSC0023093
tataaactaaatt

SEQ ID NO: 92387 - DNA, 13 bp, Artificial Sequence
  Oligonucleotide for detection of SNP TSC0023093
aatttaatttata

SEQ ID NO: 92388 - DNA, 13 bp, Artificial Sequence
  Oligonucleotide for detection of SNP TSC0023093
tataaattaaatt

SEQ ID NO: 92389 - DNA, 13 bp, Artificial Sequence
  Oligonucleotide for detection of SNP TSC0023094
gttttgaagtgag

SEQ ID NO: 92390 - DNA, 13 bp, Artificial Sequence
  Oligonucleotide for detection of SNP TSC0023094
ctcacttcaaaac

SEQ ID NO: 92391 - DNA, 13 bp, Artificial Sequence
  Oligonucleotide for detection of SNP TSC0023094
gtttcgaagtgag

SEQ ID NO: 92392 - DNA, 13 bp, Artificial Sequence
  Oligonucleotide for detection of SNP TSC0023094
ctcacttcgaaac

SEQ ID NO: 92393 - DNA, 13 bp, Artificial Sequence
  Oligonucleotide for detection of SNP TSC0023095
ttattttggggta

SEQ ID NO: 92394 - DNA, 13 bp, Artificial Sequence
  Oligonucleotide for detection of SNP TSC0023095
taccccaaaataa

SEQ ID NO: 92395 - DNA, 13 bp, Artificial Sequence
  Oligonucleotide for detection of SNP TSC0023095
ttatttcggggta

SEQ ID NO: 92396 - DNA, 13 bp, Artificial Sequence
  Oligonucleotide for detection of SNP TSC0023095
taccccgaaataa

SEQ ID NO: 92397 - DNA, 13 bp, Artificial Sequence
  Oligonucleotide for detection of SNP TSC0023095
tgttttggagtga

SEQ ID NO: 92398 - DNA, 13 bp, Artificial Sequence
  Oligonucleotide for detection of SNP TSC0023095
tcactccaaaaca

SEQ ID NO: 92399 - DNA, 13 bp, Artificial Sequence
  Oligonucleotide for detection of SNP TSC0023095
tgttttagagtga

SEQ ID NO: 92400 - DNA, 13 bp, Artificial Sequence
  Oligonucleotide for detection of SNP TSC0023095
tcactctaaaaca

SEQ ID NO: 92401 - DNA, 13 bp, Artificial Sequence
  Oligonucleotide for detection of SNP TSC0023095
tgtttcggagtga

SEQ ID NO: 92402 - DNA, 13 bp, Artificial Sequence
  Oligonucleotide for detection of SNP TSC0023095
tcactccgaaaca

SEQ ID NO: 92403 - DNA, 13 bp, Artificial Sequence
  Oligonucleotide for detection of SNP TSC0023096
aaagaagttatgy

SEQ ID NO: 92404 - DNA, 13 bp, Artificial Sequence
  Oligonucleotide for detection of SNP TSC0023096
rcataacttcttt

SEQ ID NO: 92405 - DNA, 13 bp, Artificial Sequence
  Oligonucleotide for detection of SNP TSC0023096
aaagaaattatgy

SEQ ID NO: 92406 - DNA, 13 bp, Artificial Sequence
  Oligonucleotide for detection of SNP TSC0023096
rcataatttcttt

SEQ ID NO: 92407 - DNA, 13 bp, Artificial Sequence
  Oligonucleotide for detection of SNP TSC0023100
atgataattttty

SEQ ID NO: 92408 - DNA, 13 bp, Artificial Sequence
  Oligonucleotide for detection of SNP TSC0023100
raaaaattatcat

SEQ ID NO: 92409 - DNA, 13 bp, Artificial Sequence
  Oligonucleotide for detection of SNP TSC0023100
atgatagttttty

SEQ ID NO: 92410 - DNA, 13 bp, Artificial Sequence
  Oligonucleotide for detection of SNP TSC0023100
raaaaactatcat

SEQ ID NO: 92411 - DNA, 13 bp, Artificial Sequence
  Oligonucleotide for detection of SNP TSC0023104
tttttagaaatay

SEQ ID NO: 92412 - DNA, 13 bp, Artificial Sequence
  Oligonucleotide for detection of SNP TSC0023104
rtatttctaaaaa

SEQ ID NO: 92413 - DNA, 13 bp, Artificial Sequence
  Oligonucleotide for detection of SNP TSC0023104
tttttataaatay

SEQ ID NO: 92414 - DNA, 13 bp, Artificial Sequence
  Oligonucleotide for detection of SNP TSC0023104
rtatttataaaaa

SEQ ID NO: 92415 - DNA, 13 bp, Artificial Sequence
  Oligonucleotide for detection of SNP TSC0023104
gtgtttttggagg

SEQ ID NO: 92416 - DNA, 13 bp, Artificial Sequence
  Oligonucleotide for detection of SNP TSC0023104
cctccaaaaacac

SEQ ID NO: 92417 - DNA, 13 bp, Artificial Sequence
  Oligonucleotide for detection of SNP TSC0023104
gtgtttatggagg

SEQ ID NO: 92418 - DNA, 13 bp, Artificial Sequence
  Oligonucleotide for detection of SNP TSC0023104
cctccataaacac

SEQ ID NO: 92419 - DNA, 13 bp, Artificial Sequence
  Oligonucleotide for detection of SNP TSC0023105
gggggggttagag

SEQ ID NO: 92420 - DNA, 13 bp, Artificial Sequence
  Oligonucleotide for detection of SNP TSC0023105
ctctaaccccccc

SEQ ID NO: 92421 - DNA, 13 bp, Artificial Sequence
  Oligonucleotide for detection of SNP TSC0023105
ggggggtttagag

SEQ ID NO: 92422 - DNA, 13 bp, Artificial Sequence
  Oligonucleotide for detection of SNP TSC0023105
ctctaaacccccc

SEQ ID NO: 92423 - DNA, 13 bp, Artificial Sequence
  Oligonucleotide for detection of SNP TSC0023105
ttttggtttttty

SEQ ID NO: 92424 - DNA, 13 bp, Artificial Sequence
  Oligonucleotide for detection of SNP TSC0023105
raaaaaaccaaaa

SEQ ID NO: 92425 - DNA, 13 bp, Artificial Sequence
  Oligonucleotide for detection of SNP TSC0023106
gtgatttttaagg

SEQ ID NO: 92426 - DNA, 13 bp, Artificial Sequence
  Oligonucleotide for detection of SNP TSC0023106
ccttaaaaatcac

SEQ ID NO: 92427 - DNA, 13 bp, Artificial Sequence
  Oligonucleotide for detection of SNP TSC0023106
gtgattgttaagg

SEQ ID NO: 92428 - DNA, 13 bp, Artificial Sequence
  Oligonucleotide for detection of SNP TSC0023106
ccttaacaatcac

SEQ ID NO: 92429 - DNA, 13 bp, Artificial Sequence
  Oligonucleotide for detection of SNP TSC0023106
ttttgagagttay

SEQ ID NO: 92430 - DNA, 13 bp, Artificial Sequence
  Oligonucleotide for detection of SNP TSC0023106
rtaactctcaaaa

SEQ ID NO: 92431 - DNA, 13 bp, Artificial Sequence
  Oligonucleotide for detection of SNP TSC0023106
ttttgatagttay

SEQ ID NO: 92432 - DNA, 13 bp, Artificial Sequence
  Oligonucleotide for detection of SNP TSC0023106
rtaactatcaaaa

SEQ ID NO: 92433 - DNA, 13 bp, Artificial Sequence
  Oligonucleotide for detection of SNP TSC0023107
ggaaggggtagag

SEQ ID NO: 92434 - DNA, 13 bp, Artificial Sequence
  Oligonucleotide for detection of SNP TSC0023107
ctctaccccttcc

SEQ ID NO: 92435 - DNA, 13 bp, Artificial Sequence
  Oligonucleotide for detection of SNP TSC0023107
ggaaggagtagag

SEQ ID NO: 92436 - DNA, 13 bp, Artificial Sequence
  Oligonucleotide for detection of SNP TSC0023107
ctctactccttcc

SEQ ID NO: 92437 - DNA, 13 bp, Artificial Sequence
  Oligonucleotide for detection of SNP TSC0023109
tggtaatggtaga

SEQ ID NO: 92438 - DNA, 13 bp, Artificial Sequence
  Oligonucleotide for detection of SNP TSC0023109
tctaccattacca

SEQ ID NO: 92439 - DNA, 13 bp, Artificial Sequence
  Oligonucleotide for detection of SNP TSC0023109
tggtaacggtaga

SEQ ID NO: 92440 - DNA, 13 bp, Artificial Sequence
  Oligonucleotide for detection of SNP TSC0023109
tctaccgttacca

SEQ ID NO: 92441 - DNA, 13 bp, Artificial Sequence
  Oligonucleotide for detection of SNP TSC0023111
attttatgtttat

SEQ ID NO: 92442 - DNA, 13 bp, Artificial Sequence
  Oligonucleotide for detection of SNP TSC0023111
ataaacataaaat

SEQ ID NO: 92443 - DNA, 13 bp, Artificial Sequence
  Oligonucleotide for detection of SNP TSC0023111
attttacgtttat

SEQ ID NO: 92444 - DNA, 13 bp, Artificial Sequence
  Oligonucleotide for detection of SNP TSC0023111
ataaacgtaaaat

SEQ ID NO: 92445 - DNA, 13 bp, Artificial Sequence
  Oligonucleotide for detection of SNP TSC0023111
atgagtgtggggt

SEQ ID NO: 92446 - DNA, 13 bp, Artificial Sequence
  Oligonucleotide for detection of SNP TSC0023111
accccacactcat

SEQ ID NO: 92447 - DNA, 13 bp, Artificial Sequence
  Oligonucleotide for detection of SNP TSC0023111
atgagtatggggt

SEQ ID NO: 92448 - DNA, 13 bp, Artificial Sequence
  Oligonucleotide for detection of SNP TSC0023111
accccatactcat

SEQ ID NO: 92449 - DNA, 13 bp, Artificial Sequence
  Oligonucleotide for detection of SNP TSC0023111
atgagcgtggggt

SEQ ID NO: 92450 - DNA, 13 bp, Artificial Sequence
  Oligonucleotide for detection of SNP TSC0023111
accccacgctcat

SEQ ID NO: 92451 - DNA, 13 bp, Artificial Sequence
  Oligonucleotide for detection of SNP TSC0023112
tttttatgtagat

SEQ ID NO: 92452 - DNA, 13 bp, Artificial Sequence
  Oligonucleotide for detection of SNP TSC0023112
atctacataaaaa

SEQ ID NO: 92453 - DNA, 13 bp, Artificial Sequence
  Oligonucleotide for detection of SNP TSC0023112
tttttacgtagat

SEQ ID NO: 92454 - DNA, 13 bp, Artificial Sequence
  Oligonucleotide for detection of SNP TSC0023112
atctacgtaaaaa

SEQ ID NO: 92455 - DNA, 13 bp, Artificial Sequence
  Oligonucleotide for detection of SNP TSC0023112
atttatgtaggaa

SEQ ID NO: 92456 - DNA, 13 bp, Artificial Sequence
  Oligonucleotide for detection of SNP TSC0023112
ttcctacataaat

SEQ ID NO: 92457 - DNA, 13 bp, Artificial Sequence
  Oligonucleotide for detection of SNP TSC0023112
atttatataggaa

SEQ ID NO: 92458 - DNA, 13 bp, Artificial Sequence
  Oligonucleotide for detection of SNP TSC0023112
ttcctatataaat

SEQ ID NO: 92459 - DNA, 13 bp, Artificial Sequence
  Oligonucleotide for detection of SNP TSC0023112
atttacgtaggaa

SEQ ID NO: 92460 - DNA, 13 bp, Artificial Sequence
  Oligonucleotide for detection of SNP TSC0023112
ttcctacgtaaat

SEQ ID NO: 92461 - DNA, 13 bp, Artificial Sequence
  Oligonucleotide for detection of SNP TSC0023115
tatttttgataaa

SEQ ID NO: 92462 - DNA, 13 bp, Artificial Sequence
  Oligonucleotide for detection of SNP TSC0023115
tttatcaaaaata

SEQ ID NO: 92463 - DNA, 13 bp, Artificial Sequence
  Oligonucleotide for detection of SNP TSC0023115
tattttcgataaa

SEQ ID NO: 92464 - DNA, 13 bp, Artificial Sequence
  Oligonucleotide for detection of SNP TSC0023115
tttatcgaaaata

SEQ ID NO: 92465 - DNA, 13 bp, Artificial Sequence
  Oligonucleotide for detection of SNP TSC0023115
tttgttggggata

SEQ ID NO: 92466 - DNA, 13 bp, Artificial Sequence
  Oligonucleotide for detection of SNP TSC0023115
tatccccaacaaa

SEQ ID NO: 92467 - DNA, 13 bp, Artificial Sequence
  Oligonucleotide for detection of SNP TSC0023115
tttgttagggata

SEQ ID NO: 92468 - DNA, 13 bp, Artificial Sequence
  Oligonucleotide for detection of SNP TSC0023115
tatccctaacaaa

SEQ ID NO: 92469 - DNA, 13 bp, Artificial Sequence
  Oligonucleotide for detection of SNP TSC0023115
tttgtcggggata

SEQ ID NO: 92470 - DNA, 13 bp, Artificial Sequence
  Oligonucleotide for detection of SNP TSC0023115
tatccccgacaaa

SEQ ID NO: 92471 - DNA, 13 bp, Artificial Sequence
  Oligonucleotide for detection of SNP TSC0023117
gaatgttggtagy

SEQ ID NO: 92472 - DNA, 13 bp, Artificial Sequence
  Oligonucleotide for detection of SNP TSC0023117
rctaccaacattc

SEQ ID NO: 92473 - DNA, 13 bp, Artificial Sequence
  Oligonucleotide for detection of SNP TSC0023117
gaatgtcggtagy

SEQ ID NO: 92474 - DNA, 13 bp, Artificial Sequence
  Oligonucleotide for detection of SNP TSC0023117
rctaccgacattc

SEQ ID NO: 92475 - DNA, 13 bp, Artificial Sequence
  Oligonucleotide for detection of SNP TSC0023117
gttgttggtatty

SEQ ID NO: 92476 - DNA, 13 bp, Artificial Sequence
  Oligonucleotide for detection of SNP TSC0023117
raataccaacaac

SEQ ID NO: 92477 - DNA, 13 bp, Artificial Sequence
  Oligonucleotide for detection of SNP TSC0023117
gttgttagtatty

SEQ ID NO: 92478 - DNA, 13 bp, Artificial Sequence
  Oligonucleotide for detection of SNP TSC0023117
raatactaacaac

SEQ ID NO: 92479 - DNA, 13 bp, Artificial Sequence
  Oligonucleotide for detection of SNP TSC0023117
gttgtcggtatty

SEQ ID NO: 92480 - DNA, 13 bp, Artificial Sequence
  Oligonucleotide for detection of SNP TSC0023117
raataccgacaac

SEQ ID NO: 92481 - DNA, 13 bp, Artificial Sequence
  Oligonucleotide for detection of SNP TSC0023118
gtaggtatttgta

SEQ ID NO: 92482 - DNA, 13 bp, Artificial Sequence
  Oligonucleotide for detection of SNP TSC0023118
tacaaatacctac

SEQ ID NO: 92483 - DNA, 13 bp, Artificial Sequence
  Oligonucleotide for detection of SNP TSC0023118
gtaggtgtttgta

SEQ ID NO: 92484 - DNA, 13 bp, Artificial Sequence
  Oligonucleotide for detection of SNP TSC0023118
tacaaacacctac

SEQ ID NO: 92485 - DNA, 13 bp, Artificial Sequence
  Oligonucleotide for detection of SNP TSC0023118
gtaggcgtttgta

SEQ ID NO: 92486 - DNA, 13 bp, Artificial Sequence
  Oligonucleotide for detection of SNP TSC0023118
tacaaacgcctac

SEQ ID NO: 92487 - DNA, 13 bp, Artificial Sequence
  Oligonucleotide for detection of SNP TSC0023119
agtttgagtttgt

SEQ ID NO: 92488 - DNA, 13 bp, Artificial Sequence
  Oligonucleotide for detection of SNP TSC0023119
acaaactcaaact

SEQ ID NO: 92489 - DNA, 13 bp, Artificial Sequence
  Oligonucleotide for detection of SNP TSC0023119
agtttgtgtttgt

SEQ ID NO: 92490 - DNA, 13 bp, Artificial Sequence
  Oligonucleotide for detection of SNP TSC0023119
acaaacacaaact

SEQ ID NO: 92491 - DNA, 13 bp, Artificial Sequence
  Oligonucleotide for detection of SNP TSC0023119
ataagtttagatt

SEQ ID NO: 92492 - DNA, 13 bp, Artificial Sequence
  Oligonucleotide for detection of SNP TSC0023119
aatctaaacttat

SEQ ID NO: 92493 - DNA, 13 bp, Artificial Sequence
  Oligonucleotide for detection of SNP TSC0023119
ataagtatagatt

SEQ ID NO: 92494 - DNA, 13 bp, Artificial Sequence
  Oligonucleotide for detection of SNP TSC0023119
aatctatacttat

SEQ ID NO: 92495 - DNA, 13 bp, Artificial Sequence
  Oligonucleotide for detection of SNP TSC0023124
gttaatagattgy

SEQ ID NO: 92496 - DNA, 13 bp, Artificial Sequence
  Oligonucleotide for detection of SNP TSC0023124
rcaatctattaac

SEQ ID NO: 92497 - DNA, 13 bp, Artificial Sequence
  Oligonucleotide for detection of SNP TSC0023124
gttaatggattgy

SEQ ID NO: 92498 - DNA, 13 bp, Artificial Sequence
  Oligonucleotide for detection of SNP TSC0023124
rcaatccattaac

SEQ ID NO: 92499 - DNA, 13 bp, Artificial Sequence
  Oligonucleotide for detection of SNP TSC0023125
agtatggtgatta

SEQ ID NO: 92500 - DNA, 13 bp, Artificial Sequence
  Oligonucleotide for detection of SNP TSC0023125
taatcaccatact

SEQ ID NO: 92501 - DNA, 13 bp, Artificial Sequence
  Oligonucleotide for detection of SNP TSC0023125
agtatgttgatta

SEQ ID NO: 92502 - DNA, 13 bp, Artificial Sequence
  Oligonucleotide for detection of SNP TSC0023125
taatcaacatact

SEQ ID NO: 92503 - DNA, 13 bp, Artificial Sequence
  Oligonucleotide for detection of SNP TSC0023125
tagttattatgtt

SEQ ID NO: 92504 - DNA, 13 bp, Artificial Sequence
  Oligonucleotide for detection of SNP TSC0023125
aacataataacta

SEQ ID NO: 92505 - DNA, 13 bp, Artificial Sequence
  Oligonucleotide for detection of SNP TSC0023125
tagttaatatgtt

SEQ ID NO: 92506 - DNA, 13 bp, Artificial Sequence
  Oligonucleotide for detection of SNP TSC0023125
aacatattaacta

SEQ ID NO: 92507 - DNA, 13 bp, Artificial Sequence
  Oligonucleotide for detection of SNP TSC0023130
atggtgatatgtg

SEQ ID NO: 92508 - DNA, 13 bp, Artificial Sequence
  Oligonucleotide for detection of SNP TSC0023130
cacatatcaccat

SEQ ID NO: 92509 - DNA, 13 bp, Artificial Sequence
  Oligonucleotide for detection of SNP TSC0023130
atggtggtatgtg

SEQ ID NO: 92510 - DNA, 13 bp, Artificial Sequence
  Oligonucleotide for detection of SNP TSC0023130
cacataccaccat

SEQ ID NO: 92511 - DNA, 13 bp, Artificial Sequence
  Oligonucleotide for detection of SNP TSC0023130
atggtgatatgcg

SEQ ID NO: 92512 - DNA, 13 bp, Artificial Sequence
  Oligonucleotide for detection of SNP TSC0023130
cgcatatcaccat

SEQ ID NO: 92513 - DNA, 13 bp, Artificial Sequence
  Oligonucleotide for detection of SNP TSC0023130
atggtggtatgcg

SEQ ID NO: 92514 - DNA, 13 bp, Artificial Sequence
  Oligonucleotide for detection of SNP TSC0023130
cgcataccaccat

SEQ ID NO: 92515 - DNA, 13 bp, Artificial Sequence
  Oligonucleotide for detection of SNP TSC0023131
aaataagtaaaat

SEQ ID NO: 92516 - DNA, 13 bp, Artificial Sequence
  Oligonucleotide for detection of SNP TSC0023131
attttacttattt

SEQ ID NO: 92517 - DNA, 13 bp, Artificial Sequence
  Oligonucleotide for detection of SNP TSC0023131
aaataaataaaat

SEQ ID NO: 92518 - DNA, 13 bp, Artificial Sequence
  Oligonucleotide for detection of SNP TSC0023131
attttatttattt

SEQ ID NO: 92519 - DNA, 13 bp, Artificial Sequence
  Oligonucleotide for detection of SNP TSC0023137
ggtggtaagagga

SEQ ID NO: 92520 - DNA, 13 bp, Artificial Sequence
  Oligonucleotide for detection of SNP TSC0023137
tcctcttaccacc

SEQ ID NO: 92521 - DNA, 13 bp, Artificial Sequence
  Oligonucleotide for detection of SNP TSC0023137
ggtggtgagagga

SEQ ID NO: 92522 - DNA, 13 bp, Artificial Sequence
  Oligonucleotide for detection of SNP TSC0023137
tcctctcaccacc

SEQ ID NO: 92523 - DNA, 13 bp, Artificial Sequence
  Oligonucleotide for detection of SNP TSC0023137
ggcggtaagagga

SEQ ID NO: 92524 - DNA, 13 bp, Artificial Sequence
  Oligonucleotide for detection of SNP TSC0023137
tcctcttaccgcc

SEQ ID NO: 92525 - DNA, 13 bp, Artificial Sequence
  Oligonucleotide for detection of SNP TSC0023137
ggcggtgagagga

SEQ ID NO: 92526 - DNA, 13 bp, Artificial Sequence
  Oligonucleotide for detection of SNP TSC0023137
tcctctcaccgcc

SEQ ID NO: 92527 - DNA, 13 bp, Artificial Sequence
  Oligonucleotide for detection of SNP TSC0023138
ggtaggattatga

SEQ ID NO: 92528 - DNA, 13 bp, Artificial Sequence
  Oligonucleotide for detection of SNP TSC0023138
tcataatcctacc

SEQ ID NO: 92529 - DNA, 13 bp, Artificial Sequence
  Oligonucleotide for detection of SNP TSC0023138
ggtagggttatga

SEQ ID NO: 92530 - DNA, 13 bp, Artificial Sequence
  Oligonucleotide for detection of SNP TSC0023138
tcataaccctacc

SEQ ID NO: 92531 - DNA, 13 bp, Artificial Sequence
  Oligonucleotide for detection of SNP TSC0023139
gatgatattaatt

SEQ ID NO: 92532 - DNA, 13 bp, Artificial Sequence
  Oligonucleotide for detection of SNP TSC0023139
aattaatatcatc

SEQ ID NO: 92533 - DNA, 13 bp, Artificial Sequence
  Oligonucleotide for detection of SNP TSC0023139
gatgatgttaatt

SEQ ID NO: 92534 - DNA, 13 bp, Artificial Sequence
  Oligonucleotide for detection of SNP TSC0023139
aattaacatcatc

SEQ ID NO: 92535 - DNA, 13 bp, Artificial Sequence
  Oligonucleotide for detection of SNP TSC0023139
gatgacgttaatt

SEQ ID NO: 92536 - DNA, 13 bp, Artificial Sequence
  Oligonucleotide for detection of SNP TSC0023139
aattaacgtcatc

SEQ ID NO: 92537 - DNA, 13 bp, Artificial Sequence
  Oligonucleotide for detection of SNP TSC0023139
agttaatgttaty

SEQ ID NO: 92538 - DNA, 13 bp, Artificial Sequence
  Oligonucleotide for detection of SNP TSC0023139
rataacattaact

SEQ ID NO: 92539 - DNA, 13 bp, Artificial Sequence
  Oligonucleotide for detection of SNP TSC0023139
agttaacgttaty

SEQ ID NO: 92540 - DNA, 13 bp, Artificial Sequence
  Oligonucleotide for detection of SNP TSC0023139
rataacgttaact

SEQ ID NO: 92541 - DNA, 13 bp, Artificial Sequence
  Oligonucleotide for detection of SNP TSC0023140
aggtttattttay

SEQ ID NO: 92542 - DNA, 13 bp, Artificial Sequence
  Oligonucleotide for detection of SNP TSC0023140
rtaaaataaacct

SEQ ID NO: 92543 - DNA, 13 bp, Artificial Sequence
  Oligonucleotide for detection of SNP TSC0023140
aggttttttttay

SEQ ID NO: 92544 - DNA, 13 bp, Artificial Sequence
  Oligonucleotide for detection of SNP TSC0023140
rtaaaaaaaacct

SEQ ID NO: 92545 - DNA, 13 bp, Artificial Sequence
  Oligonucleotide for detection of SNP TSC0023140
gtgaggtagattt

SEQ ID NO: 92546 - DNA, 13 bp, Artificial Sequence
  Oligonucleotide for detection of SNP TSC0023140
aaatctacctcac

SEQ ID NO: 92547 - DNA, 13 bp, Artificial Sequence
  Oligonucleotide for detection of SNP TSC0023140
gtgagggagattt

SEQ ID NO: 92548 - DNA, 13 bp, Artificial Sequence
  Oligonucleotide for detection of SNP TSC0023140
aaatctccctcac

SEQ ID NO: 92549 - DNA, 13 bp, Artificial Sequence
  Oligonucleotide for detection of SNP TSC0023141
aatattttgtatt

SEQ ID NO: 92550 - DNA, 13 bp, Artificial Sequence
  Oligonucleotide for detection of SNP TSC0023141
aatacaaaatatt

SEQ ID NO: 92551 - DNA, 13 bp, Artificial Sequence
  Oligonucleotide for detection of SNP TSC0023141
aatattgtgtatt

SEQ ID NO: 92552 - DNA, 13 bp, Artificial Sequence
  Oligonucleotide for detection of SNP TSC0023141
aatacacaatatt

SEQ ID NO: 92553 - DNA, 13 bp, Artificial Sequence
  Oligonucleotide for detection of SNP TSC0023141
agtatagagtatt

SEQ ID NO: 92554 - DNA, 13 bp, Artificial Sequence
  Oligonucleotide for detection of SNP TSC0023141
aatactctatact

SEQ ID NO: 92555 - DNA, 13 bp, Artificial Sequence
  Oligonucleotide for detection of SNP TSC0023141
agtatatagtatt

SEQ ID NO: 92556 - DNA, 13 bp, Artificial Sequence
  Oligonucleotide for detection of SNP TSC0023141
aatactatatact

SEQ ID NO: 92557 - DNA, 13 bp, Artificial Sequence
  Oligonucleotide for detection of SNP TSC0023142
tttattaggataa

SEQ ID NO: 92558 - DNA, 13 bp, Artificial Sequence
  Oligonucleotide for detection of SNP TSC0023142
ttatcctaataaa

SEQ ID NO: 92559 - DNA, 13 bp, Artificial Sequence
  Oligonucleotide for detection of SNP TSC0023142
tttattgggataa

SEQ ID NO: 92560 - DNA, 13 bp, Artificial Sequence
  Oligonucleotide for detection of SNP TSC0023142
ttatcccaataaa

SEQ ID NO: 92561 - DNA, 13 bp, Artificial Sequence
  Oligonucleotide for detection of SNP TSC0023142
tttatcgggataa

SEQ ID NO: 92562 - DNA, 13 bp, Artificial Sequence
  Oligonucleotide for detection of SNP TSC0023142
ttatcccgataaa

SEQ ID NO: 92563 - DNA, 13 bp, Artificial Sequence
  Oligonucleotide for detection of SNP TSC0023142
ttgttttgataag

SEQ ID NO: 92564 - DNA, 13 bp, Artificial Sequence
  Oligonucleotide for detection of SNP TSC0023142
cttatcaaaacaa

SEQ ID NO: 92565 - DNA, 13 bp, Artificial Sequence
  Oligonucleotide for detection of SNP TSC0023142
ttgtttcgataag

SEQ ID NO: 92566 - DNA, 13 bp, Artificial Sequence
  Oligonucleotide for detection of SNP TSC0023142
cttatcgaaacaa

SEQ ID NO: 92567 - DNA, 13 bp, Artificial Sequence
  Oligonucleotide for detection of SNP TSC0023143
tttttaaagtgty

SEQ ID NO: 92568 - DNA, 13 bp, Artificial Sequence
  Oligonucleotide for detection of SNP TSC0023143
racactttaaaaa

SEQ ID NO: 92569 - DNA, 13 bp, Artificial Sequence
  Oligonucleotide for detection of SNP TSC0023143
tttttagagtgty

SEQ ID NO: 92570 - DNA, 13 bp, Artificial Sequence
  Oligonucleotide for detection of SNP TSC0023143
racactctaaaaa

SEQ ID NO: 92571 - DNA, 13 bp, Artificial Sequence
  Oligonucleotide for detection of SNP TSC0023145
agtatttggttay

SEQ ID NO: 92572 - DNA, 13 bp, Artificial Sequence
  Oligonucleotide for detection of SNP TSC0023145
rtaaccaaatact

SEQ ID NO: 92573 - DNA, 13 bp, Artificial Sequence
  Oligonucleotide for detection of SNP TSC0023145
agtattcggttay

SEQ ID NO: 92574 - DNA, 13 bp, Artificial Sequence
  Oligonucleotide for detection of SNP TSC0023145
rtaaccgaatact

SEQ ID NO: 92575 - DNA, 13 bp, Artificial Sequence
  Oligonucleotide for detection of SNP TSC0023145
gtggttgggtgtt

SEQ ID NO: 92576 - DNA, 13 bp, Artificial Sequence
  Oligonucleotide for detection of SNP TSC0023145
aacacccaaccac

SEQ ID NO: 92577 - DNA, 13 bp, Artificial Sequence
  Oligonucleotide for detection of SNP TSC0023145
gtggttaggtgtt

SEQ ID NO: 92578 - DNA, 13 bp, Artificial Sequence
  Oligonucleotide for detection of SNP TSC0023145
aacacctaaccac

SEQ ID NO: 92579 - DNA, 13 bp, Artificial Sequence
  Oligonucleotide for detection of SNP TSC0023145
gtggtcgggtgtt

SEQ ID NO: 92580 - DNA, 13 bp, Artificial Sequence
  Oligonucleotide for detection of SNP TSC0023145
aacacccgaccac

SEQ ID NO: 92581 - DNA, 13 bp, Artificial Sequence
  Oligonucleotide for detection of SNP TSC0023146
tagtttgggtaay

SEQ ID NO: 92582 - DNA, 13 bp, Artificial Sequence
  Oligonucleotide for detection of SNP TSC0023146
rttacccaaacta

SEQ ID NO: 92583 - DNA, 13 bp, Artificial Sequence
  Oligonucleotide for detection of SNP TSC0023146
tagtttaggtaay

SEQ ID NO: 92584 - DNA, 13 bp, Artificial Sequence
  Oligonucleotide for detection of SNP TSC0023146
rttacctaaacta

SEQ ID NO: 92585 - DNA, 13 bp, Artificial Sequence
  Oligonucleotide for detection of SNP TSC0023147
gagtgagtgaagg

SEQ ID NO: 92586 - DNA, 13 bp, Artificial Sequence
  Oligonucleotide for detection of SNP TSC0023147
ccttcactcactc

SEQ ID NO: 92587 - DNA, 13 bp, Artificial Sequence
  Oligonucleotide for detection of SNP TSC0023147
gagtgaatgaagg

SEQ ID NO: 92588 - DNA, 13 bp, Artificial Sequence
  Oligonucleotide for detection of SNP TSC0023147
ccttcattcactc

SEQ ID NO: 92589 - DNA, 13 bp, Artificial Sequence
  Oligonucleotide for detection of SNP TSC0023147
gagcgagtgaagg

SEQ ID NO: 92590 - DNA, 13 bp, Artificial Sequence
  Oligonucleotide for detection of SNP TSC0023147
ccttcactcgctc

SEQ ID NO: 92591 - DNA, 13 bp, Artificial Sequence
  Oligonucleotide for detection of SNP TSC0023147
gagcgaatgaagg

SEQ ID NO: 92592 - DNA, 13 bp, Artificial Sequence
  Oligonucleotide for detection of SNP TSC0023147
ccttcattcgctc

SEQ ID NO: 92593 - DNA, 13 bp, Artificial Sequence
  Oligonucleotide for detection of SNP TSC0023148
gtaattgtgagga

SEQ ID NO: 92594 - DNA, 13 bp, Artificial Sequence
  Oligonucleotide for detection of SNP TSC0023148
tcctcacaattac

SEQ ID NO: 92595 - DNA, 13 bp, Artificial Sequence
  Oligonucleotide for detection of SNP TSC0023148
gtaattatgagga

SEQ ID NO: 92596 - DNA, 13 bp, Artificial Sequence
  Oligonucleotide for detection of SNP TSC0023148
tcctcataattac

SEQ ID NO: 92597 - DNA, 13 bp, Artificial Sequence
  Oligonucleotide for detection of SNP TSC0023149
ttattgggtagtg

SEQ ID NO: 92598 - DNA, 13 bp, Artificial Sequence
  Oligonucleotide for detection of SNP TSC0023149
cactacccaataa

SEQ ID NO: 92599 - DNA, 13 bp, Artificial Sequence
  Oligonucleotide for detection of SNP TSC0023149
ttattgtgtagtg

SEQ ID NO: 92600 - DNA, 13 bp, Artificial Sequence
  Oligonucleotide for detection of SNP TSC0023149
cactacacaataa

SEQ ID NO: 92601 - DNA, 13 bp, Artificial Sequence
  Oligonucleotide for detection of SNP TSC0023149
tattgtttagtaa

SEQ ID NO: 92602 - DNA, 13 bp, Artificial Sequence
  Oligonucleotide for detection of SNP TSC0023149
ttactaaacaata

SEQ ID NO: 92603 - DNA, 13 bp, Artificial Sequence
  Oligonucleotide for detection of SNP TSC0023149
tattgtatagtaa

SEQ ID NO: 92604 - DNA, 13 bp, Artificial Sequence
  Oligonucleotide for detection of SNP TSC0023149
ttactatacaata

SEQ ID NO: 92605 - DNA, 13 bp, Artificial Sequence
  Oligonucleotide for detection of SNP TSC0023152
tagtaaatttaat

SEQ ID NO: 92606 - DNA, 13 bp, Artificial Sequence
  Oligonucleotide for detection of SNP TSC0023152
attaaatttacta

SEQ ID NO: 92607 - DNA, 13 bp, Artificial Sequence
  Oligonucleotide for detection of SNP TSC0023152
tagtaagtttaat

SEQ ID NO: 92608 - DNA, 13 bp, Artificial Sequence
  Oligonucleotide for detection of SNP TSC0023152
attaaacttacta

SEQ ID NO: 92609 - DNA, 13 bp, Artificial Sequence
  Oligonucleotide for detection of SNP TSC0023153
gagggaaagaagy

SEQ ID NO: 92610 - DNA, 13 bp, Artificial Sequence
  Oligonucleotide for detection of SNP TSC0023153
rcttctttccctc

SEQ ID NO: 92611 - DNA, 13 bp, Artificial Sequence
  Oligonucleotide for detection of SNP TSC0023153
gagggagagaagy

SEQ ID NO: 92612 - DNA, 13 bp, Artificial Sequence
  Oligonucleotide for detection of SNP TSC0023153
rcttctctccctc

SEQ ID NO: 92613 - DNA, 13 bp, Artificial Sequence
  Oligonucleotide for detection of SNP TSC0023154
tattaggtattta

SEQ ID NO: 92614 - DNA, 13 bp, Artificial Sequence
  Oligonucleotide for detection of SNP TSC0023154
taaatacctaata

SEQ ID NO: 92615 - DNA, 13 bp, Artificial Sequence
  Oligonucleotide for detection of SNP TSC0023154
tattagttattta

SEQ ID NO: 92616 - DNA, 13 bp, Artificial Sequence
  Oligonucleotide for detection of SNP TSC0023154
taaataactaata

SEQ ID NO: 92617 - DNA, 13 bp, Artificial Sequence
  Oligonucleotide for detection of SNP TSC0023154
tgggtatttggta

SEQ ID NO: 92618 - DNA, 13 bp, Artificial Sequence
  Oligonucleotide for detection of SNP TSC0023154
taccaaataccca

SEQ ID NO: 92619 - DNA, 13 bp, Artificial Sequence
  Oligonucleotide for detection of SNP TSC0023154
tgggtaattggta

SEQ ID NO: 92620 - DNA, 13 bp, Artificial Sequence
  Oligonucleotide for detection of SNP TSC0023154
taccaattaccca

SEQ ID NO: 92621 - DNA, 13 bp, Artificial Sequence
  Oligonucleotide for detection of SNP TSC0023156
taaagatggagaa

SEQ ID NO: 92622 - DNA, 13 bp, Artificial Sequence
  Oligonucleotide for detection of SNP TSC0023156
ttctccatcttta

SEQ ID NO: 92623 - DNA, 13 bp, Artificial Sequence
  Oligonucleotide for detection of SNP TSC0023156
taaagacggagaa

SEQ ID NO: 92624 - DNA, 13 bp, Artificial Sequence
  Oligonucleotide for detection of SNP TSC0023156
ttctccgtcttta

SEQ ID NO: 92625 - DNA, 13 bp, Artificial Sequence
  Oligonucleotide for detection of SNP TSC0023160
ataaattttttgt

SEQ ID NO: 92626 - DNA, 13 bp, Artificial Sequence
  Oligonucleotide for detection of SNP TSC0023160
acaaaaaatttat

SEQ ID NO: 92627 - DNA, 13 bp, Artificial Sequence
  Oligonucleotide for detection of SNP TSC0023160
ataaatgttttgt

SEQ ID NO: 92628 - DNA, 13 bp, Artificial Sequence
  Oligonucleotide for detection of SNP TSC0023160
acaaaacatttat

SEQ ID NO: 92629 - DNA, 13 bp, Artificial Sequence
  Oligonucleotide for detection of SNP TSC0023160
atagaagatttat

SEQ ID NO: 92630 - DNA, 13 bp, Artificial Sequence
  Oligonucleotide for detection of SNP TSC0023160
ataaatcttctat

SEQ ID NO: 92631 - DNA, 13 bp, Artificial Sequence
  Oligonucleotide for detection of SNP TSC0023160
atagaatatttat

SEQ ID NO: 92632 - DNA, 13 bp, Artificial Sequence
  Oligonucleotide for detection of SNP TSC0023160
ataaatattctat

SEQ ID NO: 92633 - DNA, 13 bp, Artificial Sequence
  Oligonucleotide for detection of SNP TSC0023163
tttttattagaga

SEQ ID NO: 92634 - DNA, 13 bp, Artificial Sequence
  Oligonucleotide for detection of SNP TSC0023163
tctctaataaaaa

SEQ ID NO: 92635 - DNA, 13 bp, Artificial Sequence
  Oligonucleotide for detection of SNP TSC0023164
tgtaaattggatt

SEQ ID NO: 92636 - DNA, 13 bp, Artificial Sequence
  Oligonucleotide for detection of SNP TSC0023164
aatccaatttaca

SEQ ID NO: 92637 - DNA, 13 bp, Artificial Sequence
  Oligonucleotide for detection of SNP TSC0023164
tgtaaagtggatt

SEQ ID NO: 92638 - DNA, 13 bp, Artificial Sequence
  Oligonucleotide for detection of SNP TSC0023164
aatccactttaca

SEQ ID NO: 92639 - DNA, 13 bp, Artificial Sequence
  Oligonucleotide for detection of SNP TSC0023164
aatttattttata

SEQ ID NO: 92640 - DNA, 13 bp, Artificial Sequence
  Oligonucleotide for detection of SNP TSC0023164
tataaaataaatt

SEQ ID NO: 92641 - DNA, 13 bp, Artificial Sequence
  Oligonucleotide for detection of SNP TSC0023165
ttgagtgtgtata

SEQ ID NO: 92642 - DNA, 13 bp, Artificial Sequence
  Oligonucleotide for detection of SNP TSC0023165
tatacacactcaa

SEQ ID NO: 92643 - DNA, 13 bp, Artificial Sequence
  Oligonucleotide for detection of SNP TSC0023165
ttgagtatgtata

SEQ ID NO: 92644 - DNA, 13 bp, Artificial Sequence
  Oligonucleotide for detection of SNP TSC0023165
tatacatactcaa

SEQ ID NO: 92645 - DNA, 13 bp, Artificial Sequence
  Oligonucleotide for detection of SNP TSC0023166
tagaggaattttt

SEQ ID NO: 92646 - DNA, 13 bp, Artificial Sequence
  Oligonucleotide for detection of SNP TSC0023166
aaaaattcctcta

SEQ ID NO: 92647 - DNA, 13 bp, Artificial Sequence
  Oligonucleotide for detection of SNP TSC0023166
tagagggattttt

SEQ ID NO: 92648 - DNA, 13 bp, Artificial Sequence
  Oligonucleotide for detection of SNP TSC0023166
aaaaatccctcta

SEQ ID NO: 92649 - DNA, 13 bp, Artificial Sequence
  Oligonucleotide for detection of SNP TSC0023167
agatttgaggtta

SEQ ID NO: 92650 - DNA, 13 bp, Artificial Sequence
  Oligonucleotide for detection of SNP TSC0023167
taacctcaaatct

SEQ ID NO: 92651 - DNA, 13 bp, Artificial Sequence
  Oligonucleotide for detection of SNP TSC0023167
agatttaaggtta

SEQ ID NO: 92652 - DNA, 13 bp, Artificial Sequence
  Oligonucleotide for detection of SNP TSC0023167
taaccttaaatct

SEQ ID NO: 92653 - DNA, 13 bp, Artificial Sequence
  Oligonucleotide for detection of SNP TSC0023167
agattcgaggtta

SEQ ID NO: 92654 - DNA, 13 bp, Artificial Sequence
  Oligonucleotide for detection of SNP TSC0023167
taacctcgaatct

SEQ ID NO: 92655 - DNA, 13 bp, Artificial Sequence
  Oligonucleotide for detection of SNP TSC0023170
cgggagtttgagg

SEQ ID NO: 92656 - DNA, 13 bp, Artificial Sequence
  Oligonucleotide for detection of SNP TSC0023170
cctcaaactcccg

SEQ ID NO: 92657 - DNA, 13 bp, Artificial Sequence
  Oligonucleotide for detection of SNP TSC0023170
cgggaggttgagg

SEQ ID NO: 92658 - DNA, 13 bp, Artificial Sequence
  Oligonucleotide for detection of SNP TSC0023170
cctcaacctcccg

SEQ ID NO: 92659 - DNA, 13 bp, Artificial Sequence
  Oligonucleotide for detection of SNP TSC0023170
ttttaggttttcg

SEQ ID NO: 92660 - DNA, 13 bp, Artificial Sequence
  Oligonucleotide for detection of SNP TSC0023170
cgaaaacctaaaa

SEQ ID NO: 92661 - DNA, 13 bp, Artificial Sequence
  Oligonucleotide for detection of SNP TSC0023170
ttttagtttttcg

SEQ ID NO: 92662 - DNA, 13 bp, Artificial Sequence
  Oligonucleotide for detection of SNP TSC0023170
cgaaaaactaaaa

SEQ ID NO: 92663 - DNA, 13 bp, Artificial Sequence
  Oligonucleotide for detection of SNP TSC0023171
ttttaggatatag

SEQ ID NO: 92664 - DNA, 13 bp, Artificial Sequence
  Oligonucleotide for detection of SNP TSC0023171
ctatatcctaaaa

SEQ ID NO: 92665 - DNA, 13 bp, Artificial Sequence
  Oligonucleotide for detection of SNP TSC0023171
ttttagaatatag

SEQ ID NO: 92666 - DNA, 13 bp, Artificial Sequence
  Oligonucleotide for detection of SNP TSC0023171
ctatattctaaaa

SEQ ID NO: 92667 - DNA, 13 bp, Artificial Sequence
  Oligonucleotide for detection of SNP TSC0023173
ggggtttgtgtgg

SEQ ID NO: 92668 - DNA, 13 bp, Artificial Sequence
  Oligonucleotide for detection of SNP TSC0023173
ccacacaaacccc

SEQ ID NO: 92669 - DNA, 13 bp, Artificial Sequence
  Oligonucleotide for detection of SNP TSC0023173
ggggttcgtgtgg

SEQ ID NO: 92670 - DNA, 13 bp, Artificial Sequence
  Oligonucleotide for detection of SNP TSC0023173
ccacacgaacccc

SEQ ID NO: 92671 - DNA, 13 bp, Artificial Sequence
  Oligonucleotide for detection of SNP TSC0023173
ttatatgagttty

SEQ ID NO: 92672 - DNA, 13 bp, Artificial Sequence
  Oligonucleotide for detection of SNP TSC0023173
raaactcatataa

SEQ ID NO: 92673 - DNA, 13 bp, Artificial Sequence
  Oligonucleotide for detection of SNP TSC0023173
ttatataagttty

SEQ ID NO: 92674 - DNA, 13 bp, Artificial Sequence
  Oligonucleotide for detection of SNP TSC0023173
raaacttatataa

SEQ ID NO: 92675 - DNA, 13 bp, Artificial Sequence
  Oligonucleotide for detection of SNP TSC0023173
ttatacgagttty

SEQ ID NO: 92676 - DNA, 13 bp, Artificial Sequence
  Oligonucleotide for detection of SNP TSC0023173
raaactcgtataa

SEQ ID NO: 92677 - DNA, 13 bp, Artificial Sequence
  Oligonucleotide for detection of SNP TSC0023174
tgtagtattgaaa

SEQ ID NO: 92678 - DNA, 13 bp, Artificial Sequence
  Oligonucleotide for detection of SNP TSC0023174
tttcaatactaca

SEQ ID NO: 92679 - DNA, 13 bp, Artificial Sequence
  Oligonucleotide for detection of SNP TSC0023174
tgtagtgttgaaa

SEQ ID NO: 92680 - DNA, 13 bp, Artificial Sequence
  Oligonucleotide for detection of SNP TSC0023174
tttcaacactaca

SEQ ID NO: 92681 - DNA, 13 bp, Artificial Sequence
  Oligonucleotide for detection of SNP TSC0023175
ttaagggttaaag

SEQ ID NO: 92682 - DNA, 13 bp, Artificial Sequence
  Oligonucleotide for detection of SNP TSC0023175
ctttaacccttaa

SEQ ID NO: 92683 - DNA, 13 bp, Artificial Sequence
  Oligonucleotide for detection of SNP TSC0023175
ttaaggattaaag

SEQ ID NO: 92684 - DNA, 13 bp, Artificial Sequence
  Oligonucleotide for detection of SNP TSC0023175
ctttaatccttaa

SEQ ID NO: 92685 - DNA, 13 bp, Artificial Sequence
  Oligonucleotide for detection of SNP TSC0023176
gtattttgggtaa

SEQ ID NO: 92686 - DNA, 13 bp, Artificial Sequence
  Oligonucleotide for detection of SNP TSC0023176
ttacccaaaatac

SEQ ID NO: 92687 - DNA, 13 bp, Artificial Sequence
  Oligonucleotide for detection of SNP TSC0023176
gtatttcgggtaa

SEQ ID NO: 92688 - DNA, 13 bp, Artificial Sequence
  Oligonucleotide for detection of SNP TSC0023176
ttacccgaaatac

SEQ ID NO: 92689 - DNA, 13 bp, Artificial Sequence
  Oligonucleotide for detection of SNP TSC0023176
ttgtttggagtay

SEQ ID NO: 92690 - DNA, 13 bp, Artificial Sequence
  Oligonucleotide for detection of SNP TSC0023176
rtactccaaacaa

SEQ ID NO: 92691 - DNA, 13 bp, Artificial Sequence
  Oligonucleotide for detection of SNP TSC0023176
ttgtttagagtay

SEQ ID NO: 92692 - DNA, 13 bp, Artificial Sequence
  Oligonucleotide for detection of SNP TSC0023176
rtactctaaacaa

SEQ ID NO: 92693 - DNA, 13 bp, Artificial Sequence
  Oligonucleotide for detection of SNP TSC0023176
ttgttcggagtay

SEQ ID NO: 92694 - DNA, 13 bp, Artificial Sequence
  Oligonucleotide for detection of SNP TSC0023176
rtactccgaacaa

SEQ ID NO: 92695 - DNA, 13 bp, Artificial Sequence
  Oligonucleotide for detection of SNP TSC0023177
tttgttgtattgy

SEQ ID NO: 92696 - DNA, 13 bp, Artificial Sequence
  Oligonucleotide for detection of SNP TSC0023177
rcaatacaacaaa

SEQ ID NO: 92697 - DNA, 13 bp, Artificial Sequence
  Oligonucleotide for detection of SNP TSC0023177
tttgtcgtattgy

SEQ ID NO: 92698 - DNA, 13 bp, Artificial Sequence
  Oligonucleotide for detection of SNP TSC0023177
rcaatacgacaaa

SEQ ID NO: 92699 - DNA, 13 bp, Artificial Sequence
  Oligonucleotide for detection of SNP TSC0023177
gtagtgcggtagg

SEQ ID NO: 92700 - DNA, 13 bp, Artificial Sequence
  Oligonucleotide for detection of SNP TSC0023177
cctaccgcactac

SEQ ID NO: 92701 - DNA, 13 bp, Artificial Sequence
  Oligonucleotide for detection of SNP TSC0023179
aggtttagtgagg

SEQ ID NO: 92702 - DNA, 13 bp, Artificial Sequence
  Oligonucleotide for detection of SNP TSC0023179
cctcactaaacct

SEQ ID NO: 92703 - DNA, 13 bp, Artificial Sequence
  Oligonucleotide for detection of SNP TSC0023179
aggtttggtgagg

SEQ ID NO: 92704 - DNA, 13 bp, Artificial Sequence
  Oligonucleotide for detection of SNP TSC0023179
cctcaccaaacct

SEQ ID NO: 92705 - DNA, 13 bp, Artificial Sequence
  Oligonucleotide for detection of SNP TSC0023179
aggttcggtgagg

SEQ ID NO: 92706 - DNA, 13 bp, Artificial Sequence
  Oligonucleotide for detection of SNP TSC0023179
cctcaccgaacct

SEQ ID NO: 92707 - DNA, 13 bp, Artificial Sequence
  Oligonucleotide for detection of SNP TSC0023180
tattatatatatg

SEQ ID NO: 92708 - DNA, 13 bp, Artificial Sequence
  Oligonucleotide for detection of SNP TSC0023180
catatatataata

SEQ ID NO: 92709 - DNA, 13 bp, Artificial Sequence
  Oligonucleotide for detection of SNP TSC0023180
tattatgtatatg

SEQ ID NO: 92710 - DNA, 13 bp, Artificial Sequence
  Oligonucleotide for detection of SNP TSC0023180
catatacataata

SEQ ID NO: 92711 - DNA, 13 bp, Artificial Sequence
  Oligonucleotide for detection of SNP TSC0023180
tattacgtatatg

SEQ ID NO: 92712 - DNA, 13 bp, Artificial Sequence
  Oligonucleotide for detection of SNP TSC0023180
catatacgtaata

SEQ ID NO: 92713 - DNA, 13 bp, Artificial Sequence
  Oligonucleotide for detection of SNP TSC0023180
tatatatgtaata

SEQ ID NO: 92714 - DNA, 13 bp, Artificial Sequence
  Oligonucleotide for detection of SNP TSC0023180
tattacatatata

SEQ ID NO: 92715 - DNA, 13 bp, Artificial Sequence
  Oligonucleotide for detection of SNP TSC0023180
tatatacgtaata

SEQ ID NO: 92716 - DNA, 13 bp, Artificial Sequence
  Oligonucleotide for detection of SNP TSC0023180
tattacgtatata

SEQ ID NO: 92717 - DNA, 13 bp, Artificial Sequence
  Oligonucleotide for detection of SNP TSC0023181
atatataatattt

SEQ ID NO: 92718 - DNA, 13 bp, Artificial Sequence
  Oligonucleotide for detection of SNP TSC0023181
aaatattatatat

SEQ ID NO: 92719 - DNA, 13 bp, Artificial Sequence
  Oligonucleotide for detection of SNP TSC0023181
atatatgatattt

SEQ ID NO: 92720 - DNA, 13 bp, Artificial Sequence
  Oligonucleotide for detection of SNP TSC0023181
aaatatcatatat

SEQ ID NO: 92721 - DNA, 13 bp, Artificial Sequence
  Oligonucleotide for detection of SNP TSC0023182
ttataggtaggta

SEQ ID NO: 92722 - DNA, 13 bp, Artificial Sequence
  Oligonucleotide for detection of SNP TSC0023182
tacctacctataa

SEQ ID NO: 92723 - DNA, 13 bp, Artificial Sequence
  Oligonucleotide for detection of SNP TSC0023182
ttatagataggta

SEQ ID NO: 92724 - DNA, 13 bp, Artificial Sequence
  Oligonucleotide for detection of SNP TSC0023182
tacctatctataa

SEQ ID NO: 92725 - DNA, 13 bp, Artificial Sequence
  Oligonucleotide for detection of SNP TSC0023183
aggaatgtttaag

SEQ ID NO: 92726 - DNA, 13 bp, Artificial Sequence
  Oligonucleotide for detection of SNP TSC0023183
cttaaacattcct

SEQ ID NO: 92727 - DNA, 13 bp, Artificial Sequence
  Oligonucleotide for detection of SNP TSC0023183
aggaatatttaag

SEQ ID NO: 92728 - DNA, 13 bp, Artificial Sequence
  Oligonucleotide for detection of SNP TSC0023183
cttaaatattcct

SEQ ID NO: 92729 - DNA, 13 bp, Artificial Sequence
  Oligonucleotide for detection of SNP TSC0023185
gatttggtgggat

SEQ ID NO: 92730 - DNA, 13 bp, Artificial Sequence
  Oligonucleotide for detection of SNP TSC0023185
atcccaccaaatc

SEQ ID NO: 92731 - DNA, 13 bp, Artificial Sequence
  Oligonucleotide for detection of SNP TSC0023185
gatttgttgggat

SEQ ID NO: 92732 - DNA, 13 bp, Artificial Sequence
  Oligonucleotide for detection of SNP TSC0023185
atcccaacaaatc

SEQ ID NO: 92733 - DNA, 13 bp, Artificial Sequence
  Oligonucleotide for detection of SNP TSC0023185
attttattaagty

SEQ ID NO: 92734 - DNA, 13 bp, Artificial Sequence
  Oligonucleotide for detection of SNP TSC0023185
racttaataaaat

SEQ ID NO: 92735 - DNA, 13 bp, Artificial Sequence
  Oligonucleotide for detection of SNP TSC0023185
attttaataagty

SEQ ID NO: 92736 - DNA, 13 bp, Artificial Sequence
  Oligonucleotide for detection of SNP TSC0023185
racttattaaaat

SEQ ID NO: 92737 - DNA, 13 bp, Artificial Sequence
  Oligonucleotide for detection of SNP TSC0023187
ttattatgagtta

SEQ ID NO: 92738 - DNA, 13 bp, Artificial Sequence
  Oligonucleotide for detection of SNP TSC0023187
taactcataataa

SEQ ID NO: 92739 - DNA, 13 bp, Artificial Sequence
  Oligonucleotide for detection of SNP TSC0023187
ttattacgagtta

SEQ ID NO: 92740 - DNA, 13 bp, Artificial Sequence
  Oligonucleotide for detection of SNP TSC0023187
taactcgtaataa

SEQ ID NO: 92741 - DNA, 13 bp, Artificial Sequence
  Oligonucleotide for detection of SNP TSC0023187
tggtttgtagtaa

SEQ ID NO: 92742 - DNA, 13 bp, Artificial Sequence
  Oligonucleotide for detection of SNP TSC0023187
ttactacaaacca

SEQ ID NO: 92743 - DNA, 13 bp, Artificial Sequence
  Oligonucleotide for detection of SNP TSC0023187
tggtttatagtaa

SEQ ID NO: 92744 - DNA, 13 bp, Artificial Sequence
  Oligonucleotide for detection of SNP TSC0023187
ttactataaacca

SEQ ID NO: 92745 - DNA, 13 bp, Artificial Sequence
  Oligonucleotide for detection of SNP TSC0023187
tggttcgtagtaa

SEQ ID NO: 92746 - DNA, 13 bp, Artificial Sequence
  Oligonucleotide for detection of SNP TSC0023187
ttactacgaacca

SEQ ID NO: 92747 - DNA, 13 bp, Artificial Sequence
  Oligonucleotide for detection of SNP TSC0023189
tttatgggtttta

SEQ ID NO: 92748 - DNA, 13 bp, Artificial Sequence
  Oligonucleotide for detection of SNP TSC0023189
taaaacccataaa

SEQ ID NO: 92749 - DNA, 13 bp, Artificial Sequence
  Oligonucleotide for detection of SNP TSC0023189
tttatgagtttta

SEQ ID NO: 92750 - DNA, 13 bp, Artificial Sequence
  Oligonucleotide for detection of SNP TSC0023189
taaaactcataaa

SEQ ID NO: 92751 - DNA, 13 bp, Artificial Sequence
  Oligonucleotide for detection of SNP TSC0023190
ttttaaaaagaat

SEQ ID NO: 92752 - DNA, 13 bp, Artificial Sequence
  Oligonucleotide for detection of SNP TSC0023190
attctttttaaaa

SEQ ID NO: 92753 - DNA, 13 bp, Artificial Sequence
  Oligonucleotide for detection of SNP TSC0023190
ttttaataagaat

SEQ ID NO: 92754 - DNA, 13 bp, Artificial Sequence
  Oligonucleotide for detection of SNP TSC0023190
attcttattaaaa

SEQ ID NO: 92755 - DNA, 13 bp, Artificial Sequence
  Oligonucleotide for detection of SNP TSC0023190
attttttttaaaa

SEQ ID NO: 92756 - DNA, 13 bp, Artificial Sequence
  Oligonucleotide for detection of SNP TSC0023190
ttttaaaaaaaat

SEQ ID NO: 92757 - DNA, 13 bp, Artificial Sequence
  Oligonucleotide for detection of SNP TSC0023196
ttttttaaggggg

SEQ ID NO: 92758 - DNA, 13 bp, Artificial Sequence
  Oligonucleotide for detection of SNP TSC0023196
cccccttaaaaaa

SEQ ID NO: 92759 - DNA, 13 bp, Artificial Sequence
  Oligonucleotide for detection of SNP TSC0023196
tttttttaggggg

SEQ ID NO: 92760 - DNA, 13 bp, Artificial Sequence
  Oligonucleotide for detection of SNP TSC0023196
ccccctaaaaaaa

SEQ ID NO: 92761 - DNA, 13 bp, Artificial Sequence
  Oligonucleotide for detection of SNP TSC0023196
tttttttggaaaa

SEQ ID NO: 92762 - DNA, 13 bp, Artificial Sequence
  Oligonucleotide for detection of SNP TSC0023196
ttttccaaaaaaa

SEQ ID NO: 92763 - DNA, 13 bp, Artificial Sequence
  Oligonucleotide for detection of SNP TSC0023196
ttttttgggaaaa

SEQ ID NO: 92764 - DNA, 13 bp, Artificial Sequence
  Oligonucleotide for detection of SNP TSC0023196
ttttcccaaaaaa

SEQ ID NO: 92765 - DNA, 13 bp, Artificial Sequence
  Oligonucleotide for detection of SNP TSC0023197
aagtttgtaaagy

SEQ ID NO: 92766 - DNA, 13 bp, Artificial Sequence
  Oligonucleotide for detection of SNP TSC0023197
rctttacaaactt

SEQ ID NO: 92767 - DNA, 13 bp, Artificial Sequence
  Oligonucleotide for detection of SNP TSC0023197
aagtttataaagy

SEQ ID NO: 92768 - DNA, 13 bp, Artificial Sequence
  Oligonucleotide for detection of SNP TSC0023197
rctttataaactt

SEQ ID NO: 92769 - DNA, 13 bp, Artificial Sequence
  Oligonucleotide for detection of SNP TSC0023198
taaataattaata

SEQ ID NO: 92770 - DNA, 13 bp, Artificial Sequence
  Oligonucleotide for detection of SNP TSC0023198
tattaattattta

SEQ ID NO: 92771 - DNA, 13 bp, Artificial Sequence
  Oligonucleotide for detection of SNP TSC0023198
taaatagttaata

SEQ ID NO: 92772 - DNA, 13 bp, Artificial Sequence
  Oligonucleotide for detection of SNP TSC0023198
tattaactattta

SEQ ID NO: 92773 - DNA, 13 bp, Artificial Sequence
  Oligonucleotide for detection of SNP TSC0023199
tatgttggtttty

SEQ ID NO: 92774 - DNA, 13 bp, Artificial Sequence
  Oligonucleotide for detection of SNP TSC0023199
raaaaccaacata

SEQ ID NO: 92775 - DNA, 13 bp, Artificial Sequence
  Oligonucleotide for detection of SNP TSC0023200
agtagtaatagat

SEQ ID NO: 92776 - DNA, 13 bp, Artificial Sequence
  Oligonucleotide for detection of SNP TSC0023200
atctattactact

SEQ ID NO: 92777 - DNA, 13 bp, Artificial Sequence
  Oligonucleotide for detection of SNP TSC0023200
agtagtgatagat

SEQ ID NO: 92778 - DNA, 13 bp, Artificial Sequence
  Oligonucleotide for detection of SNP TSC0023200
atctatcactact

SEQ ID NO: 92779 - DNA, 13 bp, Artificial Sequence
  Oligonucleotide for detection of SNP TSC0023204
gtagttaaggtta

SEQ ID NO: 92780 - DNA, 13 bp, Artificial Sequence
  Oligonucleotide for detection of SNP TSC0023204
taaccttaactac

SEQ ID NO: 92781 - DNA, 13 bp, Artificial Sequence
  Oligonucleotide for detection of SNP TSC0023204
gtagtttaggtta

SEQ ID NO: 92782 - DNA, 13 bp, Artificial Sequence
  Oligonucleotide for detection of SNP TSC0023204
taacctaaactac

SEQ ID NO: 92783 - DNA, 13 bp, Artificial Sequence
  Oligonucleotide for detection of SNP TSC0023204
tagttttgattgy

SEQ ID NO: 92784 - DNA, 13 bp, Artificial Sequence
  Oligonucleotide for detection of SNP TSC0023204
rcaatcaaaacta

SEQ ID NO: 92785 - DNA, 13 bp, Artificial Sequence
  Oligonucleotide for detection of SNP TSC0023204
tagtttagattgy

SEQ ID NO: 92786 - DNA, 13 bp, Artificial Sequence
  Oligonucleotide for detection of SNP TSC0023204
rcaatctaaacta

SEQ ID NO: 92787 - DNA, 13 bp, Artificial Sequence
  Oligonucleotide for detection of SNP TSC0023206
ttgttgtggaaaa

SEQ ID NO: 92788 - DNA, 13 bp, Artificial Sequence
  Oligonucleotide for detection of SNP TSC0023206
ttttccacaacaa

SEQ ID NO: 92789 - DNA, 13 bp, Artificial Sequence
  Oligonucleotide for detection of SNP TSC0023206
ttgttgcggaaaa

SEQ ID NO: 92790 - DNA, 13 bp, Artificial Sequence
  Oligonucleotide for detection of SNP TSC0023206
ttttccgcaacaa

SEQ ID NO: 92791 - DNA, 13 bp, Artificial Sequence
  Oligonucleotide for detection of SNP TSC0023206
ttttttataataa

SEQ ID NO: 92792 - DNA, 13 bp, Artificial Sequence
  Oligonucleotide for detection of SNP TSC0023206
ttattataaaaaa

SEQ ID NO: 92793 - DNA, 13 bp, Artificial Sequence
  Oligonucleotide for detection of SNP TSC0023209
ggtgttttttaga

SEQ ID NO: 92794 - DNA, 13 bp, Artificial Sequence
  Oligonucleotide for detection of SNP TSC0023209
tctaaaaaacacc

SEQ ID NO: 92795 - DNA, 13 bp, Artificial Sequence
  Oligonucleotide for detection of SNP TSC0023209
ggtgttgtttaga

SEQ ID NO: 92796 - DNA, 13 bp, Artificial Sequence
  Oligonucleotide for detection of SNP TSC0023209
tctaaacaacacc

SEQ ID NO: 92797 - DNA, 13 bp, Artificial Sequence
  Oligonucleotide for detection of SNP TSC0023209
ggtgtcgtttaga

SEQ ID NO: 92798 - DNA, 13 bp, Artificial Sequence
  Oligonucleotide for detection of SNP TSC0023209
tctaaacgacacc

SEQ ID NO: 92799 - DNA, 13 bp, Artificial Sequence
  Oligonucleotide for detection of SNP TSC0023209
tttggggggtaty

SEQ ID NO: 92800 - DNA, 13 bp, Artificial Sequence
  Oligonucleotide for detection of SNP TSC0023209
rataccccccaaa

SEQ ID NO: 92801 - DNA, 13 bp, Artificial Sequence
  Oligonucleotide for detection of SNP TSC0023209
tttgggtggtaty

SEQ ID NO: 92802 - DNA, 13 bp, Artificial Sequence
  Oligonucleotide for detection of SNP TSC0023209
rataccacccaaa

SEQ ID NO: 92803 - DNA, 13 bp, Artificial Sequence
  Oligonucleotide for detection of SNP TSC0023209
tttgggcggtaty

SEQ ID NO: 92804 - DNA, 13 bp, Artificial Sequence
  Oligonucleotide for detection of SNP TSC0023209
rataccgcccaaa

SEQ ID NO: 92805 - DNA, 13 bp, Artificial Sequence
  Oligonucleotide for detection of SNP TSC0023210
tttgtttgtatat

SEQ ID NO: 92806 - DNA, 13 bp, Artificial Sequence
  Oligonucleotide for detection of SNP TSC0023210
atatacaaacaaa

SEQ ID NO: 92807 - DNA, 13 bp, Artificial Sequence
  Oligonucleotide for detection of SNP TSC0023210
tttgttcgtatat

SEQ ID NO: 92808 - DNA, 13 bp, Artificial Sequence
  Oligonucleotide for detection of SNP TSC0023210
atatacgaacaaa

SEQ ID NO: 92809 - DNA, 13 bp, Artificial Sequence
  Oligonucleotide for detection of SNP TSC0023210
atatatgaataga

SEQ ID NO: 92810 - DNA, 13 bp, Artificial Sequence
  Oligonucleotide for detection of SNP TSC0023210
tctattcatatat

SEQ ID NO: 92811 - DNA, 13 bp, Artificial Sequence
  Oligonucleotide for detection of SNP TSC0023210
atatataaataga

SEQ ID NO: 92812 - DNA, 13 bp, Artificial Sequence
  Oligonucleotide for detection of SNP TSC0023210
tctatttatatat

SEQ ID NO: 92813 - DNA, 13 bp, Artificial Sequence
  Oligonucleotide for detection of SNP TSC0023210
atatacgaataga

SEQ ID NO: 92814 - DNA, 13 bp, Artificial Sequence
  Oligonucleotide for detection of SNP TSC0023210
tctattcgtatat

SEQ ID NO: 92815 - DNA, 13 bp, Artificial Sequence
  Oligonucleotide for detection of SNP TSC0023211
aggttttggaaga

SEQ ID NO: 92816 - DNA, 13 bp, Artificial Sequence
  Oligonucleotide for detection of SNP TSC0023211
tcttccaaaacct

SEQ ID NO: 92817 - DNA, 13 bp, Artificial Sequence
  Oligonucleotide for detection of SNP TSC0023211
aggtttcggaaga

SEQ ID NO: 92818 - DNA, 13 bp, Artificial Sequence
  Oligonucleotide for detection of SNP TSC0023211
tcttccgaaacct

SEQ ID NO: 92819 - DNA, 13 bp, Artificial Sequence
  Oligonucleotide for detection of SNP TSC0023211
ttttttagaattt

SEQ ID NO: 92820 - DNA, 13 bp, Artificial Sequence
  Oligonucleotide for detection of SNP TSC0023211
aaattctaaaaaa

SEQ ID NO: 92821 - DNA, 13 bp, Artificial Sequence
  Oligonucleotide for detection of SNP TSC0023211
tttttcggaattt

SEQ ID NO: 92822 - DNA, 13 bp, Artificial Sequence
  Oligonucleotide for detection of SNP TSC0023211
aaattccgaaaaa

SEQ ID NO: 92823 - DNA, 13 bp, Artificial Sequence
  Oligonucleotide for detection of SNP TSC0023212
ttttgggtatttt

SEQ ID NO: 92824 - DNA, 13 bp, Artificial Sequence
  Oligonucleotide for detection of SNP TSC0023212
aaaatacccaaaa

SEQ ID NO: 92825 - DNA, 13 bp, Artificial Sequence
  Oligonucleotide for detection of SNP TSC0023212
ttttggatatttt

SEQ ID NO: 92826 - DNA, 13 bp, Artificial Sequence
  Oligonucleotide for detection of SNP TSC0023212
aaaatatccaaaa

SEQ ID NO: 92827 - DNA, 13 bp, Artificial Sequence
  Oligonucleotide for detection of SNP TSC0023214
ttaatggggattt

SEQ ID NO: 92828 - DNA, 13 bp, Artificial Sequence
  Oligonucleotide for detection of SNP TSC0023214
aaatccccattaa

SEQ ID NO: 92829 - DNA, 13 bp, Artificial Sequence
  Oligonucleotide for detection of SNP TSC0023214
ttaatgaggattt

SEQ ID NO: 92830 - DNA, 13 bp, Artificial Sequence
  Oligonucleotide for detection of SNP TSC0023214
aaatcctcattaa

SEQ ID NO: 92831 - DNA, 13 bp, Artificial Sequence
  Oligonucleotide for detection of SNP TSC0023215
gggtaggagggtt

SEQ ID NO: 92832 - DNA, 13 bp, Artificial Sequence
  Oligonucleotide for detection of SNP TSC0023215
aaccctcctaccc

SEQ ID NO: 92833 - DNA, 13 bp, Artificial Sequence
  Oligonucleotide for detection of SNP TSC0023215
gggtagaagggtt

SEQ ID NO: 92834 - DNA, 13 bp, Artificial Sequence
  Oligonucleotide for detection of SNP TSC0023215
aacccttctaccc

SEQ ID NO: 92835 - DNA, 13 bp, Artificial Sequence
  Oligonucleotide for detection of SNP TSC0023216
tatgttgtaatty

SEQ ID NO: 92836 - DNA, 13 bp, Artificial Sequence
  Oligonucleotide for detection of SNP TSC0023216
raattacaacata

SEQ ID NO: 92837 - DNA, 13 bp, Artificial Sequence
  Oligonucleotide for detection of SNP TSC0023216
tatgttataatty

SEQ ID NO: 92838 - DNA, 13 bp, Artificial Sequence
  Oligonucleotide for detection of SNP TSC0023216
raattataacata

SEQ ID NO: 92839 - DNA, 13 bp, Artificial Sequence
  Oligonucleotide for detection of SNP TSC0023217
gtaggatgtaggy

SEQ ID NO: 92840 - DNA, 13 bp, Artificial Sequence
  Oligonucleotide for detection of SNP TSC0023217
rcctacatcctac

SEQ ID NO: 92841 - DNA, 13 bp, Artificial Sequence
  Oligonucleotide for detection of SNP TSC0023217
gtaggacgtaggy

SEQ ID NO: 92842 - DNA, 13 bp, Artificial Sequence
  Oligonucleotide for detection of SNP TSC0023217
rcctacgtcctac

SEQ ID NO: 92843 - DNA, 13 bp, Artificial Sequence
  Oligonucleotide for detection of SNP TSC0023218
attattaattaag

SEQ ID NO: 92844 - DNA, 13 bp, Artificial Sequence
  Oligonucleotide for detection of SNP TSC0023218
cttaattaataat

SEQ ID NO: 92845 - DNA, 13 bp, Artificial Sequence
  Oligonucleotide for detection of SNP TSC0023218
attatttattaag

SEQ ID NO: 92846 - DNA, 13 bp, Artificial Sequence
  Oligonucleotide for detection of SNP TSC0023218
cttaataaataat

SEQ ID NO: 92847 - DNA, 13 bp, Artificial Sequence
  Oligonucleotide for detection of SNP TSC0023218
tttgattaatgat

SEQ ID NO: 92848 - DNA, 13 bp, Artificial Sequence
  Oligonucleotide for detection of SNP TSC0023218
atcattaatcaaa

SEQ ID NO: 92849 - DNA, 13 bp, Artificial Sequence
  Oligonucleotide for detection of SNP TSC0023218
tttgatgaatgat

SEQ ID NO: 92850 - DNA, 13 bp, Artificial Sequence
  Oligonucleotide for detection of SNP TSC0023218
atcattcatcaaa

SEQ ID NO: 92851 - DNA, 13 bp, Artificial Sequence
  Oligonucleotide for detection of SNP TSC0023219
tttagatggggtt

SEQ ID NO: 92852 - DNA, 13 bp, Artificial Sequence
  Oligonucleotide for detection of SNP TSC0023219
aaccccatctaaa

SEQ ID NO: 92853 - DNA, 13 bp, Artificial Sequence
  Oligonucleotide for detection of SNP TSC0023219
tttagacggggtt

SEQ ID NO: 92854 - DNA, 13 bp, Artificial Sequence
  Oligonucleotide for detection of SNP TSC0023219
aaccccgtctaaa

SEQ ID NO: 92855 - DNA, 13 bp, Artificial Sequence
  Oligonucleotide for detection of SNP TSC0023219
aattttgtttggg

SEQ ID NO: 92856 - DNA, 13 bp, Artificial Sequence
  Oligonucleotide for detection of SNP TSC0023219
cccaaacaaaatt

SEQ ID NO: 92857 - DNA, 13 bp, Artificial Sequence
  Oligonucleotide for detection of SNP TSC0023219
aattttatttggg

SEQ ID NO: 92858 - DNA, 13 bp, Artificial Sequence
  Oligonucleotide for detection of SNP TSC0023219
cccaaataaaatt

SEQ ID NO: 92859 - DNA, 13 bp, Artificial Sequence
  Oligonucleotide for detection of SNP TSC0023219
aatttcgtttggg

SEQ ID NO: 92860 - DNA, 13 bp, Artificial Sequence
  Oligonucleotide for detection of SNP TSC0023219
cccaaacgaaatt

SEQ ID NO: 92861 - DNA, 13 bp, Artificial Sequence
  Oligonucleotide for detection of SNP TSC0023221
gggaaaattgtag

SEQ ID NO: 92862 - DNA, 13 bp, Artificial Sequence
  Oligonucleotide for detection of SNP TSC0023221
ctacaattttccc

SEQ ID NO: 92863 - DNA, 13 bp, Artificial Sequence
  Oligonucleotide for detection of SNP TSC0023221
gggaaatttgtag

SEQ ID NO: 92864 - DNA, 13 bp, Artificial Sequence
  Oligonucleotide for detection of SNP TSC0023221
ctacaaatttccc

SEQ ID NO: 92865 - DNA, 13 bp, Artificial Sequence
  Oligonucleotide for detection of SNP TSC0023221
ttgtagtttttty

SEQ ID NO: 92866 - DNA, 13 bp, Artificial Sequence
  Oligonucleotide for detection of SNP TSC0023221
raaaaaactacaa

SEQ ID NO: 92867 - DNA, 13 bp, Artificial Sequence
  Oligonucleotide for detection of SNP TSC0023221
ttgtagattttty

SEQ ID NO: 92868 - DNA, 13 bp, Artificial Sequence
  Oligonucleotide for detection of SNP TSC0023221
raaaaatctacaa

SEQ ID NO: 92869 - DNA, 13 bp, Artificial Sequence
  Oligonucleotide for detection of SNP TSC0023222
ttatttttaatty

SEQ ID NO: 92870 - DNA, 13 bp, Artificial Sequence
  Oligonucleotide for detection of SNP TSC0023222
raattaaaaataa

SEQ ID NO: 92871 - DNA, 13 bp, Artificial Sequence
  Oligonucleotide for detection of SNP TSC0023222
ttatttgtaatty

SEQ ID NO: 92872 - DNA, 13 bp, Artificial Sequence
  Oligonucleotide for detection of SNP TSC0023222
raattacaaataa

SEQ ID NO: 92873 - DNA, 13 bp, Artificial Sequence
  Oligonucleotide for detection of SNP TSC0023222
ttattcgtaatty

SEQ ID NO: 92874 - DNA, 13 bp, Artificial Sequence
  Oligonucleotide for detection of SNP TSC0023222
raattacgaataa

SEQ ID NO: 92875 - DNA, 13 bp, Artificial Sequence
  Oligonucleotide for detection of SNP TSC0023222
gggttgggggtaa

SEQ ID NO: 92876 - DNA, 13 bp, Artificial Sequence
  Oligonucleotide for detection of SNP TSC0023222
ttacccccaaccc

SEQ ID NO: 92877 - DNA, 13 bp, Artificial Sequence
  Oligonucleotide for detection of SNP TSC0023222
gggttgtgggtaa

SEQ ID NO: 92878 - DNA, 13 bp, Artificial Sequence
  Oligonucleotide for detection of SNP TSC0023222
ttacccacaaccc

SEQ ID NO: 92879 - DNA, 13 bp, Artificial Sequence
  Oligonucleotide for detection of SNP TSC0023222
gggttgcgggtaa

SEQ ID NO: 92880 - DNA, 13 bp, Artificial Sequence
  Oligonucleotide for detection of SNP TSC0023222
ttacccgcaaccc

SEQ ID NO: 92881 - DNA, 13 bp, Artificial Sequence
  Oligonucleotide for detection of SNP TSC0023223
tattttgttaaag

SEQ ID NO: 92882 - DNA, 13 bp, Artificial Sequence
  Oligonucleotide for detection of SNP TSC0023223
ctttaacaaaata

SEQ ID NO: 92883 - DNA, 13 bp, Artificial Sequence
  Oligonucleotide for detection of SNP TSC0023223
tatttttttaaag

SEQ ID NO: 92884 - DNA, 13 bp, Artificial Sequence
  Oligonucleotide for detection of SNP TSC0023223
ctttaaaaaaata

SEQ ID NO: 92885 - DNA, 13 bp, Artificial Sequence
  Oligonucleotide for detection of SNP TSC0023223
tatttcgttaaag

SEQ ID NO: 92886 - DNA, 13 bp, Artificial Sequence
  Oligonucleotide for detection of SNP TSC0023223
ctttaacgaaata

SEQ ID NO: 92887 - DNA, 13 bp, Artificial Sequence
  Oligonucleotide for detection of SNP TSC0023223
ttttggtgggatg

SEQ ID NO: 92888 - DNA, 13 bp, Artificial Sequence
  Oligonucleotide for detection of SNP TSC0023223
catcccaccaaaa

SEQ ID NO: 92889 - DNA, 13 bp, Artificial Sequence
  Oligonucleotide for detection of SNP TSC0023223
ttttggagggatg

SEQ ID NO: 92890 - DNA, 13 bp, Artificial Sequence
  Oligonucleotide for detection of SNP TSC0023223
catccctccaaaa

SEQ ID NO: 92891 - DNA, 13 bp, Artificial Sequence
  Oligonucleotide for detection of SNP TSC0023223
ttttggcgggatg

SEQ ID NO: 92892 - DNA, 13 bp, Artificial Sequence
  Oligonucleotide for detection of SNP TSC0023223
catcccgccaaaa

SEQ ID NO: 92893 - DNA, 13 bp, Artificial Sequence
  Oligonucleotide for detection of SNP TSC0023224
tgttggggagggg

SEQ ID NO: 92894 - DNA, 13 bp, Artificial Sequence
  Oligonucleotide for detection of SNP TSC0023224
cccctccccaaca

SEQ ID NO: 92895 - DNA, 13 bp, Artificial Sequence
  Oligonucleotide for detection of SNP TSC0023224
tgttggtgagggg

SEQ ID NO: 92896 - DNA, 13 bp, Artificial Sequence
  Oligonucleotide for detection of SNP TSC0023224
cccctcaccaaca

SEQ ID NO: 92897 - DNA, 13 bp, Artificial Sequence
  Oligonucleotide for detection of SNP TSC0023226
tttgtaattggat

SEQ ID NO: 92898 - DNA, 13 bp, Artificial Sequence
  Oligonucleotide for detection of SNP TSC0023226
atccaattacaaa

SEQ ID NO: 92899 - DNA, 13 bp, Artificial Sequence
  Oligonucleotide for detection of SNP TSC0023226
tttgtagttggat

SEQ ID NO: 92900 - DNA, 13 bp, Artificial Sequence
  Oligonucleotide for detection of SNP TSC0023226
atccaactacaaa

SEQ ID NO: 92901 - DNA, 13 bp, Artificial Sequence
  Oligonucleotide for detection of SNP TSC0023229
gggtaaattataa

SEQ ID NO: 92902 - DNA, 13 bp, Artificial Sequence
  Oligonucleotide for detection of SNP TSC0023229
ttataatttaccc

SEQ ID NO: 92903 - DNA, 13 bp, Artificial Sequence
  Oligonucleotide for detection of SNP TSC0023229
gggtaagttataa

SEQ ID NO: 92904 - DNA, 13 bp, Artificial Sequence
  Oligonucleotide for detection of SNP TSC0023229
ttataacttaccc

SEQ ID NO: 92905 - DNA, 13 bp, Artificial Sequence
  Oligonucleotide for detection of SNP TSC0023234
tattgtgttagga

SEQ ID NO: 92906 - DNA, 13 bp, Artificial Sequence
  Oligonucleotide for detection of SNP TSC0023234
tcctaacacaata

SEQ ID NO: 92907 - DNA, 13 bp, Artificial Sequence
  Oligonucleotide for detection of SNP TSC0023234
tattgttttagga

SEQ ID NO: 92908 - DNA, 13 bp, Artificial Sequence
  Oligonucleotide for detection of SNP TSC0023234
tcctaaaacaata

SEQ ID NO: 92909 - DNA, 13 bp, Artificial Sequence
  Oligonucleotide for detection of SNP TSC0023234
tatcgtgttagga

SEQ ID NO: 92910 - DNA, 13 bp, Artificial Sequence
  Oligonucleotide for detection of SNP TSC0023234
tcctaacacgata

SEQ ID NO: 92911 - DNA, 13 bp, Artificial Sequence
  Oligonucleotide for detection of SNP TSC0023234
tatcgttttagga

SEQ ID NO: 92912 - DNA, 13 bp, Artificial Sequence
  Oligonucleotide for detection of SNP TSC0023234
tcctaaaacgata

SEQ ID NO: 92913 - DNA, 13 bp, Artificial Sequence
  Oligonucleotide for detection of SNP TSC0023234
tattgcgttagga

SEQ ID NO: 92914 - DNA, 13 bp, Artificial Sequence
  Oligonucleotide for detection of SNP TSC0023234
tcctaacgcaata

SEQ ID NO: 92915 - DNA, 13 bp, Artificial Sequence
  Oligonucleotide for detection of SNP TSC0023234
tatcgcgttagga

SEQ ID NO: 92916 - DNA, 13 bp, Artificial Sequence
  Oligonucleotide for detection of SNP TSC0023234
tcctaacgcgata

SEQ ID NO: 92917 - DNA, 13 bp, Artificial Sequence
  Oligonucleotide for detection of SNP TSC0023234
ttttgatgtggtg

SEQ ID NO: 92918 - DNA, 13 bp, Artificial Sequence
  Oligonucleotide for detection of SNP TSC0023234
caccacatcaaaa

SEQ ID NO: 92919 - DNA, 13 bp, Artificial Sequence
  Oligonucleotide for detection of SNP TSC0023234
ttttgaagtggtg

SEQ ID NO: 92920 - DNA, 13 bp, Artificial Sequence
  Oligonucleotide for detection of SNP TSC0023234
caccacttcaaaa

SEQ ID NO: 92921 - DNA, 13 bp, Artificial Sequence
  Oligonucleotide for detection of SNP TSC0023234
ttttgacgtggtg

SEQ ID NO: 92922 - DNA, 13 bp, Artificial Sequence
  Oligonucleotide for detection of SNP TSC0023234
caccacgtcaaaa

SEQ ID NO: 92923 - DNA, 13 bp, Artificial Sequence
  Oligonucleotide for detection of SNP TSC0023234
ttttgaagcggtg

SEQ ID NO: 92924 - DNA, 13 bp, Artificial Sequence
  Oligonucleotide for detection of SNP TSC0023234
caccgcttcaaaa

SEQ ID NO: 92925 - DNA, 13 bp, Artificial Sequence
  Oligonucleotide for detection of SNP TSC0023234
ttttgatgcggtg

SEQ ID NO: 92926 - DNA, 13 bp, Artificial Sequence
  Oligonucleotide for detection of SNP TSC0023234
caccgcatcaaaa

SEQ ID NO: 92927 - DNA, 13 bp, Artificial Sequence
  Oligonucleotide for detection of SNP TSC0023234
ttttgacgcggtg

SEQ ID NO: 92928 - DNA, 13 bp, Artificial Sequence
  Oligonucleotide for detection of SNP TSC0023234
caccgcgtcaaaa

SEQ ID NO: 92929 - DNA, 13 bp, Artificial Sequence
  Oligonucleotide for detection of SNP TSC0023235
ggtgggggtgtga

SEQ ID NO: 92930 - DNA, 13 bp, Artificial Sequence
  Oligonucleotide for detection of SNP TSC0023235
tcacacccccacc

SEQ ID NO: 92931 - DNA, 13 bp, Artificial Sequence
  Oligonucleotide for detection of SNP TSC0023235
ggtgggagtgtga

SEQ ID NO: 92932 - DNA, 13 bp, Artificial Sequence
  Oligonucleotide for detection of SNP TSC0023235
tcacactcccacc

SEQ ID NO: 92933 - DNA, 13 bp, Artificial Sequence
  Oligonucleotide for detection of SNP TSC0023238
gttggagtggaty

SEQ ID NO: 92934 - DNA, 13 bp, Artificial Sequence
  Oligonucleotide for detection of SNP TSC0023238
ratccactccaac

SEQ ID NO: 92935 - DNA, 13 bp, Artificial Sequence
  Oligonucleotide for detection of SNP TSC0023238
gttggaatggaty

SEQ ID NO: 92936 - DNA, 13 bp, Artificial Sequence
  Oligonucleotide for detection of SNP TSC0023238
ratccattccaac

SEQ ID NO: 92937 - DNA, 13 bp, Artificial Sequence
  Oligonucleotide for detection of SNP TSC0023242
tgtatagtgttag

SEQ ID NO: 92938 - DNA, 13 bp, Artificial Sequence
  Oligonucleotide for detection of SNP TSC0023242
ctaacactataca

SEQ ID NO: 92939 - DNA, 13 bp, Artificial Sequence
  Oligonucleotide for detection of SNP TSC0023242
tgtataatgttag

SEQ ID NO: 92940 - DNA, 13 bp, Artificial Sequence
  Oligonucleotide for detection of SNP TSC0023242
ctaacattataca

SEQ ID NO: 92941 - DNA, 13 bp, Artificial Sequence
  Oligonucleotide for detection of SNP TSC0023243
tatttgtaaaggt

SEQ ID NO: 92942 - DNA, 13 bp, Artificial Sequence
  Oligonucleotide for detection of SNP TSC0023243
acctttacaaata

SEQ ID NO: 92943 - DNA, 13 bp, Artificial Sequence
  Oligonucleotide for detection of SNP TSC0023243
tatttggaaaggt

SEQ ID NO: 92944 - DNA, 13 bp, Artificial Sequence
  Oligonucleotide for detection of SNP TSC0023243
acctttccaaata

SEQ ID NO: 92945 - DNA, 13 bp, Artificial Sequence
  Oligonucleotide for detection of SNP TSC0023243
atttttgtaaata

SEQ ID NO: 92946 - DNA, 13 bp, Artificial Sequence
  Oligonucleotide for detection of SNP TSC0023243
tatttacaaaaat

SEQ ID NO: 92947 - DNA, 13 bp, Artificial Sequence
  Oligonucleotide for detection of SNP TSC0023244
gggatgtattata

SEQ ID NO: 92948 - DNA, 13 bp, Artificial Sequence
  Oligonucleotide for detection of SNP TSC0023244
tataatacatccc

SEQ ID NO: 92949 - DNA, 13 bp, Artificial Sequence
  Oligonucleotide for detection of SNP TSC0023244
gggatggattata

SEQ ID NO: 92950 - DNA, 13 bp, Artificial Sequence
  Oligonucleotide for detection of SNP TSC0023244
tataatccatccc

SEQ ID NO: 92951 - DNA, 13 bp, Artificial Sequence
  Oligonucleotide for detection of SNP TSC0023244
tgtaatgtattty

SEQ ID NO: 92952 - DNA, 13 bp, Artificial Sequence
  Oligonucleotide for detection of SNP TSC0023244
raaatacattaca

SEQ ID NO: 92953 - DNA, 13 bp, Artificial Sequence
  Oligonucleotide for detection of SNP TSC0023244
tgtaatttattty

SEQ ID NO: 92954 - DNA, 13 bp, Artificial Sequence
  Oligonucleotide for detection of SNP TSC0023244
raaataaattaca

SEQ ID NO: 92955 - DNA, 13 bp, Artificial Sequence
  Oligonucleotide for detection of SNP TSC0023245
ttattaattgtat

SEQ ID NO: 92956 - DNA, 13 bp, Artificial Sequence
  Oligonucleotide for detection of SNP TSC0023245
atacaattaataa

SEQ ID NO: 92957 - DNA, 13 bp, Artificial Sequence
  Oligonucleotide for detection of SNP TSC0023245
ttattagttgtat

SEQ ID NO: 92958 - DNA, 13 bp, Artificial Sequence
  Oligonucleotide for detection of SNP TSC0023245
atacaactaataa

SEQ ID NO: 92959 - DNA, 13 bp, Artificial Sequence
  Oligonucleotide for detection of SNP TSC0023245
ttattaatcgtat

SEQ ID NO: 92960 - DNA, 13 bp, Artificial Sequence
  Oligonucleotide for detection of SNP TSC0023245
atacgattaataa

SEQ ID NO: 92961 - DNA, 13 bp, Artificial Sequence
  Oligonucleotide for detection of SNP TSC0023245
ttattagtcgtat

SEQ ID NO: 92962 - DNA, 13 bp, Artificial Sequence
  Oligonucleotide for detection of SNP TSC0023245
atacgactaataa

SEQ ID NO: 92963 - DNA, 13 bp, Artificial Sequence
  Oligonucleotide for detection of SNP TSC0023250
attatgttgtgag

SEQ ID NO: 92964 - DNA, 13 bp, Artificial Sequence
  Oligonucleotide for detection of SNP TSC0023250
ctcacaacataat

SEQ ID NO: 92965 - DNA, 13 bp, Artificial Sequence
  Oligonucleotide for detection of SNP TSC0023250
attatggtgtgag

SEQ ID NO: 92966 - DNA, 13 bp, Artificial Sequence
  Oligonucleotide for detection of SNP TSC0023250
ctcacaccataat

SEQ ID NO: 92967 - DNA, 13 bp, Artificial Sequence
  Oligonucleotide for detection of SNP TSC0023250
tttatagtatggt

SEQ ID NO: 92968 - DNA, 13 bp, Artificial Sequence
  Oligonucleotide for detection of SNP TSC0023250
accatactataaa

SEQ ID NO: 92969 - DNA, 13 bp, Artificial Sequence
  Oligonucleotide for detection of SNP TSC0023250
tttatattatggt

SEQ ID NO: 92970 - DNA, 13 bp, Artificial Sequence
  Oligonucleotide for detection of SNP TSC0023250
accataatataaa

SEQ ID NO: 92971 - DNA, 13 bp, Artificial Sequence
  Oligonucleotide for detection of SNP TSC0023251
atatgtttaaaay

SEQ ID NO: 92972 - DNA, 13 bp, Artificial Sequence
  Oligonucleotide for detection of SNP TSC0023251
rttttaaacatat

SEQ ID NO: 92973 - DNA, 13 bp, Artificial Sequence
  Oligonucleotide for detection of SNP TSC0023251
atatgtgtaaaay

SEQ ID NO: 92974 - DNA, 13 bp, Artificial Sequence
  Oligonucleotide for detection of SNP TSC0023251
rttttacacatat

SEQ ID NO: 92975 - DNA, 13 bp, Artificial Sequence
  Oligonucleotide for detection of SNP TSC0023251
atacgtttaaaay

SEQ ID NO: 92976 - DNA, 13 bp, Artificial Sequence
  Oligonucleotide for detection of SNP TSC0023251
rttttaaacgtat

SEQ ID NO: 92977 - DNA, 13 bp, Artificial Sequence
  Oligonucleotide for detection of SNP TSC0023251
atacgtgtaaaay

SEQ ID NO: 92978 - DNA, 13 bp, Artificial Sequence
  Oligonucleotide for detection of SNP TSC0023251
rttttacacgtat

SEQ ID NO: 92979 - DNA, 13 bp, Artificial Sequence
  Oligonucleotide for detection of SNP TSC0023251
gttttagatgtgt

SEQ ID NO: 92980 - DNA, 13 bp, Artificial Sequence
  Oligonucleotide for detection of SNP TSC0023251
acacatctaaaac

SEQ ID NO: 92981 - DNA, 13 bp, Artificial Sequence
  Oligonucleotide for detection of SNP TSC0023251
gttttatatgtgt

SEQ ID NO: 92982 - DNA, 13 bp, Artificial Sequence
  Oligonucleotide for detection of SNP TSC0023251
acacatataaaac

SEQ ID NO: 92983 - DNA, 13 bp, Artificial Sequence
  Oligonucleotide for detection of SNP TSC0023251
gttttagacgtgt

SEQ ID NO: 92984 - DNA, 13 bp, Artificial Sequence
  Oligonucleotide for detection of SNP TSC0023251
acacgtctaaaac

SEQ ID NO: 92985 - DNA, 13 bp, Artificial Sequence
  Oligonucleotide for detection of SNP TSC0023251
gttttatacgtgt

SEQ ID NO: 92986 - DNA, 13 bp, Artificial Sequence
  Oligonucleotide for detection of SNP TSC0023251
acacgtataaaac

SEQ ID NO: 92987 - DNA, 13 bp, Artificial Sequence
  Oligonucleotide for detection of SNP TSC0023253
taaaaatgtttty

SEQ ID NO: 92988 - DNA, 13 bp, Artificial Sequence
  Oligonucleotide for detection of SNP TSC0023253
raaaacattttta

SEQ ID NO: 92989 - DNA, 13 bp, Artificial Sequence
  Oligonucleotide for detection of SNP TSC0023253
taaaaacgtttty

SEQ ID NO: 92990 - DNA, 13 bp, Artificial Sequence
  Oligonucleotide for detection of SNP TSC0023253
raaaacgttttta

SEQ ID NO: 92991 - DNA, 13 bp, Artificial Sequence
  Oligonucleotide for detection of SNP TSC0023253
ggaagtgtttttg

SEQ ID NO: 92992 - DNA, 13 bp, Artificial Sequence
  Oligonucleotide for detection of SNP TSC0023253
caaaaacacttcc

SEQ ID NO: 92993 - DNA, 13 bp, Artificial Sequence
  Oligonucleotide for detection of SNP TSC0023253
ggaagtatttttg

SEQ ID NO: 92994 - DNA, 13 bp, Artificial Sequence
  Oligonucleotide for detection of SNP TSC0023253
caaaaatacttcc

SEQ ID NO: 92995 - DNA, 13 bp, Artificial Sequence
  Oligonucleotide for detection of SNP TSC0023253
ggaagcgtttttg

SEQ ID NO: 92996 - DNA, 13 bp, Artificial Sequence
  Oligonucleotide for detection of SNP TSC0023253
caaaaacgcttcc

SEQ ID NO: 92997 - DNA, 13 bp, Artificial Sequence
  Oligonucleotide for detection of SNP TSC0023254
gggtgtgtgtaty

SEQ ID NO: 92998 - DNA, 13 bp, Artificial Sequence
  Oligonucleotide for detection of SNP TSC0023254
ratacacacaccc

SEQ ID NO: 92999 - DNA, 13 bp, Artificial Sequence
  Oligonucleotide for detection of SNP TSC0023254
gggtgtttgtaty

SEQ ID NO: 93000 - DNA, 13 bp, Artificial Sequence
  Oligonucleotide for detection of SNP TSC0023254
ratacaaacaccc

SEQ ID NO: 93001 - DNA, 13 bp, Artificial Sequence
  Oligonucleotide for detection of SNP TSC0023254
gggtgcgtgtaty

SEQ ID NO: 93002 - DNA, 13 bp, Artificial Sequence
  Oligonucleotide for detection of SNP TSC0023254
ratacacgcaccc

SEQ ID NO: 93003 - DNA, 13 bp, Artificial Sequence
  Oligonucleotide for detection of SNP TSC0023254
gatgtatgtatty

SEQ ID NO: 93004 - DNA, 13 bp, Artificial Sequence
  Oligonucleotide for detection of SNP TSC0023254
raatacatacatc

SEQ ID NO: 93005 - DNA, 13 bp, Artificial Sequence
  Oligonucleotide for detection of SNP TSC0023254
gatgtaagtatty

SEQ ID NO: 93006 - DNA, 13 bp, Artificial Sequence
  Oligonucleotide for detection of SNP TSC0023254
raatacttacatc

SEQ ID NO: 93007 - DNA, 13 bp, Artificial Sequence
  Oligonucleotide for detection of SNP TSC0023254
gatgtacgtatty

SEQ ID NO: 93008 - DNA, 13 bp, Artificial Sequence
  Oligonucleotide for detection of SNP TSC0023254
raatacgtacatc

SEQ ID NO: 93009 - DNA, 13 bp, Artificial Sequence
  Oligonucleotide for detection of SNP TSC0023256
aaaattaggtagg

SEQ ID NO: 93010 - DNA, 13 bp, Artificial Sequence
  Oligonucleotide for detection of SNP TSC0023256
cctacctaatttt

SEQ ID NO: 93011 - DNA, 13 bp, Artificial Sequence
  Oligonucleotide for detection of SNP TSC0023256
aaaatttggtagg

SEQ ID NO: 93012 - DNA, 13 bp, Artificial Sequence
  Oligonucleotide for detection of SNP TSC0023256
cctaccaaatttt

SEQ ID NO: 93013 - DNA, 13 bp, Artificial Sequence
  Oligonucleotide for detection of SNP TSC0023256
tttgtttaatttt

SEQ ID NO: 93014 - DNA, 13 bp, Artificial Sequence
  Oligonucleotide for detection of SNP TSC0023256
aaaattaaacaaa

SEQ ID NO: 93015 - DNA, 13 bp, Artificial Sequence
  Oligonucleotide for detection of SNP TSC0023256
tttgttaaatttt

SEQ ID NO: 93016 - DNA, 13 bp, Artificial Sequence
  Oligonucleotide for detection of SNP TSC0023256
aaaatttaacaaa

SEQ ID NO: 93017 - DNA, 13 bp, Artificial Sequence
  Oligonucleotide for detection of SNP TSC0023257
tagggaaaaattt

SEQ ID NO: 93018 - DNA, 13 bp, Artificial Sequence
  Oligonucleotide for detection of SNP TSC0023257
aaatttttcccta

SEQ ID NO: 93019 - DNA, 13 bp, Artificial Sequence
  Oligonucleotide for detection of SNP TSC0023257
tagggagaaattt

SEQ ID NO: 93020 - DNA, 13 bp, Artificial Sequence
  Oligonucleotide for detection of SNP TSC0023257
aaatttctcccta

SEQ ID NO: 93021 - DNA, 13 bp, Artificial Sequence
  Oligonucleotide for detection of SNP TSC0023259
gttttgtttaaaa

SEQ ID NO: 93022 - DNA, 13 bp, Artificial Sequence
  Oligonucleotide for detection of SNP TSC0023259
ttttaaacaaaac

SEQ ID NO: 93023 - DNA, 13 bp, Artificial Sequence
  Oligonucleotide for detection of SNP TSC0023259
gttttggttaaaa

SEQ ID NO: 93024 - DNA, 13 bp, Artificial Sequence
  Oligonucleotide for detection of SNP TSC0023259
ttttaaccaaaac

SEQ ID NO: 93025 - DNA, 13 bp, Artificial Sequence
  Oligonucleotide for detection of SNP TSC0023259
ttttaattagaay

SEQ ID NO: 93026 - DNA, 13 bp, Artificial Sequence
  Oligonucleotide for detection of SNP TSC0023259
rttctaattaaaa

SEQ ID NO: 93027 - DNA, 13 bp, Artificial Sequence
  Oligonucleotide for detection of SNP TSC0023260
aagaaatgaaata

SEQ ID NO: 93028 - DNA, 13 bp, Artificial Sequence
  Oligonucleotide for detection of SNP TSC0023260
tatttcatttctt

SEQ ID NO: 93029 - DNA, 13 bp, Artificial Sequence
  Oligonucleotide for detection of SNP TSC0023260
aagaaacgaaata

SEQ ID NO: 93030 - DNA, 13 bp, Artificial Sequence
  Oligonucleotide for detection of SNP TSC0023260
tatttcgtttctt

SEQ ID NO: 93031 - DNA, 13 bp, Artificial Sequence
  Oligonucleotide for detection of SNP TSC0023261
gtttgaattattg

SEQ ID NO: 93032 - DNA, 13 bp, Artificial Sequence
  Oligonucleotide for detection of SNP TSC0023261
caataattcaaac

SEQ ID NO: 93033 - DNA, 13 bp, Artificial Sequence
  Oligonucleotide for detection of SNP TSC0023261
gtttgatttattg

SEQ ID NO: 93034 - DNA, 13 bp, Artificial Sequence
  Oligonucleotide for detection of SNP TSC0023261
caataaatcaaac

SEQ ID NO: 93035 - DNA, 13 bp, Artificial Sequence
  Oligonucleotide for detection of SNP TSC0023261
tagtggtttagay

SEQ ID NO: 93036 - DNA, 13 bp, Artificial Sequence
  Oligonucleotide for detection of SNP TSC0023261
rtctaaaccacta

SEQ ID NO: 93037 - DNA, 13 bp, Artificial Sequence
  Oligonucleotide for detection of SNP TSC0023261
tagtgggttagay

SEQ ID NO: 93038 - DNA, 13 bp, Artificial Sequence
  Oligonucleotide for detection of SNP TSC0023261
rtctaacccacta

SEQ ID NO: 93039 - DNA, 13 bp, Artificial Sequence
  Oligonucleotide for detection of SNP TSC0023263
attaatagaagga

SEQ ID NO: 93040 - DNA, 13 bp, Artificial Sequence
  Oligonucleotide for detection of SNP TSC0023263
tccttctattaat

SEQ ID NO: 93041 - DNA, 13 bp, Artificial Sequence
  Oligonucleotide for detection of SNP TSC0023263
attaatggaagga

SEQ ID NO: 93042 - DNA, 13 bp, Artificial Sequence
  Oligonucleotide for detection of SNP TSC0023263
tccttccattaat

SEQ ID NO: 93043 - DNA, 13 bp, Artificial Sequence
  Oligonucleotide for detection of SNP TSC0023263
attaacggaagga

SEQ ID NO: 93044 - DNA, 13 bp, Artificial Sequence
  Oligonucleotide for detection of SNP TSC0023263
tccttccgttaat

SEQ ID NO: 93045 - DNA, 13 bp, Artificial Sequence
  Oligonucleotide for detection of SNP TSC0023263
tttttttgttggt

SEQ ID NO: 93046 - DNA, 13 bp, Artificial Sequence
  Oligonucleotide for detection of SNP TSC0023263
accaacaaaaaaa

SEQ ID NO: 93047 - DNA, 13 bp, Artificial Sequence
  Oligonucleotide for detection of SNP TSC0023263
ttttttcgttggt

SEQ ID NO: 93048 - DNA, 13 bp, Artificial Sequence
  Oligonucleotide for detection of SNP TSC0023263
accaacgaaaaaa

SEQ ID NO: 93049 - DNA, 13 bp, Artificial Sequence
  Oligonucleotide for detection of SNP TSC0023264
taatttatatgga

SEQ ID NO: 93050 - DNA, 13 bp, Artificial Sequence
  Oligonucleotide for detection of SNP TSC0023264
tccatataaatta

SEQ ID NO: 93051 - DNA, 13 bp, Artificial Sequence
  Oligonucleotide for detection of SNP TSC0023264
taatttgtatgga

SEQ ID NO: 93052 - DNA, 13 bp, Artificial Sequence
  Oligonucleotide for detection of SNP TSC0023264
tccatacaaatta

SEQ ID NO: 93053 - DNA, 13 bp, Artificial Sequence
  Oligonucleotide for detection of SNP TSC0023265
aattttttattta

SEQ ID NO: 93054 - DNA, 13 bp, Artificial Sequence
  Oligonucleotide for detection of SNP TSC0023265
taaataaaaaatt

SEQ ID NO: 93055 - DNA, 13 bp, Artificial Sequence
  Oligonucleotide for detection of SNP TSC0023265
taggtagagagtt

SEQ ID NO: 93056 - DNA, 13 bp, Artificial Sequence
  Oligonucleotide for detection of SNP TSC0023265
aactctctaccta

SEQ ID NO: 93057 - DNA, 13 bp, Artificial Sequence
  Oligonucleotide for detection of SNP TSC0023265
taggtatagagtt

SEQ ID NO: 93058 - DNA, 13 bp, Artificial Sequence
  Oligonucleotide for detection of SNP TSC0023265
aactctataccta

SEQ ID NO: 93059 - DNA, 13 bp, Artificial Sequence
  Oligonucleotide for detection of SNP TSC0023268
agataaagatgga

SEQ ID NO: 93060 - DNA, 13 bp, Artificial Sequence
  Oligonucleotide for detection of SNP TSC0023268
tccatctttatct

SEQ ID NO: 93061 - DNA, 13 bp, Artificial Sequence
  Oligonucleotide for detection of SNP TSC0023268
agataatgatgga

SEQ ID NO: 93062 - DNA, 13 bp, Artificial Sequence
  Oligonucleotide for detection of SNP TSC0023268
tccatcattatct

SEQ ID NO: 93063 - DNA, 13 bp, Artificial Sequence
  Oligonucleotide for detection of SNP TSC0023268
tttatttttattt

SEQ ID NO: 93064 - DNA, 13 bp, Artificial Sequence
  Oligonucleotide for detection of SNP TSC0023268
aaataaaaataaa

SEQ ID NO: 93065 - DNA, 13 bp, Artificial Sequence
  Oligonucleotide for detection of SNP TSC0023269
ggaaggtatttag

SEQ ID NO: 93066 - DNA, 13 bp, Artificial Sequence
  Oligonucleotide for detection of SNP TSC0023269
ctaaataccttcc

SEQ ID NO: 93067 - DNA, 13 bp, Artificial Sequence
  Oligonucleotide for detection of SNP TSC0023269
ggaagggatttag

SEQ ID NO: 93068 - DNA, 13 bp, Artificial Sequence
  Oligonucleotide for detection of SNP TSC0023269
ctaaatcccttcc

SEQ ID NO: 93069 - DNA, 13 bp, Artificial Sequence
  Oligonucleotide for detection of SNP TSC0023269
ttaggtgttttty

SEQ ID NO: 93070 - DNA, 13 bp, Artificial Sequence
  Oligonucleotide for detection of SNP TSC0023269
raaaaacacctaa

SEQ ID NO: 93071 - DNA, 13 bp, Artificial Sequence
  Oligonucleotide for detection of SNP TSC0023269
ttaggttttttty

SEQ ID NO: 93072 - DNA, 13 bp, Artificial Sequence
  Oligonucleotide for detection of SNP TSC0023269
raaaaaaacctaa

SEQ ID NO: 93073 - DNA, 13 bp, Artificial Sequence
  Oligonucleotide for detection of SNP TSC0023270
ttttagagaaata

SEQ ID NO: 93074 - DNA, 13 bp, Artificial Sequence
  Oligonucleotide for detection of SNP TSC0023270
tatttctctaaaa

SEQ ID NO: 93075 - DNA, 13 bp, Artificial Sequence
  Oligonucleotide for detection of SNP TSC0023270
ttttagggaaata

SEQ ID NO: 93076 - DNA, 13 bp, Artificial Sequence
  Oligonucleotide for detection of SNP TSC0023270
tatttccctaaaa

SEQ ID NO: 93077 - DNA, 13 bp, Artificial Sequence
  Oligonucleotide for detection of SNP TSC0023271
ttgagttgatata

SEQ ID NO: 93078 - DNA, 13 bp, Artificial Sequence
  Oligonucleotide for detection of SNP TSC0023271
tatatcaactcaa

SEQ ID NO: 93079 - DNA, 13 bp, Artificial Sequence
  Oligonucleotide for detection of SNP TSC0023271
ttgagtcgatata

SEQ ID NO: 93080 - DNA, 13 bp, Artificial Sequence
  Oligonucleotide for detection of SNP TSC0023271
tatatcgactcaa

SEQ ID NO: 93081 - DNA, 13 bp, Artificial Sequence
  Oligonucleotide for detection of SNP TSC0023271
tatattggtttag

SEQ ID NO: 93082 - DNA, 13 bp, Artificial Sequence
  Oligonucleotide for detection of SNP TSC0023271
ctaaaccaatata

SEQ ID NO: 93083 - DNA, 13 bp, Artificial Sequence
  Oligonucleotide for detection of SNP TSC0023271
tatattagtttag

SEQ ID NO: 93084 - DNA, 13 bp, Artificial Sequence
  Oligonucleotide for detection of SNP TSC0023271
ctaaactaatata

SEQ ID NO: 93085 - DNA, 13 bp, Artificial Sequence
  Oligonucleotide for detection of SNP TSC0023271
tatatcggtttag

SEQ ID NO: 93086 - DNA, 13 bp, Artificial Sequence
  Oligonucleotide for detection of SNP TSC0023271
ctaaaccgatata

SEQ ID NO: 93087 - DNA, 13 bp, Artificial Sequence
  Oligonucleotide for detection of SNP TSC0023274
gttttattatatt

SEQ ID NO: 93088 - DNA, 13 bp, Artificial Sequence
  Oligonucleotide for detection of SNP TSC0023274
aatataataaaac

SEQ ID NO: 93089 - DNA, 13 bp, Artificial Sequence
  Oligonucleotide for detection of SNP TSC0023274
gttttagtatatt

SEQ ID NO: 93090 - DNA, 13 bp, Artificial Sequence
  Oligonucleotide for detection of SNP TSC0023274
aatatactaaaac

SEQ ID NO: 93091 - DNA, 13 bp, Artificial Sequence
  Oligonucleotide for detection of SNP TSC0023275
tgggtaagttttg

SEQ ID NO: 93092 - DNA, 13 bp, Artificial Sequence
  Oligonucleotide for detection of SNP TSC0023275
caaaacttaccca

SEQ ID NO: 93093 - DNA, 13 bp, Artificial Sequence
  Oligonucleotide for detection of SNP TSC0023275
tgggtatgttttg

SEQ ID NO: 93094 - DNA, 13 bp, Artificial Sequence
  Oligonucleotide for detection of SNP TSC0023275
caaaacataccca

SEQ ID NO: 93095 - DNA, 13 bp, Artificial Sequence
  Oligonucleotide for detection of SNP TSC0023275
cgggtaagttttg

SEQ ID NO: 93096 - DNA, 13 bp, Artificial Sequence
  Oligonucleotide for detection of SNP TSC0023275
caaaacttacccg

SEQ ID NO: 93097 - DNA, 13 bp, Artificial Sequence
  Oligonucleotide for detection of SNP TSC0023275
cgggtatgttttg

SEQ ID NO: 93098 - DNA, 13 bp, Artificial Sequence
  Oligonucleotide for detection of SNP TSC0023275
caaaacatacccg

SEQ ID NO: 93099 - DNA, 13 bp, Artificial Sequence
  Oligonucleotide for detection of SNP TSC0023275
taaaatttgtttg

SEQ ID NO: 93100 - DNA, 13 bp, Artificial Sequence
  Oligonucleotide for detection of SNP TSC0023275
caaacaaatttta

SEQ ID NO: 93101 - DNA, 13 bp, Artificial Sequence
  Oligonucleotide for detection of SNP TSC0023275
taaaatatgtttg

SEQ ID NO: 93102 - DNA, 13 bp, Artificial Sequence
  Oligonucleotide for detection of SNP TSC0023275
caaacatatttta

SEQ ID NO: 93103 - DNA, 13 bp, Artificial Sequence
  Oligonucleotide for detection of SNP TSC0023275
taaaatttgttcg

SEQ ID NO: 93104 - DNA, 13 bp, Artificial Sequence
  Oligonucleotide for detection of SNP TSC0023275
cgaacaaatttta

SEQ ID NO: 93105 - DNA, 13 bp, Artificial Sequence
  Oligonucleotide for detection of SNP TSC0023275
taaaatatgttcg

SEQ ID NO: 93106 - DNA, 13 bp, Artificial Sequence
  Oligonucleotide for detection of SNP TSC0023275
cgaacatatttta

SEQ ID NO: 93107 - DNA, 13 bp, Artificial Sequence
  Oligonucleotide for detection of SNP TSC0023276
aagtgagtttttt

SEQ ID NO: 93108 - DNA, 13 bp, Artificial Sequence
  Oligonucleotide for detection of SNP TSC0023276
aaaaaactcactt

SEQ ID NO: 93109 - DNA, 13 bp, Artificial Sequence
  Oligonucleotide for detection of SNP TSC0023276
aagtgattttttt

SEQ ID NO: 93110 - DNA, 13 bp, Artificial Sequence
  Oligonucleotide for detection of SNP TSC0023276
aaaaaaatcactt

SEQ ID NO: 93111 - DNA, 13 bp, Artificial Sequence
  Oligonucleotide for detection of SNP TSC0023276
aagcgagtttttt

SEQ ID NO: 93112 - DNA, 13 bp, Artificial Sequence
  Oligonucleotide for detection of SNP TSC0023276
aaaaaactcgctt

SEQ ID NO: 93113 - DNA, 13 bp, Artificial Sequence
  Oligonucleotide for detection of SNP TSC0023276
aagcgattttttt

SEQ ID NO: 93114 - DNA, 13 bp, Artificial Sequence
  Oligonucleotide for detection of SNP TSC0023276
aaaaaaatcgctt

SEQ ID NO: 93115 - DNA, 13 bp, Artificial Sequence
  Oligonucleotide for detection of SNP TSC0023276
agaagatttgttt

SEQ ID NO: 93116 - DNA, 13 bp, Artificial Sequence
  Oligonucleotide for detection of SNP TSC0023276
aaacaaatcttct

SEQ ID NO: 93117 - DNA, 13 bp, Artificial Sequence
  Oligonucleotide for detection of SNP TSC0023276
agaagaattgttt

SEQ ID NO: 93118 - DNA, 13 bp, Artificial Sequence
  Oligonucleotide for detection of SNP TSC0023276
aaacaattcttct

SEQ ID NO: 93119 - DNA, 13 bp, Artificial Sequence
  Oligonucleotide for detection of SNP TSC0023276
agaagattcgttt

SEQ ID NO: 93120 - DNA, 13 bp, Artificial Sequence
  Oligonucleotide for detection of SNP TSC0023276
aaacgaatcttct

SEQ ID NO: 93121 - DNA, 13 bp, Artificial Sequence
  Oligonucleotide for detection of SNP TSC0023276
agaagaatcgttt

SEQ ID NO: 93122 - DNA, 13 bp, Artificial Sequence
  Oligonucleotide for detection of SNP TSC0023276
aaacgattcttct

SEQ ID NO: 93123 - DNA, 13 bp, Artificial Sequence
  Oligonucleotide for detection of SNP TSC0023277
tttagttttttty

SEQ ID NO: 93124 - DNA, 13 bp, Artificial Sequence
  Oligonucleotide for detection of SNP TSC0023277
raaaaaaactaaa

SEQ ID NO: 93125 - DNA, 13 bp, Artificial Sequence
  Oligonucleotide for detection of SNP TSC0023277
tttagtgttttty

SEQ ID NO: 93126 - DNA, 13 bp, Artificial Sequence
  Oligonucleotide for detection of SNP TSC0023277
raaaaacactaaa

SEQ ID NO: 93127 - DNA, 13 bp, Artificial Sequence
  Oligonucleotide for detection of SNP TSC0023277
tttagcgttttty

SEQ ID NO: 93128 - DNA, 13 bp, Artificial Sequence
  Oligonucleotide for detection of SNP TSC0023277
raaaaacgctaaa

SEQ ID NO: 93129 - DNA, 13 bp, Artificial Sequence
  Oligonucleotide for detection of SNP TSC0023277
gggaggggttggg

SEQ ID NO: 93130 - DNA, 13 bp, Artificial Sequence
  Oligonucleotide for detection of SNP TSC0023277
cccaacccctccc

SEQ ID NO: 93131 - DNA, 13 bp, Artificial Sequence
  Oligonucleotide for detection of SNP TSC0023277
gggaggtgttggg

SEQ ID NO: 93132 - DNA, 13 bp, Artificial Sequence
  Oligonucleotide for detection of SNP TSC0023277
cccaacacctccc

SEQ ID NO: 93133 - DNA, 13 bp, Artificial Sequence
  Oligonucleotide for detection of SNP TSC0023277
gggaggcgttggg

SEQ ID NO: 93134 - DNA, 13 bp, Artificial Sequence
  Oligonucleotide for detection of SNP TSC0023277
cccaacgcctccc

SEQ ID NO: 93135 - DNA, 13 bp, Artificial Sequence
  Oligonucleotide for detection of SNP TSC0023278
ggttgtagttaga

SEQ ID NO: 93136 - DNA, 13 bp, Artificial Sequence
  Oligonucleotide for detection of SNP TSC0023278
tctaactacaacc

SEQ ID NO: 93137 - DNA, 13 bp, Artificial Sequence
  Oligonucleotide for detection of SNP TSC0023278
ggttgtggttaga

SEQ ID NO: 93138 - DNA, 13 bp, Artificial Sequence
  Oligonucleotide for detection of SNP TSC0023278
tctaaccacaacc

SEQ ID NO: 93139 - DNA, 13 bp, Artificial Sequence
  Oligonucleotide for detection of SNP TSC0023278
ggttgcggttaga

SEQ ID NO: 93140 - DNA, 13 bp, Artificial Sequence
  Oligonucleotide for detection of SNP TSC0023278
tctaaccgcaacc

SEQ ID NO: 93141 - DNA, 13 bp, Artificial Sequence
  Oligonucleotide for detection of SNP TSC0023278
tttagttgtagty

SEQ ID NO: 93142 - DNA, 13 bp, Artificial Sequence
  Oligonucleotide for detection of SNP TSC0023278
ractacaactaaa

SEQ ID NO: 93143 - DNA, 13 bp, Artificial Sequence
  Oligonucleotide for detection of SNP TSC0023278
tttagtcgtagty

SEQ ID NO: 93144 - DNA, 13 bp, Artificial Sequence
  Oligonucleotide for detection of SNP TSC0023278
ractacgactaaa

SEQ ID NO: 93145 - DNA, 13 bp, Artificial Sequence
  Oligonucleotide for detection of SNP TSC0023280
tatattgagatat

SEQ ID NO: 93146 - DNA, 13 bp, Artificial Sequence
  Oligonucleotide for detection of SNP TSC0023280
atatctcaatata

SEQ ID NO: 93147 - DNA, 13 bp, Artificial Sequence
  Oligonucleotide for detection of SNP TSC0023280
tatatttagatat

SEQ ID NO: 93148 - DNA, 13 bp, Artificial Sequence
  Oligonucleotide for detection of SNP TSC0023280
atatctaaatata

SEQ ID NO: 93149 - DNA, 13 bp, Artificial Sequence
  Oligonucleotide for detection of SNP TSC0023280
atatttaaatata

SEQ ID NO: 93150 - DNA, 13 bp, Artificial Sequence
  Oligonucleotide for detection of SNP TSC0023280
tatatttaaatat

SEQ ID NO: 93151 - DNA, 13 bp, Artificial Sequence
  Oligonucleotide for detection of SNP TSC0023281
agtaagtgataag

SEQ ID NO: 93152 - DNA, 13 bp, Artificial Sequence
  Oligonucleotide for detection of SNP TSC0023281
cttatcacttact

SEQ ID NO: 93153 - DNA, 13 bp, Artificial Sequence
  Oligonucleotide for detection of SNP TSC0023281
agtaagcgataag

SEQ ID NO: 93154 - DNA, 13 bp, Artificial Sequence
  Oligonucleotide for detection of SNP TSC0023281
cttatcgcttact

SEQ ID NO: 93155 - DNA, 13 bp, Artificial Sequence
  Oligonucleotide for detection of SNP TSC0023281
tttgttgtttgtt

SEQ ID NO: 93156 - DNA, 13 bp, Artificial Sequence
  Oligonucleotide for detection of SNP TSC0023281
aacaaacaacaaa

SEQ ID NO: 93157 - DNA, 13 bp, Artificial Sequence
  Oligonucleotide for detection of SNP TSC0023281
tttgttatttgtt

SEQ ID NO: 93158 - DNA, 13 bp, Artificial Sequence
  Oligonucleotide for detection of SNP TSC0023281
aacaaataacaaa

SEQ ID NO: 93159 - DNA, 13 bp, Artificial Sequence
  Oligonucleotide for detection of SNP TSC0023281
tttgtcgtttgtt

SEQ ID NO: 93160 - DNA, 13 bp, Artificial Sequence
  Oligonucleotide for detection of SNP TSC0023281
aacaaacgacaaa

SEQ ID NO: 93161 - DNA, 13 bp, Artificial Sequence
  Oligonucleotide for detection of SNP TSC0023282
tgtgtagtttttt

SEQ ID NO: 93162 - DNA, 13 bp, Artificial Sequence
  Oligonucleotide for detection of SNP TSC0023282
aaaaaactacaca

SEQ ID NO: 93163 - DNA, 13 bp, Artificial Sequence
  Oligonucleotide for detection of SNP TSC0023282
tgtgtaatttttt

SEQ ID NO: 93164 - DNA, 13 bp, Artificial Sequence
  Oligonucleotide for detection of SNP TSC0023282
aaaaaattacaca

SEQ ID NO: 93165 - DNA, 13 bp, Artificial Sequence
  Oligonucleotide for detection of SNP TSC0023283
tataggaaagtty

SEQ ID NO: 93166 - DNA, 13 bp, Artificial Sequence
  Oligonucleotide for detection of SNP TSC0023283
raactttcctata

SEQ ID NO: 93167 - DNA, 13 bp, Artificial Sequence
  Oligonucleotide for detection of SNP TSC0023283
tatagggaagtty

SEQ ID NO: 93168 - DNA, 13 bp, Artificial Sequence
  Oligonucleotide for detection of SNP TSC0023283
raacttccctata

SEQ ID NO: 93169 - DNA, 13 bp, Artificial Sequence
  Oligonucleotide for detection of SNP TSC0023284
tgatagtagaata

SEQ ID NO: 93170 - DNA, 13 bp, Artificial Sequence
  Oligonucleotide for detection of SNP TSC0023284
tattctactatca

SEQ ID NO: 93171 - DNA, 13 bp, Artificial Sequence
  Oligonucleotide for detection of SNP TSC0023284
tgatagaagaata

SEQ ID NO: 93172 - DNA, 13 bp, Artificial Sequence
  Oligonucleotide for detection of SNP TSC0023284
tattcttctatca

SEQ ID NO: 93173 - DNA, 13 bp, Artificial Sequence
  Oligonucleotide for detection of SNP TSC0023285
ttagtggtattat

SEQ ID NO: 93174 - DNA, 13 bp, Artificial Sequence
  Oligonucleotide for detection of SNP TSC0023285
ataataccactaa

SEQ ID NO: 93175 - DNA, 13 bp, Artificial Sequence
  Oligonucleotide for detection of SNP TSC0023285
ttagtgatattat

SEQ ID NO: 93176 - DNA, 13 bp, Artificial Sequence
  Oligonucleotide for detection of SNP TSC0023285
ataatatcactaa

SEQ ID NO: 93177 - DNA, 13 bp, Artificial Sequence
  Oligonucleotide for detection of SNP TSC0023286
agtttagttagag

SEQ ID NO: 93178 - DNA, 13 bp, Artificial Sequence
  Oligonucleotide for detection of SNP TSC0023286
ctctaactaaact

SEQ ID NO: 93179 - DNA, 13 bp, Artificial Sequence
  Oligonucleotide for detection of SNP TSC0023286
agtttatttagag

SEQ ID NO: 93180 - DNA, 13 bp, Artificial Sequence
  Oligonucleotide for detection of SNP TSC0023286
ctctaaataaact

SEQ ID NO: 93181 - DNA, 13 bp, Artificial Sequence
  Oligonucleotide for detection of SNP TSC0023286
ttttagttgggtt

SEQ ID NO: 93182 - DNA, 13 bp, Artificial Sequence
  Oligonucleotide for detection of SNP TSC0023286
aacccaactaaaa

SEQ ID NO: 93183 - DNA, 13 bp, Artificial Sequence
  Oligonucleotide for detection of SNP TSC0023286
ttttagatgggtt

SEQ ID NO: 93184 - DNA, 13 bp, Artificial Sequence
  Oligonucleotide for detection of SNP TSC0023286
aacccatctaaaa

SEQ ID NO: 93185 - DNA, 13 bp, Artificial Sequence
  Oligonucleotide for detection of SNP TSC0023288
gtattatggaata

SEQ ID NO: 93186 - DNA, 13 bp, Artificial Sequence
  Oligonucleotide for detection of SNP TSC0023288
tattccataatac

SEQ ID NO: 93187 - DNA, 13 bp, Artificial Sequence
  Oligonucleotide for detection of SNP TSC0023288
gtattacggaata

SEQ ID NO: 93188 - DNA, 13 bp, Artificial Sequence
  Oligonucleotide for detection of SNP TSC0023288
tattccgtaatac

SEQ ID NO: 93189 - DNA, 13 bp, Artificial Sequence
  Oligonucleotide for detection of SNP TSC0023288
tgttttgtagtgy

SEQ ID NO: 93190 - DNA, 13 bp, Artificial Sequence
  Oligonucleotide for detection of SNP TSC0023288
rcactacaaaaca

SEQ ID NO: 93191 - DNA, 13 bp, Artificial Sequence
  Oligonucleotide for detection of SNP TSC0023288
tgttttatagtgy

SEQ ID NO: 93192 - DNA, 13 bp, Artificial Sequence
  Oligonucleotide for detection of SNP TSC0023288
rcactataaaaca

SEQ ID NO: 93193 - DNA, 13 bp, Artificial Sequence
  Oligonucleotide for detection of SNP TSC0023288
tgtttcgtagtgy

SEQ ID NO: 93194 - DNA, 13 bp, Artificial Sequence
  Oligonucleotide for detection of SNP TSC0023288
rcactacgaaaca

SEQ ID NO: 93195 - DNA, 13 bp, Artificial Sequence
  Oligonucleotide for detection of SNP TSC0023289
tgagtaaaaaaag

SEQ ID NO: 93196 - DNA, 13 bp, Artificial Sequence
  Oligonucleotide for detection of SNP TSC0023289
ctttttttactca

SEQ ID NO: 93197 - DNA, 13 bp, Artificial Sequence
  Oligonucleotide for detection of SNP TSC0023289
tgagtataaaaag

SEQ ID NO: 93198 - DNA, 13 bp, Artificial Sequence
  Oligonucleotide for detection of SNP TSC0023289
ctttttatactca

SEQ ID NO: 93199 - DNA, 13 bp, Artificial Sequence
  Oligonucleotide for detection of SNP TSC0023289
cgagtaaaaaaag

SEQ ID NO: 93200 - DNA, 13 bp, Artificial Sequence
  Oligonucleotide for detection of SNP TSC0023289
ctttttttactcg

SEQ ID NO: 93201 - DNA, 13 bp, Artificial Sequence
  Oligonucleotide for detection of SNP TSC0023289
cgagtataaaaag

SEQ ID NO: 93202 - DNA, 13 bp, Artificial Sequence
  Oligonucleotide for detection of SNP TSC0023289
ctttttatactcg

SEQ ID NO: 93203 - DNA, 13 bp, Artificial Sequence
  Oligonucleotide for detection of SNP TSC0023289
ttttttttgtttg

SEQ ID NO: 93204 - DNA, 13 bp, Artificial Sequence
  Oligonucleotide for detection of SNP TSC0023289
caaacaaaaaaaa

SEQ ID NO: 93205 - DNA, 13 bp, Artificial Sequence
  Oligonucleotide for detection of SNP TSC0023289
ttttttttgttcg

SEQ ID NO: 93206 - DNA, 13 bp, Artificial Sequence
  Oligonucleotide for detection of SNP TSC0023289
cgaacaaaaaaaa

SEQ ID NO: 93207 - DNA, 13 bp, Artificial Sequence
  Oligonucleotide for detection of SNP TSC0023290
ttaatagtgtaat

SEQ ID NO: 93208 - DNA, 13 bp, Artificial Sequence
  Oligonucleotide for detection of SNP TSC0023290
attacactattaa

SEQ ID NO: 93209 - DNA, 13 bp, Artificial Sequence
  Oligonucleotide for detection of SNP TSC0023290
ttaataatgtaat

SEQ ID NO: 93210 - DNA, 13 bp, Artificial Sequence
  Oligonucleotide for detection of SNP TSC0023290
attacattattaa

SEQ ID NO: 93211 - DNA, 13 bp, Artificial Sequence
  Oligonucleotide for detection of SNP TSC0023293
agggaaattagga

SEQ ID NO: 93212 - DNA, 13 bp, Artificial Sequence
  Oligonucleotide for detection of SNP TSC0023293
tcctaatttccct

SEQ ID NO: 93213 - DNA, 13 bp, Artificial Sequence
  Oligonucleotide for detection of SNP TSC0023293
agggaagttagga

SEQ ID NO: 93214 - DNA, 13 bp, Artificial Sequence
  Oligonucleotide for detection of SNP TSC0023293
tcctaacttccct

SEQ ID NO: 93215 - DNA, 13 bp, Artificial Sequence
  Oligonucleotide for detection of SNP TSC0023294
aggggtgggataa

SEQ ID NO: 93216 - DNA, 13 bp, Artificial Sequence
  Oligonucleotide for detection of SNP TSC0023294
ttatcccacccct

SEQ ID NO: 93217 - DNA, 13 bp, Artificial Sequence
  Oligonucleotide for detection of SNP TSC0023294
aggggtaggataa

SEQ ID NO: 93218 - DNA, 13 bp, Artificial Sequence
  Oligonucleotide for detection of SNP TSC0023294
ttatcctacccct

SEQ ID NO: 93219 - DNA, 13 bp, Artificial Sequence
  Oligonucleotide for detection of SNP TSC0023294
aggggcgggataa

SEQ ID NO: 93220 - DNA, 13 bp, Artificial Sequence
  Oligonucleotide for detection of SNP TSC0023294
ttatcccgcccct

SEQ ID NO: 93221 - DNA, 13 bp, Artificial Sequence
  Oligonucleotide for detection of SNP TSC0023295
gagtggggattat

SEQ ID NO: 93222 - DNA, 13 bp, Artificial Sequence
  Oligonucleotide for detection of SNP TSC0023295
ataatccccactc

SEQ ID NO: 93223 - DNA, 13 bp, Artificial Sequence
  Oligonucleotide for detection of SNP TSC0023295
gagtggagattat

SEQ ID NO: 93224 - DNA, 13 bp, Artificial Sequence
  Oligonucleotide for detection of SNP TSC0023295
ataatctccactc

SEQ ID NO: 93225 - DNA, 13 bp, Artificial Sequence
  Oligonucleotide for detection of SNP TSC0023296
ttttatgtgttag

SEQ ID NO: 93226 - DNA, 13 bp, Artificial Sequence
  Oligonucleotide for detection of SNP TSC0023296
ctaacacataaaa

SEQ ID NO: 93227 - DNA, 13 bp, Artificial Sequence
  Oligonucleotide for detection of SNP TSC0023296
ttgatagataaaa

SEQ ID NO: 93228 - DNA, 13 bp, Artificial Sequence
  Oligonucleotide for detection of SNP TSC0023296
ttttatctatcaa

SEQ ID NO: 93229 - DNA, 13 bp, Artificial Sequence
  Oligonucleotide for detection of SNP TSC0023296
ttgatatataaaa

SEQ ID NO: 93230 - DNA, 13 bp, Artificial Sequence
  Oligonucleotide for detection of SNP TSC0023296
ttttatatatcaa

SEQ ID NO: 93231 - DNA, 13 bp, Artificial Sequence
  Oligonucleotide for detection of SNP TSC0023297
gttattgtgttta

SEQ ID NO: 93232 - DNA, 13 bp, Artificial Sequence
  Oligonucleotide for detection of SNP TSC0023297
taaacacaataac

SEQ ID NO: 93233 - DNA, 13 bp, Artificial Sequence
  Oligonucleotide for detection of SNP TSC0023297
gttattatgttta

SEQ ID NO: 93234 - DNA, 13 bp, Artificial Sequence
  Oligonucleotide for detection of SNP TSC0023297
taaacataataac

SEQ ID NO: 93235 - DNA, 13 bp, Artificial Sequence
  Oligonucleotide for detection of SNP TSC0023298
ttaaatatatatt

SEQ ID NO: 93236 - DNA, 13 bp, Artificial Sequence
  Oligonucleotide for detection of SNP TSC0023298
aatatatatttaa

SEQ ID NO: 93237 - DNA, 13 bp, Artificial Sequence
  Oligonucleotide for detection of SNP TSC0023298
ttaaatttatatt

SEQ ID NO: 93238 - DNA, 13 bp, Artificial Sequence
  Oligonucleotide for detection of SNP TSC0023298
aatataaatttaa

SEQ ID NO: 93239 - DNA, 13 bp, Artificial Sequence
  Oligonucleotide for detection of SNP TSC0023298
aatatatgtttaa

SEQ ID NO: 93240 - DNA, 13 bp, Artificial Sequence
  Oligonucleotide for detection of SNP TSC0023298
ttaaacatatatt

SEQ ID NO: 93241 - DNA, 13 bp, Artificial Sequence
  Oligonucleotide for detection of SNP TSC0023298
aatataggtttaa

SEQ ID NO: 93242 - DNA, 13 bp, Artificial Sequence
  Oligonucleotide for detection of SNP TSC0023298
ttaaacctatatt

SEQ ID NO: 93243 - DNA, 13 bp, Artificial Sequence
  Oligonucleotide for detection of SNP TSC0023301
ggaggtaattgat

SEQ ID NO: 93244 - DNA, 13 bp, Artificial Sequence
  Oligonucleotide for detection of SNP TSC0023301
atcaattacctcc

SEQ ID NO: 93245 - DNA, 13 bp, Artificial Sequence
  Oligonucleotide for detection of SNP TSC0023301
ggaggttattgat

SEQ ID NO: 93246 - DNA, 13 bp, Artificial Sequence
  Oligonucleotide for detection of SNP TSC0023301
atcaataacctcc

SEQ ID NO: 93247 - DNA, 13 bp, Artificial Sequence
  Oligonucleotide for detection of SNP TSC0023301
attaattatttty

SEQ ID NO: 93248 - DNA, 13 bp, Artificial Sequence
  Oligonucleotide for detection of SNP TSC0023301
raaaataattaat

SEQ ID NO: 93249 - DNA, 13 bp, Artificial Sequence
  Oligonucleotide for detection of SNP TSC0023301
attaatgatttty

SEQ ID NO: 93250 - DNA, 13 bp, Artificial Sequence
  Oligonucleotide for detection of SNP TSC0023301
raaaatcattaat

SEQ ID NO: 93251 - DNA, 13 bp, Artificial Sequence
  Oligonucleotide for detection of SNP TSC0023302
atatatataatag

SEQ ID NO: 93252 - DNA, 13 bp, Artificial Sequence
  Oligonucleotide for detection of SNP TSC0023302
ctattatatatat

SEQ ID NO: 93253 - DNA, 13 bp, Artificial Sequence
  Oligonucleotide for detection of SNP TSC0023302
atatatgtaatag

SEQ ID NO: 93254 - DNA, 13 bp, Artificial Sequence
  Oligonucleotide for detection of SNP TSC0023302
ctattacatatat

SEQ ID NO: 93255 - DNA, 13 bp, Artificial Sequence
  Oligonucleotide for detection of SNP TSC0023303
gtttacgtttata

SEQ ID NO: 93256 - DNA, 13 bp, Artificial Sequence
  Oligonucleotide for detection of SNP TSC0023303
tataaacgtaaac

SEQ ID NO: 93257 - DNA, 13 bp, Artificial Sequence
  Oligonucleotide for detection of SNP TSC0023306
gagtaagtgggat

SEQ ID NO: 93258 - DNA, 13 bp, Artificial Sequence
  Oligonucleotide for detection of SNP TSC0023306
atcccacttactc

SEQ ID NO: 93259 - DNA, 13 bp, Artificial Sequence
  Oligonucleotide for detection of SNP TSC0023306
gagtaattgggat

SEQ ID NO: 93260 - DNA, 13 bp, Artificial Sequence
  Oligonucleotide for detection of SNP TSC0023306
atcccaattactc

SEQ ID NO: 93261 - DNA, 13 bp, Artificial Sequence
  Oligonucleotide for detection of SNP TSC0023307
atttggtgagtta

SEQ ID NO: 93262 - DNA, 13 bp, Artificial Sequence
  Oligonucleotide for detection of SNP TSC0023307
taactcaccaaat

SEQ ID NO: 93263 - DNA, 13 bp, Artificial Sequence
  Oligonucleotide for detection of SNP TSC0023307
atttggcgagtta

SEQ ID NO: 93264 - DNA, 13 bp, Artificial Sequence
  Oligonucleotide for detection of SNP TSC0023307
taactcgccaaat

SEQ ID NO: 93265 - DNA, 13 bp, Artificial Sequence
  Oligonucleotide for detection of SNP TSC0023307
taatttgttagat

SEQ ID NO: 93266 - DNA, 13 bp, Artificial Sequence
  Oligonucleotide for detection of SNP TSC0023307
atctaacaaatta

SEQ ID NO: 93267 - DNA, 13 bp, Artificial Sequence
  Oligonucleotide for detection of SNP TSC0023307
taatttattagat

SEQ ID NO: 93268 - DNA, 13 bp, Artificial Sequence
  Oligonucleotide for detection of SNP TSC0023307
atctaataaatta

SEQ ID NO: 93269 - DNA, 13 bp, Artificial Sequence
  Oligonucleotide for detection of SNP TSC0023307
taattcgttagat

SEQ ID NO: 93270 - DNA, 13 bp, Artificial Sequence
  Oligonucleotide for detection of SNP TSC0023307
atctaacgaatta

SEQ ID NO: 93271 - DNA, 13 bp, Artificial Sequence
  Oligonucleotide for detection of SNP TSC0023308
gttataatgtttt

SEQ ID NO: 93272 - DNA, 13 bp, Artificial Sequence
  Oligonucleotide for detection of SNP TSC0023308
aaaacattataac

SEQ ID NO: 93273 - DNA, 13 bp, Artificial Sequence
  Oligonucleotide for detection of SNP TSC0023308
gttatagtgtttt

SEQ ID NO: 93274 - DNA, 13 bp, Artificial Sequence
  Oligonucleotide for detection of SNP TSC0023308
aaaacactataac

SEQ ID NO: 93275 - DNA, 13 bp, Artificial Sequence
  Oligonucleotide for detection of SNP TSC0023310
ggggtaattttta

SEQ ID NO: 93276 - DNA, 13 bp, Artificial Sequence
  Oligonucleotide for detection of SNP TSC0023310
taaaaattacccc

SEQ ID NO: 93277 - DNA, 13 bp, Artificial Sequence
  Oligonucleotide for detection of SNP TSC0023310
ggggtatttttta

SEQ ID NO: 93278 - DNA, 13 bp, Artificial Sequence
  Oligonucleotide for detection of SNP TSC0023310
taaaaaatacccc

SEQ ID NO: 93279 - DNA, 13 bp, Artificial Sequence
  Oligonucleotide for detection of SNP TSC0023310
tgagaattgttty

SEQ ID NO: 93280 - DNA, 13 bp, Artificial Sequence
  Oligonucleotide for detection of SNP TSC0023310
raaacaattctca

SEQ ID NO: 93281 - DNA, 13 bp, Artificial Sequence
  Oligonucleotide for detection of SNP TSC0023310
tgagaagtgttty

SEQ ID NO: 93282 - DNA, 13 bp, Artificial Sequence
  Oligonucleotide for detection of SNP TSC0023310
raaacacttctca

SEQ ID NO: 93283 - DNA, 13 bp, Artificial Sequence
  Oligonucleotide for detection of SNP TSC0023311
tttattatattat

SEQ ID NO: 93284 - DNA, 13 bp, Artificial Sequence
  Oligonucleotide for detection of SNP TSC0023311
ataatataataaa

SEQ ID NO: 93285 - DNA, 13 bp, Artificial Sequence
  Oligonucleotide for detection of SNP TSC0023311
tttattgtattat

SEQ ID NO: 93286 - DNA, 13 bp, Artificial Sequence
  Oligonucleotide for detection of SNP TSC0023311
ataatacaataaa

SEQ ID NO: 93287 - DNA, 13 bp, Artificial Sequence
  Oligonucleotide for detection of SNP TSC0023311
tttatcgtattat

SEQ ID NO: 93288 - DNA, 13 bp, Artificial Sequence
  Oligonucleotide for detection of SNP TSC0023311
ataatacgataaa

SEQ ID NO: 93289 - DNA, 13 bp, Artificial Sequence
  Oligonucleotide for detection of SNP TSC0023311
atagtatgatgaa

SEQ ID NO: 93290 - DNA, 13 bp, Artificial Sequence
  Oligonucleotide for detection of SNP TSC0023311
ttcatcatactat

SEQ ID NO: 93291 - DNA, 13 bp, Artificial Sequence
  Oligonucleotide for detection of SNP TSC0023311
atagtacgatgaa

SEQ ID NO: 93292 - DNA, 13 bp, Artificial Sequence
  Oligonucleotide for detection of SNP TSC0023311
ttcatcgtactat

SEQ ID NO: 93293 - DNA, 13 bp, Artificial Sequence
  Oligonucleotide for detection of SNP TSC0023312
atagtagtattat

SEQ ID NO: 93294 - DNA, 13 bp, Artificial Sequence
  Oligonucleotide for detection of SNP TSC0023312
ataatactactat

SEQ ID NO: 93295 - DNA, 13 bp, Artificial Sequence
  Oligonucleotide for detection of SNP TSC0023312
atagtattattat

SEQ ID NO: 93296 - DNA, 13 bp, Artificial Sequence
  Oligonucleotide for detection of SNP TSC0023312
ataataatactat

SEQ ID NO: 93297 - DNA, 13 bp, Artificial Sequence
  Oligonucleotide for detection of SNP TSC0023312
ataatattattat

SEQ ID NO: 93298 - DNA, 13 bp, Artificial Sequence
  Oligonucleotide for detection of SNP TSC0023312
ataataatattat

SEQ ID NO: 93299 - DNA, 13 bp, Artificial Sequence
  Oligonucleotide for detection of SNP TSC0023313
aaggtattaatat

SEQ ID NO: 93300 - DNA, 13 bp, Artificial Sequence
  Oligonucleotide for detection of SNP TSC0023313
atattaatacctt

SEQ ID NO: 93301 - DNA, 13 bp, Artificial Sequence
  Oligonucleotide for detection of SNP TSC0023313
aaggtagtaatat

SEQ ID NO: 93302 - DNA, 13 bp, Artificial Sequence
  Oligonucleotide for detection of SNP TSC0023313
atattactacctt

SEQ ID NO: 93303 - DNA, 13 bp, Artificial Sequence
  Oligonucleotide for detection of SNP TSC0023313
atattggtatttt

SEQ ID NO: 93304 - DNA, 13 bp, Artificial Sequence
  Oligonucleotide for detection of SNP TSC0023313
aaaataccaatat

SEQ ID NO: 93305 - DNA, 13 bp, Artificial Sequence
  Oligonucleotide for detection of SNP TSC0023313
atattgttatttt

SEQ ID NO: 93306 - DNA, 13 bp, Artificial Sequence
  Oligonucleotide for detection of SNP TSC0023313
aaaataacaatat

SEQ ID NO: 93307 - DNA, 13 bp, Artificial Sequence
  Oligonucleotide for detection of SNP TSC0023314
tggttggtttgag

SEQ ID NO: 93308 - DNA, 13 bp, Artificial Sequence
  Oligonucleotide for detection of SNP TSC0023314
ctcaaaccaacca

SEQ ID NO: 93309 - DNA, 13 bp, Artificial Sequence
  Oligonucleotide for detection of SNP TSC0023314
tggttgttttgag

SEQ ID NO: 93310 - DNA, 13 bp, Artificial Sequence
  Oligonucleotide for detection of SNP TSC0023314
ctcaaaacaacca

SEQ ID NO: 93311 - DNA, 13 bp, Artificial Sequence
  Oligonucleotide for detection of SNP TSC0023314
tttagattagtta

SEQ ID NO: 93312 - DNA, 13 bp, Artificial Sequence
  Oligonucleotide for detection of SNP TSC0023314
taactaatctaaa

SEQ ID NO: 93313 - DNA, 13 bp, Artificial Sequence
  Oligonucleotide for detection of SNP TSC0023314
tttagaatagtta

SEQ ID NO: 93314 - DNA, 13 bp, Artificial Sequence
  Oligonucleotide for detection of SNP TSC0023314
taactattctaaa

SEQ ID NO: 93315 - DNA, 13 bp, Artificial Sequence
  Oligonucleotide for detection of SNP TSC0023317
aagttttgggaat

SEQ ID NO: 93316 - DNA, 13 bp, Artificial Sequence
  Oligonucleotide for detection of SNP TSC0023317
attcccaaaactt

SEQ ID NO: 93317 - DNA, 13 bp, Artificial Sequence
  Oligonucleotide for detection of SNP TSC0023317
aagtttggggaat

SEQ ID NO: 93318 - DNA, 13 bp, Artificial Sequence
  Oligonucleotide for detection of SNP TSC0023317
attccccaaactt

SEQ ID NO: 93319 - DNA, 13 bp, Artificial Sequence
  Oligonucleotide for detection of SNP TSC0023317
aagtttcgggaat

SEQ ID NO: 93320 - DNA, 13 bp, Artificial Sequence
  Oligonucleotide for detection of SNP TSC0023317
attcccgaaactt

SEQ ID NO: 93321 - DNA, 13 bp, Artificial Sequence
  Oligonucleotide for detection of SNP TSC0023317
atttttgaggttt

SEQ ID NO: 93322 - DNA, 13 bp, Artificial Sequence
  Oligonucleotide for detection of SNP TSC0023317
aaacctcaaaaat

SEQ ID NO: 93323 - DNA, 13 bp, Artificial Sequence
  Oligonucleotide for detection of SNP TSC0023317
attttttaggttt

SEQ ID NO: 93324 - DNA, 13 bp, Artificial Sequence
  Oligonucleotide for detection of SNP TSC0023317
aaacctaaaaaat

SEQ ID NO: 93325 - DNA, 13 bp, Artificial Sequence
  Oligonucleotide for detection of SNP TSC0023317
attttcgaggttt

SEQ ID NO: 93326 - DNA, 13 bp, Artificial Sequence
  Oligonucleotide for detection of SNP TSC0023317
aaacctcgaaaat

SEQ ID NO: 93327 - DNA, 13 bp, Artificial Sequence
  Oligonucleotide for detection of SNP TSC0023321
gtggtttgtgttt

SEQ ID NO: 93328 - DNA, 13 bp, Artificial Sequence
  Oligonucleotide for detection of SNP TSC0023321
aaacacaaaccac

SEQ ID NO: 93329 - DNA, 13 bp, Artificial Sequence
  Oligonucleotide for detection of SNP TSC0023321
gtggttcgtgttt

SEQ ID NO: 93330 - DNA, 13 bp, Artificial Sequence
  Oligonucleotide for detection of SNP TSC0023321
aaacacgaaccac

SEQ ID NO: 93331 - DNA, 13 bp, Artificial Sequence
  Oligonucleotide for detection of SNP TSC0023322
atatgaattaaaa

SEQ ID NO: 93332 - DNA, 13 bp, Artificial Sequence
  Oligonucleotide for detection of SNP TSC0023322
ttttaattcatat

SEQ ID NO: 93333 - DNA, 13 bp, Artificial Sequence
  Oligonucleotide for detection of SNP TSC0023322
atatgagttaaaa

SEQ ID NO: 93334 - DNA, 13 bp, Artificial Sequence
  Oligonucleotide for detection of SNP TSC0023322
ttttaactcatat

SEQ ID NO: 93335 - DNA, 13 bp, Artificial Sequence
  Oligonucleotide for detection of SNP TSC0023323
taaaaggttttty

SEQ ID NO: 93336 - DNA, 13 bp, Artificial Sequence
  Oligonucleotide for detection of SNP TSC0023323
raaaaacctttta

SEQ ID NO: 93337 - DNA, 13 bp, Artificial Sequence
  Oligonucleotide for detection of SNP TSC0023323
taaaagtttttty

SEQ ID NO: 93338 - DNA, 13 bp, Artificial Sequence
  Oligonucleotide for detection of SNP TSC0023323
raaaaaactttta

SEQ ID NO: 93339 - DNA, 13 bp, Artificial Sequence
  Oligonucleotide for detection of SNP TSC0023323
gaggaattttttg

SEQ ID NO: 93340 - DNA, 13 bp, Artificial Sequence
  Oligonucleotide for detection of SNP TSC0023323
caaaaaattcctc

SEQ ID NO: 93341 - DNA, 13 bp, Artificial Sequence
  Oligonucleotide for detection of SNP TSC0023323
gaggaaatttttg

SEQ ID NO: 93342 - DNA, 13 bp, Artificial Sequence
  Oligonucleotide for detection of SNP TSC0023323
caaaaatttcctc

SEQ ID NO: 93343 - DNA, 13 bp, Artificial Sequence
  Oligonucleotide for detection of SNP TSC0023324
taatagtaaaata

SEQ ID NO: 93344 - DNA, 13 bp, Artificial Sequence
  Oligonucleotide for detection of SNP TSC0023324
tattttactatta

SEQ ID NO: 93345 - DNA, 13 bp, Artificial Sequence
  Oligonucleotide for detection of SNP TSC0023324
tgttttattgtta

SEQ ID NO: 93346 - DNA, 13 bp, Artificial Sequence
  Oligonucleotide for detection of SNP TSC0023324
taacaataaaaca

SEQ ID NO: 93347 - DNA, 13 bp, Artificial Sequence
  Oligonucleotide for detection of SNP TSC0023325
ttgtttaattttt

SEQ ID NO: 93348 - DNA, 13 bp, Artificial Sequence
  Oligonucleotide for detection of SNP TSC0023325
aaaaattaaacaa

SEQ ID NO: 93349 - DNA, 13 bp, Artificial Sequence
  Oligonucleotide for detection of SNP TSC0023326
gtggtaatattty

SEQ ID NO: 93350 - DNA, 13 bp, Artificial Sequence
  Oligonucleotide for detection of SNP TSC0023326
raaatattaccac

SEQ ID NO: 93351 - DNA, 13 bp, Artificial Sequence
  Oligonucleotide for detection of SNP TSC0023326
gtggtattattty

SEQ ID NO: 93352 - DNA, 13 bp, Artificial Sequence
  Oligonucleotide for detection of SNP TSC0023326
raaataataccac

SEQ ID NO: 93353 - DNA, 13 bp, Artificial Sequence
  Oligonucleotide for detection of SNP TSC0023326
gggatgttgttay

SEQ ID NO: 93354 - DNA, 13 bp, Artificial Sequence
  Oligonucleotide for detection of SNP TSC0023326
rtaacaacatccc

SEQ ID NO: 93355 - DNA, 13 bp, Artificial Sequence
  Oligonucleotide for detection of SNP TSC0023326
gggatggtgttay

SEQ ID NO: 93356 - DNA, 13 bp, Artificial Sequence
  Oligonucleotide for detection of SNP TSC0023326
rtaacaccatccc

SEQ ID NO: 93357 - DNA, 13 bp, Artificial Sequence
  Oligonucleotide for detection of SNP TSC0023327
tatgaaatgaaay

SEQ ID NO: 93358 - DNA, 13 bp, Artificial Sequence
  Oligonucleotide for detection of SNP TSC0023327
rtttcatttcata

SEQ ID NO: 93359 - DNA, 13 bp, Artificial Sequence
  Oligonucleotide for detection of SNP TSC0023327
tatgaagtgaaay

SEQ ID NO: 93360 - DNA, 13 bp, Artificial Sequence
  Oligonucleotide for detection of SNP TSC0023327
rtttcacttcata

SEQ ID NO: 93361 - DNA, 13 bp, Artificial Sequence
  Oligonucleotide for detection of SNP TSC0023329
gatggaaaagggy

SEQ ID NO: 93362 - DNA, 13 bp, Artificial Sequence
  Oligonucleotide for detection of SNP TSC0023329
rcccttttccatc

SEQ ID NO: 93363 - DNA, 13 bp, Artificial Sequence
  Oligonucleotide for detection of SNP TSC0023329
gatggagaagggy

SEQ ID NO: 93364 - DNA, 13 bp, Artificial Sequence
  Oligonucleotide for detection of SNP TSC0023329
rcccttctccatc

SEQ ID NO: 93365 - DNA, 13 bp, Artificial Sequence
  Oligonucleotide for detection of SNP TSC0023331
ttgtttaggagaa

SEQ ID NO: 93366 - DNA, 13 bp, Artificial Sequence
  Oligonucleotide for detection of SNP TSC0023331
ttctcctaaacaa

SEQ ID NO: 93367 - DNA, 13 bp, Artificial Sequence
  Oligonucleotide for detection of SNP TSC0023331
ttgtttgggagaa

SEQ ID NO: 93368 - DNA, 13 bp, Artificial Sequence
  Oligonucleotide for detection of SNP TSC0023331
ttctcccaaacaa

SEQ ID NO: 93369 - DNA, 13 bp, Artificial Sequence
  Oligonucleotide for detection of SNP TSC0023331
ttgttcgggagaa

SEQ ID NO: 93370 - DNA, 13 bp, Artificial Sequence
  Oligonucleotide for detection of SNP TSC0023331
ttctcccgaacaa

SEQ ID NO: 93371 - DNA, 13 bp, Artificial Sequence
  Oligonucleotide for detection of SNP TSC0023333
tgttgtatgttag

SEQ ID NO: 93372 - DNA, 13 bp, Artificial Sequence
  Oligonucleotide for detection of SNP TSC0023333
ctaacatacaaca

SEQ ID NO: 93373 - DNA, 13 bp, Artificial Sequence
  Oligonucleotide for detection of SNP TSC0023333
tgttgtgtgttag

SEQ ID NO: 93374 - DNA, 13 bp, Artificial Sequence
  Oligonucleotide for detection of SNP TSC0023333
ctaacacacaaca

SEQ ID NO: 93375 - DNA, 13 bp, Artificial Sequence
  Oligonucleotide for detection of SNP TSC0023333
cgttgtatgttag

SEQ ID NO: 93376 - DNA, 13 bp, Artificial Sequence
  Oligonucleotide for detection of SNP TSC0023333
ctaacatacaacg

SEQ ID NO: 93377 - DNA, 13 bp, Artificial Sequence
  Oligonucleotide for detection of SNP TSC0023333
cgttgtgtgttag

SEQ ID NO: 93378 - DNA, 13 bp, Artificial Sequence
  Oligonucleotide for detection of SNP TSC0023333
ctaacacacaacg

SEQ ID NO: 93379 - DNA, 13 bp, Artificial Sequence
  Oligonucleotide for detection of SNP TSC0023333
tgttgcgtgttag

SEQ ID NO: 93380 - DNA, 13 bp, Artificial Sequence
  Oligonucleotide for detection of SNP TSC0023333
ctaacacgcaaca

SEQ ID NO: 93381 - DNA, 13 bp, Artificial Sequence
  Oligonucleotide for detection of SNP TSC0023333
cgttgcgtgttag

SEQ ID NO: 93382 - DNA, 13 bp, Artificial Sequence
  Oligonucleotide for detection of SNP TSC0023333
ctaacacgcaacg

SEQ ID NO: 93383 - DNA, 13 bp, Artificial Sequence
  Oligonucleotide for detection of SNP TSC0023333
ttggtatgtagtg

SEQ ID NO: 93384 - DNA, 13 bp, Artificial Sequence
  Oligonucleotide for detection of SNP TSC0023333
cactacataccaa

SEQ ID NO: 93385 - DNA, 13 bp, Artificial Sequence
  Oligonucleotide for detection of SNP TSC0023333
ttggtatgtagcg

SEQ ID NO: 93386 - DNA, 13 bp, Artificial Sequence
  Oligonucleotide for detection of SNP TSC0023333
cgctacataccaa

SEQ ID NO: 93387 - DNA, 13 bp, Artificial Sequence
  Oligonucleotide for detection of SNP TSC0023333
ttggtacgtagtg

SEQ ID NO: 93388 - DNA, 13 bp, Artificial Sequence
  Oligonucleotide for detection of SNP TSC0023333
cactacgtaccaa

SEQ ID NO: 93389 - DNA, 13 bp, Artificial Sequence
  Oligonucleotide for detection of SNP TSC0023333
ttggtacgtagcg

SEQ ID NO: 93390 - DNA, 13 bp, Artificial Sequence
  Oligonucleotide for detection of SNP TSC0023333
cgctacgtaccaa

SEQ ID NO: 93391 - DNA, 13 bp, Artificial Sequence
  Oligonucleotide for detection of SNP TSC0023334
ttttttttttagg

SEQ ID NO: 93392 - DNA, 13 bp, Artificial Sequence
  Oligonucleotide for detection of SNP TSC0023334
cctaaaaaaaaaa

SEQ ID NO: 93393 - DNA, 13 bp, Artificial Sequence
  Oligonucleotide for detection of SNP TSC0023334
tttgaatgagaaa

SEQ ID NO: 93394 - DNA, 13 bp, Artificial Sequence
  Oligonucleotide for detection of SNP TSC0023334
tttctcattcaaa

SEQ ID NO: 93395 - DNA, 13 bp, Artificial Sequence
  Oligonucleotide for detection of SNP TSC0023334
tttgaaagagaaa

SEQ ID NO: 93396 - DNA, 13 bp, Artificial Sequence
  Oligonucleotide for detection of SNP TSC0023334
tttctctttcaaa

SEQ ID NO: 93397 - DNA, 13 bp, Artificial Sequence
  Oligonucleotide for detection of SNP TSC0023336
agagaatggaaag

SEQ ID NO: 93398 - DNA, 13 bp, Artificial Sequence
  Oligonucleotide for detection of SNP TSC0023336
ctttccattctct

SEQ ID NO: 93399 - DNA, 13 bp, Artificial Sequence
  Oligonucleotide for detection of SNP TSC0023336
agagaagggaaag

SEQ ID NO: 93400 - DNA, 13 bp, Artificial Sequence
  Oligonucleotide for detection of SNP TSC0023336
ctttcccttctct

SEQ ID NO: 93401 - DNA, 13 bp, Artificial Sequence
  Oligonucleotide for detection of SNP TSC0023336
agagaacggaaag

SEQ ID NO: 93402 - DNA, 13 bp, Artificial Sequence
  Oligonucleotide for detection of SNP TSC0023336
ctttccgttctct

SEQ ID NO: 93403 - DNA, 13 bp, Artificial Sequence
  Oligonucleotide for detection of SNP TSC0023337
ggtttgtttggty

SEQ ID NO: 93404 - DNA, 13 bp, Artificial Sequence
  Oligonucleotide for detection of SNP TSC0023337
raccaaacaaacc

SEQ ID NO: 93405 - DNA, 13 bp, Artificial Sequence
  Oligonucleotide for detection of SNP TSC0023337
ggtttggttggty

SEQ ID NO: 93406 - DNA, 13 bp, Artificial Sequence
  Oligonucleotide for detection of SNP TSC0023337
raccaaccaaacc

SEQ ID NO: 93407 - DNA, 13 bp, Artificial Sequence
  Oligonucleotide for detection of SNP TSC0023337
ggttaagtagaty

SEQ ID NO: 93408 - DNA, 13 bp, Artificial Sequence
  Oligonucleotide for detection of SNP TSC0023337
ratctacttaacc

SEQ ID NO: 93409 - DNA, 13 bp, Artificial Sequence
  Oligonucleotide for detection of SNP TSC0023337
ggttaattagaty

SEQ ID NO: 93410 - DNA, 13 bp, Artificial Sequence
  Oligonucleotide for detection of SNP TSC0023337
ratctaattaacc

SEQ ID NO: 93411 - DNA, 13 bp, Artificial Sequence
  Oligonucleotide for detection of SNP TSC0023338
gtagggtgtaaty

SEQ ID NO: 93412 - DNA, 13 bp, Artificial Sequence
  Oligonucleotide for detection of SNP TSC0023338
rattacaccctac

SEQ ID NO: 93413 - DNA, 13 bp, Artificial Sequence
  Oligonucleotide for detection of SNP TSC0023338
gtagggggtaaty

SEQ ID NO: 93414 - DNA, 13 bp, Artificial Sequence
  Oligonucleotide for detection of SNP TSC0023338
rattaccccctac

SEQ ID NO: 93415 - DNA, 13 bp, Artificial Sequence
  Oligonucleotide for detection of SNP TSC0023338
gtagggcgtaaty

SEQ ID NO: 93416 - DNA, 13 bp, Artificial Sequence
  Oligonucleotide for detection of SNP TSC0023338
rattacgccctac

SEQ ID NO: 93417 - DNA, 13 bp, Artificial Sequence
  Oligonucleotide for detection of SNP TSC0023338
gattgtgttttgy

SEQ ID NO: 93418 - DNA, 13 bp, Artificial Sequence
  Oligonucleotide for detection of SNP TSC0023338
rcaaaacacaatc

SEQ ID NO: 93419 - DNA, 13 bp, Artificial Sequence
  Oligonucleotide for detection of SNP TSC0023338
gattgttttttgy

SEQ ID NO: 93420 - DNA, 13 bp, Artificial Sequence
  Oligonucleotide for detection of SNP TSC0023338
rcaaaaaacaatc

SEQ ID NO: 93421 - DNA, 13 bp, Artificial Sequence
  Oligonucleotide for detection of SNP TSC0023338
gattgcgttttgy

SEQ ID NO: 93422 - DNA, 13 bp, Artificial Sequence
  Oligonucleotide for detection of SNP TSC0023338
rcaaaacgcaatc

SEQ ID NO: 93423 - DNA, 13 bp, Artificial Sequence
  Oligonucleotide for detection of SNP TSC0023340
gttttaaattttt

SEQ ID NO: 93424 - DNA, 13 bp, Artificial Sequence
  Oligonucleotide for detection of SNP TSC0023340
aaaaatttaaaac

SEQ ID NO: 93425 - DNA, 13 bp, Artificial Sequence
  Oligonucleotide for detection of SNP TSC0023340
gttttagattttt

SEQ ID NO: 93426 - DNA, 13 bp, Artificial Sequence
  Oligonucleotide for detection of SNP TSC0023340
aaaaatctaaaac

SEQ ID NO: 93427 - DNA, 13 bp, Artificial Sequence
  Oligonucleotide for detection of SNP TSC0023341
ttttgggttttta

SEQ ID NO: 93428 - DNA, 13 bp, Artificial Sequence
  Oligonucleotide for detection of SNP TSC0023341
taaaaacccaaaa

SEQ ID NO: 93429 - DNA, 13 bp, Artificial Sequence
  Oligonucleotide for detection of SNP TSC0023342
ttttttttttaga

SEQ ID NO: 93430 - DNA, 13 bp, Artificial Sequence
  Oligonucleotide for detection of SNP TSC0023342
tctaaaaaaaaaa

SEQ ID NO: 93431 - DNA, 13 bp, Artificial Sequence
  Oligonucleotide for detection of SNP TSC0023342
tttgaatggggga

SEQ ID NO: 93432 - DNA, 13 bp, Artificial Sequence
  Oligonucleotide for detection of SNP TSC0023342
tcccccattcaaa

SEQ ID NO: 93433 - DNA, 13 bp, Artificial Sequence
  Oligonucleotide for detection of SNP TSC0023342
tttgaagggggga

SEQ ID NO: 93434 - DNA, 13 bp, Artificial Sequence
  Oligonucleotide for detection of SNP TSC0023342
tccccccttcaaa

SEQ ID NO: 93435 - DNA, 13 bp, Artificial Sequence
  Oligonucleotide for detection of SNP TSC0023344
gtagggtgtgttt

SEQ ID NO: 93436 - DNA, 13 bp, Artificial Sequence
  Oligonucleotide for detection of SNP TSC0023344
aaacacaccctac

SEQ ID NO: 93437 - DNA, 13 bp, Artificial Sequence
  Oligonucleotide for detection of SNP TSC0023344
gtagggcgtgttt

SEQ ID NO: 93438 - DNA, 13 bp, Artificial Sequence
  Oligonucleotide for detection of SNP TSC0023344
aaacacgccctac

SEQ ID NO: 93439 - DNA, 13 bp, Artificial Sequence
  Oligonucleotide for detection of SNP TSC0023344
agatatgttttay

SEQ ID NO: 93440 - DNA, 13 bp, Artificial Sequence
  Oligonucleotide for detection of SNP TSC0023344
rtaaaacatatct

SEQ ID NO: 93441 - DNA, 13 bp, Artificial Sequence
  Oligonucleotide for detection of SNP TSC0023344
agatatattttay

SEQ ID NO: 93442 - DNA, 13 bp, Artificial Sequence
  Oligonucleotide for detection of SNP TSC0023344
rtaaaatatatct

SEQ ID NO: 93443 - DNA, 13 bp, Artificial Sequence
  Oligonucleotide for detection of SNP TSC0023344
agatacgttttay

SEQ ID NO: 93444 - DNA, 13 bp, Artificial Sequence
  Oligonucleotide for detection of SNP TSC0023344
rtaaaacgtatct

SEQ ID NO: 93445 - DNA, 13 bp, Artificial Sequence
  Oligonucleotide for detection of SNP TSC0023345
ataaaggtattta

SEQ ID NO: 93446 - DNA, 13 bp, Artificial Sequence
  Oligonucleotide for detection of SNP TSC0023345
taaatacctttat

SEQ ID NO: 93447 - DNA, 13 bp, Artificial Sequence
  Oligonucleotide for detection of SNP TSC0023345
ataaagatattta

SEQ ID NO: 93448 - DNA, 13 bp, Artificial Sequence
  Oligonucleotide for detection of SNP TSC0023345
taaatatctttat

SEQ ID NO: 93449 - DNA, 13 bp, Artificial Sequence
  Oligonucleotide for detection of SNP TSC0023346
tgtaaagaaaaay

SEQ ID NO: 93450 - DNA, 13 bp, Artificial Sequence
  Oligonucleotide for detection of SNP TSC0023346
rtttttctttaca

SEQ ID NO: 93451 - DNA, 13 bp, Artificial Sequence
  Oligonucleotide for detection of SNP TSC0023346
tgtaaataaaaay

SEQ ID NO: 93452 - DNA, 13 bp, Artificial Sequence
  Oligonucleotide for detection of SNP TSC0023346
rtttttatttaca

SEQ ID NO: 93453 - DNA, 13 bp, Artificial Sequence
  Oligonucleotide for detection of SNP TSC0023346
gtttttatttgta

SEQ ID NO: 93454 - DNA, 13 bp, Artificial Sequence
  Oligonucleotide for detection of SNP TSC0023346
tacaaataaaaac

SEQ ID NO: 93455 - DNA, 13 bp, Artificial Sequence
  Oligonucleotide for detection of SNP TSC0023347
ggtttagtgttty

SEQ ID NO: 93456 - DNA, 13 bp, Artificial Sequence
  Oligonucleotide for detection of SNP TSC0023347
raaacactaaacc

SEQ ID NO: 93457 - DNA, 13 bp, Artificial Sequence
  Oligonucleotide for detection of SNP TSC0023347
ggtttaatgttty

SEQ ID NO: 93458 - DNA, 13 bp, Artificial Sequence
  Oligonucleotide for detection of SNP TSC0023347
raaacattaaacc

SEQ ID NO: 93459 - DNA, 13 bp, Artificial Sequence
  Oligonucleotide for detection of SNP TSC0023348
tagaagtgtgggt

SEQ ID NO: 93460 - DNA, 13 bp, Artificial Sequence
  Oligonucleotide for detection of SNP TSC0023348
acccacacttcta

SEQ ID NO: 93461 - DNA, 13 bp, Artificial Sequence
  Oligonucleotide for detection of SNP TSC0023348
tagaagcgtgggt

SEQ ID NO: 93462 - DNA, 13 bp, Artificial Sequence
  Oligonucleotide for detection of SNP TSC0023348
acccacgcttcta

SEQ ID NO: 93463 - DNA, 13 bp, Artificial Sequence
  Oligonucleotide for detection of SNP TSC0023350
agagaaaagtaga

SEQ ID NO: 93464 - DNA, 13 bp, Artificial Sequence
  Oligonucleotide for detection of SNP TSC0023350
tctacttttctct

SEQ ID NO: 93465 - DNA, 13 bp, Artificial Sequence
  Oligonucleotide for detection of SNP TSC0023350
agagaagagtaga

SEQ ID NO: 93466 - DNA, 13 bp, Artificial Sequence
  Oligonucleotide for detection of SNP TSC0023350
tctactcttctct

SEQ ID NO: 93467 - DNA, 13 bp, Artificial Sequence
  Oligonucleotide for detection of SNP TSC0023352
taaatagttattg

SEQ ID NO: 93468 - DNA, 13 bp, Artificial Sequence
  Oligonucleotide for detection of SNP TSC0023352
caataactattta

SEQ ID NO: 93469 - DNA, 13 bp, Artificial Sequence
  Oligonucleotide for detection of SNP TSC0023354
taagtagagattg

SEQ ID NO: 93470 - DNA, 13 bp, Artificial Sequence
  Oligonucleotide for detection of SNP TSC0023354
caatctctactta

SEQ ID NO: 93471 - DNA, 13 bp, Artificial Sequence
  Oligonucleotide for detection of SNP TSC0023354
taagtaaagattg

SEQ ID NO: 93472 - DNA, 13 bp, Artificial Sequence
  Oligonucleotide for detection of SNP TSC0023354
caatctttactta

SEQ ID NO: 93473 - DNA, 13 bp, Artificial Sequence
  Oligonucleotide for detection of SNP TSC0023358
ttttttattgata

SEQ ID NO: 93474 - DNA, 13 bp, Artificial Sequence
  Oligonucleotide for detection of SNP TSC0023358
tatcaataaaaaa

SEQ ID NO: 93475 - DNA, 13 bp, Artificial Sequence
  Oligonucleotide for detection of SNP TSC0023358
ttttttgttgata

SEQ ID NO: 93476 - DNA, 13 bp, Artificial Sequence
  Oligonucleotide for detection of SNP TSC0023358
tatcaacaaaaaa

SEQ ID NO: 93477 - DNA, 13 bp, Artificial Sequence
  Oligonucleotide for detection of SNP TSC0023358
tttttcgttgata

SEQ ID NO: 93478 - DNA, 13 bp, Artificial Sequence
  Oligonucleotide for detection of SNP TSC0023358
tatcaacgaaaaa

SEQ ID NO: 93479 - DNA, 13 bp, Artificial Sequence
  Oligonucleotide for detection of SNP TSC0023358
tgttagtgggaaa

SEQ ID NO: 93480 - DNA, 13 bp, Artificial Sequence
  Oligonucleotide for detection of SNP TSC0023358
tttcccactaaca

SEQ ID NO: 93481 - DNA, 13 bp, Artificial Sequence
  Oligonucleotide for detection of SNP TSC0023358
tgttagcgggaaa

SEQ ID NO: 93482 - DNA, 13 bp, Artificial Sequence
  Oligonucleotide for detection of SNP TSC0023358
tttcccgctaaca

SEQ ID NO: 93483 - DNA, 13 bp, Artificial Sequence
  Oligonucleotide for detection of SNP TSC0023360
ggtttagtaagty

SEQ ID NO: 93484 - DNA, 13 bp, Artificial Sequence
  Oligonucleotide for detection of SNP TSC0023360
racttactaaacc

SEQ ID NO: 93485 - DNA, 13 bp, Artificial Sequence
  Oligonucleotide for detection of SNP TSC0023360
ggtttattaagty

SEQ ID NO: 93486 - DNA, 13 bp, Artificial Sequence
  Oligonucleotide for detection of SNP TSC0023360
racttaataaacc

SEQ ID NO: 93487 - DNA, 13 bp, Artificial Sequence
  Oligonucleotide for detection of SNP TSC0023360
ggtttgttggaty

SEQ ID NO: 93488 - DNA, 13 bp, Artificial Sequence
  Oligonucleotide for detection of SNP TSC0023360
ratccaacaaacc

SEQ ID NO: 93489 - DNA, 13 bp, Artificial Sequence
  Oligonucleotide for detection of SNP TSC0023360
ggtttgatggaty

SEQ ID NO: 93490 - DNA, 13 bp, Artificial Sequence
  Oligonucleotide for detection of SNP TSC0023360
ratccatcaaacc

SEQ ID NO: 93491 - DNA, 13 bp, Artificial Sequence
  Oligonucleotide for detection of SNP TSC0023368
gaagaatggaaag

SEQ ID NO: 93492 - DNA, 13 bp, Artificial Sequence
  Oligonucleotide for detection of SNP TSC0023368
ctttccattcttc

SEQ ID NO: 93493 - DNA, 13 bp, Artificial Sequence
  Oligonucleotide for detection of SNP TSC0023368
gaagaacggaaag

SEQ ID NO: 93494 - DNA, 13 bp, Artificial Sequence
  Oligonucleotide for detection of SNP TSC0023368
ctttccgttcttc

SEQ ID NO: 93495 - DNA, 13 bp, Artificial Sequence
  Oligonucleotide for detection of SNP TSC0023369
agtattataatta

SEQ ID NO: 93496 - DNA, 13 bp, Artificial Sequence
  Oligonucleotide for detection of SNP TSC0023369
taattataatact

SEQ ID NO: 93497 - DNA, 13 bp, Artificial Sequence
  Oligonucleotide for detection of SNP TSC0023369
agtattgtaatta

SEQ ID NO: 93498 - DNA, 13 bp, Artificial Sequence
  Oligonucleotide for detection of SNP TSC0023369
taattacaatact

SEQ ID NO: 93499 - DNA, 13 bp, Artificial Sequence
  Oligonucleotide for detection of SNP TSC0023369
agtatcgtaatta

SEQ ID NO: 93500 - DNA, 13 bp, Artificial Sequence
  Oligonucleotide for detection of SNP TSC0023369
taattacgatact

SEQ ID NO: 93501 - DNA, 13 bp, Artificial Sequence
  Oligonucleotide for detection of SNP TSC0023369
tagttatgatatt

SEQ ID NO: 93502 - DNA, 13 bp, Artificial Sequence
  Oligonucleotide for detection of SNP TSC0023369
aatatcataacta

SEQ ID NO: 93503 - DNA, 13 bp, Artificial Sequence
  Oligonucleotide for detection of SNP TSC0023369
tagttacgatatt

SEQ ID NO: 93504 - DNA, 13 bp, Artificial Sequence
  Oligonucleotide for detection of SNP TSC0023369
aatatcgtaacta

SEQ ID NO: 93505 - DNA, 13 bp, Artificial Sequence
  Oligonucleotide for detection of SNP TSC0023370
aaattaatttatt

SEQ ID NO: 93506 - DNA, 13 bp, Artificial Sequence
  Oligonucleotide for detection of SNP TSC0023370
aataaattaattt

SEQ ID NO: 93507 - DNA, 13 bp, Artificial Sequence
  Oligonucleotide for detection of SNP TSC0023370
aaattagtttatt

SEQ ID NO: 93508 - DNA, 13 bp, Artificial Sequence
  Oligonucleotide for detection of SNP TSC0023370
aataaactaattt

SEQ ID NO: 93509 - DNA, 13 bp, Artificial Sequence
  Oligonucleotide for detection of SNP TSC0023371
tatggtaaaattg

SEQ ID NO: 93510 - DNA, 13 bp, Artificial Sequence
  Oligonucleotide for detection of SNP TSC0023371
caattttaccata

SEQ ID NO: 93511 - DNA, 13 bp, Artificial Sequence
  Oligonucleotide for detection of SNP TSC0023371
tatggtgaaattg

SEQ ID NO: 93512 - DNA, 13 bp, Artificial Sequence
  Oligonucleotide for detection of SNP TSC0023371
caatttcaccata

SEQ ID NO: 93513 - DNA, 13 bp, Artificial Sequence
  Oligonucleotide for detection of SNP TSC0023371
tatggcgaaattg

SEQ ID NO: 93514 - DNA, 13 bp, Artificial Sequence
  Oligonucleotide for detection of SNP TSC0023371
caatttcgccata

SEQ ID NO: 93515 - DNA, 13 bp, Artificial Sequence
  Oligonucleotide for detection of SNP TSC0023371
tagttttgttatg

SEQ ID NO: 93516 - DNA, 13 bp, Artificial Sequence
  Oligonucleotide for detection of SNP TSC0023371
cataacaaaacta

SEQ ID NO: 93517 - DNA, 13 bp, Artificial Sequence
  Oligonucleotide for detection of SNP TSC0023371
tagtttcgttatg

SEQ ID NO: 93518 - DNA, 13 bp, Artificial Sequence
  Oligonucleotide for detection of SNP TSC0023371
cataacgaaacta

SEQ ID NO: 93519 - DNA, 13 bp, Artificial Sequence
  Oligonucleotide for detection of SNP TSC0023373
tatttgagtggta

SEQ ID NO: 93520 - DNA, 13 bp, Artificial Sequence
  Oligonucleotide for detection of SNP TSC0023373
taccactcaaata

SEQ ID NO: 93521 - DNA, 13 bp, Artificial Sequence
  Oligonucleotide for detection of SNP TSC0023373
tatttgtgtggta

SEQ ID NO: 93522 - DNA, 13 bp, Artificial Sequence
  Oligonucleotide for detection of SNP TSC0023373
taccacacaaata

SEQ ID NO: 93523 - DNA, 13 bp, Artificial Sequence
  Oligonucleotide for detection of SNP TSC0023373
tatttgcgtggta

SEQ ID NO: 93524 - DNA, 13 bp, Artificial Sequence
  Oligonucleotide for detection of SNP TSC0023373
taccacgcaaata

SEQ ID NO: 93525 - DNA, 13 bp, Artificial Sequence
  Oligonucleotide for detection of SNP TSC0023373
tattatttaggta

SEQ ID NO: 93526 - DNA, 13 bp, Artificial Sequence
  Oligonucleotide for detection of SNP TSC0023373
tacctaaataata

SEQ ID NO: 93527 - DNA, 13 bp, Artificial Sequence
  Oligonucleotide for detection of SNP TSC0023373
tattatgtaggta

SEQ ID NO: 93528 - DNA, 13 bp, Artificial Sequence
  Oligonucleotide for detection of SNP TSC0023373
tacctacataata

SEQ ID NO: 93529 - DNA, 13 bp, Artificial Sequence
  Oligonucleotide for detection of SNP TSC0023373
tattacgtaggta

SEQ ID NO: 93530 - DNA, 13 bp, Artificial Sequence
  Oligonucleotide for detection of SNP TSC0023373
tacctacgtaata

SEQ ID NO: 93531 - DNA, 13 bp, Artificial Sequence
  Oligonucleotide for detection of SNP TSC0023374
aagatgtggagga

SEQ ID NO: 93532 - DNA, 13 bp, Artificial Sequence
  Oligonucleotide for detection of SNP TSC0023374
tcctccacatctt

SEQ ID NO: 93533 - DNA, 13 bp, Artificial Sequence
  Oligonucleotide for detection of SNP TSC0023374
aagatgcggagga

SEQ ID NO: 93534 - DNA, 13 bp, Artificial Sequence
  Oligonucleotide for detection of SNP TSC0023374
tcctccgcatctt

SEQ ID NO: 93535 - DNA, 13 bp, Artificial Sequence
  Oligonucleotide for detection of SNP TSC0023374
ttttttatatttt

SEQ ID NO: 93536 - DNA, 13 bp, Artificial Sequence
  Oligonucleotide for detection of SNP TSC0023374
aaaatataaaaaa

SEQ ID NO: 93537 - DNA, 13 bp, Artificial Sequence
  Oligonucleotide for detection of SNP TSC0023374
tttttcgtatttt

SEQ ID NO: 93538 - DNA, 13 bp, Artificial Sequence
  Oligonucleotide for detection of SNP TSC0023374
aaaatacgaaaaa

SEQ ID NO: 93539 - DNA, 13 bp, Artificial Sequence
  Oligonucleotide for detection of SNP TSC0023376
tattttaattttt

SEQ ID NO: 93540 - DNA, 13 bp, Artificial Sequence
  Oligonucleotide for detection of SNP TSC0023376
aaaaattaaaata

SEQ ID NO: 93541 - DNA, 13 bp, Artificial Sequence
  Oligonucleotide for detection of SNP TSC0023376
tattttgattttt

SEQ ID NO: 93542 - DNA, 13 bp, Artificial Sequence
  Oligonucleotide for detection of SNP TSC0023376
aaaaatcaaaata

SEQ ID NO: 93543 - DNA, 13 bp, Artificial Sequence
  Oligonucleotide for detection of SNP TSC0023376
tatttcgattttt

SEQ ID NO: 93544 - DNA, 13 bp, Artificial Sequence
  Oligonucleotide for detection of SNP TSC0023376
aaaaatcgaaata

SEQ ID NO: 93545 - DNA, 13 bp, Artificial Sequence
  Oligonucleotide for detection of SNP TSC0023376
agaggttgaagtg

SEQ ID NO: 93546 - DNA, 13 bp, Artificial Sequence
  Oligonucleotide for detection of SNP TSC0023376
cacttcaacctct

SEQ ID NO: 93547 - DNA, 13 bp, Artificial Sequence
  Oligonucleotide for detection of SNP TSC0023376
agaggtcgaagtg

SEQ ID NO: 93548 - DNA, 13 bp, Artificial Sequence
  Oligonucleotide for detection of SNP TSC0023376
cacttcgacctct

SEQ ID NO: 93549 - DNA, 13 bp, Artificial Sequence
  Oligonucleotide for detection of SNP TSC0023379
tgagggtttgttt

SEQ ID NO: 93550 - DNA, 13 bp, Artificial Sequence
  Oligonucleotide for detection of SNP TSC0023379
aaacaaaccctca

SEQ ID NO: 93551 - DNA, 13 bp, Artificial Sequence
  Oligonucleotide for detection of SNP TSC0023379
tgaggggttgttt

SEQ ID NO: 93552 - DNA, 13 bp, Artificial Sequence
  Oligonucleotide for detection of SNP TSC0023379
aaacaacccctca

SEQ ID NO: 93553 - DNA, 13 bp, Artificial Sequence
  Oligonucleotide for detection of SNP TSC0023379
cgagggtttgttt

SEQ ID NO: 93554 - DNA, 13 bp, Artificial Sequence
  Oligonucleotide for detection of SNP TSC0023379
aaacaaaccctcg

SEQ ID NO: 93555 - DNA, 13 bp, Artificial Sequence
  Oligonucleotide for detection of SNP TSC0023379
cgaggggttgttt

SEQ ID NO: 93556 - DNA, 13 bp, Artificial Sequence
  Oligonucleotide for detection of SNP TSC0023379
aaacaacccctcg

SEQ ID NO: 93557 - DNA, 13 bp, Artificial Sequence
  Oligonucleotide for detection of SNP TSC0023379
tgagggttcgttt

SEQ ID NO: 93558 - DNA, 13 bp, Artificial Sequence
  Oligonucleotide for detection of SNP TSC0023379
aaacgaaccctca

SEQ ID NO: 93559 - DNA, 13 bp, Artificial Sequence
  Oligonucleotide for detection of SNP TSC0023379
tgaggggtcgttt

SEQ ID NO: 93560 - DNA, 13 bp, Artificial Sequence
  Oligonucleotide for detection of SNP TSC0023379
aaacgacccctca

SEQ ID NO: 93561 - DNA, 13 bp, Artificial Sequence
  Oligonucleotide for detection of SNP TSC0023379
cgagggttcgttt

SEQ ID NO: 93562 - DNA, 13 bp, Artificial Sequence
  Oligonucleotide for detection of SNP TSC0023379
aaacgaaccctcg

SEQ ID NO: 93563 - DNA, 13 bp, Artificial Sequence
  Oligonucleotide for detection of SNP TSC0023379
cgaggggtcgttt

SEQ ID NO: 93564 - DNA, 13 bp, Artificial Sequence
  Oligonucleotide for detection of SNP TSC0023379
aaacgacccctcg

SEQ ID NO: 93565 - DNA, 13 bp, Artificial Sequence
  Oligonucleotide for detection of SNP TSC0023379
aagtgggtttttg

SEQ ID NO: 93566 - DNA, 13 bp, Artificial Sequence
  Oligonucleotide for detection of SNP TSC0023379
caaaaacccactt

SEQ ID NO: 93567 - DNA, 13 bp, Artificial Sequence
  Oligonucleotide for detection of SNP TSC0023379
aagtggttttttg

SEQ ID NO: 93568 - DNA, 13 bp, Artificial Sequence
  Oligonucleotide for detection of SNP TSC0023379
caaaaaaccactt

SEQ ID NO: 93569 - DNA, 13 bp, Artificial Sequence
  Oligonucleotide for detection of SNP TSC0023379
aagcgggtttttg

SEQ ID NO: 93570 - DNA, 13 bp, Artificial Sequence
  Oligonucleotide for detection of SNP TSC0023379
caaaaacccgctt

SEQ ID NO: 93571 - DNA, 13 bp, Artificial Sequence
  Oligonucleotide for detection of SNP TSC0023379
aagcggttttttg

SEQ ID NO: 93572 - DNA, 13 bp, Artificial Sequence
  Oligonucleotide for detection of SNP TSC0023379
caaaaaaccgctt

SEQ ID NO: 93573 - DNA, 13 bp, Artificial Sequence
  Oligonucleotide for detection of SNP TSC0023379
aagtgggttttcg

SEQ ID NO: 93574 - DNA, 13 bp, Artificial Sequence
  Oligonucleotide for detection of SNP TSC0023379
cgaaaacccactt

SEQ ID NO: 93575 - DNA, 13 bp, Artificial Sequence
  Oligonucleotide for detection of SNP TSC0023379
aagtggtttttcg

SEQ ID NO: 93576 - DNA, 13 bp, Artificial Sequence
  Oligonucleotide for detection of SNP TSC0023379
cgaaaaaccactt

SEQ ID NO: 93577 - DNA, 13 bp, Artificial Sequence
  Oligonucleotide for detection of SNP TSC0023379
aagcgggttttcg

SEQ ID NO: 93578 - DNA, 13 bp, Artificial Sequence
  Oligonucleotide for detection of SNP TSC0023379
cgaaaacccgctt

SEQ ID NO: 93579 - DNA, 13 bp, Artificial Sequence
  Oligonucleotide for detection of SNP TSC0023379
aagcggtttttcg

SEQ ID NO: 93580 - DNA, 13 bp, Artificial Sequence
  Oligonucleotide for detection of SNP TSC0023379
cgaaaaaccgctt

SEQ ID NO: 93581 - DNA, 13 bp, Artificial Sequence
  Oligonucleotide for detection of SNP TSC0023380
atggttgatattg

SEQ ID NO: 93582 - DNA, 13 bp, Artificial Sequence
  Oligonucleotide for detection of SNP TSC0023380
caatatcaaccat

SEQ ID NO: 93583 - DNA, 13 bp, Artificial Sequence
  Oligonucleotide for detection of SNP TSC0023380
atggttaatattg

SEQ ID NO: 93584 - DNA, 13 bp, Artificial Sequence
  Oligonucleotide for detection of SNP TSC0023380
caatattaaccat

SEQ ID NO: 93585 - DNA, 13 bp, Artificial Sequence
  Oligonucleotide for detection of SNP TSC0023381
aagtttgttgaga

SEQ ID NO: 93586 - DNA, 13 bp, Artificial Sequence
  Oligonucleotide for detection of SNP TSC0023381
tctcaacaaactt

SEQ ID NO: 93587 - DNA, 13 bp, Artificial Sequence
  Oligonucleotide for detection of SNP TSC0023381
aagtttattgaga

SEQ ID NO: 93588 - DNA, 13 bp, Artificial Sequence
  Oligonucleotide for detection of SNP TSC0023381
tctcaataaactt

SEQ ID NO: 93589 - DNA, 13 bp, Artificial Sequence
  Oligonucleotide for detection of SNP TSC0023382
gtttgtaagaaty

SEQ ID NO: 93590 - DNA, 13 bp, Artificial Sequence
  Oligonucleotide for detection of SNP TSC0023382
rattcttacaaac

SEQ ID NO: 93591 - DNA, 13 bp, Artificial Sequence
  Oligonucleotide for detection of SNP TSC0023382
gtttgtgagaaty

SEQ ID NO: 93592 - DNA, 13 bp, Artificial Sequence
  Oligonucleotide for detection of SNP TSC0023382
rattctcacaaac

SEQ ID NO: 93593 - DNA, 13 bp, Artificial Sequence
  Oligonucleotide for detection of SNP TSC0023382
gttcgtaagaaty

SEQ ID NO: 93594 - DNA, 13 bp, Artificial Sequence
  Oligonucleotide for detection of SNP TSC0023382
rattcttacgaac

SEQ ID NO: 93595 - DNA, 13 bp, Artificial Sequence
  Oligonucleotide for detection of SNP TSC0023382
gttcgtgagaaty

SEQ ID NO: 93596 - DNA, 13 bp, Artificial Sequence
  Oligonucleotide for detection of SNP TSC0023382
rattctcacgaac

SEQ ID NO: 93597 - DNA, 13 bp, Artificial Sequence
  Oligonucleotide for detection of SNP TSC0023383
gtgggaagggttt

SEQ ID NO: 93598 - DNA, 13 bp, Artificial Sequence
  Oligonucleotide for detection of SNP TSC0023383
aaacccttcccac

SEQ ID NO: 93599 - DNA, 13 bp, Artificial Sequence
  Oligonucleotide for detection of SNP TSC0023383
gtgggaggggttt

SEQ ID NO: 93600 - DNA, 13 bp, Artificial Sequence
  Oligonucleotide for detection of SNP TSC0023383
aaacccctcccac

SEQ ID NO: 93601 - DNA, 13 bp, Artificial Sequence
  Oligonucleotide for detection of SNP TSC0023383
gcgggaagggttt

SEQ ID NO: 93602 - DNA, 13 bp, Artificial Sequence
  Oligonucleotide for detection of SNP TSC0023383
aaacccttcccgc

SEQ ID NO: 93603 - DNA, 13 bp, Artificial Sequence
  Oligonucleotide for detection of SNP TSC0023383
gcgggaggggttt

SEQ ID NO: 93604 - DNA, 13 bp, Artificial Sequence
  Oligonucleotide for detection of SNP TSC0023383
aaacccctcccgc

SEQ ID NO: 93605 - DNA, 13 bp, Artificial Sequence
  Oligonucleotide for detection of SNP TSC0023387
atgtatagaaata

SEQ ID NO: 93606 - DNA, 13 bp, Artificial Sequence
  Oligonucleotide for detection of SNP TSC0023387
tatttctatacat

SEQ ID NO: 93607 - DNA, 13 bp, Artificial Sequence
  Oligonucleotide for detection of SNP TSC0023387
atgtattgaaata

SEQ ID NO: 93608 - DNA, 13 bp, Artificial Sequence
  Oligonucleotide for detection of SNP TSC0023387
tatttcaatacat

SEQ ID NO: 93609 - DNA, 13 bp, Artificial Sequence
  Oligonucleotide for detection of SNP TSC0023387
atgtatcgaaata

SEQ ID NO: 93610 - DNA, 13 bp, Artificial Sequence
  Oligonucleotide for detection of SNP TSC0023387
tatttcgatacat

SEQ ID NO: 93611 - DNA, 13 bp, Artificial Sequence
  Oligonucleotide for detection of SNP TSC0023387
tatttttgtatat

SEQ ID NO: 93612 - DNA, 13 bp, Artificial Sequence
  Oligonucleotide for detection of SNP TSC0023387
atatacaaaaata

SEQ ID NO: 93613 - DNA, 13 bp, Artificial Sequence
  Oligonucleotide for detection of SNP TSC0023387
tattttggtatat

SEQ ID NO: 93614 - DNA, 13 bp, Artificial Sequence
  Oligonucleotide for detection of SNP TSC0023387
atataccaaaata

SEQ ID NO: 93615 - DNA, 13 bp, Artificial Sequence
  Oligonucleotide for detection of SNP TSC0023387
tatttcggtatat

SEQ ID NO: 93616 - DNA, 13 bp, Artificial Sequence
  Oligonucleotide for detection of SNP TSC0023387
atataccgaaata

SEQ ID NO: 93617 - DNA, 13 bp, Artificial Sequence
  Oligonucleotide for detection of SNP TSC0023388
ttgtgtagaggtg

SEQ ID NO: 93618 - DNA, 13 bp, Artificial Sequence
  Oligonucleotide for detection of SNP TSC0023388
cacctctacacaa

SEQ ID NO: 93619 - DNA, 13 bp, Artificial Sequence
  Oligonucleotide for detection of SNP TSC0023388
ttgtgtggaggtg

SEQ ID NO: 93620 - DNA, 13 bp, Artificial Sequence
  Oligonucleotide for detection of SNP TSC0023388
cacctccacacaa

SEQ ID NO: 93621 - DNA, 13 bp, Artificial Sequence
  Oligonucleotide for detection of SNP TSC0023388
ttgtgcggaggtg

SEQ ID NO: 93622 - DNA, 13 bp, Artificial Sequence
  Oligonucleotide for detection of SNP TSC0023388
cacctccgcacaa

SEQ ID NO: 93623 - DNA, 13 bp, Artificial Sequence
  Oligonucleotide for detection of SNP TSC0023388
tatttttgtatag

SEQ ID NO: 93624 - DNA, 13 bp, Artificial Sequence
  Oligonucleotide for detection of SNP TSC0023388
ctatacaaaaata

SEQ ID NO: 93625 - DNA, 13 bp, Artificial Sequence
  Oligonucleotide for detection of SNP TSC0023388
tattttcgtatag

SEQ ID NO: 93626 - DNA, 13 bp, Artificial Sequence
  Oligonucleotide for detection of SNP TSC0023388
ctatacgaaaata

SEQ ID NO: 93627 - DNA, 13 bp, Artificial Sequence
  Oligonucleotide for detection of SNP TSC0023389
tttttgatgggga

SEQ ID NO: 93628 - DNA, 13 bp, Artificial Sequence
  Oligonucleotide for detection of SNP TSC0023389
tccccatcaaaaa

SEQ ID NO: 93629 - DNA, 13 bp, Artificial Sequence
  Oligonucleotide for detection of SNP TSC0023389
tttttgttgggga

SEQ ID NO: 93630 - DNA, 13 bp, Artificial Sequence
  Oligonucleotide for detection of SNP TSC0023389
tccccaacaaaaa

SEQ ID NO: 93631 - DNA, 13 bp, Artificial Sequence
  Oligonucleotide for detection of SNP TSC0023389
tttttattagaaa

SEQ ID NO: 93632 - DNA, 13 bp, Artificial Sequence
  Oligonucleotide for detection of SNP TSC0023389
tttctaataaaaa

SEQ ID NO: 93633 - DNA, 13 bp, Artificial Sequence
  Oligonucleotide for detection of SNP TSC0023389
tttttaatagaaa

SEQ ID NO: 93634 - DNA, 13 bp, Artificial Sequence
  Oligonucleotide for detection of SNP TSC0023389
tttctattaaaaa

SEQ ID NO: 93635 - DNA, 13 bp, Artificial Sequence
  Oligonucleotide for detection of SNP TSC0023390
ttgaaaaatagtt

SEQ ID NO: 93636 - DNA, 13 bp, Artificial Sequence
  Oligonucleotide for detection of SNP TSC0023390
aactatttttcaa

SEQ ID NO: 93637 - DNA, 13 bp, Artificial Sequence
  Oligonucleotide for detection of SNP TSC0023390
ttgaaatatagtt

SEQ ID NO: 93638 - DNA, 13 bp, Artificial Sequence
  Oligonucleotide for detection of SNP TSC0023390
aactatatttcaa

SEQ ID NO: 93639 - DNA, 13 bp, Artificial Sequence
  Oligonucleotide for detection of SNP TSC0023390
agttattttttag

SEQ ID NO: 93640 - DNA, 13 bp, Artificial Sequence
  Oligonucleotide for detection of SNP TSC0023390
ctaaaaaataact

SEQ ID NO: 93641 - DNA, 13 bp, Artificial Sequence
  Oligonucleotide for detection of SNP TSC0023390
agttatattttag

SEQ ID NO: 93642 - DNA, 13 bp, Artificial Sequence
  Oligonucleotide for detection of SNP TSC0023390
ctaaaatataact

SEQ ID NO: 93643 - DNA, 13 bp, Artificial Sequence
  Oligonucleotide for detection of SNP TSC0023391
ggaaaatggtatt

SEQ ID NO: 93644 - DNA, 13 bp, Artificial Sequence
  Oligonucleotide for detection of SNP TSC0023391
aataccattttcc

SEQ ID NO: 93645 - DNA, 13 bp, Artificial Sequence
  Oligonucleotide for detection of SNP TSC0023391
ggaaaacggtatt

SEQ ID NO: 93646 - DNA, 13 bp, Artificial Sequence
  Oligonucleotide for detection of SNP TSC0023391
aataccgttttcc

SEQ ID NO: 93647 - DNA, 13 bp, Artificial Sequence
  Oligonucleotide for detection of SNP TSC0023391
agtgttgttttty

SEQ ID NO: 93648 - DNA, 13 bp, Artificial Sequence
  Oligonucleotide for detection of SNP TSC0023391
raaaaacaacact

SEQ ID NO: 93649 - DNA, 13 bp, Artificial Sequence
  Oligonucleotide for detection of SNP TSC0023391
agtgttattttty

SEQ ID NO: 93650 - DNA, 13 bp, Artificial Sequence
  Oligonucleotide for detection of SNP TSC0023391
raaaaataacact

SEQ ID NO: 93651 - DNA, 13 bp, Artificial Sequence
  Oligonucleotide for detection of SNP TSC0023391
agtgtcgttttty

SEQ ID NO: 93652 - DNA, 13 bp, Artificial Sequence
  Oligonucleotide for detection of SNP TSC0023391
raaaaacgacact

SEQ ID NO: 93653 - DNA, 13 bp, Artificial Sequence
  Oligonucleotide for detection of SNP TSC0023393
gtttatgtatagg

SEQ ID NO: 93654 - DNA, 13 bp, Artificial Sequence
  Oligonucleotide for detection of SNP TSC0023393
cctatacataaac

SEQ ID NO: 93655 - DNA, 13 bp, Artificial Sequence
  Oligonucleotide for detection of SNP TSC0023393
gtttatatatagg

SEQ ID NO: 93656 - DNA, 13 bp, Artificial Sequence
  Oligonucleotide for detection of SNP TSC0023393
cctatatataaac

SEQ ID NO: 93657 - DNA, 13 bp, Artificial Sequence
  Oligonucleotide for detection of SNP TSC0023394
tttttattagagg

SEQ ID NO: 93658 - DNA, 13 bp, Artificial Sequence
  Oligonucleotide for detection of SNP TSC0023394
cctctaataaaaa

SEQ ID NO: 93659 - DNA, 13 bp, Artificial Sequence
  Oligonucleotide for detection of SNP TSC0023394
tttttagtagagg

SEQ ID NO: 93660 - DNA, 13 bp, Artificial Sequence
  Oligonucleotide for detection of SNP TSC0023394
cctctactaaaaa

SEQ ID NO: 93661 - DNA, 13 bp, Artificial Sequence
  Oligonucleotide for detection of SNP TSC0023394
tttttggtgggaa

SEQ ID NO: 93662 - DNA, 13 bp, Artificial Sequence
  Oligonucleotide for detection of SNP TSC0023394
ttcccaccaaaaa

SEQ ID NO: 93663 - DNA, 13 bp, Artificial Sequence
  Oligonucleotide for detection of SNP TSC0023394
tttttgttgggaa

SEQ ID NO: 93664 - DNA, 13 bp, Artificial Sequence
  Oligonucleotide for detection of SNP TSC0023394
ttcccaacaaaaa

SEQ ID NO: 93665 - DNA, 13 bp, Artificial Sequence
  Oligonucleotide for detection of SNP TSC0023398
gatgataataata

SEQ ID NO: 93666 - DNA, 13 bp, Artificial Sequence
  Oligonucleotide for detection of SNP TSC0023398
tattattatcatc

SEQ ID NO: 93667 - DNA, 13 bp, Artificial Sequence
  Oligonucleotide for detection of SNP TSC0023398
gatgatgataata

SEQ ID NO: 93668 - DNA, 13 bp, Artificial Sequence
  Oligonucleotide for detection of SNP TSC0023398
tattatcatcatc

SEQ ID NO: 93669 - DNA, 13 bp, Artificial Sequence
  Oligonucleotide for detection of SNP TSC0023398
gatgacgataata

SEQ ID NO: 93670 - DNA, 13 bp, Artificial Sequence
  Oligonucleotide for detection of SNP TSC0023398
tattatcgtcatc

SEQ ID NO: 93671 - DNA, 13 bp, Artificial Sequence
  Oligonucleotide for detection of SNP TSC0023398
tattgttgttaty

SEQ ID NO: 93672 - DNA, 13 bp, Artificial Sequence
  Oligonucleotide for detection of SNP TSC0023398
rataacaacaata

SEQ ID NO: 93673 - DNA, 13 bp, Artificial Sequence
  Oligonucleotide for detection of SNP TSC0023398
tattgtcgttaty

SEQ ID NO: 93674 - DNA, 13 bp, Artificial Sequence
  Oligonucleotide for detection of SNP TSC0023398
rataacgacaata

SEQ ID NO: 93675 - DNA, 13 bp, Artificial Sequence
  Oligonucleotide for detection of SNP TSC0023399
aaggtagagtttt

SEQ ID NO: 93676 - DNA, 13 bp, Artificial Sequence
  Oligonucleotide for detection of SNP TSC0023399
aaaactctacctt

SEQ ID NO: 93677 - DNA, 13 bp, Artificial Sequence
  Oligonucleotide for detection of SNP TSC0023399
aaggtatagtttt

SEQ ID NO: 93678 - DNA, 13 bp, Artificial Sequence
  Oligonucleotide for detection of SNP TSC0023399
aaaactatacctt

SEQ ID NO: 93679 - DNA, 13 bp, Artificial Sequence
  Oligonucleotide for detection of SNP TSC0023399
agaattttatttt

SEQ ID NO: 93680 - DNA, 13 bp, Artificial Sequence
  Oligonucleotide for detection of SNP TSC0023399
aaaataaaattct

SEQ ID NO: 93681 - DNA, 13 bp, Artificial Sequence
  Oligonucleotide for detection of SNP TSC0023399
agaattatatttt

SEQ ID NO: 93682 - DNA, 13 bp, Artificial Sequence
  Oligonucleotide for detection of SNP TSC0023399
aaaatataattct

SEQ ID NO: 93683 - DNA, 13 bp, Artificial Sequence
  Oligonucleotide for detection of SNP TSC0023400
atatatataagag

SEQ ID NO: 93684 - DNA, 13 bp, Artificial Sequence
  Oligonucleotide for detection of SNP TSC0023400
ctcttatatatat

SEQ ID NO: 93685 - DNA, 13 bp, Artificial Sequence
  Oligonucleotide for detection of SNP TSC0023400
atatatgtaagag

SEQ ID NO: 93686 - DNA, 13 bp, Artificial Sequence
  Oligonucleotide for detection of SNP TSC0023400
ctcttacatatat

SEQ ID NO: 93687 - DNA, 13 bp, Artificial Sequence
  Oligonucleotide for detection of SNP TSC0023400
atatacgtaagag

SEQ ID NO: 93688 - DNA, 13 bp, Artificial Sequence
  Oligonucleotide for detection of SNP TSC0023400
ctcttacgtatat

SEQ ID NO: 93689 - DNA, 13 bp, Artificial Sequence
  Oligonucleotide for detection of SNP TSC0023400
tttttatgtatgt

SEQ ID NO: 93690 - DNA, 13 bp, Artificial Sequence
  Oligonucleotide for detection of SNP TSC0023400
acatacataaaaa

SEQ ID NO: 93691 - DNA, 13 bp, Artificial Sequence
  Oligonucleotide for detection of SNP TSC0023400
tttttacgtatgt

SEQ ID NO: 93692 - DNA, 13 bp, Artificial Sequence
  Oligonucleotide for detection of SNP TSC0023400
acatacgtaaaaa

SEQ ID NO: 93693 - DNA, 13 bp, Artificial Sequence
  Oligonucleotide for detection of SNP TSC0023405
aatgtgataatta

SEQ ID NO: 93694 - DNA, 13 bp, Artificial Sequence
  Oligonucleotide for detection of SNP TSC0023405
taattatcacatt

SEQ ID NO: 93695 - DNA, 13 bp, Artificial Sequence
  Oligonucleotide for detection of SNP TSC0023405
aatgtggtaatta

SEQ ID NO: 93696 - DNA, 13 bp, Artificial Sequence
  Oligonucleotide for detection of SNP TSC0023405
taattaccacatt

SEQ ID NO: 93697 - DNA, 13 bp, Artificial Sequence
  Oligonucleotide for detection of SNP TSC0023406
atttgttgtttty

SEQ ID NO: 93698 - DNA, 13 bp, Artificial Sequence
  Oligonucleotide for detection of SNP TSC0023406
raaaacaacaaat

SEQ ID NO: 93699 - DNA, 13 bp, Artificial Sequence
  Oligonucleotide for detection of SNP TSC0023406
atttgtcgtttty

SEQ ID NO: 93700 - DNA, 13 bp, Artificial Sequence
  Oligonucleotide for detection of SNP TSC0023406
raaaacgacaaat

SEQ ID NO: 93701 - DNA, 13 bp, Artificial Sequence
  Oligonucleotide for detection of SNP TSC0023406
gggagtggtaagt

SEQ ID NO: 93702 - DNA, 13 bp, Artificial Sequence
  Oligonucleotide for detection of SNP TSC0023406
acttaccactccc

SEQ ID NO: 93703 - DNA, 13 bp, Artificial Sequence
  Oligonucleotide for detection of SNP TSC0023406
gggagtagtaagt

SEQ ID NO: 93704 - DNA, 13 bp, Artificial Sequence
  Oligonucleotide for detection of SNP TSC0023406
acttactactccc

SEQ ID NO: 93705 - DNA, 13 bp, Artificial Sequence
  Oligonucleotide for detection of SNP TSC0023406
gggagcggtaagt

SEQ ID NO: 93706 - DNA, 13 bp, Artificial Sequence
  Oligonucleotide for detection of SNP TSC0023406
acttaccgctccc

SEQ ID NO: 93707 - DNA, 13 bp, Artificial Sequence
  Oligonucleotide for detection of SNP TSC0023408
tgattaataatay

SEQ ID NO: 93708 - DNA, 13 bp, Artificial Sequence
  Oligonucleotide for detection of SNP TSC0023408
rtattattaatca

SEQ ID NO: 93709 - DNA, 13 bp, Artificial Sequence
  Oligonucleotide for detection of SNP TSC0023408
tgattagtaatay

SEQ ID NO: 93710 - DNA, 13 bp, Artificial Sequence
  Oligonucleotide for detection of SNP TSC0023408
rtattactaatca

SEQ ID NO: 93711 - DNA, 13 bp, Artificial Sequence
  Oligonucleotide for detection of SNP TSC0023409
agtttgaggaggg

SEQ ID NO: 93712 - DNA, 13 bp, Artificial Sequence
  Oligonucleotide for detection of SNP TSC0023409
ccctcctcaaact

SEQ ID NO: 93713 - DNA, 13 bp, Artificial Sequence
  Oligonucleotide for detection of SNP TSC0023409
agtttggggaggg

SEQ ID NO: 93714 - DNA, 13 bp, Artificial Sequence
  Oligonucleotide for detection of SNP TSC0023409
ccctccccaaact

SEQ ID NO: 93715 - DNA, 13 bp, Artificial Sequence
  Oligonucleotide for detection of SNP TSC0023412
ggtatttgttaty

SEQ ID NO: 93716 - DNA, 13 bp, Artificial Sequence
  Oligonucleotide for detection of SNP TSC0023412
rataacaaatacc

SEQ ID NO: 93717 - DNA, 13 bp, Artificial Sequence
  Oligonucleotide for detection of SNP TSC0023412
ggtattcgttaty

SEQ ID NO: 93718 - DNA, 13 bp, Artificial Sequence
  Oligonucleotide for detection of SNP TSC0023412
rataacgaatacc

SEQ ID NO: 93719 - DNA, 13 bp, Artificial Sequence
  Oligonucleotide for detection of SNP TSC0023413
ttattaattgata

SEQ ID NO: 93720 - DNA, 13 bp, Artificial Sequence
  Oligonucleotide for detection of SNP TSC0023413
tatcaattaataa

SEQ ID NO: 93721 - DNA, 13 bp, Artificial Sequence
  Oligonucleotide for detection of SNP TSC0023413
ttattatttgata

SEQ ID NO: 93722 - DNA, 13 bp, Artificial Sequence
  Oligonucleotide for detection of SNP TSC0023413
tatcaaataataa

SEQ ID NO: 93723 - DNA, 13 bp, Artificial Sequence
  Oligonucleotide for detection of SNP TSC0023413
tgttagttgatgg

SEQ ID NO: 93724 - DNA, 13 bp, Artificial Sequence
  Oligonucleotide for detection of SNP TSC0023413
ccatcaactaaca

SEQ ID NO: 93725 - DNA, 13 bp, Artificial Sequence
  Oligonucleotide for detection of SNP TSC0023413
tgttaggtgatgg

SEQ ID NO: 93726 - DNA, 13 bp, Artificial Sequence
  Oligonucleotide for detection of SNP TSC0023413
ccatcacctaaca

SEQ ID NO: 93727 - DNA, 13 bp, Artificial Sequence
  Oligonucleotide for detection of SNP TSC0023414
aaatagggggaag

SEQ ID NO: 93728 - DNA, 13 bp, Artificial Sequence
  Oligonucleotide for detection of SNP TSC0023414
cttccccctattt

SEQ ID NO: 93729 - DNA, 13 bp, Artificial Sequence
  Oligonucleotide for detection of SNP TSC0023414
aaatagtgggaag

SEQ ID NO: 93730 - DNA, 13 bp, Artificial Sequence
  Oligonucleotide for detection of SNP TSC0023414
cttcccactattt

SEQ ID NO: 93731 - DNA, 13 bp, Artificial Sequence
  Oligonucleotide for detection of SNP TSC0023415
ttattatagttgg

SEQ ID NO: 93732 - DNA, 13 bp, Artificial Sequence
  Oligonucleotide for detection of SNP TSC0023415
ccaactataataa

SEQ ID NO: 93733 - DNA, 13 bp, Artificial Sequence
  Oligonucleotide for detection of SNP TSC0023415
ttattagagttgg

SEQ ID NO: 93734 - DNA, 13 bp, Artificial Sequence
  Oligonucleotide for detection of SNP TSC0023415
ccaactctaataa

SEQ ID NO: 93735 - DNA, 13 bp, Artificial Sequence
  Oligonucleotide for detection of SNP TSC0023415
ttaattgtgatgg

SEQ ID NO: 93736 - DNA, 13 bp, Artificial Sequence
  Oligonucleotide for detection of SNP TSC0023415
ccatcacaattaa

SEQ ID NO: 93737 - DNA, 13 bp, Artificial Sequence
  Oligonucleotide for detection of SNP TSC0023415
ttaattttgatgg

SEQ ID NO: 93738 - DNA, 13 bp, Artificial Sequence
  Oligonucleotide for detection of SNP TSC0023415
ccatcaaaattaa

SEQ ID NO: 93739 - DNA, 13 bp, Artificial Sequence
  Oligonucleotide for detection of SNP TSC0023416
taattaaagaaay

SEQ ID NO: 93740 - DNA, 13 bp, Artificial Sequence
  Oligonucleotide for detection of SNP TSC0023416
rtttctttaatta

SEQ ID NO: 93741 - DNA, 13 bp, Artificial Sequence
  Oligonucleotide for detection of SNP TSC0023416
taattagagaaay

SEQ ID NO: 93742 - DNA, 13 bp, Artificial Sequence
  Oligonucleotide for detection of SNP TSC0023416
rtttctctaatta

SEQ ID NO: 93743 - DNA, 13 bp, Artificial Sequence
  Oligonucleotide for detection of SNP TSC0023418
agattttgtttaa

SEQ ID NO: 93744 - DNA, 13 bp, Artificial Sequence
  Oligonucleotide for detection of SNP TSC0023418
ttaaacaaaatct

SEQ ID NO: 93745 - DNA, 13 bp, Artificial Sequence
  Oligonucleotide for detection of SNP TSC0023418
agatttcgtttaa

SEQ ID NO: 93746 - DNA, 13 bp, Artificial Sequence
  Oligonucleotide for detection of SNP TSC0023418
ttaaacgaaatct

SEQ ID NO: 93747 - DNA, 13 bp, Artificial Sequence
  Oligonucleotide for detection of SNP TSC0023418
ttagatggggttt

SEQ ID NO: 93748 - DNA, 13 bp, Artificial Sequence
  Oligonucleotide for detection of SNP TSC0023418
aaaccccatctaa

SEQ ID NO: 93749 - DNA, 13 bp, Artificial Sequence
  Oligonucleotide for detection of SNP TSC0023418
ttagatagggttt

SEQ ID NO: 93750 - DNA, 13 bp, Artificial Sequence
  Oligonucleotide for detection of SNP TSC0023418
aaaccctatctaa

SEQ ID NO: 93751 - DNA, 13 bp, Artificial Sequence
  Oligonucleotide for detection of SNP TSC0023418
ttagacggggttt

SEQ ID NO: 93752 - DNA, 13 bp, Artificial Sequence
  Oligonucleotide for detection of SNP TSC0023418
aaaccccgtctaa

SEQ ID NO: 93753 - DNA, 13 bp, Artificial Sequence
  Oligonucleotide for detection of SNP TSC0023420
agggttatgtttg

SEQ ID NO: 93754 - DNA, 13 bp, Artificial Sequence
  Oligonucleotide for detection of SNP TSC0023420
caaacataaccct

SEQ ID NO: 93755 - DNA, 13 bp, Artificial Sequence
  Oligonucleotide for detection of SNP TSC0023420
agggttgtgtttg

SEQ ID NO: 93756 - DNA, 13 bp, Artificial Sequence
  Oligonucleotide for detection of SNP TSC0023420
caaacacaaccct

SEQ ID NO: 93757 - DNA, 13 bp, Artificial Sequence
  Oligonucleotide for detection of SNP TSC0023420
agggtcgtgtttg

SEQ ID NO: 93758 - DNA, 13 bp, Artificial Sequence
  Oligonucleotide for detection of SNP TSC0023420
caaacacgaccct

SEQ ID NO: 93759 - DNA, 13 bp, Artificial Sequence
  Oligonucleotide for detection of SNP TSC0023420
tagatatggtttt

SEQ ID NO: 93760 - DNA, 13 bp, Artificial Sequence
  Oligonucleotide for detection of SNP TSC0023420
aaaaccatatcta

SEQ ID NO: 93761 - DNA, 13 bp, Artificial Sequence
  Oligonucleotide for detection of SNP TSC0023420
tagatacggtttt

SEQ ID NO: 93762 - DNA, 13 bp, Artificial Sequence
  Oligonucleotide for detection of SNP TSC0023420
aaaaccgtatcta

SEQ ID NO: 93763 - DNA, 13 bp, Artificial Sequence
  Oligonucleotide for detection of SNP TSC0023421
attagtagagaga

SEQ ID NO: 93764 - DNA, 13 bp, Artificial Sequence
  Oligonucleotide for detection of SNP TSC0023421
tctctctactaat

SEQ ID NO: 93765 - DNA, 13 bp, Artificial Sequence
  Oligonucleotide for detection of SNP TSC0023421
attagtggagaga

SEQ ID NO: 93766 - DNA, 13 bp, Artificial Sequence
  Oligonucleotide for detection of SNP TSC0023421
tctctccactaat

SEQ ID NO: 93767 - DNA, 13 bp, Artificial Sequence
  Oligonucleotide for detection of SNP TSC0023422
tttggaaagggta

SEQ ID NO: 93768 - DNA, 13 bp, Artificial Sequence
  Oligonucleotide for detection of SNP TSC0023422
taccctttccaaa

SEQ ID NO: 93769 - DNA, 13 bp, Artificial Sequence
  Oligonucleotide for detection of SNP TSC0023422
tttggagagggta

SEQ ID NO: 93770 - DNA, 13 bp, Artificial Sequence
  Oligonucleotide for detection of SNP TSC0023422
taccctctccaaa

SEQ ID NO: 93771 - DNA, 13 bp, Artificial Sequence
  Oligonucleotide for detection of SNP TSC0023426
agggttgtttttt

SEQ ID NO: 93772 - DNA, 13 bp, Artificial Sequence
  Oligonucleotide for detection of SNP TSC0023426
aaaaaacaaccct

SEQ ID NO: 93773 - DNA, 13 bp, Artificial Sequence
  Oligonucleotide for detection of SNP TSC0023426
agggtcgtttttt

SEQ ID NO: 93774 - DNA, 13 bp, Artificial Sequence
  Oligonucleotide for detection of SNP TSC0023426
aaaaaacgaccct

SEQ ID NO: 93775 - DNA, 13 bp, Artificial Sequence
  Oligonucleotide for detection of SNP TSC0023427
ttggatgttttgg

SEQ ID NO: 93776 - DNA, 13 bp, Artificial Sequence
  Oligonucleotide for detection of SNP TSC0023427
ccaaaacatccaa

SEQ ID NO: 93777 - DNA, 13 bp, Artificial Sequence
  Oligonucleotide for detection of SNP TSC0023427
ttggattttttgg

SEQ ID NO: 93778 - DNA, 13 bp, Artificial Sequence
  Oligonucleotide for detection of SNP TSC0023427
ccaaaaaatccaa

SEQ ID NO: 93779 - DNA, 13 bp, Artificial Sequence
  Oligonucleotide for detection of SNP TSC0023427
ttggacgttttgg

SEQ ID NO: 93780 - DNA, 13 bp, Artificial Sequence
  Oligonucleotide for detection of SNP TSC0023427
ccaaaacgtccaa

SEQ ID NO: 93781 - DNA, 13 bp, Artificial Sequence
  Oligonucleotide for detection of SNP TSC0023427
ttaagatgtttaa

SEQ ID NO: 93782 - DNA, 13 bp, Artificial Sequence
  Oligonucleotide for detection of SNP TSC0023427
ttaaacatcttaa

SEQ ID NO: 93783 - DNA, 13 bp, Artificial Sequence
  Oligonucleotide for detection of SNP TSC0023427
ttaagaagtttaa

SEQ ID NO: 93784 - DNA, 13 bp, Artificial Sequence
  Oligonucleotide for detection of SNP TSC0023427
ttaaacttcttaa

SEQ ID NO: 93785 - DNA, 13 bp, Artificial Sequence
  Oligonucleotide for detection of SNP TSC0023427
ttaagacgtttaa

SEQ ID NO: 93786 - DNA, 13 bp, Artificial Sequence
  Oligonucleotide for detection of SNP TSC0023427
ttaaacgtcttaa

SEQ ID NO: 93787 - DNA, 13 bp, Artificial Sequence
  Oligonucleotide for detection of SNP TSC0023429
agaaagtggtagg

SEQ ID NO: 93788 - DNA, 13 bp, Artificial Sequence
  Oligonucleotide for detection of SNP TSC0023429
cctaccactttct

SEQ ID NO: 93789 - DNA, 13 bp, Artificial Sequence
  Oligonucleotide for detection of SNP TSC0023429
agaaagcggtagg

SEQ ID NO: 93790 - DNA, 13 bp, Artificial Sequence
  Oligonucleotide for detection of SNP TSC0023429
cctaccgctttct

SEQ ID NO: 93791 - DNA, 13 bp, Artificial Sequence
  Oligonucleotide for detection of SNP TSC0023431
tattttgaatttt

SEQ ID NO: 93792 - DNA, 13 bp, Artificial Sequence
  Oligonucleotide for detection of SNP TSC0023431
aaaattcaaaata

SEQ ID NO: 93793 - DNA, 13 bp, Artificial Sequence
  Oligonucleotide for detection of SNP TSC0023431
tattttaaatttt

SEQ ID NO: 93794 - DNA, 13 bp, Artificial Sequence
  Oligonucleotide for detection of SNP TSC0023431
aaaatttaaaata

SEQ ID NO: 93795 - DNA, 13 bp, Artificial Sequence
  Oligonucleotide for detection of SNP TSC0023432
aaattatgttatg

SEQ ID NO: 93796 - DNA, 13 bp, Artificial Sequence
  Oligonucleotide for detection of SNP TSC0023432
cataacataattt

SEQ ID NO: 93797 - DNA, 13 bp, Artificial Sequence
  Oligonucleotide for detection of SNP TSC0023432
aaattacgttatg

SEQ ID NO: 93798 - DNA, 13 bp, Artificial Sequence
  Oligonucleotide for detection of SNP TSC0023432
cataacgtaattt

SEQ ID NO: 93799 - DNA, 13 bp, Artificial Sequence
  Oligonucleotide for detection of SNP TSC0023432
tatgatgtgattt

SEQ ID NO: 93800 - DNA, 13 bp, Artificial Sequence
  Oligonucleotide for detection of SNP TSC0023432
aaatcacatcata

SEQ ID NO: 93801 - DNA, 13 bp, Artificial Sequence
  Oligonucleotide for detection of SNP TSC0023432
tatgatatgattt

SEQ ID NO: 93802 - DNA, 13 bp, Artificial Sequence
  Oligonucleotide for detection of SNP TSC0023432
aaatcatatcata

SEQ ID NO: 93803 - DNA, 13 bp, Artificial Sequence
  Oligonucleotide for detection of SNP TSC0023432
tatgacgtgattt

SEQ ID NO: 93804 - DNA, 13 bp, Artificial Sequence
  Oligonucleotide for detection of SNP TSC0023432
aaatcacgtcata

SEQ ID NO: 93805 - DNA, 13 bp, Artificial Sequence
  Oligonucleotide for detection of SNP TSC0023434
tgttggagaaata

SEQ ID NO: 93806 - DNA, 13 bp, Artificial Sequence
  Oligonucleotide for detection of SNP TSC0023434
tatttctccaaca

SEQ ID NO: 93807 - DNA, 13 bp, Artificial Sequence
  Oligonucleotide for detection of SNP TSC0023434
tgttggggaaata

SEQ ID NO: 93808 - DNA, 13 bp, Artificial Sequence
  Oligonucleotide for detection of SNP TSC0023434
tatttccccaaca

SEQ ID NO: 93809 - DNA, 13 bp, Artificial Sequence
  Oligonucleotide for detection of SNP TSC0023436
ggttaggtattty

SEQ ID NO: 93810 - DNA, 13 bp, Artificial Sequence
  Oligonucleotide for detection of SNP TSC0023436
raaatacctaacc

SEQ ID NO: 93811 - DNA, 13 bp, Artificial Sequence
  Oligonucleotide for detection of SNP TSC0023436
ggttagttattty

SEQ ID NO: 93812 - DNA, 13 bp, Artificial Sequence
  Oligonucleotide for detection of SNP TSC0023436
raaataactaacc

SEQ ID NO: 93813 - DNA, 13 bp, Artificial Sequence
  Oligonucleotide for detection of SNP TSC0023436
ggagtgtttgaty

SEQ ID NO: 93814 - DNA, 13 bp, Artificial Sequence
  Oligonucleotide for detection of SNP TSC0023436
ratcaaacactcc

SEQ ID NO: 93815 - DNA, 13 bp, Artificial Sequence
  Oligonucleotide for detection of SNP TSC0023436
ggagtgattgaty

SEQ ID NO: 93816 - DNA, 13 bp, Artificial Sequence
  Oligonucleotide for detection of SNP TSC0023436
ratcaatcactcc

SEQ ID NO: 93817 - DNA, 13 bp, Artificial Sequence
  Oligonucleotide for detection of SNP TSC0023437
gtgttgtggttat

SEQ ID NO: 93818 - DNA, 13 bp, Artificial Sequence
  Oligonucleotide for detection of SNP TSC0023437
ataaccacaacac

SEQ ID NO: 93819 - DNA, 13 bp, Artificial Sequence
  Oligonucleotide for detection of SNP TSC0023437
gtgttgcggttat

SEQ ID NO: 93820 - DNA, 13 bp, Artificial Sequence
  Oligonucleotide for detection of SNP TSC0023437
ataaccgcaacac

SEQ ID NO: 93821 - DNA, 13 bp, Artificial Sequence
  Oligonucleotide for detection of SNP TSC0023437
atgattgtaatay

SEQ ID NO: 93822 - DNA, 13 bp, Artificial Sequence
  Oligonucleotide for detection of SNP TSC0023437
rtattacaatcat

SEQ ID NO: 93823 - DNA, 13 bp, Artificial Sequence
  Oligonucleotide for detection of SNP TSC0023437
atgattataatay

SEQ ID NO: 93824 - DNA, 13 bp, Artificial Sequence
  Oligonucleotide for detection of SNP TSC0023437
rtattataatcat

SEQ ID NO: 93825 - DNA, 13 bp, Artificial Sequence
  Oligonucleotide for detection of SNP TSC0023437
atgatcgtaatay

SEQ ID NO: 93826 - DNA, 13 bp, Artificial Sequence
  Oligonucleotide for detection of SNP TSC0023437
rtattacgatcat

SEQ ID NO: 93827 - DNA, 13 bp, Artificial Sequence
  Oligonucleotide for detection of SNP TSC0023441
agtgttatttatg

SEQ ID NO: 93828 - DNA, 13 bp, Artificial Sequence
  Oligonucleotide for detection of SNP TSC0023441
cataaataacact

SEQ ID NO: 93829 - DNA, 13 bp, Artificial Sequence
  Oligonucleotide for detection of SNP TSC0023441
tataggtagtatt

SEQ ID NO: 93830 - DNA, 13 bp, Artificial Sequence
  Oligonucleotide for detection of SNP TSC0023441
aatactacctata

SEQ ID NO: 93831 - DNA, 13 bp, Artificial Sequence
  Oligonucleotide for detection of SNP TSC0023441
tataggaagtatt

SEQ ID NO: 93832 - DNA, 13 bp, Artificial Sequence
  Oligonucleotide for detection of SNP TSC0023441
aatacttcctata

SEQ ID NO: 93833 - DNA, 13 bp, Artificial Sequence
  Oligonucleotide for detection of SNP TSC0023442
tatgaaaatgtty

SEQ ID NO: 93834 - DNA, 13 bp, Artificial Sequence
  Oligonucleotide for detection of SNP TSC0023442
raacattttcata

SEQ ID NO: 93835 - DNA, 13 bp, Artificial Sequence
  Oligonucleotide for detection of SNP TSC0023442
tatgaagatgtty

SEQ ID NO: 93836 - DNA, 13 bp, Artificial Sequence
  Oligonucleotide for detection of SNP TSC0023442
raacatcttcata

SEQ ID NO: 93837 - DNA, 13 bp, Artificial Sequence
  Oligonucleotide for detection of SNP TSC0023444
aaatgtatattgy

SEQ ID NO: 93838 - DNA, 13 bp, Artificial Sequence
  Oligonucleotide for detection of SNP TSC0023444
rcaatatacattt

SEQ ID NO: 93839 - DNA, 13 bp, Artificial Sequence
  Oligonucleotide for detection of SNP TSC0023444
aaatgtgtattgy

SEQ ID NO: 93840 - DNA, 13 bp, Artificial Sequence
  Oligonucleotide for detection of SNP TSC0023444
rcaatacacattt

SEQ ID NO: 93841 - DNA, 13 bp, Artificial Sequence
  Oligonucleotide for detection of SNP TSC0023445
gatggtatttata

SEQ ID NO: 93842 - DNA, 13 bp, Artificial Sequence
  Oligonucleotide for detection of SNP TSC0023445
tataaataccatc

SEQ ID NO: 93843 - DNA, 13 bp, Artificial Sequence
  Oligonucleotide for detection of SNP TSC0023445
gatggtgtttata

SEQ ID NO: 93844 - DNA, 13 bp, Artificial Sequence
  Oligonucleotide for detection of SNP TSC0023445
tataaacaccatc

SEQ ID NO: 93845 - DNA, 13 bp, Artificial Sequence
  Oligonucleotide for detection of SNP TSC0023445
gatggcgtttata

SEQ ID NO: 93846 - DNA, 13 bp, Artificial Sequence
  Oligonucleotide for detection of SNP TSC0023445
tataaacgccatc

SEQ ID NO: 93847 - DNA, 13 bp, Artificial Sequence
  Oligonucleotide for detection of SNP TSC0023445
tatagatgttaty

SEQ ID NO: 93848 - DNA, 13 bp, Artificial Sequence
  Oligonucleotide for detection of SNP TSC0023445
rataacatctata

SEQ ID NO: 93849 - DNA, 13 bp, Artificial Sequence
  Oligonucleotide for detection of SNP TSC0023445
tatagacgttaty

SEQ ID NO: 93850 - DNA, 13 bp, Artificial Sequence
  Oligonucleotide for detection of SNP TSC0023445
rataacgtctata

SEQ ID NO: 93851 - DNA, 13 bp, Artificial Sequence
  Oligonucleotide for detection of SNP TSC0023447
gtaaggtgttttt

SEQ ID NO: 93852 - DNA, 13 bp, Artificial Sequence
  Oligonucleotide for detection of SNP TSC0023447
aaaaacaccttac

SEQ ID NO: 93853 - DNA, 13 bp, Artificial Sequence
  Oligonucleotide for detection of SNP TSC0023447
gtaaggcgttttt

SEQ ID NO: 93854 - DNA, 13 bp, Artificial Sequence
  Oligonucleotide for detection of SNP TSC0023447
aaaaacgccttac

SEQ ID NO: 93855 - DNA, 13 bp, Artificial Sequence
  Oligonucleotide for detection of SNP TSC0023447
aaaaatgttttgy

SEQ ID NO: 93856 - DNA, 13 bp, Artificial Sequence
  Oligonucleotide for detection of SNP TSC0023447
rcaaaacattttt

SEQ ID NO: 93857 - DNA, 13 bp, Artificial Sequence
  Oligonucleotide for detection of SNP TSC0023447
aaaaacgttttgy

SEQ ID NO: 93858 - DNA, 13 bp, Artificial Sequence
  Oligonucleotide for detection of SNP TSC0023447
rcaaaacgttttt

SEQ ID NO: 93859 - DNA, 13 bp, Artificial Sequence
  Oligonucleotide for detection of SNP TSC0023448
ttataaatattta

SEQ ID NO: 93860 - DNA, 13 bp, Artificial Sequence
  Oligonucleotide for detection of SNP TSC0023448
taaatatttataa

SEQ ID NO: 93861 - DNA, 13 bp, Artificial Sequence
  Oligonucleotide for detection of SNP TSC0023448
ttataagtattta

SEQ ID NO: 93862 - DNA, 13 bp, Artificial Sequence
  Oligonucleotide for detection of SNP TSC0023448
taaatacttataa

SEQ ID NO: 93863 - DNA, 13 bp, Artificial Sequence
  Oligonucleotide for detection of SNP TSC0023453
attttatgataay

SEQ ID NO: 93864 - DNA, 13 bp, Artificial Sequence
  Oligonucleotide for detection of SNP TSC0023453
rttatcataaaat

SEQ ID NO: 93865 - DNA, 13 bp, Artificial Sequence
  Oligonucleotide for detection of SNP TSC0023453
attttacgataay

SEQ ID NO: 93866 - DNA, 13 bp, Artificial Sequence
  Oligonucleotide for detection of SNP TSC0023453
rttatcgtaaaat

SEQ ID NO: 93867 - DNA, 13 bp, Artificial Sequence
  Oligonucleotide for detection of SNP TSC0023453
gttattgtagggt

SEQ ID NO: 93868 - DNA, 13 bp, Artificial Sequence
  Oligonucleotide for detection of SNP TSC0023453
accctacaataac

SEQ ID NO: 93869 - DNA, 13 bp, Artificial Sequence
  Oligonucleotide for detection of SNP TSC0023453
gttattatagggt

SEQ ID NO: 93870 - DNA, 13 bp, Artificial Sequence
  Oligonucleotide for detection of SNP TSC0023453
accctataataac

SEQ ID NO: 93871 - DNA, 13 bp, Artificial Sequence
  Oligonucleotide for detection of SNP TSC0023453
gttatcgtagggt

SEQ ID NO: 93872 - DNA, 13 bp, Artificial Sequence
  Oligonucleotide for detection of SNP TSC0023453
accctacgataac

SEQ ID NO: 93873 - DNA, 13 bp, Artificial Sequence
  Oligonucleotide for detection of SNP TSC0023454
ttttaatatagaa

SEQ ID NO: 93874 - DNA, 13 bp, Artificial Sequence
  Oligonucleotide for detection of SNP TSC0023454
ttctatattaaaa

SEQ ID NO: 93875 - DNA, 13 bp, Artificial Sequence
  Oligonucleotide for detection of SNP TSC0023454
ttttaagatagaa

SEQ ID NO: 93876 - DNA, 13 bp, Artificial Sequence
  Oligonucleotide for detection of SNP TSC0023454
ttctatcttaaaa

SEQ ID NO: 93877 - DNA, 13 bp, Artificial Sequence
  Oligonucleotide for detection of SNP TSC0023454
ttttatgttagag

SEQ ID NO: 93878 - DNA, 13 bp, Artificial Sequence
  Oligonucleotide for detection of SNP TSC0023454
ctctaacataaaa

SEQ ID NO: 93879 - DNA, 13 bp, Artificial Sequence
  Oligonucleotide for detection of SNP TSC0023454
ttttattttagag

SEQ ID NO: 93880 - DNA, 13 bp, Artificial Sequence
  Oligonucleotide for detection of SNP TSC0023454
ctctaaaataaaa

SEQ ID NO: 93881 - DNA, 13 bp, Artificial Sequence
  Oligonucleotide for detection of SNP TSC0023455
ttttttgagtaay

SEQ ID NO: 93882 - DNA, 13 bp, Artificial Sequence
  Oligonucleotide for detection of SNP TSC0023455
rttactcaaaaaa

SEQ ID NO: 93883 - DNA, 13 bp, Artificial Sequence
  Oligonucleotide for detection of SNP TSC0023455
ttttttaagtaay

SEQ ID NO: 93884 - DNA, 13 bp, Artificial Sequence
  Oligonucleotide for detection of SNP TSC0023455
rttacttaaaaaa

SEQ ID NO: 93885 - DNA, 13 bp, Artificial Sequence
  Oligonucleotide for detection of SNP TSC0023455
tttttcgagtaay

SEQ ID NO: 93886 - DNA, 13 bp, Artificial Sequence
  Oligonucleotide for detection of SNP TSC0023455
rttactcgaaaaa

SEQ ID NO: 93887 - DNA, 13 bp, Artificial Sequence
  Oligonucleotide for detection of SNP TSC0023456
taaaagaggaatt

SEQ ID NO: 93888 - DNA, 13 bp, Artificial Sequence
  Oligonucleotide for detection of SNP TSC0023456
aattcctctttta

SEQ ID NO: 93889 - DNA, 13 bp, Artificial Sequence
  Oligonucleotide for detection of SNP TSC0023456
taaaaggggaatt

SEQ ID NO: 93890 - DNA, 13 bp, Artificial Sequence
  Oligonucleotide for detection of SNP TSC0023456
aattcccctttta

SEQ ID NO: 93891 - DNA, 13 bp, Artificial Sequence
  Oligonucleotide for detection of SNP TSC0023458
tttttgagggata

SEQ ID NO: 93892 - DNA, 13 bp, Artificial Sequence
  Oligonucleotide for detection of SNP TSC0023458
tatccctcaaaaa

SEQ ID NO: 93893 - DNA, 13 bp, Artificial Sequence
  Oligonucleotide for detection of SNP TSC0023458
tttttgggggata

SEQ ID NO: 93894 - DNA, 13 bp, Artificial Sequence
  Oligonucleotide for detection of SNP TSC0023458
tatcccccaaaaa

SEQ ID NO: 93895 - DNA, 13 bp, Artificial Sequence
  Oligonucleotide for detection of SNP TSC0023460
tgaagttgataaa

SEQ ID NO: 93896 - DNA, 13 bp, Artificial Sequence
  Oligonucleotide for detection of SNP TSC0023460
tttatcaacttca

SEQ ID NO: 93897 - DNA, 13 bp, Artificial Sequence
  Oligonucleotide for detection of SNP TSC0023460
tgaagtcgataaa

SEQ ID NO: 93898 - DNA, 13 bp, Artificial Sequence
  Oligonucleotide for detection of SNP TSC0023460
tttatcgacttca

SEQ ID NO: 93899 - DNA, 13 bp, Artificial Sequence
  Oligonucleotide for detection of SNP TSC0023461
gtttttagggggy

SEQ ID NO: 93900 - DNA, 13 bp, Artificial Sequence
  Oligonucleotide for detection of SNP TSC0023461
rccccctaaaaac

SEQ ID NO: 93901 - DNA, 13 bp, Artificial Sequence
  Oligonucleotide for detection of SNP TSC0023461
gtttttggggggy

SEQ ID NO: 93902 - DNA, 13 bp, Artificial Sequence
  Oligonucleotide for detection of SNP TSC0023461
rccccccaaaaac

SEQ ID NO: 93903 - DNA, 13 bp, Artificial Sequence
  Oligonucleotide for detection of SNP TSC0023461
gttttcggggggy

SEQ ID NO: 93904 - DNA, 13 bp, Artificial Sequence
  Oligonucleotide for detection of SNP TSC0023461
rccccccgaaaac

SEQ ID NO: 93905 - DNA, 13 bp, Artificial Sequence
  Oligonucleotide for detection of SNP TSC0023461
gttttttgagggy

SEQ ID NO: 93906 - DNA, 13 bp, Artificial Sequence
  Oligonucleotide for detection of SNP TSC0023461
rccctcaaaaaac

SEQ ID NO: 93907 - DNA, 13 bp, Artificial Sequence
  Oligonucleotide for detection of SNP TSC0023461
gtttttcgagggy

SEQ ID NO: 93908 - DNA, 13 bp, Artificial Sequence
  Oligonucleotide for detection of SNP TSC0023461
rccctcgaaaaac

SEQ ID NO: 93909 - DNA, 13 bp, Artificial Sequence
  Oligonucleotide for detection of SNP TSC0023465
ggaggttgggatt

SEQ ID NO: 93910 - DNA, 13 bp, Artificial Sequence
  Oligonucleotide for detection of SNP TSC0023465
aatcccaacctcc

SEQ ID NO: 93911 - DNA, 13 bp, Artificial Sequence
  Oligonucleotide for detection of SNP TSC0023465
ggaggtcgggatt

SEQ ID NO: 93912 - DNA, 13 bp, Artificial Sequence
  Oligonucleotide for detection of SNP TSC0023465
aatcccgacctcc

SEQ ID NO: 93913 - DNA, 13 bp, Artificial Sequence
  Oligonucleotide for detection of SNP TSC0023465
agttttggtttty

SEQ ID NO: 93914 - DNA, 13 bp, Artificial Sequence
  Oligonucleotide for detection of SNP TSC0023465
raaaaccaaaact

SEQ ID NO: 93915 - DNA, 13 bp, Artificial Sequence
  Oligonucleotide for detection of SNP TSC0023465
agttttagtttty

SEQ ID NO: 93916 - DNA, 13 bp, Artificial Sequence
  Oligonucleotide for detection of SNP TSC0023465
raaaactaaaact

SEQ ID NO: 93917 - DNA, 13 bp, Artificial Sequence
  Oligonucleotide for detection of SNP TSC0023465
agtttcggtttty

SEQ ID NO: 93918 - DNA, 13 bp, Artificial Sequence
  Oligonucleotide for detection of SNP TSC0023465
raaaaccgaaact

SEQ ID NO: 93919 - DNA, 13 bp, Artificial Sequence
  Oligonucleotide for detection of SNP TSC0023469
agaagttaggttg

SEQ ID NO: 93920 - DNA, 13 bp, Artificial Sequence
  Oligonucleotide for detection of SNP TSC0023469
caacctaacttct

SEQ ID NO: 93921 - DNA, 13 bp, Artificial Sequence
  Oligonucleotide for detection of SNP TSC0023469
agaagtgaggttg

SEQ ID NO: 93922 - DNA, 13 bp, Artificial Sequence
  Oligonucleotide for detection of SNP TSC0023469
caacctcacttct

SEQ ID NO: 93923 - DNA, 13 bp, Artificial Sequence
  Oligonucleotide for detection of SNP TSC0023469
agaagcgaggttg

SEQ ID NO: 93924 - DNA, 13 bp, Artificial Sequence
  Oligonucleotide for detection of SNP TSC0023469
caacctcgcttct

SEQ ID NO: 93925 - DNA, 13 bp, Artificial Sequence
  Oligonucleotide for detection of SNP TSC0023469
tagtttggttttt

SEQ ID NO: 93926 - DNA, 13 bp, Artificial Sequence
  Oligonucleotide for detection of SNP TSC0023469
aaaaaccaaacta

SEQ ID NO: 93927 - DNA, 13 bp, Artificial Sequence
  Oligonucleotide for detection of SNP TSC0023470
ataataataatag

SEQ ID NO: 93928 - DNA, 13 bp, Artificial Sequence
  Oligonucleotide for detection of SNP TSC0023470
ctattattattat

SEQ ID NO: 93929 - DNA, 13 bp, Artificial Sequence
  Oligonucleotide for detection of SNP TSC0023470
ataatattaatag

SEQ ID NO: 93930 - DNA, 13 bp, Artificial Sequence
  Oligonucleotide for detection of SNP TSC0023470
ctattaatattat

SEQ ID NO: 93931 - DNA, 13 bp, Artificial Sequence
  Oligonucleotide for detection of SNP TSC0023470
ttattgttattgt

SEQ ID NO: 93932 - DNA, 13 bp, Artificial Sequence
  Oligonucleotide for detection of SNP TSC0023470
acaataacaataa

SEQ ID NO: 93933 - DNA, 13 bp, Artificial Sequence
  Oligonucleotide for detection of SNP TSC0023470
ttattggtattgt

SEQ ID NO: 93934 - DNA, 13 bp, Artificial Sequence
  Oligonucleotide for detection of SNP TSC0023470
acaataccaataa

SEQ ID NO: 93935 - DNA, 13 bp, Artificial Sequence
  Oligonucleotide for detection of SNP TSC0023471
taataggtttaat

SEQ ID NO: 93936 - DNA, 13 bp, Artificial Sequence
  Oligonucleotide for detection of SNP TSC0023471
attaaacctatta

SEQ ID NO: 93937 - DNA, 13 bp, Artificial Sequence
  Oligonucleotide for detection of SNP TSC0023471
taatagttttaat

SEQ ID NO: 93938 - DNA, 13 bp, Artificial Sequence
  Oligonucleotide for detection of SNP TSC0023471
attaaaactatta

SEQ ID NO: 93939 - DNA, 13 bp, Artificial Sequence
  Oligonucleotide for detection of SNP TSC0023471
attaaatttattg

SEQ ID NO: 93940 - DNA, 13 bp, Artificial Sequence
  Oligonucleotide for detection of SNP TSC0023471
caataaatttaat

SEQ ID NO: 93941 - DNA, 13 bp, Artificial Sequence
  Oligonucleotide for detection of SNP TSC0023471
attaaaattattg

SEQ ID NO: 93942 - DNA, 13 bp, Artificial Sequence
  Oligonucleotide for detection of SNP TSC0023471
caataattttaat

SEQ ID NO: 93943 - DNA, 13 bp, Artificial Sequence
  Oligonucleotide for detection of SNP TSC0023473
gatagtgatgttt

SEQ ID NO: 93944 - DNA, 13 bp, Artificial Sequence
  Oligonucleotide for detection of SNP TSC0023473
aaacatcactatc

SEQ ID NO: 93945 - DNA, 13 bp, Artificial Sequence
  Oligonucleotide for detection of SNP TSC0023473
gatagtaatgttt

SEQ ID NO: 93946 - DNA, 13 bp, Artificial Sequence
  Oligonucleotide for detection of SNP TSC0023473
aaacattactatc

SEQ ID NO: 93947 - DNA, 13 bp, Artificial Sequence
  Oligonucleotide for detection of SNP TSC0023474
attttatggttay

SEQ ID NO: 93948 - DNA, 13 bp, Artificial Sequence
  Oligonucleotide for detection of SNP TSC0023474
rtaaccataaaat

SEQ ID NO: 93949 - DNA, 13 bp, Artificial Sequence
  Oligonucleotide for detection of SNP TSC0023474
attttacggttay

SEQ ID NO: 93950 - DNA, 13 bp, Artificial Sequence
  Oligonucleotide for detection of SNP TSC0023474
rtaaccgtaaaat

SEQ ID NO: 93951 - DNA, 13 bp, Artificial Sequence
  Oligonucleotide for detection of SNP TSC0023474
gtgattgtgaggt

SEQ ID NO: 93952 - DNA, 13 bp, Artificial Sequence
  Oligonucleotide for detection of SNP TSC0023474
acctcacaatcac

SEQ ID NO: 93953 - DNA, 13 bp, Artificial Sequence
  Oligonucleotide for detection of SNP TSC0023474
gtgattatgaggt

SEQ ID NO: 93954 - DNA, 13 bp, Artificial Sequence
  Oligonucleotide for detection of SNP TSC0023474
acctcataatcac

SEQ ID NO: 93955 - DNA, 13 bp, Artificial Sequence
  Oligonucleotide for detection of SNP TSC0023474
gtgatcgtgaggt

SEQ ID NO: 93956 - DNA, 13 bp, Artificial Sequence
  Oligonucleotide for detection of SNP TSC0023474
acctcacgatcac

SEQ ID NO: 93957 - DNA, 13 bp, Artificial Sequence
  Oligonucleotide for detection of SNP TSC0023477
gtatagggtagty

SEQ ID NO: 93958 - DNA, 13 bp, Artificial Sequence
  Oligonucleotide for detection of SNP TSC0023477
ractaccctatac

SEQ ID NO: 93959 - DNA, 13 bp, Artificial Sequence
  Oligonucleotide for detection of SNP TSC0023477
gtatagtgtagty

SEQ ID NO: 93960 - DNA, 13 bp, Artificial Sequence
  Oligonucleotide for detection of SNP TSC0023477
ractacactatac

SEQ ID NO: 93961 - DNA, 13 bp, Artificial Sequence
  Oligonucleotide for detection of SNP TSC0023477
ggttgttttgtgy

SEQ ID NO: 93962 - DNA, 13 bp, Artificial Sequence
  Oligonucleotide for detection of SNP TSC0023477
rcacaaaacaacc

SEQ ID NO: 93963 - DNA, 13 bp, Artificial Sequence
  Oligonucleotide for detection of SNP TSC0023480
gtttaagtagata

SEQ ID NO: 93964 - DNA, 13 bp, Artificial Sequence
  Oligonucleotide for detection of SNP TSC0023480
tatctacttaaac

SEQ ID NO: 93965 - DNA, 13 bp, Artificial Sequence
  Oligonucleotide for detection of SNP TSC0023480
gtttaaatagata

SEQ ID NO: 93966 - DNA, 13 bp, Artificial Sequence
  Oligonucleotide for detection of SNP TSC0023480
tatctatttaaac

SEQ ID NO: 93967 - DNA, 13 bp, Artificial Sequence
  Oligonucleotide for detection of SNP TSC0023481
gatatgtgttatg

SEQ ID NO: 93968 - DNA, 13 bp, Artificial Sequence
  Oligonucleotide for detection of SNP TSC0023481
cataacacatatc

SEQ ID NO: 93969 - DNA, 13 bp, Artificial Sequence
  Oligonucleotide for detection of SNP TSC0023481
gatatgcgttatg

SEQ ID NO: 93970 - DNA, 13 bp, Artificial Sequence
  Oligonucleotide for detection of SNP TSC0023481
cataacgcatatc

SEQ ID NO: 93971 - DNA, 13 bp, Artificial Sequence
  Oligonucleotide for detection of SNP TSC0023481
tatagtgtataty

SEQ ID NO: 93972 - DNA, 13 bp, Artificial Sequence
  Oligonucleotide for detection of SNP TSC0023481
ratatacactata

SEQ ID NO: 93973 - DNA, 13 bp, Artificial Sequence
  Oligonucleotide for detection of SNP TSC0023481
tatagtatataty

SEQ ID NO: 93974 - DNA, 13 bp, Artificial Sequence
  Oligonucleotide for detection of SNP TSC0023481
ratatatactata

SEQ ID NO: 93975 - DNA, 13 bp, Artificial Sequence
  Oligonucleotide for detection of SNP TSC0023481
tatagcgtataty

SEQ ID NO: 93976 - DNA, 13 bp, Artificial Sequence
  Oligonucleotide for detection of SNP TSC0023481
ratatacgctata

SEQ ID NO: 93977 - DNA, 13 bp, Artificial Sequence
  Oligonucleotide for detection of SNP TSC0023482
atttggggttaag

SEQ ID NO: 93978 - DNA, 13 bp, Artificial Sequence
  Oligonucleotide for detection of SNP TSC0023482
cttaaccccaaat

SEQ ID NO: 93979 - DNA, 13 bp, Artificial Sequence
  Oligonucleotide for detection of SNP TSC0023482
atttggagttaag

SEQ ID NO: 93980 - DNA, 13 bp, Artificial Sequence
  Oligonucleotide for detection of SNP TSC0023482
cttaactccaaat

SEQ ID NO: 93981 - DNA, 13 bp, Artificial Sequence
  Oligonucleotide for detection of SNP TSC0023483
gagaaatgtatta

SEQ ID NO: 93982 - DNA, 13 bp, Artificial Sequence
  Oligonucleotide for detection of SNP TSC0023483
taatacatttctc

SEQ ID NO: 93983 - DNA, 13 bp, Artificial Sequence
  Oligonucleotide for detection of SNP TSC0023483
gagaaacgtatta

SEQ ID NO: 93984 - DNA, 13 bp, Artificial Sequence
  Oligonucleotide for detection of SNP TSC0023483
taatacgtttctc

SEQ ID NO: 93985 - DNA, 13 bp, Artificial Sequence
  Oligonucleotide for detection of SNP TSC0023483
tggtgtgttttty

SEQ ID NO: 93986 - DNA, 13 bp, Artificial Sequence
  Oligonucleotide for detection of SNP TSC0023483
raaaaacacacca

SEQ ID NO: 93987 - DNA, 13 bp, Artificial Sequence
  Oligonucleotide for detection of SNP TSC0023483
tggtgtattttty

SEQ ID NO: 93988 - DNA, 13 bp, Artificial Sequence
  Oligonucleotide for detection of SNP TSC0023483
raaaaatacacca

SEQ ID NO: 93989 - DNA, 13 bp, Artificial Sequence
  Oligonucleotide for detection of SNP TSC0023483
tggtgcgttttty

SEQ ID NO: 93990 - DNA, 13 bp, Artificial Sequence
  Oligonucleotide for detection of SNP TSC0023483
raaaaacgcacca

SEQ ID NO: 93991 - DNA, 13 bp, Artificial Sequence
  Oligonucleotide for detection of SNP TSC0023484
ttaagtgattgty

SEQ ID NO: 93992 - DNA, 13 bp, Artificial Sequence
  Oligonucleotide for detection of SNP TSC0023484
racaatcacttaa

SEQ ID NO: 93993 - DNA, 13 bp, Artificial Sequence
  Oligonucleotide for detection of SNP TSC0023484
ttaagtaattgty

SEQ ID NO: 93994 - DNA, 13 bp, Artificial Sequence
  Oligonucleotide for detection of SNP TSC0023484
racaattacttaa

SEQ ID NO: 93995 - DNA, 13 bp, Artificial Sequence
  Oligonucleotide for detection of SNP TSC0023484
ttaagcgattgty

SEQ ID NO: 93996 - DNA, 13 bp, Artificial Sequence
  Oligonucleotide for detection of SNP TSC0023484
racaatcgcttaa

SEQ ID NO: 93997 - DNA, 13 bp, Artificial Sequence
  Oligonucleotide for detection of SNP TSC0023486
tatttaatagtty

SEQ ID NO: 93998 - DNA, 13 bp, Artificial Sequence
  Oligonucleotide for detection of SNP TSC0023486
raactattaaata

SEQ ID NO: 93999 - DNA, 13 bp, Artificial Sequence
  Oligonucleotide for detection of SNP TSC0023486
tatttagtagtty

SEQ ID NO: 94000 - DNA, 13 bp, Artificial Sequence
  Oligonucleotide for detection of SNP TSC0023486
raactactaaata

SEQ ID NO: 94001 - DNA, 13 bp, Artificial Sequence
  Oligonucleotide for detection of SNP TSC0023487
tattttaatgtat

SEQ ID NO: 94002 - DNA, 13 bp, Artificial Sequence
  Oligonucleotide for detection of SNP TSC0023487
atacattaaaata

SEQ ID NO: 94003 - DNA, 13 bp, Artificial Sequence
  Oligonucleotide for detection of SNP TSC0023487
tattttgatgtat

SEQ ID NO: 94004 - DNA, 13 bp, Artificial Sequence
  Oligonucleotide for detection of SNP TSC0023487
atacatcaaaata

SEQ ID NO: 94005 - DNA, 13 bp, Artificial Sequence
  Oligonucleotide for detection of SNP TSC0023487
tatttcgatgtat

SEQ ID NO: 94006 - DNA, 13 bp, Artificial Sequence
  Oligonucleotide for detection of SNP TSC0023487
atacatcgaaata

SEQ ID NO: 94007 - DNA, 13 bp, Artificial Sequence
  Oligonucleotide for detection of SNP TSC0023487
atgtattgaggtg

SEQ ID NO: 94008 - DNA, 13 bp, Artificial Sequence
  Oligonucleotide for detection of SNP TSC0023487
cacctcaatacat

SEQ ID NO: 94009 - DNA, 13 bp, Artificial Sequence
  Oligonucleotide for detection of SNP TSC0023487
atgtatcgaggtg

SEQ ID NO: 94010 - DNA, 13 bp, Artificial Sequence
  Oligonucleotide for detection of SNP TSC0023487
cacctcgatacat

SEQ ID NO: 94011 - DNA, 13 bp, Artificial Sequence
  Oligonucleotide for detection of SNP TSC0023488
aagtgaatgatty

SEQ ID NO: 94012 - DNA, 13 bp, Artificial Sequence
  Oligonucleotide for detection of SNP TSC0023488
raatcattcactt

SEQ ID NO: 94013 - DNA, 13 bp, Artificial Sequence
  Oligonucleotide for detection of SNP TSC0023488
aagtgagtgatty

SEQ ID NO: 94014 - DNA, 13 bp, Artificial Sequence
  Oligonucleotide for detection of SNP TSC0023488
raatcactcactt

SEQ ID NO: 94015 - DNA, 13 bp, Artificial Sequence
  Oligonucleotide for detection of SNP TSC0023488
aagtgaacgatty

SEQ ID NO: 94016 - DNA, 13 bp, Artificial Sequence
  Oligonucleotide for detection of SNP TSC0023488
raatcgttcactt

SEQ ID NO: 94017 - DNA, 13 bp, Artificial Sequence
  Oligonucleotide for detection of SNP TSC0023488
aagtgagcgatty

SEQ ID NO: 94018 - DNA, 13 bp, Artificial Sequence
  Oligonucleotide for detection of SNP TSC0023488
raatcgctcactt

SEQ ID NO: 94019 - DNA, 13 bp, Artificial Sequence
  Oligonucleotide for detection of SNP TSC0023489
tttatagttttag

SEQ ID NO: 94020 - DNA, 13 bp, Artificial Sequence
  Oligonucleotide for detection of SNP TSC0023489
ctaaaactataaa

SEQ ID NO: 94021 - DNA, 13 bp, Artificial Sequence
  Oligonucleotide for detection of SNP TSC0023491
ggagattgtagga

SEQ ID NO: 94022 - DNA, 13 bp, Artificial Sequence
  Oligonucleotide for detection of SNP TSC0023491
tcctacaatctcc

SEQ ID NO: 94023 - DNA, 13 bp, Artificial Sequence
  Oligonucleotide for detection of SNP TSC0023491
ggagatcgtagga

SEQ ID NO: 94024 - DNA, 13 bp, Artificial Sequence
  Oligonucleotide for detection of SNP TSC0023491
tcctacgatctcc

SEQ ID NO: 94025 - DNA, 13 bp, Artificial Sequence
  Oligonucleotide for detection of SNP TSC0023491
ttttgtggtttty

SEQ ID NO: 94026 - DNA, 13 bp, Artificial Sequence
  Oligonucleotide for detection of SNP TSC0023491
raaaaccacaaaa

SEQ ID NO: 94027 - DNA, 13 bp, Artificial Sequence
  Oligonucleotide for detection of SNP TSC0023491
ttttgtagtttty

SEQ ID NO: 94028 - DNA, 13 bp, Artificial Sequence
  Oligonucleotide for detection of SNP TSC0023491
raaaactacaaaa

SEQ ID NO: 94029 - DNA, 13 bp, Artificial Sequence
  Oligonucleotide for detection of SNP TSC0023491
ttttgcggtttty

SEQ ID NO: 94030 - DNA, 13 bp, Artificial Sequence
  Oligonucleotide for detection of SNP TSC0023491
raaaaccgcaaaa

SEQ ID NO: 94031 - DNA, 13 bp, Artificial Sequence
  Oligonucleotide for detection of SNP TSC0023493
ttgtatatggagy

SEQ ID NO: 94032 - DNA, 13 bp, Artificial Sequence
  Oligonucleotide for detection of SNP TSC0023493
rctccatatacaa

SEQ ID NO: 94033 - DNA, 13 bp, Artificial Sequence
  Oligonucleotide for detection of SNP TSC0023493
ttgtatttggagy

SEQ ID NO: 94034 - DNA, 13 bp, Artificial Sequence
  Oligonucleotide for detection of SNP TSC0023493
rctccaaatacaa

SEQ ID NO: 94035 - DNA, 13 bp, Artificial Sequence
  Oligonucleotide for detection of SNP TSC0023493
ttgtatacggagy

SEQ ID NO: 94036 - DNA, 13 bp, Artificial Sequence
  Oligonucleotide for detection of SNP TSC0023493
rctccgtatacaa

SEQ ID NO: 94037 - DNA, 13 bp, Artificial Sequence
  Oligonucleotide for detection of SNP TSC0023493
ttgtattcggagy

SEQ ID NO: 94038 - DNA, 13 bp, Artificial Sequence
  Oligonucleotide for detection of SNP TSC0023493
rctccgaatacaa

SEQ ID NO: 94039 - DNA, 13 bp, Artificial Sequence
  Oligonucleotide for detection of SNP TSC0023493
gttttgtgtgtag

SEQ ID NO: 94040 - DNA, 13 bp, Artificial Sequence
  Oligonucleotide for detection of SNP TSC0023493
ctacacacaaaac

SEQ ID NO: 94041 - DNA, 13 bp, Artificial Sequence
  Oligonucleotide for detection of SNP TSC0023493
gttttgggtgtag

SEQ ID NO: 94042 - DNA, 13 bp, Artificial Sequence
  Oligonucleotide for detection of SNP TSC0023493
ctacacccaaaac

SEQ ID NO: 94043 - DNA, 13 bp, Artificial Sequence
  Oligonucleotide for detection of SNP TSC0023493
gtttcgtgtgtag

SEQ ID NO: 94044 - DNA, 13 bp, Artificial Sequence
  Oligonucleotide for detection of SNP TSC0023493
ctacacacgaaac

SEQ ID NO: 94045 - DNA, 13 bp, Artificial Sequence
  Oligonucleotide for detection of SNP TSC0023493
gtttcgggtgtag

SEQ ID NO: 94046 - DNA, 13 bp, Artificial Sequence
  Oligonucleotide for detection of SNP TSC0023493
ctacacccgaaac

SEQ ID NO: 94047 - DNA, 13 bp, Artificial Sequence
  Oligonucleotide for detection of SNP TSC0023494
tttggtgatttta

SEQ ID NO: 94048 - DNA, 13 bp, Artificial Sequence
  Oligonucleotide for detection of SNP TSC0023494
taaaatcaccaaa

SEQ ID NO: 94049 - DNA, 13 bp, Artificial Sequence
  Oligonucleotide for detection of SNP TSC0023494
tttggttatttta

SEQ ID NO: 94050 - DNA, 13 bp, Artificial Sequence
  Oligonucleotide for detection of SNP TSC0023494
taaaataaccaaa

SEQ ID NO: 94051 - DNA, 13 bp, Artificial Sequence
  Oligonucleotide for detection of SNP TSC0023494
tttggcgatttta

SEQ ID NO: 94052 - DNA, 13 bp, Artificial Sequence
  Oligonucleotide for detection of SNP TSC0023494
taaaatcgccaaa

SEQ ID NO: 94053 - DNA, 13 bp, Artificial Sequence
  Oligonucleotide for detection of SNP TSC0023494
tgaggttgttaag

SEQ ID NO: 94054 - DNA, 13 bp, Artificial Sequence
  Oligonucleotide for detection of SNP TSC0023494
cttaacaacctca

SEQ ID NO: 94055 - DNA, 13 bp, Artificial Sequence
  Oligonucleotide for detection of SNP TSC0023494
tgaggtagttaag

SEQ ID NO: 94056 - DNA, 13 bp, Artificial Sequence
  Oligonucleotide for detection of SNP TSC0023494
cttaactacctca

SEQ ID NO: 94057 - DNA, 13 bp, Artificial Sequence
  Oligonucleotide for detection of SNP TSC0023494
tgaggtcgttaag

SEQ ID NO: 94058 - DNA, 13 bp, Artificial Sequence
  Oligonucleotide for detection of SNP TSC0023494
cttaacgacctca

SEQ ID NO: 94059 - DNA, 13 bp, Artificial Sequence
  Oligonucleotide for detection of SNP TSC0023495
ggtgtgaatttag

SEQ ID NO: 94060 - DNA, 13 bp, Artificial Sequence
  Oligonucleotide for detection of SNP TSC0023495
ctaaattcacacc

SEQ ID NO: 94061 - DNA, 13 bp, Artificial Sequence
  Oligonucleotide for detection of SNP TSC0023495
ggtgtggatttag

SEQ ID NO: 94062 - DNA, 13 bp, Artificial Sequence
  Oligonucleotide for detection of SNP TSC0023495
ctaaatccacacc

SEQ ID NO: 94063 - DNA, 13 bp, Artificial Sequence
  Oligonucleotide for detection of SNP TSC0023495
ggcgtgaatttag

SEQ ID NO: 94064 - DNA, 13 bp, Artificial Sequence
  Oligonucleotide for detection of SNP TSC0023495
ctaaattcacgcc

SEQ ID NO: 94065 - DNA, 13 bp, Artificial Sequence
  Oligonucleotide for detection of SNP TSC0023495
ggcgtggatttag

SEQ ID NO: 94066 - DNA, 13 bp, Artificial Sequence
  Oligonucleotide for detection of SNP TSC0023495
ctaaatccacgcc

SEQ ID NO: 94067 - DNA, 13 bp, Artificial Sequence
  Oligonucleotide for detection of SNP TSC0023496
tagaattgggtta

SEQ ID NO: 94068 - DNA, 13 bp, Artificial Sequence
  Oligonucleotide for detection of SNP TSC0023496
taacccaattcta

SEQ ID NO: 94069 - DNA, 13 bp, Artificial Sequence
  Oligonucleotide for detection of SNP TSC0023496
tagaatcgggtta

SEQ ID NO: 94070 - DNA, 13 bp, Artificial Sequence
  Oligonucleotide for detection of SNP TSC0023496
taacccgattcta

SEQ ID NO: 94071 - DNA, 13 bp, Artificial Sequence
  Oligonucleotide for detection of SNP TSC0023496
tgatttggttttg

SEQ ID NO: 94072 - DNA, 13 bp, Artificial Sequence
  Oligonucleotide for detection of SNP TSC0023496
caaaaccaaatca

SEQ ID NO: 94073 - DNA, 13 bp, Artificial Sequence
  Oligonucleotide for detection of SNP TSC0023496
tgatttagttttg

SEQ ID NO: 94074 - DNA, 13 bp, Artificial Sequence
  Oligonucleotide for detection of SNP TSC0023496
caaaactaaatca

SEQ ID NO: 94075 - DNA, 13 bp, Artificial Sequence
  Oligonucleotide for detection of SNP TSC0023496
tgattcggttttg

SEQ ID NO: 94076 - DNA, 13 bp, Artificial Sequence
  Oligonucleotide for detection of SNP TSC0023496
caaaaccgaatca

SEQ ID NO: 94077 - DNA, 13 bp, Artificial Sequence
  Oligonucleotide for detection of SNP TSC0023497
ataaattgtatag

SEQ ID NO: 94078 - DNA, 13 bp, Artificial Sequence
  Oligonucleotide for detection of SNP TSC0023497
ctatacaatttat

SEQ ID NO: 94079 - DNA, 13 bp, Artificial Sequence
  Oligonucleotide for detection of SNP TSC0023497
ataaatcgtatag

SEQ ID NO: 94080 - DNA, 13 bp, Artificial Sequence
  Oligonucleotide for detection of SNP TSC0023497
ctatacgatttat

SEQ ID NO: 94081 - DNA, 13 bp, Artificial Sequence
  Oligonucleotide for detection of SNP TSC0023497
ttatgtgatttat

SEQ ID NO: 94082 - DNA, 13 bp, Artificial Sequence
  Oligonucleotide for detection of SNP TSC0023497
ataaatcacataa

SEQ ID NO: 94083 - DNA, 13 bp, Artificial Sequence
  Oligonucleotide for detection of SNP TSC0023497
ttatgtaatttat

SEQ ID NO: 94084 - DNA, 13 bp, Artificial Sequence
  Oligonucleotide for detection of SNP TSC0023497
ataaattacataa

SEQ ID NO: 94085 - DNA, 13 bp, Artificial Sequence
  Oligonucleotide for detection of SNP TSC0023497
ttatgcgatttat

SEQ ID NO: 94086 - DNA, 13 bp, Artificial Sequence
  Oligonucleotide for detection of SNP TSC0023497
ataaatcgcataa

SEQ ID NO: 94087 - DNA, 13 bp, Artificial Sequence
  Oligonucleotide for detection of SNP TSC0023499
tatgttgttatgy

SEQ ID NO: 94088 - DNA, 13 bp, Artificial Sequence
  Oligonucleotide for detection of SNP TSC0023499
rcataacaacata

SEQ ID NO: 94089 - DNA, 13 bp, Artificial Sequence
  Oligonucleotide for detection of SNP TSC0023499
tatgttattatgy

SEQ ID NO: 94090 - DNA, 13 bp, Artificial Sequence
  Oligonucleotide for detection of SNP TSC0023499
rcataataacata

SEQ ID NO: 94091 - DNA, 13 bp, Artificial Sequence
  Oligonucleotide for detection of SNP TSC0023499
tatgtcgttatgy

SEQ ID NO: 94092 - DNA, 13 bp, Artificial Sequence
  Oligonucleotide for detection of SNP TSC0023499
rcataacgacata

SEQ ID NO: 94093 - DNA, 13 bp, Artificial Sequence
  Oligonucleotide for detection of SNP TSC0023500
aataaatgagtaa

SEQ ID NO: 94094 - DNA, 13 bp, Artificial Sequence
  Oligonucleotide for detection of SNP TSC0023500
ttactcatttatt

SEQ ID NO: 94095 - DNA, 13 bp, Artificial Sequence
  Oligonucleotide for detection of SNP TSC0023500
aataaacgagtaa

SEQ ID NO: 94096 - DNA, 13 bp, Artificial Sequence
  Oligonucleotide for detection of SNP TSC0023500
ttactcgtttatt

SEQ ID NO: 94097 - DNA, 13 bp, Artificial Sequence
  Oligonucleotide for detection of SNP TSC0023501
tatttaagtgtgy

SEQ ID NO: 94098 - DNA, 13 bp, Artificial Sequence
  Oligonucleotide for detection of SNP TSC0023501
rcacacttaaata

SEQ ID NO: 94099 - DNA, 13 bp, Artificial Sequence
  Oligonucleotide for detection of SNP TSC0023501
tatttaggtgtgy

SEQ ID NO: 94100 - DNA, 13 bp, Artificial Sequence
  Oligonucleotide for detection of SNP TSC0023501
rcacacctaaata

SEQ ID NO: 94101 - DNA, 13 bp, Artificial Sequence
  Oligonucleotide for detection of SNP TSC0023501
tatttaagcgtgy

SEQ ID NO: 94102 - DNA, 13 bp, Artificial Sequence
  Oligonucleotide for detection of SNP TSC0023501
rcacgcttaaata

SEQ ID NO: 94103 - DNA, 13 bp, Artificial Sequence
  Oligonucleotide for detection of SNP TSC0023501
tatttaggcgtgy

SEQ ID NO: 94104 - DNA, 13 bp, Artificial Sequence
  Oligonucleotide for detection of SNP TSC0023501
rcacgcctaaata

SEQ ID NO: 94105 - DNA, 13 bp, Artificial Sequence
  Oligonucleotide for detection of SNP TSC0023502
tttaagtgtgtat

SEQ ID NO: 94106 - DNA, 13 bp, Artificial Sequence
  Oligonucleotide for detection of SNP TSC0023502
atacacacttaaa

SEQ ID NO: 94107 - DNA, 13 bp, Artificial Sequence
  Oligonucleotide for detection of SNP TSC0023502
tttaagcgtgtat

SEQ ID NO: 94108 - DNA, 13 bp, Artificial Sequence
  Oligonucleotide for detection of SNP TSC0023502
atacacgcttaaa

SEQ ID NO: 94109 - DNA, 13 bp, Artificial Sequence
  Oligonucleotide for detection of SNP TSC0023502
atgtatgtttgag

SEQ ID NO: 94110 - DNA, 13 bp, Artificial Sequence
  Oligonucleotide for detection of SNP TSC0023502
ctcaaacatacat

SEQ ID NO: 94111 - DNA, 13 bp, Artificial Sequence
  Oligonucleotide for detection of SNP TSC0023502
atgtatatttgag

SEQ ID NO: 94112 - DNA, 13 bp, Artificial Sequence
  Oligonucleotide for detection of SNP TSC0023502
ctcaaatatacat

SEQ ID NO: 94113 - DNA, 13 bp, Artificial Sequence
  Oligonucleotide for detection of SNP TSC0023502
atgtacgtttgag

SEQ ID NO: 94114 - DNA, 13 bp, Artificial Sequence
  Oligonucleotide for detection of SNP TSC0023502
ctcaaacgtacat

SEQ ID NO: 94115 - DNA, 13 bp, Artificial Sequence
  Oligonucleotide for detection of SNP TSC0023503
tttttaggataga

SEQ ID NO: 94116 - DNA, 13 bp, Artificial Sequence
  Oligonucleotide for detection of SNP TSC0023503
tctatcctaaaaa

SEQ ID NO: 94117 - DNA, 13 bp, Artificial Sequence
  Oligonucleotide for detection of SNP TSC0023503
tttttatgataga

SEQ ID NO: 94118 - DNA, 13 bp, Artificial Sequence
  Oligonucleotide for detection of SNP TSC0023503
tctatcataaaaa

SEQ ID NO: 94119 - DNA, 13 bp, Artificial Sequence
  Oligonucleotide for detection of SNP TSC0023503
tttgttttgaggg

SEQ ID NO: 94120 - DNA, 13 bp, Artificial Sequence
  Oligonucleotide for detection of SNP TSC0023503
ccctcaaaacaaa

SEQ ID NO: 94121 - DNA, 13 bp, Artificial Sequence
  Oligonucleotide for detection of SNP TSC0023503
tttgttatgaggg

SEQ ID NO: 94122 - DNA, 13 bp, Artificial Sequence
  Oligonucleotide for detection of SNP TSC0023503
ccctcataacaaa

SEQ ID NO: 94123 - DNA, 13 bp, Artificial Sequence
  Oligonucleotide for detection of SNP TSC0023504
atttttgttttga

SEQ ID NO: 94124 - DNA, 13 bp, Artificial Sequence
  Oligonucleotide for detection of SNP TSC0023504
tcaaaacaaaaat

SEQ ID NO: 94125 - DNA, 13 bp, Artificial Sequence
  Oligonucleotide for detection of SNP TSC0023504
atttttattttga

SEQ ID NO: 94126 - DNA, 13 bp, Artificial Sequence
  Oligonucleotide for detection of SNP TSC0023504
tcaaaataaaaat

SEQ ID NO: 94127 - DNA, 13 bp, Artificial Sequence
  Oligonucleotide for detection of SNP TSC0023505
gatattgatgttg

SEQ ID NO: 94128 - DNA, 13 bp, Artificial Sequence
  Oligonucleotide for detection of SNP TSC0023505
caacatcaatatc

SEQ ID NO: 94129 - DNA, 13 bp, Artificial Sequence
  Oligonucleotide for detection of SNP TSC0023505
gatattaatgttg

SEQ ID NO: 94130 - DNA, 13 bp, Artificial Sequence
  Oligonucleotide for detection of SNP TSC0023505
caacattaatatc

SEQ ID NO: 94131 - DNA, 13 bp, Artificial Sequence
  Oligonucleotide for detection of SNP TSC0023506
aatgatattgtty

SEQ ID NO: 94132 - DNA, 13 bp, Artificial Sequence
  Oligonucleotide for detection of SNP TSC0023506
raacaatatcatt

SEQ ID NO: 94133 - DNA, 13 bp, Artificial Sequence
  Oligonucleotide for detection of SNP TSC0023506
aatgatgttgtty

SEQ ID NO: 94134 - DNA, 13 bp, Artificial Sequence
  Oligonucleotide for detection of SNP TSC0023506
raacaacatcatt

SEQ ID NO: 94135 - DNA, 13 bp, Artificial Sequence
  Oligonucleotide for detection of SNP TSC0023506
aatgacgttgtty

SEQ ID NO: 94136 - DNA, 13 bp, Artificial Sequence
  Oligonucleotide for detection of SNP TSC0023506
raacaacgtcatt

SEQ ID NO: 94137 - DNA, 13 bp, Artificial Sequence
  Oligonucleotide for detection of SNP TSC0023506
ggataatgttatt

SEQ ID NO: 94138 - DNA, 13 bp, Artificial Sequence
  Oligonucleotide for detection of SNP TSC0023506
aataacattatcc

SEQ ID NO: 94139 - DNA, 13 bp, Artificial Sequence
  Oligonucleotide for detection of SNP TSC0023506
ggataacgttatt

SEQ ID NO: 94140 - DNA, 13 bp, Artificial Sequence
  Oligonucleotide for detection of SNP TSC0023506
aataacgttatcc

SEQ ID NO: 94141 - DNA, 13 bp, Artificial Sequence
  Oligonucleotide for detection of SNP TSC0023507
aattttggggttg

SEQ ID NO: 94142 - DNA, 13 bp, Artificial Sequence
  Oligonucleotide for detection of SNP TSC0023507
caaccccaaaatt

SEQ ID NO: 94143 - DNA, 13 bp, Artificial Sequence
  Oligonucleotide for detection of SNP TSC0023507
aattttagggttg

SEQ ID NO: 94144 - DNA, 13 bp, Artificial Sequence
  Oligonucleotide for detection of SNP TSC0023507
caaccctaaaatt

SEQ ID NO: 94145 - DNA, 13 bp, Artificial Sequence
  Oligonucleotide for detection of SNP TSC0023507
aattttggggtcg

SEQ ID NO: 94146 - DNA, 13 bp, Artificial Sequence
  Oligonucleotide for detection of SNP TSC0023507
cgaccccaaaatt

SEQ ID NO: 94147 - DNA, 13 bp, Artificial Sequence
  Oligonucleotide for detection of SNP TSC0023507
aattttagggtcg

SEQ ID NO: 94148 - DNA, 13 bp, Artificial Sequence
  Oligonucleotide for detection of SNP TSC0023507
cgaccctaaaatt

SEQ ID NO: 94149 - DNA, 13 bp, Artificial Sequence
  Oligonucleotide for detection of SNP TSC0023508
ggttagaatttat

SEQ ID NO: 94150 - DNA, 13 bp, Artificial Sequence
  Oligonucleotide for detection of SNP TSC0023508
ataaattctaacc

SEQ ID NO: 94151 - DNA, 13 bp, Artificial Sequence
  Oligonucleotide for detection of SNP TSC0023508
ggttagtatttat

SEQ ID NO: 94152 - DNA, 13 bp, Artificial Sequence
  Oligonucleotide for detection of SNP TSC0023508
ataaatactaacc

SEQ ID NO: 94153 - DNA, 13 bp, Artificial Sequence
  Oligonucleotide for detection of SNP TSC0023508
atagattttgaty

SEQ ID NO: 94154 - DNA, 13 bp, Artificial Sequence
  Oligonucleotide for detection of SNP TSC0023508
ratcaaaatctat

SEQ ID NO: 94155 - DNA, 13 bp, Artificial Sequence
  Oligonucleotide for detection of SNP TSC0023508
atagatattgaty

SEQ ID NO: 94156 - DNA, 13 bp, Artificial Sequence
  Oligonucleotide for detection of SNP TSC0023508
ratcaatatctat

SEQ ID NO: 94157 - DNA, 13 bp, Artificial Sequence
  Oligonucleotide for detection of SNP TSC0023509
gttttgtggattt

SEQ ID NO: 94158 - DNA, 13 bp, Artificial Sequence
  Oligonucleotide for detection of SNP TSC0023509
aaatccacaaaac

SEQ ID NO: 94159 - DNA, 13 bp, Artificial Sequence
  Oligonucleotide for detection of SNP TSC0023509
gttttggggattt

SEQ ID NO: 94160 - DNA, 13 bp, Artificial Sequence
  Oligonucleotide for detection of SNP TSC0023509
aaatccccaaaac

SEQ ID NO: 94161 - DNA, 13 bp, Artificial Sequence
  Oligonucleotide for detection of SNP TSC0023509
gtttcgtggattt

SEQ ID NO: 94162 - DNA, 13 bp, Artificial Sequence
  Oligonucleotide for detection of SNP TSC0023509
aaatccacgaaac

SEQ ID NO: 94163 - DNA, 13 bp, Artificial Sequence
  Oligonucleotide for detection of SNP TSC0023509
gtttcggggattt

SEQ ID NO: 94164 - DNA, 13 bp, Artificial Sequence
  Oligonucleotide for detection of SNP TSC0023509
aaatccccgaaac

SEQ ID NO: 94165 - DNA, 13 bp, Artificial Sequence
  Oligonucleotide for detection of SNP TSC0023509
gttttgcggattt

SEQ ID NO: 94166 - DNA, 13 bp, Artificial Sequence
  Oligonucleotide for detection of SNP TSC0023509
aaatccgcaaaac

SEQ ID NO: 94167 - DNA, 13 bp, Artificial Sequence
  Oligonucleotide for detection of SNP TSC0023509
gtttcgcggattt

SEQ ID NO: 94168 - DNA, 13 bp, Artificial Sequence
  Oligonucleotide for detection of SNP TSC0023509
aaatccgcgaaac

SEQ ID NO: 94169 - DNA, 13 bp, Artificial Sequence
  Oligonucleotide for detection of SNP TSC0023509
agatttgtggaay

SEQ ID NO: 94170 - DNA, 13 bp, Artificial Sequence
  Oligonucleotide for detection of SNP TSC0023509
rttccacaaatct

SEQ ID NO: 94171 - DNA, 13 bp, Artificial Sequence
  Oligonucleotide for detection of SNP TSC0023509
agatttttggaay

SEQ ID NO: 94172 - DNA, 13 bp, Artificial Sequence
  Oligonucleotide for detection of SNP TSC0023509
rttccaaaaatct

SEQ ID NO: 94173 - DNA, 13 bp, Artificial Sequence
  Oligonucleotide for detection of SNP TSC0023509
agattcgtggaay

SEQ ID NO: 94174 - DNA, 13 bp, Artificial Sequence
  Oligonucleotide for detection of SNP TSC0023509
rttccacgaatct

SEQ ID NO: 94175 - DNA, 13 bp, Artificial Sequence
  Oligonucleotide for detection of SNP TSC0023509
agattttcggaay

SEQ ID NO: 94176 - DNA, 13 bp, Artificial Sequence
  Oligonucleotide for detection of SNP TSC0023509
rttccgaaaatct

SEQ ID NO: 94177 - DNA, 13 bp, Artificial Sequence
  Oligonucleotide for detection of SNP TSC0023509
agatttgcggaay

SEQ ID NO: 94178 - DNA, 13 bp, Artificial Sequence
  Oligonucleotide for detection of SNP TSC0023509
rttccgcaaatct

SEQ ID NO: 94179 - DNA, 13 bp, Artificial Sequence
  Oligonucleotide for detection of SNP TSC0023509
agattcgcggaay

SEQ ID NO: 94180 - DNA, 13 bp, Artificial Sequence
  Oligonucleotide for detection of SNP TSC0023509
rttccgcgaatct

SEQ ID NO: 94181 - DNA, 13 bp, Artificial Sequence
  Oligonucleotide for detection of SNP TSC0023510
tagaaggggaggg

SEQ ID NO: 94182 - DNA, 13 bp, Artificial Sequence
  Oligonucleotide for detection of SNP TSC0023510
ccctccccttcta

SEQ ID NO: 94183 - DNA, 13 bp, Artificial Sequence
  Oligonucleotide for detection of SNP TSC0023510
tagaagtggaggg

SEQ ID NO: 94184 - DNA, 13 bp, Artificial Sequence
  Oligonucleotide for detection of SNP TSC0023510
ccctccacttcta

SEQ ID NO: 94185 - DNA, 13 bp, Artificial Sequence
  Oligonucleotide for detection of SNP TSC0023511
aggtgatggatat

SEQ ID NO: 94186 - DNA, 13 bp, Artificial Sequence
  Oligonucleotide for detection of SNP TSC0023511
atatccatcacct

SEQ ID NO: 94187 - DNA, 13 bp, Artificial Sequence
  Oligonucleotide for detection of SNP TSC0023511
aggtgacggatat

SEQ ID NO: 94188 - DNA, 13 bp, Artificial Sequence
  Oligonucleotide for detection of SNP TSC0023511
atatccgtcacct

SEQ ID NO: 94189 - DNA, 13 bp, Artificial Sequence
  Oligonucleotide for detection of SNP TSC0023511
atatttgttattt

SEQ ID NO: 94190 - DNA, 13 bp, Artificial Sequence
  Oligonucleotide for detection of SNP TSC0023511
aaataacaaatat

SEQ ID NO: 94191 - DNA, 13 bp, Artificial Sequence
  Oligonucleotide for detection of SNP TSC0023511
atatttattattt

SEQ ID NO: 94192 - DNA, 13 bp, Artificial Sequence
  Oligonucleotide for detection of SNP TSC0023511
aaataataaatat

SEQ ID NO: 94193 - DNA, 13 bp, Artificial Sequence
  Oligonucleotide for detection of SNP TSC0023511
atattcgttattt

SEQ ID NO: 94194 - DNA, 13 bp, Artificial Sequence
  Oligonucleotide for detection of SNP TSC0023511
aaataacgaatat

SEQ ID NO: 94195 - DNA, 13 bp, Artificial Sequence
  Oligonucleotide for detection of SNP TSC0023517
ttgtgaagtattt

SEQ ID NO: 94196 - DNA, 13 bp, Artificial Sequence
  Oligonucleotide for detection of SNP TSC0023517
aaatacttcacaa

SEQ ID NO: 94197 - DNA, 13 bp, Artificial Sequence
  Oligonucleotide for detection of SNP TSC0023517
ttgtgaggtattt

SEQ ID NO: 94198 - DNA, 13 bp, Artificial Sequence
  Oligonucleotide for detection of SNP TSC0023517
aaatacctcacaa

SEQ ID NO: 94199 - DNA, 13 bp, Artificial Sequence
  Oligonucleotide for detection of SNP TSC0023518
gagatggagttgg

SEQ ID NO: 94200 - DNA, 13 bp, Artificial Sequence
  Oligonucleotide for detection of SNP TSC0023518
ccaactccatctc

SEQ ID NO: 94201 - DNA, 13 bp, Artificial Sequence
  Oligonucleotide for detection of SNP TSC0023518
gagatgtagttgg

SEQ ID NO: 94202 - DNA, 13 bp, Artificial Sequence
  Oligonucleotide for detection of SNP TSC0023518
ccaactacatctc

SEQ ID NO: 94203 - DNA, 13 bp, Artificial Sequence
  Oligonucleotide for detection of SNP TSC0023518
ttagttttattty

SEQ ID NO: 94204 - DNA, 13 bp, Artificial Sequence
  Oligonucleotide for detection of SNP TSC0023518
raaataaaactaa

SEQ ID NO: 94205 - DNA, 13 bp, Artificial Sequence
  Oligonucleotide for detection of SNP TSC0023518
ttagttatattty

SEQ ID NO: 94206 - DNA, 13 bp, Artificial Sequence
  Oligonucleotide for detection of SNP TSC0023518
raaatataactaa

SEQ ID NO: 94207 - DNA, 13 bp, Artificial Sequence
  Oligonucleotide for detection of SNP TSC0023519
tagtagtgaatta

SEQ ID NO: 94208 - DNA, 13 bp, Artificial Sequence
  Oligonucleotide for detection of SNP TSC0023519
taattcactacta

SEQ ID NO: 94209 - DNA, 13 bp, Artificial Sequence
  Oligonucleotide for detection of SNP TSC0023519
tagtagcgaatta

SEQ ID NO: 94210 - DNA, 13 bp, Artificial Sequence
  Oligonucleotide for detection of SNP TSC0023519
taattcgctacta

SEQ ID NO: 94211 - DNA, 13 bp, Artificial Sequence
  Oligonucleotide for detection of SNP TSC0023519
tgatttgttgtta

SEQ ID NO: 94212 - DNA, 13 bp, Artificial Sequence
  Oligonucleotide for detection of SNP TSC0023519
taacaacaaatca

SEQ ID NO: 94213 - DNA, 13 bp, Artificial Sequence
  Oligonucleotide for detection of SNP TSC0023519
tgatttattgtta

SEQ ID NO: 94214 - DNA, 13 bp, Artificial Sequence
  Oligonucleotide for detection of SNP TSC0023519
taacaataaatca

SEQ ID NO: 94215 - DNA, 13 bp, Artificial Sequence
  Oligonucleotide for detection of SNP TSC0023519
tgattcgttgtta

SEQ ID NO: 94216 - DNA, 13 bp, Artificial Sequence
  Oligonucleotide for detection of SNP TSC0023519
taacaacgaatca

SEQ ID NO: 94217 - DNA, 13 bp, Artificial Sequence
  Oligonucleotide for detection of SNP TSC0023520
tagtgaattatta

SEQ ID NO: 94218 - DNA, 13 bp, Artificial Sequence
  Oligonucleotide for detection of SNP TSC0023520
taataattcacta

SEQ ID NO: 94219 - DNA, 13 bp, Artificial Sequence
  Oligonucleotide for detection of SNP TSC0023520
tagtgagttatta

SEQ ID NO: 94220 - DNA, 13 bp, Artificial Sequence
  Oligonucleotide for detection of SNP TSC0023520
taataactcacta

SEQ ID NO: 94221 - DNA, 13 bp, Artificial Sequence
  Oligonucleotide for detection of SNP TSC0023520
tagcgaattatta

SEQ ID NO: 94222 - DNA, 13 bp, Artificial Sequence
  Oligonucleotide for detection of SNP TSC0023520
taataattcgcta

SEQ ID NO: 94223 - DNA, 13 bp, Artificial Sequence
  Oligonucleotide for detection of SNP TSC0023520
tagcgagttatta

SEQ ID NO: 94224 - DNA, 13 bp, Artificial Sequence
  Oligonucleotide for detection of SNP TSC0023520
taataactcgcta

SEQ ID NO: 94225 - DNA, 13 bp, Artificial Sequence
  Oligonucleotide for detection of SNP TSC0023522
tatttgtgttaty

SEQ ID NO: 94226 - DNA, 13 bp, Artificial Sequence
  Oligonucleotide for detection of SNP TSC0023522
rataacacaaata

SEQ ID NO: 94227 - DNA, 13 bp, Artificial Sequence
  Oligonucleotide for detection of SNP TSC0023522
tatttgcgttaty

SEQ ID NO: 94228 - DNA, 13 bp, Artificial Sequence
  Oligonucleotide for detection of SNP TSC0023522
rataacgcaaata

SEQ ID NO: 94229 - DNA, 13 bp, Artificial Sequence
  Oligonucleotide for detection of SNP TSC0023522
ggtggtgtaagtg

SEQ ID NO: 94230 - DNA, 13 bp, Artificial Sequence
  Oligonucleotide for detection of SNP TSC0023522
cacttacaccacc

SEQ ID NO: 94231 - DNA, 13 bp, Artificial Sequence
  Oligonucleotide for detection of SNP TSC0023522
ggtggtataagtg

SEQ ID NO: 94232 - DNA, 13 bp, Artificial Sequence
  Oligonucleotide for detection of SNP TSC0023522
cacttataccacc

SEQ ID NO: 94233 - DNA, 13 bp, Artificial Sequence
  Oligonucleotide for detection of SNP TSC0023522
ggtggcgtaagtg

SEQ ID NO: 94234 - DNA, 13 bp, Artificial Sequence
  Oligonucleotide for detection of SNP TSC0023522
cacttacgccacc

SEQ ID NO: 94235 - DNA, 13 bp, Artificial Sequence
  Oligonucleotide for detection of SNP TSC0023525
ttttttatttcgg

SEQ ID NO: 94236 - DNA, 13 bp, Artificial Sequence
  Oligonucleotide for detection of SNP TSC0023525
ccgaaataaaaaa

SEQ ID NO: 94237 - DNA, 13 bp, Artificial Sequence
  Oligonucleotide for detection of SNP TSC0023525
tttttcgttttgg

SEQ ID NO: 94238 - DNA, 13 bp, Artificial Sequence
  Oligonucleotide for detection of SNP TSC0023525
ccaaaacgaaaaa

SEQ ID NO: 94239 - DNA, 13 bp, Artificial Sequence
  Oligonucleotide for detection of SNP TSC0023525
ttttttgtttcgg

SEQ ID NO: 94240 - DNA, 13 bp, Artificial Sequence
  Oligonucleotide for detection of SNP TSC0023525
ccgaaacaaaaaa

SEQ ID NO: 94241 - DNA, 13 bp, Artificial Sequence
  Oligonucleotide for detection of SNP TSC0023525
tttttcgtttcgg

SEQ ID NO: 94242 - DNA, 13 bp, Artificial Sequence
  Oligonucleotide for detection of SNP TSC0023525
ccgaaacgaaaaa

SEQ ID NO: 94243 - DNA, 13 bp, Artificial Sequence
  Oligonucleotide for detection of SNP TSC0023525
ttgggatgagaag

SEQ ID NO: 94244 - DNA, 13 bp, Artificial Sequence
  Oligonucleotide for detection of SNP TSC0023525
cttctcatcccaa

SEQ ID NO: 94245 - DNA, 13 bp, Artificial Sequence
  Oligonucleotide for detection of SNP TSC0023525
tcgggatgagaag

SEQ ID NO: 94246 - DNA, 13 bp, Artificial Sequence
  Oligonucleotide for detection of SNP TSC0023525
cttctcatcccga

SEQ ID NO: 94247 - DNA, 13 bp, Artificial Sequence
  Oligonucleotide for detection of SNP TSC0023525
ttgggacgagaag

SEQ ID NO: 94248 - DNA, 13 bp, Artificial Sequence
  Oligonucleotide for detection of SNP TSC0023525
cttctcgtcccaa

SEQ ID NO: 94249 - DNA, 13 bp, Artificial Sequence
  Oligonucleotide for detection of SNP TSC0023525
tcgggacgagaag

SEQ ID NO: 94250 - DNA, 13 bp, Artificial Sequence
  Oligonucleotide for detection of SNP TSC0023525
cttctcgtcccga

SEQ ID NO: 94251 - DNA, 13 bp, Artificial Sequence
  Oligonucleotide for detection of SNP TSC0023527
tttgagaaggtag

SEQ ID NO: 94252 - DNA, 13 bp, Artificial Sequence
  Oligonucleotide for detection of SNP TSC0023527
ctaccttctcaaa

SEQ ID NO: 94253 - DNA, 13 bp, Artificial Sequence
  Oligonucleotide for detection of SNP TSC0023527
tttgaggaggtag

SEQ ID NO: 94254 - DNA, 13 bp, Artificial Sequence
  Oligonucleotide for detection of SNP TSC0023527
ctacctcctcaaa

SEQ ID NO: 94255 - DNA, 13 bp, Artificial Sequence
  Oligonucleotide for detection of SNP TSC0023528
aaaaaaagaaaat

SEQ ID NO: 94256 - DNA, 13 bp, Artificial Sequence
  Oligonucleotide for detection of SNP TSC0023528
attttcttttttt

SEQ ID NO: 94257 - DNA, 13 bp, Artificial Sequence
  Oligonucleotide for detection of SNP TSC0023530
ttaagatgtaata

SEQ ID NO: 94258 - DNA, 13 bp, Artificial Sequence
  Oligonucleotide for detection of SNP TSC0023530
tattacatcttaa

SEQ ID NO: 94259 - DNA, 13 bp, Artificial Sequence
  Oligonucleotide for detection of SNP TSC0023530
ttaagaggtaata

SEQ ID NO: 94260 - DNA, 13 bp, Artificial Sequence
  Oligonucleotide for detection of SNP TSC0023530
tattacctcttaa

SEQ ID NO: 94261 - DNA, 13 bp, Artificial Sequence
  Oligonucleotide for detection of SNP TSC0023530
ttaagacgtaata

SEQ ID NO: 94262 - DNA, 13 bp, Artificial Sequence
  Oligonucleotide for detection of SNP TSC0023530
tattacgtcttaa

SEQ ID NO: 94263 - DNA, 13 bp, Artificial Sequence
  Oligonucleotide for detection of SNP TSC0023530
tgttattttttag

SEQ ID NO: 94264 - DNA, 13 bp, Artificial Sequence
  Oligonucleotide for detection of SNP TSC0023530
ctaaaaaataaca

SEQ ID NO: 94265 - DNA, 13 bp, Artificial Sequence
  Oligonucleotide for detection of SNP TSC0023531
tagtttatgagay

SEQ ID NO: 94266 - DNA, 13 bp, Artificial Sequence
  Oligonucleotide for detection of SNP TSC0023531
rtctcataaacta

SEQ ID NO: 94267 - DNA, 13 bp, Artificial Sequence
  Oligonucleotide for detection of SNP TSC0023531
tagtttttgagay

SEQ ID NO: 94268 - DNA, 13 bp, Artificial Sequence
  Oligonucleotide for detection of SNP TSC0023531
rtctcaaaaacta

SEQ ID NO: 94269 - DNA, 13 bp, Artificial Sequence
  Oligonucleotide for detection of SNP TSC0023531
gttttatgggttg

SEQ ID NO: 94270 - DNA, 13 bp, Artificial Sequence
  Oligonucleotide for detection of SNP TSC0023531
caacccataaaac

SEQ ID NO: 94271 - DNA, 13 bp, Artificial Sequence
  Oligonucleotide for detection of SNP TSC0023531
gttttaggggttg

SEQ ID NO: 94272 - DNA, 13 bp, Artificial Sequence
  Oligonucleotide for detection of SNP TSC0023531
caacccctaaaac

SEQ ID NO: 94273 - DNA, 13 bp, Artificial Sequence
  Oligonucleotide for detection of SNP TSC0023532
taatgatattaty

SEQ ID NO: 94274 - DNA, 13 bp, Artificial Sequence
  Oligonucleotide for detection of SNP TSC0023532
rataatatcatta

SEQ ID NO: 94275 - DNA, 13 bp, Artificial Sequence
  Oligonucleotide for detection of SNP TSC0023532
taatgagattaty

SEQ ID NO: 94276 - DNA, 13 bp, Artificial Sequence
  Oligonucleotide for detection of SNP TSC0023532
rataatctcatta

SEQ ID NO: 94277 - DNA, 13 bp, Artificial Sequence
  Oligonucleotide for detection of SNP TSC0023532
ggtggtgttatta

SEQ ID NO: 94278 - DNA, 13 bp, Artificial Sequence
  Oligonucleotide for detection of SNP TSC0023532
taataacaccacc

SEQ ID NO: 94279 - DNA, 13 bp, Artificial Sequence
  Oligonucleotide for detection of SNP TSC0023532
ggtggttttatta

SEQ ID NO: 94280 - DNA, 13 bp, Artificial Sequence
  Oligonucleotide for detection of SNP TSC0023532
taataaaaccacc

SEQ ID NO: 94281 - DNA, 13 bp, Artificial Sequence
  Oligonucleotide for detection of SNP TSC0023533
tttataattgtgg

SEQ ID NO: 94282 - DNA, 13 bp, Artificial Sequence
  Oligonucleotide for detection of SNP TSC0023533
ccacaattataaa

SEQ ID NO: 94283 - DNA, 13 bp, Artificial Sequence
  Oligonucleotide for detection of SNP TSC0023533
tttatatttgtgg

SEQ ID NO: 94284 - DNA, 13 bp, Artificial Sequence
  Oligonucleotide for detection of SNP TSC0023533
ccacaaatataaa

SEQ ID NO: 94285 - DNA, 13 bp, Artificial Sequence
  Oligonucleotide for detection of SNP TSC0023533
ttatagttataga

SEQ ID NO: 94286 - DNA, 13 bp, Artificial Sequence
  Oligonucleotide for detection of SNP TSC0023533
tctataactataa

SEQ ID NO: 94287 - DNA, 13 bp, Artificial Sequence
  Oligonucleotide for detection of SNP TSC0023533
ttatagatataga

SEQ ID NO: 94288 - DNA, 13 bp, Artificial Sequence
  Oligonucleotide for detection of SNP TSC0023533
tctatatctataa

SEQ ID NO: 94289 - DNA, 13 bp, Artificial Sequence
  Oligonucleotide for detection of SNP TSC0023534
gtagagattaaga

SEQ ID NO: 94290 - DNA, 13 bp, Artificial Sequence
  Oligonucleotide for detection of SNP TSC0023534
tcttaatctctac

SEQ ID NO: 94291 - DNA, 13 bp, Artificial Sequence
  Oligonucleotide for detection of SNP TSC0023534
gtagaggttaaga

SEQ ID NO: 94292 - DNA, 13 bp, Artificial Sequence
  Oligonucleotide for detection of SNP TSC0023534
tcttaacctctac

SEQ ID NO: 94293 - DNA, 13 bp, Artificial Sequence
  Oligonucleotide for detection of SNP TSC0023535
aattttaatattt

SEQ ID NO: 94294 - DNA, 13 bp, Artificial Sequence
  Oligonucleotide for detection of SNP TSC0023535
aaatattaaaatt

SEQ ID NO: 94295 - DNA, 13 bp, Artificial Sequence
  Oligonucleotide for detection of SNP TSC0023535
aatttttatattt

SEQ ID NO: 94296 - DNA, 13 bp, Artificial Sequence
  Oligonucleotide for detection of SNP TSC0023535
aaatataaaaatt

SEQ ID NO: 94297 - DNA, 13 bp, Artificial Sequence
  Oligonucleotide for detection of SNP TSC0023535
agatgttggaatt

SEQ ID NO: 94298 - DNA, 13 bp, Artificial Sequence
  Oligonucleotide for detection of SNP TSC0023535
aattccaacatct

SEQ ID NO: 94299 - DNA, 13 bp, Artificial Sequence
  Oligonucleotide for detection of SNP TSC0023535
agatgtaggaatt

SEQ ID NO: 94300 - DNA, 13 bp, Artificial Sequence
  Oligonucleotide for detection of SNP TSC0023535
aattcctacatct

SEQ ID NO: 94301 - DNA, 13 bp, Artificial Sequence
  Oligonucleotide for detection of SNP TSC0023536
tttattttatatg

SEQ ID NO: 94302 - DNA, 13 bp, Artificial Sequence
  Oligonucleotide for detection of SNP TSC0023536
catataaaataaa

SEQ ID NO: 94303 - DNA, 13 bp, Artificial Sequence
  Oligonucleotide for detection of SNP TSC0023536
tatatatagtaag

SEQ ID NO: 94304 - DNA, 13 bp, Artificial Sequence
  Oligonucleotide for detection of SNP TSC0023536
cttactatatata

SEQ ID NO: 94305 - DNA, 13 bp, Artificial Sequence
  Oligonucleotide for detection of SNP TSC0023536
tatatagagtaag

SEQ ID NO: 94306 - DNA, 13 bp, Artificial Sequence
  Oligonucleotide for detection of SNP TSC0023536
cttactctatata

SEQ ID NO: 94307 - DNA, 13 bp, Artificial Sequence
  Oligonucleotide for detection of SNP TSC0023537
gattaggagaatt

SEQ ID NO: 94308 - DNA, 13 bp, Artificial Sequence
  Oligonucleotide for detection of SNP TSC0023537
aattctcctaatc

SEQ ID NO: 94309 - DNA, 13 bp, Artificial Sequence
  Oligonucleotide for detection of SNP TSC0023537
gattagaagaatt

SEQ ID NO: 94310 - DNA, 13 bp, Artificial Sequence
  Oligonucleotide for detection of SNP TSC0023537
aattcttctaatc

SEQ ID NO: 94311 - DNA, 13 bp, Artificial Sequence
  Oligonucleotide for detection of SNP TSC0023541
ggtgatatgtttg

SEQ ID NO: 94312 - DNA, 13 bp, Artificial Sequence
  Oligonucleotide for detection of SNP TSC0023541
caaacatatcacc

SEQ ID NO: 94313 - DNA, 13 bp, Artificial Sequence
  Oligonucleotide for detection of SNP TSC0023541
ggtgatgtgtttg

SEQ ID NO: 94314 - DNA, 13 bp, Artificial Sequence
  Oligonucleotide for detection of SNP TSC0023541
caaacacatcacc

SEQ ID NO: 94315 - DNA, 13 bp, Artificial Sequence
  Oligonucleotide for detection of SNP TSC0023541
ggtgacgtgtttg

SEQ ID NO: 94316 - DNA, 13 bp, Artificial Sequence
  Oligonucleotide for detection of SNP TSC0023541
caaacacgtcacc

SEQ ID NO: 94317 - DNA, 13 bp, Artificial Sequence
  Oligonucleotide for detection of SNP TSC0023541
taagtatgttaty

SEQ ID NO: 94318 - DNA, 13 bp, Artificial Sequence
  Oligonucleotide for detection of SNP TSC0023541
rataacatactta

SEQ ID NO: 94319 - DNA, 13 bp, Artificial Sequence
  Oligonucleotide for detection of SNP TSC0023541
taagtacgttaty

SEQ ID NO: 94320 - DNA, 13 bp, Artificial Sequence
  Oligonucleotide for detection of SNP TSC0023541
rataacgtactta

SEQ ID NO: 94321 - DNA, 13 bp, Artificial Sequence
  Oligonucleotide for detection of SNP TSC0023542
aaaagagtagaat

SEQ ID NO: 94322 - DNA, 13 bp, Artificial Sequence
  Oligonucleotide for detection of SNP TSC0023542
attctactctttt

SEQ ID NO: 94323 - DNA, 13 bp, Artificial Sequence
  Oligonucleotide for detection of SNP TSC0023542
aaaagaatagaat

SEQ ID NO: 94324 - DNA, 13 bp, Artificial Sequence
  Oligonucleotide for detection of SNP TSC0023542
attctattctttt

SEQ ID NO: 94325 - DNA, 13 bp, Artificial Sequence
  Oligonucleotide for detection of SNP TSC0023543
ttttttggattta

SEQ ID NO: 94326 - DNA, 13 bp, Artificial Sequence
  Oligonucleotide for detection of SNP TSC0023543
taaatccaaaaaa

SEQ ID NO: 94327 - DNA, 13 bp, Artificial Sequence
  Oligonucleotide for detection of SNP TSC0023543
tttttttgattta

SEQ ID NO: 94328 - DNA, 13 bp, Artificial Sequence
  Oligonucleotide for detection of SNP TSC0023543
taaatcaaaaaaa

SEQ ID NO: 94329 - DNA, 13 bp, Artificial Sequence
  Oligonucleotide for detection of SNP TSC0023543
taaatttagggga

SEQ ID NO: 94330 - DNA, 13 bp, Artificial Sequence
  Oligonucleotide for detection of SNP TSC0023543
tcccctaaattta

SEQ ID NO: 94331 - DNA, 13 bp, Artificial Sequence
  Oligonucleotide for detection of SNP TSC0023543
taaattaagggga

SEQ ID NO: 94332 - DNA, 13 bp, Artificial Sequence
  Oligonucleotide for detection of SNP TSC0023543
tccccttaattta

SEQ ID NO: 94333 - DNA, 13 bp, Artificial Sequence
  Oligonucleotide for detection of SNP TSC0023546
tatttttatgagt

SEQ ID NO: 94334 - DNA, 13 bp, Artificial Sequence
  Oligonucleotide for detection of SNP TSC0023546
actcataaaaata

SEQ ID NO: 94335 - DNA, 13 bp, Artificial Sequence
  Oligonucleotide for detection of SNP TSC0023546
tattttgatgagt

SEQ ID NO: 94336 - DNA, 13 bp, Artificial Sequence
  Oligonucleotide for detection of SNP TSC0023546
actcatcaaaata

SEQ ID NO: 94337 - DNA, 13 bp, Artificial Sequence
  Oligonucleotide for detection of SNP TSC0023546
atttatgagaatg

SEQ ID NO: 94338 - DNA, 13 bp, Artificial Sequence
  Oligonucleotide for detection of SNP TSC0023546
cattctcataaat

SEQ ID NO: 94339 - DNA, 13 bp, Artificial Sequence
  Oligonucleotide for detection of SNP TSC0023546
atttattagaatg

SEQ ID NO: 94340 - DNA, 13 bp, Artificial Sequence
  Oligonucleotide for detection of SNP TSC0023546
cattctaataaat

SEQ ID NO: 94341 - DNA, 13 bp, Artificial Sequence
  Oligonucleotide for detection of SNP TSC0023550
tggtaggaattty

SEQ ID NO: 94342 - DNA, 13 bp, Artificial Sequence
  Oligonucleotide for detection of SNP TSC0023550
raaattcctacca

SEQ ID NO: 94343 - DNA, 13 bp, Artificial Sequence
  Oligonucleotide for detection of SNP TSC0023550
tggtagaaattty

SEQ ID NO: 94344 - DNA, 13 bp, Artificial Sequence
  Oligonucleotide for detection of SNP TSC0023550
raaatttctacca

SEQ ID NO: 94345 - DNA, 13 bp, Artificial Sequence
  Oligonucleotide for detection of SNP TSC0023551
tttgggtaatttg

SEQ ID NO: 94346 - DNA, 13 bp, Artificial Sequence
  Oligonucleotide for detection of SNP TSC0023551
caaattacccaaa

SEQ ID NO: 94347 - DNA, 13 bp, Artificial Sequence
  Oligonucleotide for detection of SNP TSC0023551
tttggggaatttg

SEQ ID NO: 94348 - DNA, 13 bp, Artificial Sequence
  Oligonucleotide for detection of SNP TSC0023551
caaattccccaaa

SEQ ID NO: 94349 - DNA, 13 bp, Artificial Sequence
  Oligonucleotide for detection of SNP TSC0023551
taaattgtttagg

SEQ ID NO: 94350 - DNA, 13 bp, Artificial Sequence
  Oligonucleotide for detection of SNP TSC0023551
cctaaacaattta

SEQ ID NO: 94351 - DNA, 13 bp, Artificial Sequence
  Oligonucleotide for detection of SNP TSC0023551
taaattttttagg

SEQ ID NO: 94352 - DNA, 13 bp, Artificial Sequence
  Oligonucleotide for detection of SNP TSC0023551
cctaaaaaattta

SEQ ID NO: 94353 - DNA, 13 bp, Artificial Sequence
  Oligonucleotide for detection of SNP TSC0023554
ttaattagttata

SEQ ID NO: 94354 - DNA, 13 bp, Artificial Sequence
  Oligonucleotide for detection of SNP TSC0023554
tataactaattaa

SEQ ID NO: 94355 - DNA, 13 bp, Artificial Sequence
  Oligonucleotide for detection of SNP TSC0023554
ttaatttgttata

SEQ ID NO: 94356 - DNA, 13 bp, Artificial Sequence
  Oligonucleotide for detection of SNP TSC0023554
tataacaaattaa

SEQ ID NO: 94357 - DNA, 13 bp, Artificial Sequence
  Oligonucleotide for detection of SNP TSC0023554
ttaattcgttata

SEQ ID NO: 94358 - DNA, 13 bp, Artificial Sequence
  Oligonucleotide for detection of SNP TSC0023554
tataacgaattaa

SEQ ID NO: 94359 - DNA, 13 bp, Artificial Sequence
  Oligonucleotide for detection of SNP TSC0023554
tgtgattgattga

SEQ ID NO: 94360 - DNA, 13 bp, Artificial Sequence
  Oligonucleotide for detection of SNP TSC0023554
tcaatcaatcaca

SEQ ID NO: 94361 - DNA, 13 bp, Artificial Sequence
  Oligonucleotide for detection of SNP TSC0023554
tgtgatggattga

SEQ ID NO: 94362 - DNA, 13 bp, Artificial Sequence
  Oligonucleotide for detection of SNP TSC0023554
tcaatccatcaca

SEQ ID NO: 94363 - DNA, 13 bp, Artificial Sequence
  Oligonucleotide for detection of SNP TSC0023554
tgtgacggattga

SEQ ID NO: 94364 - DNA, 13 bp, Artificial Sequence
  Oligonucleotide for detection of SNP TSC0023554
tcaatccgtcaca

SEQ ID NO: 94365 - DNA, 13 bp, Artificial Sequence
  Oligonucleotide for detection of SNP TSC0023555
tagttgagtgtgg

SEQ ID NO: 94366 - DNA, 13 bp, Artificial Sequence
  Oligonucleotide for detection of SNP TSC0023555
ccacactcaacta

SEQ ID NO: 94367 - DNA, 13 bp, Artificial Sequence
  Oligonucleotide for detection of SNP TSC0023555
tagtcgagtgtgg

SEQ ID NO: 94368 - DNA, 13 bp, Artificial Sequence
  Oligonucleotide for detection of SNP TSC0023555
ccacactcgacta

SEQ ID NO: 94369 - DNA, 13 bp, Artificial Sequence
  Oligonucleotide for detection of SNP TSC0023555
tagtcgggtgtgg

SEQ ID NO: 94370 - DNA, 13 bp, Artificial Sequence
  Oligonucleotide for detection of SNP TSC0023555
ccacacccgacta

SEQ ID NO: 94371 - DNA, 13 bp, Artificial Sequence
  Oligonucleotide for detection of SNP TSC0023555
tagttgagcgtgg

SEQ ID NO: 94372 - DNA, 13 bp, Artificial Sequence
  Oligonucleotide for detection of SNP TSC0023555
ccacgctcaacta

SEQ ID NO: 94373 - DNA, 13 bp, Artificial Sequence
  Oligonucleotide for detection of SNP TSC0023555
tagttgggcgtgg

SEQ ID NO: 94374 - DNA, 13 bp, Artificial Sequence
  Oligonucleotide for detection of SNP TSC0023555
ccacgcccaacta

SEQ ID NO: 94375 - DNA, 13 bp, Artificial Sequence
  Oligonucleotide for detection of SNP TSC0023555
tagtcgagcgtgg

SEQ ID NO: 94376 - DNA, 13 bp, Artificial Sequence
  Oligonucleotide for detection of SNP TSC0023555
ccacgctcgacta

SEQ ID NO: 94377 - DNA, 13 bp, Artificial Sequence
  Oligonucleotide for detection of SNP TSC0023555
tagtcgggcgtgg

SEQ ID NO: 94378 - DNA, 13 bp, Artificial Sequence
  Oligonucleotide for detection of SNP TSC0023555
ccacgcccgacta

SEQ ID NO: 94379 - DNA, 13 bp, Artificial Sequence
  Oligonucleotide for detection of SNP TSC0023556
tgtggttgtaggy

SEQ ID NO: 94380 - DNA, 13 bp, Artificial Sequence
  Oligonucleotide for detection of SNP TSC0023556
rcctacaaccaca

SEQ ID NO: 94381 - DNA, 13 bp, Artificial Sequence
  Oligonucleotide for detection of SNP TSC0023556
tgtggtggtaggy

SEQ ID NO: 94382 - DNA, 13 bp, Artificial Sequence
  Oligonucleotide for detection of SNP TSC0023556
rcctaccaccaca

SEQ ID NO: 94383 - DNA, 13 bp, Artificial Sequence
  Oligonucleotide for detection of SNP TSC0023556
cgtggttgtaggy

SEQ ID NO: 94384 - DNA, 13 bp, Artificial Sequence
  Oligonucleotide for detection of SNP TSC0023556
rcctacaaccacg

SEQ ID NO: 94385 - DNA, 13 bp, Artificial Sequence
  Oligonucleotide for detection of SNP TSC0023556
cgtggtggtaggy

SEQ ID NO: 94386 - DNA, 13 bp, Artificial Sequence
  Oligonucleotide for detection of SNP TSC0023556
rcctaccaccacg

SEQ ID NO: 94387 - DNA, 13 bp, Artificial Sequence
  Oligonucleotide for detection of SNP TSC0023556
tgtggtcgtaggy

SEQ ID NO: 94388 - DNA, 13 bp, Artificial Sequence
  Oligonucleotide for detection of SNP TSC0023556
rcctacgaccaca

SEQ ID NO: 94389 - DNA, 13 bp, Artificial Sequence
  Oligonucleotide for detection of SNP TSC0023556
cgtggtcgtaggy

SEQ ID NO: 94390 - DNA, 13 bp, Artificial Sequence
  Oligonucleotide for detection of SNP TSC0023556
rcctacgaccacg

SEQ ID NO: 94391 - DNA, 13 bp, Artificial Sequence
  Oligonucleotide for detection of SNP TSC0023556
gtttgtgattatg

SEQ ID NO: 94392 - DNA, 13 bp, Artificial Sequence
  Oligonucleotide for detection of SNP TSC0023556
cataatcacaaac

SEQ ID NO: 94393 - DNA, 13 bp, Artificial Sequence
  Oligonucleotide for detection of SNP TSC0023556
gtttgttattatg

SEQ ID NO: 94394 - DNA, 13 bp, Artificial Sequence
  Oligonucleotide for detection of SNP TSC0023556
cataataacaaac

SEQ ID NO: 94395 - DNA, 13 bp, Artificial Sequence
  Oligonucleotide for detection of SNP TSC0023556
gtttgcgattatg

SEQ ID NO: 94396 - DNA, 13 bp, Artificial Sequence
  Oligonucleotide for detection of SNP TSC0023556
cataatcgcaaac

SEQ ID NO: 94397 - DNA, 13 bp, Artificial Sequence
  Oligonucleotide for detection of SNP TSC0023556
gtttgttattacg

SEQ ID NO: 94398 - DNA, 13 bp, Artificial Sequence
  Oligonucleotide for detection of SNP TSC0023556
cgtaataacaaac

SEQ ID NO: 94399 - DNA, 13 bp, Artificial Sequence
  Oligonucleotide for detection of SNP TSC0023556
gtttgtgattacg

SEQ ID NO: 94400 - DNA, 13 bp, Artificial Sequence
  Oligonucleotide for detection of SNP TSC0023556
cgtaatcacaaac

SEQ ID NO: 94401 - DNA, 13 bp, Artificial Sequence
  Oligonucleotide for detection of SNP TSC0023556
gtttgcgattacg

SEQ ID NO: 94402 - DNA, 13 bp, Artificial Sequence
  Oligonucleotide for detection of SNP TSC0023556
cgtaatcgcaaac

SEQ ID NO: 94403 - DNA, 13 bp, Artificial Sequence
  Oligonucleotide for detection of SNP TSC0023557
ggttgtaggtgty

SEQ ID NO: 94404 - DNA, 13 bp, Artificial Sequence
  Oligonucleotide for detection of SNP TSC0023557
racacctacaacc

SEQ ID NO: 94405 - DNA, 13 bp, Artificial Sequence
  Oligonucleotide for detection of SNP TSC0023557
ggttgtgggtgty

SEQ ID NO: 94406 - DNA, 13 bp, Artificial Sequence
  Oligonucleotide for detection of SNP TSC0023557
racacccacaacc

SEQ ID NO: 94407 - DNA, 13 bp, Artificial Sequence
  Oligonucleotide for detection of SNP TSC0023557
ggtcgtaggtgty

SEQ ID NO: 94408 - DNA, 13 bp, Artificial Sequence
  Oligonucleotide for detection of SNP TSC0023557
racacctacgacc

SEQ ID NO: 94409 - DNA, 13 bp, Artificial Sequence
  Oligonucleotide for detection of SNP TSC0023557
ggtcgtgggtgty

SEQ ID NO: 94410 - DNA, 13 bp, Artificial Sequence
  Oligonucleotide for detection of SNP TSC0023557
racacccacgacc

SEQ ID NO: 94411 - DNA, 13 bp, Artificial Sequence
  Oligonucleotide for detection of SNP TSC0023557
ggttgtaggcgty

SEQ ID NO: 94412 - DNA, 13 bp, Artificial Sequence
  Oligonucleotide for detection of SNP TSC0023557
racgcctacaacc

SEQ ID NO: 94413 - DNA, 13 bp, Artificial Sequence
  Oligonucleotide for detection of SNP TSC0023557
ggttgcgggtgty

SEQ ID NO: 94414 - DNA, 13 bp, Artificial Sequence
  Oligonucleotide for detection of SNP TSC0023557
racacccgcaacc

SEQ ID NO: 94415 - DNA, 13 bp, Artificial Sequence
  Oligonucleotide for detection of SNP TSC0023557
ggtcgtaggcgty

SEQ ID NO: 94416 - DNA, 13 bp, Artificial Sequence
  Oligonucleotide for detection of SNP TSC0023557
racgcctacgacc

SEQ ID NO: 94417 - DNA, 13 bp, Artificial Sequence
  Oligonucleotide for detection of SNP TSC0023557
ggttgtgggcgty

SEQ ID NO: 94418 - DNA, 13 bp, Artificial Sequence
  Oligonucleotide for detection of SNP TSC0023557
racgcccacaacc

SEQ ID NO: 94419 - DNA, 13 bp, Artificial Sequence
  Oligonucleotide for detection of SNP TSC0023557
ggtcgcgggtgty

SEQ ID NO: 94420 - DNA, 13 bp, Artificial Sequence
  Oligonucleotide for detection of SNP TSC0023557
racacccgcgacc

SEQ ID NO: 94421 - DNA, 13 bp, Artificial Sequence
  Oligonucleotide for detection of SNP TSC0023557
ggtcgtgggcgty

SEQ ID NO: 94422 - DNA, 13 bp, Artificial Sequence
  Oligonucleotide for detection of SNP TSC0023557
racgcccacgacc

SEQ ID NO: 94423 - DNA, 13 bp, Artificial Sequence
  Oligonucleotide for detection of SNP TSC0023557
ggttgcgggcgty

SEQ ID NO: 94424 - DNA, 13 bp, Artificial Sequence
  Oligonucleotide for detection of SNP TSC0023557
racgcccgcaacc

SEQ ID NO: 94425 - DNA, 13 bp, Artificial Sequence
  Oligonucleotide for detection of SNP TSC0023557
ggtcgcgggcgty

SEQ ID NO: 94426 - DNA, 13 bp, Artificial Sequence
  Oligonucleotide for detection of SNP TSC0023557
racgcccgcgacc

SEQ ID NO: 94427 - DNA, 13 bp, Artificial Sequence
  Oligonucleotide for detection of SNP TSC0023557
ggtgtttgtgaty

SEQ ID NO: 94428 - DNA, 13 bp, Artificial Sequence
  Oligonucleotide for detection of SNP TSC0023557
ratcacaaacacc

SEQ ID NO: 94429 - DNA, 13 bp, Artificial Sequence
  Oligonucleotide for detection of SNP TSC0023557
ggcgtttgtgaty

SEQ ID NO: 94430 - DNA, 13 bp, Artificial Sequence
  Oligonucleotide for detection of SNP TSC0023557
ratcacaaacgcc

SEQ ID NO: 94431 - DNA, 13 bp, Artificial Sequence
  Oligonucleotide for detection of SNP TSC0023557
ggtgtttgcgaty

SEQ ID NO: 94432 - DNA, 13 bp, Artificial Sequence
  Oligonucleotide for detection of SNP TSC0023557
ratcgcaaacacc

SEQ ID NO: 94433 - DNA, 13 bp, Artificial Sequence
  Oligonucleotide for detection of SNP TSC0023557
ggtgttcgtgaty

SEQ ID NO: 94434 - DNA, 13 bp, Artificial Sequence
  Oligonucleotide for detection of SNP TSC0023557
ratcacgaacacc

SEQ ID NO: 94435 - DNA, 13 bp, Artificial Sequence
  Oligonucleotide for detection of SNP TSC0023557
ggcgtttgcgaty

SEQ ID NO: 94436 - DNA, 13 bp, Artificial Sequence
  Oligonucleotide for detection of SNP TSC0023557
ratcgcaaacgcc

SEQ ID NO: 94437 - DNA, 13 bp, Artificial Sequence
  Oligonucleotide for detection of SNP TSC0023557
ggcgttcgtgaty

SEQ ID NO: 94438 - DNA, 13 bp, Artificial Sequence
  Oligonucleotide for detection of SNP TSC0023557
ratcacgaacgcc

SEQ ID NO: 94439 - DNA, 13 bp, Artificial Sequence
  Oligonucleotide for detection of SNP TSC0023557
ggtgttcgcgaty

SEQ ID NO: 94440 - DNA, 13 bp, Artificial Sequence
  Oligonucleotide for detection of SNP TSC0023557
ratcgcgaacacc

SEQ ID NO: 94441 - DNA, 13 bp, Artificial Sequence
  Oligonucleotide for detection of SNP TSC0023557
ggcgttcgcgaty

SEQ ID NO: 94442 - DNA, 13 bp, Artificial Sequence
  Oligonucleotide for detection of SNP TSC0023557
ratcgcgaacgcc

SEQ ID NO: 94443 - DNA, 13 bp, Artificial Sequence
  Oligonucleotide for detection of SNP TSC0023558
gtgttgtgataty

SEQ ID NO: 94444 - DNA, 13 bp, Artificial Sequence
  Oligonucleotide for detection of SNP TSC0023558
ratatcacaacac

SEQ ID NO: 94445 - DNA, 13 bp, Artificial Sequence
  Oligonucleotide for detection of SNP TSC0023558
gcgttgtgataty

SEQ ID NO: 94446 - DNA, 13 bp, Artificial Sequence
  Oligonucleotide for detection of SNP TSC0023558
ratatcacaacgc

SEQ ID NO: 94447 - DNA, 13 bp, Artificial Sequence
  Oligonucleotide for detection of SNP TSC0023558
gtgttgcgataty

SEQ ID NO: 94448 - DNA, 13 bp, Artificial Sequence
  Oligonucleotide for detection of SNP TSC0023558
ratatcgcaacac

SEQ ID NO: 94449 - DNA, 13 bp, Artificial Sequence
  Oligonucleotide for detection of SNP TSC0023558
gcgttgcgataty

SEQ ID NO: 94450 - DNA, 13 bp, Artificial Sequence
  Oligonucleotide for detection of SNP TSC0023558
ratatcgcaacgc

SEQ ID NO: 94451 - DNA, 13 bp, Artificial Sequence
  Oligonucleotide for detection of SNP TSC0023558
ggtgttgtagtgy

SEQ ID NO: 94452 - DNA, 13 bp, Artificial Sequence
  Oligonucleotide for detection of SNP TSC0023558
rcactacaacacc

SEQ ID NO: 94453 - DNA, 13 bp, Artificial Sequence
  Oligonucleotide for detection of SNP TSC0023558
ggtgttatagtgy

SEQ ID NO: 94454 - DNA, 13 bp, Artificial Sequence
  Oligonucleotide for detection of SNP TSC0023558
rcactataacacc

SEQ ID NO: 94455 - DNA, 13 bp, Artificial Sequence
  Oligonucleotide for detection of SNP TSC0023558
ggtgtcgtagtgy

SEQ ID NO: 94456 - DNA, 13 bp, Artificial Sequence
  Oligonucleotide for detection of SNP TSC0023558
rcactacgacacc

SEQ ID NO: 94457 - DNA, 13 bp, Artificial Sequence
  Oligonucleotide for detection of SNP TSC0023558
ggtgttatagcgy

SEQ ID NO: 94458 - DNA, 13 bp, Artificial Sequence
  Oligonucleotide for detection of SNP TSC0023558
rcgctataacacc

SEQ ID NO: 94459 - DNA, 13 bp, Artificial Sequence
  Oligonucleotide for detection of SNP TSC0023558
ggtgttgtagcgy

SEQ ID NO: 94460 - DNA, 13 bp, Artificial Sequence
  Oligonucleotide for detection of SNP TSC0023558
rcgctacaacacc

SEQ ID NO: 94461 - DNA, 13 bp, Artificial Sequence
  Oligonucleotide for detection of SNP TSC0023558
ggtgtcgtagcgy

SEQ ID NO: 94462 - DNA, 13 bp, Artificial Sequence
  Oligonucleotide for detection of SNP TSC0023558
rcgctacgacacc

SEQ ID NO: 94463 - DNA, 13 bp, Artificial Sequence
  Oligonucleotide for detection of SNP TSC0023559
gagtagagttgaa

SEQ ID NO: 94464 - DNA, 13 bp, Artificial Sequence
  Oligonucleotide for detection of SNP TSC0023559
ttcaactctactc

SEQ ID NO: 94465 - DNA, 13 bp, Artificial Sequence
  Oligonucleotide for detection of SNP TSC0023559
gagtagggttgaa

SEQ ID NO: 94466 - DNA, 13 bp, Artificial Sequence
  Oligonucleotide for detection of SNP TSC0023559
ttcaaccctactc

SEQ ID NO: 94467 - DNA, 13 bp, Artificial Sequence
  Oligonucleotide for detection of SNP TSC0023560
ttttttaagtttt

SEQ ID NO: 94468 - DNA, 13 bp, Artificial Sequence
  Oligonucleotide for detection of SNP TSC0023560
aaaacttaaaaaa

SEQ ID NO: 94469 - DNA, 13 bp, Artificial Sequence
  Oligonucleotide for detection of SNP TSC0023560
aaggtttaagaaa

SEQ ID NO: 94470 - DNA, 13 bp, Artificial Sequence
  Oligonucleotide for detection of SNP TSC0023560
tttcttaaacctt

SEQ ID NO: 94471 - DNA, 13 bp, Artificial Sequence
  Oligonucleotide for detection of SNP TSC0023560
aaggttgaagaaa

SEQ ID NO: 94472 - DNA, 13 bp, Artificial Sequence
  Oligonucleotide for detection of SNP TSC0023560
tttcttcaacctt

SEQ ID NO: 94473 - DNA, 13 bp, Artificial Sequence
  Oligonucleotide for detection of SNP TSC0023561
tattatttataaa

SEQ ID NO: 94474 - DNA, 13 bp, Artificial Sequence
  Oligonucleotide for detection of SNP TSC0023561
tttataaataata

SEQ ID NO: 94475 - DNA, 13 bp, Artificial Sequence
  Oligonucleotide for detection of SNP TSC0023561
tattatgtataaa

SEQ ID NO: 94476 - DNA, 13 bp, Artificial Sequence
  Oligonucleotide for detection of SNP TSC0023561
tttatacataata

SEQ ID NO: 94477 - DNA, 13 bp, Artificial Sequence
  Oligonucleotide for detection of SNP TSC0023561
tttatagatagta

SEQ ID NO: 94478 - DNA, 13 bp, Artificial Sequence
  Oligonucleotide for detection of SNP TSC0023561
tactatctataaa

SEQ ID NO: 94479 - DNA, 13 bp, Artificial Sequence
  Oligonucleotide for detection of SNP TSC0023561
tttatatatagta

SEQ ID NO: 94480 - DNA, 13 bp, Artificial Sequence
  Oligonucleotide for detection of SNP TSC0023561
tactatatataaa

SEQ ID NO: 94481 - DNA, 13 bp, Artificial Sequence
  Oligonucleotide for detection of SNP TSC0023562
gtttgaatgtttg

SEQ ID NO: 94482 - DNA, 13 bp, Artificial Sequence
  Oligonucleotide for detection of SNP TSC0023562
caaacattcaaac

SEQ ID NO: 94483 - DNA, 13 bp, Artificial Sequence
  Oligonucleotide for detection of SNP TSC0023562
gtttgagtgtttg

SEQ ID NO: 94484 - DNA, 13 bp, Artificial Sequence
  Oligonucleotide for detection of SNP TSC0023562
caaacactcaaac

SEQ ID NO: 94485 - DNA, 13 bp, Artificial Sequence
  Oligonucleotide for detection of SNP TSC0023562
gtttgaacgtttg

SEQ ID NO: 94486 - DNA, 13 bp, Artificial Sequence
  Oligonucleotide for detection of SNP TSC0023562
caaacgttcaaac

SEQ ID NO: 94487 - DNA, 13 bp, Artificial Sequence
  Oligonucleotide for detection of SNP TSC0023562
gtttgagcgtttg

SEQ ID NO: 94488 - DNA, 13 bp, Artificial Sequence
  Oligonucleotide for detection of SNP TSC0023562
caaacgctcaaac

SEQ ID NO: 94489 - DNA, 13 bp, Artificial Sequence
  Oligonucleotide for detection of SNP TSC0023563
gtatgggatatga

SEQ ID NO: 94490 - DNA, 13 bp, Artificial Sequence
  Oligonucleotide for detection of SNP TSC0023563
tcatatcccatac

SEQ ID NO: 94491 - DNA, 13 bp, Artificial Sequence
  Oligonucleotide for detection of SNP TSC0023563
gtatggtatatga

SEQ ID NO: 94492 - DNA, 13 bp, Artificial Sequence
  Oligonucleotide for detection of SNP TSC0023563
tcatataccatac

SEQ ID NO: 94493 - DNA, 13 bp, Artificial Sequence
  Oligonucleotide for detection of SNP TSC0023563
ttatgttttatgy

SEQ ID NO: 94494 - DNA, 13 bp, Artificial Sequence
  Oligonucleotide for detection of SNP TSC0023563
rcataaaacataa

SEQ ID NO: 94495 - DNA, 13 bp, Artificial Sequence
  Oligonucleotide for detection of SNP TSC0023563
ttatgtattatgy

SEQ ID NO: 94496 - DNA, 13 bp, Artificial Sequence
  Oligonucleotide for detection of SNP TSC0023563
rcataatacataa

SEQ ID NO: 94497 - DNA, 13 bp, Artificial Sequence
  Oligonucleotide for detection of SNP TSC0023564
tatgggatatgat

SEQ ID NO: 94498 - DNA, 13 bp, Artificial Sequence
  Oligonucleotide for detection of SNP TSC0023564
atcatatcccata

SEQ ID NO: 94499 - DNA, 13 bp, Artificial Sequence
  Oligonucleotide for detection of SNP TSC0023564
tatgggttatgat

SEQ ID NO: 94500 - DNA, 13 bp, Artificial Sequence
  Oligonucleotide for detection of SNP TSC0023564
atcataacccata

SEQ ID NO: 94501 - DNA, 13 bp, Artificial Sequence
  Oligonucleotide for detection of SNP TSC0023564
attatgttttatg

SEQ ID NO: 94502 - DNA, 13 bp, Artificial Sequence
  Oligonucleotide for detection of SNP TSC0023564
cataaaacataat

SEQ ID NO: 94503 - DNA, 13 bp, Artificial Sequence
  Oligonucleotide for detection of SNP TSC0023564
attatggtttatg

SEQ ID NO: 94504 - DNA, 13 bp, Artificial Sequence
  Oligonucleotide for detection of SNP TSC0023564
cataaaccataat

SEQ ID NO: 94505 - DNA, 13 bp, Artificial Sequence
  Oligonucleotide for detection of SNP TSC0023565
atagatgtgagty

SEQ ID NO: 94506 - DNA, 13 bp, Artificial Sequence
  Oligonucleotide for detection of SNP TSC0023565
ractcacatctat

SEQ ID NO: 94507 - DNA, 13 bp, Artificial Sequence
  Oligonucleotide for detection of SNP TSC0023565
atagatatgagty

SEQ ID NO: 94508 - DNA, 13 bp, Artificial Sequence
  Oligonucleotide for detection of SNP TSC0023565
ractcatatctat

SEQ ID NO: 94509 - DNA, 13 bp, Artificial Sequence
  Oligonucleotide for detection of SNP TSC0023565
atagacgtgagty

SEQ ID NO: 94510 - DNA, 13 bp, Artificial Sequence
  Oligonucleotide for detection of SNP TSC0023565
ractcacgtctat

SEQ ID NO: 94511 - DNA, 13 bp, Artificial Sequence
  Oligonucleotide for detection of SNP TSC0023566
tgtataatttgta

SEQ ID NO: 94512 - DNA, 13 bp, Artificial Sequence
  Oligonucleotide for detection of SNP TSC0023566
tacaaattataca

SEQ ID NO: 94513 - DNA, 13 bp, Artificial Sequence
  Oligonucleotide for detection of SNP TSC0023566
tgtatattttgta

SEQ ID NO: 94514 - DNA, 13 bp, Artificial Sequence
  Oligonucleotide for detection of SNP TSC0023566
tacaaaatataca

SEQ ID NO: 94515 - DNA, 13 bp, Artificial Sequence
  Oligonucleotide for detection of SNP TSC0023566
tgtaagatatgta

SEQ ID NO: 94516 - DNA, 13 bp, Artificial Sequence
  Oligonucleotide for detection of SNP TSC0023566
tacatatcttaca

SEQ ID NO: 94517 - DNA, 13 bp, Artificial Sequence
  Oligonucleotide for detection of SNP TSC0023567
atttgtatagaat

SEQ ID NO: 94518 - DNA, 13 bp, Artificial Sequence
  Oligonucleotide for detection of SNP TSC0023567
attctatacaaat

SEQ ID NO: 94519 - DNA, 13 bp, Artificial Sequence
  Oligonucleotide for detection of SNP TSC0023567
atttgtgtagaat

SEQ ID NO: 94520 - DNA, 13 bp, Artificial Sequence
  Oligonucleotide for detection of SNP TSC0023567
attctacacaaat

SEQ ID NO: 94521 - DNA, 13 bp, Artificial Sequence
  Oligonucleotide for detection of SNP TSC0023567
atttgcgtagaat

SEQ ID NO: 94522 - DNA, 13 bp, Artificial Sequence
  Oligonucleotide for detection of SNP TSC0023567
attctacgcaaat

SEQ ID NO: 94523 - DNA, 13 bp, Artificial Sequence
  Oligonucleotide for detection of SNP TSC0023567
attttgtgtaagt

SEQ ID NO: 94524 - DNA, 13 bp, Artificial Sequence
  Oligonucleotide for detection of SNP TSC0023567
acttacacaaaat

SEQ ID NO: 94525 - DNA, 13 bp, Artificial Sequence
  Oligonucleotide for detection of SNP TSC0023567
attttgcgtaagt

SEQ ID NO: 94526 - DNA, 13 bp, Artificial Sequence
  Oligonucleotide for detection of SNP TSC0023567
acttacgcaaaat

SEQ ID NO: 94527 - DNA, 13 bp, Artificial Sequence
  Oligonucleotide for detection of SNP TSC0023568
gtttggataaatt

SEQ ID NO: 94528 - DNA, 13 bp, Artificial Sequence
  Oligonucleotide for detection of SNP TSC0023568
aatttatccaaac

SEQ ID NO: 94529 - DNA, 13 bp, Artificial Sequence
  Oligonucleotide for detection of SNP TSC0023568
gtttgggtaaatt

SEQ ID NO: 94530 - DNA, 13 bp, Artificial Sequence
  Oligonucleotide for detection of SNP TSC0023568
aatttacccaaac

SEQ ID NO: 94531 - DNA, 13 bp, Artificial Sequence
  Oligonucleotide for detection of SNP TSC0023570
aagtttgagaagg

SEQ ID NO: 94532 - DNA, 13 bp, Artificial Sequence
  Oligonucleotide for detection of SNP TSC0023570
ccttctcaaactt

SEQ ID NO: 94533 - DNA, 13 bp, Artificial Sequence
  Oligonucleotide for detection of SNP TSC0023570
aagtttaagaagg

SEQ ID NO: 94534 - DNA, 13 bp, Artificial Sequence
  Oligonucleotide for detection of SNP TSC0023570
ccttcttaaactt

SEQ ID NO: 94535 - DNA, 13 bp, Artificial Sequence
  Oligonucleotide for detection of SNP TSC0023571
ttatgtatagaty

SEQ ID NO: 94536 - DNA, 13 bp, Artificial Sequence
  Oligonucleotide for detection of SNP TSC0023571
ratctatacataa

SEQ ID NO: 94537 - DNA, 13 bp, Artificial Sequence
  Oligonucleotide for detection of SNP TSC0023571
ttatgtgtagaty

SEQ ID NO: 94538 - DNA, 13 bp, Artificial Sequence
  Oligonucleotide for detection of SNP TSC0023571
ratctacacataa

SEQ ID NO: 94539 - DNA, 13 bp, Artificial Sequence
  Oligonucleotide for detection of SNP TSC0023572
tttaggatattaa

SEQ ID NO: 94540 - DNA, 13 bp, Artificial Sequence
  Oligonucleotide for detection of SNP TSC0023572
ttaatatcctaaa

SEQ ID NO: 94541 - DNA, 13 bp, Artificial Sequence
  Oligonucleotide for detection of SNP TSC0023573
agatttaaatgta

SEQ ID NO: 94542 - DNA, 13 bp, Artificial Sequence
  Oligonucleotide for detection of SNP TSC0023573
tacatttaaatct

SEQ ID NO: 94543 - DNA, 13 bp, Artificial Sequence
  Oligonucleotide for detection of SNP TSC0023573
agattttaatgta

SEQ ID NO: 94544 - DNA, 13 bp, Artificial Sequence
  Oligonucleotide for detection of SNP TSC0023573
tacattaaaatct

SEQ ID NO: 94545 - DNA, 13 bp, Artificial Sequence
  Oligonucleotide for detection of SNP TSC0023573
tatatttaaattt

SEQ ID NO: 94546 - DNA, 13 bp, Artificial Sequence
  Oligonucleotide for detection of SNP TSC0023573
aaatttaaatata

SEQ ID NO: 94547 - DNA, 13 bp, Artificial Sequence
  Oligonucleotide for detection of SNP TSC0023573
tatattaaaattt

SEQ ID NO: 94548 - DNA, 13 bp, Artificial Sequence
  Oligonucleotide for detection of SNP TSC0023573
aaattttaatata

SEQ ID NO: 94549 - DNA, 13 bp, Artificial Sequence
  Oligonucleotide for detection of SNP TSC0023574
tgataaatgggay

SEQ ID NO: 94550 - DNA, 13 bp, Artificial Sequence
  Oligonucleotide for detection of SNP TSC0023574
rtcccatttatca

SEQ ID NO: 94551 - DNA, 13 bp, Artificial Sequence
  Oligonucleotide for detection of SNP TSC0023574
tgataagtgggay

SEQ ID NO: 94552 - DNA, 13 bp, Artificial Sequence
  Oligonucleotide for detection of SNP TSC0023574
rtcccacttatca

SEQ ID NO: 94553 - DNA, 13 bp, Artificial Sequence
  Oligonucleotide for detection of SNP TSC0023575
gtgtgggggggag

SEQ ID NO: 94554 - DNA, 13 bp, Artificial Sequence
  Oligonucleotide for detection of SNP TSC0023575
ctcccccccacac

SEQ ID NO: 94555 - DNA, 13 bp, Artificial Sequence
  Oligonucleotide for detection of SNP TSC0023575
gtgtggtggggag

SEQ ID NO: 94556 - DNA, 13 bp, Artificial Sequence
  Oligonucleotide for detection of SNP TSC0023575
ctccccaccacac

SEQ ID NO: 94557 - DNA, 13 bp, Artificial Sequence
  Oligonucleotide for detection of SNP TSC0023575
gcgtgggggggag

SEQ ID NO: 94558 - DNA, 13 bp, Artificial Sequence
  Oligonucleotide for detection of SNP TSC0023575
ctcccccccacgc

SEQ ID NO: 94559 - DNA, 13 bp, Artificial Sequence
  Oligonucleotide for detection of SNP TSC0023575
gcgtggtggggag

SEQ ID NO: 94560 - DNA, 13 bp, Artificial Sequence
  Oligonucleotide for detection of SNP TSC0023575
ctccccaccacgc

SEQ ID NO: 94561 - DNA, 13 bp, Artificial Sequence
  Oligonucleotide for detection of SNP TSC0023575
gtgcgggggggag

SEQ ID NO: 94562 - DNA, 13 bp, Artificial Sequence
  Oligonucleotide for detection of SNP TSC0023575
ctcccccccgcac

SEQ ID NO: 94563 - DNA, 13 bp, Artificial Sequence
  Oligonucleotide for detection of SNP TSC0023575
gtgcggtggggag

SEQ ID NO: 94564 - DNA, 13 bp, Artificial Sequence
  Oligonucleotide for detection of SNP TSC0023575
ctccccaccgcac

SEQ ID NO: 94565 - DNA, 13 bp, Artificial Sequence
  Oligonucleotide for detection of SNP TSC0023575
gcgcgggggggag

SEQ ID NO: 94566 - DNA, 13 bp, Artificial Sequence
  Oligonucleotide for detection of SNP TSC0023575
ctcccccccgcgc

SEQ ID NO: 94567 - DNA, 13 bp, Artificial Sequence
  Oligonucleotide for detection of SNP TSC0023575
gcgcggtggggag

SEQ ID NO: 94568 - DNA, 13 bp, Artificial Sequence
  Oligonucleotide for detection of SNP TSC0023575
ctccccaccgcgc

SEQ ID NO: 94569 - DNA, 13 bp, Artificial Sequence
  Oligonucleotide for detection of SNP TSC0023575
ttttttttcgtgy

SEQ ID NO: 94570 - DNA, 13 bp, Artificial Sequence
  Oligonucleotide for detection of SNP TSC0023575
rcacgaaaaaaaa

SEQ ID NO: 94571 - DNA, 13 bp, Artificial Sequence
  Oligonucleotide for detection of SNP TSC0023575
ttttttatcgtgy

SEQ ID NO: 94572 - DNA, 13 bp, Artificial Sequence
  Oligonucleotide for detection of SNP TSC0023575
rcacgataaaaaa

SEQ ID NO: 94573 - DNA, 13 bp, Artificial Sequence
  Oligonucleotide for detection of SNP TSC0023575
tttttttttgcgy

SEQ ID NO: 94574 - DNA, 13 bp, Artificial Sequence
  Oligonucleotide for detection of SNP TSC0023575
rcgcaaaaaaaaa

SEQ ID NO: 94575 - DNA, 13 bp, Artificial Sequence
  Oligonucleotide for detection of SNP TSC0023575
ttttttattgcgy

SEQ ID NO: 94576 - DNA, 13 bp, Artificial Sequence
  Oligonucleotide for detection of SNP TSC0023575
rcgcaataaaaaa

SEQ ID NO: 94577 - DNA, 13 bp, Artificial Sequence
  Oligonucleotide for detection of SNP TSC0023575
ttttttttcgcgy

SEQ ID NO: 94578 - DNA, 13 bp, Artificial Sequence
  Oligonucleotide for detection of SNP TSC0023575
rcgcgaaaaaaaa

SEQ ID NO: 94579 - DNA, 13 bp, Artificial Sequence
  Oligonucleotide for detection of SNP TSC0023575
ttttttatcgcgy

SEQ ID NO: 94580 - DNA, 13 bp, Artificial Sequence
  Oligonucleotide for detection of SNP TSC0023575
rcgcgataaaaaa

SEQ ID NO: 94581 - DNA, 13 bp, Artificial Sequence
  Oligonucleotide for detection of SNP TSC0023576
ggatatgtttttg

SEQ ID NO: 94582 - DNA, 13 bp, Artificial Sequence
  Oligonucleotide for detection of SNP TSC0023576
caaaaacatatcc

SEQ ID NO: 94583 - DNA, 13 bp, Artificial Sequence
  Oligonucleotide for detection of SNP TSC0023576
ggatatatttttg

SEQ ID NO: 94584 - DNA, 13 bp, Artificial Sequence
  Oligonucleotide for detection of SNP TSC0023576
caaaaatatatcc

SEQ ID NO: 94585 - DNA, 13 bp, Artificial Sequence
  Oligonucleotide for detection of SNP TSC0023577
tttggaatgttag

SEQ ID NO: 94586 - DNA, 13 bp, Artificial Sequence
  Oligonucleotide for detection of SNP TSC0023577
ctaacattccaaa

SEQ ID NO: 94587 - DNA, 13 bp, Artificial Sequence
  Oligonucleotide for detection of SNP TSC0023577
tttggagtgttag

SEQ ID NO: 94588 - DNA, 13 bp, Artificial Sequence
  Oligonucleotide for detection of SNP TSC0023577
ctaacactccaaa

SEQ ID NO: 94589 - DNA, 13 bp, Artificial Sequence
  Oligonucleotide for detection of SNP TSC0023581
ggtttaaaattat

SEQ ID NO: 94590 - DNA, 13 bp, Artificial Sequence
  Oligonucleotide for detection of SNP TSC0023581
ataattttaaacc

SEQ ID NO: 94591 - DNA, 13 bp, Artificial Sequence
  Oligonucleotide for detection of SNP TSC0023581
ggtttagaattat

SEQ ID NO: 94592 - DNA, 13 bp, Artificial Sequence
  Oligonucleotide for detection of SNP TSC0023581
ataattctaaacc

SEQ ID NO: 94593 - DNA, 13 bp, Artificial Sequence
  Oligonucleotide for detection of SNP TSC0023582
aagtaatttgggt

SEQ ID NO: 94594 - DNA, 13 bp, Artificial Sequence
  Oligonucleotide for detection of SNP TSC0023582
acccaaattactt

SEQ ID NO: 94595 - DNA, 13 bp, Artificial Sequence
  Oligonucleotide for detection of SNP TSC0023582
aagtaagttgggt

SEQ ID NO: 94596 - DNA, 13 bp, Artificial Sequence
  Oligonucleotide for detection of SNP TSC0023582
acccaacttactt

SEQ ID NO: 94597 - DNA, 13 bp, Artificial Sequence
  Oligonucleotide for detection of SNP TSC0023583
ggattttaggttg

SEQ ID NO: 94598 - DNA, 13 bp, Artificial Sequence
  Oligonucleotide for detection of SNP TSC0023583
caacctaaaatcc

SEQ ID NO: 94599 - DNA, 13 bp, Artificial Sequence
  Oligonucleotide for detection of SNP TSC0023583
ggatttgaggttg

SEQ ID NO: 94600 - DNA, 13 bp, Artificial Sequence
  Oligonucleotide for detection of SNP TSC0023583
caacctcaaatcc

SEQ ID NO: 94601 - DNA, 13 bp, Artificial Sequence
  Oligonucleotide for detection of SNP TSC0023583
ggattcgaggttg

SEQ ID NO: 94602 - DNA, 13 bp, Artificial Sequence
  Oligonucleotide for detection of SNP TSC0023583
caacctcgaatcc

SEQ ID NO: 94603 - DNA, 13 bp, Artificial Sequence
  Oligonucleotide for detection of SNP TSC0023583
tagtttggggtty

SEQ ID NO: 94604 - DNA, 13 bp, Artificial Sequence
  Oligonucleotide for detection of SNP TSC0023583
raaccccaaacta

SEQ ID NO: 94605 - DNA, 13 bp, Artificial Sequence
  Oligonucleotide for detection of SNP TSC0023583
tagttttgggtty

SEQ ID NO: 94606 - DNA, 13 bp, Artificial Sequence
  Oligonucleotide for detection of SNP TSC0023583
raacccaaaacta

SEQ ID NO: 94607 - DNA, 13 bp, Artificial Sequence
  Oligonucleotide for detection of SNP TSC0023583
tagtttcgggtty

SEQ ID NO: 94608 - DNA, 13 bp, Artificial Sequence
  Oligonucleotide for detection of SNP TSC0023583
raacccgaaacta

SEQ ID NO: 94609 - DNA, 13 bp, Artificial Sequence
  Oligonucleotide for detection of SNP TSC0023585
gttttaatttagt

SEQ ID NO: 94610 - DNA, 13 bp, Artificial Sequence
  Oligonucleotide for detection of SNP TSC0023585
actaaattaaaac

SEQ ID NO: 94611 - DNA, 13 bp, Artificial Sequence
  Oligonucleotide for detection of SNP TSC0023585
gttttagtttagt

SEQ ID NO: 94612 - DNA, 13 bp, Artificial Sequence
  Oligonucleotide for detection of SNP TSC0023585
actaaactaaaac

SEQ ID NO: 94613 - DNA, 13 bp, Artificial Sequence
  Oligonucleotide for detection of SNP TSC0023586
ggaaaattaaatg

SEQ ID NO: 94614 - DNA, 13 bp, Artificial Sequence
  Oligonucleotide for detection of SNP TSC0023586
catttaattttcc

SEQ ID NO: 94615 - DNA, 13 bp, Artificial Sequence
  Oligonucleotide for detection of SNP TSC0023586
ggaaaagtaaatg

SEQ ID NO: 94616 - DNA, 13 bp, Artificial Sequence
  Oligonucleotide for detection of SNP TSC0023586
catttacttttcc

SEQ ID NO: 94617 - DNA, 13 bp, Artificial Sequence
  Oligonucleotide for detection of SNP TSC0023586
tatttggttttty

SEQ ID NO: 94618 - DNA, 13 bp, Artificial Sequence
  Oligonucleotide for detection of SNP TSC0023586
raaaaaccaaata

SEQ ID NO: 94619 - DNA, 13 bp, Artificial Sequence
  Oligonucleotide for detection of SNP TSC0023586
tatttgtttttty

SEQ ID NO: 94620 - DNA, 13 bp, Artificial Sequence
  Oligonucleotide for detection of SNP TSC0023586
raaaaaacaaata

SEQ ID NO: 94621 - DNA, 13 bp, Artificial Sequence
  Oligonucleotide for detection of SNP TSC0023587
ggggttatttaat

SEQ ID NO: 94622 - DNA, 13 bp, Artificial Sequence
  Oligonucleotide for detection of SNP TSC0023587
attaaataacccc

SEQ ID NO: 94623 - DNA, 13 bp, Artificial Sequence
  Oligonucleotide for detection of SNP TSC0023587
ggggttgtttaat

SEQ ID NO: 94624 - DNA, 13 bp, Artificial Sequence
  Oligonucleotide for detection of SNP TSC0023587
attaaacaacccc

SEQ ID NO: 94625 - DNA, 13 bp, Artificial Sequence
  Oligonucleotide for detection of SNP TSC0023587
ggggtcgtttaat

SEQ ID NO: 94626 - DNA, 13 bp, Artificial Sequence
  Oligonucleotide for detection of SNP TSC0023587
attaaacgacccc

SEQ ID NO: 94627 - DNA, 13 bp, Artificial Sequence
  Oligonucleotide for detection of SNP TSC0023587
attaaatgattty

SEQ ID NO: 94628 - DNA, 13 bp, Artificial Sequence
  Oligonucleotide for detection of SNP TSC0023587
raaatcatttaat

SEQ ID NO: 94629 - DNA, 13 bp, Artificial Sequence
  Oligonucleotide for detection of SNP TSC0023587
attaaacgattty

SEQ ID NO: 94630 - DNA, 13 bp, Artificial Sequence
  Oligonucleotide for detection of SNP TSC0023587
raaatcgtttaat

SEQ ID NO: 94631 - DNA, 13 bp, Artificial Sequence
  Oligonucleotide for detection of SNP TSC0023588
ttttttaggattt

SEQ ID NO: 94632 - DNA, 13 bp, Artificial Sequence
  Oligonucleotide for detection of SNP TSC0023588
aaatcctaaaaaa

SEQ ID NO: 94633 - DNA, 13 bp, Artificial Sequence
  Oligonucleotide for detection of SNP TSC0023588
ttttttgggattt

SEQ ID NO: 94634 - DNA, 13 bp, Artificial Sequence
  Oligonucleotide for detection of SNP TSC0023588
aaatcccaaaaaa

SEQ ID NO: 94635 - DNA, 13 bp, Artificial Sequence
  Oligonucleotide for detection of SNP TSC0023588
tttttcgggattt

SEQ ID NO: 94636 - DNA, 13 bp, Artificial Sequence
  Oligonucleotide for detection of SNP TSC0023588
aaatcccgaaaaa

SEQ ID NO: 94637 - DNA, 13 bp, Artificial Sequence
  Oligonucleotide for detection of SNP TSC0023588
agattttgaggga

SEQ ID NO: 94638 - DNA, 13 bp, Artificial Sequence
  Oligonucleotide for detection of SNP TSC0023588
tccctcaaaatct

SEQ ID NO: 94639 - DNA, 13 bp, Artificial Sequence
  Oligonucleotide for detection of SNP TSC0023588
agatttcgaggga

SEQ ID NO: 94640 - DNA, 13 bp, Artificial Sequence
  Oligonucleotide for detection of SNP TSC0023588
tccctcgaaatct

SEQ ID NO: 94641 - DNA, 13 bp, Artificial Sequence
  Oligonucleotide for detection of SNP TSC0023589
taggaaaaagagy

SEQ ID NO: 94642 - DNA, 13 bp, Artificial Sequence
  Oligonucleotide for detection of SNP TSC0023589
rctctttttccta

SEQ ID NO: 94643 - DNA, 13 bp, Artificial Sequence
  Oligonucleotide for detection of SNP TSC0023589
taggaagaagagy

SEQ ID NO: 94644 - DNA, 13 bp, Artificial Sequence
  Oligonucleotide for detection of SNP TSC0023589
rctcttcttccta

SEQ ID NO: 94645 - DNA, 13 bp, Artificial Sequence
  Oligonucleotide for detection of SNP TSC0023590
ttggggtatatgy

SEQ ID NO: 94646 - DNA, 13 bp, Artificial Sequence
  Oligonucleotide for detection of SNP TSC0023590
rcatataccccaa

SEQ ID NO: 94647 - DNA, 13 bp, Artificial Sequence
  Oligonucleotide for detection of SNP TSC0023590
ttgggggatatgy

SEQ ID NO: 94648 - DNA, 13 bp, Artificial Sequence
  Oligonucleotide for detection of SNP TSC0023590
rcatatcccccaa

SEQ ID NO: 94649 - DNA, 13 bp, Artificial Sequence
  Oligonucleotide for detection of SNP TSC0023590
gtatatgttttag

SEQ ID NO: 94650 - DNA, 13 bp, Artificial Sequence
  Oligonucleotide for detection of SNP TSC0023590
ctaaaacatatac

SEQ ID NO: 94651 - DNA, 13 bp, Artificial Sequence
  Oligonucleotide for detection of SNP TSC0023590
gtatattttttag

SEQ ID NO: 94652 - DNA, 13 bp, Artificial Sequence
  Oligonucleotide for detection of SNP TSC0023590
ctaaaaaatatac

SEQ ID NO: 94653 - DNA, 13 bp, Artificial Sequence
  Oligonucleotide for detection of SNP TSC0023591
atttttgaaaaty

SEQ ID NO: 94654 - DNA, 13 bp, Artificial Sequence
  Oligonucleotide for detection of SNP TSC0023591
rattttcaaaaat

SEQ ID NO: 94655 - DNA, 13 bp, Artificial Sequence
  Oligonucleotide for detection of SNP TSC0023591
atttttaaaaaty

SEQ ID NO: 94656 - DNA, 13 bp, Artificial Sequence
  Oligonucleotide for detection of SNP TSC0023591
ratttttaaaaat

SEQ ID NO: 94657 - DNA, 13 bp, Artificial Sequence
  Oligonucleotide for detection of SNP TSC0023592
aaaagtattttga

SEQ ID NO: 94658 - DNA, 13 bp, Artificial Sequence
  Oligonucleotide for detection of SNP TSC0023592
tcaaaatactttt

SEQ ID NO: 94659 - DNA, 13 bp, Artificial Sequence
  Oligonucleotide for detection of SNP TSC0023592
aaaagttttttga

SEQ ID NO: 94660 - DNA, 13 bp, Artificial Sequence
  Oligonucleotide for detection of SNP TSC0023592
tcaaaaaactttt

SEQ ID NO: 94661 - DNA, 13 bp, Artificial Sequence
  Oligonucleotide for detection of SNP TSC0023592
aaaagtatttcga

SEQ ID NO: 94662 - DNA, 13 bp, Artificial Sequence
  Oligonucleotide for detection of SNP TSC0023592
tcgaaatactttt

SEQ ID NO: 94663 - DNA, 13 bp, Artificial Sequence
  Oligonucleotide for detection of SNP TSC0023592
aaaagtttttcga

SEQ ID NO: 94664 - DNA, 13 bp, Artificial Sequence
  Oligonucleotide for detection of SNP TSC0023592
tcgaaaaactttt

SEQ ID NO: 94665 - DNA, 13 bp, Artificial Sequence
  Oligonucleotide for detection of SNP TSC0023592
ttgaagggttttt

SEQ ID NO: 94666 - DNA, 13 bp, Artificial Sequence
  Oligonucleotide for detection of SNP TSC0023592
aaaaacccttcaa

SEQ ID NO: 94667 - DNA, 13 bp, Artificial Sequence
  Oligonucleotide for detection of SNP TSC0023592
tcgaagtgttttt

SEQ ID NO: 94668 - DNA, 13 bp, Artificial Sequence
  Oligonucleotide for detection of SNP TSC0023592
aaaaacacttcga

SEQ ID NO: 94669 - DNA, 13 bp, Artificial Sequence
  Oligonucleotide for detection of SNP TSC0023592
tcgaagggttttt

SEQ ID NO: 94670 - DNA, 13 bp, Artificial Sequence
  Oligonucleotide for detection of SNP TSC0023592
aaaaacccttcga

SEQ ID NO: 94671 - DNA, 13 bp, Artificial Sequence
  Oligonucleotide for detection of SNP TSC0023593
gtattaatttttt

SEQ ID NO: 94672 - DNA, 13 bp, Artificial Sequence
  Oligonucleotide for detection of SNP TSC0023593
aaaaaattaatac

SEQ ID NO: 94673 - DNA, 13 bp, Artificial Sequence
  Oligonucleotide for detection of SNP TSC0023593
gtattattttttt

SEQ ID NO: 94674 - DNA, 13 bp, Artificial Sequence
  Oligonucleotide for detection of SNP TSC0023593
aaaaaaataatac

SEQ ID NO: 94675 - DNA, 13 bp, Artificial Sequence
  Oligonucleotide for detection of SNP TSC0023593
aaaaagttaatay

SEQ ID NO: 94676 - DNA, 13 bp, Artificial Sequence
  Oligonucleotide for detection of SNP TSC0023593
rtattaacttttt

SEQ ID NO: 94677 - DNA, 13 bp, Artificial Sequence
  Oligonucleotide for detection of SNP TSC0023593
aaaaaggtaatay

SEQ ID NO: 94678 - DNA, 13 bp, Artificial Sequence
  Oligonucleotide for detection of SNP TSC0023593
rtattaccttttt

SEQ ID NO: 94679 - DNA, 13 bp, Artificial Sequence
  Oligonucleotide for detection of SNP TSC0023594
atgtttatttaga

SEQ ID NO: 94680 - DNA, 13 bp, Artificial Sequence
  Oligonucleotide for detection of SNP TSC0023594
tctaaataaacat

SEQ ID NO: 94681 - DNA, 13 bp, Artificial Sequence
  Oligonucleotide for detection of SNP TSC0023594
atgtttgtttaga

SEQ ID NO: 94682 - DNA, 13 bp, Artificial Sequence
  Oligonucleotide for detection of SNP TSC0023594
tctaaacaaacat

SEQ ID NO: 94683 - DNA, 13 bp, Artificial Sequence
  Oligonucleotide for detection of SNP TSC0023595
tgtgtttttttay

SEQ ID NO: 94684 - DNA, 13 bp, Artificial Sequence
  Oligonucleotide for detection of SNP TSC0023595
rtaaaaaaacaca

SEQ ID NO: 94685 - DNA, 13 bp, Artificial Sequence
  Oligonucleotide for detection of SNP TSC0023595
gtggagtaatata

SEQ ID NO: 94686 - DNA, 13 bp, Artificial Sequence
  Oligonucleotide for detection of SNP TSC0023595
tatattactccac

SEQ ID NO: 94687 - DNA, 13 bp, Artificial Sequence
  Oligonucleotide for detection of SNP TSC0023595
gtggagaaatata

SEQ ID NO: 94688 - DNA, 13 bp, Artificial Sequence
  Oligonucleotide for detection of SNP TSC0023595
tatatttctccac

SEQ ID NO: 94689 - DNA, 13 bp, Artificial Sequence
  Oligonucleotide for detection of SNP TSC0023600
gataatagataay

SEQ ID NO: 94690 - DNA, 13 bp, Artificial Sequence
  Oligonucleotide for detection of SNP TSC0023600
rttatctattatc

SEQ ID NO: 94691 - DNA, 13 bp, Artificial Sequence
  Oligonucleotide for detection of SNP TSC0023600
gataattgataay

SEQ ID NO: 94692 - DNA, 13 bp, Artificial Sequence
  Oligonucleotide for detection of SNP TSC0023600
rttatcaattatc

SEQ ID NO: 94693 - DNA, 13 bp, Artificial Sequence
  Oligonucleotide for detection of SNP TSC0023600
gttgtttgttgty

SEQ ID NO: 94694 - DNA, 13 bp, Artificial Sequence
  Oligonucleotide for detection of SNP TSC0023600
racaacaaacaac

SEQ ID NO: 94695 - DNA, 13 bp, Artificial Sequence
  Oligonucleotide for detection of SNP TSC0023600
gttgttagttgty

SEQ ID NO: 94696 - DNA, 13 bp, Artificial Sequence
  Oligonucleotide for detection of SNP TSC0023600
racaactaacaac

SEQ ID NO: 94697 - DNA, 13 bp, Artificial Sequence
  Oligonucleotide for detection of SNP TSC0023601
attttatggtgat

SEQ ID NO: 94698 - DNA, 13 bp, Artificial Sequence
  Oligonucleotide for detection of SNP TSC0023601
atcaccataaaat

SEQ ID NO: 94699 - DNA, 13 bp, Artificial Sequence
  Oligonucleotide for detection of SNP TSC0023601
attttacggtgat

SEQ ID NO: 94700 - DNA, 13 bp, Artificial Sequence
  Oligonucleotide for detection of SNP TSC0023601
atcaccgtaaaat

SEQ ID NO: 94701 - DNA, 13 bp, Artificial Sequence
  Oligonucleotide for detection of SNP TSC0023601
attattgtgggat

SEQ ID NO: 94702 - DNA, 13 bp, Artificial Sequence
  Oligonucleotide for detection of SNP TSC0023601
atcccacaataat

SEQ ID NO: 94703 - DNA, 13 bp, Artificial Sequence
  Oligonucleotide for detection of SNP TSC0023601
attattatgggat

SEQ ID NO: 94704 - DNA, 13 bp, Artificial Sequence
  Oligonucleotide for detection of SNP TSC0023601
atcccataataat

SEQ ID NO: 94705 - DNA, 13 bp, Artificial Sequence
  Oligonucleotide for detection of SNP TSC0023601
attatcgtgggat

SEQ ID NO: 94706 - DNA, 13 bp, Artificial Sequence
  Oligonucleotide for detection of SNP TSC0023601
atcccacgataat

SEQ ID NO: 94707 - DNA, 13 bp, Artificial Sequence
  Oligonucleotide for detection of SNP TSC0023602
ttgtagtgagtcg

SEQ ID NO: 94708 - DNA, 13 bp, Artificial Sequence
  Oligonucleotide for detection of SNP TSC0023602
cgactcactacaa

SEQ ID NO: 94709 - DNA, 13 bp, Artificial Sequence
  Oligonucleotide for detection of SNP TSC0023602
ttgtagcgagtcg

SEQ ID NO: 94710 - DNA, 13 bp, Artificial Sequence
  Oligonucleotide for detection of SNP TSC0023602
cgactcgctacaa

SEQ ID NO: 94711 - DNA, 13 bp, Artificial Sequence
  Oligonucleotide for detection of SNP TSC0023602
cggtttgttgtaa

SEQ ID NO: 94712 - DNA, 13 bp, Artificial Sequence
  Oligonucleotide for detection of SNP TSC0023602
ttacaacaaaccg

SEQ ID NO: 94713 - DNA, 13 bp, Artificial Sequence
  Oligonucleotide for detection of SNP TSC0023602
cggtttattgtaa

SEQ ID NO: 94714 - DNA, 13 bp, Artificial Sequence
  Oligonucleotide for detection of SNP TSC0023602
ttacaataaaccg

SEQ ID NO: 94715 - DNA, 13 bp, Artificial Sequence
  Oligonucleotide for detection of SNP TSC0023602
cggttcgttgtaa

SEQ ID NO: 94716 - DNA, 13 bp, Artificial Sequence
  Oligonucleotide for detection of SNP TSC0023602
ttacaacgaaccg

SEQ ID NO: 94717 - DNA, 13 bp, Artificial Sequence
  Oligonucleotide for detection of SNP TSC0023603
ttaaataagtgaa

SEQ ID NO: 94718 - DNA, 13 bp, Artificial Sequence
  Oligonucleotide for detection of SNP TSC0023603
ttcacttatttaa

SEQ ID NO: 94719 - DNA, 13 bp, Artificial Sequence
  Oligonucleotide for detection of SNP TSC0023603
ttaaatgagtgaa

SEQ ID NO: 94720 - DNA, 13 bp, Artificial Sequence
  Oligonucleotide for detection of SNP TSC0023603
ttcactcatttaa

SEQ ID NO: 94721 - DNA, 13 bp, Artificial Sequence
  Oligonucleotide for detection of SNP TSC0023604
atggatatgtgty

SEQ ID NO: 94722 - DNA, 13 bp, Artificial Sequence
  Oligonucleotide for detection of SNP TSC0023604
racacatatccat

SEQ ID NO: 94723 - DNA, 13 bp, Artificial Sequence
  Oligonucleotide for detection of SNP TSC0023604
atggatgtgtgty

SEQ ID NO: 94724 - DNA, 13 bp, Artificial Sequence
  Oligonucleotide for detection of SNP TSC0023604
racacacatccat

SEQ ID NO: 94725 - DNA, 13 bp, Artificial Sequence
  Oligonucleotide for detection of SNP TSC0023604
atggacgtgtgty

SEQ ID NO: 94726 - DNA, 13 bp, Artificial Sequence
  Oligonucleotide for detection of SNP TSC0023604
racacacgtccat

SEQ ID NO: 94727 - DNA, 13 bp, Artificial Sequence
  Oligonucleotide for detection of SNP TSC0023604
gatatatgtttat

SEQ ID NO: 94728 - DNA, 13 bp, Artificial Sequence
  Oligonucleotide for detection of SNP TSC0023604
ataaacatatatc

SEQ ID NO: 94729 - DNA, 13 bp, Artificial Sequence
  Oligonucleotide for detection of SNP TSC0023604
gatatacgtttat

SEQ ID NO: 94730 - DNA, 13 bp, Artificial Sequence
  Oligonucleotide for detection of SNP TSC0023604
ataaacgtatatc

SEQ ID NO: 94731 - DNA, 13 bp, Artificial Sequence
  Oligonucleotide for detection of SNP TSC0023605
tgtattgttttay

SEQ ID NO: 94732 - DNA, 13 bp, Artificial Sequence
  Oligonucleotide for detection of SNP TSC0023605
rtaaaacaataca

SEQ ID NO: 94733 - DNA, 13 bp, Artificial Sequence
  Oligonucleotide for detection of SNP TSC0023605
tgtattattttay

SEQ ID NO: 94734 - DNA, 13 bp, Artificial Sequence
  Oligonucleotide for detection of SNP TSC0023605
rtaaaataataca

SEQ ID NO: 94735 - DNA, 13 bp, Artificial Sequence
  Oligonucleotide for detection of SNP TSC0023606
aaaatttgaagta

SEQ ID NO: 94736 - DNA, 13 bp, Artificial Sequence
  Oligonucleotide for detection of SNP TSC0023606
tacttcaaatttt

SEQ ID NO: 94737 - DNA, 13 bp, Artificial Sequence
  Oligonucleotide for detection of SNP TSC0023606
aaaattcgaagta

SEQ ID NO: 94738 - DNA, 13 bp, Artificial Sequence
  Oligonucleotide for detection of SNP TSC0023606
tacttcgaatttt

SEQ ID NO: 94739 - DNA, 13 bp, Artificial Sequence
  Oligonucleotide for detection of SNP TSC0023606
tatttcgaatttt

SEQ ID NO: 94740 - DNA, 13 bp, Artificial Sequence
  Oligonucleotide for detection of SNP TSC0023606
aaaattcgaaata

SEQ ID NO: 94741 - DNA, 13 bp, Artificial Sequence
  Oligonucleotide for detection of SNP TSC0023609
aaaatgatatgay

SEQ ID NO: 94742 - DNA, 13 bp, Artificial Sequence
  Oligonucleotide for detection of SNP TSC0023609
rtcatatcatttt

SEQ ID NO: 94743 - DNA, 13 bp, Artificial Sequence
  Oligonucleotide for detection of SNP TSC0023609
aaaatggtatgay

SEQ ID NO: 94744 - DNA, 13 bp, Artificial Sequence
  Oligonucleotide for detection of SNP TSC0023609
rtcataccatttt

SEQ ID NO: 94745 - DNA, 13 bp, Artificial Sequence
  Oligonucleotide for detection of SNP TSC0023610
aaaattgagtgty

SEQ ID NO: 94746 - DNA, 13 bp, Artificial Sequence
  Oligonucleotide for detection of SNP TSC0023610
racactcaatttt

SEQ ID NO: 94747 - DNA, 13 bp, Artificial Sequence
  Oligonucleotide for detection of SNP TSC0023610
aaaatttagtgty

SEQ ID NO: 94748 - DNA, 13 bp, Artificial Sequence
  Oligonucleotide for detection of SNP TSC0023610
racactaaatttt

SEQ ID NO: 94749 - DNA, 13 bp, Artificial Sequence
  Oligonucleotide for detection of SNP TSC0023610
gatatttagtttt

SEQ ID NO: 94750 - DNA, 13 bp, Artificial Sequence
  Oligonucleotide for detection of SNP TSC0023610
aaaactaaatatc

SEQ ID NO: 94751 - DNA, 13 bp, Artificial Sequence
  Oligonucleotide for detection of SNP TSC0023610
gatattaagtttt

SEQ ID NO: 94752 - DNA, 13 bp, Artificial Sequence
  Oligonucleotide for detection of SNP TSC0023610
aaaacttaatatc

SEQ ID NO: 94753 - DNA, 13 bp, Artificial Sequence
  Oligonucleotide for detection of SNP TSC0023612
tgtatattaatat

SEQ ID NO: 94754 - DNA, 13 bp, Artificial Sequence
  Oligonucleotide for detection of SNP TSC0023612
atattaatataca

SEQ ID NO: 94755 - DNA, 13 bp, Artificial Sequence
  Oligonucleotide for detection of SNP TSC0023612
tgtatagtaatat

SEQ ID NO: 94756 - DNA, 13 bp, Artificial Sequence
  Oligonucleotide for detection of SNP TSC0023612
atattactataca

SEQ ID NO: 94757 - DNA, 13 bp, Artificial Sequence
  Oligonucleotide for detection of SNP TSC0023612
cgtatattaatat

SEQ ID NO: 94758 - DNA, 13 bp, Artificial Sequence
  Oligonucleotide for detection of SNP TSC0023612
atattaatatacg

SEQ ID NO: 94759 - DNA, 13 bp, Artificial Sequence
  Oligonucleotide for detection of SNP TSC0023612
cgtatagtaatat

SEQ ID NO: 94760 - DNA, 13 bp, Artificial Sequence
  Oligonucleotide for detection of SNP TSC0023612
atattactatacg

SEQ ID NO: 94761 - DNA, 13 bp, Artificial Sequence
  Oligonucleotide for detection of SNP TSC0023612
atgttagtatatg

SEQ ID NO: 94762 - DNA, 13 bp, Artificial Sequence
  Oligonucleotide for detection of SNP TSC0023612
catatactaacat

SEQ ID NO: 94763 - DNA, 13 bp, Artificial Sequence
  Oligonucleotide for detection of SNP TSC0023612
atgttattatatg

SEQ ID NO: 94764 - DNA, 13 bp, Artificial Sequence
  Oligonucleotide for detection of SNP TSC0023612
catataataacat

SEQ ID NO: 94765 - DNA, 13 bp, Artificial Sequence
  Oligonucleotide for detection of SNP TSC0023612
atgttagtatacg

SEQ ID NO: 94766 - DNA, 13 bp, Artificial Sequence
  Oligonucleotide for detection of SNP TSC0023612
cgtatactaacat

SEQ ID NO: 94767 - DNA, 13 bp, Artificial Sequence
  Oligonucleotide for detection of SNP TSC0023612
atgttattatacg

SEQ ID NO: 94768 - DNA, 13 bp, Artificial Sequence
  Oligonucleotide for detection of SNP TSC0023612
cgtataataacat

SEQ ID NO: 94769 - DNA, 13 bp, Artificial Sequence
  Oligonucleotide for detection of SNP TSC0023615
tagatggggagtg

SEQ ID NO: 94770 - DNA, 13 bp, Artificial Sequence
  Oligonucleotide for detection of SNP TSC0023615
cactccccatcta

SEQ ID NO: 94771 - DNA, 13 bp, Artificial Sequence
  Oligonucleotide for detection of SNP TSC0023615
tagatgaggagtg

SEQ ID NO: 94772 - DNA, 13 bp, Artificial Sequence
  Oligonucleotide for detection of SNP TSC0023615
cactcctcatcta

SEQ ID NO: 94773 - DNA, 13 bp, Artificial Sequence
  Oligonucleotide for detection of SNP TSC0023617
attagtatatttg

SEQ ID NO: 94774 - DNA, 13 bp, Artificial Sequence
  Oligonucleotide for detection of SNP TSC0023617
caaatatactaat

SEQ ID NO: 94775 - DNA, 13 bp, Artificial Sequence
  Oligonucleotide for detection of SNP TSC0023617
taggtatgttaat

SEQ ID NO: 94776 - DNA, 13 bp, Artificial Sequence
  Oligonucleotide for detection of SNP TSC0023617
attaacataccta

SEQ ID NO: 94777 - DNA, 13 bp, Artificial Sequence
  Oligonucleotide for detection of SNP TSC0023617
taggtaggttaat

SEQ ID NO: 94778 - DNA, 13 bp, Artificial Sequence
  Oligonucleotide for detection of SNP TSC0023617
attaacctaccta

SEQ ID NO: 94779 - DNA, 13 bp, Artificial Sequence
  Oligonucleotide for detection of SNP TSC0023618
aattagaatggga

SEQ ID NO: 94780 - DNA, 13 bp, Artificial Sequence
  Oligonucleotide for detection of SNP TSC0023618
tcccattctaatt

SEQ ID NO: 94781 - DNA, 13 bp, Artificial Sequence
  Oligonucleotide for detection of SNP TSC0023618
aattaggatggga

SEQ ID NO: 94782 - DNA, 13 bp, Artificial Sequence
  Oligonucleotide for detection of SNP TSC0023618
tcccatcctaatt

SEQ ID NO: 94783 - DNA, 13 bp, Artificial Sequence
  Oligonucleotide for detection of SNP TSC0023619
aagattattttay

SEQ ID NO: 94784 - DNA, 13 bp, Artificial Sequence
  Oligonucleotide for detection of SNP TSC0023619
rtaaaataatctt

SEQ ID NO: 94785 - DNA, 13 bp, Artificial Sequence
  Oligonucleotide for detection of SNP TSC0023619
aagattgttttay

SEQ ID NO: 94786 - DNA, 13 bp, Artificial Sequence
  Oligonucleotide for detection of SNP TSC0023619
rtaaaacaatctt

SEQ ID NO: 94787 - DNA, 13 bp, Artificial Sequence
  Oligonucleotide for detection of SNP TSC0023619
aagatcgttttay

SEQ ID NO: 94788 - DNA, 13 bp, Artificial Sequence
  Oligonucleotide for detection of SNP TSC0023619
rtaaaacgatctt

SEQ ID NO: 94789 - DNA, 13 bp, Artificial Sequence
  Oligonucleotide for detection of SNP TSC0023619
gtgaggtgatttt

SEQ ID NO: 94790 - DNA, 13 bp, Artificial Sequence
  Oligonucleotide for detection of SNP TSC0023619
aaaatcacctcac

SEQ ID NO: 94791 - DNA, 13 bp, Artificial Sequence
  Oligonucleotide for detection of SNP TSC0023619
gtgaggcgatttt

SEQ ID NO: 94792 - DNA, 13 bp, Artificial Sequence
  Oligonucleotide for detection of SNP TSC0023619
aaaatcgcctcac

SEQ ID NO: 94793 - DNA, 13 bp, Artificial Sequence
  Oligonucleotide for detection of SNP TSC0023620
agaaagaatatay

SEQ ID NO: 94794 - DNA, 13 bp, Artificial Sequence
  Oligonucleotide for detection of SNP TSC0023620
rtatattctttct

SEQ ID NO: 94795 - DNA, 13 bp, Artificial Sequence
  Oligonucleotide for detection of SNP TSC0023620
agaaaggatatay

SEQ ID NO: 94796 - DNA, 13 bp, Artificial Sequence
  Oligonucleotide for detection of SNP TSC0023620
rtatatcctttct

SEQ ID NO: 94797 - DNA, 13 bp, Artificial Sequence
  Oligonucleotide for detection of SNP TSC0023621
gtagttaatttga

SEQ ID NO: 94798 - DNA, 13 bp, Artificial Sequence
  Oligonucleotide for detection of SNP TSC0023621
tcaaattaactac

SEQ ID NO: 94799 - DNA, 13 bp, Artificial Sequence
  Oligonucleotide for detection of SNP TSC0023621
gtagtttatttga

SEQ ID NO: 94800 - DNA, 13 bp, Artificial Sequence
  Oligonucleotide for detection of SNP TSC0023621
tcaaataaactac

SEQ ID NO: 94801 - DNA, 13 bp, Artificial Sequence
  Oligonucleotide for detection of SNP TSC0023621
ttagattagttgy

SEQ ID NO: 94802 - DNA, 13 bp, Artificial Sequence
  Oligonucleotide for detection of SNP TSC0023621
rcaactaatctaa

SEQ ID NO: 94803 - DNA, 13 bp, Artificial Sequence
  Oligonucleotide for detection of SNP TSC0023621
ttagatgagttgy

SEQ ID NO: 94804 - DNA, 13 bp, Artificial Sequence
  Oligonucleotide for detection of SNP TSC0023621
rcaactcatctaa

SEQ ID NO: 94805 - DNA, 13 bp, Artificial Sequence
  Oligonucleotide for detection of SNP TSC0023622
ttgtgaatgtgtg

SEQ ID NO: 94806 - DNA, 13 bp, Artificial Sequence
  Oligonucleotide for detection of SNP TSC0023622
cacacattcacaa

SEQ ID NO: 94807 - DNA, 13 bp, Artificial Sequence
  Oligonucleotide for detection of SNP TSC0023622
ttgtgagtgtgtg

SEQ ID NO: 94808 - DNA, 13 bp, Artificial Sequence
  Oligonucleotide for detection of SNP TSC0023622
cacacactcacaa

SEQ ID NO: 94809 - DNA, 13 bp, Artificial Sequence
  Oligonucleotide for detection of SNP TSC0023623
gatttagttaatt

SEQ ID NO: 94810 - DNA, 13 bp, Artificial Sequence
  Oligonucleotide for detection of SNP TSC0023623
aattaactaaatc

SEQ ID NO: 94811 - DNA, 13 bp, Artificial Sequence
  Oligonucleotide for detection of SNP TSC0023623
gatttaattaatt

SEQ ID NO: 94812 - DNA, 13 bp, Artificial Sequence
  Oligonucleotide for detection of SNP TSC0023623
aattaattaaatc

SEQ ID NO: 94813 - DNA, 13 bp, Artificial Sequence
  Oligonucleotide for detection of SNP TSC0023624
taggttagtgtaa

SEQ ID NO: 94814 - DNA, 13 bp, Artificial Sequence
  Oligonucleotide for detection of SNP TSC0023624
ttacactaaccta

SEQ ID NO: 94815 - DNA, 13 bp, Artificial Sequence
  Oligonucleotide for detection of SNP TSC0023624
taggtttgtgtaa

SEQ ID NO: 94816 - DNA, 13 bp, Artificial Sequence
  Oligonucleotide for detection of SNP TSC0023624
ttacacaaaccta

SEQ ID NO: 94817 - DNA, 13 bp, Artificial Sequence
  Oligonucleotide for detection of SNP TSC0023624
ttgtattagtttg

SEQ ID NO: 94818 - DNA, 13 bp, Artificial Sequence
  Oligonucleotide for detection of SNP TSC0023624
caaactaatacaa

SEQ ID NO: 94819 - DNA, 13 bp, Artificial Sequence
  Oligonucleotide for detection of SNP TSC0023624
ttgtataagtttg

SEQ ID NO: 94820 - DNA, 13 bp, Artificial Sequence
  Oligonucleotide for detection of SNP TSC0023624
caaacttatacaa

SEQ ID NO: 94821 - DNA, 13 bp, Artificial Sequence
  Oligonucleotide for detection of SNP TSC0023625
atatgtaataaaa

SEQ ID NO: 94822 - DNA, 13 bp, Artificial Sequence
  Oligonucleotide for detection of SNP TSC0023625
ttttattacatat

SEQ ID NO: 94823 - DNA, 13 bp, Artificial Sequence
  Oligonucleotide for detection of SNP TSC0023625
atatgtgataaaa

SEQ ID NO: 94824 - DNA, 13 bp, Artificial Sequence
  Oligonucleotide for detection of SNP TSC0023625
ttttatcacatat

SEQ ID NO: 94825 - DNA, 13 bp, Artificial Sequence
  Oligonucleotide for detection of SNP TSC0023625
atatgcgataaaa

SEQ ID NO: 94826 - DNA, 13 bp, Artificial Sequence
  Oligonucleotide for detection of SNP TSC0023625
ttttatcgcatat

SEQ ID NO: 94827 - DNA, 13 bp, Artificial Sequence
  Oligonucleotide for detection of SNP TSC0023625
ttttgttgtatgt

SEQ ID NO: 94828 - DNA, 13 bp, Artificial Sequence
  Oligonucleotide for detection of SNP TSC0023625
acatacaacaaaa

SEQ ID NO: 94829 - DNA, 13 bp, Artificial Sequence
  Oligonucleotide for detection of SNP TSC0023625
ttttgtcgtatgt

SEQ ID NO: 94830 - DNA, 13 bp, Artificial Sequence
  Oligonucleotide for detection of SNP TSC0023625
acatacgacaaaa

SEQ ID NO: 94831 - DNA, 13 bp, Artificial Sequence
  Oligonucleotide for detection of SNP TSC0023627
agtagtaggtatt

SEQ ID NO: 94832 - DNA, 13 bp, Artificial Sequence
  Oligonucleotide for detection of SNP TSC0023627
aatacctactact

SEQ ID NO: 94833 - DNA, 13 bp, Artificial Sequence
  Oligonucleotide for detection of SNP TSC0023627
agtagtgggtatt

SEQ ID NO: 94834 - DNA, 13 bp, Artificial Sequence
  Oligonucleotide for detection of SNP TSC0023627
aatacccactact

SEQ ID NO: 94835 - DNA, 13 bp, Artificial Sequence
  Oligonucleotide for detection of SNP TSC0023627
agtagcgggtatt

SEQ ID NO: 94836 - DNA, 13 bp, Artificial Sequence
  Oligonucleotide for detection of SNP TSC0023627
aatacccgctact

SEQ ID NO: 94837 - DNA, 13 bp, Artificial Sequence
  Oligonucleotide for detection of SNP TSC0023627
aatgtttgttatt

SEQ ID NO: 94838 - DNA, 13 bp, Artificial Sequence
  Oligonucleotide for detection of SNP TSC0023627
aataacaaacatt

SEQ ID NO: 94839 - DNA, 13 bp, Artificial Sequence
  Oligonucleotide for detection of SNP TSC0023627
aatgttcgttatt

SEQ ID NO: 94840 - DNA, 13 bp, Artificial Sequence
  Oligonucleotide for detection of SNP TSC0023627
aataacgaacatt

SEQ ID NO: 94841 - DNA, 13 bp, Artificial Sequence
  Oligonucleotide for detection of SNP TSC0023628
gaggaaagtatat

SEQ ID NO: 94842 - DNA, 13 bp, Artificial Sequence
  Oligonucleotide for detection of SNP TSC0023628
atatactttcctc

SEQ ID NO: 94843 - DNA, 13 bp, Artificial Sequence
  Oligonucleotide for detection of SNP TSC0023628
gaggaaggtatat

SEQ ID NO: 94844 - DNA, 13 bp, Artificial Sequence
  Oligonucleotide for detection of SNP TSC0023628
atataccttcctc

SEQ ID NO: 94845 - DNA, 13 bp, Artificial Sequence
  Oligonucleotide for detection of SNP TSC0023629
aaatttgttaaat

SEQ ID NO: 94846 - DNA, 13 bp, Artificial Sequence
  Oligonucleotide for detection of SNP TSC0023629
atttaacaaattt

SEQ ID NO: 94847 - DNA, 13 bp, Artificial Sequence
  Oligonucleotide for detection of SNP TSC0023629
aaatttattaaat

SEQ ID NO: 94848 - DNA, 13 bp, Artificial Sequence
  Oligonucleotide for detection of SNP TSC0023629
atttaataaattt

SEQ ID NO: 94849 - DNA, 13 bp, Artificial Sequence
  Oligonucleotide for detection of SNP TSC0023632
tttttggtttggg

SEQ ID NO: 94850 - DNA, 13 bp, Artificial Sequence
  Oligonucleotide for detection of SNP TSC0023632
cccaaaccaaaaa

SEQ ID NO: 94851 - DNA, 13 bp, Artificial Sequence
  Oligonucleotide for detection of SNP TSC0023636
tatgattaggtta

SEQ ID NO: 94852 - DNA, 13 bp, Artificial Sequence
  Oligonucleotide for detection of SNP TSC0023636
taacctaatcata

SEQ ID NO: 94853 - DNA, 13 bp, Artificial Sequence
  Oligonucleotide for detection of SNP TSC0023636
tatgatgaggtta

SEQ ID NO: 94854 - DNA, 13 bp, Artificial Sequence
  Oligonucleotide for detection of SNP TSC0023636
taacctcatcata

SEQ ID NO: 94855 - DNA, 13 bp, Artificial Sequence
  Oligonucleotide for detection of SNP TSC0023636
tatgacgaggtta

SEQ ID NO: 94856 - DNA, 13 bp, Artificial Sequence
  Oligonucleotide for detection of SNP TSC0023636
taacctcgtcata

SEQ ID NO: 94857 - DNA, 13 bp, Artificial Sequence
  Oligonucleotide for detection of SNP TSC0023636
tgatttggttatg

SEQ ID NO: 94858 - DNA, 13 bp, Artificial Sequence
  Oligonucleotide for detection of SNP TSC0023636
cataaccaaatca

SEQ ID NO: 94859 - DNA, 13 bp, Artificial Sequence
  Oligonucleotide for detection of SNP TSC0023636
tgattttgttatg

SEQ ID NO: 94860 - DNA, 13 bp, Artificial Sequence
  Oligonucleotide for detection of SNP TSC0023636
cataacaaaatca

SEQ ID NO: 94861 - DNA, 13 bp, Artificial Sequence
  Oligonucleotide for detection of SNP TSC0023636
tgatttcgttatg

SEQ ID NO: 94862 - DNA, 13 bp, Artificial Sequence
  Oligonucleotide for detection of SNP TSC0023636
cataacgaaatca

SEQ ID NO: 94863 - DNA, 13 bp, Artificial Sequence
  Oligonucleotide for detection of SNP TSC0023637
tattatattttga

SEQ ID NO: 94864 - DNA, 13 bp, Artificial Sequence
  Oligonucleotide for detection of SNP TSC0023637
tcaaaatataata

SEQ ID NO: 94865 - DNA, 13 bp, Artificial Sequence
  Oligonucleotide for detection of SNP TSC0023637
tattattttttga

SEQ ID NO: 94866 - DNA, 13 bp, Artificial Sequence
  Oligonucleotide for detection of SNP TSC0023637
tcaaaaaataata

SEQ ID NO: 94867 - DNA, 13 bp, Artificial Sequence
  Oligonucleotide for detection of SNP TSC0023637
ttagaatgtgatg

SEQ ID NO: 94868 - DNA, 13 bp, Artificial Sequence
  Oligonucleotide for detection of SNP TSC0023637
catcacattctaa

SEQ ID NO: 94869 - DNA, 13 bp, Artificial Sequence
  Oligonucleotide for detection of SNP TSC0023637
ttagaaagtgatg

SEQ ID NO: 94870 - DNA, 13 bp, Artificial Sequence
  Oligonucleotide for detection of SNP TSC0023637
catcactttctaa

SEQ ID NO: 94871 - DNA, 13 bp, Artificial Sequence
  Oligonucleotide for detection of SNP TSC0023638
tgaggaggttgtt

SEQ ID NO: 94872 - DNA, 13 bp, Artificial Sequence
  Oligonucleotide for detection of SNP TSC0023638
aacaacctcctca

SEQ ID NO: 94873 - DNA, 13 bp, Artificial Sequence
  Oligonucleotide for detection of SNP TSC0023638
tgaggaagttgtt

SEQ ID NO: 94874 - DNA, 13 bp, Artificial Sequence
  Oligonucleotide for detection of SNP TSC0023638
aacaacttcctca

SEQ ID NO: 94875 - DNA, 13 bp, Artificial Sequence
  Oligonucleotide for detection of SNP TSC0023639
ttttttattgtag

SEQ ID NO: 94876 - DNA, 13 bp, Artificial Sequence
  Oligonucleotide for detection of SNP TSC0023639
ctacaataaaaaa

SEQ ID NO: 94877 - DNA, 13 bp, Artificial Sequence
  Oligonucleotide for detection of SNP TSC0023639
tttttttttgtag

SEQ ID NO: 94878 - DNA, 13 bp, Artificial Sequence
  Oligonucleotide for detection of SNP TSC0023639
ctacaaaaaaaaa

SEQ ID NO: 94879 - DNA, 13 bp, Artificial Sequence
  Oligonucleotide for detection of SNP TSC0023639
ttttttatcgtag

SEQ ID NO: 94880 - DNA, 13 bp, Artificial Sequence
  Oligonucleotide for detection of SNP TSC0023639
ctacgataaaaaa

SEQ ID NO: 94881 - DNA, 13 bp, Artificial Sequence
  Oligonucleotide for detection of SNP TSC0023639
ttttttttcgtag

SEQ ID NO: 94882 - DNA, 13 bp, Artificial Sequence
  Oligonucleotide for detection of SNP TSC0023639
ctacgaaaaaaaa

SEQ ID NO: 94883 - DNA, 13 bp, Artificial Sequence
  Oligonucleotide for detection of SNP TSC0023639
ttgtggtagggaa

SEQ ID NO: 94884 - DNA, 13 bp, Artificial Sequence
  Oligonucleotide for detection of SNP TSC0023639
ttccctaccacaa

SEQ ID NO: 94885 - DNA, 13 bp, Artificial Sequence
  Oligonucleotide for detection of SNP TSC0023639
ttgtgggagggaa

SEQ ID NO: 94886 - DNA, 13 bp, Artificial Sequence
  Oligonucleotide for detection of SNP TSC0023639
ttccctcccacaa

SEQ ID NO: 94887 - DNA, 13 bp, Artificial Sequence
  Oligonucleotide for detection of SNP TSC0023639
ttgcggtagggaa

SEQ ID NO: 94888 - DNA, 13 bp, Artificial Sequence
  Oligonucleotide for detection of SNP TSC0023639
ttccctaccgcaa

SEQ ID NO: 94889 - DNA, 13 bp, Artificial Sequence
  Oligonucleotide for detection of SNP TSC0023639
ttgcgggagggaa

SEQ ID NO: 94890 - DNA, 13 bp, Artificial Sequence
  Oligonucleotide for detection of SNP TSC0023639
ttccctcccgcaa

SEQ ID NO: 94891 - DNA, 13 bp, Artificial Sequence
  Oligonucleotide for detection of SNP TSC0023640
tttaagttttttt

SEQ ID NO: 94892 - DNA, 13 bp, Artificial Sequence
  Oligonucleotide for detection of SNP TSC0023640
aaaaaaacttaaa

SEQ ID NO: 94893 - DNA, 13 bp, Artificial Sequence
  Oligonucleotide for detection of SNP TSC0023640
agggggttttggg

SEQ ID NO: 94894 - DNA, 13 bp, Artificial Sequence
  Oligonucleotide for detection of SNP TSC0023640
cccaaaaccccct

SEQ ID NO: 94895 - DNA, 13 bp, Artificial Sequence
  Oligonucleotide for detection of SNP TSC0023640
agggggatttggg

SEQ ID NO: 94896 - DNA, 13 bp, Artificial Sequence
  Oligonucleotide for detection of SNP TSC0023640
cccaaatccccct

SEQ ID NO: 94897 - DNA, 13 bp, Artificial Sequence
  Oligonucleotide for detection of SNP TSC0023644
attttatgatggg

SEQ ID NO: 94898 - DNA, 13 bp, Artificial Sequence
  Oligonucleotide for detection of SNP TSC0023644
cccatcataaaat

SEQ ID NO: 94899 - DNA, 13 bp, Artificial Sequence
  Oligonucleotide for detection of SNP TSC0023644
attttacgatggg

SEQ ID NO: 94900 - DNA, 13 bp, Artificial Sequence
  Oligonucleotide for detection of SNP TSC0023644
cccatcgtaaaat

SEQ ID NO: 94901 - DNA, 13 bp, Artificial Sequence
  Oligonucleotide for detection of SNP TSC0023644
tttattgtgggat

SEQ ID NO: 94902 - DNA, 13 bp, Artificial Sequence
  Oligonucleotide for detection of SNP TSC0023644
atcccacaataaa

SEQ ID NO: 94903 - DNA, 13 bp, Artificial Sequence
  Oligonucleotide for detection of SNP TSC0023644
tttattatgggat

SEQ ID NO: 94904 - DNA, 13 bp, Artificial Sequence
  Oligonucleotide for detection of SNP TSC0023644
atcccataataaa

SEQ ID NO: 94905 - DNA, 13 bp, Artificial Sequence
  Oligonucleotide for detection of SNP TSC0023644
tttatcgtgggat

SEQ ID NO: 94906 - DNA, 13 bp, Artificial Sequence
  Oligonucleotide for detection of SNP TSC0023644
atcccacgataaa

SEQ ID NO: 94907 - DNA, 13 bp, Artificial Sequence
  Oligonucleotide for detection of SNP TSC0023645
ttgtaagaataaa

SEQ ID NO: 94908 - DNA, 13 bp, Artificial Sequence
  Oligonucleotide for detection of SNP TSC0023645
tttattcttacaa

SEQ ID NO: 94909 - DNA, 13 bp, Artificial Sequence
  Oligonucleotide for detection of SNP TSC0023645
ttgtaataataaa

SEQ ID NO: 94910 - DNA, 13 bp, Artificial Sequence
  Oligonucleotide for detection of SNP TSC0023645
tttattattacaa

SEQ ID NO: 94911 - DNA, 13 bp, Artificial Sequence
  Oligonucleotide for detection of SNP TSC0023645
tttgtttttgtag

SEQ ID NO: 94912 - DNA, 13 bp, Artificial Sequence
  Oligonucleotide for detection of SNP TSC0023645
ctacaaaaacaaa

SEQ ID NO: 94913 - DNA, 13 bp, Artificial Sequence
  Oligonucleotide for detection of SNP TSC0023645
tttgttattgtag

SEQ ID NO: 94914 - DNA, 13 bp, Artificial Sequence
  Oligonucleotide for detection of SNP TSC0023645
ctacaataacaaa

SEQ ID NO: 94915 - DNA, 13 bp, Artificial Sequence
  Oligonucleotide for detection of SNP TSC0023646
aatatatgtggay

SEQ ID NO: 94916 - DNA, 13 bp, Artificial Sequence
  Oligonucleotide for detection of SNP TSC0023646
rtccacatatatt

SEQ ID NO: 94917 - DNA, 13 bp, Artificial Sequence
  Oligonucleotide for detection of SNP TSC0023646
aatatacgtggay

SEQ ID NO: 94918 - DNA, 13 bp, Artificial Sequence
  Oligonucleotide for detection of SNP TSC0023646
rtccacgtatatt

SEQ ID NO: 94919 - DNA, 13 bp, Artificial Sequence
  Oligonucleotide for detection of SNP TSC0023646
gtttatgtatgtt

SEQ ID NO: 94920 - DNA, 13 bp, Artificial Sequence
  Oligonucleotide for detection of SNP TSC0023646
aacatacataaac

SEQ ID NO: 94921 - DNA, 13 bp, Artificial Sequence
  Oligonucleotide for detection of SNP TSC0023646
gtttatatatgtt

SEQ ID NO: 94922 - DNA, 13 bp, Artificial Sequence
  Oligonucleotide for detection of SNP TSC0023646
aacatatataaac

SEQ ID NO: 94923 - DNA, 13 bp, Artificial Sequence
  Oligonucleotide for detection of SNP TSC0023646
gtttacgtatgtt

SEQ ID NO: 94924 - DNA, 13 bp, Artificial Sequence
  Oligonucleotide for detection of SNP TSC0023646
aacatacgtaaac

SEQ ID NO: 94925 - DNA, 13 bp, Artificial Sequence
  Oligonucleotide for detection of SNP TSC0023649
tatgggggaaaay

SEQ ID NO: 94926 - DNA, 13 bp, Artificial Sequence
  Oligonucleotide for detection of SNP TSC0023649
rttttcccccata

SEQ ID NO: 94927 - DNA, 13 bp, Artificial Sequence
  Oligonucleotide for detection of SNP TSC0023649
tatgggagaaaay

SEQ ID NO: 94928 - DNA, 13 bp, Artificial Sequence
  Oligonucleotide for detection of SNP TSC0023649
rttttctcccata

SEQ ID NO: 94929 - DNA, 13 bp, Artificial Sequence
  Oligonucleotide for detection of SNP TSC0023654
gggattatttgty

SEQ ID NO: 94930 - DNA, 13 bp, Artificial Sequence
  Oligonucleotide for detection of SNP TSC0023654
racaaataatccc

SEQ ID NO: 94931 - DNA, 13 bp, Artificial Sequence
  Oligonucleotide for detection of SNP TSC0023654
gggattgtttgty

SEQ ID NO: 94932 - DNA, 13 bp, Artificial Sequence
  Oligonucleotide for detection of SNP TSC0023654
racaaacaatccc

SEQ ID NO: 94933 - DNA, 13 bp, Artificial Sequence
  Oligonucleotide for detection of SNP TSC0023654
gggatcgtttgty

SEQ ID NO: 94934 - DNA, 13 bp, Artificial Sequence
  Oligonucleotide for detection of SNP TSC0023654
racaaacgatccc

SEQ ID NO: 94935 - DNA, 13 bp, Artificial Sequence
  Oligonucleotide for detection of SNP TSC0023654
ggtaggtggttty

SEQ ID NO: 94936 - DNA, 13 bp, Artificial Sequence
  Oligonucleotide for detection of SNP TSC0023654
raaaccacctacc

SEQ ID NO: 94937 - DNA, 13 bp, Artificial Sequence
  Oligonucleotide for detection of SNP TSC0023654
ggtaggcggttty

SEQ ID NO: 94938 - DNA, 13 bp, Artificial Sequence
  Oligonucleotide for detection of SNP TSC0023654
raaaccgcctacc

SEQ ID NO: 94939 - DNA, 13 bp, Artificial Sequence
  Oligonucleotide for detection of SNP TSC0023656
taattgggggaga

SEQ ID NO: 94940 - DNA, 13 bp, Artificial Sequence
  Oligonucleotide for detection of SNP TSC0023656
tctcccccaatta

SEQ ID NO: 94941 - DNA, 13 bp, Artificial Sequence
  Oligonucleotide for detection of SNP TSC0023656
taattgtgggaga

SEQ ID NO: 94942 - DNA, 13 bp, Artificial Sequence
  Oligonucleotide for detection of SNP TSC0023656
tctcccacaatta

SEQ ID NO: 94943 - DNA, 13 bp, Artificial Sequence
  Oligonucleotide for detection of SNP TSC0023656
ttttttttagttg

SEQ ID NO: 94944 - DNA, 13 bp, Artificial Sequence
  Oligonucleotide for detection of SNP TSC0023656
caactaaaaaaaa

SEQ ID NO: 94945 - DNA, 13 bp, Artificial Sequence
  Oligonucleotide for detection of SNP TSC0023657
gtttataatttgt

SEQ ID NO: 94946 - DNA, 13 bp, Artificial Sequence
  Oligonucleotide for detection of SNP TSC0023657
acaaattataaac

SEQ ID NO: 94947 - DNA, 13 bp, Artificial Sequence
  Oligonucleotide for detection of SNP TSC0023657
gtttatgatttgt

SEQ ID NO: 94948 - DNA, 13 bp, Artificial Sequence
  Oligonucleotide for detection of SNP TSC0023657
acaaatcataaac

SEQ ID NO: 94949 - DNA, 13 bp, Artificial Sequence
  Oligonucleotide for detection of SNP TSC0023661
ggggtaagtaggg

SEQ ID NO: 94950 - DNA, 13 bp, Artificial Sequence
  Oligonucleotide for detection of SNP TSC0023661
ccctacttacccc

SEQ ID NO: 94951 - DNA, 13 bp, Artificial Sequence
  Oligonucleotide for detection of SNP TSC0023661
ggggtaggtaggg

SEQ ID NO: 94952 - DNA, 13 bp, Artificial Sequence
  Oligonucleotide for detection of SNP TSC0023661
ccctacctacccc

SEQ ID NO: 94953 - DNA, 13 bp, Artificial Sequence
  Oligonucleotide for detection of SNP TSC0023663
tggagtggataty

SEQ ID NO: 94954 - DNA, 13 bp, Artificial Sequence
  Oligonucleotide for detection of SNP TSC0023663
ratatccactcca

SEQ ID NO: 94955 - DNA, 13 bp, Artificial Sequence
  Oligonucleotide for detection of SNP TSC0023663
tggagttgataty

SEQ ID NO: 94956 - DNA, 13 bp, Artificial Sequence
  Oligonucleotide for detection of SNP TSC0023663
ratatcaactcca

SEQ ID NO: 94957 - DNA, 13 bp, Artificial Sequence
  Oligonucleotide for detection of SNP TSC0023663
tggagcggataty

SEQ ID NO: 94958 - DNA, 13 bp, Artificial Sequence
  Oligonucleotide for detection of SNP TSC0023663
ratatccgctcca

SEQ ID NO: 94959 - DNA, 13 bp, Artificial Sequence
  Oligonucleotide for detection of SNP TSC0023663
gatgttcgtttta

SEQ ID NO: 94960 - DNA, 13 bp, Artificial Sequence
  Oligonucleotide for detection of SNP TSC0023663
taaaacgaacatc

SEQ ID NO: 94961 - DNA, 13 bp, Artificial Sequence
  Oligonucleotide for detection of SNP TSC0023664
ttgtttattaggt

SEQ ID NO: 94962 - DNA, 13 bp, Artificial Sequence
  Oligonucleotide for detection of SNP TSC0023664
acctaataaacaa

SEQ ID NO: 94963 - DNA, 13 bp, Artificial Sequence
  Oligonucleotide for detection of SNP TSC0023665
atgtagtttttay

SEQ ID NO: 94964 - DNA, 13 bp, Artificial Sequence
  Oligonucleotide for detection of SNP TSC0023665
rtaaaaactacat

SEQ ID NO: 94965 - DNA, 13 bp, Artificial Sequence
  Oligonucleotide for detection of SNP TSC0023665
atgtaggttttay

SEQ ID NO: 94966 - DNA, 13 bp, Artificial Sequence
  Oligonucleotide for detection of SNP TSC0023665
rtaaaacctacat

SEQ ID NO: 94967 - DNA, 13 bp, Artificial Sequence
  Oligonucleotide for detection of SNP TSC0023665
gtgaaagttatat

SEQ ID NO: 94968 - DNA, 13 bp, Artificial Sequence
  Oligonucleotide for detection of SNP TSC0023665
atataactttcac

SEQ ID NO: 94969 - DNA, 13 bp, Artificial Sequence
  Oligonucleotide for detection of SNP TSC0023665
gtgaaatttatat

SEQ ID NO: 94970 - DNA, 13 bp, Artificial Sequence
  Oligonucleotide for detection of SNP TSC0023665
atataaatttcac

SEQ ID NO: 94971 - DNA, 13 bp, Artificial Sequence
  Oligonucleotide for detection of SNP TSC0023666
tttttcggttatg

SEQ ID NO: 94972 - DNA, 13 bp, Artificial Sequence
  Oligonucleotide for detection of SNP TSC0023666
cataaccgaaaaa

SEQ ID NO: 94973 - DNA, 13 bp, Artificial Sequence
  Oligonucleotide for detection of SNP TSC0023666
tatggttgggaaa

SEQ ID NO: 94974 - DNA, 13 bp, Artificial Sequence
  Oligonucleotide for detection of SNP TSC0023666
tttcccaaccata

SEQ ID NO: 94975 - DNA, 13 bp, Artificial Sequence
  Oligonucleotide for detection of SNP TSC0023666
tatggtcgggaaa

SEQ ID NO: 94976 - DNA, 13 bp, Artificial Sequence
  Oligonucleotide for detection of SNP TSC0023666
tttcccgaccata

SEQ ID NO: 94977 - DNA, 13 bp, Artificial Sequence
  Oligonucleotide for detection of SNP TSC0023667
aagttgggagttt

SEQ ID NO: 94978 - DNA, 13 bp, Artificial Sequence
  Oligonucleotide for detection of SNP TSC0023667
aaactcccaactt

SEQ ID NO: 94979 - DNA, 13 bp, Artificial Sequence
  Oligonucleotide for detection of SNP TSC0023667
aagttgagagttt

SEQ ID NO: 94980 - DNA, 13 bp, Artificial Sequence
  Oligonucleotide for detection of SNP TSC0023667
aaactctcaactt

SEQ ID NO: 94981 - DNA, 13 bp, Artificial Sequence
  Oligonucleotide for detection of SNP TSC0023668
tggggggtagagg

SEQ ID NO: 94982 - DNA, 13 bp, Artificial Sequence
  Oligonucleotide for detection of SNP TSC0023668
cctctacccccca

SEQ ID NO: 94983 - DNA, 13 bp, Artificial Sequence
  Oligonucleotide for detection of SNP TSC0023668
tgggggatagagg

SEQ ID NO: 94984 - DNA, 13 bp, Artificial Sequence
  Oligonucleotide for detection of SNP TSC0023668
cctctatccccca

SEQ ID NO: 94985 - DNA, 13 bp, Artificial Sequence
  Oligonucleotide for detection of SNP TSC0023670
ttttgtattatat

SEQ ID NO: 94986 - DNA, 13 bp, Artificial Sequence
  Oligonucleotide for detection of SNP TSC0023670
atataatacaaaa

SEQ ID NO: 94987 - DNA, 13 bp, Artificial Sequence
  Oligonucleotide for detection of SNP TSC0023670
ttttgtgttatat

SEQ ID NO: 94988 - DNA, 13 bp, Artificial Sequence
  Oligonucleotide for detection of SNP TSC0023670
atataacacaaaa

SEQ ID NO: 94989 - DNA, 13 bp, Artificial Sequence
  Oligonucleotide for detection of SNP TSC0023674
taaaagaaggggt

SEQ ID NO: 94990 - DNA, 13 bp, Artificial Sequence
  Oligonucleotide for detection of SNP TSC0023674
accccttctttta

SEQ ID NO: 94991 - DNA, 13 bp, Artificial Sequence
  Oligonucleotide for detection of SNP TSC0023674
taaaaggaggggt

SEQ ID NO: 94992 - DNA, 13 bp, Artificial Sequence
  Oligonucleotide for detection of SNP TSC0023674
acccctcctttta

SEQ ID NO: 94993 - DNA, 13 bp, Artificial Sequence
  Oligonucleotide for detection of SNP TSC0023675
ataggtatattat

SEQ ID NO: 94994 - DNA, 13 bp, Artificial Sequence
  Oligonucleotide for detection of SNP TSC0023675
ataatatacctat

SEQ ID NO: 94995 - DNA, 13 bp, Artificial Sequence
  Oligonucleotide for detection of SNP TSC0023675
ataggtttattat

SEQ ID NO: 94996 - DNA, 13 bp, Artificial Sequence
  Oligonucleotide for detection of SNP TSC0023675
ataataaacctat

SEQ ID NO: 94997 - DNA, 13 bp, Artificial Sequence
  Oligonucleotide for detection of SNP TSC0023675
atgatgtgtttat

SEQ ID NO: 94998 - DNA, 13 bp, Artificial Sequence
  Oligonucleotide for detection of SNP TSC0023675
ataaacacatcat

SEQ ID NO: 94999 - DNA, 13 bp, Artificial Sequence
  Oligonucleotide for detection of SNP TSC0023675
atgatgagtttat

SEQ ID NO: 95000 - DNA, 13 bp, Artificial Sequence
  Oligonucleotide for detection of SNP TSC0023675
ataaactcatcat

SEQ ID NO: 95001 - DNA, 13 bp, Artificial Sequence
  Oligonucleotide for detection of SNP TSC0023676
ggaaggatattat

SEQ ID NO: 95002 - DNA, 13 bp, Artificial Sequence
  Oligonucleotide for detection of SNP TSC0023676
ataatatccttcc

SEQ ID NO: 95003 - DNA, 13 bp, Artificial Sequence
  Oligonucleotide for detection of SNP TSC0023676
ggaagggtattat

SEQ ID NO: 95004 - DNA, 13 bp, Artificial Sequence
  Oligonucleotide for detection of SNP TSC0023676
ataatacccttcc

SEQ ID NO: 95005 - DNA, 13 bp, Artificial Sequence
  Oligonucleotide for detection of SNP TSC0023677
gaggtggtaggag

SEQ ID NO: 95006 - DNA, 13 bp, Artificial Sequence
  Oligonucleotide for detection of SNP TSC0023677
ctcctaccacctc

SEQ ID NO: 95007 - DNA, 13 bp, Artificial Sequence
  Oligonucleotide for detection of SNP TSC0023677
gaggtgataggag

SEQ ID NO: 95008 - DNA, 13 bp, Artificial Sequence
  Oligonucleotide for detection of SNP TSC0023677
ctcctatcacctc

SEQ ID NO: 95009 - DNA, 13 bp, Artificial Sequence
  Oligonucleotide for detection of SNP TSC0023678
agtttttttgtgg

SEQ ID NO: 95010 - DNA, 13 bp, Artificial Sequence
  Oligonucleotide for detection of SNP TSC0023678
ccacaaaaaaact

SEQ ID NO: 95011 - DNA, 13 bp, Artificial Sequence
  Oligonucleotide for detection of SNP TSC0023678
agttttgttgtgg

SEQ ID NO: 95012 - DNA, 13 bp, Artificial Sequence
  Oligonucleotide for detection of SNP TSC0023678
ccacaacaaaact

SEQ ID NO: 95013 - DNA, 13 bp, Artificial Sequence
  Oligonucleotide for detection of SNP TSC0023678
ttataggaaggtt

SEQ ID NO: 95014 - DNA, 13 bp, Artificial Sequence
  Oligonucleotide for detection of SNP TSC0023678
aaccttcctataa

SEQ ID NO: 95015 - DNA, 13 bp, Artificial Sequence
  Oligonucleotide for detection of SNP TSC0023678
ttatagtaaggtt

SEQ ID NO: 95016 - DNA, 13 bp, Artificial Sequence
  Oligonucleotide for detection of SNP TSC0023678
aaccttactataa

SEQ ID NO: 95017 - DNA, 13 bp, Artificial Sequence
  Oligonucleotide for detection of SNP TSC0023679
tttttagaataty

SEQ ID NO: 95018 - DNA, 13 bp, Artificial Sequence
  Oligonucleotide for detection of SNP TSC0023679
ratattctaaaaa

SEQ ID NO: 95019 - DNA, 13 bp, Artificial Sequence
  Oligonucleotide for detection of SNP TSC0023679
tttttaaaataty

SEQ ID NO: 95020 - DNA, 13 bp, Artificial Sequence
  Oligonucleotide for detection of SNP TSC0023679
ratattttaaaaa

SEQ ID NO: 95021 - DNA, 13 bp, Artificial Sequence
  Oligonucleotide for detection of SNP TSC0023681
gttaatatggtga

SEQ ID NO: 95022 - DNA, 13 bp, Artificial Sequence
  Oligonucleotide for detection of SNP TSC0023681
tcaccatattaac

SEQ ID NO: 95023 - DNA, 13 bp, Artificial Sequence
  Oligonucleotide for detection of SNP TSC0023681
gttaatttggtga

SEQ ID NO: 95024 - DNA, 13 bp, Artificial Sequence
  Oligonucleotide for detection of SNP TSC0023681
tcaccaaattaac

SEQ ID NO: 95025 - DNA, 13 bp, Artificial Sequence
  Oligonucleotide for detection of SNP TSC0023681
gttaatatggcga

SEQ ID NO: 95026 - DNA, 13 bp, Artificial Sequence
  Oligonucleotide for detection of SNP TSC0023681
tcgccatattaac

SEQ ID NO: 95027 - DNA, 13 bp, Artificial Sequence
  Oligonucleotide for detection of SNP TSC0023681
gttaatttggcga

SEQ ID NO: 95028 - DNA, 13 bp, Artificial Sequence
  Oligonucleotide for detection of SNP TSC0023681
tcgccaaattaac

SEQ ID NO: 95029 - DNA, 13 bp, Artificial Sequence
  Oligonucleotide for detection of SNP TSC0023682
aattaatgatgtt

SEQ ID NO: 95030 - DNA, 13 bp, Artificial Sequence
  Oligonucleotide for detection of SNP TSC0023682
aacatcattaatt

SEQ ID NO: 95031 - DNA, 13 bp, Artificial Sequence
  Oligonucleotide for detection of SNP TSC0023682
aattaacgatgtt

SEQ ID NO: 95032 - DNA, 13 bp, Artificial Sequence
  Oligonucleotide for detection of SNP TSC0023682
aacatcgttaatt

SEQ ID NO: 95033 - DNA, 13 bp, Artificial Sequence
  Oligonucleotide for detection of SNP TSC0023682
agtattgttggtt

SEQ ID NO: 95034 - DNA, 13 bp, Artificial Sequence
  Oligonucleotide for detection of SNP TSC0023682
aaccaacaatact

SEQ ID NO: 95035 - DNA, 13 bp, Artificial Sequence
  Oligonucleotide for detection of SNP TSC0023682
agtattattggtt

SEQ ID NO: 95036 - DNA, 13 bp, Artificial Sequence
  Oligonucleotide for detection of SNP TSC0023682
aaccaataatact

SEQ ID NO: 95037 - DNA, 13 bp, Artificial Sequence
  Oligonucleotide for detection of SNP TSC0023682
agtatcgttggtt

SEQ ID NO: 95038 - DNA, 13 bp, Artificial Sequence
  Oligonucleotide for detection of SNP TSC0023682
aaccaacgatact

SEQ ID NO: 95039 - DNA, 13 bp, Artificial Sequence
  Oligonucleotide for detection of SNP TSC0023683
ttatggagtgtty

SEQ ID NO: 95040 - DNA, 13 bp, Artificial Sequence
  Oligonucleotide for detection of SNP TSC0023683
raacactccataa

SEQ ID NO: 95041 - DNA, 13 bp, Artificial Sequence
  Oligonucleotide for detection of SNP TSC0023683
ttatggggtgtty

SEQ ID NO: 95042 - DNA, 13 bp, Artificial Sequence
  Oligonucleotide for detection of SNP TSC0023683
raacaccccataa

SEQ ID NO: 95043 - DNA, 13 bp, Artificial Sequence
  Oligonucleotide for detection of SNP TSC0023683
ttacggagtgtty

SEQ ID NO: 95044 - DNA, 13 bp, Artificial Sequence
  Oligonucleotide for detection of SNP TSC0023683
raacactccgtaa

SEQ ID NO: 95045 - DNA, 13 bp, Artificial Sequence
  Oligonucleotide for detection of SNP TSC0023683
ttacggggtgtty

SEQ ID NO: 95046 - DNA, 13 bp, Artificial Sequence
  Oligonucleotide for detection of SNP TSC0023683
raacaccccgtaa

SEQ ID NO: 95047 - DNA, 13 bp, Artificial Sequence
  Oligonucleotide for detection of SNP TSC0023683
ttatggagcgtty

SEQ ID NO: 95048 - DNA, 13 bp, Artificial Sequence
  Oligonucleotide for detection of SNP TSC0023683
raacgctccataa

SEQ ID NO: 95049 - DNA, 13 bp, Artificial Sequence
  Oligonucleotide for detection of SNP TSC0023683
ttatggggcgtty

SEQ ID NO: 95050 - DNA, 13 bp, Artificial Sequence
  Oligonucleotide for detection of SNP TSC0023683
raacgccccataa

SEQ ID NO: 95051 - DNA, 13 bp, Artificial Sequence
  Oligonucleotide for detection of SNP TSC0023683
ttacggagcgtty

SEQ ID NO: 95052 - DNA, 13 bp, Artificial Sequence
  Oligonucleotide for detection of SNP TSC0023683
raacgctccgtaa

SEQ ID NO: 95053 - DNA, 13 bp, Artificial Sequence
  Oligonucleotide for detection of SNP TSC0023683
ttacggggcgtty

SEQ ID NO: 95054 - DNA, 13 bp, Artificial Sequence
  Oligonucleotide for detection of SNP TSC0023683
raacgccccgtaa

SEQ ID NO: 95055 - DNA, 13 bp, Artificial Sequence
  Oligonucleotide for detection of SNP TSC0023684
taaagggtattta

SEQ ID NO: 95056 - DNA, 13 bp, Artificial Sequence
  Oligonucleotide for detection of SNP TSC0023684
taaatacccttta

SEQ ID NO: 95057 - DNA, 13 bp, Artificial Sequence
  Oligonucleotide for detection of SNP TSC0023684
taaaggttattta

SEQ ID NO: 95058 - DNA, 13 bp, Artificial Sequence
  Oligonucleotide for detection of SNP TSC0023684
taaataaccttta

SEQ ID NO: 95059 - DNA, 13 bp, Artificial Sequence
  Oligonucleotide for detection of SNP TSC0023684
tgaatatttttta

SEQ ID NO: 95060 - DNA, 13 bp, Artificial Sequence
  Oligonucleotide for detection of SNP TSC0023684
taaaaaatattca

SEQ ID NO: 95061 - DNA, 13 bp, Artificial Sequence
  Oligonucleotide for detection of SNP TSC0023684
tgaataattttta

SEQ ID NO: 95062 - DNA, 13 bp, Artificial Sequence
  Oligonucleotide for detection of SNP TSC0023684
taaaaattattca

SEQ ID NO: 95063 - DNA, 13 bp, Artificial Sequence
  Oligonucleotide for detection of SNP TSC0023685
atttttttttgga

SEQ ID NO: 95064 - DNA, 13 bp, Artificial Sequence
  Oligonucleotide for detection of SNP TSC0023685
tccaaaaaaaaat

SEQ ID NO: 95065 - DNA, 13 bp, Artificial Sequence
  Oligonucleotide for detection of SNP TSC0023685
atttttgtttgga

SEQ ID NO: 95066 - DNA, 13 bp, Artificial Sequence
  Oligonucleotide for detection of SNP TSC0023685
tccaaacaaaaat

SEQ ID NO: 95067 - DNA, 13 bp, Artificial Sequence
  Oligonucleotide for detection of SNP TSC0023685
tttagggaagggt

SEQ ID NO: 95068 - DNA, 13 bp, Artificial Sequence
  Oligonucleotide for detection of SNP TSC0023685
acccttccctaaa

SEQ ID NO: 95069 - DNA, 13 bp, Artificial Sequence
  Oligonucleotide for detection of SNP TSC0023685
tttaggtaagggt

SEQ ID NO: 95070 - DNA, 13 bp, Artificial Sequence
  Oligonucleotide for detection of SNP TSC0023685
acccttacctaaa

SEQ ID NO: 95071 - DNA, 13 bp, Artificial Sequence
  Oligonucleotide for detection of SNP TSC0023686
tattgggggtttt

SEQ ID NO: 95072 - DNA, 13 bp, Artificial Sequence
  Oligonucleotide for detection of SNP TSC0023686
aaaacccccaata

SEQ ID NO: 95073 - DNA, 13 bp, Artificial Sequence
  Oligonucleotide for detection of SNP TSC0023686
tattggtggtttt

SEQ ID NO: 95074 - DNA, 13 bp, Artificial Sequence
  Oligonucleotide for detection of SNP TSC0023686
aaaaccaccaata

SEQ ID NO: 95075 - DNA, 13 bp, Artificial Sequence
  Oligonucleotide for detection of SNP TSC0023686
aaggtttttaatg

SEQ ID NO: 95076 - DNA, 13 bp, Artificial Sequence
  Oligonucleotide for detection of SNP TSC0023686
cattaaaaacctt

SEQ ID NO: 95077 - DNA, 13 bp, Artificial Sequence
  Oligonucleotide for detection of SNP TSC0023686
aaggttattaatg

SEQ ID NO: 95078 - DNA, 13 bp, Artificial Sequence
  Oligonucleotide for detection of SNP TSC0023686
cattaataacctt

SEQ ID NO: 95079 - DNA, 13 bp, Artificial Sequence
  Oligonucleotide for detection of SNP TSC0023690
taattgggagagg

SEQ ID NO: 95080 - DNA, 13 bp, Artificial Sequence
  Oligonucleotide for detection of SNP TSC0023690
cctctcccaatta

SEQ ID NO: 95081 - DNA, 13 bp, Artificial Sequence
  Oligonucleotide for detection of SNP TSC0023690
taattgtgagagg

SEQ ID NO: 95082 - DNA, 13 bp, Artificial Sequence
  Oligonucleotide for detection of SNP TSC0023690
cctctcacaatta

SEQ ID NO: 95083 - DNA, 13 bp, Artificial Sequence
  Oligonucleotide for detection of SNP TSC0023690
taatcgggagagg

SEQ ID NO: 95084 - DNA, 13 bp, Artificial Sequence
  Oligonucleotide for detection of SNP TSC0023690
cctctcccgatta

SEQ ID NO: 95085 - DNA, 13 bp, Artificial Sequence
  Oligonucleotide for detection of SNP TSC0023690
taatcgtgagagg

SEQ ID NO: 95086 - DNA, 13 bp, Artificial Sequence
  Oligonucleotide for detection of SNP TSC0023690
cctctcacgatta

SEQ ID NO: 95087 - DNA, 13 bp, Artificial Sequence
  Oligonucleotide for detection of SNP TSC0023690
ttttttatggttg

SEQ ID NO: 95088 - DNA, 13 bp, Artificial Sequence
  Oligonucleotide for detection of SNP TSC0023690
caaccataaaaaa

SEQ ID NO: 95089 - DNA, 13 bp, Artificial Sequence
  Oligonucleotide for detection of SNP TSC0023690
tttttttcggttg

SEQ ID NO: 95090 - DNA, 13 bp, Artificial Sequence
  Oligonucleotide for detection of SNP TSC0023690
caaccgaaaaaaa

SEQ ID NO: 95091 - DNA, 13 bp, Artificial Sequence
  Oligonucleotide for detection of SNP TSC0023690
ttttttacggttg

SEQ ID NO: 95092 - DNA, 13 bp, Artificial Sequence
  Oligonucleotide for detection of SNP TSC0023690
caaccgtaaaaaa

SEQ ID NO: 95093 - DNA, 13 bp, Artificial Sequence
  Oligonucleotide for detection of SNP TSC0023691
gtaagtttagtag

SEQ ID NO: 95094 - DNA, 13 bp, Artificial Sequence
  Oligonucleotide for detection of SNP TSC0023691
ctactaaacttac

SEQ ID NO: 95095 - DNA, 13 bp, Artificial Sequence
  Oligonucleotide for detection of SNP TSC0023691
gtaagtatagtag

SEQ ID NO: 95096 - DNA, 13 bp, Artificial Sequence
  Oligonucleotide for detection of SNP TSC0023691
ctactatacttac

SEQ ID NO: 95097 - DNA, 13 bp, Artificial Sequence
  Oligonucleotide for detection of SNP TSC0023692
agttttgggtggg

SEQ ID NO: 95098 - DNA, 13 bp, Artificial Sequence
  Oligonucleotide for detection of SNP TSC0023692
cccacccaaaact

SEQ ID NO: 95099 - DNA, 13 bp, Artificial Sequence
  Oligonucleotide for detection of SNP TSC0023692
agttttaggtggg

SEQ ID NO: 95100 - DNA, 13 bp, Artificial Sequence
  Oligonucleotide for detection of SNP TSC0023692
cccacctaaaact

SEQ ID NO: 95101 - DNA, 13 bp, Artificial Sequence
  Oligonucleotide for detection of SNP TSC0023693
gttaatagggtga

SEQ ID NO: 95102 - DNA, 13 bp, Artificial Sequence
  Oligonucleotide for detection of SNP TSC0023693
tcaccctattaac

SEQ ID NO: 95103 - DNA, 13 bp, Artificial Sequence
  Oligonucleotide for detection of SNP TSC0023693
gttaatggggtga

SEQ ID NO: 95104 - DNA, 13 bp, Artificial Sequence
  Oligonucleotide for detection of SNP TSC0023693
tcaccccattaac

SEQ ID NO: 95105 - DNA, 13 bp, Artificial Sequence
  Oligonucleotide for detection of SNP TSC0023693
gttaatagggcga

SEQ ID NO: 95106 - DNA, 13 bp, Artificial Sequence
  Oligonucleotide for detection of SNP TSC0023693
tcgccctattaac

SEQ ID NO: 95107 - DNA, 13 bp, Artificial Sequence
  Oligonucleotide for detection of SNP TSC0023693
gttaacggggtga

SEQ ID NO: 95108 - DNA, 13 bp, Artificial Sequence
  Oligonucleotide for detection of SNP TSC0023693
tcaccccgttaac

SEQ ID NO: 95109 - DNA, 13 bp, Artificial Sequence
  Oligonucleotide for detection of SNP TSC0023693
gttaatggggcga

SEQ ID NO: 95110 - DNA, 13 bp, Artificial Sequence
  Oligonucleotide for detection of SNP TSC0023693
tcgccccattaac

SEQ ID NO: 95111 - DNA, 13 bp, Artificial Sequence
  Oligonucleotide for detection of SNP TSC0023693
gttaacggggcga

SEQ ID NO: 95112 - DNA, 13 bp, Artificial Sequence
  Oligonucleotide for detection of SNP TSC0023693
tcgccccgttaac

SEQ ID NO: 95113 - DNA, 13 bp, Artificial Sequence
  Oligonucleotide for detection of SNP TSC0023693
ttgttttgttagy

SEQ ID NO: 95114 - DNA, 13 bp, Artificial Sequence
  Oligonucleotide for detection of SNP TSC0023693
rctaacaaaacaa

SEQ ID NO: 95115 - DNA, 13 bp, Artificial Sequence
  Oligonucleotide for detection of SNP TSC0023693
tcgttttgttagy

SEQ ID NO: 95116 - DNA, 13 bp, Artificial Sequence
  Oligonucleotide for detection of SNP TSC0023693
rctaacaaaacga

SEQ ID NO: 95117 - DNA, 13 bp, Artificial Sequence
  Oligonucleotide for detection of SNP TSC0023693
ttgtttcgttagy

SEQ ID NO: 95118 - DNA, 13 bp, Artificial Sequence
  Oligonucleotide for detection of SNP TSC0023693
rctaacgaaacaa

SEQ ID NO: 95119 - DNA, 13 bp, Artificial Sequence
  Oligonucleotide for detection of SNP TSC0023693
tcgtttcgttagy

SEQ ID NO: 95120 - DNA, 13 bp, Artificial Sequence
  Oligonucleotide for detection of SNP TSC0023693
rctaacgaaacga

SEQ ID NO: 95121 - DNA, 13 bp, Artificial Sequence
  Oligonucleotide for detection of SNP TSC0023694
ttatgtattttgg

SEQ ID NO: 95122 - DNA, 13 bp, Artificial Sequence
  Oligonucleotide for detection of SNP TSC0023694
ccaaaatacataa

SEQ ID NO: 95123 - DNA, 13 bp, Artificial Sequence
  Oligonucleotide for detection of SNP TSC0023694
ttatgtgttttgg

SEQ ID NO: 95124 - DNA, 13 bp, Artificial Sequence
  Oligonucleotide for detection of SNP TSC0023694
ccaaaacacataa

SEQ ID NO: 95125 - DNA, 13 bp, Artificial Sequence
  Oligonucleotide for detection of SNP TSC0023694
ttatgtatttcgg

SEQ ID NO: 95126 - DNA, 13 bp, Artificial Sequence
  Oligonucleotide for detection of SNP TSC0023694
ccgaaatacataa

SEQ ID NO: 95127 - DNA, 13 bp, Artificial Sequence
  Oligonucleotide for detection of SNP TSC0023694
ttatgcgttttgg

SEQ ID NO: 95128 - DNA, 13 bp, Artificial Sequence
  Oligonucleotide for detection of SNP TSC0023694
ccaaaacgcataa

SEQ ID NO: 95129 - DNA, 13 bp, Artificial Sequence
  Oligonucleotide for detection of SNP TSC0023694
ttatgtgtttcgg

SEQ ID NO: 95130 - DNA, 13 bp, Artificial Sequence
  Oligonucleotide for detection of SNP TSC0023694
ccgaaacacataa

SEQ ID NO: 95131 - DNA, 13 bp, Artificial Sequence
  Oligonucleotide for detection of SNP TSC0023694
ttatgcgtttcgg

SEQ ID NO: 95132 - DNA, 13 bp, Artificial Sequence
  Oligonucleotide for detection of SNP TSC0023694
ccgaaacgcataa

SEQ ID NO: 95133 - DNA, 13 bp, Artificial Sequence
  Oligonucleotide for detection of SNP TSC0023694
ttggggtgtatga

SEQ ID NO: 95134 - DNA, 13 bp, Artificial Sequence
  Oligonucleotide for detection of SNP TSC0023694
tcatacaccccaa

SEQ ID NO: 95135 - DNA, 13 bp, Artificial Sequence
  Oligonucleotide for detection of SNP TSC0023694
tcggggtgtatga

SEQ ID NO: 95136 - DNA, 13 bp, Artificial Sequence
  Oligonucleotide for detection of SNP TSC0023694
tcatacaccccga

SEQ ID NO: 95137 - DNA, 13 bp, Artificial Sequence
  Oligonucleotide for detection of SNP TSC0023694
ttggggcgtatga

SEQ ID NO: 95138 - DNA, 13 bp, Artificial Sequence
  Oligonucleotide for detection of SNP TSC0023694
tcatacgccccaa

SEQ ID NO: 95139 - DNA, 13 bp, Artificial Sequence
  Oligonucleotide for detection of SNP TSC0023694
tcggggcgtatga

SEQ ID NO: 95140 - DNA, 13 bp, Artificial Sequence
  Oligonucleotide for detection of SNP TSC0023694
tcatacgccccga

SEQ ID NO: 95141 - DNA, 13 bp, Artificial Sequence
  Oligonucleotide for detection of SNP TSC0023695
tgtttagtgttaa

SEQ ID NO: 95142 - DNA, 13 bp, Artificial Sequence
  Oligonucleotide for detection of SNP TSC0023695
ttaacactaaaca

SEQ ID NO: 95143 - DNA, 13 bp, Artificial Sequence
  Oligonucleotide for detection of SNP TSC0023695
tgtttaatgttaa

SEQ ID NO: 95144 - DNA, 13 bp, Artificial Sequence
  Oligonucleotide for detection of SNP TSC0023695
ttaacattaaaca

SEQ ID NO: 95145 - DNA, 13 bp, Artificial Sequence
  Oligonucleotide for detection of SNP TSC0023697
tttaattgttggg

SEQ ID NO: 95146 - DNA, 13 bp, Artificial Sequence
  Oligonucleotide for detection of SNP TSC0023697
cccaacaattaaa

SEQ ID NO: 95147 - DNA, 13 bp, Artificial Sequence
  Oligonucleotide for detection of SNP TSC0023697
tttaatcgttggg

SEQ ID NO: 95148 - DNA, 13 bp, Artificial Sequence
  Oligonucleotide for detection of SNP TSC0023697
cccaacgattaaa

SEQ ID NO: 95149 - DNA, 13 bp, Artificial Sequence
  Oligonucleotide for detection of SNP TSC0023697
tttaatgattaaa

SEQ ID NO: 95150 - DNA, 13 bp, Artificial Sequence
  Oligonucleotide for detection of SNP TSC0023697
tttaatcattaaa

SEQ ID NO: 95151 - DNA, 13 bp, Artificial Sequence
  Oligonucleotide for detection of SNP TSC0023697
tttaacgattaaa

SEQ ID NO: 95152 - DNA, 13 bp, Artificial Sequence
  Oligonucleotide for detection of SNP TSC0023697
tttaatcgttaaa

SEQ ID NO: 95153 - DNA, 13 bp, Artificial Sequence
  Oligonucleotide for detection of SNP TSC0023700
taattgtttttag

SEQ ID NO: 95154 - DNA, 13 bp, Artificial Sequence
  Oligonucleotide for detection of SNP TSC0023700
ctaaaaacaatta

SEQ ID NO: 95155 - DNA, 13 bp, Artificial Sequence
  Oligonucleotide for detection of SNP TSC0023700
taattggttttag

SEQ ID NO: 95156 - DNA, 13 bp, Artificial Sequence
  Oligonucleotide for detection of SNP TSC0023700
ctaaaaccaatta

SEQ ID NO: 95157 - DNA, 13 bp, Artificial Sequence
  Oligonucleotide for detection of SNP TSC0023700
ttaagattagtta

SEQ ID NO: 95158 - DNA, 13 bp, Artificial Sequence
  Oligonucleotide for detection of SNP TSC0023700
taactaatcttaa

SEQ ID NO: 95159 - DNA, 13 bp, Artificial Sequence
  Oligonucleotide for detection of SNP TSC0023701
gagttatgaaagt

SEQ ID NO: 95160 - DNA, 13 bp, Artificial Sequence
  Oligonucleotide for detection of SNP TSC0023701
actttcataactc

SEQ ID NO: 95161 - DNA, 13 bp, Artificial Sequence
  Oligonucleotide for detection of SNP TSC0023701
gagttacgaaagt

SEQ ID NO: 95162 - DNA, 13 bp, Artificial Sequence
  Oligonucleotide for detection of SNP TSC0023701
actttcgtaactc

SEQ ID NO: 95163 - DNA, 13 bp, Artificial Sequence
  Oligonucleotide for detection of SNP TSC0023701
atttttgtgatty

SEQ ID NO: 95164 - DNA, 13 bp, Artificial Sequence
  Oligonucleotide for detection of SNP TSC0023701
raatcacaaaaat

SEQ ID NO: 95165 - DNA, 13 bp, Artificial Sequence
  Oligonucleotide for detection of SNP TSC0023701
atttttatgatty

SEQ ID NO: 95166 - DNA, 13 bp, Artificial Sequence
  Oligonucleotide for detection of SNP TSC0023701
raatcataaaaat

SEQ ID NO: 95167 - DNA, 13 bp, Artificial Sequence
  Oligonucleotide for detection of SNP TSC0023701
attttcgtgatty

SEQ ID NO: 95168 - DNA, 13 bp, Artificial Sequence
  Oligonucleotide for detection of SNP TSC0023701
raatcacgaaaat

SEQ ID NO: 95169 - DNA, 13 bp, Artificial Sequence
  Oligonucleotide for detection of SNP TSC0023702
aataattagatgt

SEQ ID NO: 95170 - DNA, 13 bp, Artificial Sequence
  Oligonucleotide for detection of SNP TSC0023702
acatctaattatt

SEQ ID NO: 95171 - DNA, 13 bp, Artificial Sequence
  Oligonucleotide for detection of SNP TSC0023702
aataatgagatgt

SEQ ID NO: 95172 - DNA, 13 bp, Artificial Sequence
  Oligonucleotide for detection of SNP TSC0023702
acatctcattatt

SEQ ID NO: 95173 - DNA, 13 bp, Artificial Sequence
  Oligonucleotide for detection of SNP TSC0023702
atatttgattatt

SEQ ID NO: 95174 - DNA, 13 bp, Artificial Sequence
  Oligonucleotide for detection of SNP TSC0023702
aataatcaaatat

SEQ ID NO: 95175 - DNA, 13 bp, Artificial Sequence
  Oligonucleotide for detection of SNP TSC0023702
atattttattatt

SEQ ID NO: 95176 - DNA, 13 bp, Artificial Sequence
  Oligonucleotide for detection of SNP TSC0023702
aataataaaatat

SEQ ID NO: 95177 - DNA, 13 bp, Artificial Sequence
  Oligonucleotide for detection of SNP TSC0023706
tattgtataggtt

SEQ ID NO: 95178 - DNA, 13 bp, Artificial Sequence
  Oligonucleotide for detection of SNP TSC0023706
aacctatacaata

SEQ ID NO: 95179 - DNA, 13 bp, Artificial Sequence
  Oligonucleotide for detection of SNP TSC0023706
tattgtgtaggtt

SEQ ID NO: 95180 - DNA, 13 bp, Artificial Sequence
  Oligonucleotide for detection of SNP TSC0023706
aacctacacaata

SEQ ID NO: 95181 - DNA, 13 bp, Artificial Sequence
  Oligonucleotide for detection of SNP TSC0023706
tattgcgtaggtt

SEQ ID NO: 95182 - DNA, 13 bp, Artificial Sequence
  Oligonucleotide for detection of SNP TSC0023706
aacctacgcaata

SEQ ID NO: 95183 - DNA, 13 bp, Artificial Sequence
  Oligonucleotide for detection of SNP TSC0023706
agtttgtgtagta

SEQ ID NO: 95184 - DNA, 13 bp, Artificial Sequence
  Oligonucleotide for detection of SNP TSC0023706
tactacacaaact

SEQ ID NO: 95185 - DNA, 13 bp, Artificial Sequence
  Oligonucleotide for detection of SNP TSC0023706
agtttgcgtagta

SEQ ID NO: 95186 - DNA, 13 bp, Artificial Sequence
  Oligonucleotide for detection of SNP TSC0023706
tactacgcaaact

SEQ ID NO: 95187 - DNA, 13 bp, Artificial Sequence
  Oligonucleotide for detection of SNP TSC0023707
atgtgagtattay

SEQ ID NO: 95188 - DNA, 13 bp, Artificial Sequence
  Oligonucleotide for detection of SNP TSC0023707
rtaatactcacat

SEQ ID NO: 95189 - DNA, 13 bp, Artificial Sequence
  Oligonucleotide for detection of SNP TSC0023707
atgtgaatattay

SEQ ID NO: 95190 - DNA, 13 bp, Artificial Sequence
  Oligonucleotide for detection of SNP TSC0023707
rtaatattcacat

SEQ ID NO: 95191 - DNA, 13 bp, Artificial Sequence
  Oligonucleotide for detection of SNP TSC0023708
ttatagataagty

SEQ ID NO: 95192 - DNA, 13 bp, Artificial Sequence
  Oligonucleotide for detection of SNP TSC0023708
racttatctataa

SEQ ID NO: 95193 - DNA, 13 bp, Artificial Sequence
  Oligonucleotide for detection of SNP TSC0023708
ttatagttaagty

SEQ ID NO: 95194 - DNA, 13 bp, Artificial Sequence
  Oligonucleotide for detection of SNP TSC0023708
racttaactataa

SEQ ID NO: 95195 - DNA, 13 bp, Artificial Sequence
  Oligonucleotide for detection of SNP TSC0023708
gatttgtttgtag

SEQ ID NO: 95196 - DNA, 13 bp, Artificial Sequence
  Oligonucleotide for detection of SNP TSC0023708
ctacaaacaaatc

SEQ ID NO: 95197 - DNA, 13 bp, Artificial Sequence
  Oligonucleotide for detection of SNP TSC0023708
gatttgattgtag

SEQ ID NO: 95198 - DNA, 13 bp, Artificial Sequence
  Oligonucleotide for detection of SNP TSC0023708
ctacaatcaaatc

SEQ ID NO: 95199 - DNA, 13 bp, Artificial Sequence
  Oligonucleotide for detection of SNP TSC0023709
gaatggaggagtg

SEQ ID NO: 95200 - DNA, 13 bp, Artificial Sequence
  Oligonucleotide for detection of SNP TSC0023709
cactcctccattc

SEQ ID NO: 95201 - DNA, 13 bp, Artificial Sequence
  Oligonucleotide for detection of SNP TSC0023709
gaatggtggagtg

SEQ ID NO: 95202 - DNA, 13 bp, Artificial Sequence
  Oligonucleotide for detection of SNP TSC0023709
cactccaccattc

SEQ ID NO: 95203 - DNA, 13 bp, Artificial Sequence
  Oligonucleotide for detection of SNP TSC0023709
gaatggcggagtg

SEQ ID NO: 95204 - DNA, 13 bp, Artificial Sequence
  Oligonucleotide for detection of SNP TSC0023709
cactccgccattc

SEQ ID NO: 95205 - DNA, 13 bp, Artificial Sequence
  Oligonucleotide for detection of SNP TSC0023709
tatttttttatty

SEQ ID NO: 95206 - DNA, 13 bp, Artificial Sequence
  Oligonucleotide for detection of SNP TSC0023709
raataaaaaaata

SEQ ID NO: 95207 - DNA, 13 bp, Artificial Sequence
  Oligonucleotide for detection of SNP TSC0023709
tatttcgttatty

SEQ ID NO: 95208 - DNA, 13 bp, Artificial Sequence
  Oligonucleotide for detection of SNP TSC0023709
raataacgaaata

SEQ ID NO: 95209 - DNA, 13 bp, Artificial Sequence
  Oligonucleotide for detection of SNP TSC0023710
atttattgtaggt

SEQ ID NO: 95210 - DNA, 13 bp, Artificial Sequence
  Oligonucleotide for detection of SNP TSC0023710
acctacaataaat

SEQ ID NO: 95211 - DNA, 13 bp, Artificial Sequence
  Oligonucleotide for detection of SNP TSC0023710
atttatcgtaggt

SEQ ID NO: 95212 - DNA, 13 bp, Artificial Sequence
  Oligonucleotide for detection of SNP TSC0023710
acctacgataaat

SEQ ID NO: 95213 - DNA, 13 bp, Artificial Sequence
  Oligonucleotide for detection of SNP TSC0023710
atttgtgataggt

SEQ ID NO: 95214 - DNA, 13 bp, Artificial Sequence
  Oligonucleotide for detection of SNP TSC0023710
acctatcacaaat

SEQ ID NO: 95215 - DNA, 13 bp, Artificial Sequence
  Oligonucleotide for detection of SNP TSC0023710
atttgtaataggt

SEQ ID NO: 95216 - DNA, 13 bp, Artificial Sequence
  Oligonucleotide for detection of SNP TSC0023710
acctattacaaat

SEQ ID NO: 95217 - DNA, 13 bp, Artificial Sequence
  Oligonucleotide for detection of SNP TSC0023710
atttgcgataggt

SEQ ID NO: 95218 - DNA, 13 bp, Artificial Sequence
  Oligonucleotide for detection of SNP TSC0023710
acctatcgcaaat

SEQ ID NO: 95219 - DNA, 13 bp, Artificial Sequence
  Oligonucleotide for detection of SNP TSC0023711
tatatatgtgtgy

SEQ ID NO: 95220 - DNA, 13 bp, Artificial Sequence
  Oligonucleotide for detection of SNP TSC0023711
rcacacatatata

SEQ ID NO: 95221 - DNA, 13 bp, Artificial Sequence
  Oligonucleotide for detection of SNP TSC0023711
tatatacgtgtgy

SEQ ID NO: 95222 - DNA, 13 bp, Artificial Sequence
  Oligonucleotide for detection of SNP TSC0023711
rcacacgtatata

SEQ ID NO: 95223 - DNA, 13 bp, Artificial Sequence
  Oligonucleotide for detection of SNP TSC0023712
tggagagtagtaa

SEQ ID NO: 95224 - DNA, 13 bp, Artificial Sequence
  Oligonucleotide for detection of SNP TSC0023712
ttactactctcca

SEQ ID NO: 95225 - DNA, 13 bp, Artificial Sequence
  Oligonucleotide for detection of SNP TSC0023712
tggagattagtaa

SEQ ID NO: 95226 - DNA, 13 bp, Artificial Sequence
  Oligonucleotide for detection of SNP TSC0023712
ttactaatctcca

SEQ ID NO: 95227 - DNA, 13 bp, Artificial Sequence
  Oligonucleotide for detection of SNP TSC0023712
ttattgtttttta

SEQ ID NO: 95228 - DNA, 13 bp, Artificial Sequence
  Oligonucleotide for detection of SNP TSC0023712
taaaaaacaataa

SEQ ID NO: 95229 - DNA, 13 bp, Artificial Sequence
  Oligonucleotide for detection of SNP TSC0023712
ttattgattttta

SEQ ID NO: 95230 - DNA, 13 bp, Artificial Sequence
  Oligonucleotide for detection of SNP TSC0023712
taaaaatcaataa

SEQ ID NO: 95231 - DNA, 13 bp, Artificial Sequence
  Oligonucleotide for detection of SNP TSC0023713
tgggggattaggg

SEQ ID NO: 95232 - DNA, 13 bp, Artificial Sequence
  Oligonucleotide for detection of SNP TSC0023713
ccctaatccccca

SEQ ID NO: 95233 - DNA, 13 bp, Artificial Sequence
  Oligonucleotide for detection of SNP TSC0023713
tggggggttaggg

SEQ ID NO: 95234 - DNA, 13 bp, Artificial Sequence
  Oligonucleotide for detection of SNP TSC0023713
ccctaacccccca

SEQ ID NO: 95235 - DNA, 13 bp, Artificial Sequence
  Oligonucleotide for detection of SNP TSC0023714
tatttagtggtta

SEQ ID NO: 95236 - DNA, 13 bp, Artificial Sequence
  Oligonucleotide for detection of SNP TSC0023714
taaccactaaata

SEQ ID NO: 95237 - DNA, 13 bp, Artificial Sequence
  Oligonucleotide for detection of SNP TSC0023714
tatttattggtta

SEQ ID NO: 95238 - DNA, 13 bp, Artificial Sequence
  Oligonucleotide for detection of SNP TSC0023714
taaccaataaata

SEQ ID NO: 95239 - DNA, 13 bp, Artificial Sequence
  Oligonucleotide for detection of SNP TSC0023714
tggttattgggtg

SEQ ID NO: 95240 - DNA, 13 bp, Artificial Sequence
  Oligonucleotide for detection of SNP TSC0023714
cacccaataacca

SEQ ID NO: 95241 - DNA, 13 bp, Artificial Sequence
  Oligonucleotide for detection of SNP TSC0023714
tggttaatgggtg

SEQ ID NO: 95242 - DNA, 13 bp, Artificial Sequence
  Oligonucleotide for detection of SNP TSC0023714
cacccattaacca

SEQ ID NO: 95243 - DNA, 13 bp, Artificial Sequence
  Oligonucleotide for detection of SNP TSC0023715
ttattatatttaa

SEQ ID NO: 95244 - DNA, 13 bp, Artificial Sequence
  Oligonucleotide for detection of SNP TSC0023715
ttaaatataataa

SEQ ID NO: 95245 - DNA, 13 bp, Artificial Sequence
  Oligonucleotide for detection of SNP TSC0023715
ttattaaatttaa

SEQ ID NO: 95246 - DNA, 13 bp, Artificial Sequence
  Oligonucleotide for detection of SNP TSC0023715
ttaaatttaataa

SEQ ID NO: 95247 - DNA, 13 bp, Artificial Sequence
  Oligonucleotide for detection of SNP TSC0023716
aataaatgagaaa

SEQ ID NO: 95248 - DNA, 13 bp, Artificial Sequence
  Oligonucleotide for detection of SNP TSC0023716
tttctcatttatt

SEQ ID NO: 95249 - DNA, 13 bp, Artificial Sequence
  Oligonucleotide for detection of SNP TSC0023716
aataaacgagaaa

SEQ ID NO: 95250 - DNA, 13 bp, Artificial Sequence
  Oligonucleotide for detection of SNP TSC0023716
tttctcgtttatt

SEQ ID NO: 95251 - DNA, 13 bp, Artificial Sequence
  Oligonucleotide for detection of SNP TSC0023716
tttttcgtttatt

SEQ ID NO: 95252 - DNA, 13 bp, Artificial Sequence
  Oligonucleotide for detection of SNP TSC0023716
aataaacgaaaaa

SEQ ID NO: 95253 - DNA, 13 bp, Artificial Sequence
  Oligonucleotide for detection of SNP TSC0023718
aataaggaagaag

SEQ ID NO: 95254 - DNA, 13 bp, Artificial Sequence
  Oligonucleotide for detection of SNP TSC0023718
cttcttccttatt

SEQ ID NO: 95255 - DNA, 13 bp, Artificial Sequence
  Oligonucleotide for detection of SNP TSC0023718
aataagtaagaag

SEQ ID NO: 95256 - DNA, 13 bp, Artificial Sequence
  Oligonucleotide for detection of SNP TSC0023718
cttcttacttatt

SEQ ID NO: 95257 - DNA, 13 bp, Artificial Sequence
  Oligonucleotide for detection of SNP TSC0023719
gtattatagggty

SEQ ID NO: 95258 - DNA, 13 bp, Artificial Sequence
  Oligonucleotide for detection of SNP TSC0023719
raccctataatac

SEQ ID NO: 95259 - DNA, 13 bp, Artificial Sequence
  Oligonucleotide for detection of SNP TSC0023719
gtattagagggty

SEQ ID NO: 95260 - DNA, 13 bp, Artificial Sequence
  Oligonucleotide for detection of SNP TSC0023719
raccctctaatac

SEQ ID NO: 95261 - DNA, 13 bp, Artificial Sequence
  Oligonucleotide for detection of SNP TSC0023719
ggttttgtgatgy

SEQ ID NO: 95262 - DNA, 13 bp, Artificial Sequence
  Oligonucleotide for detection of SNP TSC0023719
rcatcacaaaacc

SEQ ID NO: 95263 - DNA, 13 bp, Artificial Sequence
  Oligonucleotide for detection of SNP TSC0023719
ggttttttgatgy

SEQ ID NO: 95264 - DNA, 13 bp, Artificial Sequence
  Oligonucleotide for detection of SNP TSC0023719
rcatcaaaaaacc

SEQ ID NO: 95265 - DNA, 13 bp, Artificial Sequence
  Oligonucleotide for detection of SNP TSC0023720
taaaaataataaa

SEQ ID NO: 95266 - DNA, 13 bp, Artificial Sequence
  Oligonucleotide for detection of SNP TSC0023720
tttattattttta

SEQ ID NO: 95267 - DNA, 13 bp, Artificial Sequence
  Oligonucleotide for detection of SNP TSC0023721
tatgttttgtgga

SEQ ID NO: 95268 - DNA, 13 bp, Artificial Sequence
  Oligonucleotide for detection of SNP TSC0023721
tccacaaaacata

SEQ ID NO: 95269 - DNA, 13 bp, Artificial Sequence
  Oligonucleotide for detection of SNP TSC0023721
tatgttatgtgga

SEQ ID NO: 95270 - DNA, 13 bp, Artificial Sequence
  Oligonucleotide for detection of SNP TSC0023721
tccacataacata

SEQ ID NO: 95271 - DNA, 13 bp, Artificial Sequence
  Oligonucleotide for detection of SNP TSC0023724
gtttttatttgty

SEQ ID NO: 95272 - DNA, 13 bp, Artificial Sequence
  Oligonucleotide for detection of SNP TSC0023724
racaaataaaaac

SEQ ID NO: 95273 - DNA, 13 bp, Artificial Sequence
  Oligonucleotide for detection of SNP TSC0023724
gtttttttttgty

SEQ ID NO: 95274 - DNA, 13 bp, Artificial Sequence
  Oligonucleotide for detection of SNP TSC0023724
racaaaaaaaaac

SEQ ID NO: 95275 - DNA, 13 bp, Artificial Sequence
  Oligonucleotide for detection of SNP TSC0023724
gtttttattcgty

SEQ ID NO: 95276 - DNA, 13 bp, Artificial Sequence
  Oligonucleotide for detection of SNP TSC0023724
racgaataaaaac

SEQ ID NO: 95277 - DNA, 13 bp, Artificial Sequence
  Oligonucleotide for detection of SNP TSC0023724
gttttttttcgty

SEQ ID NO: 95278 - DNA, 13 bp, Artificial Sequence
  Oligonucleotide for detection of SNP TSC0023724
racgaaaaaaaac

SEQ ID NO: 95279 - DNA, 13 bp, Artificial Sequence
  Oligonucleotide for detection of SNP TSC0023724
ggtgggtgggggy

SEQ ID NO: 95280 - DNA, 13 bp, Artificial Sequence
  Oligonucleotide for detection of SNP TSC0023724
rcccccacccacc

SEQ ID NO: 95281 - DNA, 13 bp, Artificial Sequence
  Oligonucleotide for detection of SNP TSC0023724
ggtgggagggggy

SEQ ID NO: 95282 - DNA, 13 bp, Artificial Sequence
  Oligonucleotide for detection of SNP TSC0023724
rccccctcccacc

SEQ ID NO: 95283 - DNA, 13 bp, Artificial Sequence
  Oligonucleotide for detection of SNP TSC0023724
ggcgggtgggggy

SEQ ID NO: 95284 - DNA, 13 bp, Artificial Sequence
  Oligonucleotide for detection of SNP TSC0023724
rcccccacccgcc

SEQ ID NO: 95285 - DNA, 13 bp, Artificial Sequence
  Oligonucleotide for detection of SNP TSC0023724
ggcgggagggggy

SEQ ID NO: 95286 - DNA, 13 bp, Artificial Sequence
  Oligonucleotide for detection of SNP TSC0023724
rccccctcccgcc

SEQ ID NO: 95287 - DNA, 13 bp, Artificial Sequence
  Oligonucleotide for detection of SNP TSC0023725
tatgtggttttat

SEQ ID NO: 95288 - DNA, 13 bp, Artificial Sequence
  Oligonucleotide for detection of SNP TSC0023725
ataaaaccacata

SEQ ID NO: 95289 - DNA, 13 bp, Artificial Sequence
  Oligonucleotide for detection of SNP TSC0023725
tatgtgattttat

SEQ ID NO: 95290 - DNA, 13 bp, Artificial Sequence
  Oligonucleotide for detection of SNP TSC0023725
ataaaatcacata

SEQ ID NO: 95291 - DNA, 13 bp, Artificial Sequence
  Oligonucleotide for detection of SNP TSC0023725
tacgtggttttat

SEQ ID NO: 95292 - DNA, 13 bp, Artificial Sequence
  Oligonucleotide for detection of SNP TSC0023725
ataaaaccacgta

SEQ ID NO: 95293 - DNA, 13 bp, Artificial Sequence
  Oligonucleotide for detection of SNP TSC0023725
tacgtgattttat

SEQ ID NO: 95294 - DNA, 13 bp, Artificial Sequence
  Oligonucleotide for detection of SNP TSC0023725
ataaaatcacgta

SEQ ID NO: 95295 - DNA, 13 bp, Artificial Sequence
  Oligonucleotide for detection of SNP TSC0023726
agttttagggtta

SEQ ID NO: 95296 - DNA, 13 bp, Artificial Sequence
  Oligonucleotide for detection of SNP TSC0023726
taaccctaaaact

SEQ ID NO: 95297 - DNA, 13 bp, Artificial Sequence
  Oligonucleotide for detection of SNP TSC0023726
agttttggggtta

SEQ ID NO: 95298 - DNA, 13 bp, Artificial Sequence
  Oligonucleotide for detection of SNP TSC0023726
taaccccaaaact

SEQ ID NO: 95299 - DNA, 13 bp, Artificial Sequence
  Oligonucleotide for detection of SNP TSC0023726
agtttcggggtta

SEQ ID NO: 95300 - DNA, 13 bp, Artificial Sequence
  Oligonucleotide for detection of SNP TSC0023726
taaccccgaaact

SEQ ID NO: 95301 - DNA, 13 bp, Artificial Sequence
  Oligonucleotide for detection of SNP TSC0023726
tggttttggagtt

SEQ ID NO: 95302 - DNA, 13 bp, Artificial Sequence
  Oligonucleotide for detection of SNP TSC0023726
aactccaaaacca

SEQ ID NO: 95303 - DNA, 13 bp, Artificial Sequence
  Oligonucleotide for detection of SNP TSC0023726
tggtttcggagtt

SEQ ID NO: 95304 - DNA, 13 bp, Artificial Sequence
  Oligonucleotide for detection of SNP TSC0023726
aactccgaaacca

SEQ ID NO: 95305 - DNA, 13 bp, Artificial Sequence
  Oligonucleotide for detection of SNP TSC0023727
tttgattttaaga

SEQ ID NO: 95306 - DNA, 13 bp, Artificial Sequence
  Oligonucleotide for detection of SNP TSC0023727
tcttaaaatcaaa

SEQ ID NO: 95307 - DNA, 13 bp, Artificial Sequence
  Oligonucleotide for detection of SNP TSC0023727
tttgatgttaaga

SEQ ID NO: 95308 - DNA, 13 bp, Artificial Sequence
  Oligonucleotide for detection of SNP TSC0023727
tcttaacatcaaa

SEQ ID NO: 95309 - DNA, 13 bp, Artificial Sequence
  Oligonucleotide for detection of SNP TSC0023727
ttttgggattagg

SEQ ID NO: 95310 - DNA, 13 bp, Artificial Sequence
  Oligonucleotide for detection of SNP TSC0023727
cctaatcccaaaa

SEQ ID NO: 95311 - DNA, 13 bp, Artificial Sequence
  Oligonucleotide for detection of SNP TSC0023727
ttttggtattagg

SEQ ID NO: 95312 - DNA, 13 bp, Artificial Sequence
  Oligonucleotide for detection of SNP TSC0023727
cctaataccaaaa

SEQ ID NO: 95313 - DNA, 13 bp, Artificial Sequence
  Oligonucleotide for detection of SNP TSC0023728
gggtttatagggt

SEQ ID NO: 95314 - DNA, 13 bp, Artificial Sequence
  Oligonucleotide for detection of SNP TSC0023728
accctataaaccc

SEQ ID NO: 95315 - DNA, 13 bp, Artificial Sequence
  Oligonucleotide for detection of SNP TSC0023728
gggtttgtagggt

SEQ ID NO: 95316 - DNA, 13 bp, Artificial Sequence
  Oligonucleotide for detection of SNP TSC0023728
accctacaaaccc

SEQ ID NO: 95317 - DNA, 13 bp, Artificial Sequence
  Oligonucleotide for detection of SNP TSC0023728
gggttcgtagggt

SEQ ID NO: 95318 - DNA, 13 bp, Artificial Sequence
  Oligonucleotide for detection of SNP TSC0023728
accctacgaaccc

SEQ ID NO: 95319 - DNA, 13 bp, Artificial Sequence
  Oligonucleotide for detection of SNP TSC0023728
attttgtggatty

SEQ ID NO: 95320 - DNA, 13 bp, Artificial Sequence
  Oligonucleotide for detection of SNP TSC0023728
raatccacaaaat

SEQ ID NO: 95321 - DNA, 13 bp, Artificial Sequence
  Oligonucleotide for detection of SNP TSC0023728
attttgcggatty

SEQ ID NO: 95322 - DNA, 13 bp, Artificial Sequence
  Oligonucleotide for detection of SNP TSC0023728
raatccgcaaaat

SEQ ID NO: 95323 - DNA, 13 bp, Artificial Sequence
  Oligonucleotide for detection of SNP TSC0023732
tttagtatttatt

SEQ ID NO: 95324 - DNA, 13 bp, Artificial Sequence
  Oligonucleotide for detection of SNP TSC0023732
aataaatactaaa

SEQ ID NO: 95325 - DNA, 13 bp, Artificial Sequence
  Oligonucleotide for detection of SNP TSC0023732
tttagtgtttatt

SEQ ID NO: 95326 - DNA, 13 bp, Artificial Sequence
  Oligonucleotide for detection of SNP TSC0023732
aataaacactaaa

SEQ ID NO: 95327 - DNA, 13 bp, Artificial Sequence
  Oligonucleotide for detection of SNP TSC0023732
tttagcgtttatt

SEQ ID NO: 95328 - DNA, 13 bp, Artificial Sequence
  Oligonucleotide for detection of SNP TSC0023732
aataaacgctaaa

SEQ ID NO: 95329 - DNA, 13 bp, Artificial Sequence
  Oligonucleotide for detection of SNP TSC0023732
agtaggtgttaga

SEQ ID NO: 95330 - DNA, 13 bp, Artificial Sequence
  Oligonucleotide for detection of SNP TSC0023732
tctaacacctact

SEQ ID NO: 95331 - DNA, 13 bp, Artificial Sequence
  Oligonucleotide for detection of SNP TSC0023732
agtaggcgttaga

SEQ ID NO: 95332 - DNA, 13 bp, Artificial Sequence
  Oligonucleotide for detection of SNP TSC0023732
tctaacgcctact

SEQ ID NO: 95333 - DNA, 13 bp, Artificial Sequence
  Oligonucleotide for detection of SNP TSC0023734
atagggaagttgg

SEQ ID NO: 95334 - DNA, 13 bp, Artificial Sequence
  Oligonucleotide for detection of SNP TSC0023734
ccaacttccctat

SEQ ID NO: 95335 - DNA, 13 bp, Artificial Sequence
  Oligonucleotide for detection of SNP TSC0023734
ataggggagttgg

SEQ ID NO: 95336 - DNA, 13 bp, Artificial Sequence
  Oligonucleotide for detection of SNP TSC0023734
ccaactcccctat

SEQ ID NO: 95337 - DNA, 13 bp, Artificial Sequence
  Oligonucleotide for detection of SNP TSC0023735
tgtgttaaggttg

SEQ ID NO: 95338 - DNA, 13 bp, Artificial Sequence
  Oligonucleotide for detection of SNP TSC0023735
caaccttaacaca

SEQ ID NO: 95339 - DNA, 13 bp, Artificial Sequence
  Oligonucleotide for detection of SNP TSC0023735
tgtgtttaggttg

SEQ ID NO: 95340 - DNA, 13 bp, Artificial Sequence
  Oligonucleotide for detection of SNP TSC0023735
caacctaaacaca

SEQ ID NO: 95341 - DNA, 13 bp, Artificial Sequence
  Oligonucleotide for detection of SNP TSC0023735
tagttttggtata

SEQ ID NO: 95342 - DNA, 13 bp, Artificial Sequence
  Oligonucleotide for detection of SNP TSC0023735
tataccaaaacta

SEQ ID NO: 95343 - DNA, 13 bp, Artificial Sequence
  Oligonucleotide for detection of SNP TSC0023735
tagtttgggtata

SEQ ID NO: 95344 - DNA, 13 bp, Artificial Sequence
  Oligonucleotide for detection of SNP TSC0023735
tatacccaaacta

SEQ ID NO: 95345 - DNA, 13 bp, Artificial Sequence
  Oligonucleotide for detection of SNP TSC0023736
tttttgtgaatgg

SEQ ID NO: 95346 - DNA, 13 bp, Artificial Sequence
  Oligonucleotide for detection of SNP TSC0023736
ccattcacaaaaa

SEQ ID NO: 95347 - DNA, 13 bp, Artificial Sequence
  Oligonucleotide for detection of SNP TSC0023736
tttttgcgaatgg

SEQ ID NO: 95348 - DNA, 13 bp, Artificial Sequence
  Oligonucleotide for detection of SNP TSC0023736
ccattcgcaaaaa

SEQ ID NO: 95349 - DNA, 13 bp, Artificial Sequence
  Oligonucleotide for detection of SNP TSC0023736
ttatttgtaagag

SEQ ID NO: 95350 - DNA, 13 bp, Artificial Sequence
  Oligonucleotide for detection of SNP TSC0023736
ctcttacaaataa

SEQ ID NO: 95351 - DNA, 13 bp, Artificial Sequence
  Oligonucleotide for detection of SNP TSC0023736
ttatttataagag

SEQ ID NO: 95352 - DNA, 13 bp, Artificial Sequence
  Oligonucleotide for detection of SNP TSC0023736
ctcttataaataa

SEQ ID NO: 95353 - DNA, 13 bp, Artificial Sequence
  Oligonucleotide for detection of SNP TSC0023736
ttattcgtaagag

SEQ ID NO: 95354 - DNA, 13 bp, Artificial Sequence
  Oligonucleotide for detection of SNP TSC0023736
ctcttacgaataa

SEQ ID NO: 95355 - DNA, 13 bp, Artificial Sequence
  Oligonucleotide for detection of SNP TSC0023737
ttataagggaaga

SEQ ID NO: 95356 - DNA, 13 bp, Artificial Sequence
  Oligonucleotide for detection of SNP TSC0023737
tcttcccttataa

SEQ ID NO: 95357 - DNA, 13 bp, Artificial Sequence
  Oligonucleotide for detection of SNP TSC0023737
ttataatggaaga

SEQ ID NO: 95358 - DNA, 13 bp, Artificial Sequence
  Oligonucleotide for detection of SNP TSC0023737
tcttccattataa

SEQ ID NO: 95359 - DNA, 13 bp, Artificial Sequence
  Oligonucleotide for detection of SNP TSC0023740
gttggagtataty

SEQ ID NO: 95360 - DNA, 13 bp, Artificial Sequence
  Oligonucleotide for detection of SNP TSC0023740
ratatactccaac

SEQ ID NO: 95361 - DNA, 13 bp, Artificial Sequence
  Oligonucleotide for detection of SNP TSC0023740
gttggaatataty

SEQ ID NO: 95362 - DNA, 13 bp, Artificial Sequence
  Oligonucleotide for detection of SNP TSC0023740
ratatattccaac

SEQ ID NO: 95363 - DNA, 13 bp, Artificial Sequence
  Oligonucleotide for detection of SNP TSC0023740
gtcggagtataty

SEQ ID NO: 95364 - DNA, 13 bp, Artificial Sequence
  Oligonucleotide for detection of SNP TSC0023740
ratatactccgac

SEQ ID NO: 95365 - DNA, 13 bp, Artificial Sequence
  Oligonucleotide for detection of SNP TSC0023740
gtcggaatataty

SEQ ID NO: 95366 - DNA, 13 bp, Artificial Sequence
  Oligonucleotide for detection of SNP TSC0023740
ratatattccgac

SEQ ID NO: 95367 - DNA, 13 bp, Artificial Sequence
  Oligonucleotide for detection of SNP TSC0023741
attataggatgta

SEQ ID NO: 95368 - DNA, 13 bp, Artificial Sequence
  Oligonucleotide for detection of SNP TSC0023741
tacatcctataat

SEQ ID NO: 95369 - DNA, 13 bp, Artificial Sequence
  Oligonucleotide for detection of SNP TSC0023741
attatatgatgta

SEQ ID NO: 95370 - DNA, 13 bp, Artificial Sequence
  Oligonucleotide for detection of SNP TSC0023741
tacatcatataat

SEQ ID NO: 95371 - DNA, 13 bp, Artificial Sequence
  Oligonucleotide for detection of SNP TSC0023741
attatacgatgta

SEQ ID NO: 95372 - DNA, 13 bp, Artificial Sequence
  Oligonucleotide for detection of SNP TSC0023741
tacatcgtataat

SEQ ID NO: 95373 - DNA, 13 bp, Artificial Sequence
  Oligonucleotide for detection of SNP TSC0023742
ttggatggattty

SEQ ID NO: 95374 - DNA, 13 bp, Artificial Sequence
  Oligonucleotide for detection of SNP TSC0023742
raaatccatccaa

SEQ ID NO: 95375 - DNA, 13 bp, Artificial Sequence
  Oligonucleotide for detection of SNP TSC0023742
ttggattgattty

SEQ ID NO: 95376 - DNA, 13 bp, Artificial Sequence
  Oligonucleotide for detection of SNP TSC0023742
raaatcaatccaa

SEQ ID NO: 95377 - DNA, 13 bp, Artificial Sequence
  Oligonucleotide for detection of SNP TSC0023742
ggagtttatttaa

SEQ ID NO: 95378 - DNA, 13 bp, Artificial Sequence
  Oligonucleotide for detection of SNP TSC0023742
ttaaataaactcc

SEQ ID NO: 95379 - DNA, 13 bp, Artificial Sequence
  Oligonucleotide for detection of SNP TSC0023742
ggagttaatttaa

SEQ ID NO: 95380 - DNA, 13 bp, Artificial Sequence
  Oligonucleotide for detection of SNP TSC0023742
ttaaattaactcc

SEQ ID NO: 95381 - DNA, 13 bp, Artificial Sequence
  Oligonucleotide for detection of SNP TSC0023746
gttggaagaaagt

SEQ ID NO: 95382 - DNA, 13 bp, Artificial Sequence
  Oligonucleotide for detection of SNP TSC0023746
actttcttccaac

SEQ ID NO: 95383 - DNA, 13 bp, Artificial Sequence
  Oligonucleotide for detection of SNP TSC0023746
gttggaggaaagt

SEQ ID NO: 95384 - DNA, 13 bp, Artificial Sequence
  Oligonucleotide for detection of SNP TSC0023746
actttcctccaac

SEQ ID NO: 95385 - DNA, 13 bp, Artificial Sequence
  Oligonucleotide for detection of SNP TSC0023750
aattagggttaga

SEQ ID NO: 95386 - DNA, 13 bp, Artificial Sequence
  Oligonucleotide for detection of SNP TSC0023750
tctaaccctaatt

SEQ ID NO: 95387 - DNA, 13 bp, Artificial Sequence
  Oligonucleotide for detection of SNP TSC0023750
aattagagttaga

SEQ ID NO: 95388 - DNA, 13 bp, Artificial Sequence
  Oligonucleotide for detection of SNP TSC0023750
tctaactctaatt

SEQ ID NO: 95389 - DNA, 13 bp, Artificial Sequence
  Oligonucleotide for detection of SNP TSC0023752
ttatgagttgatt

SEQ ID NO: 95390 - DNA, 13 bp, Artificial Sequence
  Oligonucleotide for detection of SNP TSC0023752
aatcaactcataa

SEQ ID NO: 95391 - DNA, 13 bp, Artificial Sequence
  Oligonucleotide for detection of SNP TSC0023752
ttatgaattgatt

SEQ ID NO: 95392 - DNA, 13 bp, Artificial Sequence
  Oligonucleotide for detection of SNP TSC0023752
aatcaattcataa

SEQ ID NO: 95393 - DNA, 13 bp, Artificial Sequence
  Oligonucleotide for detection of SNP TSC0023752
ttatgagtcgatt

SEQ ID NO: 95394 - DNA, 13 bp, Artificial Sequence
  Oligonucleotide for detection of SNP TSC0023752
aatcgactcataa

SEQ ID NO: 95395 - DNA, 13 bp, Artificial Sequence
  Oligonucleotide for detection of SNP TSC0023752
ttatgaatcgatt

SEQ ID NO: 95396 - DNA, 13 bp, Artificial Sequence
  Oligonucleotide for detection of SNP TSC0023752
aatcgattcataa

SEQ ID NO: 95397 - DNA, 13 bp, Artificial Sequence
  Oligonucleotide for detection of SNP TSC0023753
agtggtaaggaaa

SEQ ID NO: 95398 - DNA, 13 bp, Artificial Sequence
  Oligonucleotide for detection of SNP TSC0023753
tttccttaccact

SEQ ID NO: 95399 - DNA, 13 bp, Artificial Sequence
  Oligonucleotide for detection of SNP TSC0023753
agtggtgaggaaa

SEQ ID NO: 95400 - DNA, 13 bp, Artificial Sequence
  Oligonucleotide for detection of SNP TSC0023753
tttcctcaccact

SEQ ID NO: 95401 - DNA, 13 bp, Artificial Sequence
  Oligonucleotide for detection of SNP TSC0023753
agtggcgaggaaa

SEQ ID NO: 95402 - DNA, 13 bp, Artificial Sequence
  Oligonucleotide for detection of SNP TSC0023753
tttcctcgccact

SEQ ID NO: 95403 - DNA, 13 bp, Artificial Sequence
  Oligonucleotide for detection of SNP TSC0023753
tttttttgttatt

SEQ ID NO: 95404 - DNA, 13 bp, Artificial Sequence
  Oligonucleotide for detection of SNP TSC0023753
aataacaaaaaaa

SEQ ID NO: 95405 - DNA, 13 bp, Artificial Sequence
  Oligonucleotide for detection of SNP TSC0023753
ttttttcgttatt

SEQ ID NO: 95406 - DNA, 13 bp, Artificial Sequence
  Oligonucleotide for detection of SNP TSC0023753
aataacgaaaaaa

SEQ ID NO: 95407 - DNA, 13 bp, Artificial Sequence
  Oligonucleotide for detection of SNP TSC0023754
tttaggggggttt

SEQ ID NO: 95408 - DNA, 13 bp, Artificial Sequence
  Oligonucleotide for detection of SNP TSC0023754
aaacccccctaaa

SEQ ID NO: 95409 - DNA, 13 bp, Artificial Sequence
  Oligonucleotide for detection of SNP TSC0023754
tttaggagggttt

SEQ ID NO: 95410 - DNA, 13 bp, Artificial Sequence
  Oligonucleotide for detection of SNP TSC0023754
aaaccctcctaaa

SEQ ID NO: 95411 - DNA, 13 bp, Artificial Sequence
  Oligonucleotide for detection of SNP TSC0023755
taggtgagtaagy

SEQ ID NO: 95412 - DNA, 13 bp, Artificial Sequence
  Oligonucleotide for detection of SNP TSC0023755
rcttactcaccta

SEQ ID NO: 95413 - DNA, 13 bp, Artificial Sequence
  Oligonucleotide for detection of SNP TSC0023755
taggtgtgtaagy

SEQ ID NO: 95414 - DNA, 13 bp, Artificial Sequence
  Oligonucleotide for detection of SNP TSC0023755
rcttacacaccta

SEQ ID NO: 95415 - DNA, 13 bp, Artificial Sequence
  Oligonucleotide for detection of SNP TSC0023755
taggcgagtaagy

SEQ ID NO: 95416 - DNA, 13 bp, Artificial Sequence
  Oligonucleotide for detection of SNP TSC0023755
rcttactcgccta

SEQ ID NO: 95417 - DNA, 13 bp, Artificial Sequence
  Oligonucleotide for detection of SNP TSC0023755
taggcgtgtaagy

SEQ ID NO: 95418 - DNA, 13 bp, Artificial Sequence
  Oligonucleotide for detection of SNP TSC0023755
rcttacacgccta

SEQ ID NO: 95419 - DNA, 13 bp, Artificial Sequence
  Oligonucleotide for detection of SNP TSC0023755
taggtgcgtaagy

SEQ ID NO: 95420 - DNA, 13 bp, Artificial Sequence
  Oligonucleotide for detection of SNP TSC0023755
rcttacgcaccta

SEQ ID NO: 95421 - DNA, 13 bp, Artificial Sequence
  Oligonucleotide for detection of SNP TSC0023755
taggcgcgtaagy

SEQ ID NO: 95422 - DNA, 13 bp, Artificial Sequence
  Oligonucleotide for detection of SNP TSC0023755
rcttacgcgccta

SEQ ID NO: 95423 - DNA, 13 bp, Artificial Sequence
  Oligonucleotide for detection of SNP TSC0023755
gtttgttcgtttg

SEQ ID NO: 95424 - DNA, 13 bp, Artificial Sequence
  Oligonucleotide for detection of SNP TSC0023755
caaacgaacaaac

SEQ ID NO: 95425 - DNA, 13 bp, Artificial Sequence
  Oligonucleotide for detection of SNP TSC0023755
gtttgtgcgtttg

SEQ ID NO: 95426 - DNA, 13 bp, Artificial Sequence
  Oligonucleotide for detection of SNP TSC0023755
caaacgcacaaac

SEQ ID NO: 95427 - DNA, 13 bp, Artificial Sequence
  Oligonucleotide for detection of SNP TSC0023755
gtttgcgcgtttg

SEQ ID NO: 95428 - DNA, 13 bp, Artificial Sequence
  Oligonucleotide for detection of SNP TSC0023755
caaacgcgcaaac

SEQ ID NO: 95429 - DNA, 13 bp, Artificial Sequence
  Oligonucleotide for detection of SNP TSC0023756
ttgttttgggtta

SEQ ID NO: 95430 - DNA, 13 bp, Artificial Sequence
  Oligonucleotide for detection of SNP TSC0023756
taacccaaaacaa

SEQ ID NO: 95431 - DNA, 13 bp, Artificial Sequence
  Oligonucleotide for detection of SNP TSC0023756
tcgttttgggtta

SEQ ID NO: 95432 - DNA, 13 bp, Artificial Sequence
  Oligonucleotide for detection of SNP TSC0023756
taacccaaaacga

SEQ ID NO: 95433 - DNA, 13 bp, Artificial Sequence
  Oligonucleotide for detection of SNP TSC0023756
ttgtttcgggtta

SEQ ID NO: 95434 - DNA, 13 bp, Artificial Sequence
  Oligonucleotide for detection of SNP TSC0023756
taacccgaaacaa

SEQ ID NO: 95435 - DNA, 13 bp, Artificial Sequence
  Oligonucleotide for detection of SNP TSC0023756
tcgtttcgggtta

SEQ ID NO: 95436 - DNA, 13 bp, Artificial Sequence
  Oligonucleotide for detection of SNP TSC0023756
taacccgaaacga

SEQ ID NO: 95437 - DNA, 13 bp, Artificial Sequence
  Oligonucleotide for detection of SNP TSC0023756
tgatttggggtga

SEQ ID NO: 95438 - DNA, 13 bp, Artificial Sequence
  Oligonucleotide for detection of SNP TSC0023756
tcaccccaaatca

SEQ ID NO: 95439 - DNA, 13 bp, Artificial Sequence
  Oligonucleotide for detection of SNP TSC0023756
tgatttagggtga

SEQ ID NO: 95440 - DNA, 13 bp, Artificial Sequence
  Oligonucleotide for detection of SNP TSC0023756
tcaccctaaatca

SEQ ID NO: 95441 - DNA, 13 bp, Artificial Sequence
  Oligonucleotide for detection of SNP TSC0023756
tgattcggggtga

SEQ ID NO: 95442 - DNA, 13 bp, Artificial Sequence
  Oligonucleotide for detection of SNP TSC0023756
tcaccccgaatca

SEQ ID NO: 95443 - DNA, 13 bp, Artificial Sequence
  Oligonucleotide for detection of SNP TSC0023756
tgatttagggcga

SEQ ID NO: 95444 - DNA, 13 bp, Artificial Sequence
  Oligonucleotide for detection of SNP TSC0023756
tcgccctaaatca

SEQ ID NO: 95445 - DNA, 13 bp, Artificial Sequence
  Oligonucleotide for detection of SNP TSC0023756
tgatttggggcga

SEQ ID NO: 95446 - DNA, 13 bp, Artificial Sequence
  Oligonucleotide for detection of SNP TSC0023756
tcgccccaaatca

SEQ ID NO: 95447 - DNA, 13 bp, Artificial Sequence
  Oligonucleotide for detection of SNP TSC0023756
tgattcggggcga

SEQ ID NO: 95448 - DNA, 13 bp, Artificial Sequence
  Oligonucleotide for detection of SNP TSC0023756
tcgccccgaatca

SEQ ID NO: 95449 - DNA, 13 bp, Artificial Sequence
  Oligonucleotide for detection of SNP TSC0023757
tatttgtgagttg

SEQ ID NO: 95450 - DNA, 13 bp, Artificial Sequence
  Oligonucleotide for detection of SNP TSC0023757
caactcacaaata

SEQ ID NO: 95451 - DNA, 13 bp, Artificial Sequence
  Oligonucleotide for detection of SNP TSC0023757
tatttgcgagttg

SEQ ID NO: 95452 - DNA, 13 bp, Artificial Sequence
  Oligonucleotide for detection of SNP TSC0023757
caactcgcaaata

SEQ ID NO: 95453 - DNA, 13 bp, Artificial Sequence
  Oligonucleotide for detection of SNP TSC0023757
tagtttgtaggtg

SEQ ID NO: 95454 - DNA, 13 bp, Artificial Sequence
  Oligonucleotide for detection of SNP TSC0023757
cacctacaaacta

SEQ ID NO: 95455 - DNA, 13 bp, Artificial Sequence
  Oligonucleotide for detection of SNP TSC0023757
tagtttataggtg

SEQ ID NO: 95456 - DNA, 13 bp, Artificial Sequence
  Oligonucleotide for detection of SNP TSC0023757
cacctataaacta

SEQ ID NO: 95457 - DNA, 13 bp, Artificial Sequence
  Oligonucleotide for detection of SNP TSC0023757
tagttcgtaggtg

SEQ ID NO: 95458 - DNA, 13 bp, Artificial Sequence
  Oligonucleotide for detection of SNP TSC0023757
cacctacgaacta

SEQ ID NO: 95459 - DNA, 13 bp, Artificial Sequence
  Oligonucleotide for detection of SNP TSC0023760
aggagtatttgaa

SEQ ID NO: 95460 - DNA, 13 bp, Artificial Sequence
  Oligonucleotide for detection of SNP TSC0023760
ttcaaatactcct

SEQ ID NO: 95461 - DNA, 13 bp, Artificial Sequence
  Oligonucleotide for detection of SNP TSC0023760
aggagtgtttgaa

SEQ ID NO: 95462 - DNA, 13 bp, Artificial Sequence
  Oligonucleotide for detection of SNP TSC0023760
ttcaaacactcct

SEQ ID NO: 95463 - DNA, 13 bp, Artificial Sequence
  Oligonucleotide for detection of SNP TSC0023760
aggagcgtttgaa

SEQ ID NO: 95464 - DNA, 13 bp, Artificial Sequence
  Oligonucleotide for detection of SNP TSC0023760
ttcaaacgctcct

SEQ ID NO: 95465 - DNA, 13 bp, Artificial Sequence
  Oligonucleotide for detection of SNP TSC0023761
aaagaagggtgta

SEQ ID NO: 95466 - DNA, 13 bp, Artificial Sequence
  Oligonucleotide for detection of SNP TSC0023761
tacacccttcttt

SEQ ID NO: 95467 - DNA, 13 bp, Artificial Sequence
  Oligonucleotide for detection of SNP TSC0023761
aaagaaaggtgta

SEQ ID NO: 95468 - DNA, 13 bp, Artificial Sequence
  Oligonucleotide for detection of SNP TSC0023761
tacacctttcttt

SEQ ID NO: 95469 - DNA, 13 bp, Artificial Sequence
  Oligonucleotide for detection of SNP TSC0023763
ttttaattgttgy

SEQ ID NO: 95470 - DNA, 13 bp, Artificial Sequence
  Oligonucleotide for detection of SNP TSC0023763
rcaacaattaaaa

SEQ ID NO: 95471 - DNA, 13 bp, Artificial Sequence
  Oligonucleotide for detection of SNP TSC0023763
ttttaagtgttgy

SEQ ID NO: 95472 - DNA, 13 bp, Artificial Sequence
  Oligonucleotide for detection of SNP TSC0023763
rcaacacttaaaa

SEQ ID NO: 95473 - DNA, 13 bp, Artificial Sequence
  Oligonucleotide for detection of SNP TSC0023763
gtaatagttggag

SEQ ID NO: 95474 - DNA, 13 bp, Artificial Sequence
  Oligonucleotide for detection of SNP TSC0023763
ctccaactattac

SEQ ID NO: 95475 - DNA, 13 bp, Artificial Sequence
  Oligonucleotide for detection of SNP TSC0023763
gtaatatttggag

SEQ ID NO: 95476 - DNA, 13 bp, Artificial Sequence
  Oligonucleotide for detection of SNP TSC0023763
ctccaaatattac

SEQ ID NO: 95477 - DNA, 13 bp, Artificial Sequence
  Oligonucleotide for detection of SNP TSC0023764
attagtggagttt

SEQ ID NO: 95478 - DNA, 13 bp, Artificial Sequence
  Oligonucleotide for detection of SNP TSC0023764
aaactccactaat

SEQ ID NO: 95479 - DNA, 13 bp, Artificial Sequence
  Oligonucleotide for detection of SNP TSC0023764
attagtagagttt

SEQ ID NO: 95480 - DNA, 13 bp, Artificial Sequence
  Oligonucleotide for detection of SNP TSC0023764
aaactctactaat

SEQ ID NO: 95481 - DNA, 13 bp, Artificial Sequence
  Oligonucleotide for detection of SNP TSC0023765
taagttattgtta

SEQ ID NO: 95482 - DNA, 13 bp, Artificial Sequence
  Oligonucleotide for detection of SNP TSC0023765
taacaataactta

SEQ ID NO: 95483 - DNA, 13 bp, Artificial Sequence
  Oligonucleotide for detection of SNP TSC0023765
taagttgttgtta

SEQ ID NO: 95484 - DNA, 13 bp, Artificial Sequence
  Oligonucleotide for detection of SNP TSC0023765
taacaacaactta

SEQ ID NO: 95485 - DNA, 13 bp, Artificial Sequence
  Oligonucleotide for detection of SNP TSC0023765
taagtcgttgtta

SEQ ID NO: 95486 - DNA, 13 bp, Artificial Sequence
  Oligonucleotide for detection of SNP TSC0023765
taacaacgactta

SEQ ID NO: 95487 - DNA, 13 bp, Artificial Sequence
  Oligonucleotide for detection of SNP TSC0023765
tggtagtggttta

SEQ ID NO: 95488 - DNA, 13 bp, Artificial Sequence
  Oligonucleotide for detection of SNP TSC0023765
taaaccactacca

SEQ ID NO: 95489 - DNA, 13 bp, Artificial Sequence
  Oligonucleotide for detection of SNP TSC0023765
tggtagcggttta

SEQ ID NO: 95490 - DNA, 13 bp, Artificial Sequence
  Oligonucleotide for detection of SNP TSC0023765
taaaccgctacca

SEQ ID NO: 95491 - DNA, 13 bp, Artificial Sequence
  Oligonucleotide for detection of SNP TSC0023766
ttgatgtgaaagy

SEQ ID NO: 95492 - DNA, 13 bp, Artificial Sequence
  Oligonucleotide for detection of SNP TSC0023766
rctttcacatcaa

SEQ ID NO: 95493 - DNA, 13 bp, Artificial Sequence
  Oligonucleotide for detection of SNP TSC0023766
ttgatgcgaaagy

SEQ ID NO: 95494 - DNA, 13 bp, Artificial Sequence
  Oligonucleotide for detection of SNP TSC0023766
rctttcgcatcaa

SEQ ID NO: 95495 - DNA, 13 bp, Artificial Sequence
  Oligonucleotide for detection of SNP TSC0023766
gtttttgtattaa

SEQ ID NO: 95496 - DNA, 13 bp, Artificial Sequence
  Oligonucleotide for detection of SNP TSC0023766
ttaatacaaaaac

SEQ ID NO: 95497 - DNA, 13 bp, Artificial Sequence
  Oligonucleotide for detection of SNP TSC0023766
gtttttatattaa

SEQ ID NO: 95498 - DNA, 13 bp, Artificial Sequence
  Oligonucleotide for detection of SNP TSC0023766
ttaatataaaaac

SEQ ID NO: 95499 - DNA, 13 bp, Artificial Sequence
  Oligonucleotide for detection of SNP TSC0023766
gttttcgtattaa

SEQ ID NO: 95500 - DNA, 13 bp, Artificial Sequence
  Oligonucleotide for detection of SNP TSC0023766
ttaatacgaaaac

SEQ ID NO: 95501 - DNA, 13 bp, Artificial Sequence
  Oligonucleotide for detection of SNP TSC0023767
ttagttgtgataa

SEQ ID NO: 95502 - DNA, 13 bp, Artificial Sequence
  Oligonucleotide for detection of SNP TSC0023767
ttatcacaactaa

SEQ ID NO: 95503 - DNA, 13 bp, Artificial Sequence
  Oligonucleotide for detection of SNP TSC0023767
ttagttatgataa

SEQ ID NO: 95504 - DNA, 13 bp, Artificial Sequence
  Oligonucleotide for detection of SNP TSC0023767
ttatcataactaa

SEQ ID NO: 95505 - DNA, 13 bp, Artificial Sequence
  Oligonucleotide for detection of SNP TSC0023768
tttgatatttgta

SEQ ID NO: 95506 - DNA, 13 bp, Artificial Sequence
  Oligonucleotide for detection of SNP TSC0023768
tacaaatatcaaa

SEQ ID NO: 95507 - DNA, 13 bp, Artificial Sequence
  Oligonucleotide for detection of SNP TSC0023768
tttgatgtttgta

SEQ ID NO: 95508 - DNA, 13 bp, Artificial Sequence
  Oligonucleotide for detection of SNP TSC0023768
tacaaacatcaaa

SEQ ID NO: 95509 - DNA, 13 bp, Artificial Sequence
  Oligonucleotide for detection of SNP TSC0023770
ggtaggaggttta

SEQ ID NO: 95510 - DNA, 13 bp, Artificial Sequence
  Oligonucleotide for detection of SNP TSC0023770
taaacctcctacc

SEQ ID NO: 95511 - DNA, 13 bp, Artificial Sequence
  Oligonucleotide for detection of SNP TSC0023770
ggtaggtggttta

SEQ ID NO: 95512 - DNA, 13 bp, Artificial Sequence
  Oligonucleotide for detection of SNP TSC0023770
taaaccacctacc

SEQ ID NO: 95513 - DNA, 13 bp, Artificial Sequence
  Oligonucleotide for detection of SNP TSC0023770
tgagttttttgty

SEQ ID NO: 95514 - DNA, 13 bp, Artificial Sequence
  Oligonucleotide for detection of SNP TSC0023770
racaaaaaactca

SEQ ID NO: 95515 - DNA, 13 bp, Artificial Sequence
  Oligonucleotide for detection of SNP TSC0023770
tgagttatttgty

SEQ ID NO: 95516 - DNA, 13 bp, Artificial Sequence
  Oligonucleotide for detection of SNP TSC0023770
racaaataactca

SEQ ID NO: 95517 - DNA, 13 bp, Artificial Sequence
  Oligonucleotide for detection of SNP TSC0023771
gttttagttagtg

SEQ ID NO: 95518 - DNA, 13 bp, Artificial Sequence
  Oligonucleotide for detection of SNP TSC0023771
cactaactaaaac

SEQ ID NO: 95519 - DNA, 13 bp, Artificial Sequence
  Oligonucleotide for detection of SNP TSC0023771
gttttatttagtg

SEQ ID NO: 95520 - DNA, 13 bp, Artificial Sequence
  Oligonucleotide for detection of SNP TSC0023771
cactaaataaaac

SEQ ID NO: 95521 - DNA, 13 bp, Artificial Sequence
  Oligonucleotide for detection of SNP TSC0023771
tattggttggaay

SEQ ID NO: 95522 - DNA, 13 bp, Artificial Sequence
  Oligonucleotide for detection of SNP TSC0023771
rttccaaccaata

SEQ ID NO: 95523 - DNA, 13 bp, Artificial Sequence
  Oligonucleotide for detection of SNP TSC0023771
tattggatggaay

SEQ ID NO: 95524 - DNA, 13 bp, Artificial Sequence
  Oligonucleotide for detection of SNP TSC0023771
rttccatccaata

SEQ ID NO: 95525 - DNA, 13 bp, Artificial Sequence
  Oligonucleotide for detection of SNP TSC0023772
ttagttatagtta

SEQ ID NO: 95526 - DNA, 13 bp, Artificial Sequence
  Oligonucleotide for detection of SNP TSC0023772
taactataactaa

SEQ ID NO: 95527 - DNA, 13 bp, Artificial Sequence
  Oligonucleotide for detection of SNP TSC0023772
ttagttgtagtta

SEQ ID NO: 95528 - DNA, 13 bp, Artificial Sequence
  Oligonucleotide for detection of SNP TSC0023772
taactacaactaa

SEQ ID NO: 95529 - DNA, 13 bp, Artificial Sequence
  Oligonucleotide for detection of SNP TSC0023776
gggtttatattty

SEQ ID NO: 95530 - DNA, 13 bp, Artificial Sequence
  Oligonucleotide for detection of SNP TSC0023776
raaatataaaccc

SEQ ID NO: 95531 - DNA, 13 bp, Artificial Sequence
  Oligonucleotide for detection of SNP TSC0023776
gggtttgtattty

SEQ ID NO: 95532 - DNA, 13 bp, Artificial Sequence
  Oligonucleotide for detection of SNP TSC0023776
raaatacaaaccc

SEQ ID NO: 95533 - DNA, 13 bp, Artificial Sequence
  Oligonucleotide for detection of SNP TSC0023776
gggttcgtattty

SEQ ID NO: 95534 - DNA, 13 bp, Artificial Sequence
  Oligonucleotide for detection of SNP TSC0023776
raaatacgaaccc

SEQ ID NO: 95535 - DNA, 13 bp, Artificial Sequence
  Oligonucleotide for detection of SNP TSC0023776
gggatgtggatty

SEQ ID NO: 95536 - DNA, 13 bp, Artificial Sequence
  Oligonucleotide for detection of SNP TSC0023776
raatccacatccc

SEQ ID NO: 95537 - DNA, 13 bp, Artificial Sequence
  Oligonucleotide for detection of SNP TSC0023776
gggatgcggatty

SEQ ID NO: 95538 - DNA, 13 bp, Artificial Sequence
  Oligonucleotide for detection of SNP TSC0023776
raatccgcatccc

SEQ ID NO: 95539 - DNA, 13 bp, Artificial Sequence
  Oligonucleotide for detection of SNP TSC0023777
ggtaagagatagg

SEQ ID NO: 95540 - DNA, 13 bp, Artificial Sequence
  Oligonucleotide for detection of SNP TSC0023777
cctatctcttacc

SEQ ID NO: 95541 - DNA, 13 bp, Artificial Sequence
  Oligonucleotide for detection of SNP TSC0023777
ggtaagtgatagg

SEQ ID NO: 95542 - DNA, 13 bp, Artificial Sequence
  Oligonucleotide for detection of SNP TSC0023777
cctatcacttacc

SEQ ID NO: 95543 - DNA, 13 bp, Artificial Sequence
  Oligonucleotide for detection of SNP TSC0023777
ggtaagcgatagg

SEQ ID NO: 95544 - DNA, 13 bp, Artificial Sequence
  Oligonucleotide for detection of SNP TSC0023777
cctatcgcttacc

SEQ ID NO: 95545 - DNA, 13 bp, Artificial Sequence
  Oligonucleotide for detection of SNP TSC0023777
tttgttttttaty

SEQ ID NO: 95546 - DNA, 13 bp, Artificial Sequence
  Oligonucleotide for detection of SNP TSC0023777
rataaaaaacaaa

SEQ ID NO: 95547 - DNA, 13 bp, Artificial Sequence
  Oligonucleotide for detection of SNP TSC0023777
tttgttgtttaty

SEQ ID NO: 95548 - DNA, 13 bp, Artificial Sequence
  Oligonucleotide for detection of SNP TSC0023777
rataaacaacaaa

SEQ ID NO: 95549 - DNA, 13 bp, Artificial Sequence
  Oligonucleotide for detection of SNP TSC0023777
tttgtcgtttaty

SEQ ID NO: 95550 - DNA, 13 bp, Artificial Sequence
  Oligonucleotide for detection of SNP TSC0023777
rataaacgacaaa

SEQ ID NO: 95551 - DNA, 13 bp, Artificial Sequence
  Oligonucleotide for detection of SNP TSC0023778
ttaattgtagtty

SEQ ID NO: 95552 - DNA, 13 bp, Artificial Sequence
  Oligonucleotide for detection of SNP TSC0023778
raactacaattaa

SEQ ID NO: 95553 - DNA, 13 bp, Artificial Sequence
  Oligonucleotide for detection of SNP TSC0023778
ttaattatagtty

SEQ ID NO: 95554 - DNA, 13 bp, Artificial Sequence
  Oligonucleotide for detection of SNP TSC0023778
raactataattaa

SEQ ID NO: 95555 - DNA, 13 bp, Artificial Sequence
  Oligonucleotide for detection of SNP TSC0023779
gttataaaaaaay

SEQ ID NO: 95556 - DNA, 13 bp, Artificial Sequence
  Oligonucleotide for detection of SNP TSC0023779
rtttttttataac

SEQ ID NO: 95557 - DNA, 13 bp, Artificial Sequence
  Oligonucleotide for detection of SNP TSC0023779
gttatataaaaay

SEQ ID NO: 95558 - DNA, 13 bp, Artificial Sequence
  Oligonucleotide for detection of SNP TSC0023779
rtttttatataac

SEQ ID NO: 95559 - DNA, 13 bp, Artificial Sequence
  Oligonucleotide for detection of SNP TSC0023779
gtttttttgtagy

SEQ ID NO: 95560 - DNA, 13 bp, Artificial Sequence
  Oligonucleotide for detection of SNP TSC0023779
rctacaaaaaaac

SEQ ID NO: 95561 - DNA, 13 bp, Artificial Sequence
  Oligonucleotide for detection of SNP TSC0023779
gtttttatgtagy

SEQ ID NO: 95562 - DNA, 13 bp, Artificial Sequence
  Oligonucleotide for detection of SNP TSC0023779
rctacataaaaac

SEQ ID NO: 95563 - DNA, 13 bp, Artificial Sequence
  Oligonucleotide for detection of SNP TSC0023783
ggtgggatttggy

SEQ ID NO: 95564 - DNA, 13 bp, Artificial Sequence
  Oligonucleotide for detection of SNP TSC0023783
rccaaatcccacc

SEQ ID NO: 95565 - DNA, 13 bp, Artificial Sequence
  Oligonucleotide for detection of SNP TSC0023783
ggtggggtttggy

SEQ ID NO: 95566 - DNA, 13 bp, Artificial Sequence
  Oligonucleotide for detection of SNP TSC0023783
rccaaaccccacc

SEQ ID NO: 95567 - DNA, 13 bp, Artificial Sequence
  Oligonucleotide for detection of SNP TSC0023784
atattatgtttta

SEQ ID NO: 95568 - DNA, 13 bp, Artificial Sequence
  Oligonucleotide for detection of SNP TSC0023784
taaaacataatat

SEQ ID NO: 95569 - DNA, 13 bp, Artificial Sequence
  Oligonucleotide for detection of SNP TSC0023784
atattacgtttta

SEQ ID NO: 95570 - DNA, 13 bp, Artificial Sequence
  Oligonucleotide for detection of SNP TSC0023784
taaaacgtaatat

SEQ ID NO: 95571 - DNA, 13 bp, Artificial Sequence
  Oligonucleotide for detection of SNP TSC0023784
taaaatgtaatgt

SEQ ID NO: 95572 - DNA, 13 bp, Artificial Sequence
  Oligonucleotide for detection of SNP TSC0023784
acattacatttta

SEQ ID NO: 95573 - DNA, 13 bp, Artificial Sequence
  Oligonucleotide for detection of SNP TSC0023784
taaaatataatgt

SEQ ID NO: 95574 - DNA, 13 bp, Artificial Sequence
  Oligonucleotide for detection of SNP TSC0023784
acattatatttta

SEQ ID NO: 95575 - DNA, 13 bp, Artificial Sequence
  Oligonucleotide for detection of SNP TSC0023784
taaaacgtaatgt

SEQ ID NO: 95576 - DNA, 13 bp, Artificial Sequence
  Oligonucleotide for detection of SNP TSC0023784
acattacgtttta

SEQ ID NO: 95577 - DNA, 13 bp, Artificial Sequence
  Oligonucleotide for detection of SNP TSC0023786
taaattaatgtta

SEQ ID NO: 95578 - DNA, 13 bp, Artificial Sequence
  Oligonucleotide for detection of SNP TSC0023786
taacattaattta

SEQ ID NO: 95579 - DNA, 13 bp, Artificial Sequence
  Oligonucleotide for detection of SNP TSC0023786
taaattgatgtta

SEQ ID NO: 95580 - DNA, 13 bp, Artificial Sequence
  Oligonucleotide for detection of SNP TSC0023786
taacatcaattta

SEQ ID NO: 95581 - DNA, 13 bp, Artificial Sequence
  Oligonucleotide for detection of SNP TSC0023786
taaatcgatgtta

SEQ ID NO: 95582 - DNA, 13 bp, Artificial Sequence
  Oligonucleotide for detection of SNP TSC0023786
taacatcgattta

SEQ ID NO: 95583 - DNA, 13 bp, Artificial Sequence
  Oligonucleotide for detection of SNP TSC0023786
taatattggttta

SEQ ID NO: 95584 - DNA, 13 bp, Artificial Sequence
  Oligonucleotide for detection of SNP TSC0023786
taaaccaatatta

SEQ ID NO: 95585 - DNA, 13 bp, Artificial Sequence
  Oligonucleotide for detection of SNP TSC0023786
taatatcggttta

SEQ ID NO: 95586 - DNA, 13 bp, Artificial Sequence
  Oligonucleotide for detection of SNP TSC0023786
taaaccgatatta

SEQ ID NO: 95587 - DNA, 13 bp, Artificial Sequence
  Oligonucleotide for detection of SNP TSC0023788
aggaggatattat

SEQ ID NO: 95588 - DNA, 13 bp, Artificial Sequence
  Oligonucleotide for detection of SNP TSC0023788
ataatatcctcct

SEQ ID NO: 95589 - DNA, 13 bp, Artificial Sequence
  Oligonucleotide for detection of SNP TSC0023788
aggagggtattat

SEQ ID NO: 95590 - DNA, 13 bp, Artificial Sequence
  Oligonucleotide for detection of SNP TSC0023788
ataataccctcct

SEQ ID NO: 95591 - DNA, 13 bp, Artificial Sequence
  Oligonucleotide for detection of SNP TSC0023789
tgtattatgggtt

SEQ ID NO: 95592 - DNA, 13 bp, Artificial Sequence
  Oligonucleotide for detection of SNP TSC0023789
aacccataataca

SEQ ID NO: 95593 - DNA, 13 bp, Artificial Sequence
  Oligonucleotide for detection of SNP TSC0023789
tgtattttgggtt

SEQ ID NO: 95594 - DNA, 13 bp, Artificial Sequence
  Oligonucleotide for detection of SNP TSC0023789
aacccaaaataca

SEQ ID NO: 95595 - DNA, 13 bp, Artificial Sequence
  Oligonucleotide for detection of SNP TSC0023789
cgtattatgggtt

SEQ ID NO: 95596 - DNA, 13 bp, Artificial Sequence
  Oligonucleotide for detection of SNP TSC0023789
aacccataatacg

SEQ ID NO: 95597 - DNA, 13 bp, Artificial Sequence
  Oligonucleotide for detection of SNP TSC0023789
cgtattttgggtt

SEQ ID NO: 95598 - DNA, 13 bp, Artificial Sequence
  Oligonucleotide for detection of SNP TSC0023789
aacccaaaatacg

SEQ ID NO: 95599 - DNA, 13 bp, Artificial Sequence
  Oligonucleotide for detection of SNP TSC0023789
aatttataatatg

SEQ ID NO: 95600 - DNA, 13 bp, Artificial Sequence
  Oligonucleotide for detection of SNP TSC0023789
catattataaatt

SEQ ID NO: 95601 - DNA, 13 bp, Artificial Sequence
  Oligonucleotide for detection of SNP TSC0023789
aatttagaatatg

SEQ ID NO: 95602 - DNA, 13 bp, Artificial Sequence
  Oligonucleotide for detection of SNP TSC0023789
catattctaaatt

SEQ ID NO: 95603 - DNA, 13 bp, Artificial Sequence
  Oligonucleotide for detection of SNP TSC0023789
aatttataatacg

SEQ ID NO: 95604 - DNA, 13 bp, Artificial Sequence
  Oligonucleotide for detection of SNP TSC0023789
cgtattataaatt

SEQ ID NO: 95605 - DNA, 13 bp, Artificial Sequence
  Oligonucleotide for detection of SNP TSC0023789
aatttagaatacg

SEQ ID NO: 95606 - DNA, 13 bp, Artificial Sequence
  Oligonucleotide for detection of SNP TSC0023789
cgtattctaaatt

SEQ ID NO: 95607 - DNA, 13 bp, Artificial Sequence
  Oligonucleotide for detection of SNP TSC0023790
ttttatgtatttg

SEQ ID NO: 95608 - DNA, 13 bp, Artificial Sequence
  Oligonucleotide for detection of SNP TSC0023790
caaatacataaaa

SEQ ID NO: 95609 - DNA, 13 bp, Artificial Sequence
  Oligonucleotide for detection of SNP TSC0023790
ttttatatatttg

SEQ ID NO: 95610 - DNA, 13 bp, Artificial Sequence
  Oligonucleotide for detection of SNP TSC0023790
caaatatataaaa

SEQ ID NO: 95611 - DNA, 13 bp, Artificial Sequence
  Oligonucleotide for detection of SNP TSC0023791
agtaaaatgagtt

SEQ ID NO: 95612 - DNA, 13 bp, Artificial Sequence
  Oligonucleotide for detection of SNP TSC0023791
aactcattttact

SEQ ID NO: 95613 - DNA, 13 bp, Artificial Sequence
  Oligonucleotide for detection of SNP TSC0023791
agtaaagtgagtt

SEQ ID NO: 95614 - DNA, 13 bp, Artificial Sequence
  Oligonucleotide for detection of SNP TSC0023791
aactcactttact

SEQ ID NO: 95615 - DNA, 13 bp, Artificial Sequence
  Oligonucleotide for detection of SNP TSC0023793
tatattgtataag

SEQ ID NO: 95616 - DNA, 13 bp, Artificial Sequence
  Oligonucleotide for detection of SNP TSC0023793
cttatacaatata

SEQ ID NO: 95617 - DNA, 13 bp, Artificial Sequence
  Oligonucleotide for detection of SNP TSC0023793
tatattttataag

SEQ ID NO: 95618 - DNA, 13 bp, Artificial Sequence
  Oligonucleotide for detection of SNP TSC0023793
cttataaaatata

SEQ ID NO: 95619 - DNA, 13 bp, Artificial Sequence
  Oligonucleotide for detection of SNP TSC0023793
tttgtatagtatg

SEQ ID NO: 95620 - DNA, 13 bp, Artificial Sequence
  Oligonucleotide for detection of SNP TSC0023793
catactatacaaa

SEQ ID NO: 95621 - DNA, 13 bp, Artificial Sequence
  Oligonucleotide for detection of SNP TSC0023793
tttgtaaagtatg

SEQ ID NO: 95622 - DNA, 13 bp, Artificial Sequence
  Oligonucleotide for detection of SNP TSC0023793
catactttacaaa

SEQ ID NO: 95623 - DNA, 13 bp, Artificial Sequence
  Oligonucleotide for detection of SNP TSC0023794
gtatgttgggtga

SEQ ID NO: 95624 - DNA, 13 bp, Artificial Sequence
  Oligonucleotide for detection of SNP TSC0023794
tcacccaacatac

SEQ ID NO: 95625 - DNA, 13 bp, Artificial Sequence
  Oligonucleotide for detection of SNP TSC0023794
gtatgtcgggtga

SEQ ID NO: 95626 - DNA, 13 bp, Artificial Sequence
  Oligonucleotide for detection of SNP TSC0023794
tcacccgacatac

SEQ ID NO: 95627 - DNA, 13 bp, Artificial Sequence
  Oligonucleotide for detection of SNP TSC0023794
ttatttggtatgy

SEQ ID NO: 95628 - DNA, 13 bp, Artificial Sequence
  Oligonucleotide for detection of SNP TSC0023794
rcataccaaataa

SEQ ID NO: 95629 - DNA, 13 bp, Artificial Sequence
  Oligonucleotide for detection of SNP TSC0023794
ttatttagtatgy

SEQ ID NO: 95630 - DNA, 13 bp, Artificial Sequence
  Oligonucleotide for detection of SNP TSC0023794
rcatactaaataa

SEQ ID NO: 95631 - DNA, 13 bp, Artificial Sequence
  Oligonucleotide for detection of SNP TSC0023794
ttattcggtatgy

SEQ ID NO: 95632 - DNA, 13 bp, Artificial Sequence
  Oligonucleotide for detection of SNP TSC0023794
rcataccgaataa

SEQ ID NO: 95633 - DNA, 13 bp, Artificial Sequence
  Oligonucleotide for detection of SNP TSC0023795
gagaatattttta

SEQ ID NO: 95634 - DNA, 13 bp, Artificial Sequence
  Oligonucleotide for detection of SNP TSC0023795
taaaaatattctc

SEQ ID NO: 95635 - DNA, 13 bp, Artificial Sequence
  Oligonucleotide for detection of SNP TSC0023795
gagaatgttttta

SEQ ID NO: 95636 - DNA, 13 bp, Artificial Sequence
  Oligonucleotide for detection of SNP TSC0023795
taaaaacattctc

SEQ ID NO: 95637 - DNA, 13 bp, Artificial Sequence
  Oligonucleotide for detection of SNP TSC0023795
gagaacgttttta

SEQ ID NO: 95638 - DNA, 13 bp, Artificial Sequence
  Oligonucleotide for detection of SNP TSC0023795
taaaaacgttctc

SEQ ID NO: 95639 - DNA, 13 bp, Artificial Sequence
  Oligonucleotide for detection of SNP TSC0023795
tagagatgtttty

SEQ ID NO: 95640 - DNA, 13 bp, Artificial Sequence
  Oligonucleotide for detection of SNP TSC0023795
raaaacatctcta

SEQ ID NO: 95641 - DNA, 13 bp, Artificial Sequence
  Oligonucleotide for detection of SNP TSC0023795
tagagacgtttty

SEQ ID NO: 95642 - DNA, 13 bp, Artificial Sequence
  Oligonucleotide for detection of SNP TSC0023795
raaaacgtctcta

SEQ ID NO: 95643 - DNA, 13 bp, Artificial Sequence
  Oligonucleotide for detection of SNP TSC0023796
taagttaaatttt

SEQ ID NO: 95644 - DNA, 13 bp, Artificial Sequence
  Oligonucleotide for detection of SNP TSC0023796
aaaatttaactta

SEQ ID NO: 95645 - DNA, 13 bp, Artificial Sequence
  Oligonucleotide for detection of SNP TSC0023796
taagttgaatttt

SEQ ID NO: 95646 - DNA, 13 bp, Artificial Sequence
  Oligonucleotide for detection of SNP TSC0023796
aaaattcaactta

SEQ ID NO: 95647 - DNA, 13 bp, Artificial Sequence
  Oligonucleotide for detection of SNP TSC0023797
ttattagacgaty

SEQ ID NO: 95648 - DNA, 13 bp, Artificial Sequence
  Oligonucleotide for detection of SNP TSC0023797
ratcgtctaataa

SEQ ID NO: 95649 - DNA, 13 bp, Artificial Sequence
  Oligonucleotide for detection of SNP TSC0023797
ttattaaacgaty

SEQ ID NO: 95650 - DNA, 13 bp, Artificial Sequence
  Oligonucleotide for detection of SNP TSC0023797
ratcgtttaataa

SEQ ID NO: 95651 - DNA, 13 bp, Artificial Sequence
  Oligonucleotide for detection of SNP TSC0023798
gagttgagtggtt

SEQ ID NO: 95652 - DNA, 13 bp, Artificial Sequence
  Oligonucleotide for detection of SNP TSC0023798
aaccactcaactc

SEQ ID NO: 95653 - DNA, 13 bp, Artificial Sequence
  Oligonucleotide for detection of SNP TSC0023798
gagttgggtggtt

SEQ ID NO: 95654 - DNA, 13 bp, Artificial Sequence
  Oligonucleotide for detection of SNP TSC0023798
aaccacccaactc

SEQ ID NO: 95655 - DNA, 13 bp, Artificial Sequence
  Oligonucleotide for detection of SNP TSC0023799
gttaggaggttgg

SEQ ID NO: 95656 - DNA, 13 bp, Artificial Sequence
  Oligonucleotide for detection of SNP TSC0023799
ccaacctcctaac

SEQ ID NO: 95657 - DNA, 13 bp, Artificial Sequence
  Oligonucleotide for detection of SNP TSC0023799
gttagggggttgg

SEQ ID NO: 95658 - DNA, 13 bp, Artificial Sequence
  Oligonucleotide for detection of SNP TSC0023799
ccaaccccctaac

SEQ ID NO: 95659 - DNA, 13 bp, Artificial Sequence
  Oligonucleotide for detection of SNP TSC0023801
tataagtattgtt

SEQ ID NO: 95660 - DNA, 13 bp, Artificial Sequence
  Oligonucleotide for detection of SNP TSC0023801
aacaatacttata

SEQ ID NO: 95661 - DNA, 13 bp, Artificial Sequence
  Oligonucleotide for detection of SNP TSC0023801
tataaggattgtt

SEQ ID NO: 95662 - DNA, 13 bp, Artificial Sequence
  Oligonucleotide for detection of SNP TSC0023801
aacaatccttata

SEQ ID NO: 95663 - DNA, 13 bp, Artificial Sequence
  Oligonucleotide for detection of SNP TSC0023801
aataatgtttatg

SEQ ID NO: 95664 - DNA, 13 bp, Artificial Sequence
  Oligonucleotide for detection of SNP TSC0023801
cataaacattatt

SEQ ID NO: 95665 - DNA, 13 bp, Artificial Sequence
  Oligonucleotide for detection of SNP TSC0023801
aataatttttatg

SEQ ID NO: 95666 - DNA, 13 bp, Artificial Sequence
  Oligonucleotide for detection of SNP TSC0023801
cataaaaattatt

SEQ ID NO: 95667 - DNA, 13 bp, Artificial Sequence
  Oligonucleotide for detection of SNP TSC0023802
ttaaagggaaatt

SEQ ID NO: 95668 - DNA, 13 bp, Artificial Sequence
  Oligonucleotide for detection of SNP TSC0023802
aatttccctttaa

SEQ ID NO: 95669 - DNA, 13 bp, Artificial Sequence
  Oligonucleotide for detection of SNP TSC0023802
ttaaagagaaatt

SEQ ID NO: 95670 - DNA, 13 bp, Artificial Sequence
  Oligonucleotide for detection of SNP TSC0023802
aatttctctttaa

SEQ ID NO: 95671 - DNA, 13 bp, Artificial Sequence
  Oligonucleotide for detection of SNP TSC0023803
tttaaagggaaat

SEQ ID NO: 95672 - DNA, 13 bp, Artificial Sequence
  Oligonucleotide for detection of SNP TSC0023803
atttccctttaaa

SEQ ID NO: 95673 - DNA, 13 bp, Artificial Sequence
  Oligonucleotide for detection of SNP TSC0023803
tttaaaaggaaat

SEQ ID NO: 95674 - DNA, 13 bp, Artificial Sequence
  Oligonucleotide for detection of SNP TSC0023803
atttccttttaaa

SEQ ID NO: 95675 - DNA, 13 bp, Artificial Sequence
  Oligonucleotide for detection of SNP TSC0023804
gggtaagatattt

SEQ ID NO: 95676 - DNA, 13 bp, Artificial Sequence
  Oligonucleotide for detection of SNP TSC0023804
aaatatcttaccc

SEQ ID NO: 95677 - DNA, 13 bp, Artificial Sequence
  Oligonucleotide for detection of SNP TSC0023804
gggtaaaatattt

SEQ ID NO: 95678 - DNA, 13 bp, Artificial Sequence
  Oligonucleotide for detection of SNP TSC0023804
aaatattttaccc

SEQ ID NO: 95679 - DNA, 13 bp, Artificial Sequence
  Oligonucleotide for detection of SNP TSC0023807
gattttaaagaaa

SEQ ID NO: 95680 - DNA, 13 bp, Artificial Sequence
  Oligonucleotide for detection of SNP TSC0023807
tttctttaaaatc

SEQ ID NO: 95681 - DNA, 13 bp, Artificial Sequence
  Oligonucleotide for detection of SNP TSC0023807
gattttgaagaaa

SEQ ID NO: 95682 - DNA, 13 bp, Artificial Sequence
  Oligonucleotide for detection of SNP TSC0023807
tttcttcaaaatc

SEQ ID NO: 95683 - DNA, 13 bp, Artificial Sequence
  Oligonucleotide for detection of SNP TSC0023808
attaattttgatg

SEQ ID NO: 95684 - DNA, 13 bp, Artificial Sequence
  Oligonucleotide for detection of SNP TSC0023808
catcaaaattaat

SEQ ID NO: 95685 - DNA, 13 bp, Artificial Sequence
  Oligonucleotide for detection of SNP TSC0023808
attaatgttgatg

SEQ ID NO: 95686 - DNA, 13 bp, Artificial Sequence
  Oligonucleotide for detection of SNP TSC0023808
catcaacattaat

SEQ ID NO: 95687 - DNA, 13 bp, Artificial Sequence
  Oligonucleotide for detection of SNP TSC0023808
tattaagattaat

SEQ ID NO: 95688 - DNA, 13 bp, Artificial Sequence
  Oligonucleotide for detection of SNP TSC0023808
attaatcttaata

SEQ ID NO: 95689 - DNA, 13 bp, Artificial Sequence
  Oligonucleotide for detection of SNP TSC0023808
tattaatattaat

SEQ ID NO: 95690 - DNA, 13 bp, Artificial Sequence
  Oligonucleotide for detection of SNP TSC0023808
attaatattaata

SEQ ID NO: 95691 - DNA, 13 bp, Artificial Sequence
  Oligonucleotide for detection of SNP TSC0023809
gttgttttaaaga

SEQ ID NO: 95692 - DNA, 13 bp, Artificial Sequence
  Oligonucleotide for detection of SNP TSC0023809
tctttaaaacaac

SEQ ID NO: 95693 - DNA, 13 bp, Artificial Sequence
  Oligonucleotide for detection of SNP TSC0023809
tttttgtgatagy

SEQ ID NO: 95694 - DNA, 13 bp, Artificial Sequence
  Oligonucleotide for detection of SNP TSC0023809
rctatcacaaaaa

SEQ ID NO: 95695 - DNA, 13 bp, Artificial Sequence
  Oligonucleotide for detection of SNP TSC0023809
tttttgagatagy

SEQ ID NO: 95696 - DNA, 13 bp, Artificial Sequence
  Oligonucleotide for detection of SNP TSC0023809
rctatctcaaaaa

SEQ ID NO: 95697 - DNA, 13 bp, Artificial Sequence
  Oligonucleotide for detection of SNP TSC0023810
aggtttatggagy

SEQ ID NO: 95698 - DNA, 13 bp, Artificial Sequence
  Oligonucleotide for detection of SNP TSC0023810
rctccataaacct

SEQ ID NO: 95699 - DNA, 13 bp, Artificial Sequence
  Oligonucleotide for detection of SNP TSC0023810
aggtttgtggagy

SEQ ID NO: 95700 - DNA, 13 bp, Artificial Sequence
  Oligonucleotide for detection of SNP TSC0023810
rctccacaaacct

SEQ ID NO: 95701 - DNA, 13 bp, Artificial Sequence
  Oligonucleotide for detection of SNP TSC0023810
aggttcgtggagy

SEQ ID NO: 95702 - DNA, 13 bp, Artificial Sequence
  Oligonucleotide for detection of SNP TSC0023810
rctccacgaacct

SEQ ID NO: 95703 - DNA, 13 bp, Artificial Sequence
  Oligonucleotide for detection of SNP TSC0023810
gttttatgggttt

SEQ ID NO: 95704 - DNA, 13 bp, Artificial Sequence
  Oligonucleotide for detection of SNP TSC0023810
aaacccataaaac

SEQ ID NO: 95705 - DNA, 13 bp, Artificial Sequence
  Oligonucleotide for detection of SNP TSC0023810
gttttacgggttt

SEQ ID NO: 95706 - DNA, 13 bp, Artificial Sequence
  Oligonucleotide for detection of SNP TSC0023810
aaacccgtaaaac

SEQ ID NO: 95707 - DNA, 13 bp, Artificial Sequence
  Oligonucleotide for detection of SNP TSC0023811
tttaggaggaagg

SEQ ID NO: 95708 - DNA, 13 bp, Artificial Sequence
  Oligonucleotide for detection of SNP TSC0023811
ccttcctcctaaa

SEQ ID NO: 95709 - DNA, 13 bp, Artificial Sequence
  Oligonucleotide for detection of SNP TSC0023811
tttagggggaagg

SEQ ID NO: 95710 - DNA, 13 bp, Artificial Sequence
  Oligonucleotide for detection of SNP TSC0023811
ccttccccctaaa

SEQ ID NO: 95711 - DNA, 13 bp, Artificial Sequence
  Oligonucleotide for detection of SNP TSC0023812
ttaggaggaaggg

SEQ ID NO: 95712 - DNA, 13 bp, Artificial Sequence
  Oligonucleotide for detection of SNP TSC0023812
cccttcctcctaa

SEQ ID NO: 95713 - DNA, 13 bp, Artificial Sequence
  Oligonucleotide for detection of SNP TSC0023812
ttaggatgaaggg

SEQ ID NO: 95714 - DNA, 13 bp, Artificial Sequence
  Oligonucleotide for detection of SNP TSC0023812
cccttcatcctaa

SEQ ID NO: 95715 - DNA, 13 bp, Artificial Sequence
  Oligonucleotide for detection of SNP TSC0023813
gaaggaaaattta

SEQ ID NO: 95716 - DNA, 13 bp, Artificial Sequence
  Oligonucleotide for detection of SNP TSC0023813
taaattttccttc

SEQ ID NO: 95717 - DNA, 13 bp, Artificial Sequence
  Oligonucleotide for detection of SNP TSC0023813
gaaggagaattta

SEQ ID NO: 95718 - DNA, 13 bp, Artificial Sequence
  Oligonucleotide for detection of SNP TSC0023813
taaattctccttc

SEQ ID NO: 95719 - DNA, 13 bp, Artificial Sequence
  Oligonucleotide for detection of SNP TSC0023814
gtggtttaaattt

SEQ ID NO: 95720 - DNA, 13 bp, Artificial Sequence
  Oligonucleotide for detection of SNP TSC0023814
aaatttaaaccac

SEQ ID NO: 95721 - DNA, 13 bp, Artificial Sequence
  Oligonucleotide for detection of SNP TSC0023814
gtggttgaaattt

SEQ ID NO: 95722 - DNA, 13 bp, Artificial Sequence
  Oligonucleotide for detection of SNP TSC0023814
aaatttcaaccac

SEQ ID NO: 95723 - DNA, 13 bp, Artificial Sequence
  Oligonucleotide for detection of SNP TSC0023814
aggtttgaattay

SEQ ID NO: 95724 - DNA, 13 bp, Artificial Sequence
  Oligonucleotide for detection of SNP TSC0023814
rtaattcaaacct

SEQ ID NO: 95725 - DNA, 13 bp, Artificial Sequence
  Oligonucleotide for detection of SNP TSC0023814
aggttttaattay

SEQ ID NO: 95726 - DNA, 13 bp, Artificial Sequence
  Oligonucleotide for detection of SNP TSC0023814
rtaattaaaacct

SEQ ID NO: 95727 - DNA, 13 bp, Artificial Sequence
  Oligonucleotide for detection of SNP TSC0023816
tttttgagagaag

SEQ ID NO: 95728 - DNA, 13 bp, Artificial Sequence
  Oligonucleotide for detection of SNP TSC0023816
cttctctcaaaaa

SEQ ID NO: 95729 - DNA, 13 bp, Artificial Sequence
  Oligonucleotide for detection of SNP TSC0023816
tttttgggagaag

SEQ ID NO: 95730 - DNA, 13 bp, Artificial Sequence
  Oligonucleotide for detection of SNP TSC0023816
cttctcccaaaaa

SEQ ID NO: 95731 - DNA, 13 bp, Artificial Sequence
  Oligonucleotide for detection of SNP TSC0023819
tgaaatatgtgtg

SEQ ID NO: 95732 - DNA, 13 bp, Artificial Sequence
  Oligonucleotide for detection of SNP TSC0023819
cacacatatttca

SEQ ID NO: 95733 - DNA, 13 bp, Artificial Sequence
  Oligonucleotide for detection of SNP TSC0023819
tgaaatgtgtgtg

SEQ ID NO: 95734 - DNA, 13 bp, Artificial Sequence
  Oligonucleotide for detection of SNP TSC0023819
cacacacatttca

SEQ ID NO: 95735 - DNA, 13 bp, Artificial Sequence
  Oligonucleotide for detection of SNP TSC0023820
tttgtagttattt

SEQ ID NO: 95736 - DNA, 13 bp, Artificial Sequence
  Oligonucleotide for detection of SNP TSC0023820
aaataactacaaa

SEQ ID NO: 95737 - DNA, 13 bp, Artificial Sequence
  Oligonucleotide for detection of SNP TSC0023823
gatttagtaatty

SEQ ID NO: 95738 - DNA, 13 bp, Artificial Sequence
  Oligonucleotide for detection of SNP TSC0023823
raattactaaatc

SEQ ID NO: 95739 - DNA, 13 bp, Artificial Sequence
  Oligonucleotide for detection of SNP TSC0023823
gatttattaatty

SEQ ID NO: 95740 - DNA, 13 bp, Artificial Sequence
  Oligonucleotide for detection of SNP TSC0023823
raattaataaatc

SEQ ID NO: 95741 - DNA, 13 bp, Artificial Sequence
  Oligonucleotide for detection of SNP TSC0023823
gaattgttgggty

SEQ ID NO: 95742 - DNA, 13 bp, Artificial Sequence
  Oligonucleotide for detection of SNP TSC0023823
racccaacaattc

SEQ ID NO: 95743 - DNA, 13 bp, Artificial Sequence
  Oligonucleotide for detection of SNP TSC0023823
gaattgatgggty

SEQ ID NO: 95744 - DNA, 13 bp, Artificial Sequence
  Oligonucleotide for detection of SNP TSC0023823
racccatcaattc

SEQ ID NO: 95745 - DNA, 13 bp, Artificial Sequence
  Oligonucleotide for detection of SNP TSC0023824
ggaattgttgggt

SEQ ID NO: 95746 - DNA, 13 bp, Artificial Sequence
  Oligonucleotide for detection of SNP TSC0023824
acccaacaattcc

SEQ ID NO: 95747 - DNA, 13 bp, Artificial Sequence
  Oligonucleotide for detection of SNP TSC0023824
ggaattattgggt

SEQ ID NO: 95748 - DNA, 13 bp, Artificial Sequence
  Oligonucleotide for detection of SNP TSC0023824
acccaataattcc

SEQ ID NO: 95749 - DNA, 13 bp, Artificial Sequence
  Oligonucleotide for detection of SNP TSC0023825
gaatggatggtga

SEQ ID NO: 95750 - DNA, 13 bp, Artificial Sequence
  Oligonucleotide for detection of SNP TSC0023825
tcaccatccattc

SEQ ID NO: 95751 - DNA, 13 bp, Artificial Sequence
  Oligonucleotide for detection of SNP TSC0023825
gaatggttggtga

SEQ ID NO: 95752 - DNA, 13 bp, Artificial Sequence
  Oligonucleotide for detection of SNP TSC0023825
tcaccaaccattc

SEQ ID NO: 95753 - DNA, 13 bp, Artificial Sequence
  Oligonucleotide for detection of SNP TSC0023825
gaatggacggtga

SEQ ID NO: 95754 - DNA, 13 bp, Artificial Sequence
  Oligonucleotide for detection of SNP TSC0023825
tcaccgtccattc

SEQ ID NO: 95755 - DNA, 13 bp, Artificial Sequence
  Oligonucleotide for detection of SNP TSC0023825
gaatggtcggtga

SEQ ID NO: 95756 - DNA, 13 bp, Artificial Sequence
  Oligonucleotide for detection of SNP TSC0023825
tcaccgaccattc

SEQ ID NO: 95757 - DNA, 13 bp, Artificial Sequence
  Oligonucleotide for detection of SNP TSC0023825
gaatggatggcga

SEQ ID NO: 95758 - DNA, 13 bp, Artificial Sequence
  Oligonucleotide for detection of SNP TSC0023825
tcgccatccattc

SEQ ID NO: 95759 - DNA, 13 bp, Artificial Sequence
  Oligonucleotide for detection of SNP TSC0023825
gaatggttggcga

SEQ ID NO: 95760 - DNA, 13 bp, Artificial Sequence
  Oligonucleotide for detection of SNP TSC0023825
tcgccaaccattc

SEQ ID NO: 95761 - DNA, 13 bp, Artificial Sequence
  Oligonucleotide for detection of SNP TSC0023825
gaatggacggcga

SEQ ID NO: 95762 - DNA, 13 bp, Artificial Sequence
  Oligonucleotide for detection of SNP TSC0023825
tcgccgtccattc

SEQ ID NO: 95763 - DNA, 13 bp, Artificial Sequence
  Oligonucleotide for detection of SNP TSC0023825
gaatggtcggcga

SEQ ID NO: 95764 - DNA, 13 bp, Artificial Sequence
  Oligonucleotide for detection of SNP TSC0023825
tcgccgaccattc

SEQ ID NO: 95765 - DNA, 13 bp, Artificial Sequence
  Oligonucleotide for detection of SNP TSC0023825
ttgttgtttatty

SEQ ID NO: 95766 - DNA, 13 bp, Artificial Sequence
  Oligonucleotide for detection of SNP TSC0023825
raataaacaacaa

SEQ ID NO: 95767 - DNA, 13 bp, Artificial Sequence
  Oligonucleotide for detection of SNP TSC0023825
ttgttggttatty

SEQ ID NO: 95768 - DNA, 13 bp, Artificial Sequence
  Oligonucleotide for detection of SNP TSC0023825
raataaccaacaa

SEQ ID NO: 95769 - DNA, 13 bp, Artificial Sequence
  Oligonucleotide for detection of SNP TSC0023825
tcgttgtttatty

SEQ ID NO: 95770 - DNA, 13 bp, Artificial Sequence
  Oligonucleotide for detection of SNP TSC0023825
raataaacaacga

SEQ ID NO: 95771 - DNA, 13 bp, Artificial Sequence
  Oligonucleotide for detection of SNP TSC0023825
tcgttggttatty

SEQ ID NO: 95772 - DNA, 13 bp, Artificial Sequence
  Oligonucleotide for detection of SNP TSC0023825
raataaccaacga

SEQ ID NO: 95773 - DNA, 13 bp, Artificial Sequence
  Oligonucleotide for detection of SNP TSC0023825
ttgtcgtttatty

SEQ ID NO: 95774 - DNA, 13 bp, Artificial Sequence
  Oligonucleotide for detection of SNP TSC0023825
raataaacgacaa

SEQ ID NO: 95775 - DNA, 13 bp, Artificial Sequence
  Oligonucleotide for detection of SNP TSC0023825
ttgtcggttatty

SEQ ID NO: 95776 - DNA, 13 bp, Artificial Sequence
  Oligonucleotide for detection of SNP TSC0023825
raataaccgacaa

SEQ ID NO: 95777 - DNA, 13 bp, Artificial Sequence
  Oligonucleotide for detection of SNP TSC0023825
tcgtcgtttatty

SEQ ID NO: 95778 - DNA, 13 bp, Artificial Sequence
  Oligonucleotide for detection of SNP TSC0023825
raataaacgacga

SEQ ID NO: 95779 - DNA, 13 bp, Artificial Sequence
  Oligonucleotide for detection of SNP TSC0023825
tcgtcggttatty

SEQ ID NO: 95780 - DNA, 13 bp, Artificial Sequence
  Oligonucleotide for detection of SNP TSC0023825
raataaccgacga

SEQ ID NO: 95781 - DNA, 13 bp, Artificial Sequence
  Oligonucleotide for detection of SNP TSC0023826
taatttaaaattt

SEQ ID NO: 95782 - DNA, 13 bp, Artificial Sequence
  Oligonucleotide for detection of SNP TSC0023826
aaattttaaatta

SEQ ID NO: 95783 - DNA, 13 bp, Artificial Sequence
  Oligonucleotide for detection of SNP TSC0023827
tgttagtagtaat

SEQ ID NO: 95784 - DNA, 13 bp, Artificial Sequence
  Oligonucleotide for detection of SNP TSC0023827
attactactaaca

SEQ ID NO: 95785 - DNA, 13 bp, Artificial Sequence
  Oligonucleotide for detection of SNP TSC0023827
tgttaggagtaat

SEQ ID NO: 95786 - DNA, 13 bp, Artificial Sequence
  Oligonucleotide for detection of SNP TSC0023827
attactcctaaca

SEQ ID NO: 95787 - DNA, 13 bp, Artificial Sequence
  Oligonucleotide for detection of SNP TSC0023827
attgttgttgata

SEQ ID NO: 95788 - DNA, 13 bp, Artificial Sequence
  Oligonucleotide for detection of SNP TSC0023827
tatcaacaacaat

SEQ ID NO: 95789 - DNA, 13 bp, Artificial Sequence
  Oligonucleotide for detection of SNP TSC0023827
attgtttttgata

SEQ ID NO: 95790 - DNA, 13 bp, Artificial Sequence
  Oligonucleotide for detection of SNP TSC0023827
tatcaaaaacaat

SEQ ID NO: 95791 - DNA, 13 bp, Artificial Sequence
  Oligonucleotide for detection of SNP TSC0023828
taattaaaaggta

SEQ ID NO: 95792 - DNA, 13 bp, Artificial Sequence
  Oligonucleotide for detection of SNP TSC0023828
taccttttaatta

SEQ ID NO: 95793 - DNA, 13 bp, Artificial Sequence
  Oligonucleotide for detection of SNP TSC0023828
taattagaaggta

SEQ ID NO: 95794 - DNA, 13 bp, Artificial Sequence
  Oligonucleotide for detection of SNP TSC0023828
taccttctaatta

SEQ ID NO: 95795 - DNA, 13 bp, Artificial Sequence
  Oligonucleotide for detection of SNP TSC0023830
gtggttagaggga

SEQ ID NO: 95796 - DNA, 13 bp, Artificial Sequence
  Oligonucleotide for detection of SNP TSC0023830
tccctctaaccac

SEQ ID NO: 95797 - DNA, 13 bp, Artificial Sequence
  Oligonucleotide for detection of SNP TSC0023830
gtggttggaggga

SEQ ID NO: 95798 - DNA, 13 bp, Artificial Sequence
  Oligonucleotide for detection of SNP TSC0023830
tccctccaaccac

SEQ ID NO: 95799 - DNA, 13 bp, Artificial Sequence
  Oligonucleotide for detection of SNP TSC0023830
gtggtcggaggga

SEQ ID NO: 95800 - DNA, 13 bp, Artificial Sequence
  Oligonucleotide for detection of SNP TSC0023830
tccctccgaccac

SEQ ID NO: 95801 - DNA, 13 bp, Artificial Sequence
  Oligonucleotide for detection of SNP TSC0023830
tttttttggttay

SEQ ID NO: 95802 - DNA, 13 bp, Artificial Sequence
  Oligonucleotide for detection of SNP TSC0023830
rtaaccaaaaaaa

SEQ ID NO: 95803 - DNA, 13 bp, Artificial Sequence
  Oligonucleotide for detection of SNP TSC0023830
ttttttcggttay

SEQ ID NO: 95804 - DNA, 13 bp, Artificial Sequence
  Oligonucleotide for detection of SNP TSC0023830
rtaaccgaaaaaa

SEQ ID NO: 95805 - DNA, 13 bp, Artificial Sequence
  Oligonucleotide for detection of SNP TSC0023831
atatttgtatata

SEQ ID NO: 95806 - DNA, 13 bp, Artificial Sequence
  Oligonucleotide for detection of SNP TSC0023831
tatatacaaatat

SEQ ID NO: 95807 - DNA, 13 bp, Artificial Sequence
  Oligonucleotide for detection of SNP TSC0023831
atatttatatata

SEQ ID NO: 95808 - DNA, 13 bp, Artificial Sequence
  Oligonucleotide for detection of SNP TSC0023831
tatatataaatat

SEQ ID NO: 95809 - DNA, 13 bp, Artificial Sequence
  Oligonucleotide for detection of SNP TSC0023832
ttgaaagtttatg

SEQ ID NO: 95810 - DNA, 13 bp, Artificial Sequence
  Oligonucleotide for detection of SNP TSC0023832
cataaactttcaa

SEQ ID NO: 95811 - DNA, 13 bp, Artificial Sequence
  Oligonucleotide for detection of SNP TSC0023832
ttgaaaatttatg

SEQ ID NO: 95812 - DNA, 13 bp, Artificial Sequence
  Oligonucleotide for detection of SNP TSC0023832
cataaattttcaa

SEQ ID NO: 95813 - DNA, 13 bp, Artificial Sequence
  Oligonucleotide for detection of SNP TSC0023833
ggatgatagggty

SEQ ID NO: 95814 - DNA, 13 bp, Artificial Sequence
  Oligonucleotide for detection of SNP TSC0023833
raccctatcatcc

SEQ ID NO: 95815 - DNA, 13 bp, Artificial Sequence
  Oligonucleotide for detection of SNP TSC0023833
ggatgagagggty

SEQ ID NO: 95816 - DNA, 13 bp, Artificial Sequence
  Oligonucleotide for detection of SNP TSC0023833
raccctctcatcc

SEQ ID NO: 95817 - DNA, 13 bp, Artificial Sequence
  Oligonucleotide for detection of SNP TSC0023833
gattttgttatty

SEQ ID NO: 95818 - DNA, 13 bp, Artificial Sequence
  Oligonucleotide for detection of SNP TSC0023833
raataacaaaatc

SEQ ID NO: 95819 - DNA, 13 bp, Artificial Sequence
  Oligonucleotide for detection of SNP TSC0023833
gatttttttatty

SEQ ID NO: 95820 - DNA, 13 bp, Artificial Sequence
  Oligonucleotide for detection of SNP TSC0023833
raataaaaaaatc

SEQ ID NO: 95821 - DNA, 13 bp, Artificial Sequence
  Oligonucleotide for detection of SNP TSC0023834
agttaagattatt

SEQ ID NO: 95822 - DNA, 13 bp, Artificial Sequence
  Oligonucleotide for detection of SNP TSC0023834
aataatcttaact

SEQ ID NO: 95823 - DNA, 13 bp, Artificial Sequence
  Oligonucleotide for detection of SNP TSC0023834
agttaaaattatt

SEQ ID NO: 95824 - DNA, 13 bp, Artificial Sequence
  Oligonucleotide for detection of SNP TSC0023834
aataattttaact

SEQ ID NO: 95825 - DNA, 13 bp, Artificial Sequence
  Oligonucleotide for detection of SNP TSC0023836
atgtaggaattgy

SEQ ID NO: 95826 - DNA, 13 bp, Artificial Sequence
  Oligonucleotide for detection of SNP TSC0023836
rcaattcctacat

SEQ ID NO: 95827 - DNA, 13 bp, Artificial Sequence
  Oligonucleotide for detection of SNP TSC0023836
atgtagaaattgy

SEQ ID NO: 95828 - DNA, 13 bp, Artificial Sequence
  Oligonucleotide for detection of SNP TSC0023836
rcaatttctacat

SEQ ID NO: 95829 - DNA, 13 bp, Artificial Sequence
  Oligonucleotide for detection of SNP TSC0023836
atgtaggaatcgy

SEQ ID NO: 95830 - DNA, 13 bp, Artificial Sequence
  Oligonucleotide for detection of SNP TSC0023836
rcgattcctacat

SEQ ID NO: 95831 - DNA, 13 bp, Artificial Sequence
  Oligonucleotide for detection of SNP TSC0023836
atgtagaaatcgy

SEQ ID NO: 95832 - DNA, 13 bp, Artificial Sequence
  Oligonucleotide for detection of SNP TSC0023836
rcgatttctacat

SEQ ID NO: 95833 - DNA, 13 bp, Artificial Sequence
  Oligonucleotide for detection of SNP TSC0023839
taagtaaaagatt

SEQ ID NO: 95834 - DNA, 13 bp, Artificial Sequence
  Oligonucleotide for detection of SNP TSC0023839
aatcttttactta

SEQ ID NO: 95835 - DNA, 13 bp, Artificial Sequence
  Oligonucleotide for detection of SNP TSC0023839
taagtagaagatt

SEQ ID NO: 95836 - DNA, 13 bp, Artificial Sequence
  Oligonucleotide for detection of SNP TSC0023839
aatcttctactta

SEQ ID NO: 95837 - DNA, 13 bp, Artificial Sequence
  Oligonucleotide for detection of SNP TSC0023840
ttttgtgttggtt

SEQ ID NO: 95838 - DNA, 13 bp, Artificial Sequence
  Oligonucleotide for detection of SNP TSC0023840
aaccaacacaaaa

SEQ ID NO: 95839 - DNA, 13 bp, Artificial Sequence
  Oligonucleotide for detection of SNP TSC0023840
ttttgttttggtt

SEQ ID NO: 95840 - DNA, 13 bp, Artificial Sequence
  Oligonucleotide for detection of SNP TSC0023840
aaccaaaacaaaa

SEQ ID NO: 95841 - DNA, 13 bp, Artificial Sequence
  Oligonucleotide for detection of SNP TSC0023840
agttagtataaag

SEQ ID NO: 95842 - DNA, 13 bp, Artificial Sequence
  Oligonucleotide for detection of SNP TSC0023840
ctttatactaact

SEQ ID NO: 95843 - DNA, 13 bp, Artificial Sequence
  Oligonucleotide for detection of SNP TSC0023840
agttagaataaag

SEQ ID NO: 95844 - DNA, 13 bp, Artificial Sequence
  Oligonucleotide for detection of SNP TSC0023840
ctttattctaact

SEQ ID NO: 95845 - DNA, 13 bp, Artificial Sequence
  Oligonucleotide for detection of SNP TSC0023841
atagaaatattag

SEQ ID NO: 95846 - DNA, 13 bp, Artificial Sequence
  Oligonucleotide for detection of SNP TSC0023841
ctaatatttctat

SEQ ID NO: 95847 - DNA, 13 bp, Artificial Sequence
  Oligonucleotide for detection of SNP TSC0023841
atagaagtattag

SEQ ID NO: 95848 - DNA, 13 bp, Artificial Sequence
  Oligonucleotide for detection of SNP TSC0023841
ctaatacttctat

SEQ ID NO: 95849 - DNA, 13 bp, Artificial Sequence
  Oligonucleotide for detection of SNP TSC0023842
tttttgaaatggy

SEQ ID NO: 95850 - DNA, 13 bp, Artificial Sequence
  Oligonucleotide for detection of SNP TSC0023842
rccatttcaaaaa

SEQ ID NO: 95851 - DNA, 13 bp, Artificial Sequence
  Oligonucleotide for detection of SNP TSC0023842
tttttggaatggy

SEQ ID NO: 95852 - DNA, 13 bp, Artificial Sequence
  Oligonucleotide for detection of SNP TSC0023842
rccattccaaaaa

SEQ ID NO: 95853 - DNA, 13 bp, Artificial Sequence
  Oligonucleotide for detection of SNP TSC0023842
ttttcgaaatggy

SEQ ID NO: 95854 - DNA, 13 bp, Artificial Sequence
  Oligonucleotide for detection of SNP TSC0023842
rccatttcgaaaa

SEQ ID NO: 95855 - DNA, 13 bp, Artificial Sequence
  Oligonucleotide for detection of SNP TSC0023842
ttttcggaatggy

SEQ ID NO: 95856 - DNA, 13 bp, Artificial Sequence
  Oligonucleotide for detection of SNP TSC0023842
rccattccgaaaa

SEQ ID NO: 95857 - DNA, 13 bp, Artificial Sequence
  Oligonucleotide for detection of SNP TSC0023842
tttttgaaacggy

SEQ ID NO: 95858 - DNA, 13 bp, Artificial Sequence
  Oligonucleotide for detection of SNP TSC0023842
rccgtttcaaaaa

SEQ ID NO: 95859 - DNA, 13 bp, Artificial Sequence
  Oligonucleotide for detection of SNP TSC0023842
tttttggaacggy

SEQ ID NO: 95860 - DNA, 13 bp, Artificial Sequence
  Oligonucleotide for detection of SNP TSC0023842
rccgttccaaaaa

SEQ ID NO: 95861 - DNA, 13 bp, Artificial Sequence
  Oligonucleotide for detection of SNP TSC0023842
ttttcgaaacggy

SEQ ID NO: 95862 - DNA, 13 bp, Artificial Sequence
  Oligonucleotide for detection of SNP TSC0023842
rccgtttcgaaaa

SEQ ID NO: 95863 - DNA, 13 bp, Artificial Sequence
  Oligonucleotide for detection of SNP TSC0023842
ttttcggaacggy

SEQ ID NO: 95864 - DNA, 13 bp, Artificial Sequence
  Oligonucleotide for detection of SNP TSC0023842
rccgttccgaaaa

SEQ ID NO: 95865 - DNA, 13 bp, Artificial Sequence
  Oligonucleotide for detection of SNP TSC0023844
gttgtcgtatagy

SEQ ID NO: 95866 - DNA, 13 bp, Artificial Sequence
  Oligonucleotide for detection of SNP TSC0023844
rctatacgacaac

SEQ ID NO: 95867 - DNA, 13 bp, Artificial Sequence
  Oligonucleotide for detection of SNP TSC0023844
gttgtgtggtaay

SEQ ID NO: 95868 - DNA, 13 bp, Artificial Sequence
  Oligonucleotide for detection of SNP TSC0023844
rttaccacacaac

SEQ ID NO: 95869 - DNA, 13 bp, Artificial Sequence
  Oligonucleotide for detection of SNP TSC0023844
gttgtgcggtaay

SEQ ID NO: 95870 - DNA, 13 bp, Artificial Sequence
  Oligonucleotide for detection of SNP TSC0023844
rttaccgcacaac

SEQ ID NO: 95871 - DNA, 13 bp, Artificial Sequence
  Oligonucleotide for detection of SNP TSC0023845
ttttatatgaagg

SEQ ID NO: 95872 - DNA, 13 bp, Artificial Sequence
  Oligonucleotide for detection of SNP TSC0023845
ccttcatataaaa

SEQ ID NO: 95873 - DNA, 13 bp, Artificial Sequence
  Oligonucleotide for detection of SNP TSC0023845
ttttatgtgaagg

SEQ ID NO: 95874 - DNA, 13 bp, Artificial Sequence
  Oligonucleotide for detection of SNP TSC0023845
ccttcacataaaa

SEQ ID NO: 95875 - DNA, 13 bp, Artificial Sequence
  Oligonucleotide for detection of SNP TSC0023846
gagagtggtttty

SEQ ID NO: 95876 - DNA, 13 bp, Artificial Sequence
  Oligonucleotide for detection of SNP TSC0023846
raaaaccactctc

SEQ ID NO: 95877 - DNA, 13 bp, Artificial Sequence
  Oligonucleotide for detection of SNP TSC0023846
gagagtagtttty

SEQ ID NO: 95878 - DNA, 13 bp, Artificial Sequence
  Oligonucleotide for detection of SNP TSC0023846
raaaactactctc

SEQ ID NO: 95879 - DNA, 13 bp, Artificial Sequence
  Oligonucleotide for detection of SNP TSC0023849
gtttagattgaga

SEQ ID NO: 95880 - DNA, 13 bp, Artificial Sequence
  Oligonucleotide for detection of SNP TSC0023849
tctcaatctaaac

SEQ ID NO: 95881 - DNA, 13 bp, Artificial Sequence
  Oligonucleotide for detection of SNP TSC0023849
gtttaggttgaga

SEQ ID NO: 95882 - DNA, 13 bp, Artificial Sequence
  Oligonucleotide for detection of SNP TSC0023849
tctcaacctaaac

SEQ ID NO: 95883 - DNA, 13 bp, Artificial Sequence
  Oligonucleotide for detection of SNP TSC0023850
ttaagtatttatt

SEQ ID NO: 95884 - DNA, 13 bp, Artificial Sequence
  Oligonucleotide for detection of SNP TSC0023850
aataaatacttaa

SEQ ID NO: 95885 - DNA, 13 bp, Artificial Sequence
  Oligonucleotide for detection of SNP TSC0023851
ttgagaatattta

SEQ ID NO: 95886 - DNA, 13 bp, Artificial Sequence
  Oligonucleotide for detection of SNP TSC0023851
taaatattctcaa

SEQ ID NO: 95887 - DNA, 13 bp, Artificial Sequence
  Oligonucleotide for detection of SNP TSC0023851
ttgagagtattta

SEQ ID NO: 95888 - DNA, 13 bp, Artificial Sequence
  Oligonucleotide for detection of SNP TSC0023851
taaatactctcaa

SEQ ID NO: 95889 - DNA, 13 bp, Artificial Sequence
  Oligonucleotide for detection of SNP TSC0023851
tcgagaatattta

SEQ ID NO: 95890 - DNA, 13 bp, Artificial Sequence
  Oligonucleotide for detection of SNP TSC0023851
taaatattctcga

SEQ ID NO: 95891 - DNA, 13 bp, Artificial Sequence
  Oligonucleotide for detection of SNP TSC0023851
tcgagagtattta

SEQ ID NO: 95892 - DNA, 13 bp, Artificial Sequence
  Oligonucleotide for detection of SNP TSC0023851
taaatactctcga

SEQ ID NO: 95893 - DNA, 13 bp, Artificial Sequence
  Oligonucleotide for detection of SNP TSC0023852
ttattggggaaag

SEQ ID NO: 95894 - DNA, 13 bp, Artificial Sequence
  Oligonucleotide for detection of SNP TSC0023852
ctttccccaataa

SEQ ID NO: 95895 - DNA, 13 bp, Artificial Sequence
  Oligonucleotide for detection of SNP TSC0023852
ttattgtggaaag

SEQ ID NO: 95896 - DNA, 13 bp, Artificial Sequence
  Oligonucleotide for detection of SNP TSC0023852
ctttccacaataa

SEQ ID NO: 95897 - DNA, 13 bp, Artificial Sequence
  Oligonucleotide for detection of SNP TSC0023852
ttttttttagtga

SEQ ID NO: 95898 - DNA, 13 bp, Artificial Sequence
  Oligonucleotide for detection of SNP TSC0023852
tcactaaaaaaaa

SEQ ID NO: 95899 - DNA, 13 bp, Artificial Sequence
  Oligonucleotide for detection of SNP TSC0023852
ttttttatagtga

SEQ ID NO: 95900 - DNA, 13 bp, Artificial Sequence
  Oligonucleotide for detection of SNP TSC0023852
tcactataaaaaa

SEQ ID NO: 95901 - DNA, 13 bp, Artificial Sequence
  Oligonucleotide for detection of SNP TSC0023856
tgtaatagtttat

SEQ ID NO: 95902 - DNA, 13 bp, Artificial Sequence
  Oligonucleotide for detection of SNP TSC0023856
ataaactattaca

SEQ ID NO: 95903 - DNA, 13 bp, Artificial Sequence
  Oligonucleotide for detection of SNP TSC0023856
tgtaatggtttat

SEQ ID NO: 95904 - DNA, 13 bp, Artificial Sequence
  Oligonucleotide for detection of SNP TSC0023856
ataaaccattaca

SEQ ID NO: 95905 - DNA, 13 bp, Artificial Sequence
  Oligonucleotide for detection of SNP TSC0023856
tgtaacggtttat

SEQ ID NO: 95906 - DNA, 13 bp, Artificial Sequence
  Oligonucleotide for detection of SNP TSC0023856
ataaaccgttaca

SEQ ID NO: 95907 - DNA, 13 bp, Artificial Sequence
  Oligonucleotide for detection of SNP TSC0023856
atagattgttata

SEQ ID NO: 95908 - DNA, 13 bp, Artificial Sequence
  Oligonucleotide for detection of SNP TSC0023856
tataacaatctat

SEQ ID NO: 95909 - DNA, 13 bp, Artificial Sequence
  Oligonucleotide for detection of SNP TSC0023856
atagatcgttata

SEQ ID NO: 95910 - DNA, 13 bp, Artificial Sequence
  Oligonucleotide for detection of SNP TSC0023856
tataacgatctat

SEQ ID NO: 95911 - DNA, 13 bp, Artificial Sequence
  Oligonucleotide for detection of SNP TSC0023857
tgtttgagattat

SEQ ID NO: 95912 - DNA, 13 bp, Artificial Sequence
  Oligonucleotide for detection of SNP TSC0023857
ataatctcaaaca

SEQ ID NO: 95913 - DNA, 13 bp, Artificial Sequence
  Oligonucleotide for detection of SNP TSC0023857
tgtttgggattat

SEQ ID NO: 95914 - DNA, 13 bp, Artificial Sequence
  Oligonucleotide for detection of SNP TSC0023857
ataatcccaaaca

SEQ ID NO: 95915 - DNA, 13 bp, Artificial Sequence
  Oligonucleotide for detection of SNP TSC0023858
tgatgaagtaagg

SEQ ID NO: 95916 - DNA, 13 bp, Artificial Sequence
  Oligonucleotide for detection of SNP TSC0023858
ccttacttcatca

SEQ ID NO: 95917 - DNA, 13 bp, Artificial Sequence
  Oligonucleotide for detection of SNP TSC0023858
tgatgaggtaagg

SEQ ID NO: 95918 - DNA, 13 bp, Artificial Sequence
  Oligonucleotide for detection of SNP TSC0023858
ccttacctcatca

SEQ ID NO: 95919 - DNA, 13 bp, Artificial Sequence
  Oligonucleotide for detection of SNP TSC0023859
tagaaaagttgty

SEQ ID NO: 95920 - DNA, 13 bp, Artificial Sequence
  Oligonucleotide for detection of SNP TSC0023859
racaacttttcta

SEQ ID NO: 95921 - DNA, 13 bp, Artificial Sequence
  Oligonucleotide for detection of SNP TSC0023859
tagaaaggttgty

SEQ ID NO: 95922 - DNA, 13 bp, Artificial Sequence
  Oligonucleotide for detection of SNP TSC0023859
racaacctttcta

SEQ ID NO: 95923 - DNA, 13 bp, Artificial Sequence
  Oligonucleotide for detection of SNP TSC0023860
tggtagtgttata

SEQ ID NO: 95924 - DNA, 13 bp, Artificial Sequence
  Oligonucleotide for detection of SNP TSC0023860
tataacactacca

SEQ ID NO: 95925 - DNA, 13 bp, Artificial Sequence
  Oligonucleotide for detection of SNP TSC0023860
tggtagcgttata

SEQ ID NO: 95926 - DNA, 13 bp, Artificial Sequence
  Oligonucleotide for detection of SNP TSC0023860
tataacgctacca

SEQ ID NO: 95927 - DNA, 13 bp, Artificial Sequence
  Oligonucleotide for detection of SNP TSC0023860
tgtggtgttgtta

SEQ ID NO: 95928 - DNA, 13 bp, Artificial Sequence
  Oligonucleotide for detection of SNP TSC0023860
taacaacaccaca

SEQ ID NO: 95929 - DNA, 13 bp, Artificial Sequence
  Oligonucleotide for detection of SNP TSC0023860
tgtggtattgtta

SEQ ID NO: 95930 - DNA, 13 bp, Artificial Sequence
  Oligonucleotide for detection of SNP TSC0023860
taacaataccaca

SEQ ID NO: 95931 - DNA, 13 bp, Artificial Sequence
  Oligonucleotide for detection of SNP TSC0023860
tgtggcgttgtta

SEQ ID NO: 95932 - DNA, 13 bp, Artificial Sequence
  Oligonucleotide for detection of SNP TSC0023860
taacaacgccaca

SEQ ID NO: 95933 - DNA, 13 bp, Artificial Sequence
  Oligonucleotide for detection of SNP TSC0023861
gttgtaagaatty

SEQ ID NO: 95934 - DNA, 13 bp, Artificial Sequence
  Oligonucleotide for detection of SNP TSC0023861
raattcttacaac

SEQ ID NO: 95935 - DNA, 13 bp, Artificial Sequence
  Oligonucleotide for detection of SNP TSC0023861
gttgtaggaatty

SEQ ID NO: 95936 - DNA, 13 bp, Artificial Sequence
  Oligonucleotide for detection of SNP TSC0023861
raattcctacaac

SEQ ID NO: 95937 - DNA, 13 bp, Artificial Sequence
  Oligonucleotide for detection of SNP TSC0023862
aattgagtgtttt

SEQ ID NO: 95938 - DNA, 13 bp, Artificial Sequence
  Oligonucleotide for detection of SNP TSC0023862
aaaacactcaatt

SEQ ID NO: 95939 - DNA, 13 bp, Artificial Sequence
  Oligonucleotide for detection of SNP TSC0023862
aattgattgtttt

SEQ ID NO: 95940 - DNA, 13 bp, Artificial Sequence
  Oligonucleotide for detection of SNP TSC0023862
aaaacaatcaatt

SEQ ID NO: 95941 - DNA, 13 bp, Artificial Sequence
  Oligonucleotide for detection of SNP TSC0023862
aagatatttagtt

SEQ ID NO: 95942 - DNA, 13 bp, Artificial Sequence
  Oligonucleotide for detection of SNP TSC0023862
aactaaatatctt

SEQ ID NO: 95943 - DNA, 13 bp, Artificial Sequence
  Oligonucleotide for detection of SNP TSC0023862
aagataattagtt

SEQ ID NO: 95944 - DNA, 13 bp, Artificial Sequence
  Oligonucleotide for detection of SNP TSC0023862
aactaattatctt

SEQ ID NO: 95945 - DNA, 13 bp, Artificial Sequence
  Oligonucleotide for detection of SNP TSC0023863
ttattgtagtggy

SEQ ID NO: 95946 - DNA, 13 bp, Artificial Sequence
  Oligonucleotide for detection of SNP TSC0023863
rccactacaataa

SEQ ID NO: 95947 - DNA, 13 bp, Artificial Sequence
  Oligonucleotide for detection of SNP TSC0023863
ttattggagtggy

SEQ ID NO: 95948 - DNA, 13 bp, Artificial Sequence
  Oligonucleotide for detection of SNP TSC0023863
rccactccaataa

SEQ ID NO: 95949 - DNA, 13 bp, Artificial Sequence
  Oligonucleotide for detection of SNP TSC0023863
ttatcgtagtggy

SEQ ID NO: 95950 - DNA, 13 bp, Artificial Sequence
  Oligonucleotide for detection of SNP TSC0023863
rccactacgataa

SEQ ID NO: 95951 - DNA, 13 bp, Artificial Sequence
  Oligonucleotide for detection of SNP TSC0023863
ttatcggagtggy

SEQ ID NO: 95952 - DNA, 13 bp, Artificial Sequence
  Oligonucleotide for detection of SNP TSC0023863
rccactccgataa

SEQ ID NO: 95953 - DNA, 13 bp, Artificial Sequence
  Oligonucleotide for detection of SNP TSC0023863
ttattgtagcggy

SEQ ID NO: 95954 - DNA, 13 bp, Artificial Sequence
  Oligonucleotide for detection of SNP TSC0023863
rccgctacaataa

SEQ ID NO: 95955 - DNA, 13 bp, Artificial Sequence
  Oligonucleotide for detection of SNP TSC0023863
ttattggagcggy

SEQ ID NO: 95956 - DNA, 13 bp, Artificial Sequence
  Oligonucleotide for detection of SNP TSC0023863
rccgctccaataa

SEQ ID NO: 95957 - DNA, 13 bp, Artificial Sequence
  Oligonucleotide for detection of SNP TSC0023863
ttatcgtagcggy

SEQ ID NO: 95958 - DNA, 13 bp, Artificial Sequence
  Oligonucleotide for detection of SNP TSC0023863
rccgctacgataa

SEQ ID NO: 95959 - DNA, 13 bp, Artificial Sequence
  Oligonucleotide for detection of SNP TSC0023863
ttatcggagcggy

SEQ ID NO: 95960 - DNA, 13 bp, Artificial Sequence
  Oligonucleotide for detection of SNP TSC0023863
rccgctccgataa

SEQ ID NO: 95961 - DNA, 13 bp, Artificial Sequence
  Oligonucleotide for detection of SNP TSC0023863
gttgttgtggtgg

SEQ ID NO: 95962 - DNA, 13 bp, Artificial Sequence
  Oligonucleotide for detection of SNP TSC0023863
ccaccacaacaac

SEQ ID NO: 95963 - DNA, 13 bp, Artificial Sequence
  Oligonucleotide for detection of SNP TSC0023863
gttgttttggtgg

SEQ ID NO: 95964 - DNA, 13 bp, Artificial Sequence
  Oligonucleotide for detection of SNP TSC0023863
ccaccaaaacaac

SEQ ID NO: 95965 - DNA, 13 bp, Artificial Sequence
  Oligonucleotide for detection of SNP TSC0023863
gtcgttgtggtgg

SEQ ID NO: 95966 - DNA, 13 bp, Artificial Sequence
  Oligonucleotide for detection of SNP TSC0023863
ccaccacaacgac

SEQ ID NO: 95967 - DNA, 13 bp, Artificial Sequence
  Oligonucleotide for detection of SNP TSC0023863
gtcgttttggtgg

SEQ ID NO: 95968 - DNA, 13 bp, Artificial Sequence
  Oligonucleotide for detection of SNP TSC0023863
ccaccaaaacgac

SEQ ID NO: 95969 - DNA, 13 bp, Artificial Sequence
  Oligonucleotide for detection of SNP TSC0023863
gttgttgcggtgg

SEQ ID NO: 95970 - DNA, 13 bp, Artificial Sequence
  Oligonucleotide for detection of SNP TSC0023863
ccaccgcaacaac

SEQ ID NO: 95971 - DNA, 13 bp, Artificial Sequence
  Oligonucleotide for detection of SNP TSC0023863
gttgtttcggtgg

SEQ ID NO: 95972 - DNA, 13 bp, Artificial Sequence
  Oligonucleotide for detection of SNP TSC0023863
ccaccgaaacaac

SEQ ID NO: 95973 - DNA, 13 bp, Artificial Sequence
  Oligonucleotide for detection of SNP TSC0023863
gtcgttgcggtgg

SEQ ID NO: 95974 - DNA, 13 bp, Artificial Sequence
  Oligonucleotide for detection of SNP TSC0023863
ccaccgcaacgac

SEQ ID NO: 95975 - DNA, 13 bp, Artificial Sequence
  Oligonucleotide for detection of SNP TSC0023863
gtcgtttcggtgg

SEQ ID NO: 95976 - DNA, 13 bp, Artificial Sequence
  Oligonucleotide for detection of SNP TSC0023863
ccaccgaaacgac

SEQ ID NO: 95977 - DNA, 13 bp, Artificial Sequence
  Oligonucleotide for detection of SNP TSC0023864
tttgttaatgatg

SEQ ID NO: 95978 - DNA, 13 bp, Artificial Sequence
  Oligonucleotide for detection of SNP TSC0023864
catcattaacaaa

SEQ ID NO: 95979 - DNA, 13 bp, Artificial Sequence
  Oligonucleotide for detection of SNP TSC0023864
tttgtttatgatg

SEQ ID NO: 95980 - DNA, 13 bp, Artificial Sequence
  Oligonucleotide for detection of SNP TSC0023864
catcataaacaaa

SEQ ID NO: 95981 - DNA, 13 bp, Artificial Sequence
  Oligonucleotide for detection of SNP TSC0023864
tattattagtaag

SEQ ID NO: 95982 - DNA, 13 bp, Artificial Sequence
  Oligonucleotide for detection of SNP TSC0023864
cttactaataata

SEQ ID NO: 95983 - DNA, 13 bp, Artificial Sequence
  Oligonucleotide for detection of SNP TSC0023864
tattatgagtaag

SEQ ID NO: 95984 - DNA, 13 bp, Artificial Sequence
  Oligonucleotide for detection of SNP TSC0023864
cttactcataata

SEQ ID NO: 95985 - DNA, 13 bp, Artificial Sequence
  Oligonucleotide for detection of SNP TSC0023870
tatttagtttagt

SEQ ID NO: 95986 - DNA, 13 bp, Artificial Sequence
  Oligonucleotide for detection of SNP TSC0023870
actaaactaaata

SEQ ID NO: 95987 - DNA, 13 bp, Artificial Sequence
  Oligonucleotide for detection of SNP TSC0023870
tatttaatttagt

SEQ ID NO: 95988 - DNA, 13 bp, Artificial Sequence
  Oligonucleotide for detection of SNP TSC0023870
actaaattaaata

SEQ ID NO: 95989 - DNA, 13 bp, Artificial Sequence
  Oligonucleotide for detection of SNP TSC0023871
aagtatggtgtty

SEQ ID NO: 95990 - DNA, 13 bp, Artificial Sequence
  Oligonucleotide for detection of SNP TSC0023871
raacaccatactt

SEQ ID NO: 95991 - DNA, 13 bp, Artificial Sequence
  Oligonucleotide for detection of SNP TSC0023871
aagtatagtgtty

SEQ ID NO: 95992 - DNA, 13 bp, Artificial Sequence
  Oligonucleotide for detection of SNP TSC0023871
raacactatactt

SEQ ID NO: 95993 - DNA, 13 bp, Artificial Sequence
  Oligonucleotide for detection of SNP TSC0023874
gattttattagty

SEQ ID NO: 95994 - DNA, 13 bp, Artificial Sequence
  Oligonucleotide for detection of SNP TSC0023874
ractaataaaatc

SEQ ID NO: 95995 - DNA, 13 bp, Artificial Sequence
  Oligonucleotide for detection of SNP TSC0023874
gattttgttagty

SEQ ID NO: 95996 - DNA, 13 bp, Artificial Sequence
  Oligonucleotide for detection of SNP TSC0023874
ractaacaaaatc

SEQ ID NO: 95997 - DNA, 13 bp, Artificial Sequence
  Oligonucleotide for detection of SNP TSC0023874
gatttcgttagty

SEQ ID NO: 95998 - DNA, 13 bp, Artificial Sequence
  Oligonucleotide for detection of SNP TSC0023874
ractaacgaaatc

SEQ ID NO: 95999 - DNA, 13 bp, Artificial Sequence
  Oligonucleotide for detection of SNP TSC0023874
gattgatggggty

SEQ ID NO: 96000 - DNA, 13 bp, Artificial Sequence
  Oligonucleotide for detection of SNP TSC0023874
raccccatcaatc

SEQ ID NO: 96001 - DNA, 13 bp, Artificial Sequence
  Oligonucleotide for detection of SNP TSC0023874
gattgacggggty

SEQ ID NO: 96002 - DNA, 13 bp, Artificial Sequence
  Oligonucleotide for detection of SNP TSC0023874
raccccgtcaatc

SEQ ID NO: 96003 - DNA, 13 bp, Artificial Sequence
  Oligonucleotide for detection of SNP TSC0023875
ttatatatattty

SEQ ID NO: 96004 - DNA, 13 bp, Artificial Sequence
  Oligonucleotide for detection of SNP TSC0023875
raaatatatataa

SEQ ID NO: 96005 - DNA, 13 bp, Artificial Sequence
  Oligonucleotide for detection of SNP TSC0023875
ttatatgtattty

SEQ ID NO: 96006 - DNA, 13 bp, Artificial Sequence
  Oligonucleotide for detection of SNP TSC0023875
raaatacatataa

SEQ ID NO: 96007 - DNA, 13 bp, Artificial Sequence
  Oligonucleotide for detection of SNP TSC0023876
tgtagtttatgty

SEQ ID NO: 96008 - DNA, 13 bp, Artificial Sequence
  Oligonucleotide for detection of SNP TSC0023876
racataaactaca

SEQ ID NO: 96009 - DNA, 13 bp, Artificial Sequence
  Oligonucleotide for detection of SNP TSC0023876
tgtagtgtatgty

SEQ ID NO: 96010 - DNA, 13 bp, Artificial Sequence
  Oligonucleotide for detection of SNP TSC0023876
racatacactaca

SEQ ID NO: 96011 - DNA, 13 bp, Artificial Sequence
  Oligonucleotide for detection of SNP TSC0023876
cgtagtttatgty

SEQ ID NO: 96012 - DNA, 13 bp, Artificial Sequence
  Oligonucleotide for detection of SNP TSC0023876
racataaactacg

SEQ ID NO: 96013 - DNA, 13 bp, Artificial Sequence
  Oligonucleotide for detection of SNP TSC0023876
cgtagtgtatgty

SEQ ID NO: 96014 - DNA, 13 bp, Artificial Sequence
  Oligonucleotide for detection of SNP TSC0023876
racatacactacg

SEQ ID NO: 96015 - DNA, 13 bp, Artificial Sequence
  Oligonucleotide for detection of SNP TSC0023876
ggtatggattgtg

SEQ ID NO: 96016 - DNA, 13 bp, Artificial Sequence
  Oligonucleotide for detection of SNP TSC0023876
cacaatccatacc

SEQ ID NO: 96017 - DNA, 13 bp, Artificial Sequence
  Oligonucleotide for detection of SNP TSC0023876
ggtatgtattgtg

SEQ ID NO: 96018 - DNA, 13 bp, Artificial Sequence
  Oligonucleotide for detection of SNP TSC0023876
cacaatacatacc

SEQ ID NO: 96019 - DNA, 13 bp, Artificial Sequence
  Oligonucleotide for detection of SNP TSC0023876
ggtatggattgcg

SEQ ID NO: 96020 - DNA, 13 bp, Artificial Sequence
  Oligonucleotide for detection of SNP TSC0023876
cgcaatccatacc

SEQ ID NO: 96021 - DNA, 13 bp, Artificial Sequence
  Oligonucleotide for detection of SNP TSC0023876
ggtatgtattgcg

SEQ ID NO: 96022 - DNA, 13 bp, Artificial Sequence
  Oligonucleotide for detection of SNP TSC0023876
cgcaatacatacc

SEQ ID NO: 96023 - DNA, 13 bp, Artificial Sequence
  Oligonucleotide for detection of SNP TSC0023878
gattaagttgtaa

SEQ ID NO: 96024 - DNA, 13 bp, Artificial Sequence
  Oligonucleotide for detection of SNP TSC0023878
ttacaacttaatc

SEQ ID NO: 96025 - DNA, 13 bp, Artificial Sequence
  Oligonucleotide for detection of SNP TSC0023878
gattaaattgtaa

SEQ ID NO: 96026 - DNA, 13 bp, Artificial Sequence
  Oligonucleotide for detection of SNP TSC0023878
ttacaatttaatc

SEQ ID NO: 96027 - DNA, 13 bp, Artificial Sequence
  Oligonucleotide for detection of SNP TSC0023879
gtaggtatgaatt

SEQ ID NO: 96028 - DNA, 13 bp, Artificial Sequence
  Oligonucleotide for detection of SNP TSC0023879
aattcatacctac

SEQ ID NO: 96029 - DNA, 13 bp, Artificial Sequence
  Oligonucleotide for detection of SNP TSC0023879
gtaggtgtgaatt

SEQ ID NO: 96030 - DNA, 13 bp, Artificial Sequence
  Oligonucleotide for detection of SNP TSC0023879
aattcacacctac

SEQ ID NO: 96031 - DNA, 13 bp, Artificial Sequence
  Oligonucleotide for detection of SNP TSC0023881
gataatattatat

SEQ ID NO: 96032 - DNA, 13 bp, Artificial Sequence
  Oligonucleotide for detection of SNP TSC0023881
atataatattatc

SEQ ID NO: 96033 - DNA, 13 bp, Artificial Sequence
  Oligonucleotide for detection of SNP TSC0023881
gataattttatat

SEQ ID NO: 96034 - DNA, 13 bp, Artificial Sequence
  Oligonucleotide for detection of SNP TSC0023881
atataaaattatc

SEQ ID NO: 96035 - DNA, 13 bp, Artificial Sequence
  Oligonucleotide for detection of SNP TSC0023881
atatggtgttgty

SEQ ID NO: 96036 - DNA, 13 bp, Artificial Sequence
  Oligonucleotide for detection of SNP TSC0023881
racaacaccatat

SEQ ID NO: 96037 - DNA, 13 bp, Artificial Sequence
  Oligonucleotide for detection of SNP TSC0023881
atatggggttgty

SEQ ID NO: 96038 - DNA, 13 bp, Artificial Sequence
  Oligonucleotide for detection of SNP TSC0023881
racaaccccatat

SEQ ID NO: 96039 - DNA, 13 bp, Artificial Sequence
  Oligonucleotide for detection of SNP TSC0023882
ttataaaaggagt

SEQ ID NO: 96040 - DNA, 13 bp, Artificial Sequence
  Oligonucleotide for detection of SNP TSC0023882
actccttttataa

SEQ ID NO: 96041 - DNA, 13 bp, Artificial Sequence
  Oligonucleotide for detection of SNP TSC0023882
ttataagaggagt

SEQ ID NO: 96042 - DNA, 13 bp, Artificial Sequence
  Oligonucleotide for detection of SNP TSC0023882
actcctcttataa

SEQ ID NO: 96043 - DNA, 13 bp, Artificial Sequence
  Oligonucleotide for detection of SNP TSC0023883
aaaaagggggggg

SEQ ID NO: 96044 - DNA, 13 bp, Artificial Sequence
  Oligonucleotide for detection of SNP TSC0023883
ccccccccttttt

SEQ ID NO: 96045 - DNA, 13 bp, Artificial Sequence
  Oligonucleotide for detection of SNP TSC0023883
aaaaagagggggg

SEQ ID NO: 96046 - DNA, 13 bp, Artificial Sequence
  Oligonucleotide for detection of SNP TSC0023883
cccccctcttttt

SEQ ID NO: 96047 - DNA, 13 bp, Artificial Sequence
  Oligonucleotide for detection of SNP TSC0023884
ttggataaataat

SEQ ID NO: 96048 - DNA, 13 bp, Artificial Sequence
  Oligonucleotide for detection of SNP TSC0023884
attatttatccaa

SEQ ID NO: 96049 - DNA, 13 bp, Artificial Sequence
  Oligonucleotide for detection of SNP TSC0023884
ttggattaataat

SEQ ID NO: 96050 - DNA, 13 bp, Artificial Sequence
  Oligonucleotide for detection of SNP TSC0023884
attattaatccaa

SEQ ID NO: 96051 - DNA, 13 bp, Artificial Sequence
  Oligonucleotide for detection of SNP TSC0023884
attatttatttag

SEQ ID NO: 96052 - DNA, 13 bp, Artificial Sequence
  Oligonucleotide for detection of SNP TSC0023884
ctaaataaataat

SEQ ID NO: 96053 - DNA, 13 bp, Artificial Sequence
  Oligonucleotide for detection of SNP TSC0023884
attattgatttag

SEQ ID NO: 96054 - DNA, 13 bp, Artificial Sequence
  Oligonucleotide for detection of SNP TSC0023884
ctaaatcaataat

SEQ ID NO: 96055 - DNA, 13 bp, Artificial Sequence
  Oligonucleotide for detection of SNP TSC0023885
agggaggggaagg

SEQ ID NO: 96056 - DNA, 13 bp, Artificial Sequence
  Oligonucleotide for detection of SNP TSC0023885
ccttcccctccct

SEQ ID NO: 96057 - DNA, 13 bp, Artificial Sequence
  Oligonucleotide for detection of SNP TSC0023885
agggagtggaagg

SEQ ID NO: 96058 - DNA, 13 bp, Artificial Sequence
  Oligonucleotide for detection of SNP TSC0023885
ccttccactccct

SEQ ID NO: 96059 - DNA, 13 bp, Artificial Sequence
  Oligonucleotide for detection of SNP TSC0023886
ggttaagatatag

SEQ ID NO: 96060 - DNA, 13 bp, Artificial Sequence
  Oligonucleotide for detection of SNP TSC0023886
ctatatcttaacc

SEQ ID NO: 96061 - DNA, 13 bp, Artificial Sequence
  Oligonucleotide for detection of SNP TSC0023886
ggttaaaatatag

SEQ ID NO: 96062 - DNA, 13 bp, Artificial Sequence
  Oligonucleotide for detection of SNP TSC0023886
ctatattttaacc

SEQ ID NO: 96063 - DNA, 13 bp, Artificial Sequence
  Oligonucleotide for detection of SNP TSC0023887
ttaggaataggtt

SEQ ID NO: 96064 - DNA, 13 bp, Artificial Sequence
  Oligonucleotide for detection of SNP TSC0023887
aacctattcctaa

SEQ ID NO: 96065 - DNA, 13 bp, Artificial Sequence
  Oligonucleotide for detection of SNP TSC0023887
ttaggagtaggtt

SEQ ID NO: 96066 - DNA, 13 bp, Artificial Sequence
  Oligonucleotide for detection of SNP TSC0023887
aacctactcctaa

SEQ ID NO: 96067 - DNA, 13 bp, Artificial Sequence
  Oligonucleotide for detection of SNP TSC0023890
aaatataggtgtt

SEQ ID NO: 96068 - DNA, 13 bp, Artificial Sequence
  Oligonucleotide for detection of SNP TSC0023890
aacacctatattt

SEQ ID NO: 96069 - DNA, 13 bp, Artificial Sequence
  Oligonucleotide for detection of SNP TSC0023890
aaatatgggtgtt

SEQ ID NO: 96070 - DNA, 13 bp, Artificial Sequence
  Oligonucleotide for detection of SNP TSC0023890
aacacccatattt

SEQ ID NO: 96071 - DNA, 13 bp, Artificial Sequence
  Oligonucleotide for detection of SNP TSC0023890
aaatataggcgtt

SEQ ID NO: 96072 - DNA, 13 bp, Artificial Sequence
  Oligonucleotide for detection of SNP TSC0023890
aacgcctatattt

SEQ ID NO: 96073 - DNA, 13 bp, Artificial Sequence
  Oligonucleotide for detection of SNP TSC0023890
aaatacgggtgtt

SEQ ID NO: 96074 - DNA, 13 bp, Artificial Sequence
  Oligonucleotide for detection of SNP TSC0023890
aacacccgtattt

SEQ ID NO: 96075 - DNA, 13 bp, Artificial Sequence
  Oligonucleotide for detection of SNP TSC0023890
aaatatgggcgtt

SEQ ID NO: 96076 - DNA, 13 bp, Artificial Sequence
  Oligonucleotide for detection of SNP TSC0023890
aacgcccatattt

SEQ ID NO: 96077 - DNA, 13 bp, Artificial Sequence
  Oligonucleotide for detection of SNP TSC0023890
aaatacgggcgtt

SEQ ID NO: 96078 - DNA, 13 bp, Artificial Sequence
  Oligonucleotide for detection of SNP TSC0023890
aacgcccgtattt

SEQ ID NO: 96079 - DNA, 13 bp, Artificial Sequence
  Oligonucleotide for detection of SNP TSC0023890
agtgtttgtgttt

SEQ ID NO: 96080 - DNA, 13 bp, Artificial Sequence
  Oligonucleotide for detection of SNP TSC0023890
aaacacaaacact

SEQ ID NO: 96081 - DNA, 13 bp, Artificial Sequence
  Oligonucleotide for detection of SNP TSC0023890
agcgtttgtgttt

SEQ ID NO: 96082 - DNA, 13 bp, Artificial Sequence
  Oligonucleotide for detection of SNP TSC0023890
aaacacaaacgct

SEQ ID NO: 96083 - DNA, 13 bp, Artificial Sequence
  Oligonucleotide for detection of SNP TSC0023890
agtgttcgtgttt

SEQ ID NO: 96084 - DNA, 13 bp, Artificial Sequence
  Oligonucleotide for detection of SNP TSC0023890
aaacacgaacact

SEQ ID NO: 96085 - DNA, 13 bp, Artificial Sequence
  Oligonucleotide for detection of SNP TSC0023890
agcgttcgtgttt

SEQ ID NO: 96086 - DNA, 13 bp, Artificial Sequence
  Oligonucleotide for detection of SNP TSC0023890
aaacacgaacgct

SEQ ID NO: 96087 - DNA, 13 bp, Artificial Sequence
  Oligonucleotide for detection of SNP TSC0023891
ttgggtttgtttg

SEQ ID NO: 96088 - DNA, 13 bp, Artificial Sequence
  Oligonucleotide for detection of SNP TSC0023891
caaacaaacccaa

SEQ ID NO: 96089 - DNA, 13 bp, Artificial Sequence
  Oligonucleotide for detection of SNP TSC0023891
ttgggtgtgtttg

SEQ ID NO: 96090 - DNA, 13 bp, Artificial Sequence
  Oligonucleotide for detection of SNP TSC0023891
caaacacacccaa

SEQ ID NO: 96091 - DNA, 13 bp, Artificial Sequence
  Oligonucleotide for detection of SNP TSC0023891
ttgggcgtgtttg

SEQ ID NO: 96092 - DNA, 13 bp, Artificial Sequence
  Oligonucleotide for detection of SNP TSC0023891
caaacacgcccaa

SEQ ID NO: 96093 - DNA, 13 bp, Artificial Sequence
  Oligonucleotide for detection of SNP TSC0023891
taaataggtttag

SEQ ID NO: 96094 - DNA, 13 bp, Artificial Sequence
  Oligonucleotide for detection of SNP TSC0023891
ctaaacctattta

SEQ ID NO: 96095 - DNA, 13 bp, Artificial Sequence
  Oligonucleotide for detection of SNP TSC0023891
taaatatgtttag

SEQ ID NO: 96096 - DNA, 13 bp, Artificial Sequence
  Oligonucleotide for detection of SNP TSC0023891
ctaaacatattta

SEQ ID NO: 96097 - DNA, 13 bp, Artificial Sequence
  Oligonucleotide for detection of SNP TSC0023891
taaatacgtttag

SEQ ID NO: 96098 - DNA, 13 bp, Artificial Sequence
  Oligonucleotide for detection of SNP TSC0023891
ctaaacgtattta

SEQ ID NO: 96099 - DNA, 13 bp, Artificial Sequence
  Oligonucleotide for detection of SNP TSC0023892
tttggtattgtty

SEQ ID NO: 96100 - DNA, 13 bp, Artificial Sequence
  Oligonucleotide for detection of SNP TSC0023892
raacaataccaaa

SEQ ID NO: 96101 - DNA, 13 bp, Artificial Sequence
  Oligonucleotide for detection of SNP TSC0023892
tttggttttgtty

SEQ ID NO: 96102 - DNA, 13 bp, Artificial Sequence
  Oligonucleotide for detection of SNP TSC0023892
raacaaaaccaaa

SEQ ID NO: 96103 - DNA, 13 bp, Artificial Sequence
  Oligonucleotide for detection of SNP TSC0023892
gagtagtattaga

SEQ ID NO: 96104 - DNA, 13 bp, Artificial Sequence
  Oligonucleotide for detection of SNP TSC0023892
tctaatactactc

SEQ ID NO: 96105 - DNA, 13 bp, Artificial Sequence
  Oligonucleotide for detection of SNP TSC0023892
gagtaggattaga

SEQ ID NO: 96106 - DNA, 13 bp, Artificial Sequence
  Oligonucleotide for detection of SNP TSC0023892
tctaatcctactc

SEQ ID NO: 96107 - DNA, 13 bp, Artificial Sequence
  Oligonucleotide for detection of SNP TSC0023893
gtattggggaagg

SEQ ID NO: 96108 - DNA, 13 bp, Artificial Sequence
  Oligonucleotide for detection of SNP TSC0023893
ccttccccaatac

SEQ ID NO: 96109 - DNA, 13 bp, Artificial Sequence
  Oligonucleotide for detection of SNP TSC0023893
gtattgtggaagg

SEQ ID NO: 96110 - DNA, 13 bp, Artificial Sequence
  Oligonucleotide for detection of SNP TSC0023893
ccttccacaatac

SEQ ID NO: 96111 - DNA, 13 bp, Artificial Sequence
  Oligonucleotide for detection of SNP TSC0023893
ttttttttagtgy

SEQ ID NO: 96112 - DNA, 13 bp, Artificial Sequence
  Oligonucleotide for detection of SNP TSC0023893
rcactaaaaaaaa

SEQ ID NO: 96113 - DNA, 13 bp, Artificial Sequence
  Oligonucleotide for detection of SNP TSC0023893
ttttttatagtgy

SEQ ID NO: 96114 - DNA, 13 bp, Artificial Sequence
  Oligonucleotide for detection of SNP TSC0023893
rcactataaaaaa

SEQ ID NO: 96115 - DNA, 13 bp, Artificial Sequence
  Oligonucleotide for detection of SNP TSC0023894
atatttaattaat

SEQ ID NO: 96116 - DNA, 13 bp, Artificial Sequence
  Oligonucleotide for detection of SNP TSC0023894
attaattaaatat

SEQ ID NO: 96117 - DNA, 13 bp, Artificial Sequence
  Oligonucleotide for detection of SNP TSC0023894
atatttgattaat

SEQ ID NO: 96118 - DNA, 13 bp, Artificial Sequence
  Oligonucleotide for detection of SNP TSC0023894
attaatcaaatat

SEQ ID NO: 96119 - DNA, 13 bp, Artificial Sequence
  Oligonucleotide for detection of SNP TSC0023894
atattcgattaat

SEQ ID NO: 96120 - DNA, 13 bp, Artificial Sequence
  Oligonucleotide for detection of SNP TSC0023894
attaatcgaatat

SEQ ID NO: 96121 - DNA, 13 bp, Artificial Sequence
  Oligonucleotide for detection of SNP TSC0023895
gattttggttttt

SEQ ID NO: 96122 - DNA, 13 bp, Artificial Sequence
  Oligonucleotide for detection of SNP TSC0023895
aaaaaccaaaatc

SEQ ID NO: 96123 - DNA, 13 bp, Artificial Sequence
  Oligonucleotide for detection of SNP TSC0023895
gatttttgttttt

SEQ ID NO: 96124 - DNA, 13 bp, Artificial Sequence
  Oligonucleotide for detection of SNP TSC0023895
aaaaacaaaaatc

SEQ ID NO: 96125 - DNA, 13 bp, Artificial Sequence
  Oligonucleotide for detection of SNP TSC0023895
aaaaattagggty

SEQ ID NO: 96126 - DNA, 13 bp, Artificial Sequence
  Oligonucleotide for detection of SNP TSC0023895
raccctaattttt

SEQ ID NO: 96127 - DNA, 13 bp, Artificial Sequence
  Oligonucleotide for detection of SNP TSC0023895
aaaaataagggty

SEQ ID NO: 96128 - DNA, 13 bp, Artificial Sequence
  Oligonucleotide for detection of SNP TSC0023895
racccttattttt

SEQ ID NO: 96129 - DNA, 13 bp, Artificial Sequence
  Oligonucleotide for detection of SNP TSC0023896
gaggtaggtggat

SEQ ID NO: 96130 - DNA, 13 bp, Artificial Sequence
  Oligonucleotide for detection of SNP TSC0023896
atccacctacctc

SEQ ID NO: 96131 - DNA, 13 bp, Artificial Sequence
  Oligonucleotide for detection of SNP TSC0023896
gaggtaagtggat

SEQ ID NO: 96132 - DNA, 13 bp, Artificial Sequence
  Oligonucleotide for detection of SNP TSC0023896
atccacttacctc

SEQ ID NO: 96133 - DNA, 13 bp, Artificial Sequence
  Oligonucleotide for detection of SNP TSC0023898
atagattagttay

SEQ ID NO: 96134 - DNA, 13 bp, Artificial Sequence
  Oligonucleotide for detection of SNP TSC0023898
rtaactaatctat

SEQ ID NO: 96135 - DNA, 13 bp, Artificial Sequence
  Oligonucleotide for detection of SNP TSC0023898
atagatgagttay

SEQ ID NO: 96136 - DNA, 13 bp, Artificial Sequence
  Oligonucleotide for detection of SNP TSC0023898
rtaactcatctat

SEQ ID NO: 96137 - DNA, 13 bp, Artificial Sequence
  Oligonucleotide for detection of SNP TSC0023898
gtgattgatttgt

SEQ ID NO: 96138 - DNA, 13 bp, Artificial Sequence
  Oligonucleotide for detection of SNP TSC0023898
acaaatcaatcac

SEQ ID NO: 96139 - DNA, 13 bp, Artificial Sequence
  Oligonucleotide for detection of SNP TSC0023898
gtgatttatttgt

SEQ ID NO: 96140 - DNA, 13 bp, Artificial Sequence
  Oligonucleotide for detection of SNP TSC0023898
acaaataaatcac

SEQ ID NO: 96141 - DNA, 13 bp, Artificial Sequence
  Oligonucleotide for detection of SNP TSC0023899
gagtaaatggaty

SEQ ID NO: 96142 - DNA, 13 bp, Artificial Sequence
  Oligonucleotide for detection of SNP TSC0023899
ratccatttactc

SEQ ID NO: 96143 - DNA, 13 bp, Artificial Sequence
  Oligonucleotide for detection of SNP TSC0023899
gagtaagtggaty

SEQ ID NO: 96144 - DNA, 13 bp, Artificial Sequence
  Oligonucleotide for detection of SNP TSC0023899
ratccacttactc

SEQ ID NO: 96145 - DNA, 13 bp, Artificial Sequence
  Oligonucleotide for detection of SNP TSC0023901
taataaaaataaa

SEQ ID NO: 96146 - DNA, 13 bp, Artificial Sequence
  Oligonucleotide for detection of SNP TSC0023901
tttatttttatta

SEQ ID NO: 96147 - DNA, 13 bp, Artificial Sequence
  Oligonucleotide for detection of SNP TSC0023902
aaaaaaattagaa

SEQ ID NO: 96148 - DNA, 13 bp, Artificial Sequence
  Oligonucleotide for detection of SNP TSC0023902
ttctaattttttt

SEQ ID NO: 96149 - DNA, 13 bp, Artificial Sequence
  Oligonucleotide for detection of SNP TSC0023902
aaaaaatttagaa

SEQ ID NO: 96150 - DNA, 13 bp, Artificial Sequence
  Oligonucleotide for detection of SNP TSC0023902
ttctaaatttttt

SEQ ID NO: 96151 - DNA, 13 bp, Artificial Sequence
  Oligonucleotide for detection of SNP TSC0023903
aggaaggttagtt

SEQ ID NO: 96152 - DNA, 13 bp, Artificial Sequence
  Oligonucleotide for detection of SNP TSC0023903
aactaaccttcct

SEQ ID NO: 96153 - DNA, 13 bp, Artificial Sequence
  Oligonucleotide for detection of SNP TSC0023903
aggaagattagtt

SEQ ID NO: 96154 - DNA, 13 bp, Artificial Sequence
  Oligonucleotide for detection of SNP TSC0023903
aactaatcttcct

SEQ ID NO: 96155 - DNA, 13 bp, Artificial Sequence
  Oligonucleotide for detection of SNP TSC0023904
taaatgatttaat

SEQ ID NO: 96156 - DNA, 13 bp, Artificial Sequence
  Oligonucleotide for detection of SNP TSC0023904
attaaatcattta

SEQ ID NO: 96157 - DNA, 13 bp, Artificial Sequence
  Oligonucleotide for detection of SNP TSC0023904
taaatggtttaat

SEQ ID NO: 96158 - DNA, 13 bp, Artificial Sequence
  Oligonucleotide for detection of SNP TSC0023904
attaaaccattta

SEQ ID NO: 96159 - DNA, 13 bp, Artificial Sequence
  Oligonucleotide for detection of SNP TSC0023905
tgggagggttgag

SEQ ID NO: 96160 - DNA, 13 bp, Artificial Sequence
  Oligonucleotide for detection of SNP TSC0023905
ctcaaccctccca

SEQ ID NO: 96161 - DNA, 13 bp, Artificial Sequence
  Oligonucleotide for detection of SNP TSC0023905
tgggagagttgag

SEQ ID NO: 96162 - DNA, 13 bp, Artificial Sequence
  Oligonucleotide for detection of SNP TSC0023905
ctcaactctccca

SEQ ID NO: 96163 - DNA, 13 bp, Artificial Sequence
  Oligonucleotide for detection of SNP TSC0023908
ggggagaaagata

SEQ ID NO: 96164 - DNA, 13 bp, Artificial Sequence
  Oligonucleotide for detection of SNP TSC0023908
tatctttctcccc

SEQ ID NO: 96165 - DNA, 13 bp, Artificial Sequence
  Oligonucleotide for detection of SNP TSC0023908
ggggaggaagata

SEQ ID NO: 96166 - DNA, 13 bp, Artificial Sequence
  Oligonucleotide for detection of SNP TSC0023908
tatcttcctcccc

SEQ ID NO: 96167 - DNA, 13 bp, Artificial Sequence
  Oligonucleotide for detection of SNP TSC0023909
ggaagtttttatt

SEQ ID NO: 96168 - DNA, 13 bp, Artificial Sequence
  Oligonucleotide for detection of SNP TSC0023909
aataaaaacttcc

SEQ ID NO: 96169 - DNA, 13 bp, Artificial Sequence
  Oligonucleotide for detection of SNP TSC0023909
ggaagtgtttatt

SEQ ID NO: 96170 - DNA, 13 bp, Artificial Sequence
  Oligonucleotide for detection of SNP TSC0023909
aataaacacttcc

SEQ ID NO: 96171 - DNA, 13 bp, Artificial Sequence
  Oligonucleotide for detection of SNP TSC0023909
ggaagcgtttatt

SEQ ID NO: 96172 - DNA, 13 bp, Artificial Sequence
  Oligonucleotide for detection of SNP TSC0023909
aataaacgcttcc

SEQ ID NO: 96173 - DNA, 13 bp, Artificial Sequence
  Oligonucleotide for detection of SNP TSC0023909
agtgagggtttty

SEQ ID NO: 96174 - DNA, 13 bp, Artificial Sequence
  Oligonucleotide for detection of SNP TSC0023909
raaaaccctcact

SEQ ID NO: 96175 - DNA, 13 bp, Artificial Sequence
  Oligonucleotide for detection of SNP TSC0023909
agtgagtgtttty

SEQ ID NO: 96176 - DNA, 13 bp, Artificial Sequence
  Oligonucleotide for detection of SNP TSC0023909
raaaacactcact

SEQ ID NO: 96177 - DNA, 13 bp, Artificial Sequence
  Oligonucleotide for detection of SNP TSC0023909
agtgagcgtttty

SEQ ID NO: 96178 - DNA, 13 bp, Artificial Sequence
  Oligonucleotide for detection of SNP TSC0023909
raaaacgctcact

SEQ ID NO: 96179 - DNA, 13 bp, Artificial Sequence
  Oligonucleotide for detection of SNP TSC0023910
tagtttagaagaa

SEQ ID NO: 96180 - DNA, 13 bp, Artificial Sequence
  Oligonucleotide for detection of SNP TSC0023910
ttcttctaaacta

SEQ ID NO: 96181 - DNA, 13 bp, Artificial Sequence
  Oligonucleotide for detection of SNP TSC0023910
tagtttggaagaa

SEQ ID NO: 96182 - DNA, 13 bp, Artificial Sequence
  Oligonucleotide for detection of SNP TSC0023910
ttcttccaaacta

SEQ ID NO: 96183 - DNA, 13 bp, Artificial Sequence
  Oligonucleotide for detection of SNP TSC0023910
tagttcggaagaa

SEQ ID NO: 96184 - DNA, 13 bp, Artificial Sequence
  Oligonucleotide for detection of SNP TSC0023910
ttcttccgaacta

SEQ ID NO: 96185 - DNA, 13 bp, Artificial Sequence
  Oligonucleotide for detection of SNP TSC0023910
tttttttgggttg

SEQ ID NO: 96186 - DNA, 13 bp, Artificial Sequence
  Oligonucleotide for detection of SNP TSC0023910
caacccaaaaaaa

SEQ ID NO: 96187 - DNA, 13 bp, Artificial Sequence
  Oligonucleotide for detection of SNP TSC0023910
ttttttcgggttg

SEQ ID NO: 96188 - DNA, 13 bp, Artificial Sequence
  Oligonucleotide for detection of SNP TSC0023910
caacccgaaaaaa

SEQ ID NO: 96189 - DNA, 13 bp, Artificial Sequence
  Oligonucleotide for detection of SNP TSC0023912
gttggttgggtgy

SEQ ID NO: 96190 - DNA, 13 bp, Artificial Sequence
  Oligonucleotide for detection of SNP TSC0023912
rcacccaaccaac

SEQ ID NO: 96191 - DNA, 13 bp, Artificial Sequence
  Oligonucleotide for detection of SNP TSC0023912
gttggtcgggtgy

SEQ ID NO: 96192 - DNA, 13 bp, Artificial Sequence
  Oligonucleotide for detection of SNP TSC0023912
rcacccgaccaac

SEQ ID NO: 96193 - DNA, 13 bp, Artificial Sequence
  Oligonucleotide for detection of SNP TSC0023912
gtatttggttaay

SEQ ID NO: 96194 - DNA, 13 bp, Artificial Sequence
  Oligonucleotide for detection of SNP TSC0023912
rttaaccaaatac

SEQ ID NO: 96195 - DNA, 13 bp, Artificial Sequence
  Oligonucleotide for detection of SNP TSC0023912
gtatttagttaay

SEQ ID NO: 96196 - DNA, 13 bp, Artificial Sequence
  Oligonucleotide for detection of SNP TSC0023912
rttaactaaatac

SEQ ID NO: 96197 - DNA, 13 bp, Artificial Sequence
  Oligonucleotide for detection of SNP TSC0023912
gtattcggttaay

SEQ ID NO: 96198 - DNA, 13 bp, Artificial Sequence
  Oligonucleotide for detection of SNP TSC0023912
rttaaccgaatac

SEQ ID NO: 96199 - DNA, 13 bp, Artificial Sequence
  Oligonucleotide for detection of SNP TSC0023916
tgagatatttgga

SEQ ID NO: 96200 - DNA, 13 bp, Artificial Sequence
  Oligonucleotide for detection of SNP TSC0023916
tccaaatatctca

SEQ ID NO: 96201 - DNA, 13 bp, Artificial Sequence
  Oligonucleotide for detection of SNP TSC0023916
tgagatttttgga

SEQ ID NO: 96202 - DNA, 13 bp, Artificial Sequence
  Oligonucleotide for detection of SNP TSC0023916
tccaaaaatctca

SEQ ID NO: 96203 - DNA, 13 bp, Artificial Sequence
  Oligonucleotide for detection of SNP TSC0023916
tttagatatttta

SEQ ID NO: 96204 - DNA, 13 bp, Artificial Sequence
  Oligonucleotide for detection of SNP TSC0023916
taaaatatctaaa

SEQ ID NO: 96205 - DNA, 13 bp, Artificial Sequence
  Oligonucleotide for detection of SNP TSC0023916
tttagagatttta

SEQ ID NO: 96206 - DNA, 13 bp, Artificial Sequence
  Oligonucleotide for detection of SNP TSC0023916
taaaatctctaaa

SEQ ID NO: 96207 - DNA, 13 bp, Artificial Sequence
  Oligonucleotide for detection of SNP TSC0023917
tgttattgttaty

SEQ ID NO: 96208 - DNA, 13 bp, Artificial Sequence
  Oligonucleotide for detection of SNP TSC0023917
rataacaataaca

SEQ ID NO: 96209 - DNA, 13 bp, Artificial Sequence
  Oligonucleotide for detection of SNP TSC0023917
tgttatcgttaty

SEQ ID NO: 96210 - DNA, 13 bp, Artificial Sequence
  Oligonucleotide for detection of SNP TSC0023917
rataacgataaca

SEQ ID NO: 96211 - DNA, 13 bp, Artificial Sequence
  Oligonucleotide for detection of SNP TSC0023917
gatggtggtagta

SEQ ID NO: 96212 - DNA, 13 bp, Artificial Sequence
  Oligonucleotide for detection of SNP TSC0023917
tactaccaccatc

SEQ ID NO: 96213 - DNA, 13 bp, Artificial Sequence
  Oligonucleotide for detection of SNP TSC0023917
gatggtagtagta

SEQ ID NO: 96214 - DNA, 13 bp, Artificial Sequence
  Oligonucleotide for detection of SNP TSC0023917
tactactaccatc

SEQ ID NO: 96215 - DNA, 13 bp, Artificial Sequence
  Oligonucleotide for detection of SNP TSC0023917
gatggcggtagta

SEQ ID NO: 96216 - DNA, 13 bp, Artificial Sequence
  Oligonucleotide for detection of SNP TSC0023917
tactaccgccatc

SEQ ID NO: 96217 - DNA, 13 bp, Artificial Sequence
  Oligonucleotide for detection of SNP TSC0023918
attagtatgaggt

SEQ ID NO: 96218 - DNA, 13 bp, Artificial Sequence
  Oligonucleotide for detection of SNP TSC0023918
acctcatactaat

SEQ ID NO: 96219 - DNA, 13 bp, Artificial Sequence
  Oligonucleotide for detection of SNP TSC0023918
attagtttgaggt

SEQ ID NO: 96220 - DNA, 13 bp, Artificial Sequence
  Oligonucleotide for detection of SNP TSC0023918
acctcaaactaat

SEQ ID NO: 96221 - DNA, 13 bp, Artificial Sequence
  Oligonucleotide for detection of SNP TSC0023918
attttatattggt

SEQ ID NO: 96222 - DNA, 13 bp, Artificial Sequence
  Oligonucleotide for detection of SNP TSC0023918
accaatataaaat

SEQ ID NO: 96223 - DNA, 13 bp, Artificial Sequence
  Oligonucleotide for detection of SNP TSC0023918
attttaaattggt

SEQ ID NO: 96224 - DNA, 13 bp, Artificial Sequence
  Oligonucleotide for detection of SNP TSC0023918
accaatttaaaat

SEQ ID NO: 96225 - DNA, 13 bp, Artificial Sequence
  Oligonucleotide for detection of SNP TSC0023919
tttgtttggttgg

SEQ ID NO: 96226 - DNA, 13 bp, Artificial Sequence
  Oligonucleotide for detection of SNP TSC0023919
ccaaccaaacaaa

SEQ ID NO: 96227 - DNA, 13 bp, Artificial Sequence
  Oligonucleotide for detection of SNP TSC0023919
ttcgtttggttgg

SEQ ID NO: 96228 - DNA, 13 bp, Artificial Sequence
  Oligonucleotide for detection of SNP TSC0023919
ccaaccaaacgaa

SEQ ID NO: 96229 - DNA, 13 bp, Artificial Sequence
  Oligonucleotide for detection of SNP TSC0023919
tttgttcggttgg

SEQ ID NO: 96230 - DNA, 13 bp, Artificial Sequence
  Oligonucleotide for detection of SNP TSC0023919
ccaaccgaacaaa

SEQ ID NO: 96231 - DNA, 13 bp, Artificial Sequence
  Oligonucleotide for detection of SNP TSC0023919
tttgtttggtcgg

SEQ ID NO: 96232 - DNA, 13 bp, Artificial Sequence
  Oligonucleotide for detection of SNP TSC0023919
ccgaccaaacaaa

SEQ ID NO: 96233 - DNA, 13 bp, Artificial Sequence
  Oligonucleotide for detection of SNP TSC0023919
ttcgtttggtcgg

SEQ ID NO: 96234 - DNA, 13 bp, Artificial Sequence
  Oligonucleotide for detection of SNP TSC0023919
ccgaccaaacgaa

SEQ ID NO: 96235 - DNA, 13 bp, Artificial Sequence
  Oligonucleotide for detection of SNP TSC0023919
ttcgttcggttgg

SEQ ID NO: 96236 - DNA, 13 bp, Artificial Sequence
  Oligonucleotide for detection of SNP TSC0023919
ccaaccgaacgaa

SEQ ID NO: 96237 - DNA, 13 bp, Artificial Sequence
  Oligonucleotide for detection of SNP TSC0023919
tttgttcggtcgg

SEQ ID NO: 96238 - DNA, 13 bp, Artificial Sequence
  Oligonucleotide for detection of SNP TSC0023919
ccgaccgaacaaa

SEQ ID NO: 96239 - DNA, 13 bp, Artificial Sequence
  Oligonucleotide for detection of SNP TSC0023919
ttcgttcggtcgg

SEQ ID NO: 96240 - DNA, 13 bp, Artificial Sequence
  Oligonucleotide for detection of SNP TSC0023919
ccgaccgaacgaa

SEQ ID NO: 96241 - DNA, 13 bp, Artificial Sequence
  Oligonucleotide for detection of SNP TSC0023919
tcggttgggtggg

SEQ ID NO: 96242 - DNA, 13 bp, Artificial Sequence
  Oligonucleotide for detection of SNP TSC0023919
cccacccaaccga

SEQ ID NO: 96243 - DNA, 13 bp, Artificial Sequence
  Oligonucleotide for detection of SNP TSC0023919
tcggttaggtggg

SEQ ID NO: 96244 - DNA, 13 bp, Artificial Sequence
  Oligonucleotide for detection of SNP TSC0023919
cccacctaaccga

SEQ ID NO: 96245 - DNA, 13 bp, Artificial Sequence
  Oligonucleotide for detection of SNP TSC0023919
ttggtcgggtggg

SEQ ID NO: 96246 - DNA, 13 bp, Artificial Sequence
  Oligonucleotide for detection of SNP TSC0023919
cccacccgaccaa

SEQ ID NO: 96247 - DNA, 13 bp, Artificial Sequence
  Oligonucleotide for detection of SNP TSC0023919
ttggttaggcggg

SEQ ID NO: 96248 - DNA, 13 bp, Artificial Sequence
  Oligonucleotide for detection of SNP TSC0023919
cccgcctaaccaa

SEQ ID NO: 96249 - DNA, 13 bp, Artificial Sequence
  Oligonucleotide for detection of SNP TSC0023919
ttggttgggcggg

SEQ ID NO: 96250 - DNA, 13 bp, Artificial Sequence
  Oligonucleotide for detection of SNP TSC0023919
cccgcccaaccaa

SEQ ID NO: 96251 - DNA, 13 bp, Artificial Sequence
  Oligonucleotide for detection of SNP TSC0023919
tcggttaggcggg

SEQ ID NO: 96252 - DNA, 13 bp, Artificial Sequence
  Oligonucleotide for detection of SNP TSC0023919
cccgcctaaccga

SEQ ID NO: 96253 - DNA, 13 bp, Artificial Sequence
  Oligonucleotide for detection of SNP TSC0023919
tcggtcgggtggg

SEQ ID NO: 96254 - DNA, 13 bp, Artificial Sequence
  Oligonucleotide for detection of SNP TSC0023919
cccacccgaccga

SEQ ID NO: 96255 - DNA, 13 bp, Artificial Sequence
  Oligonucleotide for detection of SNP TSC0023919
tcggttgggcggg

SEQ ID NO: 96256 - DNA, 13 bp, Artificial Sequence
  Oligonucleotide for detection of SNP TSC0023919
cccgcccaaccga

SEQ ID NO: 96257 - DNA, 13 bp, Artificial Sequence
  Oligonucleotide for detection of SNP TSC0023919
ttggtcgggcggg

SEQ ID NO: 96258 - DNA, 13 bp, Artificial Sequence
  Oligonucleotide for detection of SNP TSC0023919
cccgcccgaccaa

SEQ ID NO: 96259 - DNA, 13 bp, Artificial Sequence
  Oligonucleotide for detection of SNP TSC0023919
tcggtcgggcggg

SEQ ID NO: 96260 - DNA, 13 bp, Artificial Sequence
  Oligonucleotide for detection of SNP TSC0023919
cccgcccgaccga

SEQ ID NO: 96261 - DNA, 13 bp, Artificial Sequence
  Oligonucleotide for detection of SNP TSC0023920
aaaggggtagagg

SEQ ID NO: 96262 - DNA, 13 bp, Artificial Sequence
  Oligonucleotide for detection of SNP TSC0023920
cctctaccccttt

SEQ ID NO: 96263 - DNA, 13 bp, Artificial Sequence
  Oligonucleotide for detection of SNP TSC0023920
aaagggttagagg

SEQ ID NO: 96264 - DNA, 13 bp, Artificial Sequence
  Oligonucleotide for detection of SNP TSC0023920
cctctaacccttt

SEQ ID NO: 96265 - DNA, 13 bp, Artificial Sequence
  Oligonucleotide for detection of SNP TSC0023921
tatgttgtgtgag

SEQ ID NO: 96266 - DNA, 13 bp, Artificial Sequence
  Oligonucleotide for detection of SNP TSC0023921
ctcacacaacata

SEQ ID NO: 96267 - DNA, 13 bp, Artificial Sequence
  Oligonucleotide for detection of SNP TSC0023921
tatgttatgtgag

SEQ ID NO: 96268 - DNA, 13 bp, Artificial Sequence
  Oligonucleotide for detection of SNP TSC0023921
ctcacataacata

SEQ ID NO: 96269 - DNA, 13 bp, Artificial Sequence
  Oligonucleotide for detection of SNP TSC0023921
tacgttgtgtgag

SEQ ID NO: 96270 - DNA, 13 bp, Artificial Sequence
  Oligonucleotide for detection of SNP TSC0023921
ctcacacaacgta

SEQ ID NO: 96271 - DNA, 13 bp, Artificial Sequence
  Oligonucleotide for detection of SNP TSC0023921
tacgttatgtgag

SEQ ID NO: 96272 - DNA, 13 bp, Artificial Sequence
  Oligonucleotide for detection of SNP TSC0023921
ctcacataacgta

SEQ ID NO: 96273 - DNA, 13 bp, Artificial Sequence
  Oligonucleotide for detection of SNP TSC0023922
ttatatagtgtga

SEQ ID NO: 96274 - DNA, 13 bp, Artificial Sequence
  Oligonucleotide for detection of SNP TSC0023922
tcacactatataa

SEQ ID NO: 96275 - DNA, 13 bp, Artificial Sequence
  Oligonucleotide for detection of SNP TSC0023922
ttatatggtgtga

SEQ ID NO: 96276 - DNA, 13 bp, Artificial Sequence
  Oligonucleotide for detection of SNP TSC0023922
tcacaccatataa

SEQ ID NO: 96277 - DNA, 13 bp, Artificial Sequence
  Oligonucleotide for detection of SNP TSC0023922
ttatatagcgtga

SEQ ID NO: 96278 - DNA, 13 bp, Artificial Sequence
  Oligonucleotide for detection of SNP TSC0023922
tcacgctatataa

SEQ ID NO: 96279 - DNA, 13 bp, Artificial Sequence
  Oligonucleotide for detection of SNP TSC0023922
ttatacggtgtga

SEQ ID NO: 96280 - DNA, 13 bp, Artificial Sequence
  Oligonucleotide for detection of SNP TSC0023922
tcacaccgtataa

SEQ ID NO: 96281 - DNA, 13 bp, Artificial Sequence
  Oligonucleotide for detection of SNP TSC0023922
ttatatggcgtga

SEQ ID NO: 96282 - DNA, 13 bp, Artificial Sequence
  Oligonucleotide for detection of SNP TSC0023922
tcacgccatataa

SEQ ID NO: 96283 - DNA, 13 bp, Artificial Sequence
  Oligonucleotide for detection of SNP TSC0023922
ttatacggcgtga

SEQ ID NO: 96284 - DNA, 13 bp, Artificial Sequence
  Oligonucleotide for detection of SNP TSC0023922
tcacgccgtataa

SEQ ID NO: 96285 - DNA, 13 bp, Artificial Sequence
  Oligonucleotide for detection of SNP TSC0023922
ttatgttgtgtga

SEQ ID NO: 96286 - DNA, 13 bp, Artificial Sequence
  Oligonucleotide for detection of SNP TSC0023922
tcacacaacataa

SEQ ID NO: 96287 - DNA, 13 bp, Artificial Sequence
  Oligonucleotide for detection of SNP TSC0023922
ttacgttgtgtga

SEQ ID NO: 96288 - DNA, 13 bp, Artificial Sequence
  Oligonucleotide for detection of SNP TSC0023922
tcacacaacgtaa

SEQ ID NO: 96289 - DNA, 13 bp, Artificial Sequence
  Oligonucleotide for detection of SNP TSC0023922
ttatgtcgtgtga

SEQ ID NO: 96290 - DNA, 13 bp, Artificial Sequence
  Oligonucleotide for detection of SNP TSC0023922
tcacacgacataa

SEQ ID NO: 96291 - DNA, 13 bp, Artificial Sequence
  Oligonucleotide for detection of SNP TSC0023922
ttacgtcgtgtga

SEQ ID NO: 96292 - DNA, 13 bp, Artificial Sequence
  Oligonucleotide for detection of SNP TSC0023922
tcacacgacgtaa

SEQ ID NO: 96293 - DNA, 13 bp, Artificial Sequence
  Oligonucleotide for detection of SNP TSC0023923
ttatgacgtttaa

SEQ ID NO: 96294 - DNA, 13 bp, Artificial Sequence
  Oligonucleotide for detection of SNP TSC0023923
ttaaacgtcataa

SEQ ID NO: 96295 - DNA, 13 bp, Artificial Sequence
  Oligonucleotide for detection of SNP TSC0023923
ttgggttttatgg

SEQ ID NO: 96296 - DNA, 13 bp, Artificial Sequence
  Oligonucleotide for detection of SNP TSC0023923
ccataaaacccaa

SEQ ID NO: 96297 - DNA, 13 bp, Artificial Sequence
  Oligonucleotide for detection of SNP TSC0023923
ttgggtgttatgg

SEQ ID NO: 96298 - DNA, 13 bp, Artificial Sequence
  Oligonucleotide for detection of SNP TSC0023923
ccataacacccaa

SEQ ID NO: 96299 - DNA, 13 bp, Artificial Sequence
  Oligonucleotide for detection of SNP TSC0023923
ttgggcgttatgg

SEQ ID NO: 96300 - DNA, 13 bp, Artificial Sequence
  Oligonucleotide for detection of SNP TSC0023923
ccataacgcccaa

SEQ ID NO: 96301 - DNA, 13 bp, Artificial Sequence
  Oligonucleotide for detection of SNP TSC0023926
gtatgggaagttt

SEQ ID NO: 96302 - DNA, 13 bp, Artificial Sequence
  Oligonucleotide for detection of SNP TSC0023926
aaacttcccatac

SEQ ID NO: 96303 - DNA, 13 bp, Artificial Sequence
  Oligonucleotide for detection of SNP TSC0023926
gtatggaaagttt

SEQ ID NO: 96304 - DNA, 13 bp, Artificial Sequence
  Oligonucleotide for detection of SNP TSC0023926
aaactttccatac

SEQ ID NO: 96305 - DNA, 13 bp, Artificial Sequence
  Oligonucleotide for detection of SNP TSC0023931
tttattgaaaaay

SEQ ID NO: 96306 - DNA, 13 bp, Artificial Sequence
  Oligonucleotide for detection of SNP TSC0023931
rtttttcaataaa

SEQ ID NO: 96307 - DNA, 13 bp, Artificial Sequence
  Oligonucleotide for detection of SNP TSC0023931
tttattaaaaaay

SEQ ID NO: 96308 - DNA, 13 bp, Artificial Sequence
  Oligonucleotide for detection of SNP TSC0023931
rttttttaataaa

SEQ ID NO: 96309 - DNA, 13 bp, Artificial Sequence
  Oligonucleotide for detection of SNP TSC0023933
tgaggtagtgtgy

SEQ ID NO: 96310 - DNA, 13 bp, Artificial Sequence
  Oligonucleotide for detection of SNP TSC0023933
rcacactacctca

SEQ ID NO: 96311 - DNA, 13 bp, Artificial Sequence
  Oligonucleotide for detection of SNP TSC0023933
tgaggtggtgtgy

SEQ ID NO: 96312 - DNA, 13 bp, Artificial Sequence
  Oligonucleotide for detection of SNP TSC0023933
rcacaccacctca

SEQ ID NO: 96313 - DNA, 13 bp, Artificial Sequence
  Oligonucleotide for detection of SNP TSC0023933
tgaggcggtgtgy

SEQ ID NO: 96314 - DNA, 13 bp, Artificial Sequence
  Oligonucleotide for detection of SNP TSC0023933
rcacaccgcctca

SEQ ID NO: 96315 - DNA, 13 bp, Artificial Sequence
  Oligonucleotide for detection of SNP TSC0023933
gtatattgtttta

SEQ ID NO: 96316 - DNA, 13 bp, Artificial Sequence
  Oligonucleotide for detection of SNP TSC0023933
taaaacaatatac

SEQ ID NO: 96317 - DNA, 13 bp, Artificial Sequence
  Oligonucleotide for detection of SNP TSC0023933
gtatatcgtttta

SEQ ID NO: 96318 - DNA, 13 bp, Artificial Sequence
  Oligonucleotide for detection of SNP TSC0023933
taaaacgatatac

SEQ ID NO: 96319 - DNA, 13 bp, Artificial Sequence
  Oligonucleotide for detection of SNP TSC0023938
aatgataaaattg

SEQ ID NO: 96320 - DNA, 13 bp, Artificial Sequence
  Oligonucleotide for detection of SNP TSC0023938
caattttatcatt

SEQ ID NO: 96321 - DNA, 13 bp, Artificial Sequence
  Oligonucleotide for detection of SNP TSC0023938
aatgatgaaattg

SEQ ID NO: 96322 - DNA, 13 bp, Artificial Sequence
  Oligonucleotide for detection of SNP TSC0023938
caatttcatcatt

SEQ ID NO: 96323 - DNA, 13 bp, Artificial Sequence
  Oligonucleotide for detection of SNP TSC0023938
aatgacgaaattg

SEQ ID NO: 96324 - DNA, 13 bp, Artificial Sequence
  Oligonucleotide for detection of SNP TSC0023938
caatttcgtcatt

SEQ ID NO: 96325 - DNA, 13 bp, Artificial Sequence
  Oligonucleotide for detection of SNP TSC0023945
tgattgatgagtt

SEQ ID NO: 96326 - DNA, 13 bp, Artificial Sequence
  Oligonucleotide for detection of SNP TSC0023945
aactcatcaatca

SEQ ID NO: 96327 - DNA, 13 bp, Artificial Sequence
  Oligonucleotide for detection of SNP TSC0023945
tgattggtgagtt

SEQ ID NO: 96328 - DNA, 13 bp, Artificial Sequence
  Oligonucleotide for detection of SNP TSC0023945
aactcaccaatca

SEQ ID NO: 96329 - DNA, 13 bp, Artificial Sequence
  Oligonucleotide for detection of SNP TSC0023946
agtatgtaatttt

SEQ ID NO: 96330 - DNA, 13 bp, Artificial Sequence
  Oligonucleotide for detection of SNP TSC0023946
aaaattacatact

SEQ ID NO: 96331 - DNA, 13 bp, Artificial Sequence
  Oligonucleotide for detection of SNP TSC0023946
agtatggaatttt

SEQ ID NO: 96332 - DNA, 13 bp, Artificial Sequence
  Oligonucleotide for detection of SNP TSC0023946
aaaattccatact

SEQ ID NO: 96333 - DNA, 13 bp, Artificial Sequence
  Oligonucleotide for detection of SNP TSC0023946
aggattgtatgtt

SEQ ID NO: 96334 - DNA, 13 bp, Artificial Sequence
  Oligonucleotide for detection of SNP TSC0023946
aacatacaatcct

SEQ ID NO: 96335 - DNA, 13 bp, Artificial Sequence
  Oligonucleotide for detection of SNP TSC0023946
aggattttatgtt

SEQ ID NO: 96336 - DNA, 13 bp, Artificial Sequence
  Oligonucleotide for detection of SNP TSC0023946
aacataaaatcct

SEQ ID NO: 96337 - DNA, 13 bp, Artificial Sequence
  Oligonucleotide for detection of SNP TSC0023948
gagtttatggttt

SEQ ID NO: 96338 - DNA, 13 bp, Artificial Sequence
  Oligonucleotide for detection of SNP TSC0023948
aaaccataaactc

SEQ ID NO: 96339 - DNA, 13 bp, Artificial Sequence
  Oligonucleotide for detection of SNP TSC0023948
gagtttgtggttt

SEQ ID NO: 96340 - DNA, 13 bp, Artificial Sequence
  Oligonucleotide for detection of SNP TSC0023948
aaaccacaaactc

SEQ ID NO: 96341 - DNA, 13 bp, Artificial Sequence
  Oligonucleotide for detection of SNP TSC0023948
gagttcgtggttt

SEQ ID NO: 96342 - DNA, 13 bp, Artificial Sequence
  Oligonucleotide for detection of SNP TSC0023948
aaaccacgaactc

SEQ ID NO: 96343 - DNA, 13 bp, Artificial Sequence
  Oligonucleotide for detection of SNP TSC0023948
aaattatgggtty

SEQ ID NO: 96344 - DNA, 13 bp, Artificial Sequence
  Oligonucleotide for detection of SNP TSC0023948
raacccataattt

SEQ ID NO: 96345 - DNA, 13 bp, Artificial Sequence
  Oligonucleotide for detection of SNP TSC0023948
aaattacgggtty

SEQ ID NO: 96346 - DNA, 13 bp, Artificial Sequence
  Oligonucleotide for detection of SNP TSC0023948
raacccgtaattt

SEQ ID NO: 96347 - DNA, 13 bp, Artificial Sequence
  Oligonucleotide for detection of SNP TSC0023949
taagtttgattat

SEQ ID NO: 96348 - DNA, 13 bp, Artificial Sequence
  Oligonucleotide for detection of SNP TSC0023949
ataatcaaactta

SEQ ID NO: 96349 - DNA, 13 bp, Artificial Sequence
  Oligonucleotide for detection of SNP TSC0023949
taagttcgattat

SEQ ID NO: 96350 - DNA, 13 bp, Artificial Sequence
  Oligonucleotide for detection of SNP TSC0023949
ataatcgaactta

SEQ ID NO: 96351 - DNA, 13 bp, Artificial Sequence
  Oligonucleotide for detection of SNP TSC0023949
atgattgaatttg

SEQ ID NO: 96352 - DNA, 13 bp, Artificial Sequence
  Oligonucleotide for detection of SNP TSC0023949
caaattcaatcat

SEQ ID NO: 96353 - DNA, 13 bp, Artificial Sequence
  Oligonucleotide for detection of SNP TSC0023949
atgattaaatttg

SEQ ID NO: 96354 - DNA, 13 bp, Artificial Sequence
  Oligonucleotide for detection of SNP TSC0023949
caaatttaatcat

SEQ ID NO: 96355 - DNA, 13 bp, Artificial Sequence
  Oligonucleotide for detection of SNP TSC0023949
atgatcgaatttg

SEQ ID NO: 96356 - DNA, 13 bp, Artificial Sequence
  Oligonucleotide for detection of SNP TSC0023949
caaattcgatcat

SEQ ID NO: 96357 - DNA, 13 bp, Artificial Sequence
  Oligonucleotide for detection of SNP TSC0023950
ggttgtagaatag

SEQ ID NO: 96358 - DNA, 13 bp, Artificial Sequence
  Oligonucleotide for detection of SNP TSC0023950
ctattctacaacc

SEQ ID NO: 96359 - DNA, 13 bp, Artificial Sequence
  Oligonucleotide for detection of SNP TSC0023950
ggttgtggaatag

SEQ ID NO: 96360 - DNA, 13 bp, Artificial Sequence
  Oligonucleotide for detection of SNP TSC0023950
ctattccacaacc

SEQ ID NO: 96361 - DNA, 13 bp, Artificial Sequence
  Oligonucleotide for detection of SNP TSC0023950
ggtcgtagaatag

SEQ ID NO: 96362 - DNA, 13 bp, Artificial Sequence
  Oligonucleotide for detection of SNP TSC0023950
ctattctacgacc

SEQ ID NO: 96363 - DNA, 13 bp, Artificial Sequence
  Oligonucleotide for detection of SNP TSC0023950
ggtcgtggaatag

SEQ ID NO: 96364 - DNA, 13 bp, Artificial Sequence
  Oligonucleotide for detection of SNP TSC0023950
ctattccacgacc

SEQ ID NO: 96365 - DNA, 13 bp, Artificial Sequence
  Oligonucleotide for detection of SNP TSC0023950
ggttgcggaatag

SEQ ID NO: 96366 - DNA, 13 bp, Artificial Sequence
  Oligonucleotide for detection of SNP TSC0023950
ctattccgcaacc

SEQ ID NO: 96367 - DNA, 13 bp, Artificial Sequence
  Oligonucleotide for detection of SNP TSC0023950
ggtcgcggaatag

SEQ ID NO: 96368 - DNA, 13 bp, Artificial Sequence
  Oligonucleotide for detection of SNP TSC0023950
ctattccgcgacc

SEQ ID NO: 96369 - DNA, 13 bp, Artificial Sequence
  Oligonucleotide for detection of SNP TSC0023950
ttgttttgtggty

SEQ ID NO: 96370 - DNA, 13 bp, Artificial Sequence
  Oligonucleotide for detection of SNP TSC0023950
raccacaaaacaa

SEQ ID NO: 96371 - DNA, 13 bp, Artificial Sequence
  Oligonucleotide for detection of SNP TSC0023950
ttgttttgcggty

SEQ ID NO: 96372 - DNA, 13 bp, Artificial Sequence
  Oligonucleotide for detection of SNP TSC0023950
raccgcaaaacaa

SEQ ID NO: 96373 - DNA, 13 bp, Artificial Sequence
  Oligonucleotide for detection of SNP TSC0023950
ttgtttcgtggty

SEQ ID NO: 96374 - DNA, 13 bp, Artificial Sequence
  Oligonucleotide for detection of SNP TSC0023950
raccacgaaacaa

SEQ ID NO: 96375 - DNA, 13 bp, Artificial Sequence
  Oligonucleotide for detection of SNP TSC0023950
ttgtttcgcggty

SEQ ID NO: 96376 - DNA, 13 bp, Artificial Sequence
  Oligonucleotide for detection of SNP TSC0023950
raccgcgaaacaa

SEQ ID NO: 96377 - DNA, 13 bp, Artificial Sequence
  Oligonucleotide for detection of SNP TSC0023951
tagaatagagtty

SEQ ID NO: 96378 - DNA, 13 bp, Artificial Sequence
  Oligonucleotide for detection of SNP TSC0023951
raactctattcta

SEQ ID NO: 96379 - DNA, 13 bp, Artificial Sequence
  Oligonucleotide for detection of SNP TSC0023951
tagaattgagtty

SEQ ID NO: 96380 - DNA, 13 bp, Artificial Sequence
  Oligonucleotide for detection of SNP TSC0023951
raactcaattcta

SEQ ID NO: 96381 - DNA, 13 bp, Artificial Sequence
  Oligonucleotide for detection of SNP TSC0023951
tagaatcgagtty

SEQ ID NO: 96382 - DNA, 13 bp, Artificial Sequence
  Oligonucleotide for detection of SNP TSC0023951
raactcgattcta

SEQ ID NO: 96383 - DNA, 13 bp, Artificial Sequence
  Oligonucleotide for detection of SNP TSC0023951
ggattttgttttg

SEQ ID NO: 96384 - DNA, 13 bp, Artificial Sequence
  Oligonucleotide for detection of SNP TSC0023951
caaaacaaaatcc

SEQ ID NO: 96385 - DNA, 13 bp, Artificial Sequence
  Oligonucleotide for detection of SNP TSC0023951
ggatttggttttg

SEQ ID NO: 96386 - DNA, 13 bp, Artificial Sequence
  Oligonucleotide for detection of SNP TSC0023951
caaaaccaaatcc

SEQ ID NO: 96387 - DNA, 13 bp, Artificial Sequence
  Oligonucleotide for detection of SNP TSC0023951
ggattcggttttg

SEQ ID NO: 96388 - DNA, 13 bp, Artificial Sequence
  Oligonucleotide for detection of SNP TSC0023951
caaaaccgaatcc

SEQ ID NO: 96389 - DNA, 13 bp, Artificial Sequence
  Oligonucleotide for detection of SNP TSC0023952
gatagaatgaaat

SEQ ID NO: 96390 - DNA, 13 bp, Artificial Sequence
  Oligonucleotide for detection of SNP TSC0023952
atttcattctatc

SEQ ID NO: 96391 - DNA, 13 bp, Artificial Sequence
  Oligonucleotide for detection of SNP TSC0023952
gatagagtgaaat

SEQ ID NO: 96392 - DNA, 13 bp, Artificial Sequence
  Oligonucleotide for detection of SNP TSC0023952
atttcactctatc

SEQ ID NO: 96393 - DNA, 13 bp, Artificial Sequence
  Oligonucleotide for detection of SNP TSC0023955
attttattttggg

SEQ ID NO: 96394 - DNA, 13 bp, Artificial Sequence
  Oligonucleotide for detection of SNP TSC0023955
cccaaaataaaat

SEQ ID NO: 96395 - DNA, 13 bp, Artificial Sequence
  Oligonucleotide for detection of SNP TSC0023955
attttagtttggg

SEQ ID NO: 96396 - DNA, 13 bp, Artificial Sequence
  Oligonucleotide for detection of SNP TSC0023955
cccaaactaaaat

SEQ ID NO: 96397 - DNA, 13 bp, Artificial Sequence
  Oligonucleotide for detection of SNP TSC0023955
tttagggtagagt

SEQ ID NO: 96398 - DNA, 13 bp, Artificial Sequence
  Oligonucleotide for detection of SNP TSC0023955
actctaccctaaa

SEQ ID NO: 96399 - DNA, 13 bp, Artificial Sequence
  Oligonucleotide for detection of SNP TSC0023955
tttaggttagagt

SEQ ID NO: 96400 - DNA, 13 bp, Artificial Sequence
  Oligonucleotide for detection of SNP TSC0023955
actctaacctaaa

SEQ ID NO: 96401 - DNA, 13 bp, Artificial Sequence
  Oligonucleotide for detection of SNP TSC0023956
ttttttatgttgy

SEQ ID NO: 96402 - DNA, 13 bp, Artificial Sequence
  Oligonucleotide for detection of SNP TSC0023956
rcaacataaaaaa

SEQ ID NO: 96403 - DNA, 13 bp, Artificial Sequence
  Oligonucleotide for detection of SNP TSC0023956
ttttttgtgttgy

SEQ ID NO: 96404 - DNA, 13 bp, Artificial Sequence
  Oligonucleotide for detection of SNP TSC0023956
rcaacacaaaaaa

SEQ ID NO: 96405 - DNA, 13 bp, Artificial Sequence
  Oligonucleotide for detection of SNP TSC0023956
ttttttatgtcgy

SEQ ID NO: 96406 - DNA, 13 bp, Artificial Sequence
  Oligonucleotide for detection of SNP TSC0023956
rcgacataaaaaa

SEQ ID NO: 96407 - DNA, 13 bp, Artificial Sequence
  Oligonucleotide for detection of SNP TSC0023956
ttttttgtgtcgy

SEQ ID NO: 96408 - DNA, 13 bp, Artificial Sequence
  Oligonucleotide for detection of SNP TSC0023956
rcgacacaaaaaa

SEQ ID NO: 96409 - DNA, 13 bp, Artificial Sequence
  Oligonucleotide for detection of SNP TSC0023957
atattgattttta

SEQ ID NO: 96410 - DNA, 13 bp, Artificial Sequence
  Oligonucleotide for detection of SNP TSC0023957
taaaaatcaatat

SEQ ID NO: 96411 - DNA, 13 bp, Artificial Sequence
  Oligonucleotide for detection of SNP TSC0023957
atattgtttttta

SEQ ID NO: 96412 - DNA, 13 bp, Artificial Sequence
  Oligonucleotide for detection of SNP TSC0023957
taaaaaacaatat

SEQ ID NO: 96413 - DNA, 13 bp, Artificial Sequence
  Oligonucleotide for detection of SNP TSC0023957
atatcgattttta

SEQ ID NO: 96414 - DNA, 13 bp, Artificial Sequence
  Oligonucleotide for detection of SNP TSC0023957
taaaaatcgatat

SEQ ID NO: 96415 - DNA, 13 bp, Artificial Sequence
  Oligonucleotide for detection of SNP TSC0023957
atatcgtttttta

SEQ ID NO: 96416 - DNA, 13 bp, Artificial Sequence
  Oligonucleotide for detection of SNP TSC0023957
taaaaaacgatat

SEQ ID NO: 96417 - DNA, 13 bp, Artificial Sequence
  Oligonucleotide for detection of SNP TSC0023957
tggagattgatat

SEQ ID NO: 96418 - DNA, 13 bp, Artificial Sequence
  Oligonucleotide for detection of SNP TSC0023957
atatcaatctcca

SEQ ID NO: 96419 - DNA, 13 bp, Artificial Sequence
  Oligonucleotide for detection of SNP TSC0023957
tggagagtgatat

SEQ ID NO: 96420 - DNA, 13 bp, Artificial Sequence
  Oligonucleotide for detection of SNP TSC0023957
atatcactctcca

SEQ ID NO: 96421 - DNA, 13 bp, Artificial Sequence
  Oligonucleotide for detection of SNP TSC0023957
tggagatcgatat

SEQ ID NO: 96422 - DNA, 13 bp, Artificial Sequence
  Oligonucleotide for detection of SNP TSC0023957
atatcgatctcca

SEQ ID NO: 96423 - DNA, 13 bp, Artificial Sequence
  Oligonucleotide for detection of SNP TSC0023957
tggagagcgatat

SEQ ID NO: 96424 - DNA, 13 bp, Artificial Sequence
  Oligonucleotide for detection of SNP TSC0023957
atatcgctctcca

SEQ ID NO: 96425 - DNA, 13 bp, Artificial Sequence
  Oligonucleotide for detection of SNP TSC0023963
ggatggagtattg

SEQ ID NO: 96426 - DNA, 13 bp, Artificial Sequence
  Oligonucleotide for detection of SNP TSC0023963
caatactccatcc

SEQ ID NO: 96427 - DNA, 13 bp, Artificial Sequence
  Oligonucleotide for detection of SNP TSC0023963
ggatggggtattg

SEQ ID NO: 96428 - DNA, 13 bp, Artificial Sequence
  Oligonucleotide for detection of SNP TSC0023963
caataccccatcc

SEQ ID NO: 96429 - DNA, 13 bp, Artificial Sequence
  Oligonucleotide for detection of SNP TSC0023963
ggacggagtattg

SEQ ID NO: 96430 - DNA, 13 bp, Artificial Sequence
  Oligonucleotide for detection of SNP TSC0023963
caatactccgtcc

SEQ ID NO: 96431 - DNA, 13 bp, Artificial Sequence
  Oligonucleotide for detection of SNP TSC0023963
ggacggggtattg

SEQ ID NO: 96432 - DNA, 13 bp, Artificial Sequence
  Oligonucleotide for detection of SNP TSC0023963
caataccccgtcc

SEQ ID NO: 96433 - DNA, 13 bp, Artificial Sequence
  Oligonucleotide for detection of SNP TSC0023964
gagtgtagggagg

SEQ ID NO: 96434 - DNA, 13 bp, Artificial Sequence
  Oligonucleotide for detection of SNP TSC0023964
cctccctacactc

SEQ ID NO: 96435 - DNA, 13 bp, Artificial Sequence
  Oligonucleotide for detection of SNP TSC0023964
gagtgtggggagg

SEQ ID NO: 96436 - DNA, 13 bp, Artificial Sequence
  Oligonucleotide for detection of SNP TSC0023964
cctccccacactc

SEQ ID NO: 96437 - DNA, 13 bp, Artificial Sequence
  Oligonucleotide for detection of SNP TSC0023965
attgaggtgatag

SEQ ID NO: 96438 - DNA, 13 bp, Artificial Sequence
  Oligonucleotide for detection of SNP TSC0023965
ctatcacctcaat

SEQ ID NO: 96439 - DNA, 13 bp, Artificial Sequence
  Oligonucleotide for detection of SNP TSC0023965
attgagttgatag

SEQ ID NO: 96440 - DNA, 13 bp, Artificial Sequence
  Oligonucleotide for detection of SNP TSC0023965
ctatcaactcaat

SEQ ID NO: 96441 - DNA, 13 bp, Artificial Sequence
  Oligonucleotide for detection of SNP TSC0023965
ttgttattttagt

SEQ ID NO: 96442 - DNA, 13 bp, Artificial Sequence
  Oligonucleotide for detection of SNP TSC0023965
actaaaataacaa

SEQ ID NO: 96443 - DNA, 13 bp, Artificial Sequence
  Oligonucleotide for detection of SNP TSC0023965
ttgttaatttagt

SEQ ID NO: 96444 - DNA, 13 bp, Artificial Sequence
  Oligonucleotide for detection of SNP TSC0023965
actaaattaacaa

SEQ ID NO: 96445 - DNA, 13 bp, Artificial Sequence
  Oligonucleotide for detection of SNP TSC0023966
taagaaagatagy

SEQ ID NO: 96446 - DNA, 13 bp, Artificial Sequence
  Oligonucleotide for detection of SNP TSC0023966
rctatctttctta

SEQ ID NO: 96447 - DNA, 13 bp, Artificial Sequence
  Oligonucleotide for detection of SNP TSC0023966
taagaatgatagy

SEQ ID NO: 96448 - DNA, 13 bp, Artificial Sequence
  Oligonucleotide for detection of SNP TSC0023966
rctatcattctta

SEQ ID NO: 96449 - DNA, 13 bp, Artificial Sequence
  Oligonucleotide for detection of SNP TSC0023968
ttaatttaatgtt

SEQ ID NO: 96450 - DNA, 13 bp, Artificial Sequence
  Oligonucleotide for detection of SNP TSC0023968
aacattaaattaa

SEQ ID NO: 96451 - DNA, 13 bp, Artificial Sequence
  Oligonucleotide for detection of SNP TSC0023968
ttaattgaatgtt

SEQ ID NO: 96452 - DNA, 13 bp, Artificial Sequence
  Oligonucleotide for detection of SNP TSC0023968
aacattcaattaa

SEQ ID NO: 96453 - DNA, 13 bp, Artificial Sequence
  Oligonucleotide for detection of SNP TSC0023968
aatattgaattaa

SEQ ID NO: 96454 - DNA, 13 bp, Artificial Sequence
  Oligonucleotide for detection of SNP TSC0023968
ttaattcaatatt

SEQ ID NO: 96455 - DNA, 13 bp, Artificial Sequence
  Oligonucleotide for detection of SNP TSC0023968
aatatttaattaa

SEQ ID NO: 96456 - DNA, 13 bp, Artificial Sequence
  Oligonucleotide for detection of SNP TSC0023968
ttaattaaatatt

SEQ ID NO: 96457 - DNA, 13 bp, Artificial Sequence
  Oligonucleotide for detection of SNP TSC0023969
tagagatgtttaa

SEQ ID NO: 96458 - DNA, 13 bp, Artificial Sequence
  Oligonucleotide for detection of SNP TSC0023969
ttaaacatctcta

SEQ ID NO: 96459 - DNA, 13 bp, Artificial Sequence
  Oligonucleotide for detection of SNP TSC0023969
tagagacgtttaa

SEQ ID NO: 96460 - DNA, 13 bp, Artificial Sequence
  Oligonucleotide for detection of SNP TSC0023969
ttaaacgtctcta

SEQ ID NO: 96461 - DNA, 13 bp, Artificial Sequence
  Oligonucleotide for detection of SNP TSC0023970
gttgggatttaat

SEQ ID NO: 96462 - DNA, 13 bp, Artificial Sequence
  Oligonucleotide for detection of SNP TSC0023970
attaaatcccaac

SEQ ID NO: 96463 - DNA, 13 bp, Artificial Sequence
  Oligonucleotide for detection of SNP TSC0023970
gttggggtttaat

SEQ ID NO: 96464 - DNA, 13 bp, Artificial Sequence
  Oligonucleotide for detection of SNP TSC0023970
attaaaccccaac

SEQ ID NO: 96465 - DNA, 13 bp, Artificial Sequence
  Oligonucleotide for detection of SNP TSC0023971
gttgagatgggta

SEQ ID NO: 96466 - DNA, 13 bp, Artificial Sequence
  Oligonucleotide for detection of SNP TSC0023971
tacccatctcaac

SEQ ID NO: 96467 - DNA, 13 bp, Artificial Sequence
  Oligonucleotide for detection of SNP TSC0023971
gttgagttgggta

SEQ ID NO: 96468 - DNA, 13 bp, Artificial Sequence
  Oligonucleotide for detection of SNP TSC0023971
tacccaactcaac

SEQ ID NO: 96469 - DNA, 13 bp, Artificial Sequence
  Oligonucleotide for detection of SNP TSC0023971
gtcgagatgggta

SEQ ID NO: 96470 - DNA, 13 bp, Artificial Sequence
  Oligonucleotide for detection of SNP TSC0023971
tacccatctcgac

SEQ ID NO: 96471 - DNA, 13 bp, Artificial Sequence
  Oligonucleotide for detection of SNP TSC0023971
gtcgagttgggta

SEQ ID NO: 96472 - DNA, 13 bp, Artificial Sequence
  Oligonucleotide for detection of SNP TSC0023971
tacccaactcgac

SEQ ID NO: 96473 - DNA, 13 bp, Artificial Sequence
  Oligonucleotide for detection of SNP TSC0023971
tgtttattttggy

SEQ ID NO: 96474 - DNA, 13 bp, Artificial Sequence
  Oligonucleotide for detection of SNP TSC0023971
rccaaaataaaca

SEQ ID NO: 96475 - DNA, 13 bp, Artificial Sequence
  Oligonucleotide for detection of SNP TSC0023971
tgtttatttcggy

SEQ ID NO: 96476 - DNA, 13 bp, Artificial Sequence
  Oligonucleotide for detection of SNP TSC0023971
rccgaaataaaca

SEQ ID NO: 96477 - DNA, 13 bp, Artificial Sequence
  Oligonucleotide for detection of SNP TSC0023971
tgtttaattcggy

SEQ ID NO: 96478 - DNA, 13 bp, Artificial Sequence
  Oligonucleotide for detection of SNP TSC0023971
rccgaattaaaca

SEQ ID NO: 96479 - DNA, 13 bp, Artificial Sequence
  Oligonucleotide for detection of SNP TSC0023973
attttttgatatg

SEQ ID NO: 96480 - DNA, 13 bp, Artificial Sequence
  Oligonucleotide for detection of SNP TSC0023973
catatcaaaaaat

SEQ ID NO: 96481 - DNA, 13 bp, Artificial Sequence
  Oligonucleotide for detection of SNP TSC0023973
atttttcgatatg

SEQ ID NO: 96482 - DNA, 13 bp, Artificial Sequence
  Oligonucleotide for detection of SNP TSC0023973
catatcgaaaaat

SEQ ID NO: 96483 - DNA, 13 bp, Artificial Sequence
  Oligonucleotide for detection of SNP TSC0023973
tatattggagggt

SEQ ID NO: 96484 - DNA, 13 bp, Artificial Sequence
  Oligonucleotide for detection of SNP TSC0023973
accctccaatata

SEQ ID NO: 96485 - DNA, 13 bp, Artificial Sequence
  Oligonucleotide for detection of SNP TSC0023973
tatattagagggt

SEQ ID NO: 96486 - DNA, 13 bp, Artificial Sequence
  Oligonucleotide for detection of SNP TSC0023973
accctctaatata

SEQ ID NO: 96487 - DNA, 13 bp, Artificial Sequence
  Oligonucleotide for detection of SNP TSC0023973
tatatcggagggt

SEQ ID NO: 96488 - DNA, 13 bp, Artificial Sequence
  Oligonucleotide for detection of SNP TSC0023973
accctccgatata

SEQ ID NO: 96489 - DNA, 13 bp, Artificial Sequence
  Oligonucleotide for detection of SNP TSC0023975
gttatatgtgttg

SEQ ID NO: 96490 - DNA, 13 bp, Artificial Sequence
  Oligonucleotide for detection of SNP TSC0023975
caacacatataac

SEQ ID NO: 96491 - DNA, 13 bp, Artificial Sequence
  Oligonucleotide for detection of SNP TSC0023975
gttatacgtgttg

SEQ ID NO: 96492 - DNA, 13 bp, Artificial Sequence
  Oligonucleotide for detection of SNP TSC0023975
caacacgtataac

SEQ ID NO: 96493 - DNA, 13 bp, Artificial Sequence
  Oligonucleotide for detection of SNP TSC0023975
tagtatgtgtgay

SEQ ID NO: 96494 - DNA, 13 bp, Artificial Sequence
  Oligonucleotide for detection of SNP TSC0023975
rtcacacatacta

SEQ ID NO: 96495 - DNA, 13 bp, Artificial Sequence
  Oligonucleotide for detection of SNP TSC0023975
tagtatatgtgay

SEQ ID NO: 96496 - DNA, 13 bp, Artificial Sequence
  Oligonucleotide for detection of SNP TSC0023975
rtcacatatacta

SEQ ID NO: 96497 - DNA, 13 bp, Artificial Sequence
  Oligonucleotide for detection of SNP TSC0023975
tagtacgtgtgay

SEQ ID NO: 96498 - DNA, 13 bp, Artificial Sequence
  Oligonucleotide for detection of SNP TSC0023975
rtcacacgtacta

SEQ ID NO: 96499 - DNA, 13 bp, Artificial Sequence
  Oligonucleotide for detection of SNP TSC0023977
taataggttatat

SEQ ID NO: 96500 - DNA, 13 bp, Artificial Sequence
  Oligonucleotide for detection of SNP TSC0023977
atataacctatta

SEQ ID NO: 96501 - DNA, 13 bp, Artificial Sequence
  Oligonucleotide for detection of SNP TSC0023977
taatagattatat

SEQ ID NO: 96502 - DNA, 13 bp, Artificial Sequence
  Oligonucleotide for detection of SNP TSC0023977
atataatctatta

SEQ ID NO: 96503 - DNA, 13 bp, Artificial Sequence
  Oligonucleotide for detection of SNP TSC0023978
ttttttagtgtty

SEQ ID NO: 96504 - DNA, 13 bp, Artificial Sequence
  Oligonucleotide for detection of SNP TSC0023978
raacactaaaaaa

SEQ ID NO: 96505 - DNA, 13 bp, Artificial Sequence
  Oligonucleotide for detection of SNP TSC0023978
tttttttgtgtty

SEQ ID NO: 96506 - DNA, 13 bp, Artificial Sequence
  Oligonucleotide for detection of SNP TSC0023978
raacacaaaaaaa

SEQ ID NO: 96507 - DNA, 13 bp, Artificial Sequence
  Oligonucleotide for detection of SNP TSC0023978
ggatattaaaaaa

SEQ ID NO: 96508 - DNA, 13 bp, Artificial Sequence
  Oligonucleotide for detection of SNP TSC0023978
ttttttaatatcc

SEQ ID NO: 96509 - DNA, 13 bp, Artificial Sequence
  Oligonucleotide for detection of SNP TSC0023978
ggatataaaaaaa

SEQ ID NO: 96510 - DNA, 13 bp, Artificial Sequence
  Oligonucleotide for detection of SNP TSC0023978
tttttttatatcc

SEQ ID NO: 96511 - DNA, 13 bp, Artificial Sequence
  Oligonucleotide for detection of SNP TSC0023979
gaattgggtatta

SEQ ID NO: 96512 - DNA, 13 bp, Artificial Sequence
  Oligonucleotide for detection of SNP TSC0023979
taatacccaattc

SEQ ID NO: 96513 - DNA, 13 bp, Artificial Sequence
  Oligonucleotide for detection of SNP TSC0023979
gaattgtgtatta

SEQ ID NO: 96514 - DNA, 13 bp, Artificial Sequence
  Oligonucleotide for detection of SNP TSC0023979
taatacacaattc

SEQ ID NO: 96515 - DNA, 13 bp, Artificial Sequence
  Oligonucleotide for detection of SNP TSC0023979
taatgtttagtty

SEQ ID NO: 96516 - DNA, 13 bp, Artificial Sequence
  Oligonucleotide for detection of SNP TSC0023979
raactaaacatta

SEQ ID NO: 96517 - DNA, 13 bp, Artificial Sequence
  Oligonucleotide for detection of SNP TSC0023979
taatgtatagtty

SEQ ID NO: 96518 - DNA, 13 bp, Artificial Sequence
  Oligonucleotide for detection of SNP TSC0023979
raactatacatta

SEQ ID NO: 96519 - DNA, 13 bp, Artificial Sequence
  Oligonucleotide for detection of SNP TSC0023980
tttttgattagat

SEQ ID NO: 96520 - DNA, 13 bp, Artificial Sequence
  Oligonucleotide for detection of SNP TSC0023980
atctaatcaaaaa

SEQ ID NO: 96521 - DNA, 13 bp, Artificial Sequence
  Oligonucleotide for detection of SNP TSC0023980
tttttgtttagat

SEQ ID NO: 96522 - DNA, 13 bp, Artificial Sequence
  Oligonucleotide for detection of SNP TSC0023980
atctaaacaaaaa

SEQ ID NO: 96523 - DNA, 13 bp, Artificial Sequence
  Oligonucleotide for detection of SNP TSC0023980
atttggttaaaaa

SEQ ID NO: 96524 - DNA, 13 bp, Artificial Sequence
  Oligonucleotide for detection of SNP TSC0023980
tttttaaccaaat

SEQ ID NO: 96525 - DNA, 13 bp, Artificial Sequence
  Oligonucleotide for detection of SNP TSC0023980
atttgggtaaaaa

SEQ ID NO: 96526 - DNA, 13 bp, Artificial Sequence
  Oligonucleotide for detection of SNP TSC0023980
tttttacccaaat

SEQ ID NO: 96527 - DNA, 13 bp, Artificial Sequence
  Oligonucleotide for detection of SNP TSC0023981
tgtttttagggga

SEQ ID NO: 96528 - DNA, 13 bp, Artificial Sequence
  Oligonucleotide for detection of SNP TSC0023981
tcccctaaaaaca

SEQ ID NO: 96529 - DNA, 13 bp, Artificial Sequence
  Oligonucleotide for detection of SNP TSC0023981
tgttttgagggga

SEQ ID NO: 96530 - DNA, 13 bp, Artificial Sequence
  Oligonucleotide for detection of SNP TSC0023981
tcccctcaaaaca

SEQ ID NO: 96531 - DNA, 13 bp, Artificial Sequence
  Oligonucleotide for detection of SNP TSC0023981
tgtttcgagggga

SEQ ID NO: 96532 - DNA, 13 bp, Artificial Sequence
  Oligonucleotide for detection of SNP TSC0023981
tcccctcgaaaca

SEQ ID NO: 96533 - DNA, 13 bp, Artificial Sequence
  Oligonucleotide for detection of SNP TSC0023981
ttttttggaggta

SEQ ID NO: 96534 - DNA, 13 bp, Artificial Sequence
  Oligonucleotide for detection of SNP TSC0023981
tacctccaaaaaa

SEQ ID NO: 96535 - DNA, 13 bp, Artificial Sequence
  Oligonucleotide for detection of SNP TSC0023981
tttttttgaggta

SEQ ID NO: 96536 - DNA, 13 bp, Artificial Sequence
  Oligonucleotide for detection of SNP TSC0023981
tacctcaaaaaaa

SEQ ID NO: 96537 - DNA, 13 bp, Artificial Sequence
  Oligonucleotide for detection of SNP TSC0023981
ttttttcgaggta

SEQ ID NO: 96538 - DNA, 13 bp, Artificial Sequence
  Oligonucleotide for detection of SNP TSC0023981
tacctcgaaaaaa

SEQ ID NO: 96539 - DNA, 13 bp, Artificial Sequence
  Oligonucleotide for detection of SNP TSC0023984
gttagttgtatty

SEQ ID NO: 96540 - DNA, 13 bp, Artificial Sequence
  Oligonucleotide for detection of SNP TSC0023984
raatacaactaac

SEQ ID NO: 96541 - DNA, 13 bp, Artificial Sequence
  Oligonucleotide for detection of SNP TSC0023984
gttagtggtatty

SEQ ID NO: 96542 - DNA, 13 bp, Artificial Sequence
  Oligonucleotide for detection of SNP TSC0023984
raataccactaac

SEQ ID NO: 96543 - DNA, 13 bp, Artificial Sequence
  Oligonucleotide for detection of SNP TSC0023984
gttagtcgtatty

SEQ ID NO: 96544 - DNA, 13 bp, Artificial Sequence
  Oligonucleotide for detection of SNP TSC0023984
raatacgactaac

SEQ ID NO: 96545 - DNA, 13 bp, Artificial Sequence
  Oligonucleotide for detection of SNP TSC0023984
gttagcggtatty

SEQ ID NO: 96546 - DNA, 13 bp, Artificial Sequence
  Oligonucleotide for detection of SNP TSC0023984
raataccgctaac

SEQ ID NO: 96547 - DNA, 13 bp, Artificial Sequence
  Oligonucleotide for detection of SNP TSC0023984
gaatgtggttagy

SEQ ID NO: 96548 - DNA, 13 bp, Artificial Sequence
  Oligonucleotide for detection of SNP TSC0023984
rctaaccacattc

SEQ ID NO: 96549 - DNA, 13 bp, Artificial Sequence
  Oligonucleotide for detection of SNP TSC0023984
gaatgttgttagy

SEQ ID NO: 96550 - DNA, 13 bp, Artificial Sequence
  Oligonucleotide for detection of SNP TSC0023984
rctaacaacattc

SEQ ID NO: 96551 - DNA, 13 bp, Artificial Sequence
  Oligonucleotide for detection of SNP TSC0023984
gaatgcggttagy

SEQ ID NO: 96552 - DNA, 13 bp, Artificial Sequence
  Oligonucleotide for detection of SNP TSC0023984
rctaaccgcattc

SEQ ID NO: 96553 - DNA, 13 bp, Artificial Sequence
  Oligonucleotide for detection of SNP TSC0023984
gaatgtcgttagy

SEQ ID NO: 96554 - DNA, 13 bp, Artificial Sequence
  Oligonucleotide for detection of SNP TSC0023984
rctaacgacattc

SEQ ID NO: 96555 - DNA, 13 bp, Artificial Sequence
  Oligonucleotide for detection of SNP TSC0023990
ggtgagttttttg

SEQ ID NO: 96556 - DNA, 13 bp, Artificial Sequence
  Oligonucleotide for detection of SNP TSC0023990
caaaaaactcacc

SEQ ID NO: 96557 - DNA, 13 bp, Artificial Sequence
  Oligonucleotide for detection of SNP TSC0023990
ggtgaggtttttg

SEQ ID NO: 96558 - DNA, 13 bp, Artificial Sequence
  Oligonucleotide for detection of SNP TSC0023990
caaaaacctcacc

SEQ ID NO: 96559 - DNA, 13 bp, Artificial Sequence
  Oligonucleotide for detection of SNP TSC0023990
taaagagtttaty

SEQ ID NO: 96560 - DNA, 13 bp, Artificial Sequence
  Oligonucleotide for detection of SNP TSC0023990
rataaactcttta

SEQ ID NO: 96561 - DNA, 13 bp, Artificial Sequence
  Oligonucleotide for detection of SNP TSC0023990
taaagattttaty

SEQ ID NO: 96562 - DNA, 13 bp, Artificial Sequence
  Oligonucleotide for detection of SNP TSC0023990
rataaaatcttta

SEQ ID NO: 96563 - DNA, 13 bp, Artificial Sequence
  Oligonucleotide for detection of SNP TSC0023992
ggatagatagtta

SEQ ID NO: 96564 - DNA, 13 bp, Artificial Sequence
  Oligonucleotide for detection of SNP TSC0023992
taactatctatcc

SEQ ID NO: 96565 - DNA, 13 bp, Artificial Sequence
  Oligonucleotide for detection of SNP TSC0023992
ggataggtagtta

SEQ ID NO: 96566 - DNA, 13 bp, Artificial Sequence
  Oligonucleotide for detection of SNP TSC0023992
taactacctatcc

SEQ ID NO: 96567 - DNA, 13 bp, Artificial Sequence
  Oligonucleotide for detection of SNP TSC0023993
tattgataataga

SEQ ID NO: 96568 - DNA, 13 bp, Artificial Sequence
  Oligonucleotide for detection of SNP TSC0023993
tctattatcaata

SEQ ID NO: 96569 - DNA, 13 bp, Artificial Sequence
  Oligonucleotide for detection of SNP TSC0023993
tattgagaataga

SEQ ID NO: 96570 - DNA, 13 bp, Artificial Sequence
  Oligonucleotide for detection of SNP TSC0023993
tctattctcaata

SEQ ID NO: 96571 - DNA, 13 bp, Artificial Sequence
  Oligonucleotide for detection of SNP TSC0023993
tttgtttttaata

SEQ ID NO: 96572 - DNA, 13 bp, Artificial Sequence
  Oligonucleotide for detection of SNP TSC0023993
tattaaaaacaaa

SEQ ID NO: 96573 - DNA, 13 bp, Artificial Sequence
  Oligonucleotide for detection of SNP TSC0023994
taagttataggat

SEQ ID NO: 96574 - DNA, 13 bp, Artificial Sequence
  Oligonucleotide for detection of SNP TSC0023994
atcctataactta

SEQ ID NO: 96575 - DNA, 13 bp, Artificial Sequence
  Oligonucleotide for detection of SNP TSC0023994
taagttttaggat

SEQ ID NO: 96576 - DNA, 13 bp, Artificial Sequence
  Oligonucleotide for detection of SNP TSC0023994
atcctaaaactta

SEQ ID NO: 96577 - DNA, 13 bp, Artificial Sequence
  Oligonucleotide for detection of SNP TSC0023994
attttgtaattta

SEQ ID NO: 96578 - DNA, 13 bp, Artificial Sequence
  Oligonucleotide for detection of SNP TSC0023994
taaattacaaaat

SEQ ID NO: 96579 - DNA, 13 bp, Artificial Sequence
  Oligonucleotide for detection of SNP TSC0023994
attttggaattta

SEQ ID NO: 96580 - DNA, 13 bp, Artificial Sequence
  Oligonucleotide for detection of SNP TSC0023994
taaattccaaaat

SEQ ID NO: 96581 - DNA, 13 bp, Artificial Sequence
  Oligonucleotide for detection of SNP TSC0023996
tttattatttatt

SEQ ID NO: 96582 - DNA, 13 bp, Artificial Sequence
  Oligonucleotide for detection of SNP TSC0023996
aataaataataaa

SEQ ID NO: 96583 - DNA, 13 bp, Artificial Sequence
  Oligonucleotide for detection of SNP TSC0023996
tttattttttatt

SEQ ID NO: 96584 - DNA, 13 bp, Artificial Sequence
  Oligonucleotide for detection of SNP TSC0023996
aataaaaaataaa

SEQ ID NO: 96585 - DNA, 13 bp, Artificial Sequence
  Oligonucleotide for detection of SNP TSC0023996
agtaagtggtagg

SEQ ID NO: 96586 - DNA, 13 bp, Artificial Sequence
  Oligonucleotide for detection of SNP TSC0023996
cctaccacttact

SEQ ID NO: 96587 - DNA, 13 bp, Artificial Sequence
  Oligonucleotide for detection of SNP TSC0023996
agtaagaggtagg

SEQ ID NO: 96588 - DNA, 13 bp, Artificial Sequence
  Oligonucleotide for detection of SNP TSC0023996
cctacctcttact

SEQ ID NO: 96589 - DNA, 13 bp, Artificial Sequence
  Oligonucleotide for detection of SNP TSC0023997
aaagttatgagaa

SEQ ID NO: 96590 - DNA, 13 bp, Artificial Sequence
  Oligonucleotide for detection of SNP TSC0023997
ttctcataacttt

SEQ ID NO: 96591 - DNA, 13 bp, Artificial Sequence
  Oligonucleotide for detection of SNP TSC0023997
aaagttgtgagaa

SEQ ID NO: 96592 - DNA, 13 bp, Artificial Sequence
  Oligonucleotide for detection of SNP TSC0023997
ttctcacaacttt

SEQ ID NO: 96593 - DNA, 13 bp, Artificial Sequence
  Oligonucleotide for detection of SNP TSC0023997
aaagtcgtgagaa

SEQ ID NO: 96594 - DNA, 13 bp, Artificial Sequence
  Oligonucleotide for detection of SNP TSC0023997
ttctcacgacttt

SEQ ID NO: 96595 - DNA, 13 bp, Artificial Sequence
  Oligonucleotide for detection of SNP TSC0023997
tttttatggtttt

SEQ ID NO: 96596 - DNA, 13 bp, Artificial Sequence
  Oligonucleotide for detection of SNP TSC0023997
aaaaccataaaaa

SEQ ID NO: 96597 - DNA, 13 bp, Artificial Sequence
  Oligonucleotide for detection of SNP TSC0023997
tttttacggtttt

SEQ ID NO: 96598 - DNA, 13 bp, Artificial Sequence
  Oligonucleotide for detection of SNP TSC0023997
aaaaccgtaaaaa

SEQ ID NO: 96599 - DNA, 13 bp, Artificial Sequence
  Oligonucleotide for detection of SNP TSC0023998
taatagaaattta

SEQ ID NO: 96600 - DNA, 13 bp, Artificial Sequence
  Oligonucleotide for detection of SNP TSC0023998
taaatttctatta

SEQ ID NO: 96601 - DNA, 13 bp, Artificial Sequence
  Oligonucleotide for detection of SNP TSC0023998
taataggaattta

SEQ ID NO: 96602 - DNA, 13 bp, Artificial Sequence
  Oligonucleotide for detection of SNP TSC0023998
taaattcctatta

SEQ ID NO: 96603 - DNA, 13 bp, Artificial Sequence
  Oligonucleotide for detection of SNP TSC0023999
aatttagtgtttg

SEQ ID NO: 96604 - DNA, 13 bp, Artificial Sequence
  Oligonucleotide for detection of SNP TSC0023999
caaacactaaatt

SEQ ID NO: 96605 - DNA, 13 bp, Artificial Sequence
  Oligonucleotide for detection of SNP TSC0023999
aatttaatgtttg

SEQ ID NO: 96606 - DNA, 13 bp, Artificial Sequence
  Oligonucleotide for detection of SNP TSC0023999
caaacattaaatt

SEQ ID NO: 96607 - DNA, 13 bp, Artificial Sequence
  Oligonucleotide for detection of SNP TSC0024000
ttttgggtaaata

SEQ ID NO: 96608 - DNA, 13 bp, Artificial Sequence
  Oligonucleotide for detection of SNP TSC0024000
tatttacccaaaa

SEQ ID NO: 96609 - DNA, 13 bp, Artificial Sequence
  Oligonucleotide for detection of SNP TSC0024000
ttttggttaaata

SEQ ID NO: 96610 - DNA, 13 bp, Artificial Sequence
  Oligonucleotide for detection of SNP TSC0024000
tatttaaccaaaa

SEQ ID NO: 96611 - DNA, 13 bp, Artificial Sequence
  Oligonucleotide for detection of SNP TSC0024000
tgtttgtttagag

SEQ ID NO: 96612 - DNA, 13 bp, Artificial Sequence
  Oligonucleotide for detection of SNP TSC0024000
ctctaaacaaaca

SEQ ID NO: 96613 - DNA, 13 bp, Artificial Sequence
  Oligonucleotide for detection of SNP TSC0024000
tgtttgattagag

SEQ ID NO: 96614 - DNA, 13 bp, Artificial Sequence
  Oligonucleotide for detection of SNP TSC0024000
ctctaatcaaaca

SEQ ID NO: 96615 - DNA, 13 bp, Artificial Sequence
  Oligonucleotide for detection of SNP TSC0024001
ttagagtgatttt

SEQ ID NO: 96616 - DNA, 13 bp, Artificial Sequence
  Oligonucleotide for detection of SNP TSC0024001
aaaatcactctaa

SEQ ID NO: 96617 - DNA, 13 bp, Artificial Sequence
  Oligonucleotide for detection of SNP TSC0024001
ttagagcgatttt

SEQ ID NO: 96618 - DNA, 13 bp, Artificial Sequence
  Oligonucleotide for detection of SNP TSC0024001
aaaatcgctctaa

SEQ ID NO: 96619 - DNA, 13 bp, Artificial Sequence
  Oligonucleotide for detection of SNP TSC0024001
aggattgttttga

SEQ ID NO: 96620 - DNA, 13 bp, Artificial Sequence
  Oligonucleotide for detection of SNP TSC0024001
tcaaaacaatcct

SEQ ID NO: 96621 - DNA, 13 bp, Artificial Sequence
  Oligonucleotide for detection of SNP TSC0024001
aggattattttga

SEQ ID NO: 96622 - DNA, 13 bp, Artificial Sequence
  Oligonucleotide for detection of SNP TSC0024001
tcaaaataatcct

SEQ ID NO: 96623 - DNA, 13 bp, Artificial Sequence
  Oligonucleotide for detection of SNP TSC0024001
aggatcgttttga

SEQ ID NO: 96624 - DNA, 13 bp, Artificial Sequence
  Oligonucleotide for detection of SNP TSC0024001
tcaaaacgatcct

SEQ ID NO: 96625 - DNA, 13 bp, Artificial Sequence
  Oligonucleotide for detection of SNP TSC0024002
aaagagaattatt

SEQ ID NO: 96626 - DNA, 13 bp, Artificial Sequence
  Oligonucleotide for detection of SNP TSC0024002
aataattctcttt

SEQ ID NO: 96627 - DNA, 13 bp, Artificial Sequence
  Oligonucleotide for detection of SNP TSC0024002
aaagagtattatt

SEQ ID NO: 96628 - DNA, 13 bp, Artificial Sequence
  Oligonucleotide for detection of SNP TSC0024002
aataatactcttt

SEQ ID NO: 96629 - DNA, 13 bp, Artificial Sequence
  Oligonucleotide for detection of SNP TSC0024002
aatggtttttttt

SEQ ID NO: 96630 - DNA, 13 bp, Artificial Sequence
  Oligonucleotide for detection of SNP TSC0024002
aaaaaaaaccatt

SEQ ID NO: 96631 - DNA, 13 bp, Artificial Sequence
  Oligonucleotide for detection of SNP TSC0024002
aatggtgtttttt

SEQ ID NO: 96632 - DNA, 13 bp, Artificial Sequence
  Oligonucleotide for detection of SNP TSC0024002
aaaaaacaccatt

SEQ ID NO: 96633 - DNA, 13 bp, Artificial Sequence
  Oligonucleotide for detection of SNP TSC0024003
aagagaattatty

SEQ ID NO: 96634 - DNA, 13 bp, Artificial Sequence
  Oligonucleotide for detection of SNP TSC0024003
raataattctctt

SEQ ID NO: 96635 - DNA, 13 bp, Artificial Sequence
  Oligonucleotide for detection of SNP TSC0024003
aagagatttatty

SEQ ID NO: 96636 - DNA, 13 bp, Artificial Sequence
  Oligonucleotide for detection of SNP TSC0024003
raataaatctctt

SEQ ID NO: 96637 - DNA, 13 bp, Artificial Sequence
  Oligonucleotide for detection of SNP TSC0024003
gaatggttttttt

SEQ ID NO: 96638 - DNA, 13 bp, Artificial Sequence
  Oligonucleotide for detection of SNP TSC0024003
aaaaaaaccattc

SEQ ID NO: 96639 - DNA, 13 bp, Artificial Sequence
  Oligonucleotide for detection of SNP TSC0024003
gaatgggtttttt

SEQ ID NO: 96640 - DNA, 13 bp, Artificial Sequence
  Oligonucleotide for detection of SNP TSC0024003
aaaaaacccattc

SEQ ID NO: 96641 - DNA, 13 bp, Artificial Sequence
  Oligonucleotide for detection of SNP TSC0024006
aggggaaatttgg

SEQ ID NO: 96642 - DNA, 13 bp, Artificial Sequence
  Oligonucleotide for detection of SNP TSC0024006
ccaaatttcccct

SEQ ID NO: 96643 - DNA, 13 bp, Artificial Sequence
  Oligonucleotide for detection of SNP TSC0024006
aggggagatttgg

SEQ ID NO: 96644 - DNA, 13 bp, Artificial Sequence
  Oligonucleotide for detection of SNP TSC0024006
ccaaatctcccct

SEQ ID NO: 96645 - DNA, 13 bp, Artificial Sequence
  Oligonucleotide for detection of SNP TSC0024009
ataggagagtttt

SEQ ID NO: 96646 - DNA, 13 bp, Artificial Sequence
  Oligonucleotide for detection of SNP TSC0024009
aaaactctcctat

SEQ ID NO: 96647 - DNA, 13 bp, Artificial Sequence
  Oligonucleotide for detection of SNP TSC0024009
ataggaaagtttt

SEQ ID NO: 96648 - DNA, 13 bp, Artificial Sequence
  Oligonucleotide for detection of SNP TSC0024009
aaaactttcctat

SEQ ID NO: 96649 - DNA, 13 bp, Artificial Sequence
  Oligonucleotide for detection of SNP TSC0024010
tgggttgagtatt

SEQ ID NO: 96650 - DNA, 13 bp, Artificial Sequence
  Oligonucleotide for detection of SNP TSC0024010
aatactcaaccca

SEQ ID NO: 96651 - DNA, 13 bp, Artificial Sequence
  Oligonucleotide for detection of SNP TSC0024010
tgggtttagtatt

SEQ ID NO: 96652 - DNA, 13 bp, Artificial Sequence
  Oligonucleotide for detection of SNP TSC0024010
aatactaaaccca

SEQ ID NO: 96653 - DNA, 13 bp, Artificial Sequence
  Oligonucleotide for detection of SNP TSC0024010
tgggtcgagtatt

SEQ ID NO: 96654 - DNA, 13 bp, Artificial Sequence
  Oligonucleotide for detection of SNP TSC0024010
aatactcgaccca

SEQ ID NO: 96655 - DNA, 13 bp, Artificial Sequence
  Oligonucleotide for detection of SNP TSC0024010
agtatttggttta

SEQ ID NO: 96656 - DNA, 13 bp, Artificial Sequence
  Oligonucleotide for detection of SNP TSC0024010
taaaccaaatact

SEQ ID NO: 96657 - DNA, 13 bp, Artificial Sequence
  Oligonucleotide for detection of SNP TSC0024010
agtattaggttta

SEQ ID NO: 96658 - DNA, 13 bp, Artificial Sequence
  Oligonucleotide for detection of SNP TSC0024010
taaacctaatact

SEQ ID NO: 96659 - DNA, 13 bp, Artificial Sequence
  Oligonucleotide for detection of SNP TSC0024010
agtattcggttta

SEQ ID NO: 96660 - DNA, 13 bp, Artificial Sequence
  Oligonucleotide for detection of SNP TSC0024010
taaaccgaatact

SEQ ID NO: 96661 - DNA, 13 bp, Artificial Sequence
  Oligonucleotide for detection of SNP TSC0024012
ttgggtatgttgt

SEQ ID NO: 96662 - DNA, 13 bp, Artificial Sequence
  Oligonucleotide for detection of SNP TSC0024012
acaacatacccaa

SEQ ID NO: 96663 - DNA, 13 bp, Artificial Sequence
  Oligonucleotide for detection of SNP TSC0024012
ttgggtgtgttgt

SEQ ID NO: 96664 - DNA, 13 bp, Artificial Sequence
  Oligonucleotide for detection of SNP TSC0024012
acaacacacccaa

SEQ ID NO: 96665 - DNA, 13 bp, Artificial Sequence
  Oligonucleotide for detection of SNP TSC0024012
ttgggcgtgttgt

SEQ ID NO: 96666 - DNA, 13 bp, Artificial Sequence
  Oligonucleotide for detection of SNP TSC0024012
acaacacgcccaa

SEQ ID NO: 96667 - DNA, 13 bp, Artificial Sequence
  Oligonucleotide for detection of SNP TSC0024012
ataatatgtttaa

SEQ ID NO: 96668 - DNA, 13 bp, Artificial Sequence
  Oligonucleotide for detection of SNP TSC0024012
ttaaacatattat

SEQ ID NO: 96669 - DNA, 13 bp, Artificial Sequence
  Oligonucleotide for detection of SNP TSC0024012
ataatacgtttaa

SEQ ID NO: 96670 - DNA, 13 bp, Artificial Sequence
  Oligonucleotide for detection of SNP TSC0024012
ttaaacgtattat

SEQ ID NO: 96671 - DNA, 13 bp, Artificial Sequence
  Oligonucleotide for detection of SNP TSC0024013
tgtgttattagag

SEQ ID NO: 96672 - DNA, 13 bp, Artificial Sequence
  Oligonucleotide for detection of SNP TSC0024013
ctctaataacaca

SEQ ID NO: 96673 - DNA, 13 bp, Artificial Sequence
  Oligonucleotide for detection of SNP TSC0024015
agattgaaataag

SEQ ID NO: 96674 - DNA, 13 bp, Artificial Sequence
  Oligonucleotide for detection of SNP TSC0024015
cttatttcaatct

SEQ ID NO: 96675 - DNA, 13 bp, Artificial Sequence
  Oligonucleotide for detection of SNP TSC0024015
agattggaataag

SEQ ID NO: 96676 - DNA, 13 bp, Artificial Sequence
  Oligonucleotide for detection of SNP TSC0024015
cttattccaatct

SEQ ID NO: 96677 - DNA, 13 bp, Artificial Sequence
  Oligonucleotide for detection of SNP TSC0024016
aagattagttttt

SEQ ID NO: 96678 - DNA, 13 bp, Artificial Sequence
  Oligonucleotide for detection of SNP TSC0024016
aaaaactaatctt

SEQ ID NO: 96679 - DNA, 13 bp, Artificial Sequence
  Oligonucleotide for detection of SNP TSC0024016
aagattggttttt

SEQ ID NO: 96680 - DNA, 13 bp, Artificial Sequence
  Oligonucleotide for detection of SNP TSC0024016
aaaaaccaatctt

SEQ ID NO: 96681 - DNA, 13 bp, Artificial Sequence
  Oligonucleotide for detection of SNP TSC0024017
agttaggtattgt

SEQ ID NO: 96682 - DNA, 13 bp, Artificial Sequence
  Oligonucleotide for detection of SNP TSC0024017
acaatacctaact

SEQ ID NO: 96683 - DNA, 13 bp, Artificial Sequence
  Oligonucleotide for detection of SNP TSC0024017
agttagatattgt

SEQ ID NO: 96684 - DNA, 13 bp, Artificial Sequence
  Oligonucleotide for detection of SNP TSC0024017
acaatatctaact

SEQ ID NO: 96685 - DNA, 13 bp, Artificial Sequence
  Oligonucleotide for detection of SNP TSC0024018
tttggagttagtg

SEQ ID NO: 96686 - DNA, 13 bp, Artificial Sequence
  Oligonucleotide for detection of SNP TSC0024018
cactaactccaaa

SEQ ID NO: 96687 - DNA, 13 bp, Artificial Sequence
  Oligonucleotide for detection of SNP TSC0024018
tttggaattagtg

SEQ ID NO: 96688 - DNA, 13 bp, Artificial Sequence
  Oligonucleotide for detection of SNP TSC0024018
cactaattccaaa

SEQ ID NO: 96689 - DNA, 13 bp, Artificial Sequence
  Oligonucleotide for detection of SNP TSC0024019
tgtttttttgtgy

SEQ ID NO: 96690 - DNA, 13 bp, Artificial Sequence
  Oligonucleotide for detection of SNP TSC0024019
rcacaaaaaaaca

SEQ ID NO: 96691 - DNA, 13 bp, Artificial Sequence
  Oligonucleotide for detection of SNP TSC0024019
tgttttgttgtgy

SEQ ID NO: 96692 - DNA, 13 bp, Artificial Sequence
  Oligonucleotide for detection of SNP TSC0024019
rcacaacaaaaca

SEQ ID NO: 96693 - DNA, 13 bp, Artificial Sequence
  Oligonucleotide for detection of SNP TSC0024019
tgtttcgttgtgy

SEQ ID NO: 96694 - DNA, 13 bp, Artificial Sequence
  Oligonucleotide for detection of SNP TSC0024019
rcacaacgaaaca

SEQ ID NO: 96695 - DNA, 13 bp, Artificial Sequence
  Oligonucleotide for detection of SNP TSC0024019
gtataggggagta

SEQ ID NO: 96696 - DNA, 13 bp, Artificial Sequence
  Oligonucleotide for detection of SNP TSC0024019
tactcccctatac

SEQ ID NO: 96697 - DNA, 13 bp, Artificial Sequence
  Oligonucleotide for detection of SNP TSC0024019
gtatagtggagta

SEQ ID NO: 96698 - DNA, 13 bp, Artificial Sequence
  Oligonucleotide for detection of SNP TSC0024019
tactccactatac

SEQ ID NO: 96699 - DNA, 13 bp, Artificial Sequence
  Oligonucleotide for detection of SNP TSC0024019
gtatagcggagta

SEQ ID NO: 96700 - DNA, 13 bp, Artificial Sequence
  Oligonucleotide for detection of SNP TSC0024019
tactccgctatac

SEQ ID NO: 96701 - DNA, 13 bp, Artificial Sequence
  Oligonucleotide for detection of SNP TSC0024020
ggttgtagatagg

SEQ ID NO: 96702 - DNA, 13 bp, Artificial Sequence
  Oligonucleotide for detection of SNP TSC0024020
cctatctacaacc

SEQ ID NO: 96703 - DNA, 13 bp, Artificial Sequence
  Oligonucleotide for detection of SNP TSC0024020
ggttgtggatagg

SEQ ID NO: 96704 - DNA, 13 bp, Artificial Sequence
  Oligonucleotide for detection of SNP TSC0024020
cctatccacaacc

SEQ ID NO: 96705 - DNA, 13 bp, Artificial Sequence
  Oligonucleotide for detection of SNP TSC0024021
gtaatgggaatat

SEQ ID NO: 96706 - DNA, 13 bp, Artificial Sequence
  Oligonucleotide for detection of SNP TSC0024021
atattcccattac

SEQ ID NO: 96707 - DNA, 13 bp, Artificial Sequence
  Oligonucleotide for detection of SNP TSC0024021
gtaatgtgaatat

SEQ ID NO: 96708 - DNA, 13 bp, Artificial Sequence
  Oligonucleotide for detection of SNP TSC0024021
atattcacattac

SEQ ID NO: 96709 - DNA, 13 bp, Artificial Sequence
  Oligonucleotide for detection of SNP TSC0024021
atgtttttattgy

SEQ ID NO: 96710 - DNA, 13 bp, Artificial Sequence
  Oligonucleotide for detection of SNP TSC0024021
rcaataaaaacat

SEQ ID NO: 96711 - DNA, 13 bp, Artificial Sequence
  Oligonucleotide for detection of SNP TSC0024021
atgtttatattgy

SEQ ID NO: 96712 - DNA, 13 bp, Artificial Sequence
  Oligonucleotide for detection of SNP TSC0024021
rcaatataaacat

SEQ ID NO: 96713 - DNA, 13 bp, Artificial Sequence
  Oligonucleotide for detection of SNP TSC0024023
ttggtttggtgtg

SEQ ID NO: 96714 - DNA, 13 bp, Artificial Sequence
  Oligonucleotide for detection of SNP TSC0024023
cacaccaaaccaa

SEQ ID NO: 96715 - DNA, 13 bp, Artificial Sequence
  Oligonucleotide for detection of SNP TSC0024023
ttggttcggtgtg

SEQ ID NO: 96716 - DNA, 13 bp, Artificial Sequence
  Oligonucleotide for detection of SNP TSC0024023
cacaccgaaccaa

SEQ ID NO: 96717 - DNA, 13 bp, Artificial Sequence
  Oligonucleotide for detection of SNP TSC0024023
ttggtttggcgtg

SEQ ID NO: 96718 - DNA, 13 bp, Artificial Sequence
  Oligonucleotide for detection of SNP TSC0024023
cacgccaaaccaa

SEQ ID NO: 96719 - DNA, 13 bp, Artificial Sequence
  Oligonucleotide for detection of SNP TSC0024023
ttggttcggcgtg

SEQ ID NO: 96720 - DNA, 13 bp, Artificial Sequence
  Oligonucleotide for detection of SNP TSC0024023
cacgccgaaccaa

SEQ ID NO: 96721 - DNA, 13 bp, Artificial Sequence
  Oligonucleotide for detection of SNP TSC0024023
tatgttgggttaa

SEQ ID NO: 96722 - DNA, 13 bp, Artificial Sequence
  Oligonucleotide for detection of SNP TSC0024023
ttaacccaacata

SEQ ID NO: 96723 - DNA, 13 bp, Artificial Sequence
  Oligonucleotide for detection of SNP TSC0024023
tacgttgggttaa

SEQ ID NO: 96724 - DNA, 13 bp, Artificial Sequence
  Oligonucleotide for detection of SNP TSC0024023
ttaacccaacgta

SEQ ID NO: 96725 - DNA, 13 bp, Artificial Sequence
  Oligonucleotide for detection of SNP TSC0024023
tatgtcgggttaa

SEQ ID NO: 96726 - DNA, 13 bp, Artificial Sequence
  Oligonucleotide for detection of SNP TSC0024023
ttaacccgacata

SEQ ID NO: 96727 - DNA, 13 bp, Artificial Sequence
  Oligonucleotide for detection of SNP TSC0024023
tacgtcgggttaa

SEQ ID NO: 96728 - DNA, 13 bp, Artificial Sequence
  Oligonucleotide for detection of SNP TSC0024023
ttaacccgacgta

SEQ ID NO: 96729 - DNA, 13 bp, Artificial Sequence
  Oligonucleotide for detection of SNP TSC0024024
atatatatacgtg

SEQ ID NO: 96730 - DNA, 13 bp, Artificial Sequence
  Oligonucleotide for detection of SNP TSC0024024
cacgtatatatat

SEQ ID NO: 96731 - DNA, 13 bp, Artificial Sequence
  Oligonucleotide for detection of SNP TSC0024024
atatacgtatgtg

SEQ ID NO: 96732 - DNA, 13 bp, Artificial Sequence
  Oligonucleotide for detection of SNP TSC0024024
cacatacgtatat

SEQ ID NO: 96733 - DNA, 13 bp, Artificial Sequence
  Oligonucleotide for detection of SNP TSC0024024
atatatatatgcg

SEQ ID NO: 96734 - DNA, 13 bp, Artificial Sequence
  Oligonucleotide for detection of SNP TSC0024024
cgcatatatatat

SEQ ID NO: 96735 - DNA, 13 bp, Artificial Sequence
  Oligonucleotide for detection of SNP TSC0024024
atatatgtacgtg

SEQ ID NO: 96736 - DNA, 13 bp, Artificial Sequence
  Oligonucleotide for detection of SNP TSC0024024
cacgtacatatat

SEQ ID NO: 96737 - DNA, 13 bp, Artificial Sequence
  Oligonucleotide for detection of SNP TSC0024024
atatatatacgcg

SEQ ID NO: 96738 - DNA, 13 bp, Artificial Sequence
  Oligonucleotide for detection of SNP TSC0024024
cgcgtatatatat

SEQ ID NO: 96739 - DNA, 13 bp, Artificial Sequence
  Oligonucleotide for detection of SNP TSC0024024
atatatgtatgcg

SEQ ID NO: 96740 - DNA, 13 bp, Artificial Sequence
  Oligonucleotide for detection of SNP TSC0024024
cgcatacatatat

SEQ ID NO: 96741 - DNA, 13 bp, Artificial Sequence
  Oligonucleotide for detection of SNP TSC0024024
atatacgtacgtg

SEQ ID NO: 96742 - DNA, 13 bp, Artificial Sequence
  Oligonucleotide for detection of SNP TSC0024024
cacgtacgtatat

SEQ ID NO: 96743 - DNA, 13 bp, Artificial Sequence
  Oligonucleotide for detection of SNP TSC0024024
atatacgtatgcg

SEQ ID NO: 96744 - DNA, 13 bp, Artificial Sequence
  Oligonucleotide for detection of SNP TSC0024024
cgcatacgtatat

SEQ ID NO: 96745 - DNA, 13 bp, Artificial Sequence
  Oligonucleotide for detection of SNP TSC0024024
atatatgtacgcg

SEQ ID NO: 96746 - DNA, 13 bp, Artificial Sequence
  Oligonucleotide for detection of SNP TSC0024024
cgcgtacatatat

SEQ ID NO: 96747 - DNA, 13 bp, Artificial Sequence
  Oligonucleotide for detection of SNP TSC0024024
atatacgtacgcg

SEQ ID NO: 96748 - DNA, 13 bp, Artificial Sequence
  Oligonucleotide for detection of SNP TSC0024024
cgcgtacgtatat

SEQ ID NO: 96749 - DNA, 13 bp, Artificial Sequence
  Oligonucleotide for detection of SNP TSC0024024
cgtgtgtgtgtgt

SEQ ID NO: 96750 - DNA, 13 bp, Artificial Sequence
  Oligonucleotide for detection of SNP TSC0024024
acacacacacacg

SEQ ID NO: 96751 - DNA, 13 bp, Artificial Sequence
  Oligonucleotide for detection of SNP TSC0024024
tgcgtgtgtgtgt

SEQ ID NO: 96752 - DNA, 13 bp, Artificial Sequence
  Oligonucleotide for detection of SNP TSC0024024
acacacacacgca

SEQ ID NO: 96753 - DNA, 13 bp, Artificial Sequence
  Oligonucleotide for detection of SNP TSC0024024
cgcgtgtgtgtgt

SEQ ID NO: 96754 - DNA, 13 bp, Artificial Sequence
  Oligonucleotide for detection of SNP TSC0024024
acacacacacgcg

SEQ ID NO: 96755 - DNA, 13 bp, Artificial Sequence
  Oligonucleotide for detection of SNP TSC0024024
cgtgtgcgtgtgt

SEQ ID NO: 96756 - DNA, 13 bp, Artificial Sequence
  Oligonucleotide for detection of SNP TSC0024024
acacacgcacacg

SEQ ID NO: 96757 - DNA, 13 bp, Artificial Sequence
  Oligonucleotide for detection of SNP TSC0024024
tgcgtgcgtgtgt

SEQ ID NO: 96758 - DNA, 13 bp, Artificial Sequence
  Oligonucleotide for detection of SNP TSC0024024
acacacgcacgca

SEQ ID NO: 96759 - DNA, 13 bp, Artificial Sequence
  Oligonucleotide for detection of SNP TSC0024024
cgcgtgcgtgtgt

SEQ ID NO: 96760 - DNA, 13 bp, Artificial Sequence
  Oligonucleotide for detection of SNP TSC0024024
acacacgcacgcg

SEQ ID NO: 96761 - DNA, 13 bp, Artificial Sequence
  Oligonucleotide for detection of SNP TSC0024025
atatatacgtgtg

SEQ ID NO: 96762 - DNA, 13 bp, Artificial Sequence
  Oligonucleotide for detection of SNP TSC0024025
cacacgtatatat

SEQ ID NO: 96763 - DNA, 13 bp, Artificial Sequence
  Oligonucleotide for detection of SNP TSC0024025
atatacgtgtgtg

SEQ ID NO: 96764 - DNA, 13 bp, Artificial Sequence
  Oligonucleotide for detection of SNP TSC0024025
cacacacgtatat

SEQ ID NO: 96765 - DNA, 13 bp, Artificial Sequence
  Oligonucleotide for detection of SNP TSC0024025
atatatatgcgtg

SEQ ID NO: 96766 - DNA, 13 bp, Artificial Sequence
  Oligonucleotide for detection of SNP TSC0024025
cacgcatatatat

SEQ ID NO: 96767 - DNA, 13 bp, Artificial Sequence
  Oligonucleotide for detection of SNP TSC0024025
atatatgcgtgtg

SEQ ID NO: 96768 - DNA, 13 bp, Artificial Sequence
  Oligonucleotide for detection of SNP TSC0024025
cacacgcatatat

SEQ ID NO: 96769 - DNA, 13 bp, Artificial Sequence
  Oligonucleotide for detection of SNP TSC0024025
atatatatgtgcg

SEQ ID NO: 96770 - DNA, 13 bp, Artificial Sequence
  Oligonucleotide for detection of SNP TSC0024025
cgcacatatatat

SEQ ID NO: 96771 - DNA, 13 bp, Artificial Sequence
  Oligonucleotide for detection of SNP TSC0024025
atatatgtgcgtg

SEQ ID NO: 96772 - DNA, 13 bp, Artificial Sequence
  Oligonucleotide for detection of SNP TSC0024025
cacgcacatatat

SEQ ID NO: 96773 - DNA, 13 bp, Artificial Sequence
  Oligonucleotide for detection of SNP TSC0024025
atatatacgcgtg

SEQ ID NO: 96774 - DNA, 13 bp, Artificial Sequence
  Oligonucleotide for detection of SNP TSC0024025
cacgcgtatatat

SEQ ID NO: 96775 - DNA, 13 bp, Artificial Sequence
  Oligonucleotide for detection of SNP TSC0024025
atatatgtgtgcg

SEQ ID NO: 96776 - DNA, 13 bp, Artificial Sequence
  Oligonucleotide for detection of SNP TSC0024025
cgcacacatatat

SEQ ID NO: 96777 - DNA, 13 bp, Artificial Sequence
  Oligonucleotide for detection of SNP TSC0024025
atatatacgtgcg

SEQ ID NO: 96778 - DNA, 13 bp, Artificial Sequence
  Oligonucleotide for detection of SNP TSC0024025
cgcacgtatatat

SEQ ID NO: 96779 - DNA, 13 bp, Artificial Sequence
  Oligonucleotide for detection of SNP TSC0024025
atatacgcgtgtg

SEQ ID NO: 96780 - DNA, 13 bp, Artificial Sequence
  Oligonucleotide for detection of SNP TSC0024025
cacacgcgtatat

SEQ ID NO: 96781 - DNA, 13 bp, Artificial Sequence
  Oligonucleotide for detection of SNP TSC0024025
atatatatgcgcg

SEQ ID NO: 96782 - DNA, 13 bp, Artificial Sequence
  Oligonucleotide for detection of SNP TSC0024025
cgcgcatatatat

SEQ ID NO: 96783 - DNA, 13 bp, Artificial Sequence
  Oligonucleotide for detection of SNP TSC0024025
atatacgtgcgtg

SEQ ID NO: 96784 - DNA, 13 bp, Artificial Sequence
  Oligonucleotide for detection of SNP TSC0024025
cacgcacgtatat

SEQ ID NO: 96785 - DNA, 13 bp, Artificial Sequence
  Oligonucleotide for detection of SNP TSC0024025
atatatacgcgcg

SEQ ID NO: 96786 - DNA, 13 bp, Artificial Sequence
  Oligonucleotide for detection of SNP TSC0024025
cgcgcgtatatat

SEQ ID NO: 96787 - DNA, 13 bp, Artificial Sequence
  Oligonucleotide for detection of SNP TSC0024025
atatacgtgtgcg

SEQ ID NO: 96788 - DNA, 13 bp, Artificial Sequence
  Oligonucleotide for detection of SNP TSC0024025
cgcacacgtatat

SEQ ID NO: 96789 - DNA, 13 bp, Artificial Sequence
  Oligonucleotide for detection of SNP TSC0024025
atatatgcgcgtg

SEQ ID NO: 96790 - DNA, 13 bp, Artificial Sequence
  Oligonucleotide for detection of SNP TSC0024025
cacgcgcatatat

SEQ ID NO: 96791 - DNA, 13 bp, Artificial Sequence
  Oligonucleotide for detection of SNP TSC0024025
atatatgcgtgcg

SEQ ID NO: 96792 - DNA, 13 bp, Artificial Sequence
  Oligonucleotide for detection of SNP TSC0024025
cgcacgcatatat

SEQ ID NO: 96793 - DNA, 13 bp, Artificial Sequence
  Oligonucleotide for detection of SNP TSC0024025
atatatgtgcgcg

SEQ ID NO: 96794 - DNA, 13 bp, Artificial Sequence
  Oligonucleotide for detection of SNP TSC0024025
cgcgcacatatat

SEQ ID NO: 96795 - DNA, 13 bp, Artificial Sequence
  Oligonucleotide for detection of SNP TSC0024025
atatacgcgcgtg

SEQ ID NO: 96796 - DNA, 13 bp, Artificial Sequence
  Oligonucleotide for detection of SNP TSC0024025
cacgcgcgtatat

SEQ ID NO: 96797 - DNA, 13 bp, Artificial Sequence
  Oligonucleotide for detection of SNP TSC0024025
atatacgcgtgcg

SEQ ID NO: 96798 - DNA, 13 bp, Artificial Sequence
  Oligonucleotide for detection of SNP TSC0024025
cgcacgcgtatat

SEQ ID NO: 96799 - DNA, 13 bp, Artificial Sequence
  Oligonucleotide for detection of SNP TSC0024025
atatacgtgcgcg

SEQ ID NO: 96800 - DNA, 13 bp, Artificial Sequence
  Oligonucleotide for detection of SNP TSC0024025
cgcgcacgtatat

SEQ ID NO: 96801 - DNA, 13 bp, Artificial Sequence
  Oligonucleotide for detection of SNP TSC0024025
atatatgcgcgcg

SEQ ID NO: 96802 - DNA, 13 bp, Artificial Sequence
  Oligonucleotide for detection of SNP TSC0024025
cgcgcgcatatat

SEQ ID NO: 96803 - DNA, 13 bp, Artificial Sequence
  Oligonucleotide for detection of SNP TSC0024025
atatacgcgcgcg

SEQ ID NO: 96804 - DNA, 13 bp, Artificial Sequence
  Oligonucleotide for detection of SNP TSC0024025
cgcgcgcgtatat

SEQ ID NO: 96805 - DNA, 13 bp, Artificial Sequence
  Oligonucleotide for detection of SNP TSC0024025
tgtgcgtgtgtgt

SEQ ID NO: 96806 - DNA, 13 bp, Artificial Sequence
  Oligonucleotide for detection of SNP TSC0024025
acacacacgcaca

SEQ ID NO: 96807 - DNA, 13 bp, Artificial Sequence
  Oligonucleotide for detection of SNP TSC0024025
cgtgcgtgtgtgt

SEQ ID NO: 96808 - DNA, 13 bp, Artificial Sequence
  Oligonucleotide for detection of SNP TSC0024025
acacacacgcacg

SEQ ID NO: 96809 - DNA, 13 bp, Artificial Sequence
  Oligonucleotide for detection of SNP TSC0024025
tgcgcgtgtgtgt

SEQ ID NO: 96810 - DNA, 13 bp, Artificial Sequence
  Oligonucleotide for detection of SNP TSC0024025
acacacacgcgca

SEQ ID NO: 96811 - DNA, 13 bp, Artificial Sequence
  Oligonucleotide for detection of SNP TSC0024025
cgcgcgtgtgtgt

SEQ ID NO: 96812 - DNA, 13 bp, Artificial Sequence
  Oligonucleotide for detection of SNP TSC0024025
acacacacgcgcg

SEQ ID NO: 96813 - DNA, 13 bp, Artificial Sequence
  Oligonucleotide for detection of SNP TSC0024025
tgtgcgcgtgtgt

SEQ ID NO: 96814 - DNA, 13 bp, Artificial Sequence
  Oligonucleotide for detection of SNP TSC0024025
acacacgcgcaca

SEQ ID NO: 96815 - DNA, 13 bp, Artificial Sequence
  Oligonucleotide for detection of SNP TSC0024025
cgtgcgcgtgtgt

SEQ ID NO: 96816 - DNA, 13 bp, Artificial Sequence
  Oligonucleotide for detection of SNP TSC0024025
acacacgcgcacg

SEQ ID NO: 96817 - DNA, 13 bp, Artificial Sequence
  Oligonucleotide for detection of SNP TSC0024025
tgcgcgcgtgtgt

SEQ ID NO: 96818 - DNA, 13 bp, Artificial Sequence
  Oligonucleotide for detection of SNP TSC0024025
acacacgcgcgca

SEQ ID NO: 96819 - DNA, 13 bp, Artificial Sequence
  Oligonucleotide for detection of SNP TSC0024025
cgcgcgcgtgtgt

SEQ ID NO: 96820 - DNA, 13 bp, Artificial Sequence
  Oligonucleotide for detection of SNP TSC0024025
acacacgcgcgcg

SEQ ID NO: 96821 - DNA, 13 bp, Artificial Sequence
  Oligonucleotide for detection of SNP TSC0024026
ttatttacgttta

SEQ ID NO: 96822 - DNA, 13 bp, Artificial Sequence
  Oligonucleotide for detection of SNP TSC0024026
taaacgtaaataa

SEQ ID NO: 96823 - DNA, 13 bp, Artificial Sequence
  Oligonucleotide for detection of SNP TSC0024026
ttattttcgttta

SEQ ID NO: 96824 - DNA, 13 bp, Artificial Sequence
  Oligonucleotide for detection of SNP TSC0024026
taaacgaaaataa

SEQ ID NO: 96825 - DNA, 13 bp, Artificial Sequence
  Oligonucleotide for detection of SNP TSC0024026
taaatgtgggtga

SEQ ID NO: 96826 - DNA, 13 bp, Artificial Sequence
  Oligonucleotide for detection of SNP TSC0024026
tcacccacattta

SEQ ID NO: 96827 - DNA, 13 bp, Artificial Sequence
  Oligonucleotide for detection of SNP TSC0024026
taaatgggggtga

SEQ ID NO: 96828 - DNA, 13 bp, Artificial Sequence
  Oligonucleotide for detection of SNP TSC0024026
tcacccccattta

SEQ ID NO: 96829 - DNA, 13 bp, Artificial Sequence
  Oligonucleotide for detection of SNP TSC0024026
taaacgtgggtga

SEQ ID NO: 96830 - DNA, 13 bp, Artificial Sequence
  Oligonucleotide for detection of SNP TSC0024026
tcacccacgttta

SEQ ID NO: 96831 - DNA, 13 bp, Artificial Sequence
  Oligonucleotide for detection of SNP TSC0024026
taaacgggggtga

SEQ ID NO: 96832 - DNA, 13 bp, Artificial Sequence
  Oligonucleotide for detection of SNP TSC0024026
tcacccccgttta

SEQ ID NO: 96833 - DNA, 13 bp, Artificial Sequence
  Oligonucleotide for detection of SNP TSC0024027
gggtaaattgatg

SEQ ID NO: 96834 - DNA, 13 bp, Artificial Sequence
  Oligonucleotide for detection of SNP TSC0024027
catcaatttaccc

SEQ ID NO: 96835 - DNA, 13 bp, Artificial Sequence
  Oligonucleotide for detection of SNP TSC0024027
gggtaatttgatg

SEQ ID NO: 96836 - DNA, 13 bp, Artificial Sequence
  Oligonucleotide for detection of SNP TSC0024027
catcaaattaccc

SEQ ID NO: 96837 - DNA, 13 bp, Artificial Sequence
  Oligonucleotide for detection of SNP TSC0024027
tattagtttgtty

SEQ ID NO: 96838 - DNA, 13 bp, Artificial Sequence
  Oligonucleotide for detection of SNP TSC0024027
raacaaactaata

SEQ ID NO: 96839 - DNA, 13 bp, Artificial Sequence
  Oligonucleotide for detection of SNP TSC0024027
tattagattgtty

SEQ ID NO: 96840 - DNA, 13 bp, Artificial Sequence
  Oligonucleotide for detection of SNP TSC0024027
raacaatctaata

SEQ ID NO: 96841 - DNA, 13 bp, Artificial Sequence
  Oligonucleotide for detection of SNP TSC0024028
ttaattattttty

SEQ ID NO: 96842 - DNA, 13 bp, Artificial Sequence
  Oligonucleotide for detection of SNP TSC0024028
raaaaataattaa

SEQ ID NO: 96843 - DNA, 13 bp, Artificial Sequence
  Oligonucleotide for detection of SNP TSC0024028
ttaatttttttty

SEQ ID NO: 96844 - DNA, 13 bp, Artificial Sequence
  Oligonucleotide for detection of SNP TSC0024028
raaaaaaaattaa

SEQ ID NO: 96845 - DNA, 13 bp, Artificial Sequence
  Oligonucleotide for detection of SNP TSC0024028
ggggggtggttgg

SEQ ID NO: 96846 - DNA, 13 bp, Artificial Sequence
  Oligonucleotide for detection of SNP TSC0024028
ccaaccacccccc

SEQ ID NO: 96847 - DNA, 13 bp, Artificial Sequence
  Oligonucleotide for detection of SNP TSC0024028
gggggggggttgg

SEQ ID NO: 96848 - DNA, 13 bp, Artificial Sequence
  Oligonucleotide for detection of SNP TSC0024028
ccaaccccccccc

SEQ ID NO: 96849 - DNA, 13 bp, Artificial Sequence
  Oligonucleotide for detection of SNP TSC0024031
gtatgttgtagay

SEQ ID NO: 96850 - DNA, 13 bp, Artificial Sequence
  Oligonucleotide for detection of SNP TSC0024031
rtctacaacatac

SEQ ID NO: 96851 - DNA, 13 bp, Artificial Sequence
  Oligonucleotide for detection of SNP TSC0024031
gtatgtggtagay

SEQ ID NO: 96852 - DNA, 13 bp, Artificial Sequence
  Oligonucleotide for detection of SNP TSC0024031
rtctaccacatac

SEQ ID NO: 96853 - DNA, 13 bp, Artificial Sequence
  Oligonucleotide for detection of SNP TSC0024031
gtatgtcgtagay

SEQ ID NO: 96854 - DNA, 13 bp, Artificial Sequence
  Oligonucleotide for detection of SNP TSC0024031
rtctacgacatac

SEQ ID NO: 96855 - DNA, 13 bp, Artificial Sequence
  Oligonucleotide for detection of SNP TSC0024031
gtttgtgatatay

SEQ ID NO: 96856 - DNA, 13 bp, Artificial Sequence
  Oligonucleotide for detection of SNP TSC0024031
rtatatcacaaac

SEQ ID NO: 96857 - DNA, 13 bp, Artificial Sequence
  Oligonucleotide for detection of SNP TSC0024031
gtttgttatatay

SEQ ID NO: 96858 - DNA, 13 bp, Artificial Sequence
  Oligonucleotide for detection of SNP TSC0024031
rtatataacaaac

SEQ ID NO: 96859 - DNA, 13 bp, Artificial Sequence
  Oligonucleotide for detection of SNP TSC0024031
gtttgcgatatay

SEQ ID NO: 96860 - DNA, 13 bp, Artificial Sequence
  Oligonucleotide for detection of SNP TSC0024031
rtatatcgcaaac

SEQ ID NO: 96861 - DNA, 13 bp, Artificial Sequence
  Oligonucleotide for detection of SNP TSC0024032
ttgtagataaggt

SEQ ID NO: 96862 - DNA, 13 bp, Artificial Sequence
  Oligonucleotide for detection of SNP TSC0024032
accttatctacaa

SEQ ID NO: 96863 - DNA, 13 bp, Artificial Sequence
  Oligonucleotide for detection of SNP TSC0024032
ttgtaggtaaggt

SEQ ID NO: 96864 - DNA, 13 bp, Artificial Sequence
  Oligonucleotide for detection of SNP TSC0024032
accttacctacaa

SEQ ID NO: 96865 - DNA, 13 bp, Artificial Sequence
  Oligonucleotide for detection of SNP TSC0024032
tcgtagataaggt

SEQ ID NO: 96866 - DNA, 13 bp, Artificial Sequence
  Oligonucleotide for detection of SNP TSC0024032
accttatctacga

SEQ ID NO: 96867 - DNA, 13 bp, Artificial Sequence
  Oligonucleotide for detection of SNP TSC0024032
tcgtaggtaaggt

SEQ ID NO: 96868 - DNA, 13 bp, Artificial Sequence
  Oligonucleotide for detection of SNP TSC0024032
accttacctacga

SEQ ID NO: 96869 - DNA, 13 bp, Artificial Sequence
  Oligonucleotide for detection of SNP TSC0024034
aatgtaagatggt

SEQ ID NO: 96870 - DNA, 13 bp, Artificial Sequence
  Oligonucleotide for detection of SNP TSC0024034
accatcttacatt

SEQ ID NO: 96871 - DNA, 13 bp, Artificial Sequence
  Oligonucleotide for detection of SNP TSC0024034
aatgtaggatggt

SEQ ID NO: 96872 - DNA, 13 bp, Artificial Sequence
  Oligonucleotide for detection of SNP TSC0024034
accatcctacatt

SEQ ID NO: 96873 - DNA, 13 bp, Artificial Sequence
  Oligonucleotide for detection of SNP TSC0024036
tattaaatttatt

SEQ ID NO: 96874 - DNA, 13 bp, Artificial Sequence
  Oligonucleotide for detection of SNP TSC0024036
aataaatttaata

SEQ ID NO: 96875 - DNA, 13 bp, Artificial Sequence
  Oligonucleotide for detection of SNP TSC0024036
tattaattttatt

SEQ ID NO: 96876 - DNA, 13 bp, Artificial Sequence
  Oligonucleotide for detection of SNP TSC0024036
aataaaattaata

SEQ ID NO: 96877 - DNA, 13 bp, Artificial Sequence
  Oligonucleotide for detection of SNP TSC0024036
agtgagtttagta

SEQ ID NO: 96878 - DNA, 13 bp, Artificial Sequence
  Oligonucleotide for detection of SNP TSC0024036
tactaaactcact

SEQ ID NO: 96879 - DNA, 13 bp, Artificial Sequence
  Oligonucleotide for detection of SNP TSC0024036
agtgagattagta

SEQ ID NO: 96880 - DNA, 13 bp, Artificial Sequence
  Oligonucleotide for detection of SNP TSC0024036
tactaatctcact

SEQ ID NO: 96881 - DNA, 13 bp, Artificial Sequence
  Oligonucleotide for detection of SNP TSC0024041
tgtaggatatgag

SEQ ID NO: 96882 - DNA, 13 bp, Artificial Sequence
  Oligonucleotide for detection of SNP TSC0024041
ctcatatcctaca

SEQ ID NO: 96883 - DNA, 13 bp, Artificial Sequence
  Oligonucleotide for detection of SNP TSC0024041
tgtaggttatgag

SEQ ID NO: 96884 - DNA, 13 bp, Artificial Sequence
  Oligonucleotide for detection of SNP TSC0024041
ctcataacctaca

SEQ ID NO: 96885 - DNA, 13 bp, Artificial Sequence
  Oligonucleotide for detection of SNP TSC0024041
tttatattttgta

SEQ ID NO: 96886 - DNA, 13 bp, Artificial Sequence
  Oligonucleotide for detection of SNP TSC0024041
tacaaaatataaa

SEQ ID NO: 96887 - DNA, 13 bp, Artificial Sequence
  Oligonucleotide for detection of SNP TSC0024041
tttatagtttgta

SEQ ID NO: 96888 - DNA, 13 bp, Artificial Sequence
  Oligonucleotide for detection of SNP TSC0024041
tacaaactataaa

SEQ ID NO: 96889 - DNA, 13 bp, Artificial Sequence
  Oligonucleotide for detection of SNP TSC0024042
ggaagagaaggta

SEQ ID NO: 96890 - DNA, 13 bp, Artificial Sequence
  Oligonucleotide for detection of SNP TSC0024042
taccttctcttcc

SEQ ID NO: 96891 - DNA, 13 bp, Artificial Sequence
  Oligonucleotide for detection of SNP TSC0024042
ggaagataaggta

SEQ ID NO: 96892 - DNA, 13 bp, Artificial Sequence
  Oligonucleotide for detection of SNP TSC0024042
taccttatcttcc

SEQ ID NO: 96893 - DNA, 13 bp, Artificial Sequence
  Oligonucleotide for detection of SNP TSC0024046
tgttttgtaagta

SEQ ID NO: 96894 - DNA, 13 bp, Artificial Sequence
  Oligonucleotide for detection of SNP TSC0024046
tacttacaaaaca

SEQ ID NO: 96895 - DNA, 13 bp, Artificial Sequence
  Oligonucleotide for detection of SNP TSC0024046
tgttttataagta

SEQ ID NO: 96896 - DNA, 13 bp, Artificial Sequence
  Oligonucleotide for detection of SNP TSC0024046
tacttataaaaca

SEQ ID NO: 96897 - DNA, 13 bp, Artificial Sequence
  Oligonucleotide for detection of SNP TSC0024047
taaattagatttt

SEQ ID NO: 96898 - DNA, 13 bp, Artificial Sequence
  Oligonucleotide for detection of SNP TSC0024047
aaaatctaattta

SEQ ID NO: 96899 - DNA, 13 bp, Artificial Sequence
  Oligonucleotide for detection of SNP TSC0024047
taaattggatttt

SEQ ID NO: 96900 - DNA, 13 bp, Artificial Sequence
  Oligonucleotide for detection of SNP TSC0024047
aaaatccaattta

SEQ ID NO: 96901 - DNA, 13 bp, Artificial Sequence
  Oligonucleotide for detection of SNP TSC0024047
taaatcggatttt

SEQ ID NO: 96902 - DNA, 13 bp, Artificial Sequence
  Oligonucleotide for detection of SNP TSC0024047
aaaatccgattta

SEQ ID NO: 96903 - DNA, 13 bp, Artificial Sequence
  Oligonucleotide for detection of SNP TSC0024047
agagtttggtttg

SEQ ID NO: 96904 - DNA, 13 bp, Artificial Sequence
  Oligonucleotide for detection of SNP TSC0024047
caaaccaaactct

SEQ ID NO: 96905 - DNA, 13 bp, Artificial Sequence
  Oligonucleotide for detection of SNP TSC0024047
agagttcggtttg

SEQ ID NO: 96906 - DNA, 13 bp, Artificial Sequence
  Oligonucleotide for detection of SNP TSC0024047
caaaccgaactct

SEQ ID NO: 96907 - DNA, 13 bp, Artificial Sequence
  Oligonucleotide for detection of SNP TSC0024048
ttttgtatgtagg

SEQ ID NO: 96908 - DNA, 13 bp, Artificial Sequence
  Oligonucleotide for detection of SNP TSC0024048
cctacatacaaaa

SEQ ID NO: 96909 - DNA, 13 bp, Artificial Sequence
  Oligonucleotide for detection of SNP TSC0024048
ttttgtgtgtagg

SEQ ID NO: 96910 - DNA, 13 bp, Artificial Sequence
  Oligonucleotide for detection of SNP TSC0024048
cctacacacaaaa

SEQ ID NO: 96911 - DNA, 13 bp, Artificial Sequence
  Oligonucleotide for detection of SNP TSC0024048
tttcgtatgtagg

SEQ ID NO: 96912 - DNA, 13 bp, Artificial Sequence
  Oligonucleotide for detection of SNP TSC0024048
cctacatacgaaa

SEQ ID NO: 96913 - DNA, 13 bp, Artificial Sequence
  Oligonucleotide for detection of SNP TSC0024048
tttcgtgtgtagg

SEQ ID NO: 96914 - DNA, 13 bp, Artificial Sequence
  Oligonucleotide for detection of SNP TSC0024048
cctacacacgaaa

SEQ ID NO: 96915 - DNA, 13 bp, Artificial Sequence
  Oligonucleotide for detection of SNP TSC0024048
ttttgcgtgtagg

SEQ ID NO: 96916 - DNA, 13 bp, Artificial Sequence
  Oligonucleotide for detection of SNP TSC0024048
cctacacgcaaaa

SEQ ID NO: 96917 - DNA, 13 bp, Artificial Sequence
  Oligonucleotide for detection of SNP TSC0024048
tttcgcgtgtagg

SEQ ID NO: 96918 - DNA, 13 bp, Artificial Sequence
  Oligonucleotide for detection of SNP TSC0024048
cctacacgcgaaa

SEQ ID NO: 96919 - DNA, 13 bp, Artificial Sequence
  Oligonucleotide for detection of SNP TSC0024048
tttgtatgtggga

SEQ ID NO: 96920 - DNA, 13 bp, Artificial Sequence
  Oligonucleotide for detection of SNP TSC0024048
tcccacatacaaa

SEQ ID NO: 96921 - DNA, 13 bp, Artificial Sequence
  Oligonucleotide for detection of SNP TSC0024048
tttgtatgcggga

SEQ ID NO: 96922 - DNA, 13 bp, Artificial Sequence
  Oligonucleotide for detection of SNP TSC0024048
tcccgcatacaaa

SEQ ID NO: 96923 - DNA, 13 bp, Artificial Sequence
  Oligonucleotide for detection of SNP TSC0024048
tttgtacgtggga

SEQ ID NO: 96924 - DNA, 13 bp, Artificial Sequence
  Oligonucleotide for detection of SNP TSC0024048
tcccacgtacaaa

SEQ ID NO: 96925 - DNA, 13 bp, Artificial Sequence
  Oligonucleotide for detection of SNP TSC0024048
tttgtacgcggga

SEQ ID NO: 96926 - DNA, 13 bp, Artificial Sequence
  Oligonucleotide for detection of SNP TSC0024048
tcccgcgtacaaa

SEQ ID NO: 96927 - DNA, 13 bp, Artificial Sequence
  Oligonucleotide for detection of SNP TSC0024049
gaatttgatatgy

SEQ ID NO: 96928 - DNA, 13 bp, Artificial Sequence
  Oligonucleotide for detection of SNP TSC0024049
rcatatcaaattc

SEQ ID NO: 96929 - DNA, 13 bp, Artificial Sequence
  Oligonucleotide for detection of SNP TSC0024049
gaatttaatatgy

SEQ ID NO: 96930 - DNA, 13 bp, Artificial Sequence
  Oligonucleotide for detection of SNP TSC0024049
rcatattaaattc

SEQ ID NO: 96931 - DNA, 13 bp, Artificial Sequence
  Oligonucleotide for detection of SNP TSC0024049
gaatttgatacgy

SEQ ID NO: 96932 - DNA, 13 bp, Artificial Sequence
  Oligonucleotide for detection of SNP TSC0024049
rcgtatcaaattc

SEQ ID NO: 96933 - DNA, 13 bp, Artificial Sequence
  Oligonucleotide for detection of SNP TSC0024049
gaatttaatacgy

SEQ ID NO: 96934 - DNA, 13 bp, Artificial Sequence
  Oligonucleotide for detection of SNP TSC0024049
rcgtattaaattc

SEQ ID NO: 96935 - DNA, 13 bp, Artificial Sequence
  Oligonucleotide for detection of SNP TSC0024052
ttgtagtggatga

SEQ ID NO: 96936 - DNA, 13 bp, Artificial Sequence
  Oligonucleotide for detection of SNP TSC0024052
tcatccactacaa

SEQ ID NO: 96937 - DNA, 13 bp, Artificial Sequence
  Oligonucleotide for detection of SNP TSC0024052
ttgtaggggatga

SEQ ID NO: 96938 - DNA, 13 bp, Artificial Sequence
  Oligonucleotide for detection of SNP TSC0024052
tcatcccctacaa

SEQ ID NO: 96939 - DNA, 13 bp, Artificial Sequence
  Oligonucleotide for detection of SNP TSC0024052
ttgtagcggatga

SEQ ID NO: 96940 - DNA, 13 bp, Artificial Sequence
  Oligonucleotide for detection of SNP TSC0024052
tcatccgctacaa

SEQ ID NO: 96941 - DNA, 13 bp, Artificial Sequence
  Oligonucleotide for detection of SNP TSC0024052
ttatttgttgtaa

SEQ ID NO: 96942 - DNA, 13 bp, Artificial Sequence
  Oligonucleotide for detection of SNP TSC0024052
ttacaacaaataa

SEQ ID NO: 96943 - DNA, 13 bp, Artificial Sequence
  Oligonucleotide for detection of SNP TSC0024052
ttattttttgtaa

SEQ ID NO: 96944 - DNA, 13 bp, Artificial Sequence
  Oligonucleotide for detection of SNP TSC0024052
ttacaaaaaataa

SEQ ID NO: 96945 - DNA, 13 bp, Artificial Sequence
  Oligonucleotide for detection of SNP TSC0024052
ttattcgttgtaa

SEQ ID NO: 96946 - DNA, 13 bp, Artificial Sequence
  Oligonucleotide for detection of SNP TSC0024052
ttacaacgaataa

SEQ ID NO: 96947 - DNA, 13 bp, Artificial Sequence
  Oligonucleotide for detection of SNP TSC0024053
aatattattttty

SEQ ID NO: 96948 - DNA, 13 bp, Artificial Sequence
  Oligonucleotide for detection of SNP TSC0024053
raaaaataatatt

SEQ ID NO: 96949 - DNA, 13 bp, Artificial Sequence
  Oligonucleotide for detection of SNP TSC0024053
aatatttttttty

SEQ ID NO: 96950 - DNA, 13 bp, Artificial Sequence
  Oligonucleotide for detection of SNP TSC0024053
raaaaaaaatatt

SEQ ID NO: 96951 - DNA, 13 bp, Artificial Sequence
  Oligonucleotide for detection of SNP TSC0024053
ggaaagtggtgtt

SEQ ID NO: 96952 - DNA, 13 bp, Artificial Sequence
  Oligonucleotide for detection of SNP TSC0024053
aacaccactttcc

SEQ ID NO: 96953 - DNA, 13 bp, Artificial Sequence
  Oligonucleotide for detection of SNP TSC0024053
ggaaagaggtgtt

SEQ ID NO: 96954 - DNA, 13 bp, Artificial Sequence
  Oligonucleotide for detection of SNP TSC0024053
aacacctctttcc

SEQ ID NO: 96955 - DNA, 13 bp, Artificial Sequence
  Oligonucleotide for detection of SNP TSC0024054
ttttgtggtttta

SEQ ID NO: 96956 - DNA, 13 bp, Artificial Sequence
  Oligonucleotide for detection of SNP TSC0024054
taaaaccacaaaa

SEQ ID NO: 96957 - DNA, 13 bp, Artificial Sequence
  Oligonucleotide for detection of SNP TSC0024054
tttcgtggtttta

SEQ ID NO: 96958 - DNA, 13 bp, Artificial Sequence
  Oligonucleotide for detection of SNP TSC0024054
taaaaccacgaaa

SEQ ID NO: 96959 - DNA, 13 bp, Artificial Sequence
  Oligonucleotide for detection of SNP TSC0024054
ttttgcggtttta

SEQ ID NO: 96960 - DNA, 13 bp, Artificial Sequence
  Oligonucleotide for detection of SNP TSC0024054
taaaaccgcaaaa

SEQ ID NO: 96961 - DNA, 13 bp, Artificial Sequence
  Oligonucleotide for detection of SNP TSC0024054
tttcgcggtttta

SEQ ID NO: 96962 - DNA, 13 bp, Artificial Sequence
  Oligonucleotide for detection of SNP TSC0024054
taaaaccgcgaaa

SEQ ID NO: 96963 - DNA, 13 bp, Artificial Sequence
  Oligonucleotide for detection of SNP TSC0024054
tgaagttgtggaa

SEQ ID NO: 96964 - DNA, 13 bp, Artificial Sequence
  Oligonucleotide for detection of SNP TSC0024054
ttccacaacttca

SEQ ID NO: 96965 - DNA, 13 bp, Artificial Sequence
  Oligonucleotide for detection of SNP TSC0024054
tgaagttgcggaa

SEQ ID NO: 96966 - DNA, 13 bp, Artificial Sequence
  Oligonucleotide for detection of SNP TSC0024054
ttccgcaacttca

SEQ ID NO: 96967 - DNA, 13 bp, Artificial Sequence
  Oligonucleotide for detection of SNP TSC0024054
tgaagtcgtggaa

SEQ ID NO: 96968 - DNA, 13 bp, Artificial Sequence
  Oligonucleotide for detection of SNP TSC0024054
ttccacgacttca

SEQ ID NO: 96969 - DNA, 13 bp, Artificial Sequence
  Oligonucleotide for detection of SNP TSC0024054
tgaagtcgcggaa

SEQ ID NO: 96970 - DNA, 13 bp, Artificial Sequence
  Oligonucleotide for detection of SNP TSC0024054
ttccgcgacttca

SEQ ID NO: 96971 - DNA, 13 bp, Artificial Sequence
  Oligonucleotide for detection of SNP TSC0024055
taatttggaggag

SEQ ID NO: 96972 - DNA, 13 bp, Artificial Sequence
  Oligonucleotide for detection of SNP TSC0024055
ctcctccaaatta

SEQ ID NO: 96973 - DNA, 13 bp, Artificial Sequence
  Oligonucleotide for detection of SNP TSC0024055
taattttgaggag

SEQ ID NO: 96974 - DNA, 13 bp, Artificial Sequence
  Oligonucleotide for detection of SNP TSC0024055
ctcctcaaaatta

SEQ ID NO: 96975 - DNA, 13 bp, Artificial Sequence
  Oligonucleotide for detection of SNP TSC0024057
atgttaagtgaty

SEQ ID NO: 96976 - DNA, 13 bp, Artificial Sequence
  Oligonucleotide for detection of SNP TSC0024057
ratcacttaacat

SEQ ID NO: 96977 - DNA, 13 bp, Artificial Sequence
  Oligonucleotide for detection of SNP TSC0024057
atgttaggtgaty

SEQ ID NO: 96978 - DNA, 13 bp, Artificial Sequence
  Oligonucleotide for detection of SNP TSC0024057
ratcacctaacat

SEQ ID NO: 96979 - DNA, 13 bp, Artificial Sequence
  Oligonucleotide for detection of SNP TSC0024057
atgttaagcgaty

SEQ ID NO: 96980 - DNA, 13 bp, Artificial Sequence
  Oligonucleotide for detection of SNP TSC0024057
ratcgcttaacat

SEQ ID NO: 96981 - DNA, 13 bp, Artificial Sequence
  Oligonucleotide for detection of SNP TSC0024057
atgttaggcgaty

SEQ ID NO: 96982 - DNA, 13 bp, Artificial Sequence
  Oligonucleotide for detection of SNP TSC0024057
ratcgcctaacat

SEQ ID NO: 96983 - DNA, 13 bp, Artificial Sequence
  Oligonucleotide for detection of SNP TSC0024059
gtgtgaggataty

SEQ ID NO: 96984 - DNA, 13 bp, Artificial Sequence
  Oligonucleotide for detection of SNP TSC0024059
ratatcctcacac

SEQ ID NO: 96985 - DNA, 13 bp, Artificial Sequence
  Oligonucleotide for detection of SNP TSC0024059
gtgtgaagataty

SEQ ID NO: 96986 - DNA, 13 bp, Artificial Sequence
  Oligonucleotide for detection of SNP TSC0024059
ratatcttcacac

SEQ ID NO: 96987 - DNA, 13 bp, Artificial Sequence
  Oligonucleotide for detection of SNP TSC0024061
tttgttattttcg

SEQ ID NO: 96988 - DNA, 13 bp, Artificial Sequence
  Oligonucleotide for detection of SNP TSC0024061
cgaaaataacaaa

SEQ ID NO: 96989 - DNA, 13 bp, Artificial Sequence
  Oligonucleotide for detection of SNP TSC0024061
tttgttgttttcg

SEQ ID NO: 96990 - DNA, 13 bp, Artificial Sequence
  Oligonucleotide for detection of SNP TSC0024061
cgaaaacaacaaa

SEQ ID NO: 96991 - DNA, 13 bp, Artificial Sequence
  Oligonucleotide for detection of SNP TSC0024062
ttttataagggga

SEQ ID NO: 96992 - DNA, 13 bp, Artificial Sequence
  Oligonucleotide for detection of SNP TSC0024062
tccccttataaaa

SEQ ID NO: 96993 - DNA, 13 bp, Artificial Sequence
  Oligonucleotide for detection of SNP TSC0024062
ttttatgagggga

SEQ ID NO: 96994 - DNA, 13 bp, Artificial Sequence
  Oligonucleotide for detection of SNP TSC0024062
tcccctcataaaa

SEQ ID NO: 96995 - DNA, 13 bp, Artificial Sequence
  Oligonucleotide for detection of SNP TSC0024062
ttttacgagggga

SEQ ID NO: 96996 - DNA, 13 bp, Artificial Sequence
  Oligonucleotide for detection of SNP TSC0024062
tcccctcgtaaaa

SEQ ID NO: 96997 - DNA, 13 bp, Artificial Sequence
  Oligonucleotide for detection of SNP TSC0024062
tttttttgtgaag

SEQ ID NO: 96998 - DNA, 13 bp, Artificial Sequence
  Oligonucleotide for detection of SNP TSC0024062
cttcacaaaaaaa

SEQ ID NO: 96999 - DNA, 13 bp, Artificial Sequence
  Oligonucleotide for detection of SNP TSC0024062
ttttttcgtgaag

SEQ ID NO: 97000 - DNA, 13 bp, Artificial Sequence
  Oligonucleotide for detection of SNP TSC0024062
cttcacgaaaaaa

SEQ ID NO: 97001 - DNA, 13 bp, Artificial Sequence
  Oligonucleotide for detection of SNP TSC0024064
tattttaattaag

SEQ ID NO: 97002 - DNA, 13 bp, Artificial Sequence
  Oligonucleotide for detection of SNP TSC0024064
cttaattaaaata

SEQ ID NO: 97003 - DNA, 13 bp, Artificial Sequence
  Oligonucleotide for detection of SNP TSC0024064
tattttgattaag

SEQ ID NO: 97004 - DNA, 13 bp, Artificial Sequence
  Oligonucleotide for detection of SNP TSC0024064
cttaatcaaaata

SEQ ID NO: 97005 - DNA, 13 bp, Artificial Sequence
  Oligonucleotide for detection of SNP TSC0024064
tatttcgattaag

SEQ ID NO: 97006 - DNA, 13 bp, Artificial Sequence
  Oligonucleotide for detection of SNP TSC0024064
cttaatcgaaata

SEQ ID NO: 97007 - DNA, 13 bp, Artificial Sequence
  Oligonucleotide for detection of SNP TSC0024064
tttggttgagata

SEQ ID NO: 97008 - DNA, 13 bp, Artificial Sequence
  Oligonucleotide for detection of SNP TSC0024064
tatctcaaccaaa

SEQ ID NO: 97009 - DNA, 13 bp, Artificial Sequence
  Oligonucleotide for detection of SNP TSC0024064
tttggtcgagata

SEQ ID NO: 97010 - DNA, 13 bp, Artificial Sequence
  Oligonucleotide for detection of SNP TSC0024064
tatctcgaccaaa

SEQ ID NO: 97011 - DNA, 13 bp, Artificial Sequence
  Oligonucleotide for detection of SNP TSC0024065
tgattttgggtta

SEQ ID NO: 97012 - DNA, 13 bp, Artificial Sequence
  Oligonucleotide for detection of SNP TSC0024065
taacccaaaatca

SEQ ID NO: 97013 - DNA, 13 bp, Artificial Sequence
  Oligonucleotide for detection of SNP TSC0024065
tgatttcgggtta

SEQ ID NO: 97014 - DNA, 13 bp, Artificial Sequence
  Oligonucleotide for detection of SNP TSC0024065
taacccgaaatca

SEQ ID NO: 97015 - DNA, 13 bp, Artificial Sequence
  Oligonucleotide for detection of SNP TSC0024065
tgatttggaatta

SEQ ID NO: 97016 - DNA, 13 bp, Artificial Sequence
  Oligonucleotide for detection of SNP TSC0024065
taattccaaatca

SEQ ID NO: 97017 - DNA, 13 bp, Artificial Sequence
  Oligonucleotide for detection of SNP TSC0024065
tgatttagaatta

SEQ ID NO: 97018 - DNA, 13 bp, Artificial Sequence
  Oligonucleotide for detection of SNP TSC0024065
taattctaaatca

SEQ ID NO: 97019 - DNA, 13 bp, Artificial Sequence
  Oligonucleotide for detection of SNP TSC0024065
tgattcggaatta

SEQ ID NO: 97020 - DNA, 13 bp, Artificial Sequence
  Oligonucleotide for detection of SNP TSC0024065
taattccgaatca

SEQ ID NO: 97021 - DNA, 13 bp, Artificial Sequence
  Oligonucleotide for detection of SNP TSC0024066
tgaagttgaggtt

SEQ ID NO: 97022 - DNA, 13 bp, Artificial Sequence
  Oligonucleotide for detection of SNP TSC0024066
aacctcaacttca

SEQ ID NO: 97023 - DNA, 13 bp, Artificial Sequence
  Oligonucleotide for detection of SNP TSC0024066
tgaagtcgaggtt

SEQ ID NO: 97024 - DNA, 13 bp, Artificial Sequence
  Oligonucleotide for detection of SNP TSC0024066
aacctcgacttca

SEQ ID NO: 97025 - DNA, 13 bp, Artificial Sequence
  Oligonucleotide for detection of SNP TSC0024066
agttttggtttta

SEQ ID NO: 97026 - DNA, 13 bp, Artificial Sequence
  Oligonucleotide for detection of SNP TSC0024066
taaaaccaaaact

SEQ ID NO: 97027 - DNA, 13 bp, Artificial Sequence
  Oligonucleotide for detection of SNP TSC0024066
agttttagtttta

SEQ ID NO: 97028 - DNA, 13 bp, Artificial Sequence
  Oligonucleotide for detection of SNP TSC0024066
taaaactaaaact

SEQ ID NO: 97029 - DNA, 13 bp, Artificial Sequence
  Oligonucleotide for detection of SNP TSC0024066
agtttcggtttta

SEQ ID NO: 97030 - DNA, 13 bp, Artificial Sequence
  Oligonucleotide for detection of SNP TSC0024066
taaaaccgaaact

SEQ ID NO: 97031 - DNA, 13 bp, Artificial Sequence
  Oligonucleotide for detection of SNP TSC0024067
tatatgggtatty

SEQ ID NO: 97032 - DNA, 13 bp, Artificial Sequence
  Oligonucleotide for detection of SNP TSC0024067
raatacccatata

SEQ ID NO: 97033 - DNA, 13 bp, Artificial Sequence
  Oligonucleotide for detection of SNP TSC0024067
tatatgagtatty

SEQ ID NO: 97034 - DNA, 13 bp, Artificial Sequence
  Oligonucleotide for detection of SNP TSC0024067
raatactcatata

SEQ ID NO: 97035 - DNA, 13 bp, Artificial Sequence
  Oligonucleotide for detection of SNP TSC0024070
ataaatatatata

SEQ ID NO: 97036 - DNA, 13 bp, Artificial Sequence
  Oligonucleotide for detection of SNP TSC0024070
tatatatatttat

SEQ ID NO: 97037 - DNA, 13 bp, Artificial Sequence
  Oligonucleotide for detection of SNP TSC0024070
ataaatgtatata

SEQ ID NO: 97038 - DNA, 13 bp, Artificial Sequence
  Oligonucleotide for detection of SNP TSC0024070
tatatacatttat

SEQ ID NO: 97039 - DNA, 13 bp, Artificial Sequence
  Oligonucleotide for detection of SNP TSC0024071
tgaaaagtagtaa

SEQ ID NO: 97040 - DNA, 13 bp, Artificial Sequence
  Oligonucleotide for detection of SNP TSC0024071
ttactacttttca

SEQ ID NO: 97041 - DNA, 13 bp, Artificial Sequence
  Oligonucleotide for detection of SNP TSC0024071
tgaaaaatagtaa

SEQ ID NO: 97042 - DNA, 13 bp, Artificial Sequence
  Oligonucleotide for detection of SNP TSC0024071
ttactatttttca

SEQ ID NO: 97043 - DNA, 13 bp, Artificial Sequence
  Oligonucleotide for detection of SNP TSC0024076
tgtggaagttttt

SEQ ID NO: 97044 - DNA, 13 bp, Artificial Sequence
  Oligonucleotide for detection of SNP TSC0024076
aaaaacttccaca

SEQ ID NO: 97045 - DNA, 13 bp, Artificial Sequence
  Oligonucleotide for detection of SNP TSC0024076
tgtggaggttttt

SEQ ID NO: 97046 - DNA, 13 bp, Artificial Sequence
  Oligonucleotide for detection of SNP TSC0024076
aaaaacctccaca

SEQ ID NO: 97047 - DNA, 13 bp, Artificial Sequence
  Oligonucleotide for detection of SNP TSC0024077
gttttaaatgata

SEQ ID NO: 97048 - DNA, 13 bp, Artificial Sequence
  Oligonucleotide for detection of SNP TSC0024077
tatcatttaaaac

SEQ ID NO: 97049 - DNA, 13 bp, Artificial Sequence
  Oligonucleotide for detection of SNP TSC0024077
gttttagatgata

SEQ ID NO: 97050 - DNA, 13 bp, Artificial Sequence
  Oligonucleotide for detection of SNP TSC0024077
tatcatctaaaac

SEQ ID NO: 97051 - DNA, 13 bp, Artificial Sequence
  Oligonucleotide for detection of SNP TSC0024078
tattaaatattga

SEQ ID NO: 97052 - DNA, 13 bp, Artificial Sequence
  Oligonucleotide for detection of SNP TSC0024078
tcaatatttaata

SEQ ID NO: 97053 - DNA, 13 bp, Artificial Sequence
  Oligonucleotide for detection of SNP TSC0024078
tattaagtattga

SEQ ID NO: 97054 - DNA, 13 bp, Artificial Sequence
  Oligonucleotide for detection of SNP TSC0024078
tcaatacttaata

SEQ ID NO: 97055 - DNA, 13 bp, Artificial Sequence
  Oligonucleotide for detection of SNP TSC0024079
agaaaaatatatt

SEQ ID NO: 97056 - DNA, 13 bp, Artificial Sequence
  Oligonucleotide for detection of SNP TSC0024079
aatatatttttct

SEQ ID NO: 97057 - DNA, 13 bp, Artificial Sequence
  Oligonucleotide for detection of SNP TSC0024079
agaaaagtatatt

SEQ ID NO: 97058 - DNA, 13 bp, Artificial Sequence
  Oligonucleotide for detection of SNP TSC0024079
aatatacttttct

SEQ ID NO: 97059 - DNA, 13 bp, Artificial Sequence
  Oligonucleotide for detection of SNP TSC0024080
ttttattgatatt

SEQ ID NO: 97060 - DNA, 13 bp, Artificial Sequence
  Oligonucleotide for detection of SNP TSC0024080
aatatcaataaaa

SEQ ID NO: 97061 - DNA, 13 bp, Artificial Sequence
  Oligonucleotide for detection of SNP TSC0024080
ttttatcgatatt

SEQ ID NO: 97062 - DNA, 13 bp, Artificial Sequence
  Oligonucleotide for detection of SNP TSC0024080
aatatcgataaaa

SEQ ID NO: 97063 - DNA, 13 bp, Artificial Sequence
  Oligonucleotide for detection of SNP TSC0024080
agtattgatgaaa

SEQ ID NO: 97064 - DNA, 13 bp, Artificial Sequence
  Oligonucleotide for detection of SNP TSC0024080
tttcatcaatact

SEQ ID NO: 97065 - DNA, 13 bp, Artificial Sequence
  Oligonucleotide for detection of SNP TSC0024080
agtattaatgaaa

SEQ ID NO: 97066 - DNA, 13 bp, Artificial Sequence
  Oligonucleotide for detection of SNP TSC0024080
tttcattaatact

SEQ ID NO: 97067 - DNA, 13 bp, Artificial Sequence
  Oligonucleotide for detection of SNP TSC0024080
agtatcgatgaaa

SEQ ID NO: 97068 - DNA, 13 bp, Artificial Sequence
  Oligonucleotide for detection of SNP TSC0024080
tttcatcgatact

SEQ ID NO: 97069 - DNA, 13 bp, Artificial Sequence
  Oligonucleotide for detection of SNP TSC0024083
ttattgtatttty

SEQ ID NO: 97070 - DNA, 13 bp, Artificial Sequence
  Oligonucleotide for detection of SNP TSC0024083
raaaatacaataa

SEQ ID NO: 97071 - DNA, 13 bp, Artificial Sequence
  Oligonucleotide for detection of SNP TSC0024083
ttattggatttty

SEQ ID NO: 97072 - DNA, 13 bp, Artificial Sequence
  Oligonucleotide for detection of SNP TSC0024083
raaaatccaataa

SEQ ID NO: 97073 - DNA, 13 bp, Artificial Sequence
  Oligonucleotide for detection of SNP TSC0024083
gagggtgtagtgg

SEQ ID NO: 97074 - DNA, 13 bp, Artificial Sequence
  Oligonucleotide for detection of SNP TSC0024083
ccactacaccctc

SEQ ID NO: 97075 - DNA, 13 bp, Artificial Sequence
  Oligonucleotide for detection of SNP TSC0024083
gagggtttagtgg

SEQ ID NO: 97076 - DNA, 13 bp, Artificial Sequence
  Oligonucleotide for detection of SNP TSC0024083
ccactaaaccctc

SEQ ID NO: 97077 - DNA, 13 bp, Artificial Sequence
  Oligonucleotide for detection of SNP TSC0024085
tggggaaatttta

SEQ ID NO: 97078 - DNA, 13 bp, Artificial Sequence
  Oligonucleotide for detection of SNP TSC0024085
taaaatttcccca

SEQ ID NO: 97079 - DNA, 13 bp, Artificial Sequence
  Oligonucleotide for detection of SNP TSC0024085
tggggagatttta

SEQ ID NO: 97080 - DNA, 13 bp, Artificial Sequence
  Oligonucleotide for detection of SNP TSC0024085
taaaatctcccca

SEQ ID NO: 97081 - DNA, 13 bp, Artificial Sequence
  Oligonucleotide for detection of SNP TSC0024085
cggggaaatttta

SEQ ID NO: 97082 - DNA, 13 bp, Artificial Sequence
  Oligonucleotide for detection of SNP TSC0024085
taaaatttccccg

SEQ ID NO: 97083 - DNA, 13 bp, Artificial Sequence
  Oligonucleotide for detection of SNP TSC0024085
cggggagatttta

SEQ ID NO: 97084 - DNA, 13 bp, Artificial Sequence
  Oligonucleotide for detection of SNP TSC0024085
taaaatctccccg

SEQ ID NO: 97085 - DNA, 13 bp, Artificial Sequence
  Oligonucleotide for detection of SNP TSC0024086
ttaaagcgttggg

SEQ ID NO: 97086 - DNA, 13 bp, Artificial Sequence
  Oligonucleotide for detection of SNP TSC0024086
cccaacgctttaa

SEQ ID NO: 97087 - DNA, 13 bp, Artificial Sequence
  Oligonucleotide for detection of SNP TSC0024092
ttgtgaattttta

SEQ ID NO: 97088 - DNA, 13 bp, Artificial Sequence
  Oligonucleotide for detection of SNP TSC0024092
taaaaattcacaa

SEQ ID NO: 97089 - DNA, 13 bp, Artificial Sequence
  Oligonucleotide for detection of SNP TSC0024092
ttgtgatttttta

SEQ ID NO: 97090 - DNA, 13 bp, Artificial Sequence
  Oligonucleotide for detection of SNP TSC0024092
taaaaaatcacaa

SEQ ID NO: 97091 - DNA, 13 bp, Artificial Sequence
  Oligonucleotide for detection of SNP TSC0024092
tgggggtttatag

SEQ ID NO: 97092 - DNA, 13 bp, Artificial Sequence
  Oligonucleotide for detection of SNP TSC0024092
ctataaaccccca

SEQ ID NO: 97093 - DNA, 13 bp, Artificial Sequence
  Oligonucleotide for detection of SNP TSC0024092
tggggggttatag

SEQ ID NO: 97094 - DNA, 13 bp, Artificial Sequence
  Oligonucleotide for detection of SNP TSC0024092
ctataacccccca

SEQ ID NO: 97095 - DNA, 13 bp, Artificial Sequence
  Oligonucleotide for detection of SNP TSC0024093
ttttgttgtttgg

SEQ ID NO: 97096 - DNA, 13 bp, Artificial Sequence
  Oligonucleotide for detection of SNP TSC0024093
ccaaacaacaaaa

SEQ ID NO: 97097 - DNA, 13 bp, Artificial Sequence
  Oligonucleotide for detection of SNP TSC0024093
tttcgttgtttgg

SEQ ID NO: 97098 - DNA, 13 bp, Artificial Sequence
  Oligonucleotide for detection of SNP TSC0024093
ccaaacaacgaaa

SEQ ID NO: 97099 - DNA, 13 bp, Artificial Sequence
  Oligonucleotide for detection of SNP TSC0024093
ttttgtcgtttgg

SEQ ID NO: 97100 - DNA, 13 bp, Artificial Sequence
  Oligonucleotide for detection of SNP TSC0024093
ccaaacgacaaaa

SEQ ID NO: 97101 - DNA, 13 bp, Artificial Sequence
  Oligonucleotide for detection of SNP TSC0024093
ttttgttgttcgg

SEQ ID NO: 97102 - DNA, 13 bp, Artificial Sequence
  Oligonucleotide for detection of SNP TSC0024093
ccgaacaacaaaa

SEQ ID NO: 97103 - DNA, 13 bp, Artificial Sequence
  Oligonucleotide for detection of SNP TSC0024093
tttcgttgttcgg

SEQ ID NO: 97104 - DNA, 13 bp, Artificial Sequence
  Oligonucleotide for detection of SNP TSC0024093
ccgaacaacgaaa

SEQ ID NO: 97105 - DNA, 13 bp, Artificial Sequence
  Oligonucleotide for detection of SNP TSC0024093
tttcgtcgtttgg

SEQ ID NO: 97106 - DNA, 13 bp, Artificial Sequence
  Oligonucleotide for detection of SNP TSC0024093
ccaaacgacgaaa

SEQ ID NO: 97107 - DNA, 13 bp, Artificial Sequence
  Oligonucleotide for detection of SNP TSC0024093
ttttgtcgttcgg

SEQ ID NO: 97108 - DNA, 13 bp, Artificial Sequence
  Oligonucleotide for detection of SNP TSC0024093
ccgaacgacaaaa

SEQ ID NO: 97109 - DNA, 13 bp, Artificial Sequence
  Oligonucleotide for detection of SNP TSC0024093
tttcgtcgttcgg

SEQ ID NO: 97110 - DNA, 13 bp, Artificial Sequence
  Oligonucleotide for detection of SNP TSC0024093
ccgaacgacgaaa

SEQ ID NO: 97111 - DNA, 13 bp, Artificial Sequence
  Oligonucleotide for detection of SNP TSC0024093
ttgggtggtggag

SEQ ID NO: 97112 - DNA, 13 bp, Artificial Sequence
  Oligonucleotide for detection of SNP TSC0024093
ctccaccacccaa

SEQ ID NO: 97113 - DNA, 13 bp, Artificial Sequence
  Oligonucleotide for detection of SNP TSC0024093
ttgggtagtggag

SEQ ID NO: 97114 - DNA, 13 bp, Artificial Sequence
  Oligonucleotide for detection of SNP TSC0024093
ctccactacccaa

SEQ ID NO: 97115 - DNA, 13 bp, Artificial Sequence
  Oligonucleotide for detection of SNP TSC0024093
tcgggtggtggag

SEQ ID NO: 97116 - DNA, 13 bp, Artificial Sequence
  Oligonucleotide for detection of SNP TSC0024093
ctccaccacccga

SEQ ID NO: 97117 - DNA, 13 bp, Artificial Sequence
  Oligonucleotide for detection of SNP TSC0024093
tcgggtagtggag

SEQ ID NO: 97118 - DNA, 13 bp, Artificial Sequence
  Oligonucleotide for detection of SNP TSC0024093
ctccactacccga

SEQ ID NO: 97119 - DNA, 13 bp, Artificial Sequence
  Oligonucleotide for detection of SNP TSC0024093
ttgggcggtggag

SEQ ID NO: 97120 - DNA, 13 bp, Artificial Sequence
  Oligonucleotide for detection of SNP TSC0024093
ctccaccgcccaa

SEQ ID NO: 97121 - DNA, 13 bp, Artificial Sequence
  Oligonucleotide for detection of SNP TSC0024093
ttgggtagcggag

SEQ ID NO: 97122 - DNA, 13 bp, Artificial Sequence
  Oligonucleotide for detection of SNP TSC0024093
ctccgctacccaa

SEQ ID NO: 97123 - DNA, 13 bp, Artificial Sequence
  Oligonucleotide for detection of SNP TSC0024093
ttgggtggcggag

SEQ ID NO: 97124 - DNA, 13 bp, Artificial Sequence
  Oligonucleotide for detection of SNP TSC0024093
ctccgccacccaa

SEQ ID NO: 97125 - DNA, 13 bp, Artificial Sequence
  Oligonucleotide for detection of SNP TSC0024093
tcgggtagcggag

SEQ ID NO: 97126 - DNA, 13 bp, Artificial Sequence
  Oligonucleotide for detection of SNP TSC0024093
ctccgctacccga

SEQ ID NO: 97127 - DNA, 13 bp, Artificial Sequence
  Oligonucleotide for detection of SNP TSC0024093
tcgggcggtggag

SEQ ID NO: 97128 - DNA, 13 bp, Artificial Sequence
  Oligonucleotide for detection of SNP TSC0024093
ctccaccgcccga

SEQ ID NO: 97129 - DNA, 13 bp, Artificial Sequence
  Oligonucleotide for detection of SNP TSC0024093
tcgggtggcggag

SEQ ID NO: 97130 - DNA, 13 bp, Artificial Sequence
  Oligonucleotide for detection of SNP TSC0024093
ctccgccacccga

SEQ ID NO: 97131 - DNA, 13 bp, Artificial Sequence
  Oligonucleotide for detection of SNP TSC0024093
ttgggcggcggag

SEQ ID NO: 97132 - DNA, 13 bp, Artificial Sequence
  Oligonucleotide for detection of SNP TSC0024093
ctccgccgcccaa

SEQ ID NO: 97133 - DNA, 13 bp, Artificial Sequence
  Oligonucleotide for detection of SNP TSC0024093
tcgggcggcggag

SEQ ID NO: 97134 - DNA, 13 bp, Artificial Sequence
  Oligonucleotide for detection of SNP TSC0024093
ctccgccgcccga

SEQ ID NO: 97135 - DNA, 13 bp, Artificial Sequence
  Oligonucleotide for detection of SNP TSC0024099
gttgattgatttg

SEQ ID NO: 97136 - DNA, 13 bp, Artificial Sequence
  Oligonucleotide for detection of SNP TSC0024099
caaatcaatcaac

SEQ ID NO: 97137 - DNA, 13 bp, Artificial Sequence
  Oligonucleotide for detection of SNP TSC0024099
gtcgattgatttg

SEQ ID NO: 97138 - DNA, 13 bp, Artificial Sequence
  Oligonucleotide for detection of SNP TSC0024099
caaatcaatcgac

SEQ ID NO: 97139 - DNA, 13 bp, Artificial Sequence
  Oligonucleotide for detection of SNP TSC0024099
gttgatcgatttg

SEQ ID NO: 97140 - DNA, 13 bp, Artificial Sequence
  Oligonucleotide for detection of SNP TSC0024099
caaatcgatcaac

SEQ ID NO: 97141 - DNA, 13 bp, Artificial Sequence
  Oligonucleotide for detection of SNP TSC0024099
gtcgatcgatttg

SEQ ID NO: 97142 - DNA, 13 bp, Artificial Sequence
  Oligonucleotide for detection of SNP TSC0024099
caaatcgatcgac

SEQ ID NO: 97143 - DNA, 13 bp, Artificial Sequence
  Oligonucleotide for detection of SNP TSC0024099
tagattgattggy

SEQ ID NO: 97144 - DNA, 13 bp, Artificial Sequence
  Oligonucleotide for detection of SNP TSC0024099
rccaatcaatcta

SEQ ID NO: 97145 - DNA, 13 bp, Artificial Sequence
  Oligonucleotide for detection of SNP TSC0024099
tagattaattggy

SEQ ID NO: 97146 - DNA, 13 bp, Artificial Sequence
  Oligonucleotide for detection of SNP TSC0024099
rccaattaatcta

SEQ ID NO: 97147 - DNA, 13 bp, Artificial Sequence
  Oligonucleotide for detection of SNP TSC0024099
tagatcgattggy

SEQ ID NO: 97148 - DNA, 13 bp, Artificial Sequence
  Oligonucleotide for detection of SNP TSC0024099
rccaatcgatcta

SEQ ID NO: 97149 - DNA, 13 bp, Artificial Sequence
  Oligonucleotide for detection of SNP TSC0024099
tagattaatcggy

SEQ ID NO: 97150 - DNA, 13 bp, Artificial Sequence
  Oligonucleotide for detection of SNP TSC0024099
rccgattaatcta

SEQ ID NO: 97151 - DNA, 13 bp, Artificial Sequence
  Oligonucleotide for detection of SNP TSC0024099
tagattgatcggy

SEQ ID NO: 97152 - DNA, 13 bp, Artificial Sequence
  Oligonucleotide for detection of SNP TSC0024099
rccgatcaatcta

SEQ ID NO: 97153 - DNA, 13 bp, Artificial Sequence
  Oligonucleotide for detection of SNP TSC0024099
tagatcgatcggy

SEQ ID NO: 97154 - DNA, 13 bp, Artificial Sequence
  Oligonucleotide for detection of SNP TSC0024099
rccgatcgatcta

SEQ ID NO: 97155 - DNA, 13 bp, Artificial Sequence
  Oligonucleotide for detection of SNP TSC0024101
ttaattattgtay

SEQ ID NO: 97156 - DNA, 13 bp, Artificial Sequence
  Oligonucleotide for detection of SNP TSC0024101
rtacaataattaa

SEQ ID NO: 97157 - DNA, 13 bp, Artificial Sequence
  Oligonucleotide for detection of SNP TSC0024101
ttaattgttgtay

SEQ ID NO: 97158 - DNA, 13 bp, Artificial Sequence
  Oligonucleotide for detection of SNP TSC0024101
rtacaacaattaa

SEQ ID NO: 97159 - DNA, 13 bp, Artificial Sequence
  Oligonucleotide for detection of SNP TSC0024102
aagatggaggata

SEQ ID NO: 97160 - DNA, 13 bp, Artificial Sequence
  Oligonucleotide for detection of SNP TSC0024102
tatcctccatctt

SEQ ID NO: 97161 - DNA, 13 bp, Artificial Sequence
  Oligonucleotide for detection of SNP TSC0024102
aagatgtaggata

SEQ ID NO: 97162 - DNA, 13 bp, Artificial Sequence
  Oligonucleotide for detection of SNP TSC0024102
tatcctacatctt

SEQ ID NO: 97163 - DNA, 13 bp, Artificial Sequence
  Oligonucleotide for detection of SNP TSC0024103
gaggatgtttttt

SEQ ID NO: 97164 - DNA, 13 bp, Artificial Sequence
  Oligonucleotide for detection of SNP TSC0024103
aaaaaacatcctc

SEQ ID NO: 97165 - DNA, 13 bp, Artificial Sequence
  Oligonucleotide for detection of SNP TSC0024103
gaggacgtttttt

SEQ ID NO: 97166 - DNA, 13 bp, Artificial Sequence
  Oligonucleotide for detection of SNP TSC0024103
aaaaaacgtcctc

SEQ ID NO: 97167 - DNA, 13 bp, Artificial Sequence
  Oligonucleotide for detection of SNP TSC0024103
aaggaatgtttty

SEQ ID NO: 97168 - DNA, 13 bp, Artificial Sequence
  Oligonucleotide for detection of SNP TSC0024103
raaaacattcctt

SEQ ID NO: 97169 - DNA, 13 bp, Artificial Sequence
  Oligonucleotide for detection of SNP TSC0024103
aaggaacgtttty

SEQ ID NO: 97170 - DNA, 13 bp, Artificial Sequence
  Oligonucleotide for detection of SNP TSC0024103
raaaacgttcctt

SEQ ID NO: 97171 - DNA, 13 bp, Artificial Sequence
  Oligonucleotide for detection of SNP TSC0024106
ttatgtgaggtgt

SEQ ID NO: 97172 - DNA, 13 bp, Artificial Sequence
  Oligonucleotide for detection of SNP TSC0024106
acacctcacataa

SEQ ID NO: 97173 - DNA, 13 bp, Artificial Sequence
  Oligonucleotide for detection of SNP TSC0024106
ttatgttaggtgt

SEQ ID NO: 97174 - DNA, 13 bp, Artificial Sequence
  Oligonucleotide for detection of SNP TSC0024106
acacctaacataa

SEQ ID NO: 97175 - DNA, 13 bp, Artificial Sequence
  Oligonucleotide for detection of SNP TSC0024106
ttatgcgaggtgt

SEQ ID NO: 97176 - DNA, 13 bp, Artificial Sequence
  Oligonucleotide for detection of SNP TSC0024106
acacctcgcataa

SEQ ID NO: 97177 - DNA, 13 bp, Artificial Sequence
  Oligonucleotide for detection of SNP TSC0024106
atattttgtatgg

SEQ ID NO: 97178 - DNA, 13 bp, Artificial Sequence
  Oligonucleotide for detection of SNP TSC0024106
ccatacaaaatat

SEQ ID NO: 97179 - DNA, 13 bp, Artificial Sequence
  Oligonucleotide for detection of SNP TSC0024106
atatttagtatgg

SEQ ID NO: 97180 - DNA, 13 bp, Artificial Sequence
  Oligonucleotide for detection of SNP TSC0024106
ccatactaaatat

SEQ ID NO: 97181 - DNA, 13 bp, Artificial Sequence
  Oligonucleotide for detection of SNP TSC0024106
atatttcgtatgg

SEQ ID NO: 97182 - DNA, 13 bp, Artificial Sequence
  Oligonucleotide for detection of SNP TSC0024106
ccatacgaaatat

SEQ ID NO: 97183 - DNA, 13 bp, Artificial Sequence
  Oligonucleotide for detection of SNP TSC0024107
ttgaaaatttata

SEQ ID NO: 97184 - DNA, 13 bp, Artificial Sequence
  Oligonucleotide for detection of SNP TSC0024107
tataaattttcaa

SEQ ID NO: 97185 - DNA, 13 bp, Artificial Sequence
  Oligonucleotide for detection of SNP TSC0024107
ttgaaattttata

SEQ ID NO: 97186 - DNA, 13 bp, Artificial Sequence
  Oligonucleotide for detection of SNP TSC0024107
tataaaatttcaa

SEQ ID NO: 97187 - DNA, 13 bp, Artificial Sequence
  Oligonucleotide for detection of SNP TSC0024107
tgtaggtttttag

SEQ ID NO: 97188 - DNA, 13 bp, Artificial Sequence
  Oligonucleotide for detection of SNP TSC0024107
ctaaaaacctaca

SEQ ID NO: 97189 - DNA, 13 bp, Artificial Sequence
  Oligonucleotide for detection of SNP TSC0024107
tgtagggttttag

SEQ ID NO: 97190 - DNA, 13 bp, Artificial Sequence
  Oligonucleotide for detection of SNP TSC0024107
ctaaaaccctaca

SEQ ID NO: 97191 - DNA, 13 bp, Artificial Sequence
  Oligonucleotide for detection of SNP TSC0024108
taaaggatttaty

SEQ ID NO: 97192 - DNA, 13 bp, Artificial Sequence
  Oligonucleotide for detection of SNP TSC0024108
rataaatccttta

SEQ ID NO: 97193 - DNA, 13 bp, Artificial Sequence
  Oligonucleotide for detection of SNP TSC0024108
taaaggttttaty

SEQ ID NO: 97194 - DNA, 13 bp, Artificial Sequence
  Oligonucleotide for detection of SNP TSC0024108
rataaaaccttta

SEQ ID NO: 97195 - DNA, 13 bp, Artificial Sequence
  Oligonucleotide for detection of SNP TSC0024108
ggtaaatttttta

SEQ ID NO: 97196 - DNA, 13 bp, Artificial Sequence
  Oligonucleotide for detection of SNP TSC0024108
taaaaaatttacc

SEQ ID NO: 97197 - DNA, 13 bp, Artificial Sequence
  Oligonucleotide for detection of SNP TSC0024108
ggtaaaattttta

SEQ ID NO: 97198 - DNA, 13 bp, Artificial Sequence
  Oligonucleotide for detection of SNP TSC0024108
taaaaattttacc

SEQ ID NO: 97199 - DNA, 13 bp, Artificial Sequence
  Oligonucleotide for detection of SNP TSC0024109
attttgtgtttta

SEQ ID NO: 97200 - DNA, 13 bp, Artificial Sequence
  Oligonucleotide for detection of SNP TSC0024109
taaaacacaaaat

SEQ ID NO: 97201 - DNA, 13 bp, Artificial Sequence
  Oligonucleotide for detection of SNP TSC0024109
attttgcgtttta

SEQ ID NO: 97202 - DNA, 13 bp, Artificial Sequence
  Oligonucleotide for detection of SNP TSC0024109
taaaacgcaaaat

SEQ ID NO: 97203 - DNA, 13 bp, Artificial Sequence
  Oligonucleotide for detection of SNP TSC0024109
taaaatgtaagat

SEQ ID NO: 97204 - DNA, 13 bp, Artificial Sequence
  Oligonucleotide for detection of SNP TSC0024109
atcttacatttta

SEQ ID NO: 97205 - DNA, 13 bp, Artificial Sequence
  Oligonucleotide for detection of SNP TSC0024109
taaaatataagat

SEQ ID NO: 97206 - DNA, 13 bp, Artificial Sequence
  Oligonucleotide for detection of SNP TSC0024109
atcttatatttta

SEQ ID NO: 97207 - DNA, 13 bp, Artificial Sequence
  Oligonucleotide for detection of SNP TSC0024109
taaaacgtaagat

SEQ ID NO: 97208 - DNA, 13 bp, Artificial Sequence
  Oligonucleotide for detection of SNP TSC0024109
atcttacgtttta

SEQ ID NO: 97209 - DNA, 13 bp, Artificial Sequence
  Oligonucleotide for detection of SNP TSC0024114
gtggggggtttag

SEQ ID NO: 97210 - DNA, 13 bp, Artificial Sequence
  Oligonucleotide for detection of SNP TSC0024114
ctaaaccccccac

SEQ ID NO: 97211 - DNA, 13 bp, Artificial Sequence
  Oligonucleotide for detection of SNP TSC0024115
gtgtatagttaag

SEQ ID NO: 97212 - DNA, 13 bp, Artificial Sequence
  Oligonucleotide for detection of SNP TSC0024115
cttaactatacac

SEQ ID NO: 97213 - DNA, 13 bp, Artificial Sequence
  Oligonucleotide for detection of SNP TSC0024115
gtgtatggttaag

SEQ ID NO: 97214 - DNA, 13 bp, Artificial Sequence
  Oligonucleotide for detection of SNP TSC0024115
cttaaccatacac

SEQ ID NO: 97215 - DNA, 13 bp, Artificial Sequence
  Oligonucleotide for detection of SNP TSC0024115
gtgtacggttaag

SEQ ID NO: 97216 - DNA, 13 bp, Artificial Sequence
  Oligonucleotide for detection of SNP TSC0024115
cttaaccgtacac

SEQ ID NO: 97217 - DNA, 13 bp, Artificial Sequence
  Oligonucleotide for detection of SNP TSC0024115
tttgattgtgtay

SEQ ID NO: 97218 - DNA, 13 bp, Artificial Sequence
  Oligonucleotide for detection of SNP TSC0024115
rtacacaatcaaa

SEQ ID NO: 97219 - DNA, 13 bp, Artificial Sequence
  Oligonucleotide for detection of SNP TSC0024115
tttgatcgtgtay

SEQ ID NO: 97220 - DNA, 13 bp, Artificial Sequence
  Oligonucleotide for detection of SNP TSC0024115
rtacacgatcaaa

SEQ ID NO: 97221 - DNA, 13 bp, Artificial Sequence
  Oligonucleotide for detection of SNP TSC0024116
tttgtagtgattg

SEQ ID NO: 97222 - DNA, 13 bp, Artificial Sequence
  Oligonucleotide for detection of SNP TSC0024116
caatcactacaaa

SEQ ID NO: 97223 - DNA, 13 bp, Artificial Sequence
  Oligonucleotide for detection of SNP TSC0024116
tttgtaatgattg

SEQ ID NO: 97224 - DNA, 13 bp, Artificial Sequence
  Oligonucleotide for detection of SNP TSC0024116
caatcattacaaa

SEQ ID NO: 97225 - DNA, 13 bp, Artificial Sequence
  Oligonucleotide for detection of SNP TSC0024117
ttaggatgtatgt

SEQ ID NO: 97226 - DNA, 13 bp, Artificial Sequence
  Oligonucleotide for detection of SNP TSC0024117
acatacatcctaa

SEQ ID NO: 97227 - DNA, 13 bp, Artificial Sequence
  Oligonucleotide for detection of SNP TSC0024117
ttaggacgtatgt

SEQ ID NO: 97228 - DNA, 13 bp, Artificial Sequence
  Oligonucleotide for detection of SNP TSC0024117
acatacgtcctaa

SEQ ID NO: 97229 - DNA, 13 bp, Artificial Sequence
  Oligonucleotide for detection of SNP TSC0024117
ttaggatgtacgt

SEQ ID NO: 97230 - DNA, 13 bp, Artificial Sequence
  Oligonucleotide for detection of SNP TSC0024117
acgtacatcctaa

SEQ ID NO: 97231 - DNA, 13 bp, Artificial Sequence
  Oligonucleotide for detection of SNP TSC0024117
ttaggacgtacgt

SEQ ID NO: 97232 - DNA, 13 bp, Artificial Sequence
  Oligonucleotide for detection of SNP TSC0024117
acgtacgtcctaa

SEQ ID NO: 97233 - DNA, 13 bp, Artificial Sequence
  Oligonucleotide for detection of SNP TSC0024117
atgtgtgttttgg

SEQ ID NO: 97234 - DNA, 13 bp, Artificial Sequence
  Oligonucleotide for detection of SNP TSC0024117
ccaaaacacacat

SEQ ID NO: 97235 - DNA, 13 bp, Artificial Sequence
  Oligonucleotide for detection of SNP TSC0024117
atgtgtattttgg

SEQ ID NO: 97236 - DNA, 13 bp, Artificial Sequence
  Oligonucleotide for detection of SNP TSC0024117
ccaaaatacacat

SEQ ID NO: 97237 - DNA, 13 bp, Artificial Sequence
  Oligonucleotide for detection of SNP TSC0024117
acgtgtgttttgg

SEQ ID NO: 97238 - DNA, 13 bp, Artificial Sequence
  Oligonucleotide for detection of SNP TSC0024117
ccaaaacacacgt

SEQ ID NO: 97239 - DNA, 13 bp, Artificial Sequence
  Oligonucleotide for detection of SNP TSC0024117
acgtgtattttgg

SEQ ID NO: 97240 - DNA, 13 bp, Artificial Sequence
  Oligonucleotide for detection of SNP TSC0024117
ccaaaatacacgt

SEQ ID NO: 97241 - DNA, 13 bp, Artificial Sequence
  Oligonucleotide for detection of SNP TSC0024117
atgtgcgttttgg

SEQ ID NO: 97242 - DNA, 13 bp, Artificial Sequence
  Oligonucleotide for detection of SNP TSC0024117
ccaaaacgcacat

SEQ ID NO: 97243 - DNA, 13 bp, Artificial Sequence
  Oligonucleotide for detection of SNP TSC0024117
acgtgcgttttgg

SEQ ID NO: 97244 - DNA, 13 bp, Artificial Sequence
  Oligonucleotide for detection of SNP TSC0024117
ccaaaacgcacgt

SEQ ID NO: 97245 - DNA, 13 bp, Artificial Sequence
  Oligonucleotide for detection of SNP TSC0024119
gttattgtttata

SEQ ID NO: 97246 - DNA, 13 bp, Artificial Sequence
  Oligonucleotide for detection of SNP TSC0024119
tataaacaataac

SEQ ID NO: 97247 - DNA, 13 bp, Artificial Sequence
  Oligonucleotide for detection of SNP TSC0024119
gttattttttata

SEQ ID NO: 97248 - DNA, 13 bp, Artificial Sequence
  Oligonucleotide for detection of SNP TSC0024119
tataaaaaataac

SEQ ID NO: 97249 - DNA, 13 bp, Artificial Sequence
  Oligonucleotide for detection of SNP TSC0024119
gttatcgtttata

SEQ ID NO: 97250 - DNA, 13 bp, Artificial Sequence
  Oligonucleotide for detection of SNP TSC0024119
tataaacgataac

SEQ ID NO: 97251 - DNA, 13 bp, Artificial Sequence
  Oligonucleotide for detection of SNP TSC0024119
tataaatgatagy

SEQ ID NO: 97252 - DNA, 13 bp, Artificial Sequence
  Oligonucleotide for detection of SNP TSC0024119
rctatcatttata

SEQ ID NO: 97253 - DNA, 13 bp, Artificial Sequence
  Oligonucleotide for detection of SNP TSC0024119
tataaaagatagy

SEQ ID NO: 97254 - DNA, 13 bp, Artificial Sequence
  Oligonucleotide for detection of SNP TSC0024119
rctatcttttata

SEQ ID NO: 97255 - DNA, 13 bp, Artificial Sequence
  Oligonucleotide for detection of SNP TSC0024119
tataaacgatagy

SEQ ID NO: 97256 - DNA, 13 bp, Artificial Sequence
  Oligonucleotide for detection of SNP TSC0024119
rctatcgtttata

SEQ ID NO: 97257 - DNA, 13 bp, Artificial Sequence
  Oligonucleotide for detection of SNP TSC0024120
ttgatgatgtttt

SEQ ID NO: 97258 - DNA, 13 bp, Artificial Sequence
  Oligonucleotide for detection of SNP TSC0024120
aaaacatcatcaa

SEQ ID NO: 97259 - DNA, 13 bp, Artificial Sequence
  Oligonucleotide for detection of SNP TSC0024120
ttgatgttgtttt

SEQ ID NO: 97260 - DNA, 13 bp, Artificial Sequence
  Oligonucleotide for detection of SNP TSC0024120
aaaacaacatcaa

SEQ ID NO: 97261 - DNA, 13 bp, Artificial Sequence
  Oligonucleotide for detection of SNP TSC0024120
tcgatgatgtttt

SEQ ID NO: 97262 - DNA, 13 bp, Artificial Sequence
  Oligonucleotide for detection of SNP TSC0024120
aaaacatcatcga

SEQ ID NO: 97263 - DNA, 13 bp, Artificial Sequence
  Oligonucleotide for detection of SNP TSC0024120
tcgatgttgtttt

SEQ ID NO: 97264 - DNA, 13 bp, Artificial Sequence
  Oligonucleotide for detection of SNP TSC0024120
aaaacaacatcga

SEQ ID NO: 97265 - DNA, 13 bp, Artificial Sequence
  Oligonucleotide for detection of SNP TSC0024120
aaagtattattgg

SEQ ID NO: 97266 - DNA, 13 bp, Artificial Sequence
  Oligonucleotide for detection of SNP TSC0024120
ccaataatacttt

SEQ ID NO: 97267 - DNA, 13 bp, Artificial Sequence
  Oligonucleotide for detection of SNP TSC0024120
aaagtaatattgg

SEQ ID NO: 97268 - DNA, 13 bp, Artificial Sequence
  Oligonucleotide for detection of SNP TSC0024120
ccaatattacttt

SEQ ID NO: 97269 - DNA, 13 bp, Artificial Sequence
  Oligonucleotide for detection of SNP TSC0024120
aaagtattatcgg

SEQ ID NO: 97270 - DNA, 13 bp, Artificial Sequence
  Oligonucleotide for detection of SNP TSC0024120
ccgataatacttt

SEQ ID NO: 97271 - DNA, 13 bp, Artificial Sequence
  Oligonucleotide for detection of SNP TSC0024120
aaagtaatatcgg

SEQ ID NO: 97272 - DNA, 13 bp, Artificial Sequence
  Oligonucleotide for detection of SNP TSC0024120
ccgatattacttt

SEQ ID NO: 97273 - DNA, 13 bp, Artificial Sequence
  Oligonucleotide for detection of SNP TSC0024125
tatttgggtggag

SEQ ID NO: 97274 - DNA, 13 bp, Artificial Sequence
  Oligonucleotide for detection of SNP TSC0024125
ctccacccaaata

SEQ ID NO: 97275 - DNA, 13 bp, Artificial Sequence
  Oligonucleotide for detection of SNP TSC0024125
tatttgtgtggag

SEQ ID NO: 97276 - DNA, 13 bp, Artificial Sequence
  Oligonucleotide for detection of SNP TSC0024125
ctccacacaaata

SEQ ID NO: 97277 - DNA, 13 bp, Artificial Sequence
  Oligonucleotide for detection of SNP TSC0024125
ttttatttagatg

SEQ ID NO: 97278 - DNA, 13 bp, Artificial Sequence
  Oligonucleotide for detection of SNP TSC0024125
catctaaataaaa

SEQ ID NO: 97279 - DNA, 13 bp, Artificial Sequence
  Oligonucleotide for detection of SNP TSC0024126
aatgttgaaataa

SEQ ID NO: 97280 - DNA, 13 bp, Artificial Sequence
  Oligonucleotide for detection of SNP TSC0024126
ttatttcaacatt

SEQ ID NO: 97281 - DNA, 13 bp, Artificial Sequence
  Oligonucleotide for detection of SNP TSC0024126
aatgttaaaataa

SEQ ID NO: 97282 - DNA, 13 bp, Artificial Sequence
  Oligonucleotide for detection of SNP TSC0024126
ttattttaacatt

SEQ ID NO: 97283 - DNA, 13 bp, Artificial Sequence
  Oligonucleotide for detection of SNP TSC0024128
ttgagtagaataa

SEQ ID NO: 97284 - DNA, 13 bp, Artificial Sequence
  Oligonucleotide for detection of SNP TSC0024128
ttattctactcaa

SEQ ID NO: 97285 - DNA, 13 bp, Artificial Sequence
  Oligonucleotide for detection of SNP TSC0024128
ttgagttgaataa

SEQ ID NO: 97286 - DNA, 13 bp, Artificial Sequence
  Oligonucleotide for detection of SNP TSC0024128
ttattcaactcaa

SEQ ID NO: 97287 - DNA, 13 bp, Artificial Sequence
  Oligonucleotide for detection of SNP TSC0024128
ttgttttatttag

SEQ ID NO: 97288 - DNA, 13 bp, Artificial Sequence
  Oligonucleotide for detection of SNP TSC0024128
ctaaataaaacaa

SEQ ID NO: 97289 - DNA, 13 bp, Artificial Sequence
  Oligonucleotide for detection of SNP TSC0024128
ttgtttaatttag

SEQ ID NO: 97290 - DNA, 13 bp, Artificial Sequence
  Oligonucleotide for detection of SNP TSC0024128
ctaaattaaacaa

SEQ ID NO: 97291 - DNA, 13 bp, Artificial Sequence
  Oligonucleotide for detection of SNP TSC0024130
gtgggagaagagg

SEQ ID NO: 97292 - DNA, 13 bp, Artificial Sequence
  Oligonucleotide for detection of SNP TSC0024130
cctcttctcccac

SEQ ID NO: 97293 - DNA, 13 bp, Artificial Sequence
  Oligonucleotide for detection of SNP TSC0024130
gtgggataagagg

SEQ ID NO: 97294 - DNA, 13 bp, Artificial Sequence
  Oligonucleotide for detection of SNP TSC0024130
cctcttatcccac

SEQ ID NO: 97295 - DNA, 13 bp, Artificial Sequence
  Oligonucleotide for detection of SNP TSC0024131
gagtgggtagtga

SEQ ID NO: 97296 - DNA, 13 bp, Artificial Sequence
  Oligonucleotide for detection of SNP TSC0024131
tcactacccactc

SEQ ID NO: 97297 - DNA, 13 bp, Artificial Sequence
  Oligonucleotide for detection of SNP TSC0024131
gagtggatagtga

SEQ ID NO: 97298 - DNA, 13 bp, Artificial Sequence
  Oligonucleotide for detection of SNP TSC0024131
tcactatccactc

SEQ ID NO: 97299 - DNA, 13 bp, Artificial Sequence
  Oligonucleotide for detection of SNP TSC0024133
aatttttggggag

SEQ ID NO: 97300 - DNA, 13 bp, Artificial Sequence
  Oligonucleotide for detection of SNP TSC0024133
ctccccaaaaatt

SEQ ID NO: 97301 - DNA, 13 bp, Artificial Sequence
  Oligonucleotide for detection of SNP TSC0024133
aattttcggggag

SEQ ID NO: 97302 - DNA, 13 bp, Artificial Sequence
  Oligonucleotide for detection of SNP TSC0024133
ctccccgaaaatt

SEQ ID NO: 97303 - DNA, 13 bp, Artificial Sequence
  Oligonucleotide for detection of SNP TSC0024133
ttttttgagagtt

SEQ ID NO: 97304 - DNA, 13 bp, Artificial Sequence
  Oligonucleotide for detection of SNP TSC0024133
aactctcaaaaaa

SEQ ID NO: 97305 - DNA, 13 bp, Artificial Sequence
  Oligonucleotide for detection of SNP TSC0024133
ttttttaagagtt

SEQ ID NO: 97306 - DNA, 13 bp, Artificial Sequence
  Oligonucleotide for detection of SNP TSC0024133
aactcttaaaaaa

SEQ ID NO: 97307 - DNA, 13 bp, Artificial Sequence
  Oligonucleotide for detection of SNP TSC0024133
tttttcgagagtt

SEQ ID NO: 97308 - DNA, 13 bp, Artificial Sequence
  Oligonucleotide for detection of SNP TSC0024133
aactctcgaaaaa

SEQ ID NO: 97309 - DNA, 13 bp, Artificial Sequence
  Oligonucleotide for detection of SNP TSC0024134
agtggtatttgta

SEQ ID NO: 97310 - DNA, 13 bp, Artificial Sequence
  Oligonucleotide for detection of SNP TSC0024134
tacaaataccact

SEQ ID NO: 97311 - DNA, 13 bp, Artificial Sequence
  Oligonucleotide for detection of SNP TSC0024134
agtggtgtttgta

SEQ ID NO: 97312 - DNA, 13 bp, Artificial Sequence
  Oligonucleotide for detection of SNP TSC0024134
tacaaacaccact

SEQ ID NO: 97313 - DNA, 13 bp, Artificial Sequence
  Oligonucleotide for detection of SNP TSC0024134
agtggcgtttgta

SEQ ID NO: 97314 - DNA, 13 bp, Artificial Sequence
  Oligonucleotide for detection of SNP TSC0024134
tacaaacgccact

SEQ ID NO: 97315 - DNA, 13 bp, Artificial Sequence
  Oligonucleotide for detection of SNP TSC0024134
tgtagatgttatt

SEQ ID NO: 97316 - DNA, 13 bp, Artificial Sequence
  Oligonucleotide for detection of SNP TSC0024134
aataacatctaca

SEQ ID NO: 97317 - DNA, 13 bp, Artificial Sequence
  Oligonucleotide for detection of SNP TSC0024134
tgtagacgttatt

SEQ ID NO: 97318 - DNA, 13 bp, Artificial Sequence
  Oligonucleotide for detection of SNP TSC0024134
aataacgtctaca

SEQ ID NO: 97319 - DNA, 13 bp, Artificial Sequence
  Oligonucleotide for detection of SNP TSC0024139
ggttttgttttay

SEQ ID NO: 97320 - DNA, 13 bp, Artificial Sequence
  Oligonucleotide for detection of SNP TSC0024139
rtaaaacaaaacc

SEQ ID NO: 97321 - DNA, 13 bp, Artificial Sequence
  Oligonucleotide for detection of SNP TSC0024141
atttggaaggggt

SEQ ID NO: 97322 - DNA, 13 bp, Artificial Sequence
  Oligonucleotide for detection of SNP TSC0024141
accccttccaaat

SEQ ID NO: 97323 - DNA, 13 bp, Artificial Sequence
  Oligonucleotide for detection of SNP TSC0024141
atttgggaggggt

SEQ ID NO: 97324 - DNA, 13 bp, Artificial Sequence
  Oligonucleotide for detection of SNP TSC0024141
acccctcccaaat

SEQ ID NO: 97325 - DNA, 13 bp, Artificial Sequence
  Oligonucleotide for detection of SNP TSC0024142
ggtatatggagaa

SEQ ID NO: 97326 - DNA, 13 bp, Artificial Sequence
  Oligonucleotide for detection of SNP TSC0024142
ttctccatatacc

SEQ ID NO: 97327 - DNA, 13 bp, Artificial Sequence
  Oligonucleotide for detection of SNP TSC0024142
ggtatacggagaa

SEQ ID NO: 97328 - DNA, 13 bp, Artificial Sequence
  Oligonucleotide for detection of SNP TSC0024142
ttctccgtatacc

SEQ ID NO: 97329 - DNA, 13 bp, Artificial Sequence
  Oligonucleotide for detection of SNP TSC0024151
aaggttggaaagy

SEQ ID NO: 97330 - DNA, 13 bp, Artificial Sequence
  Oligonucleotide for detection of SNP TSC0024151
rctttccaacctt

SEQ ID NO: 97331 - DNA, 13 bp, Artificial Sequence
  Oligonucleotide for detection of SNP TSC0024151
aaggtttgaaagy

SEQ ID NO: 97332 - DNA, 13 bp, Artificial Sequence
  Oligonucleotide for detection of SNP TSC0024151
rctttcaaacctt

SEQ ID NO: 97333 - DNA, 13 bp, Artificial Sequence
  Oligonucleotide for detection of SNP TSC0024151
gttttttaatttt

SEQ ID NO: 97334 - DNA, 13 bp, Artificial Sequence
  Oligonucleotide for detection of SNP TSC0024151
aaaattaaaaaac

SEQ ID NO: 97335 - DNA, 13 bp, Artificial Sequence
  Oligonucleotide for detection of SNP TSC0024151
gtttttaaatttt

SEQ ID NO: 97336 - DNA, 13 bp, Artificial Sequence
  Oligonucleotide for detection of SNP TSC0024151
aaaatttaaaaac

SEQ ID NO: 97337 - DNA, 13 bp, Artificial Sequence
  Oligonucleotide for detection of SNP TSC0024152
tagggaaagaaga

SEQ ID NO: 97338 - DNA, 13 bp, Artificial Sequence
  Oligonucleotide for detection of SNP TSC0024152
tcttctttcccta

SEQ ID NO: 97339 - DNA, 13 bp, Artificial Sequence
  Oligonucleotide for detection of SNP TSC0024152
tagggagagaaga

SEQ ID NO: 97340 - DNA, 13 bp, Artificial Sequence
  Oligonucleotide for detection of SNP TSC0024152
tcttctctcccta

SEQ ID NO: 97341 - DNA, 13 bp, Artificial Sequence
  Oligonucleotide for detection of SNP TSC0024158
ataaggtgggaga

SEQ ID NO: 97342 - DNA, 13 bp, Artificial Sequence
  Oligonucleotide for detection of SNP TSC0024158
tctcccaccttat

SEQ ID NO: 97343 - DNA, 13 bp, Artificial Sequence
  Oligonucleotide for detection of SNP TSC0024158
ataaggcgggaga

SEQ ID NO: 97344 - DNA, 13 bp, Artificial Sequence
  Oligonucleotide for detection of SNP TSC0024158
tctcccgccttat

SEQ ID NO: 97345 - DNA, 13 bp, Artificial Sequence
  Oligonucleotide for detection of SNP TSC0024159
gtaggtataagaa

SEQ ID NO: 97346 - DNA, 13 bp, Artificial Sequence
  Oligonucleotide for detection of SNP TSC0024159
ttcttatacctac

SEQ ID NO: 97347 - DNA, 13 bp, Artificial Sequence
  Oligonucleotide for detection of SNP TSC0024159
gtaggtgtaagaa

SEQ ID NO: 97348 - DNA, 13 bp, Artificial Sequence
  Oligonucleotide for detection of SNP TSC0024159
ttcttacacctac

SEQ ID NO: 97349 - DNA, 13 bp, Artificial Sequence
  Oligonucleotide for detection of SNP TSC0024159
gtaggcgtaagaa

SEQ ID NO: 97350 - DNA, 13 bp, Artificial Sequence
  Oligonucleotide for detection of SNP TSC0024159
ttcttacgcctac

SEQ ID NO: 97351 - DNA, 13 bp, Artificial Sequence
  Oligonucleotide for detection of SNP TSC0024159
tttttgcgtttgy

SEQ ID NO: 97352 - DNA, 13 bp, Artificial Sequence
  Oligonucleotide for detection of SNP TSC0024159
rcaaacgcaaaaa

SEQ ID NO: 97353 - DNA, 13 bp, Artificial Sequence
  Oligonucleotide for detection of SNP TSC0024164
ttagataataaay

SEQ ID NO: 97354 - DNA, 13 bp, Artificial Sequence
  Oligonucleotide for detection of SNP TSC0024164
rtttattatctaa

SEQ ID NO: 97355 - DNA, 13 bp, Artificial Sequence
  Oligonucleotide for detection of SNP TSC0024164
ttagattataaay

SEQ ID NO: 97356 - DNA, 13 bp, Artificial Sequence
  Oligonucleotide for detection of SNP TSC0024164
rtttataatctaa

SEQ ID NO: 97357 - DNA, 13 bp, Artificial Sequence
  Oligonucleotide for detection of SNP TSC0024164
gtttgttgtttaa

SEQ ID NO: 97358 - DNA, 13 bp, Artificial Sequence
  Oligonucleotide for detection of SNP TSC0024164
ttaaacaacaaac

SEQ ID NO: 97359 - DNA, 13 bp, Artificial Sequence
  Oligonucleotide for detection of SNP TSC0024164
gtttgtggtttaa

SEQ ID NO: 97360 - DNA, 13 bp, Artificial Sequence
  Oligonucleotide for detection of SNP TSC0024164
ttaaaccacaaac

SEQ ID NO: 97361 - DNA, 13 bp, Artificial Sequence
  Oligonucleotide for detection of SNP TSC0024167
ttttatttaaagy

SEQ ID NO: 97362 - DNA, 13 bp, Artificial Sequence
  Oligonucleotide for detection of SNP TSC0024167
rctttaaataaaa

SEQ ID NO: 97363 - DNA, 13 bp, Artificial Sequence
  Oligonucleotide for detection of SNP TSC0024167
ttttatgtaaagy

SEQ ID NO: 97364 - DNA, 13 bp, Artificial Sequence
  Oligonucleotide for detection of SNP TSC0024167
rctttacataaaa

SEQ ID NO: 97365 - DNA, 13 bp, Artificial Sequence
  Oligonucleotide for detection of SNP TSC0024167
gttttagatggaa

SEQ ID NO: 97366 - DNA, 13 bp, Artificial Sequence
  Oligonucleotide for detection of SNP TSC0024167
ttccatctaaaac

SEQ ID NO: 97367 - DNA, 13 bp, Artificial Sequence
  Oligonucleotide for detection of SNP TSC0024167
gttttatatggaa

SEQ ID NO: 97368 - DNA, 13 bp, Artificial Sequence
  Oligonucleotide for detection of SNP TSC0024167
ttccatataaaac

SEQ ID NO: 97369 - DNA, 13 bp, Artificial Sequence
  Oligonucleotide for detection of SNP TSC0024170
tatattggagagt

SEQ ID NO: 97370 - DNA, 13 bp, Artificial Sequence
  Oligonucleotide for detection of SNP TSC0024170
actctccaatata

SEQ ID NO: 97371 - DNA, 13 bp, Artificial Sequence
  Oligonucleotide for detection of SNP TSC0024170
tatattagagagt

SEQ ID NO: 97372 - DNA, 13 bp, Artificial Sequence
  Oligonucleotide for detection of SNP TSC0024170
actctctaatata

SEQ ID NO: 97373 - DNA, 13 bp, Artificial Sequence
  Oligonucleotide for detection of SNP TSC0024171
tgaaataatagga

SEQ ID NO: 97374 - DNA, 13 bp, Artificial Sequence
  Oligonucleotide for detection of SNP TSC0024171
tcctattatttca

SEQ ID NO: 97375 - DNA, 13 bp, Artificial Sequence
  Oligonucleotide for detection of SNP TSC0024171
tgaaatgatagga

SEQ ID NO: 97376 - DNA, 13 bp, Artificial Sequence
  Oligonucleotide for detection of SNP TSC0024171
tcctatcatttca

SEQ ID NO: 97377 - DNA, 13 bp, Artificial Sequence
  Oligonucleotide for detection of SNP TSC0024172
ttttaaaaaggta

SEQ ID NO: 97378 - DNA, 13 bp, Artificial Sequence
  Oligonucleotide for detection of SNP TSC0024172
tacctttttaaaa

SEQ ID NO: 97379 - DNA, 13 bp, Artificial Sequence
  Oligonucleotide for detection of SNP TSC0024172
ttttaagaaggta

SEQ ID NO: 97380 - DNA, 13 bp, Artificial Sequence
  Oligonucleotide for detection of SNP TSC0024172
taccttcttaaaa

SEQ ID NO: 97381 - DNA, 13 bp, Artificial Sequence
  Oligonucleotide for detection of SNP TSC0024173
gtgtttataatty

SEQ ID NO: 97382 - DNA, 13 bp, Artificial Sequence
  Oligonucleotide for detection of SNP TSC0024173
raattataaacac

SEQ ID NO: 97383 - DNA, 13 bp, Artificial Sequence
  Oligonucleotide for detection of SNP TSC0024173
gtgtttgtaatty

SEQ ID NO: 97384 - DNA, 13 bp, Artificial Sequence
  Oligonucleotide for detection of SNP TSC0024173
raattacaaacac

SEQ ID NO: 97385 - DNA, 13 bp, Artificial Sequence
  Oligonucleotide for detection of SNP TSC0024173
gcgtttataatty

SEQ ID NO: 97386 - DNA, 13 bp, Artificial Sequence
  Oligonucleotide for detection of SNP TSC0024173
raattataaacgc

SEQ ID NO: 97387 - DNA, 13 bp, Artificial Sequence
  Oligonucleotide for detection of SNP TSC0024173
gcgtttgtaatty

SEQ ID NO: 97388 - DNA, 13 bp, Artificial Sequence
  Oligonucleotide for detection of SNP TSC0024173
raattacaaacgc

SEQ ID NO: 97389 - DNA, 13 bp, Artificial Sequence
  Oligonucleotide for detection of SNP TSC0024174
tagagatgaggtg

SEQ ID NO: 97390 - DNA, 13 bp, Artificial Sequence
  Oligonucleotide for detection of SNP TSC0024174
cacctcatctcta

SEQ ID NO: 97391 - DNA, 13 bp, Artificial Sequence
  Oligonucleotide for detection of SNP TSC0024174
tagagacgaggtg

SEQ ID NO: 97392 - DNA, 13 bp, Artificial Sequence
  Oligonucleotide for detection of SNP TSC0024174
cacctcgtctcta

SEQ ID NO: 97393 - DNA, 13 bp, Artificial Sequence
  Oligonucleotide for detection of SNP TSC0024174
tatttcgtttttg

SEQ ID NO: 97394 - DNA, 13 bp, Artificial Sequence
  Oligonucleotide for detection of SNP TSC0024174
caaaaacgaaata

SEQ ID NO: 97395 - DNA, 13 bp, Artificial Sequence
  Oligonucleotide for detection of SNP TSC0024177
ttaagggatagty

SEQ ID NO: 97396 - DNA, 13 bp, Artificial Sequence
  Oligonucleotide for detection of SNP TSC0024177
ractatcccttaa

SEQ ID NO: 97397 - DNA, 13 bp, Artificial Sequence
  Oligonucleotide for detection of SNP TSC0024177
ttaaggaatagty

SEQ ID NO: 97398 - DNA, 13 bp, Artificial Sequence
  Oligonucleotide for detection of SNP TSC0024177
ractattccttaa

SEQ ID NO: 97399 - DNA, 13 bp, Artificial Sequence
  Oligonucleotide for detection of SNP TSC0024179
attggatgaaagg

SEQ ID NO: 97400 - DNA, 13 bp, Artificial Sequence
  Oligonucleotide for detection of SNP TSC0024179
cctttcatccaat

SEQ ID NO: 97401 - DNA, 13 bp, Artificial Sequence
  Oligonucleotide for detection of SNP TSC0024179
attggacgaaagg

SEQ ID NO: 97402 - DNA, 13 bp, Artificial Sequence
  Oligonucleotide for detection of SNP TSC0024179
cctttcgtccaat

SEQ ID NO: 97403 - DNA, 13 bp, Artificial Sequence
  Oligonucleotide for detection of SNP TSC0024179
tttttcgtttagt

SEQ ID NO: 97404 - DNA, 13 bp, Artificial Sequence
  Oligonucleotide for detection of SNP TSC0024179
actaaacgaaaaa

SEQ ID NO: 97405 - DNA, 13 bp, Artificial Sequence
  Oligonucleotide for detection of SNP TSC0024183
gtgtttagtaata

SEQ ID NO: 97406 - DNA, 13 bp, Artificial Sequence
  Oligonucleotide for detection of SNP TSC0024183
tattactaaacac

SEQ ID NO: 97407 - DNA, 13 bp, Artificial Sequence
  Oligonucleotide for detection of SNP TSC0024183
gtgtttggtaata

SEQ ID NO: 97408 - DNA, 13 bp, Artificial Sequence
  Oligonucleotide for detection of SNP TSC0024183
tattaccaaacac

SEQ ID NO: 97409 - DNA, 13 bp, Artificial Sequence
  Oligonucleotide for detection of SNP TSC0024187
agtagagtttagt

SEQ ID NO: 97410 - DNA, 13 bp, Artificial Sequence
  Oligonucleotide for detection of SNP TSC0024187
actaaactctact

SEQ ID NO: 97411 - DNA, 13 bp, Artificial Sequence
  Oligonucleotide for detection of SNP TSC0024187
agtagaatttagt

SEQ ID NO: 97412 - DNA, 13 bp, Artificial Sequence
  Oligonucleotide for detection of SNP TSC0024187
actaaattctact

SEQ ID NO: 97413 - DNA, 13 bp, Artificial Sequence
  Oligonucleotide for detection of SNP TSC0024193
ataatagtattta

SEQ ID NO: 97414 - DNA, 13 bp, Artificial Sequence
  Oligonucleotide for detection of SNP TSC0024193
taaatactattat

SEQ ID NO: 97415 - DNA, 13 bp, Artificial Sequence
  Oligonucleotide for detection of SNP TSC0024193
ataataatattta

SEQ ID NO: 97416 - DNA, 13 bp, Artificial Sequence
  Oligonucleotide for detection of SNP TSC0024193
taaatattattat

SEQ ID NO: 97417 - DNA, 13 bp, Artificial Sequence
  Oligonucleotide for detection of SNP TSC0024194
gatagttataggt

SEQ ID NO: 97418 - DNA, 13 bp, Artificial Sequence
  Oligonucleotide for detection of SNP TSC0024194
acctataactatc

SEQ ID NO: 97419 - DNA, 13 bp, Artificial Sequence
  Oligonucleotide for detection of SNP TSC0024194
gatagtgataggt

SEQ ID NO: 97420 - DNA, 13 bp, Artificial Sequence
  Oligonucleotide for detection of SNP TSC0024194
acctatcactatc

SEQ ID NO: 97421 - DNA, 13 bp, Artificial Sequence
  Oligonucleotide for detection of SNP TSC0024194
atttgtgattgty

SEQ ID NO: 97422 - DNA, 13 bp, Artificial Sequence
  Oligonucleotide for detection of SNP TSC0024194
racaatcacaaat

SEQ ID NO: 97423 - DNA, 13 bp, Artificial Sequence
  Oligonucleotide for detection of SNP TSC0024194
atttgttattgty

SEQ ID NO: 97424 - DNA, 13 bp, Artificial Sequence
  Oligonucleotide for detection of SNP TSC0024194
racaataacaaat

SEQ ID NO: 97425 - DNA, 13 bp, Artificial Sequence
  Oligonucleotide for detection of SNP TSC0024195
ggttttattgatg

SEQ ID NO: 97426 - DNA, 13 bp, Artificial Sequence
  Oligonucleotide for detection of SNP TSC0024195
catcaataaaacc

SEQ ID NO: 97427 - DNA, 13 bp, Artificial Sequence
  Oligonucleotide for detection of SNP TSC0024195
ggtttttttgatg

SEQ ID NO: 97428 - DNA, 13 bp, Artificial Sequence
  Oligonucleotide for detection of SNP TSC0024195
catcaaaaaaacc

SEQ ID NO: 97429 - DNA, 13 bp, Artificial Sequence
  Oligonucleotide for detection of SNP TSC0024195
ggttttatcgatg

SEQ ID NO: 97430 - DNA, 13 bp, Artificial Sequence
  Oligonucleotide for detection of SNP TSC0024195
catcgataaaacc

SEQ ID NO: 97431 - DNA, 13 bp, Artificial Sequence
  Oligonucleotide for detection of SNP TSC0024195
ggttttttcgatg

SEQ ID NO: 97432 - DNA, 13 bp, Artificial Sequence
  Oligonucleotide for detection of SNP TSC0024195
catcgaaaaaacc

SEQ ID NO: 97433 - DNA, 13 bp, Artificial Sequence
  Oligonucleotide for detection of SNP TSC0024195
tattgatgaagty

SEQ ID NO: 97434 - DNA, 13 bp, Artificial Sequence
  Oligonucleotide for detection of SNP TSC0024195
racttcatcaata

SEQ ID NO: 97435 - DNA, 13 bp, Artificial Sequence
  Oligonucleotide for detection of SNP TSC0024195
tattgaggaagty

SEQ ID NO: 97436 - DNA, 13 bp, Artificial Sequence
  Oligonucleotide for detection of SNP TSC0024195
racttcctcaata

SEQ ID NO: 97437 - DNA, 13 bp, Artificial Sequence
  Oligonucleotide for detection of SNP TSC0024195
tatcgatgaagty

SEQ ID NO: 97438 - DNA, 13 bp, Artificial Sequence
  Oligonucleotide for detection of SNP TSC0024195
racttcatcgata

SEQ ID NO: 97439 - DNA, 13 bp, Artificial Sequence
  Oligonucleotide for detection of SNP TSC0024195
tatcgaggaagty

SEQ ID NO: 97440 - DNA, 13 bp, Artificial Sequence
  Oligonucleotide for detection of SNP TSC0024195
racttcctcgata

SEQ ID NO: 97441 - DNA, 13 bp, Artificial Sequence
  Oligonucleotide for detection of SNP TSC0024196
tagagagttgggg

SEQ ID NO: 97442 - DNA, 13 bp, Artificial Sequence
  Oligonucleotide for detection of SNP TSC0024196
ccccaactctcta

SEQ ID NO: 97443 - DNA, 13 bp, Artificial Sequence
  Oligonucleotide for detection of SNP TSC0024196
tagagatttgggg

SEQ ID NO: 97444 - DNA, 13 bp, Artificial Sequence
  Oligonucleotide for detection of SNP TSC0024196
ccccaaatctcta

SEQ ID NO: 97445 - DNA, 13 bp, Artificial Sequence
  Oligonucleotide for detection of SNP TSC0024196
ttttagatttttg

SEQ ID NO: 97446 - DNA, 13 bp, Artificial Sequence
  Oligonucleotide for detection of SNP TSC0024196
caaaaatctaaaa

SEQ ID NO: 97447 - DNA, 13 bp, Artificial Sequence
  Oligonucleotide for detection of SNP TSC0024198
ttatatatttttg

SEQ ID NO: 97448 - DNA, 13 bp, Artificial Sequence
  Oligonucleotide for detection of SNP TSC0024198
caaaaatatataa

SEQ ID NO: 97449 - DNA, 13 bp, Artificial Sequence
  Oligonucleotide for detection of SNP TSC0024198
ttatatgtttttg

SEQ ID NO: 97450 - DNA, 13 bp, Artificial Sequence
  Oligonucleotide for detection of SNP TSC0024198
caaaaacatataa

SEQ ID NO: 97451 - DNA, 13 bp, Artificial Sequence
  Oligonucleotide for detection of SNP TSC0024198
ttatacgtttttg

SEQ ID NO: 97452 - DNA, 13 bp, Artificial Sequence
  Oligonucleotide for detection of SNP TSC0024198
caaaaacgtataa

SEQ ID NO: 97453 - DNA, 13 bp, Artificial Sequence
  Oligonucleotide for detection of SNP TSC0024198
tagaaatgtgtaa

SEQ ID NO: 97454 - DNA, 13 bp, Artificial Sequence
  Oligonucleotide for detection of SNP TSC0024198
ttacacatttcta

SEQ ID NO: 97455 - DNA, 13 bp, Artificial Sequence
  Oligonucleotide for detection of SNP TSC0024198
tagaaacgtgtaa

SEQ ID NO: 97456 - DNA, 13 bp, Artificial Sequence
  Oligonucleotide for detection of SNP TSC0024198
ttacacgtttcta

SEQ ID NO: 97457 - DNA, 13 bp, Artificial Sequence
  Oligonucleotide for detection of SNP TSC0024199
ttaattgtagggt

SEQ ID NO: 97458 - DNA, 13 bp, Artificial Sequence
  Oligonucleotide for detection of SNP TSC0024199
accctacaattaa

SEQ ID NO: 97459 - DNA, 13 bp, Artificial Sequence
  Oligonucleotide for detection of SNP TSC0024199
ttaattttagggt

SEQ ID NO: 97460 - DNA, 13 bp, Artificial Sequence
  Oligonucleotide for detection of SNP TSC0024199
accctaaaattaa

SEQ ID NO: 97461 - DNA, 13 bp, Artificial Sequence
  Oligonucleotide for detection of SNP TSC0024199
attttataattgg

SEQ ID NO: 97462 - DNA, 13 bp, Artificial Sequence
  Oligonucleotide for detection of SNP TSC0024199
ccaattataaaat

SEQ ID NO: 97463 - DNA, 13 bp, Artificial Sequence
  Oligonucleotide for detection of SNP TSC0024201
agtttttgtgttt

SEQ ID NO: 97464 - DNA, 13 bp, Artificial Sequence
  Oligonucleotide for detection of SNP TSC0024201
aaacacaaaaact

SEQ ID NO: 97465 - DNA, 13 bp, Artificial Sequence
  Oligonucleotide for detection of SNP TSC0024201
agttttcgtgttt

SEQ ID NO: 97466 - DNA, 13 bp, Artificial Sequence
  Oligonucleotide for detection of SNP TSC0024201
aaacacgaaaact

SEQ ID NO: 97467 - DNA, 13 bp, Artificial Sequence
  Oligonucleotide for detection of SNP TSC0024201
aaatatgaagatt

SEQ ID NO: 97468 - DNA, 13 bp, Artificial Sequence
  Oligonucleotide for detection of SNP TSC0024201
aatcttcatattt

SEQ ID NO: 97469 - DNA, 13 bp, Artificial Sequence
  Oligonucleotide for detection of SNP TSC0024201
aaatataaagatt

SEQ ID NO: 97470 - DNA, 13 bp, Artificial Sequence
  Oligonucleotide for detection of SNP TSC0024201
aatctttatattt

SEQ ID NO: 97471 - DNA, 13 bp, Artificial Sequence
  Oligonucleotide for detection of SNP TSC0024201
aaatacgaagatt

SEQ ID NO: 97472 - DNA, 13 bp, Artificial Sequence
  Oligonucleotide for detection of SNP TSC0024201
aatcttcgtattt

SEQ ID NO: 97473 - DNA, 13 bp, Artificial Sequence
  Oligonucleotide for detection of SNP TSC0024208
agtattgttttty

SEQ ID NO: 97474 - DNA, 13 bp, Artificial Sequence
  Oligonucleotide for detection of SNP TSC0024208
raaaaacaatact

SEQ ID NO: 97475 - DNA, 13 bp, Artificial Sequence
  Oligonucleotide for detection of SNP TSC0024208
agtattattttty

SEQ ID NO: 97476 - DNA, 13 bp, Artificial Sequence
  Oligonucleotide for detection of SNP TSC0024208
raaaaataatact

SEQ ID NO: 97477 - DNA, 13 bp, Artificial Sequence
  Oligonucleotide for detection of SNP TSC0024209
tttttgaagtaag

SEQ ID NO: 97478 - DNA, 13 bp, Artificial Sequence
  Oligonucleotide for detection of SNP TSC0024209
cttacttcaaaaa

SEQ ID NO: 97479 - DNA, 13 bp, Artificial Sequence
  Oligonucleotide for detection of SNP TSC0024209
tttttgtagtaag

SEQ ID NO: 97480 - DNA, 13 bp, Artificial Sequence
  Oligonucleotide for detection of SNP TSC0024209
cttactacaaaaa

SEQ ID NO: 97481 - DNA, 13 bp, Artificial Sequence
  Oligonucleotide for detection of SNP TSC0024209
tttgttttagaaa

SEQ ID NO: 97482 - DNA, 13 bp, Artificial Sequence
  Oligonucleotide for detection of SNP TSC0024209
tttctaaaacaaa

SEQ ID NO: 97483 - DNA, 13 bp, Artificial Sequence
  Oligonucleotide for detection of SNP TSC0024209
tttgttgtagaaa

SEQ ID NO: 97484 - DNA, 13 bp, Artificial Sequence
  Oligonucleotide for detection of SNP TSC0024209
tttctacaacaaa

SEQ ID NO: 97485 - DNA, 13 bp, Artificial Sequence
  Oligonucleotide for detection of SNP TSC0024211
tttttgagtttta

SEQ ID NO: 97486 - DNA, 13 bp, Artificial Sequence
  Oligonucleotide for detection of SNP TSC0024211
taaaactcaaaaa

SEQ ID NO: 97487 - DNA, 13 bp, Artificial Sequence
  Oligonucleotide for detection of SNP TSC0024211
tttttgtgtttta

SEQ ID NO: 97488 - DNA, 13 bp, Artificial Sequence
  Oligonucleotide for detection of SNP TSC0024211
taaaacacaaaaa

SEQ ID NO: 97489 - DNA, 13 bp, Artificial Sequence
  Oligonucleotide for detection of SNP TSC0024211
tgggatttaggaa

SEQ ID NO: 97490 - DNA, 13 bp, Artificial Sequence
  Oligonucleotide for detection of SNP TSC0024211
ttcctaaatccca

SEQ ID NO: 97491 - DNA, 13 bp, Artificial Sequence
  Oligonucleotide for detection of SNP TSC0024211
tgggatataggaa

SEQ ID NO: 97492 - DNA, 13 bp, Artificial Sequence
  Oligonucleotide for detection of SNP TSC0024211
ttcctatatccca

SEQ ID NO: 97493 - DNA, 13 bp, Artificial Sequence
  Oligonucleotide for detection of SNP TSC0024212
gagagaagggtat

SEQ ID NO: 97494 - DNA, 13 bp, Artificial Sequence
  Oligonucleotide for detection of SNP TSC0024212
atacccttctctc

SEQ ID NO: 97495 - DNA, 13 bp, Artificial Sequence
  Oligonucleotide for detection of SNP TSC0024212
gagagaggggtat

SEQ ID NO: 97496 - DNA, 13 bp, Artificial Sequence
  Oligonucleotide for detection of SNP TSC0024212
atacccctctctc

SEQ ID NO: 97497 - DNA, 13 bp, Artificial Sequence
  Oligonucleotide for detection of SNP TSC0024213
attttttgatttg

SEQ ID NO: 97498 - DNA, 13 bp, Artificial Sequence
  Oligonucleotide for detection of SNP TSC0024213
caaatcaaaaaat

SEQ ID NO: 97499 - DNA, 13 bp, Artificial Sequence
  Oligonucleotide for detection of SNP TSC0024213
atttttggatttg

SEQ ID NO: 97500 - DNA, 13 bp, Artificial Sequence
  Oligonucleotide for detection of SNP TSC0024213
caaatccaaaaat

SEQ ID NO: 97501 - DNA, 13 bp, Artificial Sequence
  Oligonucleotide for detection of SNP TSC0024213
atttttcgatttg

SEQ ID NO: 97502 - DNA, 13 bp, Artificial Sequence
  Oligonucleotide for detection of SNP TSC0024213
caaatcgaaaaat

SEQ ID NO: 97503 - DNA, 13 bp, Artificial Sequence
  Oligonucleotide for detection of SNP TSC0024213
attttcggatttg

SEQ ID NO: 97504 - DNA, 13 bp, Artificial Sequence
  Oligonucleotide for detection of SNP TSC0024213
caaatccgaaaat

SEQ ID NO: 97505 - DNA, 13 bp, Artificial Sequence
  Oligonucleotide for detection of SNP TSC0024213
taagttgggggat

SEQ ID NO: 97506 - DNA, 13 bp, Artificial Sequence
  Oligonucleotide for detection of SNP TSC0024213
atcccccaactta

SEQ ID NO: 97507 - DNA, 13 bp, Artificial Sequence
  Oligonucleotide for detection of SNP TSC0024213
taagtttggggat

SEQ ID NO: 97508 - DNA, 13 bp, Artificial Sequence
  Oligonucleotide for detection of SNP TSC0024213
atccccaaactta

SEQ ID NO: 97509 - DNA, 13 bp, Artificial Sequence
  Oligonucleotide for detection of SNP TSC0024213
taagtcgggggat

SEQ ID NO: 97510 - DNA, 13 bp, Artificial Sequence
  Oligonucleotide for detection of SNP TSC0024213
atcccccgactta

SEQ ID NO: 97511 - DNA, 13 bp, Artificial Sequence
  Oligonucleotide for detection of SNP TSC0024213
taagttcggggat

SEQ ID NO: 97512 - DNA, 13 bp, Artificial Sequence
  Oligonucleotide for detection of SNP TSC0024213
atccccgaactta

SEQ ID NO: 97513 - DNA, 13 bp, Artificial Sequence
  Oligonucleotide for detection of SNP TSC0024219
gggtagggggtag

SEQ ID NO: 97514 - DNA, 13 bp, Artificial Sequence
  Oligonucleotide for detection of SNP TSC0024219
ctaccccctaccc

SEQ ID NO: 97515 - DNA, 13 bp, Artificial Sequence
  Oligonucleotide for detection of SNP TSC0024219
gggtagagggtag

SEQ ID NO: 97516 - DNA, 13 bp, Artificial Sequence
  Oligonucleotide for detection of SNP TSC0024219
ctaccctctaccc

SEQ ID NO: 97517 - DNA, 13 bp, Artificial Sequence
  Oligonucleotide for detection of SNP TSC0024220
ttgagtattttgg

SEQ ID NO: 97518 - DNA, 13 bp, Artificial Sequence
  Oligonucleotide for detection of SNP TSC0024220
ccaaaatactcaa

SEQ ID NO: 97519 - DNA, 13 bp, Artificial Sequence
  Oligonucleotide for detection of SNP TSC0024220
ttgagtgttttgg

SEQ ID NO: 97520 - DNA, 13 bp, Artificial Sequence
  Oligonucleotide for detection of SNP TSC0024220
ccaaaacactcaa

SEQ ID NO: 97521 - DNA, 13 bp, Artificial Sequence
  Oligonucleotide for detection of SNP TSC0024220
ttgagcgttttgg

SEQ ID NO: 97522 - DNA, 13 bp, Artificial Sequence
  Oligonucleotide for detection of SNP TSC0024220
ccaaaacgctcaa

SEQ ID NO: 97523 - DNA, 13 bp, Artificial Sequence
  Oligonucleotide for detection of SNP TSC0024220
ttaaagtgtttag

SEQ ID NO: 97524 - DNA, 13 bp, Artificial Sequence
  Oligonucleotide for detection of SNP TSC0024220
ctaaacactttaa

SEQ ID NO: 97525 - DNA, 13 bp, Artificial Sequence
  Oligonucleotide for detection of SNP TSC0024220
ttaaagcgtttag

SEQ ID NO: 97526 - DNA, 13 bp, Artificial Sequence
  Oligonucleotide for detection of SNP TSC0024220
ctaaacgctttaa

SEQ ID NO: 97527 - DNA, 13 bp, Artificial Sequence
  Oligonucleotide for detection of SNP TSC0024221
gttattggggagg

SEQ ID NO: 97528 - DNA, 13 bp, Artificial Sequence
  Oligonucleotide for detection of SNP TSC0024221
cctccccaataac

SEQ ID NO: 97529 - DNA, 13 bp, Artificial Sequence
  Oligonucleotide for detection of SNP TSC0024221
tttttttagtagy

SEQ ID NO: 97530 - DNA, 13 bp, Artificial Sequence
  Oligonucleotide for detection of SNP TSC0024221
rctactaaaaaaa

SEQ ID NO: 97531 - DNA, 13 bp, Artificial Sequence
  Oligonucleotide for detection of SNP TSC0024223
ttgtttagggtta

SEQ ID NO: 97532 - DNA, 13 bp, Artificial Sequence
  Oligonucleotide for detection of SNP TSC0024223
taaccctaaacaa

SEQ ID NO: 97533 - DNA, 13 bp, Artificial Sequence
  Oligonucleotide for detection of SNP TSC0024223
ttgtttggggtta

SEQ ID NO: 97534 - DNA, 13 bp, Artificial Sequence
  Oligonucleotide for detection of SNP TSC0024223
taaccccaaacaa

SEQ ID NO: 97535 - DNA, 13 bp, Artificial Sequence
  Oligonucleotide for detection of SNP TSC0024223
tcgtttagggtta

SEQ ID NO: 97536 - DNA, 13 bp, Artificial Sequence
  Oligonucleotide for detection of SNP TSC0024223
taaccctaaacga

SEQ ID NO: 97537 - DNA, 13 bp, Artificial Sequence
  Oligonucleotide for detection of SNP TSC0024223
tcgtttggggtta

SEQ ID NO: 97538 - DNA, 13 bp, Artificial Sequence
  Oligonucleotide for detection of SNP TSC0024223
taaccccaaacga

SEQ ID NO: 97539 - DNA, 13 bp, Artificial Sequence
  Oligonucleotide for detection of SNP TSC0024223
ttgttcggggtta

SEQ ID NO: 97540 - DNA, 13 bp, Artificial Sequence
  Oligonucleotide for detection of SNP TSC0024223
taaccccgaacaa

SEQ ID NO: 97541 - DNA, 13 bp, Artificial Sequence
  Oligonucleotide for detection of SNP TSC0024223
tcgttcggggtta

SEQ ID NO: 97542 - DNA, 13 bp, Artificial Sequence
  Oligonucleotide for detection of SNP TSC0024223
taaccccgaacga

SEQ ID NO: 97543 - DNA, 13 bp, Artificial Sequence
  Oligonucleotide for detection of SNP TSC0024223
tggttttgggtgg

SEQ ID NO: 97544 - DNA, 13 bp, Artificial Sequence
  Oligonucleotide for detection of SNP TSC0024223
ccacccaaaacca

SEQ ID NO: 97545 - DNA, 13 bp, Artificial Sequence
  Oligonucleotide for detection of SNP TSC0024223
tggttttgggcgg

SEQ ID NO: 97546 - DNA, 13 bp, Artificial Sequence
  Oligonucleotide for detection of SNP TSC0024223
ccgcccaaaacca

SEQ ID NO: 97547 - DNA, 13 bp, Artificial Sequence
  Oligonucleotide for detection of SNP TSC0024223
tggtttcgggtgg

SEQ ID NO: 97548 - DNA, 13 bp, Artificial Sequence
  Oligonucleotide for detection of SNP TSC0024223
ccacccgaaacca

SEQ ID NO: 97549 - DNA, 13 bp, Artificial Sequence
  Oligonucleotide for detection of SNP TSC0024223
tggtttcgggcgg

SEQ ID NO: 97550 - DNA, 13 bp, Artificial Sequence
  Oligonucleotide for detection of SNP TSC0024223
ccgcccgaaacca

SEQ ID NO: 97551 - DNA, 13 bp, Artificial Sequence
  Oligonucleotide for detection of SNP TSC0024224
tttttagtagtty

SEQ ID NO: 97552 - DNA, 13 bp, Artificial Sequence
  Oligonucleotide for detection of SNP TSC0024224
raactactaaaaa

SEQ ID NO: 97553 - DNA, 13 bp, Artificial Sequence
  Oligonucleotide for detection of SNP TSC0024224
tttttaatagtty

SEQ ID NO: 97554 - DNA, 13 bp, Artificial Sequence
  Oligonucleotide for detection of SNP TSC0024224
raactattaaaaa

SEQ ID NO: 97555 - DNA, 13 bp, Artificial Sequence
  Oligonucleotide for detection of SNP TSC0024226
agtgtaggagggy

SEQ ID NO: 97556 - DNA, 13 bp, Artificial Sequence
  Oligonucleotide for detection of SNP TSC0024226
rccctcctacact

SEQ ID NO: 97557 - DNA, 13 bp, Artificial Sequence
  Oligonucleotide for detection of SNP TSC0024226
agtgtaagagggy

SEQ ID NO: 97558 - DNA, 13 bp, Artificial Sequence
  Oligonucleotide for detection of SNP TSC0024226
rccctcttacact

SEQ ID NO: 97559 - DNA, 13 bp, Artificial Sequence
  Oligonucleotide for detection of SNP TSC0024237
tttgatatttata

SEQ ID NO: 97560 - DNA, 13 bp, Artificial Sequence
  Oligonucleotide for detection of SNP TSC0024237
tataaatatcaaa

SEQ ID NO: 97561 - DNA, 13 bp, Artificial Sequence
  Oligonucleotide for detection of SNP TSC0024237
tttgatgtttata

SEQ ID NO: 97562 - DNA, 13 bp, Artificial Sequence
  Oligonucleotide for detection of SNP TSC0024237
tataaacatcaaa

SEQ ID NO: 97563 - DNA, 13 bp, Artificial Sequence
  Oligonucleotide for detection of SNP TSC0024237
tttgacgtttata

SEQ ID NO: 97564 - DNA, 13 bp, Artificial Sequence
  Oligonucleotide for detection of SNP TSC0024237
tataaacgtcaaa

SEQ ID NO: 97565 - DNA, 13 bp, Artificial Sequence
  Oligonucleotide for detection of SNP TSC0024237
tgtgagtgttaag

SEQ ID NO: 97566 - DNA, 13 bp, Artificial Sequence
  Oligonucleotide for detection of SNP TSC0024237
cttaacactcaca

SEQ ID NO: 97567 - DNA, 13 bp, Artificial Sequence
  Oligonucleotide for detection of SNP TSC0024237
tgtgagcgttaag

SEQ ID NO: 97568 - DNA, 13 bp, Artificial Sequence
  Oligonucleotide for detection of SNP TSC0024237
cttaacgctcaca

SEQ ID NO: 97569 - DNA, 13 bp, Artificial Sequence
  Oligonucleotide for detection of SNP TSC0024238
ttttggagttttg

SEQ ID NO: 97570 - DNA, 13 bp, Artificial Sequence
  Oligonucleotide for detection of SNP TSC0024238
caaaactccaaaa

SEQ ID NO: 97571 - DNA, 13 bp, Artificial Sequence
  Oligonucleotide for detection of SNP TSC0024238
tttcggggttttg

SEQ ID NO: 97572 - DNA, 13 bp, Artificial Sequence
  Oligonucleotide for detection of SNP TSC0024238
caaaaccccgaaa

SEQ ID NO: 97573 - DNA, 13 bp, Artificial Sequence
  Oligonucleotide for detection of SNP TSC0024238
tttcggagttttg

SEQ ID NO: 97574 - DNA, 13 bp, Artificial Sequence
  Oligonucleotide for detection of SNP TSC0024238
caaaactccgaaa

SEQ ID NO: 97575 - DNA, 13 bp, Artificial Sequence
  Oligonucleotide for detection of SNP TSC0024240
taataatgttaty

SEQ ID NO: 97576 - DNA, 13 bp, Artificial Sequence
  Oligonucleotide for detection of SNP TSC0024240
rataacattatta

SEQ ID NO: 97577 - DNA, 13 bp, Artificial Sequence
  Oligonucleotide for detection of SNP TSC0024240
taataacgttaty

SEQ ID NO: 97578 - DNA, 13 bp, Artificial Sequence
  Oligonucleotide for detection of SNP TSC0024240
rataacgttatta

SEQ ID NO: 97579 - DNA, 13 bp, Artificial Sequence
  Oligonucleotide for detection of SNP TSC0024240
ggtgatgttgttg

SEQ ID NO: 97580 - DNA, 13 bp, Artificial Sequence
  Oligonucleotide for detection of SNP TSC0024240
caacaacatcacc

SEQ ID NO: 97581 - DNA, 13 bp, Artificial Sequence
  Oligonucleotide for detection of SNP TSC0024240
ggtgatattgttg

SEQ ID NO: 97582 - DNA, 13 bp, Artificial Sequence
  Oligonucleotide for detection of SNP TSC0024240
caacaatatcacc

SEQ ID NO: 97583 - DNA, 13 bp, Artificial Sequence
  Oligonucleotide for detection of SNP TSC0024240
ggtgacgttgttg

SEQ ID NO: 97584 - DNA, 13 bp, Artificial Sequence
  Oligonucleotide for detection of SNP TSC0024240
caacaacgtcacc

SEQ ID NO: 97585 - DNA, 13 bp, Artificial Sequence
  Oligonucleotide for detection of SNP TSC0024241
tatgaaaaaaaaa

SEQ ID NO: 97586 - DNA, 13 bp, Artificial Sequence
  Oligonucleotide for detection of SNP TSC0024241
tttttttttcata

SEQ ID NO: 97587 - DNA, 13 bp, Artificial Sequence
  Oligonucleotide for detection of SNP TSC0024241
tatgaagaaaaaa

SEQ ID NO: 97588 - DNA, 13 bp, Artificial Sequence
  Oligonucleotide for detection of SNP TSC0024241
ttttttcttcata

SEQ ID NO: 97589 - DNA, 13 bp, Artificial Sequence
  Oligonucleotide for detection of SNP TSC0024242
agttattgtttta

SEQ ID NO: 97590 - DNA, 13 bp, Artificial Sequence
  Oligonucleotide for detection of SNP TSC0024242
taaaacaataact

SEQ ID NO: 97591 - DNA, 13 bp, Artificial Sequence
  Oligonucleotide for detection of SNP TSC0024242
agttatcgtttta

SEQ ID NO: 97592 - DNA, 13 bp, Artificial Sequence
  Oligonucleotide for detection of SNP TSC0024242
taaaacgataact

SEQ ID NO: 97593 - DNA, 13 bp, Artificial Sequence
  Oligonucleotide for detection of SNP TSC0024242
taagatggtgatt

SEQ ID NO: 97594 - DNA, 13 bp, Artificial Sequence
  Oligonucleotide for detection of SNP TSC0024242
aatcaccatctta

SEQ ID NO: 97595 - DNA, 13 bp, Artificial Sequence
  Oligonucleotide for detection of SNP TSC0024242
taagatagtgatt

SEQ ID NO: 97596 - DNA, 13 bp, Artificial Sequence
  Oligonucleotide for detection of SNP TSC0024242
aatcactatctta

SEQ ID NO: 97597 - DNA, 13 bp, Artificial Sequence
  Oligonucleotide for detection of SNP TSC0024242
taagacggtgatt

SEQ ID NO: 97598 - DNA, 13 bp, Artificial Sequence
  Oligonucleotide for detection of SNP TSC0024242
aatcaccgtctta

SEQ ID NO: 97599 - DNA, 13 bp, Artificial Sequence
  Oligonucleotide for detection of SNP TSC0024243
ttatttagaatat

SEQ ID NO: 97600 - DNA, 13 bp, Artificial Sequence
  Oligonucleotide for detection of SNP TSC0024243
atattctaaataa

SEQ ID NO: 97601 - DNA, 13 bp, Artificial Sequence
  Oligonucleotide for detection of SNP TSC0024243
ttatttggaatat

SEQ ID NO: 97602 - DNA, 13 bp, Artificial Sequence
  Oligonucleotide for detection of SNP TSC0024243
atattccaaataa

SEQ ID NO: 97603 - DNA, 13 bp, Artificial Sequence
  Oligonucleotide for detection of SNP TSC0024244
agtgttgtaataa

SEQ ID NO: 97604 - DNA, 13 bp, Artificial Sequence
  Oligonucleotide for detection of SNP TSC0024244
ttattacaacact

SEQ ID NO: 97605 - DNA, 13 bp, Artificial Sequence
  Oligonucleotide for detection of SNP TSC0024244
agtgttataataa

SEQ ID NO: 97606 - DNA, 13 bp, Artificial Sequence
  Oligonucleotide for detection of SNP TSC0024244
ttattataacact

SEQ ID NO: 97607 - DNA, 13 bp, Artificial Sequence
  Oligonucleotide for detection of SNP TSC0024245
tgttttgaaaagt

SEQ ID NO: 97608 - DNA, 13 bp, Artificial Sequence
  Oligonucleotide for detection of SNP TSC0024245
acttttcaaaaca

SEQ ID NO: 97609 - DNA, 13 bp, Artificial Sequence
  Oligonucleotide for detection of SNP TSC0024245
tgttttaaaaagt

SEQ ID NO: 97610 - DNA, 13 bp, Artificial Sequence
  Oligonucleotide for detection of SNP TSC0024245
actttttaaaaca

SEQ ID NO: 97611 - DNA, 13 bp, Artificial Sequence
  Oligonucleotide for detection of SNP TSC0024245
cgttttgaaaagt

SEQ ID NO: 97612 - DNA, 13 bp, Artificial Sequence
  Oligonucleotide for detection of SNP TSC0024245
acttttcaaaacg

SEQ ID NO: 97613 - DNA, 13 bp, Artificial Sequence
  Oligonucleotide for detection of SNP TSC0024245
cgttttaaaaagt

SEQ ID NO: 97614 - DNA, 13 bp, Artificial Sequence
  Oligonucleotide for detection of SNP TSC0024245
actttttaaaacg

SEQ ID NO: 97615 - DNA, 13 bp, Artificial Sequence
  Oligonucleotide for detection of SNP TSC0024247
aaggggtgggggy

SEQ ID NO: 97616 - DNA, 13 bp, Artificial Sequence
  Oligonucleotide for detection of SNP TSC0024247
rcccccacccctt

SEQ ID NO: 97617 - DNA, 13 bp, Artificial Sequence
  Oligonucleotide for detection of SNP TSC0024247
aaggggcgggggy

SEQ ID NO: 97618 - DNA, 13 bp, Artificial Sequence
  Oligonucleotide for detection of SNP TSC0024247
rcccccgcccctt

SEQ ID NO: 97619 - DNA, 13 bp, Artificial Sequence
  Oligonucleotide for detection of SNP TSC0024248
tgtgggtatttga

SEQ ID NO: 97620 - DNA, 13 bp, Artificial Sequence
  Oligonucleotide for detection of SNP TSC0024248
tcaaatacccaca

SEQ ID NO: 97621 - DNA, 13 bp, Artificial Sequence
  Oligonucleotide for detection of SNP TSC0024248
tgtggggatttga

SEQ ID NO: 97622 - DNA, 13 bp, Artificial Sequence
  Oligonucleotide for detection of SNP TSC0024248
tcaaatccccaca

SEQ ID NO: 97623 - DNA, 13 bp, Artificial Sequence
  Oligonucleotide for detection of SNP TSC0024248
cgtgggtatttga

SEQ ID NO: 97624 - DNA, 13 bp, Artificial Sequence
  Oligonucleotide for detection of SNP TSC0024248
tcaaatacccacg

SEQ ID NO: 97625 - DNA, 13 bp, Artificial Sequence
  Oligonucleotide for detection of SNP TSC0024248
cgtggggatttga

SEQ ID NO: 97626 - DNA, 13 bp, Artificial Sequence
  Oligonucleotide for detection of SNP TSC0024248
tcaaatccccacg

SEQ ID NO: 97627 - DNA, 13 bp, Artificial Sequence
  Oligonucleotide for detection of SNP TSC0024248
ttaagtgtttatg

SEQ ID NO: 97628 - DNA, 13 bp, Artificial Sequence
  Oligonucleotide for detection of SNP TSC0024248
cataaacacttaa

SEQ ID NO: 97629 - DNA, 13 bp, Artificial Sequence
  Oligonucleotide for detection of SNP TSC0024248
ttaagtttttatg

SEQ ID NO: 97630 - DNA, 13 bp, Artificial Sequence
  Oligonucleotide for detection of SNP TSC0024248
cataaaaacttaa

SEQ ID NO: 97631 - DNA, 13 bp, Artificial Sequence
  Oligonucleotide for detection of SNP TSC0024248
ttaagtgtttacg

SEQ ID NO: 97632 - DNA, 13 bp, Artificial Sequence
  Oligonucleotide for detection of SNP TSC0024248
cgtaaacacttaa

SEQ ID NO: 97633 - DNA, 13 bp, Artificial Sequence
  Oligonucleotide for detection of SNP TSC0024248
ttaagtttttacg

SEQ ID NO: 97634 - DNA, 13 bp, Artificial Sequence
  Oligonucleotide for detection of SNP TSC0024248
cgtaaaaacttaa

SEQ ID NO: 97635 - DNA, 13 bp, Artificial Sequence
  Oligonucleotide for detection of SNP TSC0024249
gaaaatgttttta

SEQ ID NO: 97636 - DNA, 13 bp, Artificial Sequence
  Oligonucleotide for detection of SNP TSC0024249
taaaaacattttc

SEQ ID NO: 97637 - DNA, 13 bp, Artificial Sequence
  Oligonucleotide for detection of SNP TSC0024249
gaaaatattttta

SEQ ID NO: 97638 - DNA, 13 bp, Artificial Sequence
  Oligonucleotide for detection of SNP TSC0024249
taaaaatattttc

SEQ ID NO: 97639 - DNA, 13 bp, Artificial Sequence
  Oligonucleotide for detection of SNP TSC0024250
ttatatagtattt

SEQ ID NO: 97640 - DNA, 13 bp, Artificial Sequence
  Oligonucleotide for detection of SNP TSC0024250
aaatactatataa

SEQ ID NO: 97641 - DNA, 13 bp, Artificial Sequence
  Oligonucleotide for detection of SNP TSC0024250
ttatatggtattt

SEQ ID NO: 97642 - DNA, 13 bp, Artificial Sequence
  Oligonucleotide for detection of SNP TSC0024250
aaataccatataa

SEQ ID NO: 97643 - DNA, 13 bp, Artificial Sequence
  Oligonucleotide for detection of SNP TSC0024251
ttttgttggggag

SEQ ID NO: 97644 - DNA, 13 bp, Artificial Sequence
  Oligonucleotide for detection of SNP TSC0024251
ctccccaacaaaa

SEQ ID NO: 97645 - DNA, 13 bp, Artificial Sequence
  Oligonucleotide for detection of SNP TSC0024251
ttttgtcggggag

SEQ ID NO: 97646 - DNA, 13 bp, Artificial Sequence
  Oligonucleotide for detection of SNP TSC0024251
ctccccgacaaaa

SEQ ID NO: 97647 - DNA, 13 bp, Artificial Sequence
  Oligonucleotide for detection of SNP TSC0024251
ttttttgatagag

SEQ ID NO: 97648 - DNA, 13 bp, Artificial Sequence
  Oligonucleotide for detection of SNP TSC0024251
ctctatcaaaaaa

SEQ ID NO: 97649 - DNA, 13 bp, Artificial Sequence
  Oligonucleotide for detection of SNP TSC0024251
tttttcgatagag

SEQ ID NO: 97650 - DNA, 13 bp, Artificial Sequence
  Oligonucleotide for detection of SNP TSC0024251
ctctatcgaaaaa

SEQ ID NO: 97651 - DNA, 13 bp, Artificial Sequence
  Oligonucleotide for detection of SNP TSC0024252
aggttgatagttg

SEQ ID NO: 97652 - DNA, 13 bp, Artificial Sequence
  Oligonucleotide for detection of SNP TSC0024252
caactatcaacct

SEQ ID NO: 97653 - DNA, 13 bp, Artificial Sequence
  Oligonucleotide for detection of SNP TSC0024252
aggttggtagttg

SEQ ID NO: 97654 - DNA, 13 bp, Artificial Sequence
  Oligonucleotide for detection of SNP TSC0024252
caactaccaacct

SEQ ID NO: 97655 - DNA, 13 bp, Artificial Sequence
  Oligonucleotide for detection of SNP TSC0024254
ttggttgttttty

SEQ ID NO: 97656 - DNA, 13 bp, Artificial Sequence
  Oligonucleotide for detection of SNP TSC0024254
raaaaacaaccaa

SEQ ID NO: 97657 - DNA, 13 bp, Artificial Sequence
  Oligonucleotide for detection of SNP TSC0024254
gggagggagttag

SEQ ID NO: 97658 - DNA, 13 bp, Artificial Sequence
  Oligonucleotide for detection of SNP TSC0024254
ctaactccctccc

SEQ ID NO: 97659 - DNA, 13 bp, Artificial Sequence
  Oligonucleotide for detection of SNP TSC0024254
gggaggtagttag

SEQ ID NO: 97660 - DNA, 13 bp, Artificial Sequence
  Oligonucleotide for detection of SNP TSC0024254
ctaactacctccc

SEQ ID NO: 97661 - DNA, 13 bp, Artificial Sequence
  Oligonucleotide for detection of SNP TSC0024256
agaatgggagaag

SEQ ID NO: 97662 - DNA, 13 bp, Artificial Sequence
  Oligonucleotide for detection of SNP TSC0024256
cttctcccattct

SEQ ID NO: 97663 - DNA, 13 bp, Artificial Sequence
  Oligonucleotide for detection of SNP TSC0024256
agaatgagagaag

SEQ ID NO: 97664 - DNA, 13 bp, Artificial Sequence
  Oligonucleotide for detection of SNP TSC0024256
cttctctcattct

SEQ ID NO: 97665 - DNA, 13 bp, Artificial Sequence
  Oligonucleotide for detection of SNP TSC0024259
tggtttaatatga

SEQ ID NO: 97666 - DNA, 13 bp, Artificial Sequence
  Oligonucleotide for detection of SNP TSC0024259
tcatattaaacca

SEQ ID NO: 97667 - DNA, 13 bp, Artificial Sequence
  Oligonucleotide for detection of SNP TSC0024259
tggtttgatatga

SEQ ID NO: 97668 - DNA, 13 bp, Artificial Sequence
  Oligonucleotide for detection of SNP TSC0024259
tcatatcaaacca

SEQ ID NO: 97669 - DNA, 13 bp, Artificial Sequence
  Oligonucleotide for detection of SNP TSC0024259
tggttcgatatga

SEQ ID NO: 97670 - DNA, 13 bp, Artificial Sequence
  Oligonucleotide for detection of SNP TSC0024259
tcatatcgaacca

SEQ ID NO: 97671 - DNA, 13 bp, Artificial Sequence
  Oligonucleotide for detection of SNP TSC0024259
ttatgttgggtta

SEQ ID NO: 97672 - DNA, 13 bp, Artificial Sequence
  Oligonucleotide for detection of SNP TSC0024259
taacccaacataa

SEQ ID NO: 97673 - DNA, 13 bp, Artificial Sequence
  Oligonucleotide for detection of SNP TSC0024259
ttatgtcgggtta

SEQ ID NO: 97674 - DNA, 13 bp, Artificial Sequence
  Oligonucleotide for detection of SNP TSC0024259
taacccgacataa

SEQ ID NO: 97675 - DNA, 13 bp, Artificial Sequence
  Oligonucleotide for detection of SNP TSC0024261
tagattatttgag

SEQ ID NO: 97676 - DNA, 13 bp, Artificial Sequence
  Oligonucleotide for detection of SNP TSC0024261
ctcaaataatcta

SEQ ID NO: 97677 - DNA, 13 bp, Artificial Sequence
  Oligonucleotide for detection of SNP TSC0024261
tagatcgtttgag

SEQ ID NO: 97678 - DNA, 13 bp, Artificial Sequence
  Oligonucleotide for detection of SNP TSC0024261
ctcaaacgatcta

SEQ ID NO: 97679 - DNA, 13 bp, Artificial Sequence
  Oligonucleotide for detection of SNP TSC0024262
agttttaggtgtt

SEQ ID NO: 97680 - DNA, 13 bp, Artificial Sequence
  Oligonucleotide for detection of SNP TSC0024262
aacacctaaaact

SEQ ID NO: 97681 - DNA, 13 bp, Artificial Sequence
  Oligonucleotide for detection of SNP TSC0024262
agttttgggtgtt

SEQ ID NO: 97682 - DNA, 13 bp, Artificial Sequence
  Oligonucleotide for detection of SNP TSC0024262
aacacccaaaact

SEQ ID NO: 97683 - DNA, 13 bp, Artificial Sequence
  Oligonucleotide for detection of SNP TSC0024262
agtttcgggtgtt

SEQ ID NO: 97684 - DNA, 13 bp, Artificial Sequence
  Oligonucleotide for detection of SNP TSC0024262
aacacccgaaact

SEQ ID NO: 97685 - DNA, 13 bp, Artificial Sequence
  Oligonucleotide for detection of SNP TSC0024262
aatatttgaagtt

SEQ ID NO: 97686 - DNA, 13 bp, Artificial Sequence
  Oligonucleotide for detection of SNP TSC0024262
aacttcaaatatt

SEQ ID NO: 97687 - DNA, 13 bp, Artificial Sequence
  Oligonucleotide for detection of SNP TSC0024262
aatattcgaagtt

SEQ ID NO: 97688 - DNA, 13 bp, Artificial Sequence
  Oligonucleotide for detection of SNP TSC0024262
aacttcgaatatt

SEQ ID NO: 97689 - DNA, 13 bp, Artificial Sequence
  Oligonucleotide for detection of SNP TSC0024263
agtaataggtaat

SEQ ID NO: 97690 - DNA, 13 bp, Artificial Sequence
  Oligonucleotide for detection of SNP TSC0024263
attacctattact

SEQ ID NO: 97691 - DNA, 13 bp, Artificial Sequence
  Oligonucleotide for detection of SNP TSC0024263
agtaatgggtaat

SEQ ID NO: 97692 - DNA, 13 bp, Artificial Sequence
  Oligonucleotide for detection of SNP TSC0024263
attacccattact

SEQ ID NO: 97693 - DNA, 13 bp, Artificial Sequence
  Oligonucleotide for detection of SNP TSC0024264
attgttgtgatag

SEQ ID NO: 97694 - DNA, 13 bp, Artificial Sequence
  Oligonucleotide for detection of SNP TSC0024264
ctatcacaacaat

SEQ ID NO: 97695 - DNA, 13 bp, Artificial Sequence
  Oligonucleotide for detection of SNP TSC0024264
attgttatgatag

SEQ ID NO: 97696 - DNA, 13 bp, Artificial Sequence
  Oligonucleotide for detection of SNP TSC0024264
ctatcataacaat

SEQ ID NO: 97697 - DNA, 13 bp, Artificial Sequence
  Oligonucleotide for detection of SNP TSC0024265
tgttgtgatgttt

SEQ ID NO: 97698 - DNA, 13 bp, Artificial Sequence
  Oligonucleotide for detection of SNP TSC0024265
aaacatcacaaca

SEQ ID NO: 97699 - DNA, 13 bp, Artificial Sequence
  Oligonucleotide for detection of SNP TSC0024265
tgttgtaatgttt

SEQ ID NO: 97700 - DNA, 13 bp, Artificial Sequence
  Oligonucleotide for detection of SNP TSC0024265
aaacattacaaca

SEQ ID NO: 97701 - DNA, 13 bp, Artificial Sequence
  Oligonucleotide for detection of SNP TSC0024265
tgttgtgacgttt

SEQ ID NO: 97702 - DNA, 13 bp, Artificial Sequence
  Oligonucleotide for detection of SNP TSC0024265
aaacgtcacaaca

SEQ ID NO: 97703 - DNA, 13 bp, Artificial Sequence
  Oligonucleotide for detection of SNP TSC0024265
tgttgtaacgttt

SEQ ID NO: 97704 - DNA, 13 bp, Artificial Sequence
  Oligonucleotide for detection of SNP TSC0024265
aaacgttacaaca

SEQ ID NO: 97705 - DNA, 13 bp, Artificial Sequence
  Oligonucleotide for detection of SNP TSC0024273
gagagatagaatg

SEQ ID NO: 97706 - DNA, 13 bp, Artificial Sequence
  Oligonucleotide for detection of SNP TSC0024273
cattctatctctc

SEQ ID NO: 97707 - DNA, 13 bp, Artificial Sequence
  Oligonucleotide for detection of SNP TSC0024273
gagagaaagaatg

SEQ ID NO: 97708 - DNA, 13 bp, Artificial Sequence
  Oligonucleotide for detection of SNP TSC0024273
cattctttctctc

SEQ ID NO: 97709 - DNA, 13 bp, Artificial Sequence
  Oligonucleotide for detection of SNP TSC0024277
tagattaaattgy

SEQ ID NO: 97710 - DNA, 13 bp, Artificial Sequence
  Oligonucleotide for detection of SNP TSC0024277
rcaatttaatcta

SEQ ID NO: 97711 - DNA, 13 bp, Artificial Sequence
  Oligonucleotide for detection of SNP TSC0024277
tagatttaattgy

SEQ ID NO: 97712 - DNA, 13 bp, Artificial Sequence
  Oligonucleotide for detection of SNP TSC0024277
rcaattaaatcta

SEQ ID NO: 97713 - DNA, 13 bp, Artificial Sequence
  Oligonucleotide for detection of SNP TSC0024277
gtagtttagtttg

SEQ ID NO: 97714 - DNA, 13 bp, Artificial Sequence
  Oligonucleotide for detection of SNP TSC0024277
caaactaaactac

SEQ ID NO: 97715 - DNA, 13 bp, Artificial Sequence
  Oligonucleotide for detection of SNP TSC0024277
gtagttgagtttg

SEQ ID NO: 97716 - DNA, 13 bp, Artificial Sequence
  Oligonucleotide for detection of SNP TSC0024277
caaactcaactac

SEQ ID NO: 97717 - DNA, 13 bp, Artificial Sequence
  Oligonucleotide for detection of SNP TSC0024278
ggtaggggaattt

SEQ ID NO: 97718 - DNA, 13 bp, Artificial Sequence
  Oligonucleotide for detection of SNP TSC0024278
aaattcccctacc

SEQ ID NO: 97719 - DNA, 13 bp, Artificial Sequence
  Oligonucleotide for detection of SNP TSC0024278
ggtaggtgaattt

SEQ ID NO: 97720 - DNA, 13 bp, Artificial Sequence
  Oligonucleotide for detection of SNP TSC0024278
aaattcacctacc

SEQ ID NO: 97721 - DNA, 13 bp, Artificial Sequence
  Oligonucleotide for detection of SNP TSC0024278
ggtaggcgaattt

SEQ ID NO: 97722 - DNA, 13 bp, Artificial Sequence
  Oligonucleotide for detection of SNP TSC0024278
aaattcgcctacc

SEQ ID NO: 97723 - DNA, 13 bp, Artificial Sequence
  Oligonucleotide for detection of SNP TSC0024279
agaaggtgaggta

SEQ ID NO: 97724 - DNA, 13 bp, Artificial Sequence
  Oligonucleotide for detection of SNP TSC0024279
tacctcaccttct

SEQ ID NO: 97725 - DNA, 13 bp, Artificial Sequence
  Oligonucleotide for detection of SNP TSC0024279
agaaggcgaggta

SEQ ID NO: 97726 - DNA, 13 bp, Artificial Sequence
  Oligonucleotide for detection of SNP TSC0024279
tacctcgccttct

SEQ ID NO: 97727 - DNA, 13 bp, Artificial Sequence
  Oligonucleotide for detection of SNP TSC0024280
tttgtgtggggaa

SEQ ID NO: 97728 - DNA, 13 bp, Artificial Sequence
  Oligonucleotide for detection of SNP TSC0024280
ttccccacacaaa

SEQ ID NO: 97729 - DNA, 13 bp, Artificial Sequence
  Oligonucleotide for detection of SNP TSC0024280
ttcgtgtggggaa

SEQ ID NO: 97730 - DNA, 13 bp, Artificial Sequence
  Oligonucleotide for detection of SNP TSC0024280
ttccccacacgaa

SEQ ID NO: 97731 - DNA, 13 bp, Artificial Sequence
  Oligonucleotide for detection of SNP TSC0024280
tttgtgcggggaa

SEQ ID NO: 97732 - DNA, 13 bp, Artificial Sequence
  Oligonucleotide for detection of SNP TSC0024280
ttccccgcacaaa

SEQ ID NO: 97733 - DNA, 13 bp, Artificial Sequence
  Oligonucleotide for detection of SNP TSC0024280
ttcgtgcggggaa

SEQ ID NO: 97734 - DNA, 13 bp, Artificial Sequence
  Oligonucleotide for detection of SNP TSC0024280
ttccccgcacgaa

SEQ ID NO: 97735 - DNA, 13 bp, Artificial Sequence
  Oligonucleotide for detection of SNP TSC0024280
ttttttgtatgaa

SEQ ID NO: 97736 - DNA, 13 bp, Artificial Sequence
  Oligonucleotide for detection of SNP TSC0024280
ttcatacaaaaaa

SEQ ID NO: 97737 - DNA, 13 bp, Artificial Sequence
  Oligonucleotide for detection of SNP TSC0024280
ttttttatatgaa

SEQ ID NO: 97738 - DNA, 13 bp, Artificial Sequence
  Oligonucleotide for detection of SNP TSC0024280
ttcatataaaaaa

SEQ ID NO: 97739 - DNA, 13 bp, Artificial Sequence
  Oligonucleotide for detection of SNP TSC0024280
tttttcgtatgaa

SEQ ID NO: 97740 - DNA, 13 bp, Artificial Sequence
  Oligonucleotide for detection of SNP TSC0024280
ttcatacgaaaaa

SEQ ID NO: 97741 - DNA, 13 bp, Artificial Sequence
  Oligonucleotide for detection of SNP TSC0024280
ttttttatacgaa

SEQ ID NO: 97742 - DNA, 13 bp, Artificial Sequence
  Oligonucleotide for detection of SNP TSC0024280
ttcgtataaaaaa

SEQ ID NO: 97743 - DNA, 13 bp, Artificial Sequence
  Oligonucleotide for detection of SNP TSC0024280
ttttttgtacgaa

SEQ ID NO: 97744 - DNA, 13 bp, Artificial Sequence
  Oligonucleotide for detection of SNP TSC0024280
ttcgtacaaaaaa

SEQ ID NO: 97745 - DNA, 13 bp, Artificial Sequence
  Oligonucleotide for detection of SNP TSC0024280
tttttcgtacgaa

SEQ ID NO: 97746 - DNA, 13 bp, Artificial Sequence
  Oligonucleotide for detection of SNP TSC0024280
ttcgtacgaaaaa

SEQ ID NO: 97747 - DNA, 13 bp, Artificial Sequence
  Oligonucleotide for detection of SNP TSC0024281
ggtttagttttag

SEQ ID NO: 97748 - DNA, 13 bp, Artificial Sequence
  Oligonucleotide for detection of SNP TSC0024281
ctaaaactaaacc

SEQ ID NO: 97749 - DNA, 13 bp, Artificial Sequence
  Oligonucleotide for detection of SNP TSC0024281
ggtttaattttag

SEQ ID NO: 97750 - DNA, 13 bp, Artificial Sequence
  Oligonucleotide for detection of SNP TSC0024281
ctaaaattaaacc

SEQ ID NO: 97751 - DNA, 13 bp, Artificial Sequence
  Oligonucleotide for detection of SNP TSC0024283
atttttggggtty

SEQ ID NO: 97752 - DNA, 13 bp, Artificial Sequence
  Oligonucleotide for detection of SNP TSC0024283
raaccccaaaaat

SEQ ID NO: 97753 - DNA, 13 bp, Artificial Sequence
  Oligonucleotide for detection of SNP TSC0024283
atttttagggtty

SEQ ID NO: 97754 - DNA, 13 bp, Artificial Sequence
  Oligonucleotide for detection of SNP TSC0024283
raaccctaaaaat

SEQ ID NO: 97755 - DNA, 13 bp, Artificial Sequence
  Oligonucleotide for detection of SNP TSC0024284
aggtaatggttag

SEQ ID NO: 97756 - DNA, 13 bp, Artificial Sequence
  Oligonucleotide for detection of SNP TSC0024284
ctaaccattacct

SEQ ID NO: 97757 - DNA, 13 bp, Artificial Sequence
  Oligonucleotide for detection of SNP TSC0024284
aggtaacggttag

SEQ ID NO: 97758 - DNA, 13 bp, Artificial Sequence
  Oligonucleotide for detection of SNP TSC0024284
ctaaccgttacct

SEQ ID NO: 97759 - DNA, 13 bp, Artificial Sequence
  Oligonucleotide for detection of SNP TSC0024284
ttgattgttgttt

SEQ ID NO: 97760 - DNA, 13 bp, Artificial Sequence
  Oligonucleotide for detection of SNP TSC0024284
aaacaacaatcaa

SEQ ID NO: 97761 - DNA, 13 bp, Artificial Sequence
  Oligonucleotide for detection of SNP TSC0024284
ttgattattgttt

SEQ ID NO: 97762 - DNA, 13 bp, Artificial Sequence
  Oligonucleotide for detection of SNP TSC0024284
aaacaataatcaa

SEQ ID NO: 97763 - DNA, 13 bp, Artificial Sequence
  Oligonucleotide for detection of SNP TSC0024284
ttgatcgttgttt

SEQ ID NO: 97764 - DNA, 13 bp, Artificial Sequence
  Oligonucleotide for detection of SNP TSC0024284
aaacaacgatcaa

SEQ ID NO: 97765 - DNA, 13 bp, Artificial Sequence
  Oligonucleotide for detection of SNP TSC0024285
aattttttagtta

SEQ ID NO: 97766 - DNA, 13 bp, Artificial Sequence
  Oligonucleotide for detection of SNP TSC0024285
taactaaaaaatt

SEQ ID NO: 97767 - DNA, 13 bp, Artificial Sequence
  Oligonucleotide for detection of SNP TSC0024285
aattttgtagtta

SEQ ID NO: 97768 - DNA, 13 bp, Artificial Sequence
  Oligonucleotide for detection of SNP TSC0024285
taactacaaaatt

SEQ ID NO: 97769 - DNA, 13 bp, Artificial Sequence
  Oligonucleotide for detection of SNP TSC0024285
tggttagagaatt

SEQ ID NO: 97770 - DNA, 13 bp, Artificial Sequence
  Oligonucleotide for detection of SNP TSC0024285
aattctctaacca

SEQ ID NO: 97771 - DNA, 13 bp, Artificial Sequence
  Oligonucleotide for detection of SNP TSC0024285
tggttatagaatt

SEQ ID NO: 97772 - DNA, 13 bp, Artificial Sequence
  Oligonucleotide for detection of SNP TSC0024285
aattctataacca

SEQ ID NO: 97773 - DNA, 13 bp, Artificial Sequence
  Oligonucleotide for detection of SNP TSC0024286
gaataagatgtag

SEQ ID NO: 97774 - DNA, 13 bp, Artificial Sequence
  Oligonucleotide for detection of SNP TSC0024286
ctacatcttattc

SEQ ID NO: 97775 - DNA, 13 bp, Artificial Sequence
  Oligonucleotide for detection of SNP TSC0024286
gaataaaatgtag

SEQ ID NO: 97776 - DNA, 13 bp, Artificial Sequence
  Oligonucleotide for detection of SNP TSC0024286
ctacattttattc

SEQ ID NO: 97777 - DNA, 13 bp, Artificial Sequence
  Oligonucleotide for detection of SNP TSC0024287
gtaggaagagaaa

SEQ ID NO: 97778 - DNA, 13 bp, Artificial Sequence
  Oligonucleotide for detection of SNP TSC0024287
tttctcttcctac

SEQ ID NO: 97779 - DNA, 13 bp, Artificial Sequence
  Oligonucleotide for detection of SNP TSC0024287
gtaggaggagaaa

SEQ ID NO: 97780 - DNA, 13 bp, Artificial Sequence
  Oligonucleotide for detection of SNP TSC0024287
tttctcctcctac

SEQ ID NO: 97781 - DNA, 13 bp, Artificial Sequence
  Oligonucleotide for detection of SNP TSC0024288
gggtggaaggtaa

SEQ ID NO: 97782 - DNA, 13 bp, Artificial Sequence
  Oligonucleotide for detection of SNP TSC0024288
ttaccttccaccc

SEQ ID NO: 97783 - DNA, 13 bp, Artificial Sequence
  Oligonucleotide for detection of SNP TSC0024288
gggtgggaggtaa

SEQ ID NO: 97784 - DNA, 13 bp, Artificial Sequence
  Oligonucleotide for detection of SNP TSC0024288
ttacctcccaccc

SEQ ID NO: 97785 - DNA, 13 bp, Artificial Sequence
  Oligonucleotide for detection of SNP TSC0024289
tttatttgtggag

SEQ ID NO: 97786 - DNA, 13 bp, Artificial Sequence
  Oligonucleotide for detection of SNP TSC0024289
ctccacaaataaa

SEQ ID NO: 97787 - DNA, 13 bp, Artificial Sequence
  Oligonucleotide for detection of SNP TSC0024289
tttattcgtggag

SEQ ID NO: 97788 - DNA, 13 bp, Artificial Sequence
  Oligonucleotide for detection of SNP TSC0024289
ctccacgaataaa

SEQ ID NO: 97789 - DNA, 13 bp, Artificial Sequence
  Oligonucleotide for detection of SNP TSC0024289
ttttatgggtaag

SEQ ID NO: 97790 - DNA, 13 bp, Artificial Sequence
  Oligonucleotide for detection of SNP TSC0024289
cttacccataaaa

SEQ ID NO: 97791 - DNA, 13 bp, Artificial Sequence
  Oligonucleotide for detection of SNP TSC0024289
ttttataggtaag

SEQ ID NO: 97792 - DNA, 13 bp, Artificial Sequence
  Oligonucleotide for detection of SNP TSC0024289
cttacctataaaa

SEQ ID NO: 97793 - DNA, 13 bp, Artificial Sequence
  Oligonucleotide for detection of SNP TSC0024289
ttttacgggtaag

SEQ ID NO: 97794 - DNA, 13 bp, Artificial Sequence
  Oligonucleotide for detection of SNP TSC0024289
cttacccgtaaaa

SEQ ID NO: 97795 - DNA, 13 bp, Artificial Sequence
  Oligonucleotide for detection of SNP TSC0024292
gtgtaggttttay

SEQ ID NO: 97796 - DNA, 13 bp, Artificial Sequence
  Oligonucleotide for detection of SNP TSC0024292
rtaaaacctacac

SEQ ID NO: 97797 - DNA, 13 bp, Artificial Sequence
  Oligonucleotide for detection of SNP TSC0024292
gtgtagtttttay

SEQ ID NO: 97798 - DNA, 13 bp, Artificial Sequence
  Oligonucleotide for detection of SNP TSC0024292
rtaaaaactacac

SEQ ID NO: 97799 - DNA, 13 bp, Artificial Sequence
  Oligonucleotide for detection of SNP TSC0024292
gcgtaggttttay

SEQ ID NO: 97800 - DNA, 13 bp, Artificial Sequence
  Oligonucleotide for detection of SNP TSC0024292
rtaaaacctacgc

SEQ ID NO: 97801 - DNA, 13 bp, Artificial Sequence
  Oligonucleotide for detection of SNP TSC0024292
gcgtagtttttay

SEQ ID NO: 97802 - DNA, 13 bp, Artificial Sequence
  Oligonucleotide for detection of SNP TSC0024292
rtaaaaactacgc

SEQ ID NO: 97803 - DNA, 13 bp, Artificial Sequence
  Oligonucleotide for detection of SNP TSC0024292
gtggggtttgtgy

SEQ ID NO: 97804 - DNA, 13 bp, Artificial Sequence
  Oligonucleotide for detection of SNP TSC0024292
rcacaaaccccac

SEQ ID NO: 97805 - DNA, 13 bp, Artificial Sequence
  Oligonucleotide for detection of SNP TSC0024292
gtggggattgtgy

SEQ ID NO: 97806 - DNA, 13 bp, Artificial Sequence
  Oligonucleotide for detection of SNP TSC0024292
rcacaatccccac

SEQ ID NO: 97807 - DNA, 13 bp, Artificial Sequence
  Oligonucleotide for detection of SNP TSC0024292
gtggggtttgcgy

SEQ ID NO: 97808 - DNA, 13 bp, Artificial Sequence
  Oligonucleotide for detection of SNP TSC0024292
rcgcaaaccccac

SEQ ID NO: 97809 - DNA, 13 bp, Artificial Sequence
  Oligonucleotide for detection of SNP TSC0024292
gtggggattgcgy

SEQ ID NO: 97810 - DNA, 13 bp, Artificial Sequence
  Oligonucleotide for detection of SNP TSC0024292
rcgcaatccccac

SEQ ID NO: 97811 - DNA, 13 bp, Artificial Sequence
  Oligonucleotide for detection of SNP TSC0024293
agagagagtgtgt

SEQ ID NO: 97812 - DNA, 13 bp, Artificial Sequence
  Oligonucleotide for detection of SNP TSC0024293
acacactctctct

SEQ ID NO: 97813 - DNA, 13 bp, Artificial Sequence
  Oligonucleotide for detection of SNP TSC0024293
agagagtgtgtgt

SEQ ID NO: 97814 - DNA, 13 bp, Artificial Sequence
  Oligonucleotide for detection of SNP TSC0024293
acacacactctct

SEQ ID NO: 97815 - DNA, 13 bp, Artificial Sequence
  Oligonucleotide for detection of SNP TSC0024295
aagaagaaattgg

SEQ ID NO: 97816 - DNA, 13 bp, Artificial Sequence
  Oligonucleotide for detection of SNP TSC0024295
ccaatttcttctt

SEQ ID NO: 97817 - DNA, 13 bp, Artificial Sequence
  Oligonucleotide for detection of SNP TSC0024295
aagaagtaattgg

SEQ ID NO: 97818 - DNA, 13 bp, Artificial Sequence
  Oligonucleotide for detection of SNP TSC0024295
ccaattacttctt

SEQ ID NO: 97819 - DNA, 13 bp, Artificial Sequence
  Oligonucleotide for detection of SNP TSC0024295
ttagttttttttt

SEQ ID NO: 97820 - DNA, 13 bp, Artificial Sequence
  Oligonucleotide for detection of SNP TSC0024295
aaaaaaaaactaa

SEQ ID NO: 97821 - DNA, 13 bp, Artificial Sequence
  Oligonucleotide for detection of SNP TSC0024296
agaagtgatggta

SEQ ID NO: 97822 - DNA, 13 bp, Artificial Sequence
  Oligonucleotide for detection of SNP TSC0024296
taccatcacttct

SEQ ID NO: 97823 - DNA, 13 bp, Artificial Sequence
  Oligonucleotide for detection of SNP TSC0024296
agaagtaatggta

SEQ ID NO: 97824 - DNA, 13 bp, Artificial Sequence
  Oligonucleotide for detection of SNP TSC0024296
taccattacttct

SEQ ID NO: 97825 - DNA, 13 bp, Artificial Sequence
  Oligonucleotide for detection of SNP TSC0024296
agaagcgatggta

SEQ ID NO: 97826 - DNA, 13 bp, Artificial Sequence
  Oligonucleotide for detection of SNP TSC0024296
taccatcgcttct

SEQ ID NO: 97827 - DNA, 13 bp, Artificial Sequence
  Oligonucleotide for detection of SNP TSC0024298
gtttatgtgtgty

SEQ ID NO: 97828 - DNA, 13 bp, Artificial Sequence
  Oligonucleotide for detection of SNP TSC0024298
racacacataaac

SEQ ID NO: 97829 - DNA, 13 bp, Artificial Sequence
  Oligonucleotide for detection of SNP TSC0024298
gtttatacgtgty

SEQ ID NO: 97830 - DNA, 13 bp, Artificial Sequence
  Oligonucleotide for detection of SNP TSC0024298
racacgtataaac

SEQ ID NO: 97831 - DNA, 13 bp, Artificial Sequence
  Oligonucleotide for detection of SNP TSC0024298
gtttacgtgtgty

SEQ ID NO: 97832 - DNA, 13 bp, Artificial Sequence
  Oligonucleotide for detection of SNP TSC0024298
racacacgtaaac

SEQ ID NO: 97833 - DNA, 13 bp, Artificial Sequence
  Oligonucleotide for detection of SNP TSC0024298
gtttatgcgtgty

SEQ ID NO: 97834 - DNA, 13 bp, Artificial Sequence
  Oligonucleotide for detection of SNP TSC0024298
racacgcataaac

SEQ ID NO: 97835 - DNA, 13 bp, Artificial Sequence
  Oligonucleotide for detection of SNP TSC0024298
gtttacgcgtgty

SEQ ID NO: 97836 - DNA, 13 bp, Artificial Sequence
  Oligonucleotide for detection of SNP TSC0024298
racacgcgtaaac

SEQ ID NO: 97837 - DNA, 13 bp, Artificial Sequence
  Oligonucleotide for detection of SNP TSC0024298
gatatgtgtgggy

SEQ ID NO: 97838 - DNA, 13 bp, Artificial Sequence
  Oligonucleotide for detection of SNP TSC0024298
rcccacacatatc

SEQ ID NO: 97839 - DNA, 13 bp, Artificial Sequence
  Oligonucleotide for detection of SNP TSC0024298
gatacgtgtgggy

SEQ ID NO: 97840 - DNA, 13 bp, Artificial Sequence
  Oligonucleotide for detection of SNP TSC0024298
rcccacacgtatc

SEQ ID NO: 97841 - DNA, 13 bp, Artificial Sequence
  Oligonucleotide for detection of SNP TSC0024298
gatatgcgtgggy

SEQ ID NO: 97842 - DNA, 13 bp, Artificial Sequence
  Oligonucleotide for detection of SNP TSC0024298
rcccacgcatatc

SEQ ID NO: 97843 - DNA, 13 bp, Artificial Sequence
  Oligonucleotide for detection of SNP TSC0024298
gatacgcgtgggy

SEQ ID NO: 97844 - DNA, 13 bp, Artificial Sequence
  Oligonucleotide for detection of SNP TSC0024298
rcccacgcgtatc

SEQ ID NO: 97845 - DNA, 13 bp, Artificial Sequence
  Oligonucleotide for detection of SNP TSC0024299
ttttgttgtgtga

SEQ ID NO: 97846 - DNA, 13 bp, Artificial Sequence
  Oligonucleotide for detection of SNP TSC0024299
tcacacaacaaaa

SEQ ID NO: 97847 - DNA, 13 bp, Artificial Sequence
  Oligonucleotide for detection of SNP TSC0024299
ttttgtcgtgtga

SEQ ID NO: 97848 - DNA, 13 bp, Artificial Sequence
  Oligonucleotide for detection of SNP TSC0024299
tcacacgacaaaa

SEQ ID NO: 97849 - DNA, 13 bp, Artificial Sequence
  Oligonucleotide for detection of SNP TSC0024299
ttttgttgcgtga

SEQ ID NO: 97850 - DNA, 13 bp, Artificial Sequence
  Oligonucleotide for detection of SNP TSC0024299
tcacgcaacaaaa

SEQ ID NO: 97851 - DNA, 13 bp, Artificial Sequence
  Oligonucleotide for detection of SNP TSC0024299
ttttgtcgcgtga

SEQ ID NO: 97852 - DNA, 13 bp, Artificial Sequence
  Oligonucleotide for detection of SNP TSC0024299
tcacgcgacaaaa

SEQ ID NO: 97853 - DNA, 13 bp, Artificial Sequence
  Oligonucleotide for detection of SNP TSC0024299
ttatgtggtagga

SEQ ID NO: 97854 - DNA, 13 bp, Artificial Sequence
  Oligonucleotide for detection of SNP TSC0024299
tcctaccacataa

SEQ ID NO: 97855 - DNA, 13 bp, Artificial Sequence
  Oligonucleotide for detection of SNP TSC0024299
ttatgtagtagga

SEQ ID NO: 97856 - DNA, 13 bp, Artificial Sequence
  Oligonucleotide for detection of SNP TSC0024299
tcctactacataa

SEQ ID NO: 97857 - DNA, 13 bp, Artificial Sequence
  Oligonucleotide for detection of SNP TSC0024299
ttacgtggtagga

SEQ ID NO: 97858 - DNA, 13 bp, Artificial Sequence
  Oligonucleotide for detection of SNP TSC0024299
tcctaccacgtaa

SEQ ID NO: 97859 - DNA, 13 bp, Artificial Sequence
  Oligonucleotide for detection of SNP TSC0024299
ttacgtagtagga

SEQ ID NO: 97860 - DNA, 13 bp, Artificial Sequence
  Oligonucleotide for detection of SNP TSC0024299
tcctactacgtaa

SEQ ID NO: 97861 - DNA, 13 bp, Artificial Sequence
  Oligonucleotide for detection of SNP TSC0024299
ttatgcggtagga

SEQ ID NO: 97862 - DNA, 13 bp, Artificial Sequence
  Oligonucleotide for detection of SNP TSC0024299
tcctaccgcataa

SEQ ID NO: 97863 - DNA, 13 bp, Artificial Sequence
  Oligonucleotide for detection of SNP TSC0024299
ttacgcggtagga

SEQ ID NO: 97864 - DNA, 13 bp, Artificial Sequence
  Oligonucleotide for detection of SNP TSC0024299
tcctaccgcgtaa

SEQ ID NO: 97865 - DNA, 13 bp, Artificial Sequence
  Oligonucleotide for detection of SNP TSC0024301
ttttttatttagy

SEQ ID NO: 97866 - DNA, 13 bp, Artificial Sequence
  Oligonucleotide for detection of SNP TSC0024301
rctaaataaaaaa

SEQ ID NO: 97867 - DNA, 13 bp, Artificial Sequence
  Oligonucleotide for detection of SNP TSC0024301
ttttttttttagy

SEQ ID NO: 97868 - DNA, 13 bp, Artificial Sequence
  Oligonucleotide for detection of SNP TSC0024301
rctaaaaaaaaaa

SEQ ID NO: 97869 - DNA, 13 bp, Artificial Sequence
  Oligonucleotide for detection of SNP TSC0024301
gttgggtgaagag

SEQ ID NO: 97870 - DNA, 13 bp, Artificial Sequence
  Oligonucleotide for detection of SNP TSC0024301
ctcttcacccaac

SEQ ID NO: 97871 - DNA, 13 bp, Artificial Sequence
  Oligonucleotide for detection of SNP TSC0024301
gttgggggaagag

SEQ ID NO: 97872 - DNA, 13 bp, Artificial Sequence
  Oligonucleotide for detection of SNP TSC0024301
ctcttcccccaac

SEQ ID NO: 97873 - DNA, 13 bp, Artificial Sequence
  Oligonucleotide for detection of SNP TSC0024306
tttgggatgtatg

SEQ ID NO: 97874 - DNA, 13 bp, Artificial Sequence
  Oligonucleotide for detection of SNP TSC0024306
catacatcccaaa

SEQ ID NO: 97875 - DNA, 13 bp, Artificial Sequence
  Oligonucleotide for detection of SNP TSC0024306
tttgggttgtatg

SEQ ID NO: 97876 - DNA, 13 bp, Artificial Sequence
  Oligonucleotide for detection of SNP TSC0024306
catacaacccaaa

SEQ ID NO: 97877 - DNA, 13 bp, Artificial Sequence
  Oligonucleotide for detection of SNP TSC0024306
tatatattttaga

SEQ ID NO: 97878 - DNA, 13 bp, Artificial Sequence
  Oligonucleotide for detection of SNP TSC0024306
tctaaaatatata

SEQ ID NO: 97879 - DNA, 13 bp, Artificial Sequence
  Oligonucleotide for detection of SNP TSC0024306
tatatagtttaga

SEQ ID NO: 97880 - DNA, 13 bp, Artificial Sequence
  Oligonucleotide for detection of SNP TSC0024306
tctaaactatata

SEQ ID NO: 97881 - DNA, 13 bp, Artificial Sequence
  Oligonucleotide for detection of SNP TSC0024307
attatatgtaagt

SEQ ID NO: 97882 - DNA, 13 bp, Artificial Sequence
  Oligonucleotide for detection of SNP TSC0024307
acttacatataat

SEQ ID NO: 97883 - DNA, 13 bp, Artificial Sequence
  Oligonucleotide for detection of SNP TSC0024307
attatacgtaagt

SEQ ID NO: 97884 - DNA, 13 bp, Artificial Sequence
  Oligonucleotide for detection of SNP TSC0024307
acttacgtataat

SEQ ID NO: 97885 - DNA, 13 bp, Artificial Sequence
  Oligonucleotide for detection of SNP TSC0024307
atttgtgtatggt

SEQ ID NO: 97886 - DNA, 13 bp, Artificial Sequence
  Oligonucleotide for detection of SNP TSC0024307
accatacacaaat

SEQ ID NO: 97887 - DNA, 13 bp, Artificial Sequence
  Oligonucleotide for detection of SNP TSC0024307
atttgtatatggt

SEQ ID NO: 97888 - DNA, 13 bp, Artificial Sequence
  Oligonucleotide for detection of SNP TSC0024307
accatatacaaat

SEQ ID NO: 97889 - DNA, 13 bp, Artificial Sequence
  Oligonucleotide for detection of SNP TSC0024307
atttgcgtatggt

SEQ ID NO: 97890 - DNA, 13 bp, Artificial Sequence
  Oligonucleotide for detection of SNP TSC0024307
accatacgcaaat

SEQ ID NO: 97891 - DNA, 13 bp, Artificial Sequence
  Oligonucleotide for detection of SNP TSC0024311
tgtataagaatat

SEQ ID NO: 97892 - DNA, 13 bp, Artificial Sequence
  Oligonucleotide for detection of SNP TSC0024311
atattcttataca

SEQ ID NO: 97893 - DNA, 13 bp, Artificial Sequence
  Oligonucleotide for detection of SNP TSC0024311
tgtataggaatat

SEQ ID NO: 97894 - DNA, 13 bp, Artificial Sequence
  Oligonucleotide for detection of SNP TSC0024311
atattcctataca

SEQ ID NO: 97895 - DNA, 13 bp, Artificial Sequence
  Oligonucleotide for detection of SNP TSC0024312
gttagtatgtttt

SEQ ID NO: 97896 - DNA, 13 bp, Artificial Sequence
  Oligonucleotide for detection of SNP TSC0024312
aaaacatactaac

SEQ ID NO: 97897 - DNA, 13 bp, Artificial Sequence
  Oligonucleotide for detection of SNP TSC0024312
gttagtgtgtttt

SEQ ID NO: 97898 - DNA, 13 bp, Artificial Sequence
  Oligonucleotide for detection of SNP TSC0024312
aaaacacactaac

SEQ ID NO: 97899 - DNA, 13 bp, Artificial Sequence
  Oligonucleotide for detection of SNP TSC0024314
agggaggaaggaa

SEQ ID NO: 97900 - DNA, 13 bp, Artificial Sequence
  Oligonucleotide for detection of SNP TSC0024314
ttccttcctccct

SEQ ID NO: 97901 - DNA, 13 bp, Artificial Sequence
  Oligonucleotide for detection of SNP TSC0024314
agggagtaaggaa

SEQ ID NO: 97902 - DNA, 13 bp, Artificial Sequence
  Oligonucleotide for detection of SNP TSC0024314
ttccttactccct

SEQ ID NO: 97903 - DNA, 13 bp, Artificial Sequence
  Oligonucleotide for detection of SNP TSC0024315
gagtagtggagtt

SEQ ID NO: 97904 - DNA, 13 bp, Artificial Sequence
  Oligonucleotide for detection of SNP TSC0024315
aactccactactc

SEQ ID NO: 97905 - DNA, 13 bp, Artificial Sequence
  Oligonucleotide for detection of SNP TSC0024315
gagtagcggagtt

SEQ ID NO: 97906 - DNA, 13 bp, Artificial Sequence
  Oligonucleotide for detection of SNP TSC0024315
aactccgctactc

SEQ ID NO: 97907 - DNA, 13 bp, Artificial Sequence
  Oligonucleotide for detection of SNP TSC0024315
agttttgttgtty

SEQ ID NO: 97908 - DNA, 13 bp, Artificial Sequence
  Oligonucleotide for detection of SNP TSC0024315
raacaacaaaact

SEQ ID NO: 97909 - DNA, 13 bp, Artificial Sequence
  Oligonucleotide for detection of SNP TSC0024315
agttttattgtty

SEQ ID NO: 97910 - DNA, 13 bp, Artificial Sequence
  Oligonucleotide for detection of SNP TSC0024315
raacaataaaact

SEQ ID NO: 97911 - DNA, 13 bp, Artificial Sequence
  Oligonucleotide for detection of SNP TSC0024315
agtttcgttgtty

SEQ ID NO: 97912 - DNA, 13 bp, Artificial Sequence
  Oligonucleotide for detection of SNP TSC0024315
raacaacgaaact

SEQ ID NO: 97913 - DNA, 13 bp, Artificial Sequence
  Oligonucleotide for detection of SNP TSC0024316
ttttgtgttagat

SEQ ID NO: 97914 - DNA, 13 bp, Artificial Sequence
  Oligonucleotide for detection of SNP TSC0024316
atctaacacaaaa

SEQ ID NO: 97915 - DNA, 13 bp, Artificial Sequence
  Oligonucleotide for detection of SNP TSC0024316
ttttgtattagat

SEQ ID NO: 97916 - DNA, 13 bp, Artificial Sequence
  Oligonucleotide for detection of SNP TSC0024316
atctaatacaaaa

SEQ ID NO: 97917 - DNA, 13 bp, Artificial Sequence
  Oligonucleotide for detection of SNP TSC0024319
tttgttgtaagtg

SEQ ID NO: 97918 - DNA, 13 bp, Artificial Sequence
  Oligonucleotide for detection of SNP TSC0024319
cacttacaacaaa

SEQ ID NO: 97919 - DNA, 13 bp, Artificial Sequence
  Oligonucleotide for detection of SNP TSC0024319
tttgttataagtg

SEQ ID NO: 97920 - DNA, 13 bp, Artificial Sequence
  Oligonucleotide for detection of SNP TSC0024319
cacttataacaaa

SEQ ID NO: 97921 - DNA, 13 bp, Artificial Sequence
  Oligonucleotide for detection of SNP TSC0024322
agatattgtgttt

SEQ ID NO: 97922 - DNA, 13 bp, Artificial Sequence
  Oligonucleotide for detection of SNP TSC0024322
aaacacaatatct

SEQ ID NO: 97923 - DNA, 13 bp, Artificial Sequence
  Oligonucleotide for detection of SNP TSC0024322
agatatcgtgttt

SEQ ID NO: 97924 - DNA, 13 bp, Artificial Sequence
  Oligonucleotide for detection of SNP TSC0024322
aaacacgatatct

SEQ ID NO: 97925 - DNA, 13 bp, Artificial Sequence
  Oligonucleotide for detection of SNP TSC0024322
agatatgatgttt

SEQ ID NO: 97926 - DNA, 13 bp, Artificial Sequence
  Oligonucleotide for detection of SNP TSC0024322
aaacatcatatct

SEQ ID NO: 97927 - DNA, 13 bp, Artificial Sequence
  Oligonucleotide for detection of SNP TSC0024322
agatataatgttt

SEQ ID NO: 97928 - DNA, 13 bp, Artificial Sequence
  Oligonucleotide for detection of SNP TSC0024322
aaacattatatct

SEQ ID NO: 97929 - DNA, 13 bp, Artificial Sequence
  Oligonucleotide for detection of SNP TSC0024322
agatacgatgttt

SEQ ID NO: 97930 - DNA, 13 bp, Artificial Sequence
  Oligonucleotide for detection of SNP TSC0024322
aaacatcgtatct

SEQ ID NO: 97931 - DNA, 13 bp, Artificial Sequence
  Oligonucleotide for detection of SNP TSC0024323
aggatggttttga

SEQ ID NO: 97932 - DNA, 13 bp, Artificial Sequence
  Oligonucleotide for detection of SNP TSC0024323
tcaaaaccatcct

SEQ ID NO: 97933 - DNA, 13 bp, Artificial Sequence
  Oligonucleotide for detection of SNP TSC0024323
aggatgtttttga

SEQ ID NO: 97934 - DNA, 13 bp, Artificial Sequence
  Oligonucleotide for detection of SNP TSC0024323
tcaaaaacatcct

SEQ ID NO: 97935 - DNA, 13 bp, Artificial Sequence
  Oligonucleotide for detection of SNP TSC0024323
ttaagattatttt

SEQ ID NO: 97936 - DNA, 13 bp, Artificial Sequence
  Oligonucleotide for detection of SNP TSC0024323
aaaataatcttaa

SEQ ID NO: 97937 - DNA, 13 bp, Artificial Sequence
  Oligonucleotide for detection of SNP TSC0024323
ttaagaatatttt

SEQ ID NO: 97938 - DNA, 13 bp, Artificial Sequence
  Oligonucleotide for detection of SNP TSC0024323
aaaatattcttaa

SEQ ID NO: 97939 - DNA, 13 bp, Artificial Sequence
  Oligonucleotide for detection of SNP TSC0024324
atgagtatttatt

SEQ ID NO: 97940 - DNA, 13 bp, Artificial Sequence
  Oligonucleotide for detection of SNP TSC0024324
aataaatactcat

SEQ ID NO: 97941 - DNA, 13 bp, Artificial Sequence
  Oligonucleotide for detection of SNP TSC0024324
atgagtttttatt

SEQ ID NO: 97942 - DNA, 13 bp, Artificial Sequence
  Oligonucleotide for detection of SNP TSC0024324
aataaaaactcat

SEQ ID NO: 97943 - DNA, 13 bp, Artificial Sequence
  Oligonucleotide for detection of SNP TSC0024324
acgagtatttatt

SEQ ID NO: 97944 - DNA, 13 bp, Artificial Sequence
  Oligonucleotide for detection of SNP TSC0024324
aataaatactcgt

SEQ ID NO: 97945 - DNA, 13 bp, Artificial Sequence
  Oligonucleotide for detection of SNP TSC0024324
acgagtttttatt

SEQ ID NO: 97946 - DNA, 13 bp, Artificial Sequence
  Oligonucleotide for detection of SNP TSC0024324
aataaaaactcgt

SEQ ID NO: 97947 - DNA, 13 bp, Artificial Sequence
  Oligonucleotide for detection of SNP TSC0024324
agtaaatgtttgt

SEQ ID NO: 97948 - DNA, 13 bp, Artificial Sequence
  Oligonucleotide for detection of SNP TSC0024324
acaaacatttact

SEQ ID NO: 97949 - DNA, 13 bp, Artificial Sequence
  Oligonucleotide for detection of SNP TSC0024324
agtaaaggtttgt

SEQ ID NO: 97950 - DNA, 13 bp, Artificial Sequence
  Oligonucleotide for detection of SNP TSC0024324
acaaacctttact

SEQ ID NO: 97951 - DNA, 13 bp, Artificial Sequence
  Oligonucleotide for detection of SNP TSC0024324
agtaaatgttcgt

SEQ ID NO: 97952 - DNA, 13 bp, Artificial Sequence
  Oligonucleotide for detection of SNP TSC0024324
acgaacatttact

SEQ ID NO: 97953 - DNA, 13 bp, Artificial Sequence
  Oligonucleotide for detection of SNP TSC0024324
agtaaaggttcgt

SEQ ID NO: 97954 - DNA, 13 bp, Artificial Sequence
  Oligonucleotide for detection of SNP TSC0024324
acgaacctttact

SEQ ID NO: 97955 - DNA, 13 bp, Artificial Sequence
  Oligonucleotide for detection of SNP TSC0024326
tatgtgttttatt

SEQ ID NO: 97956 - DNA, 13 bp, Artificial Sequence
  Oligonucleotide for detection of SNP TSC0024326
aataaaacacata

SEQ ID NO: 97957 - DNA, 13 bp, Artificial Sequence
  Oligonucleotide for detection of SNP TSC0024326
tatgtggtttatt

SEQ ID NO: 97958 - DNA, 13 bp, Artificial Sequence
  Oligonucleotide for detection of SNP TSC0024326
aataaaccacata

SEQ ID NO: 97959 - DNA, 13 bp, Artificial Sequence
  Oligonucleotide for detection of SNP TSC0024326
agtgaggtatatg

SEQ ID NO: 97960 - DNA, 13 bp, Artificial Sequence
  Oligonucleotide for detection of SNP TSC0024326
catatacctcact

SEQ ID NO: 97961 - DNA, 13 bp, Artificial Sequence
  Oligonucleotide for detection of SNP TSC0024326
agtgagttatatg

SEQ ID NO: 97962 - DNA, 13 bp, Artificial Sequence
  Oligonucleotide for detection of SNP TSC0024326
catataactcact

SEQ ID NO: 97963 - DNA, 13 bp, Artificial Sequence
  Oligonucleotide for detection of SNP TSC0024328
tttagaaagtttt

SEQ ID NO: 97964 - DNA, 13 bp, Artificial Sequence
  Oligonucleotide for detection of SNP TSC0024328
aaaactttctaaa

SEQ ID NO: 97965 - DNA, 13 bp, Artificial Sequence
  Oligonucleotide for detection of SNP TSC0024331
atttatagaagtg

SEQ ID NO: 97966 - DNA, 13 bp, Artificial Sequence
  Oligonucleotide for detection of SNP TSC0024331
cacttctataaat

SEQ ID NO: 97967 - DNA, 13 bp, Artificial Sequence
  Oligonucleotide for detection of SNP TSC0024331
atttatggaagtg

SEQ ID NO: 97968 - DNA, 13 bp, Artificial Sequence
  Oligonucleotide for detection of SNP TSC0024331
cacttccataaat

SEQ ID NO: 97969 - DNA, 13 bp, Artificial Sequence
  Oligonucleotide for detection of SNP TSC0024331
atttacggaagtg

SEQ ID NO: 97970 - DNA, 13 bp, Artificial Sequence
  Oligonucleotide for detection of SNP TSC0024331
cacttccgtaaat

SEQ ID NO: 97971 - DNA, 13 bp, Artificial Sequence
  Oligonucleotide for detection of SNP TSC0024331
tatttttgtaggt

SEQ ID NO: 97972 - DNA, 13 bp, Artificial Sequence
  Oligonucleotide for detection of SNP TSC0024331
acctacaaaaata

SEQ ID NO: 97973 - DNA, 13 bp, Artificial Sequence
  Oligonucleotide for detection of SNP TSC0024331
tattttcgtaggt

SEQ ID NO: 97974 - DNA, 13 bp, Artificial Sequence
  Oligonucleotide for detection of SNP TSC0024331
acctacgaaaata

SEQ ID NO: 97975 - DNA, 13 bp, Artificial Sequence
  Oligonucleotide for detection of SNP TSC0024332
tttttatatttat

SEQ ID NO: 97976 - DNA, 13 bp, Artificial Sequence
  Oligonucleotide for detection of SNP TSC0024332
ataaatataaaaa

SEQ ID NO: 97977 - DNA, 13 bp, Artificial Sequence
  Oligonucleotide for detection of SNP TSC0024332
ataggtttaaaaa

SEQ ID NO: 97978 - DNA, 13 bp, Artificial Sequence
  Oligonucleotide for detection of SNP TSC0024332
tttttaaacctat

SEQ ID NO: 97979 - DNA, 13 bp, Artificial Sequence
  Oligonucleotide for detection of SNP TSC0024332
ataggtgtaaaaa

SEQ ID NO: 97980 - DNA, 13 bp, Artificial Sequence
  Oligonucleotide for detection of SNP TSC0024332
tttttacacctat

SEQ ID NO: 97981 - DNA, 13 bp, Artificial Sequence
  Oligonucleotide for detection of SNP TSC0024335
taagtgagtattg

SEQ ID NO: 97982 - DNA, 13 bp, Artificial Sequence
  Oligonucleotide for detection of SNP TSC0024335
caatactcactta

SEQ ID NO: 97983 - DNA, 13 bp, Artificial Sequence
  Oligonucleotide for detection of SNP TSC0024335
taagtgggtattg

SEQ ID NO: 97984 - DNA, 13 bp, Artificial Sequence
  Oligonucleotide for detection of SNP TSC0024335
caatacccactta

SEQ ID NO: 97985 - DNA, 13 bp, Artificial Sequence
  Oligonucleotide for detection of SNP TSC0024337
taaaataaaatga

SEQ ID NO: 97986 - DNA, 13 bp, Artificial Sequence
  Oligonucleotide for detection of SNP TSC0024337
tcattttatttta

SEQ ID NO: 97987 - DNA, 13 bp, Artificial Sequence
  Oligonucleotide for detection of SNP TSC0024337
taaaatgaaatga

SEQ ID NO: 97988 - DNA, 13 bp, Artificial Sequence
  Oligonucleotide for detection of SNP TSC0024337
tcatttcatttta

SEQ ID NO: 97989 - DNA, 13 bp, Artificial Sequence
  Oligonucleotide for detection of SNP TSC0024337
taaaataaaacga

SEQ ID NO: 97990 - DNA, 13 bp, Artificial Sequence
  Oligonucleotide for detection of SNP TSC0024337
tcgttttatttta

SEQ ID NO: 97991 - DNA, 13 bp, Artificial Sequence
  Oligonucleotide for detection of SNP TSC0024337
taaaacgaaatga

SEQ ID NO: 97992 - DNA, 13 bp, Artificial Sequence
  Oligonucleotide for detection of SNP TSC0024337
tcatttcgtttta

SEQ ID NO: 97993 - DNA, 13 bp, Artificial Sequence
  Oligonucleotide for detection of SNP TSC0024337
taaaatgaaacga

SEQ ID NO: 97994 - DNA, 13 bp, Artificial Sequence
  Oligonucleotide for detection of SNP TSC0024337
tcgtttcatttta

SEQ ID NO: 97995 - DNA, 13 bp, Artificial Sequence
  Oligonucleotide for detection of SNP TSC0024337
taaaacgaaacga

SEQ ID NO: 97996 - DNA, 13 bp, Artificial Sequence
  Oligonucleotide for detection of SNP TSC0024337
tcgtttcgtttta

SEQ ID NO: 97997 - DNA, 13 bp, Artificial Sequence
  Oligonucleotide for detection of SNP TSC0024337
tcgttttgttttg

SEQ ID NO: 97998 - DNA, 13 bp, Artificial Sequence
  Oligonucleotide for detection of SNP TSC0024337
caaaacaaaacga

SEQ ID NO: 97999 - DNA, 13 bp, Artificial Sequence
  Oligonucleotide for detection of SNP TSC0024337
tcgtttcgttttg

SEQ ID NO: 98000 - DNA, 13 bp, Artificial Sequence
  Oligonucleotide for detection of SNP TSC0024337
caaaacgaaacga

SEQ ID NO: 98001 - DNA, 13 bp, Artificial Sequence
  Oligonucleotide for detection of SNP TSC0024339
tgtgttgggaagg

SEQ ID NO: 98002 - DNA, 13 bp, Artificial Sequence
  Oligonucleotide for detection of SNP TSC0024339
ccttcccaacaca

SEQ ID NO: 98003 - DNA, 13 bp, Artificial Sequence
  Oligonucleotide for detection of SNP TSC0024339
tgtgttaggaagg

SEQ ID NO: 98004 - DNA, 13 bp, Artificial Sequence
  Oligonucleotide for detection of SNP TSC0024339
ccttcctaacaca

SEQ ID NO: 98005 - DNA, 13 bp, Artificial Sequence
  Oligonucleotide for detection of SNP TSC0024339
cgtgttgggaagg

SEQ ID NO: 98006 - DNA, 13 bp, Artificial Sequence
  Oligonucleotide for detection of SNP TSC0024339
ccttcccaacacg

SEQ ID NO: 98007 - DNA, 13 bp, Artificial Sequence
  Oligonucleotide for detection of SNP TSC0024339
cgtgttaggaagg

SEQ ID NO: 98008 - DNA, 13 bp, Artificial Sequence
  Oligonucleotide for detection of SNP TSC0024339
ccttcctaacacg

SEQ ID NO: 98009 - DNA, 13 bp, Artificial Sequence
  Oligonucleotide for detection of SNP TSC0024340
ttagtgatagagy

SEQ ID NO: 98010 - DNA, 13 bp, Artificial Sequence
  Oligonucleotide for detection of SNP TSC0024340
rctctatcactaa

SEQ ID NO: 98011 - DNA, 13 bp, Artificial Sequence
  Oligonucleotide for detection of SNP TSC0024340
ttagtgttagagy

SEQ ID NO: 98012 - DNA, 13 bp, Artificial Sequence
  Oligonucleotide for detection of SNP TSC0024340
rctctaacactaa

SEQ ID NO: 98013 - DNA, 13 bp, Artificial Sequence
  Oligonucleotide for detection of SNP TSC0024340
ttagcgatagagy

SEQ ID NO: 98014 - DNA, 13 bp, Artificial Sequence
  Oligonucleotide for detection of SNP TSC0024340
rctctatcgctaa

SEQ ID NO: 98015 - DNA, 13 bp, Artificial Sequence
  Oligonucleotide for detection of SNP TSC0024340
ttagcgttagagy

SEQ ID NO: 98016 - DNA, 13 bp, Artificial Sequence
  Oligonucleotide for detection of SNP TSC0024340
rctctaacgctaa

SEQ ID NO: 98017 - DNA, 13 bp, Artificial Sequence
  Oligonucleotide for detection of SNP TSC0024340
gttttattgttgg

SEQ ID NO: 98018 - DNA, 13 bp, Artificial Sequence
  Oligonucleotide for detection of SNP TSC0024340
ccaacaataaaac

SEQ ID NO: 98019 - DNA, 13 bp, Artificial Sequence
  Oligonucleotide for detection of SNP TSC0024340
gttttatcgttgg

SEQ ID NO: 98020 - DNA, 13 bp, Artificial Sequence
  Oligonucleotide for detection of SNP TSC0024340
ccaacgataaaac

SEQ ID NO: 98021 - DNA, 13 bp, Artificial Sequence
  Oligonucleotide for detection of SNP TSC0024340
gttttagcgttgg

SEQ ID NO: 98022 - DNA, 13 bp, Artificial Sequence
  Oligonucleotide for detection of SNP TSC0024340
ccaacgctaaaac

SEQ ID NO: 98023 - DNA, 13 bp, Artificial Sequence
  Oligonucleotide for detection of SNP TSC0024341
ggaaggagggtgy

SEQ ID NO: 98024 - DNA, 13 bp, Artificial Sequence
  Oligonucleotide for detection of SNP TSC0024341
rcaccctccttcc

SEQ ID NO: 98025 - DNA, 13 bp, Artificial Sequence
  Oligonucleotide for detection of SNP TSC0024341
ggaaggggggtgy

SEQ ID NO: 98026 - DNA, 13 bp, Artificial Sequence
  Oligonucleotide for detection of SNP TSC0024341
rcaccccccttcc

SEQ ID NO: 98027 - DNA, 13 bp, Artificial Sequence
  Oligonucleotide for detection of SNP TSC0024341
ggaaggagggcgy

SEQ ID NO: 98028 - DNA, 13 bp, Artificial Sequence
  Oligonucleotide for detection of SNP TSC0024341
rcgccctccttcc

SEQ ID NO: 98029 - DNA, 13 bp, Artificial Sequence
  Oligonucleotide for detection of SNP TSC0024341
ggaaggggggcgy

SEQ ID NO: 98030 - DNA, 13 bp, Artificial Sequence
  Oligonucleotide for detection of SNP TSC0024341
rcgccccccttcc

SEQ ID NO: 98031 - DNA, 13 bp, Artificial Sequence
  Oligonucleotide for detection of SNP TSC0024345
tattgtaggagtg

SEQ ID NO: 98032 - DNA, 13 bp, Artificial Sequence
  Oligonucleotide for detection of SNP TSC0024345
cactcctacaata

SEQ ID NO: 98033 - DNA, 13 bp, Artificial Sequence
  Oligonucleotide for detection of SNP TSC0024345
tattgttggagtg

SEQ ID NO: 98034 - DNA, 13 bp, Artificial Sequence
  Oligonucleotide for detection of SNP TSC0024345
cactccaacaata

SEQ ID NO: 98035 - DNA, 13 bp, Artificial Sequence
  Oligonucleotide for detection of SNP TSC0024345
tattgtaggagcg

SEQ ID NO: 98036 - DNA, 13 bp, Artificial Sequence
  Oligonucleotide for detection of SNP TSC0024345
cgctcctacaata

SEQ ID NO: 98037 - DNA, 13 bp, Artificial Sequence
  Oligonucleotide for detection of SNP TSC0024345
tattgtcggagtg

SEQ ID NO: 98038 - DNA, 13 bp, Artificial Sequence
  Oligonucleotide for detection of SNP TSC0024345
cactccgacaata

SEQ ID NO: 98039 - DNA, 13 bp, Artificial Sequence
  Oligonucleotide for detection of SNP TSC0024345
tattgttggagcg

SEQ ID NO: 98040 - DNA, 13 bp, Artificial Sequence
  Oligonucleotide for detection of SNP TSC0024345
cgctccaacaata

SEQ ID NO: 98041 - DNA, 13 bp, Artificial Sequence
  Oligonucleotide for detection of SNP TSC0024345
tattgtcggagcg

SEQ ID NO: 98042 - DNA, 13 bp, Artificial Sequence
  Oligonucleotide for detection of SNP TSC0024345
cgctccgacaata

SEQ ID NO: 98043 - DNA, 13 bp, Artificial Sequence
  Oligonucleotide for detection of SNP TSC0024345
tgtttttgtaatg

SEQ ID NO: 98044 - DNA, 13 bp, Artificial Sequence
  Oligonucleotide for detection of SNP TSC0024345
cattacaaaaaca

SEQ ID NO: 98045 - DNA, 13 bp, Artificial Sequence
  Oligonucleotide for detection of SNP TSC0024345
tgttttggtaatg

SEQ ID NO: 98046 - DNA, 13 bp, Artificial Sequence
  Oligonucleotide for detection of SNP TSC0024345
cattaccaaaaca

SEQ ID NO: 98047 - DNA, 13 bp, Artificial Sequence
  Oligonucleotide for detection of SNP TSC0024345
cgtttttgtaatg

SEQ ID NO: 98048 - DNA, 13 bp, Artificial Sequence
  Oligonucleotide for detection of SNP TSC0024345
cattacaaaaacg

SEQ ID NO: 98049 - DNA, 13 bp, Artificial Sequence
  Oligonucleotide for detection of SNP TSC0024345
cgttttggtaatg

SEQ ID NO: 98050 - DNA, 13 bp, Artificial Sequence
  Oligonucleotide for detection of SNP TSC0024345
cattaccaaaacg

SEQ ID NO: 98051 - DNA, 13 bp, Artificial Sequence
  Oligonucleotide for detection of SNP TSC0024345
tgtttcggtaatg

SEQ ID NO: 98052 - DNA, 13 bp, Artificial Sequence
  Oligonucleotide for detection of SNP TSC0024345
cattaccgaaaca

SEQ ID NO: 98053 - DNA, 13 bp, Artificial Sequence
  Oligonucleotide for detection of SNP TSC0024345
cgtttcggtaatg

SEQ ID NO: 98054 - DNA, 13 bp, Artificial Sequence
  Oligonucleotide for detection of SNP TSC0024345
cattaccgaaacg

SEQ ID NO: 98055 - DNA, 13 bp, Artificial Sequence
  Oligonucleotide for detection of SNP TSC0024346
tgaaattggatga

SEQ ID NO: 98056 - DNA, 13 bp, Artificial Sequence
  Oligonucleotide for detection of SNP TSC0024346
tcatccaatttca

SEQ ID NO: 98057 - DNA, 13 bp, Artificial Sequence
  Oligonucleotide for detection of SNP TSC0024346
tgaaatcggatga

SEQ ID NO: 98058 - DNA, 13 bp, Artificial Sequence
  Oligonucleotide for detection of SNP TSC0024346
tcatccgatttca

SEQ ID NO: 98059 - DNA, 13 bp, Artificial Sequence
  Oligonucleotide for detection of SNP TSC0024346
ttatttggtttta

SEQ ID NO: 98060 - DNA, 13 bp, Artificial Sequence
  Oligonucleotide for detection of SNP TSC0024346
taaaaccaaataa

SEQ ID NO: 98061 - DNA, 13 bp, Artificial Sequence
  Oligonucleotide for detection of SNP TSC0024346
ttatttagtttta

SEQ ID NO: 98062 - DNA, 13 bp, Artificial Sequence
  Oligonucleotide for detection of SNP TSC0024346
taaaactaaataa

SEQ ID NO: 98063 - DNA, 13 bp, Artificial Sequence
  Oligonucleotide for detection of SNP TSC0024346
ttattcggtttta

SEQ ID NO: 98064 - DNA, 13 bp, Artificial Sequence
  Oligonucleotide for detection of SNP TSC0024346
taaaaccgaataa

SEQ ID NO: 98065 - DNA, 13 bp, Artificial Sequence
  Oligonucleotide for detection of SNP TSC0024351
tttttagtttgty

SEQ ID NO: 98066 - DNA, 13 bp, Artificial Sequence
  Oligonucleotide for detection of SNP TSC0024351
racaaactaaaaa

SEQ ID NO: 98067 - DNA, 13 bp, Artificial Sequence
  Oligonucleotide for detection of SNP TSC0024351
gatagagtagaga

SEQ ID NO: 98068 - DNA, 13 bp, Artificial Sequence
  Oligonucleotide for detection of SNP TSC0024351
tctctactctatc

SEQ ID NO: 98069 - DNA, 13 bp, Artificial Sequence
  Oligonucleotide for detection of SNP TSC0024351
gatagattagaga

SEQ ID NO: 98070 - DNA, 13 bp, Artificial Sequence
  Oligonucleotide for detection of SNP TSC0024351
tctctaatctatc

SEQ ID NO: 98071 - DNA, 13 bp, Artificial Sequence
  Oligonucleotide for detection of SNP TSC0024352
taaaaaggaagtt

SEQ ID NO: 98072 - DNA, 13 bp, Artificial Sequence
  Oligonucleotide for detection of SNP TSC0024352
aacttccttttta

SEQ ID NO: 98073 - DNA, 13 bp, Artificial Sequence
  Oligonucleotide for detection of SNP TSC0024352
taaaaatgaagtt

SEQ ID NO: 98074 - DNA, 13 bp, Artificial Sequence
  Oligonucleotide for detection of SNP TSC0024352
aacttcattttta

SEQ ID NO: 98075 - DNA, 13 bp, Artificial Sequence
  Oligonucleotide for detection of SNP TSC0024356
agtagtattttta

SEQ ID NO: 98076 - DNA, 13 bp, Artificial Sequence
  Oligonucleotide for detection of SNP TSC0024356
taaaaatactact

SEQ ID NO: 98077 - DNA, 13 bp, Artificial Sequence
  Oligonucleotide for detection of SNP TSC0024356
agtagtgttttta

SEQ ID NO: 98078 - DNA, 13 bp, Artificial Sequence
  Oligonucleotide for detection of SNP TSC0024356
taaaaacactact

SEQ ID NO: 98079 - DNA, 13 bp, Artificial Sequence
  Oligonucleotide for detection of SNP TSC0024356
agtagcgttttta

SEQ ID NO: 98080 - DNA, 13 bp, Artificial Sequence
  Oligonucleotide for detection of SNP TSC0024356
taaaaacgctact

SEQ ID NO: 98081 - DNA, 13 bp, Artificial Sequence
  Oligonucleotide for detection of SNP TSC0024356
tgaagatgttgtt

SEQ ID NO: 98082 - DNA, 13 bp, Artificial Sequence
  Oligonucleotide for detection of SNP TSC0024356
aacaacatcttca

SEQ ID NO: 98083 - DNA, 13 bp, Artificial Sequence
  Oligonucleotide for detection of SNP TSC0024356
tgaagacgttgtt

SEQ ID NO: 98084 - DNA, 13 bp, Artificial Sequence
  Oligonucleotide for detection of SNP TSC0024356
aacaacgtcttca

SEQ ID NO: 98085 - DNA, 13 bp, Artificial Sequence
  Oligonucleotide for detection of SNP TSC0024357
cgtgggttttagg

SEQ ID NO: 98086 - DNA, 13 bp, Artificial Sequence
  Oligonucleotide for detection of SNP TSC0024357
cctaaaacccacg

SEQ ID NO: 98087 - DNA, 13 bp, Artificial Sequence
  Oligonucleotide for detection of SNP TSC0024357
cgtggggtttagg

SEQ ID NO: 98088 - DNA, 13 bp, Artificial Sequence
  Oligonucleotide for detection of SNP TSC0024357
cctaaaccccacg

SEQ ID NO: 98089 - DNA, 13 bp, Artificial Sequence
  Oligonucleotide for detection of SNP TSC0024357
tgcgggttttagg

SEQ ID NO: 98090 - DNA, 13 bp, Artificial Sequence
  Oligonucleotide for detection of SNP TSC0024357
cctaaaacccgca

SEQ ID NO: 98091 - DNA, 13 bp, Artificial Sequence
  Oligonucleotide for detection of SNP TSC0024357
tgcggggtttagg

SEQ ID NO: 98092 - DNA, 13 bp, Artificial Sequence
  Oligonucleotide for detection of SNP TSC0024357
cctaaaccccgca

SEQ ID NO: 98093 - DNA, 13 bp, Artificial Sequence
  Oligonucleotide for detection of SNP TSC0024357
cgcgggttttagg

SEQ ID NO: 98094 - DNA, 13 bp, Artificial Sequence
  Oligonucleotide for detection of SNP TSC0024357
cctaaaacccgcg

SEQ ID NO: 98095 - DNA, 13 bp, Artificial Sequence
  Oligonucleotide for detection of SNP TSC0024357
cgcggggtttagg

SEQ ID NO: 98096 - DNA, 13 bp, Artificial Sequence
  Oligonucleotide for detection of SNP TSC0024357
cctaaaccccgcg

SEQ ID NO: 98097 - DNA, 13 bp, Artificial Sequence
  Oligonucleotide for detection of SNP TSC0024357
tttgaagtttgtg

SEQ ID NO: 98098 - DNA, 13 bp, Artificial Sequence
  Oligonucleotide for detection of SNP TSC0024357
cacaaacttcaaa

SEQ ID NO: 98099 - DNA, 13 bp, Artificial Sequence
  Oligonucleotide for detection of SNP TSC0024357
tttgaattttgtg

SEQ ID NO: 98100 - DNA, 13 bp, Artificial Sequence
  Oligonucleotide for detection of SNP TSC0024357
cacaaaattcaaa

SEQ ID NO: 98101 - DNA, 13 bp, Artificial Sequence
  Oligonucleotide for detection of SNP TSC0024357
tttgaagttcgtg

SEQ ID NO: 98102 - DNA, 13 bp, Artificial Sequence
  Oligonucleotide for detection of SNP TSC0024357
cacgaacttcaaa

SEQ ID NO: 98103 - DNA, 13 bp, Artificial Sequence
  Oligonucleotide for detection of SNP TSC0024357
tttgaatttcgtg

SEQ ID NO: 98104 - DNA, 13 bp, Artificial Sequence
  Oligonucleotide for detection of SNP TSC0024357
cacgaaattcaaa

SEQ ID NO: 98105 - DNA, 13 bp, Artificial Sequence
  Oligonucleotide for detection of SNP TSC0024357
tttgaagtttgcg

SEQ ID NO: 98106 - DNA, 13 bp, Artificial Sequence
  Oligonucleotide for detection of SNP TSC0024357
cgcaaacttcaaa

SEQ ID NO: 98107 - DNA, 13 bp, Artificial Sequence
  Oligonucleotide for detection of SNP TSC0024357
tttgaattttgcg

SEQ ID NO: 98108 - DNA, 13 bp, Artificial Sequence
  Oligonucleotide for detection of SNP TSC0024357
cgcaaaattcaaa

SEQ ID NO: 98109 - DNA, 13 bp, Artificial Sequence
  Oligonucleotide for detection of SNP TSC0024357
tttgaagttcgcg

SEQ ID NO: 98110 - DNA, 13 bp, Artificial Sequence
  Oligonucleotide for detection of SNP TSC0024357
cgcgaacttcaaa

SEQ ID NO: 98111 - DNA, 13 bp, Artificial Sequence
  Oligonucleotide for detection of SNP TSC0024357
tttgaatttcgcg

SEQ ID NO: 98112 - DNA, 13 bp, Artificial Sequence
  Oligonucleotide for detection of SNP TSC0024357
cgcgaaattcaaa

SEQ ID NO: 98113 - DNA, 13 bp, Artificial Sequence
  Oligonucleotide for detection of SNP TSC0024367
agttaggggggta

SEQ ID NO: 98114 - DNA, 13 bp, Artificial Sequence
  Oligonucleotide for detection of SNP TSC0024367
tacccccctaact

SEQ ID NO: 98115 - DNA, 13 bp, Artificial Sequence
  Oligonucleotide for detection of SNP TSC0024367
agttagtggggta

SEQ ID NO: 98116 - DNA, 13 bp, Artificial Sequence
  Oligonucleotide for detection of SNP TSC0024367
taccccactaact

SEQ ID NO: 98117 - DNA, 13 bp, Artificial Sequence
  Oligonucleotide for detection of SNP TSC0024367
tgtttttttgatt

SEQ ID NO: 98118 - DNA, 13 bp, Artificial Sequence
  Oligonucleotide for detection of SNP TSC0024367
aatcaaaaaaaca

SEQ ID NO: 98119 - DNA, 13 bp, Artificial Sequence
  Oligonucleotide for detection of SNP TSC0024367
tgttttattgatt

SEQ ID NO: 98120 - DNA, 13 bp, Artificial Sequence
  Oligonucleotide for detection of SNP TSC0024367
aatcaataaaaca

SEQ ID NO: 98121 - DNA, 13 bp, Artificial Sequence
  Oligonucleotide for detection of SNP TSC0024368
gttttgatgttat

SEQ ID NO: 98122 - DNA, 13 bp, Artificial Sequence
  Oligonucleotide for detection of SNP TSC0024368
ataacatcaaaac

SEQ ID NO: 98123 - DNA, 13 bp, Artificial Sequence
  Oligonucleotide for detection of SNP TSC0024368
gttttggtgttat

SEQ ID NO: 98124 - DNA, 13 bp, Artificial Sequence
  Oligonucleotide for detection of SNP TSC0024368
ataacaccaaaac

SEQ ID NO: 98125 - DNA, 13 bp, Artificial Sequence
  Oligonucleotide for detection of SNP TSC0024369
atttgagtgaatt

SEQ ID NO: 98126 - DNA, 13 bp, Artificial Sequence
  Oligonucleotide for detection of SNP TSC0024369
aattcactcaaat

SEQ ID NO: 98127 - DNA, 13 bp, Artificial Sequence
  Oligonucleotide for detection of SNP TSC0024369
atttgaatgaatt

SEQ ID NO: 98128 - DNA, 13 bp, Artificial Sequence
  Oligonucleotide for detection of SNP TSC0024369
aattcattcaaat

SEQ ID NO: 98129 - DNA, 13 bp, Artificial Sequence
  Oligonucleotide for detection of SNP TSC0024370
aatatagatatgt

SEQ ID NO: 98130 - DNA, 13 bp, Artificial Sequence
  Oligonucleotide for detection of SNP TSC0024370
acatatctatatt

SEQ ID NO: 98131 - DNA, 13 bp, Artificial Sequence
  Oligonucleotide for detection of SNP TSC0024370
aatatatatatgt

SEQ ID NO: 98132 - DNA, 13 bp, Artificial Sequence
  Oligonucleotide for detection of SNP TSC0024370
acatatatatatt

SEQ ID NO: 98133 - DNA, 13 bp, Artificial Sequence
  Oligonucleotide for detection of SNP TSC0024370
atatgtatgtatt

SEQ ID NO: 98134 - DNA, 13 bp, Artificial Sequence
  Oligonucleotide for detection of SNP TSC0024370
aatacatacatat

SEQ ID NO: 98135 - DNA, 13 bp, Artificial Sequence
  Oligonucleotide for detection of SNP TSC0024371
tggtaagtatttt

SEQ ID NO: 98136 - DNA, 13 bp, Artificial Sequence
  Oligonucleotide for detection of SNP TSC0024371
aaaatacttacca

SEQ ID NO: 98137 - DNA, 13 bp, Artificial Sequence
  Oligonucleotide for detection of SNP TSC0024371
tggtaaatatttt

SEQ ID NO: 98138 - DNA, 13 bp, Artificial Sequence
  Oligonucleotide for detection of SNP TSC0024371
aaaatatttacca

SEQ ID NO: 98139 - DNA, 13 bp, Artificial Sequence
  Oligonucleotide for detection of SNP TSC0024372
aagttagtggtaa

SEQ ID NO: 98140 - DNA, 13 bp, Artificial Sequence
  Oligonucleotide for detection of SNP TSC0024372
ttaccactaactt

SEQ ID NO: 98141 - DNA, 13 bp, Artificial Sequence
  Oligonucleotide for detection of SNP TSC0024372
aagttaatggtaa

SEQ ID NO: 98142 - DNA, 13 bp, Artificial Sequence
  Oligonucleotide for detection of SNP TSC0024372
ttaccattaactt

SEQ ID NO: 98143 - DNA, 13 bp, Artificial Sequence
  Oligonucleotide for detection of SNP TSC0024373
tgttaggttttgy

SEQ ID NO: 98144 - DNA, 13 bp, Artificial Sequence
  Oligonucleotide for detection of SNP TSC0024373
rcaaaacctaaca

SEQ ID NO: 98145 - DNA, 13 bp, Artificial Sequence
  Oligonucleotide for detection of SNP TSC0024373
tgttagattttgy

SEQ ID NO: 98146 - DNA, 13 bp, Artificial Sequence
  Oligonucleotide for detection of SNP TSC0024373
rcaaaatctaaca

SEQ ID NO: 98147 - DNA, 13 bp, Artificial Sequence
  Oligonucleotide for detection of SNP TSC0024374
ttgttaggaaata

SEQ ID NO: 98148 - DNA, 13 bp, Artificial Sequence
  Oligonucleotide for detection of SNP TSC0024374
tatttcctaacaa

SEQ ID NO: 98149 - DNA, 13 bp, Artificial Sequence
  Oligonucleotide for detection of SNP TSC0024374
ttgttaagaaata

SEQ ID NO: 98150 - DNA, 13 bp, Artificial Sequence
  Oligonucleotide for detection of SNP TSC0024374
tatttcttaacaa

SEQ ID NO: 98151 - DNA, 13 bp, Artificial Sequence
  Oligonucleotide for detection of SNP TSC0024375
tttaggtgatatt

SEQ ID NO: 98152 - DNA, 13 bp, Artificial Sequence
  Oligonucleotide for detection of SNP TSC0024375
aatatcacctaaa

SEQ ID NO: 98153 - DNA, 13 bp, Artificial Sequence
  Oligonucleotide for detection of SNP TSC0024375
tttaggcgatatt

SEQ ID NO: 98154 - DNA, 13 bp, Artificial Sequence
  Oligonucleotide for detection of SNP TSC0024375
aatatcgcctaaa

SEQ ID NO: 98155 - DNA, 13 bp, Artificial Sequence
  Oligonucleotide for detection of SNP TSC0024375
aatattgtttgaa

SEQ ID NO: 98156 - DNA, 13 bp, Artificial Sequence
  Oligonucleotide for detection of SNP TSC0024375
ttcaaacaatatt

SEQ ID NO: 98157 - DNA, 13 bp, Artificial Sequence
  Oligonucleotide for detection of SNP TSC0024375
aatattatttgaa

SEQ ID NO: 98158 - DNA, 13 bp, Artificial Sequence
  Oligonucleotide for detection of SNP TSC0024375
ttcaaataatatt

SEQ ID NO: 98159 - DNA, 13 bp, Artificial Sequence
  Oligonucleotide for detection of SNP TSC0024375
aatatcgtttgaa

SEQ ID NO: 98160 - DNA, 13 bp, Artificial Sequence
  Oligonucleotide for detection of SNP TSC0024375
ttcaaacgatatt

SEQ ID NO: 98161 - DNA, 13 bp, Artificial Sequence
  Oligonucleotide for detection of SNP TSC0024377
tataaaattgata

SEQ ID NO: 98162 - DNA, 13 bp, Artificial Sequence
  Oligonucleotide for detection of SNP TSC0024377
tatcaattttata

SEQ ID NO: 98163 - DNA, 13 bp, Artificial Sequence
  Oligonucleotide for detection of SNP TSC0024377
tataaagttgata

SEQ ID NO: 98164 - DNA, 13 bp, Artificial Sequence
  Oligonucleotide for detection of SNP TSC0024377
tatcaactttata

SEQ ID NO: 98165 - DNA, 13 bp, Artificial Sequence
  Oligonucleotide for detection of SNP TSC0024378
attataaattaaa

SEQ ID NO: 98166 - DNA, 13 bp, Artificial Sequence
  Oligonucleotide for detection of SNP TSC0024378
tttaatttataat

SEQ ID NO: 98167 - DNA, 13 bp, Artificial Sequence
  Oligonucleotide for detection of SNP TSC0024378
attatatattaaa

SEQ ID NO: 98168 - DNA, 13 bp, Artificial Sequence
  Oligonucleotide for detection of SNP TSC0024378
tttaatatataat

SEQ ID NO: 98169 - DNA, 13 bp, Artificial Sequence
  Oligonucleotide for detection of SNP TSC0024378
tttgatttgtagt

SEQ ID NO: 98170 - DNA, 13 bp, Artificial Sequence
  Oligonucleotide for detection of SNP TSC0024378
actacaaatcaaa

SEQ ID NO: 98171 - DNA, 13 bp, Artificial Sequence
  Oligonucleotide for detection of SNP TSC0024378
tttgatatgtagt

SEQ ID NO: 98172 - DNA, 13 bp, Artificial Sequence
  Oligonucleotide for detection of SNP TSC0024378
actacatatcaaa

SEQ ID NO: 98173 - DNA, 13 bp, Artificial Sequence
  Oligonucleotide for detection of SNP TSC0024379
tttatattttttt

SEQ ID NO: 98174 - DNA, 13 bp, Artificial Sequence
  Oligonucleotide for detection of SNP TSC0024379
aaaaaaatataaa

SEQ ID NO: 98175 - DNA, 13 bp, Artificial Sequence
  Oligonucleotide for detection of SNP TSC0024379
agggagttgtgag

SEQ ID NO: 98176 - DNA, 13 bp, Artificial Sequence
  Oligonucleotide for detection of SNP TSC0024379
ctcacaactccct

SEQ ID NO: 98177 - DNA, 13 bp, Artificial Sequence
  Oligonucleotide for detection of SNP TSC0024379
agggagatgtgag

SEQ ID NO: 98178 - DNA, 13 bp, Artificial Sequence
  Oligonucleotide for detection of SNP TSC0024379
ctcacatctccct

SEQ ID NO: 98179 - DNA, 13 bp, Artificial Sequence
  Oligonucleotide for detection of SNP TSC0024382
tttttagtagggg

SEQ ID NO: 98180 - DNA, 13 bp, Artificial Sequence
  Oligonucleotide for detection of SNP TSC0024382
cccctactaaaaa

SEQ ID NO: 98181 - DNA, 13 bp, Artificial Sequence
  Oligonucleotide for detection of SNP TSC0024382
tttttaatagggg

SEQ ID NO: 98182 - DNA, 13 bp, Artificial Sequence
  Oligonucleotide for detection of SNP TSC0024382
cccctattaaaaa

SEQ ID NO: 98183 - DNA, 13 bp, Artificial Sequence
  Oligonucleotide for detection of SNP TSC0024383
gaatttgttttty

SEQ ID NO: 98184 - DNA, 13 bp, Artificial Sequence
  Oligonucleotide for detection of SNP TSC0024383
raaaaacaaattc

SEQ ID NO: 98185 - DNA, 13 bp, Artificial Sequence
  Oligonucleotide for detection of SNP TSC0024383
gaatttattttty

SEQ ID NO: 98186 - DNA, 13 bp, Artificial Sequence
  Oligonucleotide for detection of SNP TSC0024383
raaaaataaattc

SEQ ID NO: 98187 - DNA, 13 bp, Artificial Sequence
  Oligonucleotide for detection of SNP TSC0024385
tatagtatatgag

SEQ ID NO: 98188 - DNA, 13 bp, Artificial Sequence
  Oligonucleotide for detection of SNP TSC0024385
ctcatatactata

SEQ ID NO: 98189 - DNA, 13 bp, Artificial Sequence
  Oligonucleotide for detection of SNP TSC0024385
tatagtgtatgag

SEQ ID NO: 98190 - DNA, 13 bp, Artificial Sequence
  Oligonucleotide for detection of SNP TSC0024385
ctcatacactata

SEQ ID NO: 98191 - DNA, 13 bp, Artificial Sequence
  Oligonucleotide for detection of SNP TSC0024385
tatagcgtatgag

SEQ ID NO: 98192 - DNA, 13 bp, Artificial Sequence
  Oligonucleotide for detection of SNP TSC0024385
ctcatacgctata

SEQ ID NO: 98193 - DNA, 13 bp, Artificial Sequence
  Oligonucleotide for detection of SNP TSC0024385
tttatgtgttgtg

SEQ ID NO: 98194 - DNA, 13 bp, Artificial Sequence
  Oligonucleotide for detection of SNP TSC0024385
cacaacacataaa

SEQ ID NO: 98195 - DNA, 13 bp, Artificial Sequence
  Oligonucleotide for detection of SNP TSC0024385
tttatgcgttgtg

SEQ ID NO: 98196 - DNA, 13 bp, Artificial Sequence
  Oligonucleotide for detection of SNP TSC0024385
cacaacgcataaa

SEQ ID NO: 98197 - DNA, 13 bp, Artificial Sequence
  Oligonucleotide for detection of SNP TSC0024386
gatatagtttttt

SEQ ID NO: 98198 - DNA, 13 bp, Artificial Sequence
  Oligonucleotide for detection of SNP TSC0024386
aaaaaactatatc

SEQ ID NO: 98199 - DNA, 13 bp, Artificial Sequence
  Oligonucleotide for detection of SNP TSC0024386
gatataatttttt

SEQ ID NO: 98200 - DNA, 13 bp, Artificial Sequence
  Oligonucleotide for detection of SNP TSC0024386
aaaaaattatatc

SEQ ID NO: 98201 - DNA, 13 bp, Artificial Sequence
  Oligonucleotide for detection of SNP TSC0024387
atttagagtaaag

SEQ ID NO: 98202 - DNA, 13 bp, Artificial Sequence
  Oligonucleotide for detection of SNP TSC0024387
ctttactctaaat

SEQ ID NO: 98203 - DNA, 13 bp, Artificial Sequence
  Oligonucleotide for detection of SNP TSC0024387
atttagggtaaag

SEQ ID NO: 98204 - DNA, 13 bp, Artificial Sequence
  Oligonucleotide for detection of SNP TSC0024387
ctttaccctaaat

SEQ ID NO: 98205 - DNA, 13 bp, Artificial Sequence
  Oligonucleotide for detection of SNP TSC0024393
gtattaaaattay

SEQ ID NO: 98206 - DNA, 13 bp, Artificial Sequence
  Oligonucleotide for detection of SNP TSC0024393
rtaattttaatac

SEQ ID NO: 98207 - DNA, 13 bp, Artificial Sequence
  Oligonucleotide for detection of SNP TSC0024393
gtattagaattay

SEQ ID NO: 98208 - DNA, 13 bp, Artificial Sequence
  Oligonucleotide for detection of SNP TSC0024393
rtaattctaatac

SEQ ID NO: 98209 - DNA, 13 bp, Artificial Sequence
  Oligonucleotide for detection of SNP TSC0024396
ttggagggtaatg

SEQ ID NO: 98210 - DNA, 13 bp, Artificial Sequence
  Oligonucleotide for detection of SNP TSC0024396
cattaccctccaa

SEQ ID NO: 98211 - DNA, 13 bp, Artificial Sequence
  Oligonucleotide for detection of SNP TSC0024397
agttttgtagagg

SEQ ID NO: 98212 - DNA, 13 bp, Artificial Sequence
  Oligonucleotide for detection of SNP TSC0024397
cctctacaaaact

SEQ ID NO: 98213 - DNA, 13 bp, Artificial Sequence
  Oligonucleotide for detection of SNP TSC0024397
agttttatagagg

SEQ ID NO: 98214 - DNA, 13 bp, Artificial Sequence
  Oligonucleotide for detection of SNP TSC0024397
cctctataaaact

SEQ ID NO: 98215 - DNA, 13 bp, Artificial Sequence
  Oligonucleotide for detection of SNP TSC0024398
ttttgtagaatty

SEQ ID NO: 98216 - DNA, 13 bp, Artificial Sequence
  Oligonucleotide for detection of SNP TSC0024398
raattctacaaaa

SEQ ID NO: 98217 - DNA, 13 bp, Artificial Sequence
  Oligonucleotide for detection of SNP TSC0024398
ttttgtggaatty

SEQ ID NO: 98218 - DNA, 13 bp, Artificial Sequence
  Oligonucleotide for detection of SNP TSC0024398
raattccacaaaa

SEQ ID NO: 98219 - DNA, 13 bp, Artificial Sequence
  Oligonucleotide for detection of SNP TSC0024398
ttttgcggaatty

SEQ ID NO: 98220 - DNA, 13 bp, Artificial Sequence
  Oligonucleotide for detection of SNP TSC0024398
raattccgcaaaa

SEQ ID NO: 98221 - DNA, 13 bp, Artificial Sequence
  Oligonucleotide for detection of SNP TSC0024398
gagttttgtagag

SEQ ID NO: 98222 - DNA, 13 bp, Artificial Sequence
  Oligonucleotide for detection of SNP TSC0024398
ctctacaaaactc

SEQ ID NO: 98223 - DNA, 13 bp, Artificial Sequence
  Oligonucleotide for detection of SNP TSC0024398
gagtttcgtagag

SEQ ID NO: 98224 - DNA, 13 bp, Artificial Sequence
  Oligonucleotide for detection of SNP TSC0024398
ctctacgaaactc

SEQ ID NO: 98225 - DNA, 13 bp, Artificial Sequence
  Oligonucleotide for detection of SNP TSC0024402
tgagtgtgttaty

SEQ ID NO: 98226 - DNA, 13 bp, Artificial Sequence
  Oligonucleotide for detection of SNP TSC0024402
rataacacactca

SEQ ID NO: 98227 - DNA, 13 bp, Artificial Sequence
  Oligonucleotide for detection of SNP TSC0024402
tgagtgcgttaty

SEQ ID NO: 98228 - DNA, 13 bp, Artificial Sequence
  Oligonucleotide for detection of SNP TSC0024402
rataacgcactca

SEQ ID NO: 98229 - DNA, 13 bp, Artificial Sequence
  Oligonucleotide for detection of SNP TSC0024402
ggtgatgtattta

SEQ ID NO: 98230 - DNA, 13 bp, Artificial Sequence
  Oligonucleotide for detection of SNP TSC0024402
taaatacatcacc

SEQ ID NO: 98231 - DNA, 13 bp, Artificial Sequence
  Oligonucleotide for detection of SNP TSC0024402
ggtgatatattta

SEQ ID NO: 98232 - DNA, 13 bp, Artificial Sequence
  Oligonucleotide for detection of SNP TSC0024402
taaatatatcacc

SEQ ID NO: 98233 - DNA, 13 bp, Artificial Sequence
  Oligonucleotide for detection of SNP TSC0024402
ggtgacgtattta

SEQ ID NO: 98234 - DNA, 13 bp, Artificial Sequence
  Oligonucleotide for detection of SNP TSC0024402
taaatacgtcacc

SEQ ID NO: 98235 - DNA, 13 bp, Artificial Sequence
  Oligonucleotide for detection of SNP TSC0024403
tatataggtttga

SEQ ID NO: 98236 - DNA, 13 bp, Artificial Sequence
  Oligonucleotide for detection of SNP TSC0024403
tcaaacctatata

SEQ ID NO: 98237 - DNA, 13 bp, Artificial Sequence
  Oligonucleotide for detection of SNP TSC0024403
tatatatgtttga

SEQ ID NO: 98238 - DNA, 13 bp, Artificial Sequence
  Oligonucleotide for detection of SNP TSC0024403
tcaaacatatata

SEQ ID NO: 98239 - DNA, 13 bp, Artificial Sequence
  Oligonucleotide for detection of SNP TSC0024403
ttaggtttgtgtg

SEQ ID NO: 98240 - DNA, 13 bp, Artificial Sequence
  Oligonucleotide for detection of SNP TSC0024403
cacacaaacctaa

SEQ ID NO: 98241 - DNA, 13 bp, Artificial Sequence
  Oligonucleotide for detection of SNP TSC0024403
ttaggtatgtgtg

SEQ ID NO: 98242 - DNA, 13 bp, Artificial Sequence
  Oligonucleotide for detection of SNP TSC0024403
cacacatacctaa

SEQ ID NO: 98243 - DNA, 13 bp, Artificial Sequence
  Oligonucleotide for detection of SNP TSC0024404
tttaatatattaa

SEQ ID NO: 98244 - DNA, 13 bp, Artificial Sequence
  Oligonucleotide for detection of SNP TSC0024404
ttaatatattaaa

SEQ ID NO: 98245 - DNA, 13 bp, Artificial Sequence
  Oligonucleotide for detection of SNP TSC0024404
tttaatgtattaa

SEQ ID NO: 98246 - DNA, 13 bp, Artificial Sequence
  Oligonucleotide for detection of SNP TSC0024404
ttaatacattaaa

SEQ ID NO: 98247 - DNA, 13 bp, Artificial Sequence
  Oligonucleotide for detection of SNP TSC0024404
tttaacgtattaa

SEQ ID NO: 98248 - DNA, 13 bp, Artificial Sequence
  Oligonucleotide for detection of SNP TSC0024404
ttaatacgttaaa

SEQ ID NO: 98249 - DNA, 13 bp, Artificial Sequence
  Oligonucleotide for detection of SNP TSC0024404
ttgatatgttggg

SEQ ID NO: 98250 - DNA, 13 bp, Artificial Sequence
  Oligonucleotide for detection of SNP TSC0024404
cccaacatatcaa

SEQ ID NO: 98251 - DNA, 13 bp, Artificial Sequence
  Oligonucleotide for detection of SNP TSC0024404
ttgatacgttggg

SEQ ID NO: 98252 - DNA, 13 bp, Artificial Sequence
  Oligonucleotide for detection of SNP TSC0024404
cccaacgtatcaa

SEQ ID NO: 98253 - DNA, 13 bp, Artificial Sequence
  Oligonucleotide for detection of SNP TSC0024407
gtaattataatay

SEQ ID NO: 98254 - DNA, 13 bp, Artificial Sequence
  Oligonucleotide for detection of SNP TSC0024407
rtattataattac

SEQ ID NO: 98255 - DNA, 13 bp, Artificial Sequence
  Oligonucleotide for detection of SNP TSC0024407
gtaattgtaatay

SEQ ID NO: 98256 - DNA, 13 bp, Artificial Sequence
  Oligonucleotide for detection of SNP TSC0024407
rtattacaattac

SEQ ID NO: 98257 - DNA, 13 bp, Artificial Sequence
  Oligonucleotide for detection of SNP TSC0024411
tttttaaatagtt

SEQ ID NO: 98258 - DNA, 13 bp, Artificial Sequence
  Oligonucleotide for detection of SNP TSC0024411
aactatttaaaaa

SEQ ID NO: 98259 - DNA, 13 bp, Artificial Sequence
  Oligonucleotide for detection of SNP TSC0024411
tttttagatagtt

SEQ ID NO: 98260 - DNA, 13 bp, Artificial Sequence
  Oligonucleotide for detection of SNP TSC0024411
aactatctaaaaa

SEQ ID NO: 98261 - DNA, 13 bp, Artificial Sequence
  Oligonucleotide for detection of SNP TSC0024414
ttatatagatata

SEQ ID NO: 98262 - DNA, 13 bp, Artificial Sequence
  Oligonucleotide for detection of SNP TSC0024414
tatatctatataa

SEQ ID NO: 98263 - DNA, 13 bp, Artificial Sequence
  Oligonucleotide for detection of SNP TSC0024414
ttatatggatata

SEQ ID NO: 98264 - DNA, 13 bp, Artificial Sequence
  Oligonucleotide for detection of SNP TSC0024414
tatatccatataa

SEQ ID NO: 98265 - DNA, 13 bp, Artificial Sequence
  Oligonucleotide for detection of SNP TSC0024417
tataaagtttatt

SEQ ID NO: 98266 - DNA, 13 bp, Artificial Sequence
  Oligonucleotide for detection of SNP TSC0024417
aataaactttata

SEQ ID NO: 98267 - DNA, 13 bp, Artificial Sequence
  Oligonucleotide for detection of SNP TSC0024417
tataaaatttatt

SEQ ID NO: 98268 - DNA, 13 bp, Artificial Sequence
  Oligonucleotide for detection of SNP TSC0024417
aataaattttata

SEQ ID NO: 98269 - DNA, 13 bp, Artificial Sequence
  Oligonucleotide for detection of SNP TSC0024418
tatgaatgtattt

SEQ ID NO: 98270 - DNA, 13 bp, Artificial Sequence
  Oligonucleotide for detection of SNP TSC0024418
aaatacattcata

SEQ ID NO: 98271 - DNA, 13 bp, Artificial Sequence
  Oligonucleotide for detection of SNP TSC0024418
tatgaacgtattt

SEQ ID NO: 98272 - DNA, 13 bp, Artificial Sequence
  Oligonucleotide for detection of SNP TSC0024418
aaatacgttcata

SEQ ID NO: 98273 - DNA, 13 bp, Artificial Sequence
  Oligonucleotide for detection of SNP TSC0024418
aaatgtgtttata

SEQ ID NO: 98274 - DNA, 13 bp, Artificial Sequence
  Oligonucleotide for detection of SNP TSC0024418
tataaacacattt

SEQ ID NO: 98275 - DNA, 13 bp, Artificial Sequence
  Oligonucleotide for detection of SNP TSC0024418
aaatgtatttata

SEQ ID NO: 98276 - DNA, 13 bp, Artificial Sequence
  Oligonucleotide for detection of SNP TSC0024418
tataaatacattt

SEQ ID NO: 98277 - DNA, 13 bp, Artificial Sequence
  Oligonucleotide for detection of SNP TSC0024418
aaatgcgtttata

SEQ ID NO: 98278 - DNA, 13 bp, Artificial Sequence
  Oligonucleotide for detection of SNP TSC0024418
tataaacgcattt

SEQ ID NO: 98279 - DNA, 13 bp, Artificial Sequence
  Oligonucleotide for detection of SNP TSC0024419
atgtgtatatgtg

SEQ ID NO: 98280 - DNA, 13 bp, Artificial Sequence
  Oligonucleotide for detection of SNP TSC0024419
cacatatacacat

SEQ ID NO: 98281 - DNA, 13 bp, Artificial Sequence
  Oligonucleotide for detection of SNP TSC0024419
atgtgtgtatgtg

SEQ ID NO: 98282 - DNA, 13 bp, Artificial Sequence
  Oligonucleotide for detection of SNP TSC0024419
cacatacacacat

SEQ ID NO: 98283 - DNA, 13 bp, Artificial Sequence
  Oligonucleotide for detection of SNP TSC0024420
atgtgtttgtgta

SEQ ID NO: 98284 - DNA, 13 bp, Artificial Sequence
  Oligonucleotide for detection of SNP TSC0024420
tacacaaacacat

SEQ ID NO: 98285 - DNA, 13 bp, Artificial Sequence
  Oligonucleotide for detection of SNP TSC0024420
atgtgtgtgtgta

SEQ ID NO: 98286 - DNA, 13 bp, Artificial Sequence
  Oligonucleotide for detection of SNP TSC0024420
tacacacacacat

SEQ ID NO: 98287 - DNA, 13 bp, Artificial Sequence
  Oligonucleotide for detection of SNP TSC0024420
tgtatagatatat

SEQ ID NO: 98288 - DNA, 13 bp, Artificial Sequence
  Oligonucleotide for detection of SNP TSC0024420
atatatctataca

SEQ ID NO: 98289 - DNA, 13 bp, Artificial Sequence
  Oligonucleotide for detection of SNP TSC0024420
tgtatatatatat

SEQ ID NO: 98290 - DNA, 13 bp, Artificial Sequence
  Oligonucleotide for detection of SNP TSC0024420
atatatatataca

SEQ ID NO: 98291 - DNA, 13 bp, Artificial Sequence
  Oligonucleotide for detection of SNP TSC0024425
atagtatgggtty

SEQ ID NO: 98292 - DNA, 13 bp, Artificial Sequence
  Oligonucleotide for detection of SNP TSC0024425
raacccatactat

SEQ ID NO: 98293 - DNA, 13 bp, Artificial Sequence
  Oligonucleotide for detection of SNP TSC0024425
atagtacgggtty

SEQ ID NO: 98294 - DNA, 13 bp, Artificial Sequence
  Oligonucleotide for detection of SNP TSC0024425
raacccgtactat

SEQ ID NO: 98295 - DNA, 13 bp, Artificial Sequence
  Oligonucleotide for detection of SNP TSC0024425
gggtttgtattat

SEQ ID NO: 98296 - DNA, 13 bp, Artificial Sequence
  Oligonucleotide for detection of SNP TSC0024425
ataatacaaaccc

SEQ ID NO: 98297 - DNA, 13 bp, Artificial Sequence
  Oligonucleotide for detection of SNP TSC0024425
gggtttatattat

SEQ ID NO: 98298 - DNA, 13 bp, Artificial Sequence
  Oligonucleotide for detection of SNP TSC0024425
ataatataaaccc

SEQ ID NO: 98299 - DNA, 13 bp, Artificial Sequence
  Oligonucleotide for detection of SNP TSC0024425
gggttcgtattat

SEQ ID NO: 98300 - DNA, 13 bp, Artificial Sequence
  Oligonucleotide for detection of SNP TSC0024425
ataatacgaaccc

SEQ ID NO: 98301 - DNA, 13 bp, Artificial Sequence
  Oligonucleotide for detection of SNP TSC0024427
tgggtgcggtggy

SEQ ID NO: 98302 - DNA, 13 bp, Artificial Sequence
  Oligonucleotide for detection of SNP TSC0024427
rccaccgcaccca

SEQ ID NO: 98303 - DNA, 13 bp, Artificial Sequence
  Oligonucleotide for detection of SNP TSC0024427
cgggtgcggtggy

SEQ ID NO: 98304 - DNA, 13 bp, Artificial Sequence
  Oligonucleotide for detection of SNP TSC0024427
rccaccgcacccg

SEQ ID NO: 98305 - DNA, 13 bp, Artificial Sequence
  Oligonucleotide for detection of SNP TSC0024427
gttattgtattcg

SEQ ID NO: 98306 - DNA, 13 bp, Artificial Sequence
  Oligonucleotide for detection of SNP TSC0024427
cgaatacaataac

SEQ ID NO: 98307 - DNA, 13 bp, Artificial Sequence
  Oligonucleotide for detection of SNP TSC0024427
gttatcgtattcg

SEQ ID NO: 98308 - DNA, 13 bp, Artificial Sequence
  Oligonucleotide for detection of SNP TSC0024427
cgaatacgataac

SEQ ID NO: 98309 - DNA, 13 bp, Artificial Sequence
  Oligonucleotide for detection of SNP TSC0024428
ttattgcgtttaa

SEQ ID NO: 98310 - DNA, 13 bp, Artificial Sequence
  Oligonucleotide for detection of SNP TSC0024428
ttaaacgcaataa

SEQ ID NO: 98311 - DNA, 13 bp, Artificial Sequence
  Oligonucleotide for detection of SNP TSC0024430
tttgtgattatga

SEQ ID NO: 98312 - DNA, 13 bp, Artificial Sequence
  Oligonucleotide for detection of SNP TSC0024430
tcataatcacaaa

SEQ ID NO: 98313 - DNA, 13 bp, Artificial Sequence
  Oligonucleotide for detection of SNP TSC0024430
tttgtggttatga

SEQ ID NO: 98314 - DNA, 13 bp, Artificial Sequence
  Oligonucleotide for detection of SNP TSC0024430
tcataaccacaaa

SEQ ID NO: 98315 - DNA, 13 bp, Artificial Sequence
  Oligonucleotide for detection of SNP TSC0024432
aatagagtaaaat

SEQ ID NO: 98316 - DNA, 13 bp, Artificial Sequence
  Oligonucleotide for detection of SNP TSC0024432
attttactctatt

SEQ ID NO: 98317 - DNA, 13 bp, Artificial Sequence
  Oligonucleotide for detection of SNP TSC0024432
aatagaataaaat

SEQ ID NO: 98318 - DNA, 13 bp, Artificial Sequence
  Oligonucleotide for detection of SNP TSC0024432
attttattctatt

SEQ ID NO: 98319 - DNA, 13 bp, Artificial Sequence
  Oligonucleotide for detection of SNP TSC0024433
gtatttataaggg

SEQ ID NO: 98320 - DNA, 13 bp, Artificial Sequence
  Oligonucleotide for detection of SNP TSC0024433
cccttataaatac

SEQ ID NO: 98321 - DNA, 13 bp, Artificial Sequence
  Oligonucleotide for detection of SNP TSC0024433
gtatttgtaaggg

SEQ ID NO: 98322 - DNA, 13 bp, Artificial Sequence
  Oligonucleotide for detection of SNP TSC0024433
cccttacaaatac

SEQ ID NO: 98323 - DNA, 13 bp, Artificial Sequence
  Oligonucleotide for detection of SNP TSC0024434
ggtagtatatgga

SEQ ID NO: 98324 - DNA, 13 bp, Artificial Sequence
  Oligonucleotide for detection of SNP TSC0024434
tccatatactacc

SEQ ID NO: 98325 - DNA, 13 bp, Artificial Sequence
  Oligonucleotide for detection of SNP TSC0024434
ggtagtgtatgga

SEQ ID NO: 98326 - DNA, 13 bp, Artificial Sequence
  Oligonucleotide for detection of SNP TSC0024434
tccatacactacc

SEQ ID NO: 98327 - DNA, 13 bp, Artificial Sequence
  Oligonucleotide for detection of SNP TSC0024434
ggtagcgtatgga

SEQ ID NO: 98328 - DNA, 13 bp, Artificial Sequence
  Oligonucleotide for detection of SNP TSC0024434
tccatacgctacc

SEQ ID NO: 98329 - DNA, 13 bp, Artificial Sequence
  Oligonucleotide for detection of SNP TSC0024434
tttatgtgttaty

SEQ ID NO: 98330 - DNA, 13 bp, Artificial Sequence
  Oligonucleotide for detection of SNP TSC0024434
rataacacataaa

SEQ ID NO: 98331 - DNA, 13 bp, Artificial Sequence
  Oligonucleotide for detection of SNP TSC0024434
tttatgcgttaty

SEQ ID NO: 98332 - DNA, 13 bp, Artificial Sequence
  Oligonucleotide for detection of SNP TSC0024434
rataacgcataaa

SEQ ID NO: 98333 - DNA, 13 bp, Artificial Sequence
  Oligonucleotide for detection of SNP TSC0024436
gtagtgatatgga

SEQ ID NO: 98334 - DNA, 13 bp, Artificial Sequence
  Oligonucleotide for detection of SNP TSC0024436
tccatatcactac

SEQ ID NO: 98335 - DNA, 13 bp, Artificial Sequence
  Oligonucleotide for detection of SNP TSC0024436
gtagtggtatgga

SEQ ID NO: 98336 - DNA, 13 bp, Artificial Sequence
  Oligonucleotide for detection of SNP TSC0024436
tccataccactac

SEQ ID NO: 98337 - DNA, 13 bp, Artificial Sequence
  Oligonucleotide for detection of SNP TSC0024436
gtagcgatatgga

SEQ ID NO: 98338 - DNA, 13 bp, Artificial Sequence
  Oligonucleotide for detection of SNP TSC0024436
tccatatcgctac

SEQ ID NO: 98339 - DNA, 13 bp, Artificial Sequence
  Oligonucleotide for detection of SNP TSC0024436
gtagcggtatgga

SEQ ID NO: 98340 - DNA, 13 bp, Artificial Sequence
  Oligonucleotide for detection of SNP TSC0024436
tccataccgctac

SEQ ID NO: 98341 - DNA, 13 bp, Artificial Sequence
  Oligonucleotide for detection of SNP TSC0024439
tggttttgtttaa

SEQ ID NO: 98342 - DNA, 13 bp, Artificial Sequence
  Oligonucleotide for detection of SNP TSC0024439
ttaaacaaaacca

SEQ ID NO: 98343 - DNA, 13 bp, Artificial Sequence
  Oligonucleotide for detection of SNP TSC0024439
tggtttcgtttaa

SEQ ID NO: 98344 - DNA, 13 bp, Artificial Sequence
  Oligonucleotide for detection of SNP TSC0024439
ttaaacgaaacca

SEQ ID NO: 98345 - DNA, 13 bp, Artificial Sequence
  Oligonucleotide for detection of SNP TSC0024439
ttaaatgaaatta

SEQ ID NO: 98346 - DNA, 13 bp, Artificial Sequence
  Oligonucleotide for detection of SNP TSC0024439
taatttcatttaa

SEQ ID NO: 98347 - DNA, 13 bp, Artificial Sequence
  Oligonucleotide for detection of SNP TSC0024439
ttaaataaaatta

SEQ ID NO: 98348 - DNA, 13 bp, Artificial Sequence
  Oligonucleotide for detection of SNP TSC0024439
taattttatttaa

SEQ ID NO: 98349 - DNA, 13 bp, Artificial Sequence
  Oligonucleotide for detection of SNP TSC0024439
ttaaacgaaatta

SEQ ID NO: 98350 - DNA, 13 bp, Artificial Sequence
  Oligonucleotide for detection of SNP TSC0024439
taatttcgtttaa

SEQ ID NO: 98351 - DNA, 13 bp, Artificial Sequence
  Oligonucleotide for detection of SNP TSC0024441
tgttttaatttty

SEQ ID NO: 98352 - DNA, 13 bp, Artificial Sequence
  Oligonucleotide for detection of SNP TSC0024441
raaaattaaaaca

SEQ ID NO: 98353 - DNA, 13 bp, Artificial Sequence
  Oligonucleotide for detection of SNP TSC0024441
tgtttttatttty

SEQ ID NO: 98354 - DNA, 13 bp, Artificial Sequence
  Oligonucleotide for detection of SNP TSC0024441
raaaataaaaaca

SEQ ID NO: 98355 - DNA, 13 bp, Artificial Sequence
  Oligonucleotide for detection of SNP TSC0024441
gggagttggggta

SEQ ID NO: 98356 - DNA, 13 bp, Artificial Sequence
  Oligonucleotide for detection of SNP TSC0024441
taccccaactccc

SEQ ID NO: 98357 - DNA, 13 bp, Artificial Sequence
  Oligonucleotide for detection of SNP TSC0024441
gggagtgggggta

SEQ ID NO: 98358 - DNA, 13 bp, Artificial Sequence
  Oligonucleotide for detection of SNP TSC0024441
tacccccactccc

SEQ ID NO: 98359 - DNA, 13 bp, Artificial Sequence
  Oligonucleotide for detection of SNP TSC0024443
gatttaaaatttg

SEQ ID NO: 98360 - DNA, 13 bp, Artificial Sequence
  Oligonucleotide for detection of SNP TSC0024443
caaattttaaatc

SEQ ID NO: 98361 - DNA, 13 bp, Artificial Sequence
  Oligonucleotide for detection of SNP TSC0024443
gatttagaatttg

SEQ ID NO: 98362 - DNA, 13 bp, Artificial Sequence
  Oligonucleotide for detection of SNP TSC0024443
caaattctaaatc

SEQ ID NO: 98363 - DNA, 13 bp, Artificial Sequence
  Oligonucleotide for detection of SNP TSC0024444
gggaaagagatat

SEQ ID NO: 98364 - DNA, 13 bp, Artificial Sequence
  Oligonucleotide for detection of SNP TSC0024444
atatctctttccc

SEQ ID NO: 98365 - DNA, 13 bp, Artificial Sequence
  Oligonucleotide for detection of SNP TSC0024444
gggaaaaagatat

SEQ ID NO: 98366 - DNA, 13 bp, Artificial Sequence
  Oligonucleotide for detection of SNP TSC0024444
atatctttttccc

SEQ ID NO: 98367 - DNA, 13 bp, Artificial Sequence
  Oligonucleotide for detection of SNP TSC0024445
ttgatttgttgtg

SEQ ID NO: 98368 - DNA, 13 bp, Artificial Sequence
  Oligonucleotide for detection of SNP TSC0024445
cacaacaaatcaa

SEQ ID NO: 98369 - DNA, 13 bp, Artificial Sequence
  Oligonucleotide for detection of SNP TSC0024445
ttgattcgttgtg

SEQ ID NO: 98370 - DNA, 13 bp, Artificial Sequence
  Oligonucleotide for detection of SNP TSC0024445
cacaacgaatcaa

SEQ ID NO: 98371 - DNA, 13 bp, Artificial Sequence
  Oligonucleotide for detection of SNP TSC0024445
tataatgaattag

SEQ ID NO: 98372 - DNA, 13 bp, Artificial Sequence
  Oligonucleotide for detection of SNP TSC0024445
ctaattcattata

SEQ ID NO: 98373 - DNA, 13 bp, Artificial Sequence
  Oligonucleotide for detection of SNP TSC0024445
tataataaattag

SEQ ID NO: 98374 - DNA, 13 bp, Artificial Sequence
  Oligonucleotide for detection of SNP TSC0024445
ctaatttattata

SEQ ID NO: 98375 - DNA, 13 bp, Artificial Sequence
  Oligonucleotide for detection of SNP TSC0024445
tataacgaattag

SEQ ID NO: 98376 - DNA, 13 bp, Artificial Sequence
  Oligonucleotide for detection of SNP TSC0024445
ctaattcgttata

SEQ ID NO: 98377 - DNA, 13 bp, Artificial Sequence
  Oligonucleotide for detection of SNP TSC0024446
gtaaatggttttt

SEQ ID NO: 98378 - DNA, 13 bp, Artificial Sequence
  Oligonucleotide for detection of SNP TSC0024446
aaaaaccatttac

SEQ ID NO: 98379 - DNA, 13 bp, Artificial Sequence
  Oligonucleotide for detection of SNP TSC0024446
gtaaatagttttt

SEQ ID NO: 98380 - DNA, 13 bp, Artificial Sequence
  Oligonucleotide for detection of SNP TSC0024446
aaaaactatttac

SEQ ID NO: 98381 - DNA, 13 bp, Artificial Sequence
  Oligonucleotide for detection of SNP TSC0024447
aggattatttgtt

SEQ ID NO: 98382 - DNA, 13 bp, Artificial Sequence
  Oligonucleotide for detection of SNP TSC0024447
aacaaataatcct

SEQ ID NO: 98383 - DNA, 13 bp, Artificial Sequence
  Oligonucleotide for detection of SNP TSC0024447
aggattgtttgtt

SEQ ID NO: 98384 - DNA, 13 bp, Artificial Sequence
  Oligonucleotide for detection of SNP TSC0024447
aacaaacaatcct

SEQ ID NO: 98385 - DNA, 13 bp, Artificial Sequence
  Oligonucleotide for detection of SNP TSC0024447
aggatcgtttgtt

SEQ ID NO: 98386 - DNA, 13 bp, Artificial Sequence
  Oligonucleotide for detection of SNP TSC0024447
aacaaacgatcct

SEQ ID NO: 98387 - DNA, 13 bp, Artificial Sequence
  Oligonucleotide for detection of SNP TSC0024447
agtaaatggtttt

SEQ ID NO: 98388 - DNA, 13 bp, Artificial Sequence
  Oligonucleotide for detection of SNP TSC0024447
aaaaccatttact

SEQ ID NO: 98389 - DNA, 13 bp, Artificial Sequence
  Oligonucleotide for detection of SNP TSC0024447
agtaaacggtttt

SEQ ID NO: 98390 - DNA, 13 bp, Artificial Sequence
  Oligonucleotide for detection of SNP TSC0024447
aaaaccgtttact

SEQ ID NO: 98391 - DNA, 13 bp, Artificial Sequence
  Oligonucleotide for detection of SNP TSC0024448
atgttggtgggaa

SEQ ID NO: 98392 - DNA, 13 bp, Artificial Sequence
  Oligonucleotide for detection of SNP TSC0024448
ttcccaccaacat

SEQ ID NO: 98393 - DNA, 13 bp, Artificial Sequence
  Oligonucleotide for detection of SNP TSC0024448
atgttgatgggaa

SEQ ID NO: 98394 - DNA, 13 bp, Artificial Sequence
  Oligonucleotide for detection of SNP TSC0024448
ttcccatcaacat

SEQ ID NO: 98395 - DNA, 13 bp, Artificial Sequence
  Oligonucleotide for detection of SNP TSC0024449
attaggataaaaa

SEQ ID NO: 98396 - DNA, 13 bp, Artificial Sequence
  Oligonucleotide for detection of SNP TSC0024449
tttttatcctaat

SEQ ID NO: 98397 - DNA, 13 bp, Artificial Sequence
  Oligonucleotide for detection of SNP TSC0024449
attaggttaaaaa

SEQ ID NO: 98398 - DNA, 13 bp, Artificial Sequence
  Oligonucleotide for detection of SNP TSC0024449
tttttaacctaat

SEQ ID NO: 98399 - DNA, 13 bp, Artificial Sequence
  Oligonucleotide for detection of SNP TSC0024449
tttttattttgat

SEQ ID NO: 98400 - DNA, 13 bp, Artificial Sequence
  Oligonucleotide for detection of SNP TSC0024449
atcaaaataaaaa

SEQ ID NO: 98401 - DNA, 13 bp, Artificial Sequence
  Oligonucleotide for detection of SNP TSC0024449
tttttagtttgat

SEQ ID NO: 98402 - DNA, 13 bp, Artificial Sequence
  Oligonucleotide for detection of SNP TSC0024449
atcaaactaaaaa

SEQ ID NO: 98403 - DNA, 13 bp, Artificial Sequence
  Oligonucleotide for detection of SNP TSC0024451
tggataggatttt

SEQ ID NO: 98404 - DNA, 13 bp, Artificial Sequence
  Oligonucleotide for detection of SNP TSC0024451
aaaatcctatcca

SEQ ID NO: 98405 - DNA, 13 bp, Artificial Sequence
  Oligonucleotide for detection of SNP TSC0024451
tggatatgatttt

SEQ ID NO: 98406 - DNA, 13 bp, Artificial Sequence
  Oligonucleotide for detection of SNP TSC0024451
aaaatcatatcca

SEQ ID NO: 98407 - DNA, 13 bp, Artificial Sequence
  Oligonucleotide for detection of SNP TSC0024451
agaattatattta

SEQ ID NO: 98408 - DNA, 13 bp, Artificial Sequence
  Oligonucleotide for detection of SNP TSC0024451
taaatataattct

SEQ ID NO: 98409 - DNA, 13 bp, Artificial Sequence
  Oligonucleotide for detection of SNP TSC0024452
gaatttattttta

SEQ ID NO: 98410 - DNA, 13 bp, Artificial Sequence
  Oligonucleotide for detection of SNP TSC0024452
taaaaataaattc

SEQ ID NO: 98411 - DNA, 13 bp, Artificial Sequence
  Oligonucleotide for detection of SNP TSC0024452
gaatttgttttta

SEQ ID NO: 98412 - DNA, 13 bp, Artificial Sequence
  Oligonucleotide for detection of SNP TSC0024452
taaaaacaaattc

SEQ ID NO: 98413 - DNA, 13 bp, Artificial Sequence
  Oligonucleotide for detection of SNP TSC0024452
gaattcgttttta

SEQ ID NO: 98414 - DNA, 13 bp, Artificial Sequence
  Oligonucleotide for detection of SNP TSC0024452
taaaaacgaattc

SEQ ID NO: 98415 - DNA, 13 bp, Artificial Sequence
  Oligonucleotide for detection of SNP TSC0024452
tggggatgggtty

SEQ ID NO: 98416 - DNA, 13 bp, Artificial Sequence
  Oligonucleotide for detection of SNP TSC0024452
raacccatcccca

SEQ ID NO: 98417 - DNA, 13 bp, Artificial Sequence
  Oligonucleotide for detection of SNP TSC0024452
tggggacgggtty

SEQ ID NO: 98418 - DNA, 13 bp, Artificial Sequence
  Oligonucleotide for detection of SNP TSC0024452
raacccgtcccca

SEQ ID NO: 98419 - DNA, 13 bp, Artificial Sequence
  Oligonucleotide for detection of SNP TSC0024454
tgaattttgttgt

SEQ ID NO: 98420 - DNA, 13 bp, Artificial Sequence
  Oligonucleotide for detection of SNP TSC0024454
acaacaaaattca

SEQ ID NO: 98421 - DNA, 13 bp, Artificial Sequence
  Oligonucleotide for detection of SNP TSC0024454
tgaattgtgttgt

SEQ ID NO: 98422 - DNA, 13 bp, Artificial Sequence
  Oligonucleotide for detection of SNP TSC0024454
acaacacaattca

SEQ ID NO: 98423 - DNA, 13 bp, Artificial Sequence
  Oligonucleotide for detection of SNP TSC0024454
tgaatcgtgttgt

SEQ ID NO: 98424 - DNA, 13 bp, Artificial Sequence
  Oligonucleotide for detection of SNP TSC0024454
acaacacgattca

SEQ ID NO: 98425 - DNA, 13 bp, Artificial Sequence
  Oligonucleotide for detection of SNP TSC0024454
ataataggattta

SEQ ID NO: 98426 - DNA, 13 bp, Artificial Sequence
  Oligonucleotide for detection of SNP TSC0024454
taaatcctattat

SEQ ID NO: 98427 - DNA, 13 bp, Artificial Sequence
  Oligonucleotide for detection of SNP TSC0024454
ataatatgattta

SEQ ID NO: 98428 - DNA, 13 bp, Artificial Sequence
  Oligonucleotide for detection of SNP TSC0024454
taaatcatattat

SEQ ID NO: 98429 - DNA, 13 bp, Artificial Sequence
  Oligonucleotide for detection of SNP TSC0024454
ataatacgattta

SEQ ID NO: 98430 - DNA, 13 bp, Artificial Sequence
  Oligonucleotide for detection of SNP TSC0024454
taaatcgtattat

SEQ ID NO: 98431 - DNA, 13 bp, Artificial Sequence
  Oligonucleotide for detection of SNP TSC0024457
tttattaataatt

SEQ ID NO: 98432 - DNA, 13 bp, Artificial Sequence
  Oligonucleotide for detection of SNP TSC0024457
aattattaataaa

SEQ ID NO: 98433 - DNA, 13 bp, Artificial Sequence
  Oligonucleotide for detection of SNP TSC0024457
tttatttataatt

SEQ ID NO: 98434 - DNA, 13 bp, Artificial Sequence
  Oligonucleotide for detection of SNP TSC0024457
aattataaataaa

SEQ ID NO: 98435 - DNA, 13 bp, Artificial Sequence
  Oligonucleotide for detection of SNP TSC0024457
aattgttgataaa

SEQ ID NO: 98436 - DNA, 13 bp, Artificial Sequence
  Oligonucleotide for detection of SNP TSC0024457
tttatcaacaatt

SEQ ID NO: 98437 - DNA, 13 bp, Artificial Sequence
  Oligonucleotide for detection of SNP TSC0024457
aattgtagataaa

SEQ ID NO: 98438 - DNA, 13 bp, Artificial Sequence
  Oligonucleotide for detection of SNP TSC0024457
tttatctacaatt

SEQ ID NO: 98439 - DNA, 13 bp, Artificial Sequence
  Oligonucleotide for detection of SNP TSC0024460
gatgaggttttaa

SEQ ID NO: 98440 - DNA, 13 bp, Artificial Sequence
  Oligonucleotide for detection of SNP TSC0024460
ttaaaacctcatc

SEQ ID NO: 98441 - DNA, 13 bp, Artificial Sequence
  Oligonucleotide for detection of SNP TSC0024460
gatgagtttttaa

SEQ ID NO: 98442 - DNA, 13 bp, Artificial Sequence
  Oligonucleotide for detection of SNP TSC0024460
ttaaaaactcatc

SEQ ID NO: 98443 - DNA, 13 bp, Artificial Sequence
  Oligonucleotide for detection of SNP TSC0024460
ttggaattttaty

SEQ ID NO: 98444 - DNA, 13 bp, Artificial Sequence
  Oligonucleotide for detection of SNP TSC0024460
rataaaattccaa

SEQ ID NO: 98445 - DNA, 13 bp, Artificial Sequence
  Oligonucleotide for detection of SNP TSC0024460
ttggaaatttaty

SEQ ID NO: 98446 - DNA, 13 bp, Artificial Sequence
  Oligonucleotide for detection of SNP TSC0024460
rataaatttccaa

SEQ ID NO: 98447 - DNA, 13 bp, Artificial Sequence
  Oligonucleotide for detection of SNP TSC0024462
gagttttagtttg

SEQ ID NO: 98448 - DNA, 13 bp, Artificial Sequence
  Oligonucleotide for detection of SNP TSC0024462
caaactaaaactc

SEQ ID NO: 98449 - DNA, 13 bp, Artificial Sequence
  Oligonucleotide for detection of SNP TSC0024462
gagtttgagtttg

SEQ ID NO: 98450 - DNA, 13 bp, Artificial Sequence
  Oligonucleotide for detection of SNP TSC0024462
caaactcaaactc

SEQ ID NO: 98451 - DNA, 13 bp, Artificial Sequence
  Oligonucleotide for detection of SNP TSC0024462
tagattgaggtty

SEQ ID NO: 98452 - DNA, 13 bp, Artificial Sequence
  Oligonucleotide for detection of SNP TSC0024462
raacctcaatcta

SEQ ID NO: 98453 - DNA, 13 bp, Artificial Sequence
  Oligonucleotide for detection of SNP TSC0024462
tagatttaggtty

SEQ ID NO: 98454 - DNA, 13 bp, Artificial Sequence
  Oligonucleotide for detection of SNP TSC0024462
raacctaaatcta

SEQ ID NO: 98455 - DNA, 13 bp, Artificial Sequence
  Oligonucleotide for detection of SNP TSC0024463
atttaggggtaty

SEQ ID NO: 98456 - DNA, 13 bp, Artificial Sequence
  Oligonucleotide for detection of SNP TSC0024463
ratacccctaaat

SEQ ID NO: 98457 - DNA, 13 bp, Artificial Sequence
  Oligonucleotide for detection of SNP TSC0024463
atttagaggtaty

SEQ ID NO: 98458 - DNA, 13 bp, Artificial Sequence
  Oligonucleotide for detection of SNP TSC0024463
ratacctctaaat

SEQ ID NO: 98459 - DNA, 13 bp, Artificial Sequence
  Oligonucleotide for detection of SNP TSC0024464
aatttaaattaat

SEQ ID NO: 98460 - DNA, 13 bp, Artificial Sequence
  Oligonucleotide for detection of SNP TSC0024464
attaatttaaatt

SEQ ID NO: 98461 - DNA, 13 bp, Artificial Sequence
  Oligonucleotide for detection of SNP TSC0024464
aatttatattaat

SEQ ID NO: 98462 - DNA, 13 bp, Artificial Sequence
  Oligonucleotide for detection of SNP TSC0024464
attaatataaatt

SEQ ID NO: 98463 - DNA, 13 bp, Artificial Sequence
  Oligonucleotide for detection of SNP TSC0024464
attgatttgaatt

SEQ ID NO: 98464 - DNA, 13 bp, Artificial Sequence
  Oligonucleotide for detection of SNP TSC0024464
aattcaaatcaat

SEQ ID NO: 98465 - DNA, 13 bp, Artificial Sequence
  Oligonucleotide for detection of SNP TSC0024464
attgatatgaatt

SEQ ID NO: 98466 - DNA, 13 bp, Artificial Sequence
  Oligonucleotide for detection of SNP TSC0024464
aattcatatcaat

SEQ ID NO: 98467 - DNA, 13 bp, Artificial Sequence
  Oligonucleotide for detection of SNP TSC0024470
gtgataggtattt

SEQ ID NO: 98468 - DNA, 13 bp, Artificial Sequence
  Oligonucleotide for detection of SNP TSC0024470
aaatacctatcac

SEQ ID NO: 98469 - DNA, 13 bp, Artificial Sequence
  Oligonucleotide for detection of SNP TSC0024470
gtgataagtattt

SEQ ID NO: 98470 - DNA, 13 bp, Artificial Sequence
  Oligonucleotide for detection of SNP TSC0024470
aaatacttatcac

SEQ ID NO: 98471 - DNA, 13 bp, Artificial Sequence
  Oligonucleotide for detection of SNP TSC0024472
gaaagtagggtta

SEQ ID NO: 98472 - DNA, 13 bp, Artificial Sequence
  Oligonucleotide for detection of SNP TSC0024472
taaccctactttc

SEQ ID NO: 98473 - DNA, 13 bp, Artificial Sequence
  Oligonucleotide for detection of SNP TSC0024472
gaaagtggggtta

SEQ ID NO: 98474 - DNA, 13 bp, Artificial Sequence
  Oligonucleotide for detection of SNP TSC0024472
taaccccactttc

SEQ ID NO: 98475 - DNA, 13 bp, Artificial Sequence
  Oligonucleotide for detection of SNP TSC0024473
taggttgggtgtg

SEQ ID NO: 98476 - DNA, 13 bp, Artificial Sequence
  Oligonucleotide for detection of SNP TSC0024473
cacacccaaccta

SEQ ID NO: 98477 - DNA, 13 bp, Artificial Sequence
  Oligonucleotide for detection of SNP TSC0024473
taggttaggtgtg

SEQ ID NO: 98478 - DNA, 13 bp, Artificial Sequence
  Oligonucleotide for detection of SNP TSC0024473
cacacctaaccta

SEQ ID NO: 98479 - DNA, 13 bp, Artificial Sequence
  Oligonucleotide for detection of SNP TSC0024473
taggtcgggtgtg

SEQ ID NO: 98480 - DNA, 13 bp, Artificial Sequence
  Oligonucleotide for detection of SNP TSC0024473
cacacccgaccta

SEQ ID NO: 98481 - DNA, 13 bp, Artificial Sequence
  Oligonucleotide for detection of SNP TSC0024473
taggttaggcgtg

SEQ ID NO: 98482 - DNA, 13 bp, Artificial Sequence
  Oligonucleotide for detection of SNP TSC0024473
cacgcctaaccta

SEQ ID NO: 98483 - DNA, 13 bp, Artificial Sequence
  Oligonucleotide for detection of SNP TSC0024473
taggttgggcgtg

SEQ ID NO: 98484 - DNA, 13 bp, Artificial Sequence
  Oligonucleotide for detection of SNP TSC0024473
cacgcccaaccta

SEQ ID NO: 98485 - DNA, 13 bp, Artificial Sequence
  Oligonucleotide for detection of SNP TSC0024473
taggtcgggcgtg

SEQ ID NO: 98486 - DNA, 13 bp, Artificial Sequence
  Oligonucleotide for detection of SNP TSC0024473
cacgcccgaccta

SEQ ID NO: 98487 - DNA, 13 bp, Artificial Sequence
  Oligonucleotide for detection of SNP TSC0024477
tggtaggattaaa

SEQ ID NO: 98488 - DNA, 13 bp, Artificial Sequence
  Oligonucleotide for detection of SNP TSC0024477
tttaatcctacca

SEQ ID NO: 98489 - DNA, 13 bp, Artificial Sequence
  Oligonucleotide for detection of SNP TSC0024477
tggtagaattaaa

SEQ ID NO: 98490 - DNA, 13 bp, Artificial Sequence
  Oligonucleotide for detection of SNP TSC0024477
tttaattctacca

SEQ ID NO: 98491 - DNA, 13 bp, Artificial Sequence
  Oligonucleotide for detection of SNP TSC0024484
gattagagtttay

SEQ ID NO: 98492 - DNA, 13 bp, Artificial Sequence
  Oligonucleotide for detection of SNP TSC0024484
rtaaactctaatc

SEQ ID NO: 98493 - DNA, 13 bp, Artificial Sequence
  Oligonucleotide for detection of SNP TSC0024484
gattagggtttay

SEQ ID NO: 98494 - DNA, 13 bp, Artificial Sequence
  Oligonucleotide for detection of SNP TSC0024484
rtaaaccctaatc

SEQ ID NO: 98495 - DNA, 13 bp, Artificial Sequence
  Oligonucleotide for detection of SNP TSC0024485
tggggatgtttgy

SEQ ID NO: 98496 - DNA, 13 bp, Artificial Sequence
  Oligonucleotide for detection of SNP TSC0024485
rcaaacatcccca

SEQ ID NO: 98497 - DNA, 13 bp, Artificial Sequence
  Oligonucleotide for detection of SNP TSC0024485
cggggatgtttgy

SEQ ID NO: 98498 - DNA, 13 bp, Artificial Sequence
  Oligonucleotide for detection of SNP TSC0024485
rcaaacatccccg

SEQ ID NO: 98499 - DNA, 13 bp, Artificial Sequence
  Oligonucleotide for detection of SNP TSC0024485
tggggacgtttgy

SEQ ID NO: 98500 - DNA, 13 bp, Artificial Sequence
  Oligonucleotide for detection of SNP TSC0024485
rcaaacgtcccca

SEQ ID NO: 98501 - DNA, 13 bp, Artificial Sequence
  Oligonucleotide for detection of SNP TSC0024485
cggggacgtttgy

SEQ ID NO: 98502 - DNA, 13 bp, Artificial Sequence
  Oligonucleotide for detection of SNP TSC0024485
rcaaacgtccccg

SEQ ID NO: 98503 - DNA, 13 bp, Artificial Sequence
  Oligonucleotide for detection of SNP TSC0024485
gtaggtgtttttg

SEQ ID NO: 98504 - DNA, 13 bp, Artificial Sequence
  Oligonucleotide for detection of SNP TSC0024485
caaaaacacctac

SEQ ID NO: 98505 - DNA, 13 bp, Artificial Sequence
  Oligonucleotide for detection of SNP TSC0024485
gtaggtatttttg

SEQ ID NO: 98506 - DNA, 13 bp, Artificial Sequence
  Oligonucleotide for detection of SNP TSC0024485
caaaaatacctac

SEQ ID NO: 98507 - DNA, 13 bp, Artificial Sequence
  Oligonucleotide for detection of SNP TSC0024485
gtaggcgtttttg

SEQ ID NO: 98508 - DNA, 13 bp, Artificial Sequence
  Oligonucleotide for detection of SNP TSC0024485
caaaaacgcctac

SEQ ID NO: 98509 - DNA, 13 bp, Artificial Sequence
  Oligonucleotide for detection of SNP TSC0024485
gtaggtattttcg

SEQ ID NO: 98510 - DNA, 13 bp, Artificial Sequence
  Oligonucleotide for detection of SNP TSC0024485
cgaaaatacctac

SEQ ID NO: 98511 - DNA, 13 bp, Artificial Sequence
  Oligonucleotide for detection of SNP TSC0024485
gtaggtgttttcg

SEQ ID NO: 98512 - DNA, 13 bp, Artificial Sequence
  Oligonucleotide for detection of SNP TSC0024485
cgaaaacacctac

SEQ ID NO: 98513 - DNA, 13 bp, Artificial Sequence
  Oligonucleotide for detection of SNP TSC0024485
gtaggcgttttcg

SEQ ID NO: 98514 - DNA, 13 bp, Artificial Sequence
  Oligonucleotide for detection of SNP TSC0024485
cgaaaacgcctac

SEQ ID NO: 98515 - DNA, 13 bp, Artificial Sequence
  Oligonucleotide for detection of SNP TSC0024486
atttgagtttagg

SEQ ID NO: 98516 - DNA, 13 bp, Artificial Sequence
  Oligonucleotide for detection of SNP TSC0024486
cctaaactcaaat

SEQ ID NO: 98517 - DNA, 13 bp, Artificial Sequence
  Oligonucleotide for detection of SNP TSC0024486
atttgaatttagg

SEQ ID NO: 98518 - DNA, 13 bp, Artificial Sequence
  Oligonucleotide for detection of SNP TSC0024486
cctaaattcaaat

SEQ ID NO: 98519 - DNA, 13 bp, Artificial Sequence
  Oligonucleotide for detection of SNP TSC0024490
taggggatatagt

SEQ ID NO: 98520 - DNA, 13 bp, Artificial Sequence
  Oligonucleotide for detection of SNP TSC0024490
actatatccccta

SEQ ID NO: 98521 - DNA, 13 bp, Artificial Sequence
  Oligonucleotide for detection of SNP TSC0024490
tagggggtatagt

SEQ ID NO: 98522 - DNA, 13 bp, Artificial Sequence
  Oligonucleotide for detection of SNP TSC0024490
actatacccccta

SEQ ID NO: 98523 - DNA, 13 bp, Artificial Sequence
  Oligonucleotide for detection of SNP TSC0024492
attagaatttgta

SEQ ID NO: 98524 - DNA, 13 bp, Artificial Sequence
  Oligonucleotide for detection of SNP TSC0024492
tacaaattctaat

SEQ ID NO: 98525 - DNA, 13 bp, Artificial Sequence
  Oligonucleotide for detection of SNP TSC0024492
attagattttgta

SEQ ID NO: 98526 - DNA, 13 bp, Artificial Sequence
  Oligonucleotide for detection of SNP TSC0024492
tacaaaatctaat

SEQ ID NO: 98527 - DNA, 13 bp, Artificial Sequence
  Oligonucleotide for detection of SNP TSC0024492
tgtaggttttggt

SEQ ID NO: 98528 - DNA, 13 bp, Artificial Sequence
  Oligonucleotide for detection of SNP TSC0024492
accaaaacctaca

SEQ ID NO: 98529 - DNA, 13 bp, Artificial Sequence
  Oligonucleotide for detection of SNP TSC0024492
tgtagggtttggt

SEQ ID NO: 98530 - DNA, 13 bp, Artificial Sequence
  Oligonucleotide for detection of SNP TSC0024492
accaaaccctaca

SEQ ID NO: 98531 - DNA, 13 bp, Artificial Sequence
  Oligonucleotide for detection of SNP TSC0024493
atattggtatatt

SEQ ID NO: 98532 - DNA, 13 bp, Artificial Sequence
  Oligonucleotide for detection of SNP TSC0024493
aatataccaatat

SEQ ID NO: 98533 - DNA, 13 bp, Artificial Sequence
  Oligonucleotide for detection of SNP TSC0024493
atattgttatatt

SEQ ID NO: 98534 - DNA, 13 bp, Artificial Sequence
  Oligonucleotide for detection of SNP TSC0024493
aatataacaatat

SEQ ID NO: 98535 - DNA, 13 bp, Artificial Sequence
  Oligonucleotide for detection of SNP TSC0024493
aatgtattaatat

SEQ ID NO: 98536 - DNA, 13 bp, Artificial Sequence
  Oligonucleotide for detection of SNP TSC0024493
atattaatacatt

SEQ ID NO: 98537 - DNA, 13 bp, Artificial Sequence
  Oligonucleotide for detection of SNP TSC0024493
aatgtaataatat

SEQ ID NO: 98538 - DNA, 13 bp, Artificial Sequence
  Oligonucleotide for detection of SNP TSC0024493
atattattacatt

SEQ ID NO: 98539 - DNA, 13 bp, Artificial Sequence
  Oligonucleotide for detection of SNP TSC0024494
aattagggtaatt

SEQ ID NO: 98540 - DNA, 13 bp, Artificial Sequence
  Oligonucleotide for detection of SNP TSC0024494
aattaccctaatt

SEQ ID NO: 98541 - DNA, 13 bp, Artificial Sequence
  Oligonucleotide for detection of SNP TSC0024494
aattagtgtaatt

SEQ ID NO: 98542 - DNA, 13 bp, Artificial Sequence
  Oligonucleotide for detection of SNP TSC0024494
aattacactaatt

SEQ ID NO: 98543 - DNA, 13 bp, Artificial Sequence
  Oligonucleotide for detection of SNP TSC0024494
agttgttttagtt

SEQ ID NO: 98544 - DNA, 13 bp, Artificial Sequence
  Oligonucleotide for detection of SNP TSC0024494
aactaaaacaact

SEQ ID NO: 98545 - DNA, 13 bp, Artificial Sequence
  Oligonucleotide for detection of SNP TSC0024494
agttgtattagtt

SEQ ID NO: 98546 - DNA, 13 bp, Artificial Sequence
  Oligonucleotide for detection of SNP TSC0024494
aactaatacaact

SEQ ID NO: 98547 - DNA, 13 bp, Artificial Sequence
  Oligonucleotide for detection of SNP TSC0024495
ttattggtatatt

SEQ ID NO: 98548 - DNA, 13 bp, Artificial Sequence
  Oligonucleotide for detection of SNP TSC0024495
aatataccaataa

SEQ ID NO: 98549 - DNA, 13 bp, Artificial Sequence
  Oligonucleotide for detection of SNP TSC0024495
aatatattaatga

SEQ ID NO: 98550 - DNA, 13 bp, Artificial Sequence
  Oligonucleotide for detection of SNP TSC0024495
tcattaatatatt

SEQ ID NO: 98551 - DNA, 13 bp, Artificial Sequence
  Oligonucleotide for detection of SNP TSC0024495
aatataataatga

SEQ ID NO: 98552 - DNA, 13 bp, Artificial Sequence
  Oligonucleotide for detection of SNP TSC0024495
tcattattatatt

SEQ ID NO: 98553 - DNA, 13 bp, Artificial Sequence
  Oligonucleotide for detection of SNP TSC0024496
ttatgtgaaaatt

SEQ ID NO: 98554 - DNA, 13 bp, Artificial Sequence
  Oligonucleotide for detection of SNP TSC0024496
aattttcacataa

SEQ ID NO: 98555 - DNA, 13 bp, Artificial Sequence
  Oligonucleotide for detection of SNP TSC0024496
ttatgtaaaaatt

SEQ ID NO: 98556 - DNA, 13 bp, Artificial Sequence
  Oligonucleotide for detection of SNP TSC0024496
aatttttacataa

SEQ ID NO: 98557 - DNA, 13 bp, Artificial Sequence
  Oligonucleotide for detection of SNP TSC0024503
aaatatgttagta

SEQ ID NO: 98558 - DNA, 13 bp, Artificial Sequence
  Oligonucleotide for detection of SNP TSC0024503
tactaacatattt

SEQ ID NO: 98559 - DNA, 13 bp, Artificial Sequence
  Oligonucleotide for detection of SNP TSC0024503
aaatatattagta

SEQ ID NO: 98560 - DNA, 13 bp, Artificial Sequence
  Oligonucleotide for detection of SNP TSC0024503
tactaatatattt

SEQ ID NO: 98561 - DNA, 13 bp, Artificial Sequence
  Oligonucleotide for detection of SNP TSC0024504
ggtaatgatagga

SEQ ID NO: 98562 - DNA, 13 bp, Artificial Sequence
  Oligonucleotide for detection of SNP TSC0024504
tcctatcattacc

SEQ ID NO: 98563 - DNA, 13 bp, Artificial Sequence
  Oligonucleotide for detection of SNP TSC0024504
ggtaataatagga

SEQ ID NO: 98564 - DNA, 13 bp, Artificial Sequence
  Oligonucleotide for detection of SNP TSC0024504
tcctattattacc

SEQ ID NO: 98565 - DNA, 13 bp, Artificial Sequence
  Oligonucleotide for detection of SNP TSC0024505
ttttttgaagtta

SEQ ID NO: 98566 - DNA, 13 bp, Artificial Sequence
  Oligonucleotide for detection of SNP TSC0024505
taacttcaaaaaa

SEQ ID NO: 98567 - DNA, 13 bp, Artificial Sequence
  Oligonucleotide for detection of SNP TSC0024505
ttttttaaagtta

SEQ ID NO: 98568 - DNA, 13 bp, Artificial Sequence
  Oligonucleotide for detection of SNP TSC0024505
taactttaaaaaa

SEQ ID NO: 98569 - DNA, 13 bp, Artificial Sequence
  Oligonucleotide for detection of SNP TSC0024506
ggattttttttaa

SEQ ID NO: 98570 - DNA, 13 bp, Artificial Sequence
  Oligonucleotide for detection of SNP TSC0024506
ttaaaaaaaatcc

SEQ ID NO: 98571 - DNA, 13 bp, Artificial Sequence
  Oligonucleotide for detection of SNP TSC0024506
ggatttgttttaa

SEQ ID NO: 98572 - DNA, 13 bp, Artificial Sequence
  Oligonucleotide for detection of SNP TSC0024506
ttaaaacaaatcc

SEQ ID NO: 98573 - DNA, 13 bp, Artificial Sequence
  Oligonucleotide for detection of SNP TSC0024506
ttgggagaaatty

SEQ ID NO: 98574 - DNA, 13 bp, Artificial Sequence
  Oligonucleotide for detection of SNP TSC0024506
raatttctcccaa

SEQ ID NO: 98575 - DNA, 13 bp, Artificial Sequence
  Oligonucleotide for detection of SNP TSC0024506
ttgggataaatty

SEQ ID NO: 98576 - DNA, 13 bp, Artificial Sequence
  Oligonucleotide for detection of SNP TSC0024506
raatttatcccaa

SEQ ID NO: 98577 - DNA, 13 bp, Artificial Sequence
  Oligonucleotide for detection of SNP TSC0024507
tttattattagta

SEQ ID NO: 98578 - DNA, 13 bp, Artificial Sequence
  Oligonucleotide for detection of SNP TSC0024507
tactaataataaa

SEQ ID NO: 98579 - DNA, 13 bp, Artificial Sequence
  Oligonucleotide for detection of SNP TSC0024507
tttattgttagta

SEQ ID NO: 98580 - DNA, 13 bp, Artificial Sequence
  Oligonucleotide for detection of SNP TSC0024507
tactaacaataaa

SEQ ID NO: 98581 - DNA, 13 bp, Artificial Sequence
  Oligonucleotide for detection of SNP TSC0024508
aaaaggtggggaa

SEQ ID NO: 98582 - DNA, 13 bp, Artificial Sequence
  Oligonucleotide for detection of SNP TSC0024508
ttccccacctttt

SEQ ID NO: 98583 - DNA, 13 bp, Artificial Sequence
  Oligonucleotide for detection of SNP TSC0024508
aaaaggcggggaa

SEQ ID NO: 98584 - DNA, 13 bp, Artificial Sequence
  Oligonucleotide for detection of SNP TSC0024508
ttccccgcctttt

SEQ ID NO: 98585 - DNA, 13 bp, Artificial Sequence
  Oligonucleotide for detection of SNP TSC0024509
ggaaggtggtttt

SEQ ID NO: 98586 - DNA, 13 bp, Artificial Sequence
  Oligonucleotide for detection of SNP TSC0024509
aaaaccaccttcc

SEQ ID NO: 98587 - DNA, 13 bp, Artificial Sequence
  Oligonucleotide for detection of SNP TSC0024509
ggaaggcggtttt

SEQ ID NO: 98588 - DNA, 13 bp, Artificial Sequence
  Oligonucleotide for detection of SNP TSC0024509
aaaaccgccttcc

SEQ ID NO: 98589 - DNA, 13 bp, Artificial Sequence
  Oligonucleotide for detection of SNP TSC0024509
agggttgttttty

SEQ ID NO: 98590 - DNA, 13 bp, Artificial Sequence
  Oligonucleotide for detection of SNP TSC0024509
raaaaacaaccct

SEQ ID NO: 98591 - DNA, 13 bp, Artificial Sequence
  Oligonucleotide for detection of SNP TSC0024509
agggttattttty

SEQ ID NO: 98592 - DNA, 13 bp, Artificial Sequence
  Oligonucleotide for detection of SNP TSC0024509
raaaaataaccct

SEQ ID NO: 98593 - DNA, 13 bp, Artificial Sequence
  Oligonucleotide for detection of SNP TSC0024509
agggtcgttttty

SEQ ID NO: 98594 - DNA, 13 bp, Artificial Sequence
  Oligonucleotide for detection of SNP TSC0024509
raaaaacgaccct

SEQ ID NO: 98595 - DNA, 13 bp, Artificial Sequence
  Oligonucleotide for detection of SNP TSC0024510
tgggttatggggy

SEQ ID NO: 98596 - DNA, 13 bp, Artificial Sequence
  Oligonucleotide for detection of SNP TSC0024510
rccccataaccca

SEQ ID NO: 98597 - DNA, 13 bp, Artificial Sequence
  Oligonucleotide for detection of SNP TSC0024510
tgggttgtggggy

SEQ ID NO: 98598 - DNA, 13 bp, Artificial Sequence
  Oligonucleotide for detection of SNP TSC0024510
rccccacaaccca

SEQ ID NO: 98599 - DNA, 13 bp, Artificial Sequence
  Oligonucleotide for detection of SNP TSC0024510
tgggttacggggy

SEQ ID NO: 98600 - DNA, 13 bp, Artificial Sequence
  Oligonucleotide for detection of SNP TSC0024510
rccccgtaaccca

SEQ ID NO: 98601 - DNA, 13 bp, Artificial Sequence
  Oligonucleotide for detection of SNP TSC0024510
tgggtcgtggggy

SEQ ID NO: 98602 - DNA, 13 bp, Artificial Sequence
  Oligonucleotide for detection of SNP TSC0024510
rccccacgaccca

SEQ ID NO: 98603 - DNA, 13 bp, Artificial Sequence
  Oligonucleotide for detection of SNP TSC0024510
tgggttgcggggy

SEQ ID NO: 98604 - DNA, 13 bp, Artificial Sequence
  Oligonucleotide for detection of SNP TSC0024510
rccccgcaaccca

SEQ ID NO: 98605 - DNA, 13 bp, Artificial Sequence
  Oligonucleotide for detection of SNP TSC0024510
tgggtcgcggggy

SEQ ID NO: 98606 - DNA, 13 bp, Artificial Sequence
  Oligonucleotide for detection of SNP TSC0024510
rccccgcgaccca

SEQ ID NO: 98607 - DNA, 13 bp, Artificial Sequence
  Oligonucleotide for detection of SNP TSC0024510
gtttcgtggttta

SEQ ID NO: 98608 - DNA, 13 bp, Artificial Sequence
  Oligonucleotide for detection of SNP TSC0024510
taaaccacgaaac

SEQ ID NO: 98609 - DNA, 13 bp, Artificial Sequence
  Oligonucleotide for detection of SNP TSC0024510
gtttcgcggttta

SEQ ID NO: 98610 - DNA, 13 bp, Artificial Sequence
  Oligonucleotide for detection of SNP TSC0024510
taaaccgcgaaac

SEQ ID NO: 98611 - DNA, 13 bp, Artificial Sequence
  Oligonucleotide for detection of SNP TSC0024511
gataggtgagtta

SEQ ID NO: 98612 - DNA, 13 bp, Artificial Sequence
  Oligonucleotide for detection of SNP TSC0024511
taactcacctatc

SEQ ID NO: 98613 - DNA, 13 bp, Artificial Sequence
  Oligonucleotide for detection of SNP TSC0024511
gataggggagtta

SEQ ID NO: 98614 - DNA, 13 bp, Artificial Sequence
  Oligonucleotide for detection of SNP TSC0024511
taactcccctatc

SEQ ID NO: 98615 - DNA, 13 bp, Artificial Sequence
  Oligonucleotide for detection of SNP TSC0024511
gataggcgagtta

SEQ ID NO: 98616 - DNA, 13 bp, Artificial Sequence
  Oligonucleotide for detection of SNP TSC0024511
taactcgcctatc

SEQ ID NO: 98617 - DNA, 13 bp, Artificial Sequence
  Oligonucleotide for detection of SNP TSC0024511
tggtttttttgty

SEQ ID NO: 98618 - DNA, 13 bp, Artificial Sequence
  Oligonucleotide for detection of SNP TSC0024511
racaaaaaaacca

SEQ ID NO: 98619 - DNA, 13 bp, Artificial Sequence
  Oligonucleotide for detection of SNP TSC0024511
tggttcgtttgty

SEQ ID NO: 98620 - DNA, 13 bp, Artificial Sequence
  Oligonucleotide for detection of SNP TSC0024511
racaaacgaacca

SEQ ID NO: 98621 - DNA, 13 bp, Artificial Sequence
  Oligonucleotide for detection of SNP TSC0024513
tattggaatgtta

SEQ ID NO: 98622 - DNA, 13 bp, Artificial Sequence
  Oligonucleotide for detection of SNP TSC0024513
taacattccaata

SEQ ID NO: 98623 - DNA, 13 bp, Artificial Sequence
  Oligonucleotide for detection of SNP TSC0024513
tattgggatgtta

SEQ ID NO: 98624 - DNA, 13 bp, Artificial Sequence
  Oligonucleotide for detection of SNP TSC0024513
taacatcccaata

SEQ ID NO: 98625 - DNA, 13 bp, Artificial Sequence
  Oligonucleotide for detection of SNP TSC0024513
tatcggaatgtta

SEQ ID NO: 98626 - DNA, 13 bp, Artificial Sequence
  Oligonucleotide for detection of SNP TSC0024513
taacattccgata

SEQ ID NO: 98627 - DNA, 13 bp, Artificial Sequence
  Oligonucleotide for detection of SNP TSC0024513
tatcgggatgtta

SEQ ID NO: 98628 - DNA, 13 bp, Artificial Sequence
  Oligonucleotide for detection of SNP TSC0024513
taacatcccgata

SEQ ID NO: 98629 - DNA, 13 bp, Artificial Sequence
  Oligonucleotide for detection of SNP TSC0024514
tagaagtgatagt

SEQ ID NO: 98630 - DNA, 13 bp, Artificial Sequence
  Oligonucleotide for detection of SNP TSC0024514
actatcacttcta

SEQ ID NO: 98631 - DNA, 13 bp, Artificial Sequence
  Oligonucleotide for detection of SNP TSC0024514
tagaagcgatagt

SEQ ID NO: 98632 - DNA, 13 bp, Artificial Sequence
  Oligonucleotide for detection of SNP TSC0024514
actatcgcttcta

SEQ ID NO: 98633 - DNA, 13 bp, Artificial Sequence
  Oligonucleotide for detection of SNP TSC0024515
aatagtaattgtg

SEQ ID NO: 98634 - DNA, 13 bp, Artificial Sequence
  Oligonucleotide for detection of SNP TSC0024515
cacaattactatt

SEQ ID NO: 98635 - DNA, 13 bp, Artificial Sequence
  Oligonucleotide for detection of SNP TSC0024515
aatagtgattgtg

SEQ ID NO: 98636 - DNA, 13 bp, Artificial Sequence
  Oligonucleotide for detection of SNP TSC0024515
cacaatcactatt

SEQ ID NO: 98637 - DNA, 13 bp, Artificial Sequence
  Oligonucleotide for detection of SNP TSC0024515
aatagcgattgtg

SEQ ID NO: 98638 - DNA, 13 bp, Artificial Sequence
  Oligonucleotide for detection of SNP TSC0024515
cacaatcgctatt

SEQ ID NO: 98639 - DNA, 13 bp, Artificial Sequence
  Oligonucleotide for detection of SNP TSC0024515
tatagttgttatt

SEQ ID NO: 98640 - DNA, 13 bp, Artificial Sequence
  Oligonucleotide for detection of SNP TSC0024515
aataacaactata

SEQ ID NO: 98641 - DNA, 13 bp, Artificial Sequence
  Oligonucleotide for detection of SNP TSC0024515
tatagtcgttatt

SEQ ID NO: 98642 - DNA, 13 bp, Artificial Sequence
  Oligonucleotide for detection of SNP TSC0024515
aataacgactata

SEQ ID NO: 98643 - DNA, 13 bp, Artificial Sequence
  Oligonucleotide for detection of SNP TSC0024516
attagagaaatgg

SEQ ID NO: 98644 - DNA, 13 bp, Artificial Sequence
  Oligonucleotide for detection of SNP TSC0024516
ccatttctctaat

SEQ ID NO: 98645 - DNA, 13 bp, Artificial Sequence
  Oligonucleotide for detection of SNP TSC0024516
attagaaaaatgg

SEQ ID NO: 98646 - DNA, 13 bp, Artificial Sequence
  Oligonucleotide for detection of SNP TSC0024516
ccatttttctaat

SEQ ID NO: 98647 - DNA, 13 bp, Artificial Sequence
  Oligonucleotide for detection of SNP TSC0024517
tttttgtggtaay

SEQ ID NO: 98648 - DNA, 13 bp, Artificial Sequence
  Oligonucleotide for detection of SNP TSC0024517
rttaccacaaaaa

SEQ ID NO: 98649 - DNA, 13 bp, Artificial Sequence
  Oligonucleotide for detection of SNP TSC0024517
tttttgcggtaay

SEQ ID NO: 98650 - DNA, 13 bp, Artificial Sequence
  Oligonucleotide for detection of SNP TSC0024517
rttaccgcaaaaa

SEQ ID NO: 98651 - DNA, 13 bp, Artificial Sequence
  Oligonucleotide for detection of SNP TSC0024517
gttgttgtagaga

SEQ ID NO: 98652 - DNA, 13 bp, Artificial Sequence
  Oligonucleotide for detection of SNP TSC0024517
tctctacaacaac

SEQ ID NO: 98653 - DNA, 13 bp, Artificial Sequence
  Oligonucleotide for detection of SNP TSC0024517
gttgttatagaga

SEQ ID NO: 98654 - DNA, 13 bp, Artificial Sequence
  Oligonucleotide for detection of SNP TSC0024517
tctctataacaac

SEQ ID NO: 98655 - DNA, 13 bp, Artificial Sequence
  Oligonucleotide for detection of SNP TSC0024517
gttgtcgtagaga

SEQ ID NO: 98656 - DNA, 13 bp, Artificial Sequence
  Oligonucleotide for detection of SNP TSC0024517
tctctacgacaac

SEQ ID NO: 98657 - DNA, 13 bp, Artificial Sequence
  Oligonucleotide for detection of SNP TSC0024520
tagtagcgaataa

SEQ ID NO: 98658 - DNA, 13 bp, Artificial Sequence
  Oligonucleotide for detection of SNP TSC0024520
ttattcgctacta

SEQ ID NO: 98659 - DNA, 13 bp, Artificial Sequence
  Oligonucleotide for detection of SNP TSC0024526
ttatagtgttaaa

SEQ ID NO: 98660 - DNA, 13 bp, Artificial Sequence
  Oligonucleotide for detection of SNP TSC0024526
tttaacactataa

SEQ ID NO: 98661 - DNA, 13 bp, Artificial Sequence
  Oligonucleotide for detection of SNP TSC0024526
ttatagcgttaaa

SEQ ID NO: 98662 - DNA, 13 bp, Artificial Sequence
  Oligonucleotide for detection of SNP TSC0024526
tttaacgctataa

SEQ ID NO: 98663 - DNA, 13 bp, Artificial Sequence
  Oligonucleotide for detection of SNP TSC0024527
tgaagttgatttt

SEQ ID NO: 98664 - DNA, 13 bp, Artificial Sequence
  Oligonucleotide for detection of SNP TSC0024527
aaaatcaacttca

SEQ ID NO: 98665 - DNA, 13 bp, Artificial Sequence
  Oligonucleotide for detection of SNP TSC0024527
tgaagtcgatttt

SEQ ID NO: 98666 - DNA, 13 bp, Artificial Sequence
  Oligonucleotide for detection of SNP TSC0024527
aaaatcgacttca

SEQ ID NO: 98667 - DNA, 13 bp, Artificial Sequence
  Oligonucleotide for detection of SNP TSC0024527
aaagttggtttta

SEQ ID NO: 98668 - DNA, 13 bp, Artificial Sequence
  Oligonucleotide for detection of SNP TSC0024527
taaaaccaacttt

SEQ ID NO: 98669 - DNA, 13 bp, Artificial Sequence
  Oligonucleotide for detection of SNP TSC0024527
aaagttagtttta

SEQ ID NO: 98670 - DNA, 13 bp, Artificial Sequence
  Oligonucleotide for detection of SNP TSC0024527
taaaactaacttt

SEQ ID NO: 98671 - DNA, 13 bp, Artificial Sequence
  Oligonucleotide for detection of SNP TSC0024527
aaagtcggtttta

SEQ ID NO: 98672 - DNA, 13 bp, Artificial Sequence
  Oligonucleotide for detection of SNP TSC0024527
taaaaccgacttt

SEQ ID NO: 98673 - DNA, 13 bp, Artificial Sequence
  Oligonucleotide for detection of SNP TSC0024528
gagttgaggggta

SEQ ID NO: 98674 - DNA, 13 bp, Artificial Sequence
  Oligonucleotide for detection of SNP TSC0024528
tacccctcaactc

SEQ ID NO: 98675 - DNA, 13 bp, Artificial Sequence
  Oligonucleotide for detection of SNP TSC0024528
gagttggggggta

SEQ ID NO: 98676 - DNA, 13 bp, Artificial Sequence
  Oligonucleotide for detection of SNP TSC0024528
taccccccaactc

SEQ ID NO: 98677 - DNA, 13 bp, Artificial Sequence
  Oligonucleotide for detection of SNP TSC0024529
atatagatttaag

SEQ ID NO: 98678 - DNA, 13 bp, Artificial Sequence
  Oligonucleotide for detection of SNP TSC0024529
cttaaatctatat

SEQ ID NO: 98679 - DNA, 13 bp, Artificial Sequence
  Oligonucleotide for detection of SNP TSC0024529
atataggtttaag

SEQ ID NO: 98680 - DNA, 13 bp, Artificial Sequence
  Oligonucleotide for detection of SNP TSC0024529
cttaaacctatat

SEQ ID NO: 98681 - DNA, 13 bp, Artificial Sequence
  Oligonucleotide for detection of SNP TSC0024530
gaaaaggtaggty

SEQ ID NO: 98682 - DNA, 13 bp, Artificial Sequence
  Oligonucleotide for detection of SNP TSC0024530
racctaccttttc

SEQ ID NO: 98683 - DNA, 13 bp, Artificial Sequence
  Oligonucleotide for detection of SNP TSC0024530
gaaaagataggty

SEQ ID NO: 98684 - DNA, 13 bp, Artificial Sequence
  Oligonucleotide for detection of SNP TSC0024530
racctatcttttc

SEQ ID NO: 98685 - DNA, 13 bp, Artificial Sequence
  Oligonucleotide for detection of SNP TSC0024532
ttagtaatgaaty

SEQ ID NO: 98686 - DNA, 13 bp, Artificial Sequence
  Oligonucleotide for detection of SNP TSC0024532
rattcattactaa

SEQ ID NO: 98687 - DNA, 13 bp, Artificial Sequence
  Oligonucleotide for detection of SNP TSC0024532
ttagtattgaaty

SEQ ID NO: 98688 - DNA, 13 bp, Artificial Sequence
  Oligonucleotide for detection of SNP TSC0024532
rattcaatactaa

SEQ ID NO: 98689 - DNA, 13 bp, Artificial Sequence
  Oligonucleotide for detection of SNP TSC0024532
ttagtaacgaaty

SEQ ID NO: 98690 - DNA, 13 bp, Artificial Sequence
  Oligonucleotide for detection of SNP TSC0024532
rattcgttactaa

SEQ ID NO: 98691 - DNA, 13 bp, Artificial Sequence
  Oligonucleotide for detection of SNP TSC0024532
ttagtatcgaaty

SEQ ID NO: 98692 - DNA, 13 bp, Artificial Sequence
  Oligonucleotide for detection of SNP TSC0024532
rattcgatactaa

SEQ ID NO: 98693 - DNA, 13 bp, Artificial Sequence
  Oligonucleotide for detection of SNP TSC0024532
ggtttgttgttga

SEQ ID NO: 98694 - DNA, 13 bp, Artificial Sequence
  Oligonucleotide for detection of SNP TSC0024532
tcaacaacaaacc

SEQ ID NO: 98695 - DNA, 13 bp, Artificial Sequence
  Oligonucleotide for detection of SNP TSC0024532
ggtttggtgttga

SEQ ID NO: 98696 - DNA, 13 bp, Artificial Sequence
  Oligonucleotide for detection of SNP TSC0024532
tcaacaccaaacc

SEQ ID NO: 98697 - DNA, 13 bp, Artificial Sequence
  Oligonucleotide for detection of SNP TSC0024532
ggttcgttgttga

SEQ ID NO: 98698 - DNA, 13 bp, Artificial Sequence
  Oligonucleotide for detection of SNP TSC0024532
tcaacaacgaacc

SEQ ID NO: 98699 - DNA, 13 bp, Artificial Sequence
  Oligonucleotide for detection of SNP TSC0024532
ggttcggtgttga

SEQ ID NO: 98700 - DNA, 13 bp, Artificial Sequence
  Oligonucleotide for detection of SNP TSC0024532
tcaacaccgaacc

SEQ ID NO: 98701 - DNA, 13 bp, Artificial Sequence
  Oligonucleotide for detection of SNP TSC0024536
atgttatgattgt

SEQ ID NO: 98702 - DNA, 13 bp, Artificial Sequence
  Oligonucleotide for detection of SNP TSC0024536
acaatcataacat

SEQ ID NO: 98703 - DNA, 13 bp, Artificial Sequence
  Oligonucleotide for detection of SNP TSC0024536
atgttacgattgt

SEQ ID NO: 98704 - DNA, 13 bp, Artificial Sequence
  Oligonucleotide for detection of SNP TSC0024536
acaatcgtaacat

SEQ ID NO: 98705 - DNA, 13 bp, Artificial Sequence
  Oligonucleotide for detection of SNP TSC0024537
aaatgtgatagga

SEQ ID NO: 98706 - DNA, 13 bp, Artificial Sequence
  Oligonucleotide for detection of SNP TSC0024537
tcctatcacattt

SEQ ID NO: 98707 - DNA, 13 bp, Artificial Sequence
  Oligonucleotide for detection of SNP TSC0024537
aaatgtaatagga

SEQ ID NO: 98708 - DNA, 13 bp, Artificial Sequence
  Oligonucleotide for detection of SNP TSC0024537
tcctattacattt

SEQ ID NO: 98709 - DNA, 13 bp, Artificial Sequence
  Oligonucleotide for detection of SNP TSC0024538
tataaatgttaat

SEQ ID NO: 98710 - DNA, 13 bp, Artificial Sequence
  Oligonucleotide for detection of SNP TSC0024538
attaacatttata

SEQ ID NO: 98711 - DNA, 13 bp, Artificial Sequence
  Oligonucleotide for detection of SNP TSC0024538
tataaacgttaat

SEQ ID NO: 98712 - DNA, 13 bp, Artificial Sequence
  Oligonucleotide for detection of SNP TSC0024538
attaacgtttata

SEQ ID NO: 98713 - DNA, 13 bp, Artificial Sequence
  Oligonucleotide for detection of SNP TSC0024538
attgatgtttatg

SEQ ID NO: 98714 - DNA, 13 bp, Artificial Sequence
  Oligonucleotide for detection of SNP TSC0024538
cataaacatcaat

SEQ ID NO: 98715 - DNA, 13 bp, Artificial Sequence
  Oligonucleotide for detection of SNP TSC0024538
attgatatttatg

SEQ ID NO: 98716 - DNA, 13 bp, Artificial Sequence
  Oligonucleotide for detection of SNP TSC0024538
cataaatatcaat

SEQ ID NO: 98717 - DNA, 13 bp, Artificial Sequence
  Oligonucleotide for detection of SNP TSC0024538
attgacgtttatg

SEQ ID NO: 98718 - DNA, 13 bp, Artificial Sequence
  Oligonucleotide for detection of SNP TSC0024538
cataaacgtcaat

SEQ ID NO: 98719 - DNA, 13 bp, Artificial Sequence
  Oligonucleotide for detection of SNP TSC0024539
ggtgattgggtta

SEQ ID NO: 98720 - DNA, 13 bp, Artificial Sequence
  Oligonucleotide for detection of SNP TSC0024539
taacccaatcacc

SEQ ID NO: 98721 - DNA, 13 bp, Artificial Sequence
  Oligonucleotide for detection of SNP TSC0024539
ggtgatggggtta

SEQ ID NO: 98722 - DNA, 13 bp, Artificial Sequence
  Oligonucleotide for detection of SNP TSC0024539
taaccccatcacc

SEQ ID NO: 98723 - DNA, 13 bp, Artificial Sequence
  Oligonucleotide for detection of SNP TSC0024539
ggtgatcgggtta

SEQ ID NO: 98724 - DNA, 13 bp, Artificial Sequence
  Oligonucleotide for detection of SNP TSC0024539
taacccgatcacc

SEQ ID NO: 98725 - DNA, 13 bp, Artificial Sequence
  Oligonucleotide for detection of SNP TSC0024539
tgatttgattaty

SEQ ID NO: 98726 - DNA, 13 bp, Artificial Sequence
  Oligonucleotide for detection of SNP TSC0024539
rataatcaaatca

SEQ ID NO: 98727 - DNA, 13 bp, Artificial Sequence
  Oligonucleotide for detection of SNP TSC0024539
tgattttattaty

SEQ ID NO: 98728 - DNA, 13 bp, Artificial Sequence
  Oligonucleotide for detection of SNP TSC0024539
rataataaaatca

SEQ ID NO: 98729 - DNA, 13 bp, Artificial Sequence
  Oligonucleotide for detection of SNP TSC0024539
tgattcgattaty

SEQ ID NO: 98730 - DNA, 13 bp, Artificial Sequence
  Oligonucleotide for detection of SNP TSC0024539
rataatcgaatca

SEQ ID NO: 98731 - DNA, 13 bp, Artificial Sequence
  Oligonucleotide for detection of SNP TSC0024541
gtgtttatttttt

SEQ ID NO: 98732 - DNA, 13 bp, Artificial Sequence
  Oligonucleotide for detection of SNP TSC0024541
aaaaaataaacac

SEQ ID NO: 98733 - DNA, 13 bp, Artificial Sequence
  Oligonucleotide for detection of SNP TSC0024541
gtgtttttttttt

SEQ ID NO: 98734 - DNA, 13 bp, Artificial Sequence
  Oligonucleotide for detection of SNP TSC0024541
aaaaaaaaaacac

SEQ ID NO: 98735 - DNA, 13 bp, Artificial Sequence
  Oligonucleotide for detection of SNP TSC0024541
gcgtttatttttt

SEQ ID NO: 98736 - DNA, 13 bp, Artificial Sequence
  Oligonucleotide for detection of SNP TSC0024541
aaaaaataaacgc

SEQ ID NO: 98737 - DNA, 13 bp, Artificial Sequence
  Oligonucleotide for detection of SNP TSC0024541
gcgtttttttttt

SEQ ID NO: 98738 - DNA, 13 bp, Artificial Sequence
  Oligonucleotide for detection of SNP TSC0024541
aaaaaaaaaacgc

SEQ ID NO: 98739 - DNA, 13 bp, Artificial Sequence
  Oligonucleotide for detection of SNP TSC0024541
agagggtaaatgy

SEQ ID NO: 98740 - DNA, 13 bp, Artificial Sequence
  Oligonucleotide for detection of SNP TSC0024541
rcatttaccctct

SEQ ID NO: 98741 - DNA, 13 bp, Artificial Sequence
  Oligonucleotide for detection of SNP TSC0024541
agaggggaaatgy

SEQ ID NO: 98742 - DNA, 13 bp, Artificial Sequence
  Oligonucleotide for detection of SNP TSC0024541
rcatttcccctct

SEQ ID NO: 98743 - DNA, 13 bp, Artificial Sequence
  Oligonucleotide for detection of SNP TSC0024541
agagggtaaacgy

SEQ ID NO: 98744 - DNA, 13 bp, Artificial Sequence
  Oligonucleotide for detection of SNP TSC0024541
rcgtttaccctct

SEQ ID NO: 98745 - DNA, 13 bp, Artificial Sequence
  Oligonucleotide for detection of SNP TSC0024541
agaggggaaacgy

SEQ ID NO: 98746 - DNA, 13 bp, Artificial Sequence
  Oligonucleotide for detection of SNP TSC0024541
rcgtttcccctct

SEQ ID NO: 98747 - DNA, 13 bp, Artificial Sequence
  Oligonucleotide for detection of SNP TSC0024542
aggttgaagtgta

SEQ ID NO: 98748 - DNA, 13 bp, Artificial Sequence
  Oligonucleotide for detection of SNP TSC0024542
tacacttcaacct

SEQ ID NO: 98749 - DNA, 13 bp, Artificial Sequence
  Oligonucleotide for detection of SNP TSC0024545
tgggaataaagtt

SEQ ID NO: 98750 - DNA, 13 bp, Artificial Sequence
  Oligonucleotide for detection of SNP TSC0024545
aactttattccca

SEQ ID NO: 98751 - DNA, 13 bp, Artificial Sequence
  Oligonucleotide for detection of SNP TSC0024545
tgggaagaaagtt

SEQ ID NO: 98752 - DNA, 13 bp, Artificial Sequence
  Oligonucleotide for detection of SNP TSC0024545
aactttcttccca

SEQ ID NO: 98753 - DNA, 13 bp, Artificial Sequence
  Oligonucleotide for detection of SNP TSC0024547
tattttatgttat

SEQ ID NO: 98754 - DNA, 13 bp, Artificial Sequence
  Oligonucleotide for detection of SNP TSC0024547
ataacataaaata

SEQ ID NO: 98755 - DNA, 13 bp, Artificial Sequence
  Oligonucleotide for detection of SNP TSC0024547
tattttgtgttat

SEQ ID NO: 98756 - DNA, 13 bp, Artificial Sequence
  Oligonucleotide for detection of SNP TSC0024547
ataacacaaaata

SEQ ID NO: 98757 - DNA, 13 bp, Artificial Sequence
  Oligonucleotide for detection of SNP TSC0024547
tatttcgtgttat

SEQ ID NO: 98758 - DNA, 13 bp, Artificial Sequence
  Oligonucleotide for detection of SNP TSC0024547
ataacacgaaata

SEQ ID NO: 98759 - DNA, 13 bp, Artificial Sequence
  Oligonucleotide for detection of SNP TSC0024547
ataatatgggatg

SEQ ID NO: 98760 - DNA, 13 bp, Artificial Sequence
  Oligonucleotide for detection of SNP TSC0024547
catcccatattat

SEQ ID NO: 98761 - DNA, 13 bp, Artificial Sequence
  Oligonucleotide for detection of SNP TSC0024547
ataatacgggatg

SEQ ID NO: 98762 - DNA, 13 bp, Artificial Sequence
  Oligonucleotide for detection of SNP TSC0024547
catcccgtattat

SEQ ID NO: 98763 - DNA, 13 bp, Artificial Sequence
  Oligonucleotide for detection of SNP TSC0024548
gttgttaggagty

SEQ ID NO: 98764 - DNA, 13 bp, Artificial Sequence
  Oligonucleotide for detection of SNP TSC0024548
ractcctaacaac

SEQ ID NO: 98765 - DNA, 13 bp, Artificial Sequence
  Oligonucleotide for detection of SNP TSC0024548
gttgttgggagty

SEQ ID NO: 98766 - DNA, 13 bp, Artificial Sequence
  Oligonucleotide for detection of SNP TSC0024548
ractcccaacaac

SEQ ID NO: 98767 - DNA, 13 bp, Artificial Sequence
  Oligonucleotide for detection of SNP TSC0024548
gttgtcgggagty

SEQ ID NO: 98768 - DNA, 13 bp, Artificial Sequence
  Oligonucleotide for detection of SNP TSC0024548
ractcccgacaac

SEQ ID NO: 98769 - DNA, 13 bp, Artificial Sequence
  Oligonucleotide for detection of SNP TSC0024548
ggtttttggtagy

SEQ ID NO: 98770 - DNA, 13 bp, Artificial Sequence
  Oligonucleotide for detection of SNP TSC0024548
rctaccaaaaacc

SEQ ID NO: 98771 - DNA, 13 bp, Artificial Sequence
  Oligonucleotide for detection of SNP TSC0024548
ggttttcggtagy

SEQ ID NO: 98772 - DNA, 13 bp, Artificial Sequence
  Oligonucleotide for detection of SNP TSC0024548
rctaccgaaaacc

SEQ ID NO: 98773 - DNA, 13 bp, Artificial Sequence
  Oligonucleotide for detection of SNP TSC0024549
tataaggttggat

SEQ ID NO: 98774 - DNA, 13 bp, Artificial Sequence
  Oligonucleotide for detection of SNP TSC0024549
atccaaccttata

SEQ ID NO: 98775 - DNA, 13 bp, Artificial Sequence
  Oligonucleotide for detection of SNP TSC0024549
tataagtttggat

SEQ ID NO: 98776 - DNA, 13 bp, Artificial Sequence
  Oligonucleotide for detection of SNP TSC0024549
atccaaacttata

SEQ ID NO: 98777 - DNA, 13 bp, Artificial Sequence
  Oligonucleotide for detection of SNP TSC0024549
atttagttttgtg

SEQ ID NO: 98778 - DNA, 13 bp, Artificial Sequence
  Oligonucleotide for detection of SNP TSC0024549
cacaaaactaaat

SEQ ID NO: 98779 - DNA, 13 bp, Artificial Sequence
  Oligonucleotide for detection of SNP TSC0024549
atttagatttgtg

SEQ ID NO: 98780 - DNA, 13 bp, Artificial Sequence
  Oligonucleotide for detection of SNP TSC0024549
cacaaatctaaat

SEQ ID NO: 98781 - DNA, 13 bp, Artificial Sequence
  Oligonucleotide for detection of SNP TSC0024551
agggatgtggtat

SEQ ID NO: 98782 - DNA, 13 bp, Artificial Sequence
  Oligonucleotide for detection of SNP TSC0024551
ataccacatccct

SEQ ID NO: 98783 - DNA, 13 bp, Artificial Sequence
  Oligonucleotide for detection of SNP TSC0024551
agggatatggtat

SEQ ID NO: 98784 - DNA, 13 bp, Artificial Sequence
  Oligonucleotide for detection of SNP TSC0024551
ataccatatccct

SEQ ID NO: 98785 - DNA, 13 bp, Artificial Sequence
  Oligonucleotide for detection of SNP TSC0024552
aggggtattgtta

SEQ ID NO: 98786 - DNA, 13 bp, Artificial Sequence
  Oligonucleotide for detection of SNP TSC0024552
taacaatacccct

SEQ ID NO: 98787 - DNA, 13 bp, Artificial Sequence
  Oligonucleotide for detection of SNP TSC0024552
aggggtgttgtta

SEQ ID NO: 98788 - DNA, 13 bp, Artificial Sequence
  Oligonucleotide for detection of SNP TSC0024552
taacaacacccct

SEQ ID NO: 98789 - DNA, 13 bp, Artificial Sequence
  Oligonucleotide for detection of SNP TSC0024553
atataatgattaa

SEQ ID NO: 98790 - DNA, 13 bp, Artificial Sequence
  Oligonucleotide for detection of SNP TSC0024553
ttaatcattatat

SEQ ID NO: 98791 - DNA, 13 bp, Artificial Sequence
  Oligonucleotide for detection of SNP TSC0024553
atataacgattaa

SEQ ID NO: 98792 - DNA, 13 bp, Artificial Sequence
  Oligonucleotide for detection of SNP TSC0024553
ttaatcgttatat

SEQ ID NO: 98793 - DNA, 13 bp, Artificial Sequence
  Oligonucleotide for detection of SNP TSC0024553
ttgattgttgtat

SEQ ID NO: 98794 - DNA, 13 bp, Artificial Sequence
  Oligonucleotide for detection of SNP TSC0024553
atacaacaatcaa

SEQ ID NO: 98795 - DNA, 13 bp, Artificial Sequence
  Oligonucleotide for detection of SNP TSC0024553
ttgattattgtat

SEQ ID NO: 98796 - DNA, 13 bp, Artificial Sequence
  Oligonucleotide for detection of SNP TSC0024553
atacaataatcaa

SEQ ID NO: 98797 - DNA, 13 bp, Artificial Sequence
  Oligonucleotide for detection of SNP TSC0024553
ttgatcgttgtat

SEQ ID NO: 98798 - DNA, 13 bp, Artificial Sequence
  Oligonucleotide for detection of SNP TSC0024553
atacaacgatcaa

SEQ ID NO: 98799 - DNA, 13 bp, Artificial Sequence
  Oligonucleotide for detection of SNP TSC0024555
ttatgttggtttt

SEQ ID NO: 98800 - DNA, 13 bp, Artificial Sequence
  Oligonucleotide for detection of SNP TSC0024555
aaaaccaacataa

SEQ ID NO: 98801 - DNA, 13 bp, Artificial Sequence
  Oligonucleotide for detection of SNP TSC0024555
ttatgtcggtttt

SEQ ID NO: 98802 - DNA, 13 bp, Artificial Sequence
  Oligonucleotide for detection of SNP TSC0024555
aaaaccgacataa

SEQ ID NO: 98803 - DNA, 13 bp, Artificial Sequence
  Oligonucleotide for detection of SNP TSC0024555
aaggttgatatga

SEQ ID NO: 98804 - DNA, 13 bp, Artificial Sequence
  Oligonucleotide for detection of SNP TSC0024555
tcatatcaacctt

SEQ ID NO: 98805 - DNA, 13 bp, Artificial Sequence
  Oligonucleotide for detection of SNP TSC0024555
aaggttaatatga

SEQ ID NO: 98806 - DNA, 13 bp, Artificial Sequence
  Oligonucleotide for detection of SNP TSC0024555
tcatattaacctt

SEQ ID NO: 98807 - DNA, 13 bp, Artificial Sequence
  Oligonucleotide for detection of SNP TSC0024555
aaggtcgatatga

SEQ ID NO: 98808 - DNA, 13 bp, Artificial Sequence
  Oligonucleotide for detection of SNP TSC0024555
tcatatcgacctt

SEQ ID NO: 98809 - DNA, 13 bp, Artificial Sequence
  Oligonucleotide for detection of SNP TSC0024556
tgaatatgtgtty

SEQ ID NO: 98810 - DNA, 13 bp, Artificial Sequence
  Oligonucleotide for detection of SNP TSC0024556
raacacatattca

SEQ ID NO: 98811 - DNA, 13 bp, Artificial Sequence
  Oligonucleotide for detection of SNP TSC0024556
tgaatacgtgtty

SEQ ID NO: 98812 - DNA, 13 bp, Artificial Sequence
  Oligonucleotide for detection of SNP TSC0024556
raacacgtattca

SEQ ID NO: 98813 - DNA, 13 bp, Artificial Sequence
  Oligonucleotide for detection of SNP TSC0024556
gggtatgtgttta

SEQ ID NO: 98814 - DNA, 13 bp, Artificial Sequence
  Oligonucleotide for detection of SNP TSC0024556
taaacacataccc

SEQ ID NO: 98815 - DNA, 13 bp, Artificial Sequence
  Oligonucleotide for detection of SNP TSC0024556
gggtatatgttta

SEQ ID NO: 98816 - DNA, 13 bp, Artificial Sequence
  Oligonucleotide for detection of SNP TSC0024556
taaacatataccc

SEQ ID NO: 98817 - DNA, 13 bp, Artificial Sequence
  Oligonucleotide for detection of SNP TSC0024556
gggtacgtgttta

SEQ ID NO: 98818 - DNA, 13 bp, Artificial Sequence
  Oligonucleotide for detection of SNP TSC0024556
taaacacgtaccc

SEQ ID NO: 98819 - DNA, 13 bp, Artificial Sequence
  Oligonucleotide for detection of SNP TSC0024557
tggtttgtatttg

SEQ ID NO: 98820 - DNA, 13 bp, Artificial Sequence
  Oligonucleotide for detection of SNP TSC0024557
caaatacaaacca

SEQ ID NO: 98821 - DNA, 13 bp, Artificial Sequence
  Oligonucleotide for detection of SNP TSC0024557
tggtttttatttg

SEQ ID NO: 98822 - DNA, 13 bp, Artificial Sequence
  Oligonucleotide for detection of SNP TSC0024557
caaataaaaacca

SEQ ID NO: 98823 - DNA, 13 bp, Artificial Sequence
  Oligonucleotide for detection of SNP TSC0024557
tagatataaatta

SEQ ID NO: 98824 - DNA, 13 bp, Artificial Sequence
  Oligonucleotide for detection of SNP TSC0024557
taatttatatcta

SEQ ID NO: 98825 - DNA, 13 bp, Artificial Sequence
  Oligonucleotide for detection of SNP TSC0024557
tagataaaaatta

SEQ ID NO: 98826 - DNA, 13 bp, Artificial Sequence
  Oligonucleotide for detection of SNP TSC0024557
taatttttatcta

SEQ ID NO: 98827 - DNA, 13 bp, Artificial Sequence
  Oligonucleotide for detection of SNP TSC0024559
aaagatattattt

SEQ ID NO: 98828 - DNA, 13 bp, Artificial Sequence
  Oligonucleotide for detection of SNP TSC0024559
aaataatatcttt

SEQ ID NO: 98829 - DNA, 13 bp, Artificial Sequence
  Oligonucleotide for detection of SNP TSC0024559
aaagatgttattt

SEQ ID NO: 98830 - DNA, 13 bp, Artificial Sequence
  Oligonucleotide for detection of SNP TSC0024559
aaataacatcttt

SEQ ID NO: 98831 - DNA, 13 bp, Artificial Sequence
  Oligonucleotide for detection of SNP TSC0024559
aaagacgttattt

SEQ ID NO: 98832 - DNA, 13 bp, Artificial Sequence
  Oligonucleotide for detection of SNP TSC0024559
aaataacgtcttt

SEQ ID NO: 98833 - DNA, 13 bp, Artificial Sequence
  Oligonucleotide for detection of SNP TSC0024559
aaatgatgttttt

SEQ ID NO: 98834 - DNA, 13 bp, Artificial Sequence
  Oligonucleotide for detection of SNP TSC0024559
aaaaacatcattt

SEQ ID NO: 98835 - DNA, 13 bp, Artificial Sequence
  Oligonucleotide for detection of SNP TSC0024559
aaatgacgttttt

SEQ ID NO: 98836 - DNA, 13 bp, Artificial Sequence
  Oligonucleotide for detection of SNP TSC0024559
aaaaacgtcattt

SEQ ID NO: 98837 - DNA, 13 bp, Artificial Sequence
  Oligonucleotide for detection of SNP TSC0024560
attttgggattcg

SEQ ID NO: 98838 - DNA, 13 bp, Artificial Sequence
  Oligonucleotide for detection of SNP TSC0024560
cgaatcccaaaat

SEQ ID NO: 98839 - DNA, 13 bp, Artificial Sequence
  Oligonucleotide for detection of SNP TSC0024560
attttgtgattcg

SEQ ID NO: 98840 - DNA, 13 bp, Artificial Sequence
  Oligonucleotide for detection of SNP TSC0024560
cgaatcacaaaat

SEQ ID NO: 98841 - DNA, 13 bp, Artificial Sequence
  Oligonucleotide for detection of SNP TSC0024560
tgggttttagggt

SEQ ID NO: 98842 - DNA, 13 bp, Artificial Sequence
  Oligonucleotide for detection of SNP TSC0024560
accctaaaaccca

SEQ ID NO: 98843 - DNA, 13 bp, Artificial Sequence
  Oligonucleotide for detection of SNP TSC0024560
tgggttatagggt

SEQ ID NO: 98844 - DNA, 13 bp, Artificial Sequence
  Oligonucleotide for detection of SNP TSC0024560
accctataaccca

SEQ ID NO: 98845 - DNA, 13 bp, Artificial Sequence
  Oligonucleotide for detection of SNP TSC0024560
cgggttttagggt

SEQ ID NO: 98846 - DNA, 13 bp, Artificial Sequence
  Oligonucleotide for detection of SNP TSC0024560
accctaaaacccg

SEQ ID NO: 98847 - DNA, 13 bp, Artificial Sequence
  Oligonucleotide for detection of SNP TSC0024560
cgggttatagggt

SEQ ID NO: 98848 - DNA, 13 bp, Artificial Sequence
  Oligonucleotide for detection of SNP TSC0024560
accctataacccg

SEQ ID NO: 98849 - DNA, 13 bp, Artificial Sequence
  Oligonucleotide for detection of SNP TSC0024561
gatttgttttgag

SEQ ID NO: 98850 - DNA, 13 bp, Artificial Sequence
  Oligonucleotide for detection of SNP TSC0024561
ctcaaaacaaatc

SEQ ID NO: 98851 - DNA, 13 bp, Artificial Sequence
  Oligonucleotide for detection of SNP TSC0024561
gatttggtttgag

SEQ ID NO: 98852 - DNA, 13 bp, Artificial Sequence
  Oligonucleotide for detection of SNP TSC0024561
ctcaaaccaaatc

SEQ ID NO: 98853 - DNA, 13 bp, Artificial Sequence
  Oligonucleotide for detection of SNP TSC0024561
gattcgttttgag

SEQ ID NO: 98854 - DNA, 13 bp, Artificial Sequence
  Oligonucleotide for detection of SNP TSC0024561
ctcaaaacgaatc

SEQ ID NO: 98855 - DNA, 13 bp, Artificial Sequence
  Oligonucleotide for detection of SNP TSC0024561
gattcggtttgag

SEQ ID NO: 98856 - DNA, 13 bp, Artificial Sequence
  Oligonucleotide for detection of SNP TSC0024561
ctcaaaccgaatc

SEQ ID NO: 98857 - DNA, 13 bp, Artificial Sequence
  Oligonucleotide for detection of SNP TSC0024561
tttaaggtgggty

SEQ ID NO: 98858 - DNA, 13 bp, Artificial Sequence
  Oligonucleotide for detection of SNP TSC0024561
racccaccttaaa

SEQ ID NO: 98859 - DNA, 13 bp, Artificial Sequence
  Oligonucleotide for detection of SNP TSC0024561
tttaagttgggty

SEQ ID NO: 98860 - DNA, 13 bp, Artificial Sequence
  Oligonucleotide for detection of SNP TSC0024561
racccaacttaaa

SEQ ID NO: 98861 - DNA, 13 bp, Artificial Sequence
  Oligonucleotide for detection of SNP TSC0024561
tttaaggcgggty

SEQ ID NO: 98862 - DNA, 13 bp, Artificial Sequence
  Oligonucleotide for detection of SNP TSC0024561
racccgccttaaa

SEQ ID NO: 98863 - DNA, 13 bp, Artificial Sequence
  Oligonucleotide for detection of SNP TSC0024561
tttaagtcgggty

SEQ ID NO: 98864 - DNA, 13 bp, Artificial Sequence
  Oligonucleotide for detection of SNP TSC0024561
racccgacttaaa

SEQ ID NO: 98865 - DNA, 13 bp, Artificial Sequence
  Oligonucleotide for detection of SNP TSC0024562
atttttatttgag

SEQ ID NO: 98866 - DNA, 13 bp, Artificial Sequence
  Oligonucleotide for detection of SNP TSC0024562
ctcaaataaaaat

SEQ ID NO: 98867 - DNA, 13 bp, Artificial Sequence
  Oligonucleotide for detection of SNP TSC0024562
atttttgtttgag

SEQ ID NO: 98868 - DNA, 13 bp, Artificial Sequence
  Oligonucleotide for detection of SNP TSC0024562
ctcaaacaaaaat

SEQ ID NO: 98869 - DNA, 13 bp, Artificial Sequence
  Oligonucleotide for detection of SNP TSC0024562
attttcgtttgag

SEQ ID NO: 98870 - DNA, 13 bp, Artificial Sequence
  Oligonucleotide for detection of SNP TSC0024562
ctcaaacgaaaat

SEQ ID NO: 98871 - DNA, 13 bp, Artificial Sequence
  Oligonucleotide for detection of SNP TSC0024562
tttaaatgggaat

SEQ ID NO: 98872 - DNA, 13 bp, Artificial Sequence
  Oligonucleotide for detection of SNP TSC0024562
attcccatttaaa

SEQ ID NO: 98873 - DNA, 13 bp, Artificial Sequence
  Oligonucleotide for detection of SNP TSC0024562
tttaaacgggaat

SEQ ID NO: 98874 - DNA, 13 bp, Artificial Sequence
  Oligonucleotide for detection of SNP TSC0024562
attcccgtttaaa

SEQ ID NO: 98875 - DNA, 13 bp, Artificial Sequence
  Oligonucleotide for detection of SNP TSC0024563
taggtggtagttg

SEQ ID NO: 98876 - DNA, 13 bp, Artificial Sequence
  Oligonucleotide for detection of SNP TSC0024563
caactaccaccta

SEQ ID NO: 98877 - DNA, 13 bp, Artificial Sequence
  Oligonucleotide for detection of SNP TSC0024563
taggtgttagttg

SEQ ID NO: 98878 - DNA, 13 bp, Artificial Sequence
  Oligonucleotide for detection of SNP TSC0024563
caactaacaccta

SEQ ID NO: 98879 - DNA, 13 bp, Artificial Sequence
  Oligonucleotide for detection of SNP TSC0024563
tagttattatttg

SEQ ID NO: 98880 - DNA, 13 bp, Artificial Sequence
  Oligonucleotide for detection of SNP TSC0024563
caaataataacta

SEQ ID NO: 98881 - DNA, 13 bp, Artificial Sequence
  Oligonucleotide for detection of SNP TSC0024563
tagttaatatttg

SEQ ID NO: 98882 - DNA, 13 bp, Artificial Sequence
  Oligonucleotide for detection of SNP TSC0024563
caaatattaacta

SEQ ID NO: 98883 - DNA, 13 bp, Artificial Sequence
  Oligonucleotide for detection of SNP TSC0024567
tagtttagttgga

SEQ ID NO: 98884 - DNA, 13 bp, Artificial Sequence
  Oligonucleotide for detection of SNP TSC0024567
tccaactaaacta

SEQ ID NO: 98885 - DNA, 13 bp, Artificial Sequence
  Oligonucleotide for detection of SNP TSC0024567
tagtttggttgga

SEQ ID NO: 98886 - DNA, 13 bp, Artificial Sequence
  Oligonucleotide for detection of SNP TSC0024567
tccaaccaaacta

SEQ ID NO: 98887 - DNA, 13 bp, Artificial Sequence
  Oligonucleotide for detection of SNP TSC0024567
tagtttagtcgga

SEQ ID NO: 98888 - DNA, 13 bp, Artificial Sequence
  Oligonucleotide for detection of SNP TSC0024567
tccgactaaacta

SEQ ID NO: 98889 - DNA, 13 bp, Artificial Sequence
  Oligonucleotide for detection of SNP TSC0024567
tagttcggttgga

SEQ ID NO: 98890 - DNA, 13 bp, Artificial Sequence
  Oligonucleotide for detection of SNP TSC0024567
tccaaccgaacta

SEQ ID NO: 98891 - DNA, 13 bp, Artificial Sequence
  Oligonucleotide for detection of SNP TSC0024567
tagtttggtcgga

SEQ ID NO: 98892 - DNA, 13 bp, Artificial Sequence
  Oligonucleotide for detection of SNP TSC0024567
tccgaccaaacta

SEQ ID NO: 98893 - DNA, 13 bp, Artificial Sequence
  Oligonucleotide for detection of SNP TSC0024567
tagttcggtcgga

SEQ ID NO: 98894 - DNA, 13 bp, Artificial Sequence
  Oligonucleotide for detection of SNP TSC0024567
tccgaccgaacta

SEQ ID NO: 98895 - DNA, 13 bp, Artificial Sequence
  Oligonucleotide for detection of SNP TSC0024567
tttggttgagttg

SEQ ID NO: 98896 - DNA, 13 bp, Artificial Sequence
  Oligonucleotide for detection of SNP TSC0024567
caactcaaccaaa

SEQ ID NO: 98897 - DNA, 13 bp, Artificial Sequence
  Oligonucleotide for detection of SNP TSC0024567
ttcggttgagttg

SEQ ID NO: 98898 - DNA, 13 bp, Artificial Sequence
  Oligonucleotide for detection of SNP TSC0024567
caactcaaccgaa

SEQ ID NO: 98899 - DNA, 13 bp, Artificial Sequence
  Oligonucleotide for detection of SNP TSC0024567
tttggtcgagttg

SEQ ID NO: 98900 - DNA, 13 bp, Artificial Sequence
  Oligonucleotide for detection of SNP TSC0024567
caactcgaccaaa

SEQ ID NO: 98901 - DNA, 13 bp, Artificial Sequence
  Oligonucleotide for detection of SNP TSC0024567
ttcggtcgagttg

SEQ ID NO: 98902 - DNA, 13 bp, Artificial Sequence
  Oligonucleotide for detection of SNP TSC0024567
caactcgaccgaa

SEQ ID NO: 98903 - DNA, 13 bp, Artificial Sequence
  Oligonucleotide for detection of SNP TSC0024568
gtatagatttggt

SEQ ID NO: 98904 - DNA, 13 bp, Artificial Sequence
  Oligonucleotide for detection of SNP TSC0024568
accaaatctatac

SEQ ID NO: 98905 - DNA, 13 bp, Artificial Sequence
  Oligonucleotide for detection of SNP TSC0024568
gtataggtttggt

SEQ ID NO: 98906 - DNA, 13 bp, Artificial Sequence
  Oligonucleotide for detection of SNP TSC0024568
accaaacctatac

SEQ ID NO: 98907 - DNA, 13 bp, Artificial Sequence
  Oligonucleotide for detection of SNP TSC0024569
aggtacgagaaty

SEQ ID NO: 98908 - DNA, 13 bp, Artificial Sequence
  Oligonucleotide for detection of SNP TSC0024569
rattctcgtacct

SEQ ID NO: 98909 - DNA, 13 bp, Artificial Sequence
  Oligonucleotide for detection of SNP TSC0024570
atgattatttgtg

SEQ ID NO: 98910 - DNA, 13 bp, Artificial Sequence
  Oligonucleotide for detection of SNP TSC0024570
cacaaataatcat

SEQ ID NO: 98911 - DNA, 13 bp, Artificial Sequence
  Oligonucleotide for detection of SNP TSC0024570
atgattgtttgtg

SEQ ID NO: 98912 - DNA, 13 bp, Artificial Sequence
  Oligonucleotide for detection of SNP TSC0024570
cacaaacaatcat

SEQ ID NO: 98913 - DNA, 13 bp, Artificial Sequence
  Oligonucleotide for detection of SNP TSC0024570
atgattattcgtg

SEQ ID NO: 98914 - DNA, 13 bp, Artificial Sequence
  Oligonucleotide for detection of SNP TSC0024570
cacgaataatcat

SEQ ID NO: 98915 - DNA, 13 bp, Artificial Sequence
  Oligonucleotide for detection of SNP TSC0024570
atgatcgtttgtg

SEQ ID NO: 98916 - DNA, 13 bp, Artificial Sequence
  Oligonucleotide for detection of SNP TSC0024570
cacaaacgatcat

SEQ ID NO: 98917 - DNA, 13 bp, Artificial Sequence
  Oligonucleotide for detection of SNP TSC0024570
atgattgttcgtg

SEQ ID NO: 98918 - DNA, 13 bp, Artificial Sequence
  Oligonucleotide for detection of SNP TSC0024570
cacgaacaatcat

SEQ ID NO: 98919 - DNA, 13 bp, Artificial Sequence
  Oligonucleotide for detection of SNP TSC0024570
atgatcgttcgtg

SEQ ID NO: 98920 - DNA, 13 bp, Artificial Sequence
  Oligonucleotide for detection of SNP TSC0024570
cacgaacgatcat

SEQ ID NO: 98921 - DNA, 13 bp, Artificial Sequence
  Oligonucleotide for detection of SNP TSC0024570
tatggatggttat

SEQ ID NO: 98922 - DNA, 13 bp, Artificial Sequence
  Oligonucleotide for detection of SNP TSC0024570
ataaccatccata

SEQ ID NO: 98923 - DNA, 13 bp, Artificial Sequence
  Oligonucleotide for detection of SNP TSC0024570
tacggatggttat

SEQ ID NO: 98924 - DNA, 13 bp, Artificial Sequence
  Oligonucleotide for detection of SNP TSC0024570
ataaccatccgta

SEQ ID NO: 98925 - DNA, 13 bp, Artificial Sequence
  Oligonucleotide for detection of SNP TSC0024570
tatggacggttat

SEQ ID NO: 98926 - DNA, 13 bp, Artificial Sequence
  Oligonucleotide for detection of SNP TSC0024570
ataaccgtccata

SEQ ID NO: 98927 - DNA, 13 bp, Artificial Sequence
  Oligonucleotide for detection of SNP TSC0024570
tacggacggttat

SEQ ID NO: 98928 - DNA, 13 bp, Artificial Sequence
  Oligonucleotide for detection of SNP TSC0024570
ataaccgtccgta

SEQ ID NO: 98929 - DNA, 13 bp, Artificial Sequence
  Oligonucleotide for detection of SNP TSC0024571
tttgtgggaggay

SEQ ID NO: 98930 - DNA, 13 bp, Artificial Sequence
  Oligonucleotide for detection of SNP TSC0024571
rtcctcccacaaa

SEQ ID NO: 98931 - DNA, 13 bp, Artificial Sequence
  Oligonucleotide for detection of SNP TSC0024571
tttgtgagaggay

SEQ ID NO: 98932 - DNA, 13 bp, Artificial Sequence
  Oligonucleotide for detection of SNP TSC0024571
rtcctctcacaaa

SEQ ID NO: 98933 - DNA, 13 bp, Artificial Sequence
  Oligonucleotide for detection of SNP TSC0024573
tggtgtattgtay

SEQ ID NO: 98934 - DNA, 13 bp, Artificial Sequence
  Oligonucleotide for detection of SNP TSC0024573
rtacaatacacca

SEQ ID NO: 98935 - DNA, 13 bp, Artificial Sequence
  Oligonucleotide for detection of SNP TSC0024573
tggtgtgttgtay

SEQ ID NO: 98936 - DNA, 13 bp, Artificial Sequence
  Oligonucleotide for detection of SNP TSC0024573
rtacaacacacca

SEQ ID NO: 98937 - DNA, 13 bp, Artificial Sequence
  Oligonucleotide for detection of SNP TSC0024573
tggtgcgttgtay

SEQ ID NO: 98938 - DNA, 13 bp, Artificial Sequence
  Oligonucleotide for detection of SNP TSC0024573
rtacaacgcacca

SEQ ID NO: 98939 - DNA, 13 bp, Artificial Sequence
  Oligonucleotide for detection of SNP TSC0024573
gtgtagtgtatta

SEQ ID NO: 98940 - DNA, 13 bp, Artificial Sequence
  Oligonucleotide for detection of SNP TSC0024573
taatacactacac

SEQ ID NO: 98941 - DNA, 13 bp, Artificial Sequence
  Oligonucleotide for detection of SNP TSC0024573
gtgtagcgtatta

SEQ ID NO: 98942 - DNA, 13 bp, Artificial Sequence
  Oligonucleotide for detection of SNP TSC0024573
taatacgctacac

SEQ ID NO: 98943 - DNA, 13 bp, Artificial Sequence
  Oligonucleotide for detection of SNP TSC0024577
gttttggtatgaa

SEQ ID NO: 98944 - DNA, 13 bp, Artificial Sequence
  Oligonucleotide for detection of SNP TSC0024577
ttcataccaaaac

SEQ ID NO: 98945 - DNA, 13 bp, Artificial Sequence
  Oligonucleotide for detection of SNP TSC0024577
gttttgatatgaa

SEQ ID NO: 98946 - DNA, 13 bp, Artificial Sequence
  Oligonucleotide for detection of SNP TSC0024577
ttcatatcaaaac

SEQ ID NO: 98947 - DNA, 13 bp, Artificial Sequence
  Oligonucleotide for detection of SNP TSC0024577
gtttcggtatgaa

SEQ ID NO: 98948 - DNA, 13 bp, Artificial Sequence
  Oligonucleotide for detection of SNP TSC0024577
ttcataccgaaac

SEQ ID NO: 98949 - DNA, 13 bp, Artificial Sequence
  Oligonucleotide for detection of SNP TSC0024577
gtttcgatatgaa

SEQ ID NO: 98950 - DNA, 13 bp, Artificial Sequence
  Oligonucleotide for detection of SNP TSC0024577
ttcatatcgaaac

SEQ ID NO: 98951 - DNA, 13 bp, Artificial Sequence
  Oligonucleotide for detection of SNP TSC0024578
tttgttaggaata

SEQ ID NO: 98952 - DNA, 13 bp, Artificial Sequence
  Oligonucleotide for detection of SNP TSC0024578
tattcctaacaaa

SEQ ID NO: 98953 - DNA, 13 bp, Artificial Sequence
  Oligonucleotide for detection of SNP TSC0024578
tttgtttggaata

SEQ ID NO: 98954 - DNA, 13 bp, Artificial Sequence
  Oligonucleotide for detection of SNP TSC0024578
tattccaaacaaa

SEQ ID NO: 98955 - DNA, 13 bp, Artificial Sequence
  Oligonucleotide for detection of SNP TSC0024578
tatttttaatagg

SEQ ID NO: 98956 - DNA, 13 bp, Artificial Sequence
  Oligonucleotide for detection of SNP TSC0024578
cctattaaaaata

SEQ ID NO: 98957 - DNA, 13 bp, Artificial Sequence
  Oligonucleotide for detection of SNP TSC0024578
tattttaaatagg

SEQ ID NO: 98958 - DNA, 13 bp, Artificial Sequence
  Oligonucleotide for detection of SNP TSC0024578
cctatttaaaata

SEQ ID NO: 98959 - DNA, 13 bp, Artificial Sequence
  Oligonucleotide for detection of SNP TSC0024580
agagggatggagg

SEQ ID NO: 98960 - DNA, 13 bp, Artificial Sequence
  Oligonucleotide for detection of SNP TSC0024580
cctccatccctct

SEQ ID NO: 98961 - DNA, 13 bp, Artificial Sequence
  Oligonucleotide for detection of SNP TSC0024580
agagggttggagg

SEQ ID NO: 98962 - DNA, 13 bp, Artificial Sequence
  Oligonucleotide for detection of SNP TSC0024580
cctccaaccctct

SEQ ID NO: 98963 - DNA, 13 bp, Artificial Sequence
  Oligonucleotide for detection of SNP TSC0024581
tatttagggttag

SEQ ID NO: 98964 - DNA, 13 bp, Artificial Sequence
  Oligonucleotide for detection of SNP TSC0024581
ctaaccctaaata

SEQ ID NO: 98965 - DNA, 13 bp, Artificial Sequence
  Oligonucleotide for detection of SNP TSC0024581
tatttaaggttag

SEQ ID NO: 98966 - DNA, 13 bp, Artificial Sequence
  Oligonucleotide for detection of SNP TSC0024581
ctaaccttaaata

SEQ ID NO: 98967 - DNA, 13 bp, Artificial Sequence
  Oligonucleotide for detection of SNP TSC0024586
ataaatatttgtt

SEQ ID NO: 98968 - DNA, 13 bp, Artificial Sequence
  Oligonucleotide for detection of SNP TSC0024586
aacaaatatttat

SEQ ID NO: 98969 - DNA, 13 bp, Artificial Sequence
  Oligonucleotide for detection of SNP TSC0024586
ataaatgtttgtt

SEQ ID NO: 98970 - DNA, 13 bp, Artificial Sequence
  Oligonucleotide for detection of SNP TSC0024586
aacaaacatttat

SEQ ID NO: 98971 - DNA, 13 bp, Artificial Sequence
  Oligonucleotide for detection of SNP TSC0024586
ataaacgtttgtt

SEQ ID NO: 98972 - DNA, 13 bp, Artificial Sequence
  Oligonucleotide for detection of SNP TSC0024586
aacaaacgtttat

SEQ ID NO: 98973 - DNA, 13 bp, Artificial Sequence
  Oligonucleotide for detection of SNP TSC0024586
agtaaatgtttat

SEQ ID NO: 98974 - DNA, 13 bp, Artificial Sequence
  Oligonucleotide for detection of SNP TSC0024586
ataaacatttact

SEQ ID NO: 98975 - DNA, 13 bp, Artificial Sequence
  Oligonucleotide for detection of SNP TSC0024586
agtaaacgtttat

SEQ ID NO: 98976 - DNA, 13 bp, Artificial Sequence
  Oligonucleotide for detection of SNP TSC0024586
ataaacgtttact

SEQ ID NO: 98977 - DNA, 13 bp, Artificial Sequence
  Oligonucleotide for detection of SNP TSC0024587
ttggatagtggat

SEQ ID NO: 98978 - DNA, 13 bp, Artificial Sequence
  Oligonucleotide for detection of SNP TSC0024587
atccactatccaa

SEQ ID NO: 98979 - DNA, 13 bp, Artificial Sequence
  Oligonucleotide for detection of SNP TSC0024587
ttggattgtggat

SEQ ID NO: 98980 - DNA, 13 bp, Artificial Sequence
  Oligonucleotide for detection of SNP TSC0024587
atccacaatccaa

SEQ ID NO: 98981 - DNA, 13 bp, Artificial Sequence
  Oligonucleotide for detection of SNP TSC0024587
atttattgtttag

SEQ ID NO: 98982 - DNA, 13 bp, Artificial Sequence
  Oligonucleotide for detection of SNP TSC0024587
ctaaacaataaat

SEQ ID NO: 98983 - DNA, 13 bp, Artificial Sequence
  Oligonucleotide for detection of SNP TSC0024587
atttatagtttag

SEQ ID NO: 98984 - DNA, 13 bp, Artificial Sequence
  Oligonucleotide for detection of SNP TSC0024587
ctaaactataaat

SEQ ID NO: 98985 - DNA, 13 bp, Artificial Sequence
  Oligonucleotide for detection of SNP TSC0024588
ttgggtatatttt

SEQ ID NO: 98986 - DNA, 13 bp, Artificial Sequence
  Oligonucleotide for detection of SNP TSC0024588
aaaatatacccaa

SEQ ID NO: 98987 - DNA, 13 bp, Artificial Sequence
  Oligonucleotide for detection of SNP TSC0024588
ttgggtttatttt

SEQ ID NO: 98988 - DNA, 13 bp, Artificial Sequence
  Oligonucleotide for detection of SNP TSC0024588
aaaataaacccaa

SEQ ID NO: 98989 - DNA, 13 bp, Artificial Sequence
  Oligonucleotide for detection of SNP TSC0024588
aaaatatgtttag

SEQ ID NO: 98990 - DNA, 13 bp, Artificial Sequence
  Oligonucleotide for detection of SNP TSC0024588
ctaaacatatttt

SEQ ID NO: 98991 - DNA, 13 bp, Artificial Sequence
  Oligonucleotide for detection of SNP TSC0024588
aaaataggtttag

SEQ ID NO: 98992 - DNA, 13 bp, Artificial Sequence
  Oligonucleotide for detection of SNP TSC0024588
ctaaacctatttt

SEQ ID NO: 98993 - DNA, 13 bp, Artificial Sequence
  Oligonucleotide for detection of SNP TSC0024589
ggttgaatagggg

SEQ ID NO: 98994 - DNA, 13 bp, Artificial Sequence
  Oligonucleotide for detection of SNP TSC0024589
cccctattcaacc

SEQ ID NO: 98995 - DNA, 13 bp, Artificial Sequence
  Oligonucleotide for detection of SNP TSC0024589
ggttgagtagggg

SEQ ID NO: 98996 - DNA, 13 bp, Artificial Sequence
  Oligonucleotide for detection of SNP TSC0024589
cccctactcaacc

SEQ ID NO: 98997 - DNA, 13 bp, Artificial Sequence
  Oligonucleotide for detection of SNP TSC0024590
gtagttaatgtgt

SEQ ID NO: 98998 - DNA, 13 bp, Artificial Sequence
  Oligonucleotide for detection of SNP TSC0024590
acacattaactac

SEQ ID NO: 98999 - DNA, 13 bp, Artificial Sequence
  Oligonucleotide for detection of SNP TSC0024590
gtagttgatgtgt

SEQ ID NO: 99000 - DNA, 13 bp, Artificial Sequence
  Oligonucleotide for detection of SNP TSC0024590
acacatcaactac

SEQ ID NO: 99001 - DNA, 13 bp, Artificial Sequence
  Oligonucleotide for detection of SNP TSC0024593
tagttaatttgtg

SEQ ID NO: 99002 - DNA, 13 bp, Artificial Sequence
  Oligonucleotide for detection of SNP TSC0024593
cacaaattaacta

SEQ ID NO: 99003 - DNA, 13 bp, Artificial Sequence
  Oligonucleotide for detection of SNP TSC0024593
tagttattttgtg

SEQ ID NO: 99004 - DNA, 13 bp, Artificial Sequence
  Oligonucleotide for detection of SNP TSC0024593
cacaaaataacta

SEQ ID NO: 99005 - DNA, 13 bp, Artificial Sequence
  Oligonucleotide for detection of SNP TSC0024593
tataaattagtta

SEQ ID NO: 99006 - DNA, 13 bp, Artificial Sequence
  Oligonucleotide for detection of SNP TSC0024593
taactaatttata

SEQ ID NO: 99007 - DNA, 13 bp, Artificial Sequence
  Oligonucleotide for detection of SNP TSC0024593
tataaagtagtta

SEQ ID NO: 99008 - DNA, 13 bp, Artificial Sequence
  Oligonucleotide for detection of SNP TSC0024593
taactactttata

SEQ ID NO: 99009 - DNA, 13 bp, Artificial Sequence
  Oligonucleotide for detection of SNP TSC0024594
tggattataattt

SEQ ID NO: 99010 - DNA, 13 bp, Artificial Sequence
  Oligonucleotide for detection of SNP TSC0024594
aaattataatcca

SEQ ID NO: 99011 - DNA, 13 bp, Artificial Sequence
  Oligonucleotide for detection of SNP TSC0024594
tggattgtaattt

SEQ ID NO: 99012 - DNA, 13 bp, Artificial Sequence
  Oligonucleotide for detection of SNP TSC0024594
aaattacaatcca

SEQ ID NO: 99013 - DNA, 13 bp, Artificial Sequence
  Oligonucleotide for detection of SNP TSC0024594
tggatcgtaattt

SEQ ID NO: 99014 - DNA, 13 bp, Artificial Sequence
  Oligonucleotide for detection of SNP TSC0024594
aaattacgatcca

SEQ ID NO: 99015 - DNA, 13 bp, Artificial Sequence
  Oligonucleotide for detection of SNP TSC0024594
aaattatgattta

SEQ ID NO: 99016 - DNA, 13 bp, Artificial Sequence
  Oligonucleotide for detection of SNP TSC0024594
taaatcataattt

SEQ ID NO: 99017 - DNA, 13 bp, Artificial Sequence
  Oligonucleotide for detection of SNP TSC0024594
aaattacgattta

SEQ ID NO: 99018 - DNA, 13 bp, Artificial Sequence
  Oligonucleotide for detection of SNP TSC0024594
taaatcgtaattt

SEQ ID NO: 99019 - DNA, 13 bp, Artificial Sequence
  Oligonucleotide for detection of SNP TSC0024596
ggtgggtgttgga

SEQ ID NO: 99020 - DNA, 13 bp, Artificial Sequence
  Oligonucleotide for detection of SNP TSC0024596
tccaacacccacc

SEQ ID NO: 99021 - DNA, 13 bp, Artificial Sequence
  Oligonucleotide for detection of SNP TSC0024596
ggtgggggttgga

SEQ ID NO: 99022 - DNA, 13 bp, Artificial Sequence
  Oligonucleotide for detection of SNP TSC0024596
tccaacccccacc

SEQ ID NO: 99023 - DNA, 13 bp, Artificial Sequence
  Oligonucleotide for detection of SNP TSC0024596
ggcgggtgttgga

SEQ ID NO: 99024 - DNA, 13 bp, Artificial Sequence
  Oligonucleotide for detection of SNP TSC0024596
tccaacacccgcc

SEQ ID NO: 99025 - DNA, 13 bp, Artificial Sequence
  Oligonucleotide for detection of SNP TSC0024596
ggcgggggttgga

SEQ ID NO: 99026 - DNA, 13 bp, Artificial Sequence
  Oligonucleotide for detection of SNP TSC0024596
tccaacccccgcc

SEQ ID NO: 99027 - DNA, 13 bp, Artificial Sequence
  Oligonucleotide for detection of SNP TSC0024596
ggtgggcgttgga

SEQ ID NO: 99028 - DNA, 13 bp, Artificial Sequence
  Oligonucleotide for detection of SNP TSC0024596
tccaacgcccacc

SEQ ID NO: 99029 - DNA, 13 bp, Artificial Sequence
  Oligonucleotide for detection of SNP TSC0024596
ggcgggcgttgga

SEQ ID NO: 99030 - DNA, 13 bp, Artificial Sequence
  Oligonucleotide for detection of SNP TSC0024596
tccaacgcccgcc

SEQ ID NO: 99031 - DNA, 13 bp, Artificial Sequence
  Oligonucleotide for detection of SNP TSC0024596
tttaatgtttgty

SEQ ID NO: 99032 - DNA, 13 bp, Artificial Sequence
  Oligonucleotide for detection of SNP TSC0024596
racaaacattaaa

SEQ ID NO: 99033 - DNA, 13 bp, Artificial Sequence
  Oligonucleotide for detection of SNP TSC0024596
tttaatttttgty

SEQ ID NO: 99034 - DNA, 13 bp, Artificial Sequence
  Oligonucleotide for detection of SNP TSC0024596
racaaaaattaaa

SEQ ID NO: 99035 - DNA, 13 bp, Artificial Sequence
  Oligonucleotide for detection of SNP TSC0024596
tttaacgtttgty

SEQ ID NO: 99036 - DNA, 13 bp, Artificial Sequence
  Oligonucleotide for detection of SNP TSC0024596
racaaacgttaaa

SEQ ID NO: 99037 - DNA, 13 bp, Artificial Sequence
  Oligonucleotide for detection of SNP TSC0024596
tttaattttcgty

SEQ ID NO: 99038 - DNA, 13 bp, Artificial Sequence
  Oligonucleotide for detection of SNP TSC0024596
racgaaaattaaa

SEQ ID NO: 99039 - DNA, 13 bp, Artificial Sequence
  Oligonucleotide for detection of SNP TSC0024596
tttaatgttcgty

SEQ ID NO: 99040 - DNA, 13 bp, Artificial Sequence
  Oligonucleotide for detection of SNP TSC0024596
racgaacattaaa

SEQ ID NO: 99041 - DNA, 13 bp, Artificial Sequence
  Oligonucleotide for detection of SNP TSC0024596
tttaacgttcgty

SEQ ID NO: 99042 - DNA, 13 bp, Artificial Sequence
  Oligonucleotide for detection of SNP TSC0024596
racgaacgttaaa

SEQ ID NO: 99043 - DNA, 13 bp, Artificial Sequence
  Oligonucleotide for detection of SNP TSC0024599
ggtggtattgatg

SEQ ID NO: 99044 - DNA, 13 bp, Artificial Sequence
  Oligonucleotide for detection of SNP TSC0024599
catcaataccacc

SEQ ID NO: 99045 - DNA, 13 bp, Artificial Sequence
  Oligonucleotide for detection of SNP TSC0024599
ggtggtgttgatg

SEQ ID NO: 99046 - DNA, 13 bp, Artificial Sequence
  Oligonucleotide for detection of SNP TSC0024599
catcaacaccacc

SEQ ID NO: 99047 - DNA, 13 bp, Artificial Sequence
  Oligonucleotide for detection of SNP TSC0024599
ggtggtattgacg

SEQ ID NO: 99048 - DNA, 13 bp, Artificial Sequence
  Oligonucleotide for detection of SNP TSC0024599
cgtcaataccacc

SEQ ID NO: 99049 - DNA, 13 bp, Artificial Sequence
  Oligonucleotide for detection of SNP TSC0024599
ggtggcgttgatg

SEQ ID NO: 99050 - DNA, 13 bp, Artificial Sequence
  Oligonucleotide for detection of SNP TSC0024599
catcaacgccacc

SEQ ID NO: 99051 - DNA, 13 bp, Artificial Sequence
  Oligonucleotide for detection of SNP TSC0024599
ggtggtgttgacg

SEQ ID NO: 99052 - DNA, 13 bp, Artificial Sequence
  Oligonucleotide for detection of SNP TSC0024599
cgtcaacaccacc

SEQ ID NO: 99053 - DNA, 13 bp, Artificial Sequence
  Oligonucleotide for detection of SNP TSC0024599
ggtggcgttgacg

SEQ ID NO: 99054 - DNA, 13 bp, Artificial Sequence
  Oligonucleotide for detection of SNP TSC0024599
cgtcaacgccacc

SEQ ID NO: 99055 - DNA, 13 bp, Artificial Sequence
  Oligonucleotide for detection of SNP TSC0024599
tgttagtgttaty

SEQ ID NO: 99056 - DNA, 13 bp, Artificial Sequence
  Oligonucleotide for detection of SNP TSC0024599
rataacactaaca

SEQ ID NO: 99057 - DNA, 13 bp, Artificial Sequence
  Oligonucleotide for detection of SNP TSC0024599
cgttagtgttaty

SEQ ID NO: 99058 - DNA, 13 bp, Artificial Sequence
  Oligonucleotide for detection of SNP TSC0024599
rataacactaacg

SEQ ID NO: 99059 - DNA, 13 bp, Artificial Sequence
  Oligonucleotide for detection of SNP TSC0024599
tgttagcgttaty

SEQ ID NO: 99060 - DNA, 13 bp, Artificial Sequence
  Oligonucleotide for detection of SNP TSC0024599
rataacgctaaca

SEQ ID NO: 99061 - DNA, 13 bp, Artificial Sequence
  Oligonucleotide for detection of SNP TSC0024599
cgttagcgttaty

SEQ ID NO: 99062 - DNA, 13 bp, Artificial Sequence
  Oligonucleotide for detection of SNP TSC0024599
rataacgctaacg

SEQ ID NO: 99063 - DNA, 13 bp, Artificial Sequence
  Oligonucleotide for detection of SNP TSC0024601
tattttatagata

SEQ ID NO: 99064 - DNA, 13 bp, Artificial Sequence
  Oligonucleotide for detection of SNP TSC0024601
tatctataaaata

SEQ ID NO: 99065 - DNA, 13 bp, Artificial Sequence
  Oligonucleotide for detection of SNP TSC0024601
tattttgtagata

SEQ ID NO: 99066 - DNA, 13 bp, Artificial Sequence
  Oligonucleotide for detection of SNP TSC0024601
tatctacaaaata

SEQ ID NO: 99067 - DNA, 13 bp, Artificial Sequence
  Oligonucleotide for detection of SNP TSC0024602
ttgtgtattgaty

SEQ ID NO: 99068 - DNA, 13 bp, Artificial Sequence
  Oligonucleotide for detection of SNP TSC0024602
ratcaatacacaa

SEQ ID NO: 99069 - DNA, 13 bp, Artificial Sequence
  Oligonucleotide for detection of SNP TSC0024602
ttgtgtgttgaty

SEQ ID NO: 99070 - DNA, 13 bp, Artificial Sequence
  Oligonucleotide for detection of SNP TSC0024602
ratcaacacacaa

SEQ ID NO: 99071 - DNA, 13 bp, Artificial Sequence
  Oligonucleotide for detection of SNP TSC0024602
tcgtgtattgaty

SEQ ID NO: 99072 - DNA, 13 bp, Artificial Sequence
  Oligonucleotide for detection of SNP TSC0024602
ratcaatacacga

SEQ ID NO: 99073 - DNA, 13 bp, Artificial Sequence
  Oligonucleotide for detection of SNP TSC0024602
tcgtgtgttgaty

SEQ ID NO: 99074 - DNA, 13 bp, Artificial Sequence
  Oligonucleotide for detection of SNP TSC0024602
ratcaacacacga

SEQ ID NO: 99075 - DNA, 13 bp, Artificial Sequence
  Oligonucleotide for detection of SNP TSC0024605
tatttttattagt

SEQ ID NO: 99076 - DNA, 13 bp, Artificial Sequence
  Oligonucleotide for detection of SNP TSC0024605
actaataaaaata

SEQ ID NO: 99077 - DNA, 13 bp, Artificial Sequence
  Oligonucleotide for detection of SNP TSC0024605
tattttgattagt

SEQ ID NO: 99078 - DNA, 13 bp, Artificial Sequence
  Oligonucleotide for detection of SNP TSC0024605
actaatcaaaata

SEQ ID NO: 99079 - DNA, 13 bp, Artificial Sequence
  Oligonucleotide for detection of SNP TSC0024605
tatttcgattagt

SEQ ID NO: 99080 - DNA, 13 bp, Artificial Sequence
  Oligonucleotide for detection of SNP TSC0024605
actaatcgaaata

SEQ ID NO: 99081 - DNA, 13 bp, Artificial Sequence
  Oligonucleotide for detection of SNP TSC0024605
attaatggaaatg

SEQ ID NO: 99082 - DNA, 13 bp, Artificial Sequence
  Oligonucleotide for detection of SNP TSC0024605
catttccattaat

SEQ ID NO: 99083 - DNA, 13 bp, Artificial Sequence
  Oligonucleotide for detection of SNP TSC0024605
attaattgaaatg

SEQ ID NO: 99084 - DNA, 13 bp, Artificial Sequence
  Oligonucleotide for detection of SNP TSC0024605
catttcaattaat

SEQ ID NO: 99085 - DNA, 13 bp, Artificial Sequence
  Oligonucleotide for detection of SNP TSC0024605
attaatcgaaatg

SEQ ID NO: 99086 - DNA, 13 bp, Artificial Sequence
  Oligonucleotide for detection of SNP TSC0024605
catttcgattaat

SEQ ID NO: 99087 - DNA, 13 bp, Artificial Sequence
  Oligonucleotide for detection of SNP TSC0024606
ttatttggttggt

SEQ ID NO: 99088 - DNA, 13 bp, Artificial Sequence
  Oligonucleotide for detection of SNP TSC0024606
accaaccaaataa

SEQ ID NO: 99089 - DNA, 13 bp, Artificial Sequence
  Oligonucleotide for detection of SNP TSC0024606
ttatttagttggt

SEQ ID NO: 99090 - DNA, 13 bp, Artificial Sequence
  Oligonucleotide for detection of SNP TSC0024606
accaactaaataa

SEQ ID NO: 99091 - DNA, 13 bp, Artificial Sequence
  Oligonucleotide for detection of SNP TSC0024607
aagtgtagtggtg

SEQ ID NO: 99092 - DNA, 13 bp, Artificial Sequence
  Oligonucleotide for detection of SNP TSC0024607
caccactacactt

SEQ ID NO: 99093 - DNA, 13 bp, Artificial Sequence
  Oligonucleotide for detection of SNP TSC0024607
aagtgtggtggtg

SEQ ID NO: 99094 - DNA, 13 bp, Artificial Sequence
  Oligonucleotide for detection of SNP TSC0024607
caccaccacactt

SEQ ID NO: 99095 - DNA, 13 bp, Artificial Sequence
  Oligonucleotide for detection of SNP TSC0024607
aagtgtagtggcg

SEQ ID NO: 99096 - DNA, 13 bp, Artificial Sequence
  Oligonucleotide for detection of SNP TSC0024607
cgccactacactt

SEQ ID NO: 99097 - DNA, 13 bp, Artificial Sequence
  Oligonucleotide for detection of SNP TSC0024607
aagtgcggtggtg

SEQ ID NO: 99098 - DNA, 13 bp, Artificial Sequence
  Oligonucleotide for detection of SNP TSC0024607
caccaccgcactt

SEQ ID NO: 99099 - DNA, 13 bp, Artificial Sequence
  Oligonucleotide for detection of SNP TSC0024607
aagtgtggtggcg

SEQ ID NO: 99100 - DNA, 13 bp, Artificial Sequence
  Oligonucleotide for detection of SNP TSC0024607
cgccaccacactt

SEQ ID NO: 99101 - DNA, 13 bp, Artificial Sequence
  Oligonucleotide for detection of SNP TSC0024607
aagtgcggtggcg

SEQ ID NO: 99102 - DNA, 13 bp, Artificial Sequence
  Oligonucleotide for detection of SNP TSC0024607
cgccaccgcactt

SEQ ID NO: 99103 - DNA, 13 bp, Artificial Sequence
  Oligonucleotide for detection of SNP TSC0024607
tgttattgtattt

SEQ ID NO: 99104 - DNA, 13 bp, Artificial Sequence
  Oligonucleotide for detection of SNP TSC0024607
aaatacaataaca

SEQ ID NO: 99105 - DNA, 13 bp, Artificial Sequence
  Oligonucleotide for detection of SNP TSC0024607
cgttattgtattt

SEQ ID NO: 99106 - DNA, 13 bp, Artificial Sequence
  Oligonucleotide for detection of SNP TSC0024607
aaatacaataacg

SEQ ID NO: 99107 - DNA, 13 bp, Artificial Sequence
  Oligonucleotide for detection of SNP TSC0024607
tgttatcgtattt

SEQ ID NO: 99108 - DNA, 13 bp, Artificial Sequence
  Oligonucleotide for detection of SNP TSC0024607
aaatacgataaca

SEQ ID NO: 99109 - DNA, 13 bp, Artificial Sequence
  Oligonucleotide for detection of SNP TSC0024607
cgttatcgtattt

SEQ ID NO: 99110 - DNA, 13 bp, Artificial Sequence
  Oligonucleotide for detection of SNP TSC0024607
aaatacgataacg

SEQ ID NO: 99111 - DNA, 13 bp, Artificial Sequence
  Oligonucleotide for detection of SNP TSC0024611
gggaagaggggag

SEQ ID NO: 99112 - DNA, 13 bp, Artificial Sequence
  Oligonucleotide for detection of SNP TSC0024611
ctcccctcttccc

SEQ ID NO: 99113 - DNA, 13 bp, Artificial Sequence
  Oligonucleotide for detection of SNP TSC0024611
gggaaggggggag

SEQ ID NO: 99114 - DNA, 13 bp, Artificial Sequence
  Oligonucleotide for detection of SNP TSC0024611
ctccccccttccc

SEQ ID NO: 99115 - DNA, 13 bp, Artificial Sequence
  Oligonucleotide for detection of SNP TSC0024612
ttgagaagtgatg

SEQ ID NO: 99116 - DNA, 13 bp, Artificial Sequence
  Oligonucleotide for detection of SNP TSC0024612
catcacttctcaa

SEQ ID NO: 99117 - DNA, 13 bp, Artificial Sequence
  Oligonucleotide for detection of SNP TSC0024612
ttgagaggtgatg

SEQ ID NO: 99118 - DNA, 13 bp, Artificial Sequence
  Oligonucleotide for detection of SNP TSC0024612
catcacctctcaa

SEQ ID NO: 99119 - DNA, 13 bp, Artificial Sequence
  Oligonucleotide for detection of SNP TSC0024615
gtttatgttttag

SEQ ID NO: 99120 - DNA, 13 bp, Artificial Sequence
  Oligonucleotide for detection of SNP TSC0024615
ctaaaacataaac

SEQ ID NO: 99121 - DNA, 13 bp, Artificial Sequence
  Oligonucleotide for detection of SNP TSC0024615
gtttatattttag

SEQ ID NO: 99122 - DNA, 13 bp, Artificial Sequence
  Oligonucleotide for detection of SNP TSC0024615
ctaaaatataaac

SEQ ID NO: 99123 - DNA, 13 bp, Artificial Sequence
  Oligonucleotide for detection of SNP TSC0024616
aagaaggtataaa

SEQ ID NO: 99124 - DNA, 13 bp, Artificial Sequence
  Oligonucleotide for detection of SNP TSC0024616
tttataccttctt

SEQ ID NO: 99125 - DNA, 13 bp, Artificial Sequence
  Oligonucleotide for detection of SNP TSC0024616
aagaagatataaa

SEQ ID NO: 99126 - DNA, 13 bp, Artificial Sequence
  Oligonucleotide for detection of SNP TSC0024616
tttatatcttctt

SEQ ID NO: 99127 - DNA, 13 bp, Artificial Sequence
  Oligonucleotide for detection of SNP TSC0024617
ggattaattgttt

SEQ ID NO: 99128 - DNA, 13 bp, Artificial Sequence
  Oligonucleotide for detection of SNP TSC0024617
aaacaattaatcc

SEQ ID NO: 99129 - DNA, 13 bp, Artificial Sequence
  Oligonucleotide for detection of SNP TSC0024617
ggattagttgttt

SEQ ID NO: 99130 - DNA, 13 bp, Artificial Sequence
  Oligonucleotide for detection of SNP TSC0024617
aaacaactaatcc

SEQ ID NO: 99131 - DNA, 13 bp, Artificial Sequence
  Oligonucleotide for detection of SNP TSC0024617
ggattaatcgttt

SEQ ID NO: 99132 - DNA, 13 bp, Artificial Sequence
  Oligonucleotide for detection of SNP TSC0024617
aaacgattaatcc

SEQ ID NO: 99133 - DNA, 13 bp, Artificial Sequence
  Oligonucleotide for detection of SNP TSC0024617
ggattagtcgttt

SEQ ID NO: 99134 - DNA, 13 bp, Artificial Sequence
  Oligonucleotide for detection of SNP TSC0024617
aaacgactaatcc

SEQ ID NO: 99135 - DNA, 13 bp, Artificial Sequence
  Oligonucleotide for detection of SNP TSC0024618
aaaaaaatagtta

SEQ ID NO: 99136 - DNA, 13 bp, Artificial Sequence
  Oligonucleotide for detection of SNP TSC0024618
taactattttttt

SEQ ID NO: 99137 - DNA, 13 bp, Artificial Sequence
  Oligonucleotide for detection of SNP TSC0024618
aaaaaattagtta

SEQ ID NO: 99138 - DNA, 13 bp, Artificial Sequence
  Oligonucleotide for detection of SNP TSC0024618
taactaatttttt

SEQ ID NO: 99139 - DNA, 13 bp, Artificial Sequence
  Oligonucleotide for detection of SNP TSC0024618
tggttattttttt

SEQ ID NO: 99140 - DNA, 13 bp, Artificial Sequence
  Oligonucleotide for detection of SNP TSC0024618
aaaaaaataacca

SEQ ID NO: 99141 - DNA, 13 bp, Artificial Sequence
  Oligonucleotide for detection of SNP TSC0024621
ggtatagaaatgg

SEQ ID NO: 99142 - DNA, 13 bp, Artificial Sequence
  Oligonucleotide for detection of SNP TSC0024621
ccatttctatacc

SEQ ID NO: 99143 - DNA, 13 bp, Artificial Sequence
  Oligonucleotide for detection of SNP TSC0024621
ggtataaaaatgg

SEQ ID NO: 99144 - DNA, 13 bp, Artificial Sequence
  Oligonucleotide for detection of SNP TSC0024621
ccatttttatacc

SEQ ID NO: 99145 - DNA, 13 bp, Artificial Sequence
  Oligonucleotide for detection of SNP TSC0024622
tatagagggttgg

SEQ ID NO: 99146 - DNA, 13 bp, Artificial Sequence
  Oligonucleotide for detection of SNP TSC0024622
ccaaccctctata

SEQ ID NO: 99147 - DNA, 13 bp, Artificial Sequence
  Oligonucleotide for detection of SNP TSC0024622
tatagaaggttgg

SEQ ID NO: 99148 - DNA, 13 bp, Artificial Sequence
  Oligonucleotide for detection of SNP TSC0024622
ccaaccttctata

SEQ ID NO: 99149 - DNA, 13 bp, Artificial Sequence
  Oligonucleotide for detection of SNP TSC0024623
gaaatatgataay

SEQ ID NO: 99150 - DNA, 13 bp, Artificial Sequence
  Oligonucleotide for detection of SNP TSC0024623
rttatcatatttc

SEQ ID NO: 99151 - DNA, 13 bp, Artificial Sequence
  Oligonucleotide for detection of SNP TSC0024623
gaaatacgataay

SEQ ID NO: 99152 - DNA, 13 bp, Artificial Sequence
  Oligonucleotide for detection of SNP TSC0024623
rttatcgtatttc

SEQ ID NO: 99153 - DNA, 13 bp, Artificial Sequence
  Oligonucleotide for detection of SNP TSC0024624
tttagtttattaa

SEQ ID NO: 99154 - DNA, 13 bp, Artificial Sequence
  Oligonucleotide for detection of SNP TSC0024624
ttaataaactaaa

SEQ ID NO: 99155 - DNA, 13 bp, Artificial Sequence
  Oligonucleotide for detection of SNP TSC0024624
tttagtgtattaa

SEQ ID NO: 99156 - DNA, 13 bp, Artificial Sequence
  Oligonucleotide for detection of SNP TSC0024624
ttaatacactaaa

SEQ ID NO: 99157 - DNA, 13 bp, Artificial Sequence
  Oligonucleotide for detection of SNP TSC0024624
tttagcgtattaa

SEQ ID NO: 99158 - DNA, 13 bp, Artificial Sequence
  Oligonucleotide for detection of SNP TSC0024624
ttaatacgctaaa

SEQ ID NO: 99159 - DNA, 13 bp, Artificial Sequence
  Oligonucleotide for detection of SNP TSC0024624
ttaatgggttgag

SEQ ID NO: 99160 - DNA, 13 bp, Artificial Sequence
  Oligonucleotide for detection of SNP TSC0024624
ctcaacccattaa

SEQ ID NO: 99161 - DNA, 13 bp, Artificial Sequence
  Oligonucleotide for detection of SNP TSC0024624
ttaatgtgttgag

SEQ ID NO: 99162 - DNA, 13 bp, Artificial Sequence
  Oligonucleotide for detection of SNP TSC0024624
ctcaacacattaa

SEQ ID NO: 99163 - DNA, 13 bp, Artificial Sequence
  Oligonucleotide for detection of SNP TSC0024624
ttaatgcgttgag

SEQ ID NO: 99164 - DNA, 13 bp, Artificial Sequence
  Oligonucleotide for detection of SNP TSC0024624
ctcaacgcattaa

SEQ ID NO: 99165 - DNA, 13 bp, Artificial Sequence
  Oligonucleotide for detection of SNP TSC0024630
tgggggtgtttgg

SEQ ID NO: 99166 - DNA, 13 bp, Artificial Sequence
  Oligonucleotide for detection of SNP TSC0024630
ccaaacaccccca

SEQ ID NO: 99167 - DNA, 13 bp, Artificial Sequence
  Oligonucleotide for detection of SNP TSC0024630
tgggggcgtttgg

SEQ ID NO: 99168 - DNA, 13 bp, Artificial Sequence
  Oligonucleotide for detection of SNP TSC0024630
ccaaacgccccca

SEQ ID NO: 99169 - DNA, 13 bp, Artificial Sequence
  Oligonucleotide for detection of SNP TSC0024631
gtttgatgttagg

SEQ ID NO: 99170 - DNA, 13 bp, Artificial Sequence
  Oligonucleotide for detection of SNP TSC0024631
cctaacatcaaac

SEQ ID NO: 99171 - DNA, 13 bp, Artificial Sequence
  Oligonucleotide for detection of SNP TSC0024631
gttcgatgttagg

SEQ ID NO: 99172 - DNA, 13 bp, Artificial Sequence
  Oligonucleotide for detection of SNP TSC0024631
cctaacatcgaac

SEQ ID NO: 99173 - DNA, 13 bp, Artificial Sequence
  Oligonucleotide for detection of SNP TSC0024631
gtttgacgttagg

SEQ ID NO: 99174 - DNA, 13 bp, Artificial Sequence
  Oligonucleotide for detection of SNP TSC0024631
cctaacgtcaaac

SEQ ID NO: 99175 - DNA, 13 bp, Artificial Sequence
  Oligonucleotide for detection of SNP TSC0024631
gttcgacgttagg

SEQ ID NO: 99176 - DNA, 13 bp, Artificial Sequence
  Oligonucleotide for detection of SNP TSC0024631
cctaacgtcgaac

SEQ ID NO: 99177 - DNA, 13 bp, Artificial Sequence
  Oligonucleotide for detection of SNP TSC0024631
tttagtgttggay

SEQ ID NO: 99178 - DNA, 13 bp, Artificial Sequence
  Oligonucleotide for detection of SNP TSC0024631
rtccaacactaaa

SEQ ID NO: 99179 - DNA, 13 bp, Artificial Sequence
  Oligonucleotide for detection of SNP TSC0024631
tttagtattggay

SEQ ID NO: 99180 - DNA, 13 bp, Artificial Sequence
  Oligonucleotide for detection of SNP TSC0024631
rtccaatactaaa

SEQ ID NO: 99181 - DNA, 13 bp, Artificial Sequence
  Oligonucleotide for detection of SNP TSC0024631
tttagcgttggay

SEQ ID NO: 99182 - DNA, 13 bp, Artificial Sequence
  Oligonucleotide for detection of SNP TSC0024631
rtccaacgctaaa

SEQ ID NO: 99183 - DNA, 13 bp, Artificial Sequence
  Oligonucleotide for detection of SNP TSC0024631
tttagtatcggay

SEQ ID NO: 99184 - DNA, 13 bp, Artificial Sequence
  Oligonucleotide for detection of SNP TSC0024631
rtccgatactaaa

SEQ ID NO: 99185 - DNA, 13 bp, Artificial Sequence
  Oligonucleotide for detection of SNP TSC0024631
tttagtgtcggay

SEQ ID NO: 99186 - DNA, 13 bp, Artificial Sequence
  Oligonucleotide for detection of SNP TSC0024631
rtccgacactaaa

SEQ ID NO: 99187 - DNA, 13 bp, Artificial Sequence
  Oligonucleotide for detection of SNP TSC0024631
tttagcgtcggay

SEQ ID NO: 99188 - DNA, 13 bp, Artificial Sequence
  Oligonucleotide for detection of SNP TSC0024631
rtccgacgctaaa

SEQ ID NO: 99189 - DNA, 13 bp, Artificial Sequence
  Oligonucleotide for detection of SNP TSC0024632
taggtaattatta

SEQ ID NO: 99190 - DNA, 13 bp, Artificial Sequence
  Oligonucleotide for detection of SNP TSC0024632
taataattaccta

SEQ ID NO: 99191 - DNA, 13 bp, Artificial Sequence
  Oligonucleotide for detection of SNP TSC0024632
taggtatttatta

SEQ ID NO: 99192 - DNA, 13 bp, Artificial Sequence
  Oligonucleotide for detection of SNP TSC0024632
taataaataccta

SEQ ID NO: 99193 - DNA, 13 bp, Artificial Sequence
  Oligonucleotide for detection of SNP TSC0024632
tggtggttgtttg

SEQ ID NO: 99194 - DNA, 13 bp, Artificial Sequence
  Oligonucleotide for detection of SNP TSC0024632
caaacaaccacca

SEQ ID NO: 99195 - DNA, 13 bp, Artificial Sequence
  Oligonucleotide for detection of SNP TSC0024634
agtgttgtttatt

SEQ ID NO: 99196 - DNA, 13 bp, Artificial Sequence
  Oligonucleotide for detection of SNP TSC0024634
aataaacaacact

SEQ ID NO: 99197 - DNA, 13 bp, Artificial Sequence
  Oligonucleotide for detection of SNP TSC0024634
agtgttatttatt

SEQ ID NO: 99198 - DNA, 13 bp, Artificial Sequence
  Oligonucleotide for detection of SNP TSC0024634
aataaataacact

SEQ ID NO: 99199 - DNA, 13 bp, Artificial Sequence
  Oligonucleotide for detection of SNP TSC0024637
tgttatagtggtg

SEQ ID NO: 99200 - DNA, 13 bp, Artificial Sequence
  Oligonucleotide for detection of SNP TSC0024637
caccactataaca

SEQ ID NO: 99201 - DNA, 13 bp, Artificial Sequence
  Oligonucleotide for detection of SNP TSC0024637
tgttatggtggtg

SEQ ID NO: 99202 - DNA, 13 bp, Artificial Sequence
  Oligonucleotide for detection of SNP TSC0024637
caccaccataaca

SEQ ID NO: 99203 - DNA, 13 bp, Artificial Sequence
  Oligonucleotide for detection of SNP TSC0024637
tgttacggtggtg

SEQ ID NO: 99204 - DNA, 13 bp, Artificial Sequence
  Oligonucleotide for detection of SNP TSC0024637
caccaccgtaaca

SEQ ID NO: 99205 - DNA, 13 bp, Artificial Sequence
  Oligonucleotide for detection of SNP TSC0024637
tattattgtgata

SEQ ID NO: 99206 - DNA, 13 bp, Artificial Sequence
  Oligonucleotide for detection of SNP TSC0024637
tatcacaataata

SEQ ID NO: 99207 - DNA, 13 bp, Artificial Sequence
  Oligonucleotide for detection of SNP TSC0024637
tattatcgtgata

SEQ ID NO: 99208 - DNA, 13 bp, Artificial Sequence
  Oligonucleotide for detection of SNP TSC0024637
tatcacgataata

SEQ ID NO: 99209 - DNA, 13 bp, Artificial Sequence
  Oligonucleotide for detection of SNP TSC0024643
aatttgataggat

SEQ ID NO: 99210 - DNA, 13 bp, Artificial Sequence
  Oligonucleotide for detection of SNP TSC0024643
atcctatcaaatt

SEQ ID NO: 99211 - DNA, 13 bp, Artificial Sequence
  Oligonucleotide for detection of SNP TSC0024643
aatttgttaggat

SEQ ID NO: 99212 - DNA, 13 bp, Artificial Sequence
  Oligonucleotide for detection of SNP TSC0024643
atcctaacaaatt

SEQ ID NO: 99213 - DNA, 13 bp, Artificial Sequence
  Oligonucleotide for detection of SNP TSC0024643
attttgttagatt

SEQ ID NO: 99214 - DNA, 13 bp, Artificial Sequence
  Oligonucleotide for detection of SNP TSC0024643
aatctaacaaaat

SEQ ID NO: 99215 - DNA, 13 bp, Artificial Sequence
  Oligonucleotide for detection of SNP TSC0024643
attttggtagatt

SEQ ID NO: 99216 - DNA, 13 bp, Artificial Sequence
  Oligonucleotide for detection of SNP TSC0024643
aatctaccaaaat

SEQ ID NO: 99217 - DNA, 13 bp, Artificial Sequence
  Oligonucleotide for detection of SNP TSC0024646
agaattatagttt

SEQ ID NO: 99218 - DNA, 13 bp, Artificial Sequence
  Oligonucleotide for detection of SNP TSC0024646
aaactataattct

SEQ ID NO: 99219 - DNA, 13 bp, Artificial Sequence
  Oligonucleotide for detection of SNP TSC0024646
agaattttagttt

SEQ ID NO: 99220 - DNA, 13 bp, Artificial Sequence
  Oligonucleotide for detection of SNP TSC0024646
aaactaaaattct

SEQ ID NO: 99221 - DNA, 13 bp, Artificial Sequence
  Oligonucleotide for detection of SNP TSC0024646
aagttgtggtttt

SEQ ID NO: 99222 - DNA, 13 bp, Artificial Sequence
  Oligonucleotide for detection of SNP TSC0024646
aaaaccacaactt

SEQ ID NO: 99223 - DNA, 13 bp, Artificial Sequence
  Oligonucleotide for detection of SNP TSC0024646
aagttggggtttt

SEQ ID NO: 99224 - DNA, 13 bp, Artificial Sequence
  Oligonucleotide for detection of SNP TSC0024646
aaaaccccaactt

SEQ ID NO: 99225 - DNA, 13 bp, Artificial Sequence
  Oligonucleotide for detection of SNP TSC0024649
ttaatggggtatg

SEQ ID NO: 99226 - DNA, 13 bp, Artificial Sequence
  Oligonucleotide for detection of SNP TSC0024649
cataccccattaa

SEQ ID NO: 99227 - DNA, 13 bp, Artificial Sequence
  Oligonucleotide for detection of SNP TSC0024649
ttaatgaggtatg

SEQ ID NO: 99228 - DNA, 13 bp, Artificial Sequence
  Oligonucleotide for detection of SNP TSC0024649
catacctcattaa

SEQ ID NO: 99229 - DNA, 13 bp, Artificial Sequence
  Oligonucleotide for detection of SNP TSC0024650
gggattagtggtt

SEQ ID NO: 99230 - DNA, 13 bp, Artificial Sequence
  Oligonucleotide for detection of SNP TSC0024650
aaccactaatccc

SEQ ID NO: 99231 - DNA, 13 bp, Artificial Sequence
  Oligonucleotide for detection of SNP TSC0024650
gggattggtggtt

SEQ ID NO: 99232 - DNA, 13 bp, Artificial Sequence
  Oligonucleotide for detection of SNP TSC0024650
aaccaccaatccc

SEQ ID NO: 99233 - DNA, 13 bp, Artificial Sequence
  Oligonucleotide for detection of SNP TSC0024652
tttggtagtatat

SEQ ID NO: 99234 - DNA, 13 bp, Artificial Sequence
  Oligonucleotide for detection of SNP TSC0024652
atatactaccaaa

SEQ ID NO: 99235 - DNA, 13 bp, Artificial Sequence
  Oligonucleotide for detection of SNP TSC0024652
tttggtggtatat

SEQ ID NO: 99236 - DNA, 13 bp, Artificial Sequence
  Oligonucleotide for detection of SNP TSC0024652
atataccaccaaa

SEQ ID NO: 99237 - DNA, 13 bp, Artificial Sequence
  Oligonucleotide for detection of SNP TSC0024653
ttgtttagttggg

SEQ ID NO: 99238 - DNA, 13 bp, Artificial Sequence
  Oligonucleotide for detection of SNP TSC0024653
cccaactaaacaa

SEQ ID NO: 99239 - DNA, 13 bp, Artificial Sequence
  Oligonucleotide for detection of SNP TSC0024653
ttgtttggttggg

SEQ ID NO: 99240 - DNA, 13 bp, Artificial Sequence
  Oligonucleotide for detection of SNP TSC0024653
cccaaccaaacaa

SEQ ID NO: 99241 - DNA, 13 bp, Artificial Sequence
  Oligonucleotide for detection of SNP TSC0024653
ttgtttagtcggg

SEQ ID NO: 99242 - DNA, 13 bp, Artificial Sequence
  Oligonucleotide for detection of SNP TSC0024653
cccgactaaacaa

SEQ ID NO: 99243 - DNA, 13 bp, Artificial Sequence
  Oligonucleotide for detection of SNP TSC0024653
ttgttcggttggg

SEQ ID NO: 99244 - DNA, 13 bp, Artificial Sequence
  Oligonucleotide for detection of SNP TSC0024653
cccaaccgaacaa

SEQ ID NO: 99245 - DNA, 13 bp, Artificial Sequence
  Oligonucleotide for detection of SNP TSC0024653
ttgtttggtcggg

SEQ ID NO: 99246 - DNA, 13 bp, Artificial Sequence
  Oligonucleotide for detection of SNP TSC0024653
cccgaccaaacaa

SEQ ID NO: 99247 - DNA, 13 bp, Artificial Sequence
  Oligonucleotide for detection of SNP TSC0024653
ttgttcggtcggg

SEQ ID NO: 99248 - DNA, 13 bp, Artificial Sequence
  Oligonucleotide for detection of SNP TSC0024653
cccgaccgaacaa

SEQ ID NO: 99249 - DNA, 13 bp, Artificial Sequence
  Oligonucleotide for detection of SNP TSC0024653
tttgattgggtag

SEQ ID NO: 99250 - DNA, 13 bp, Artificial Sequence
  Oligonucleotide for detection of SNP TSC0024653
ctacccaatcaaa

SEQ ID NO: 99251 - DNA, 13 bp, Artificial Sequence
  Oligonucleotide for detection of SNP TSC0024653
ttcgattgggtag

SEQ ID NO: 99252 - DNA, 13 bp, Artificial Sequence
  Oligonucleotide for detection of SNP TSC0024653
ctacccaatcgaa

SEQ ID NO: 99253 - DNA, 13 bp, Artificial Sequence
  Oligonucleotide for detection of SNP TSC0024653
tttgatcgggtag

SEQ ID NO: 99254 - DNA, 13 bp, Artificial Sequence
  Oligonucleotide for detection of SNP TSC0024653
ctacccgatcaaa

SEQ ID NO: 99255 - DNA, 13 bp, Artificial Sequence
  Oligonucleotide for detection of SNP TSC0024653
ttcgatcgggtag

SEQ ID NO: 99256 - DNA, 13 bp, Artificial Sequence
  Oligonucleotide for detection of SNP TSC0024653
ctacccgatcgaa

SEQ ID NO: 99257 - DNA, 13 bp, Artificial Sequence
  Oligonucleotide for detection of SNP TSC0024655
tttttggttagag

SEQ ID NO: 99258 - DNA, 13 bp, Artificial Sequence
  Oligonucleotide for detection of SNP TSC0024655
ctctaaccaaaaa

SEQ ID NO: 99259 - DNA, 13 bp, Artificial Sequence
  Oligonucleotide for detection of SNP TSC0024655
tttttgattagag

SEQ ID NO: 99260 - DNA, 13 bp, Artificial Sequence
  Oligonucleotide for detection of SNP TSC0024655
ctctaatcaaaaa

SEQ ID NO: 99261 - DNA, 13 bp, Artificial Sequence
  Oligonucleotide for detection of SNP TSC0024656
aggattatatatt

SEQ ID NO: 99262 - DNA, 13 bp, Artificial Sequence
  Oligonucleotide for detection of SNP TSC0024656
aatatataatcct

SEQ ID NO: 99263 - DNA, 13 bp, Artificial Sequence
  Oligonucleotide for detection of SNP TSC0024656
aggattttatatt

SEQ ID NO: 99264 - DNA, 13 bp, Artificial Sequence
  Oligonucleotide for detection of SNP TSC0024656
aatataaaatcct

SEQ ID NO: 99265 - DNA, 13 bp, Artificial Sequence
  Oligonucleotide for detection of SNP TSC0024656
agtgtatgatttt

SEQ ID NO: 99266 - DNA, 13 bp, Artificial Sequence
  Oligonucleotide for detection of SNP TSC0024656
aaaatcatacact

SEQ ID NO: 99267 - DNA, 13 bp, Artificial Sequence
  Oligonucleotide for detection of SNP TSC0024656
agtgtaggatttt

SEQ ID NO: 99268 - DNA, 13 bp, Artificial Sequence
  Oligonucleotide for detection of SNP TSC0024656
aaaatcctacact

SEQ ID NO: 99269 - DNA, 13 bp, Artificial Sequence
  Oligonucleotide for detection of SNP TSC0024662
tgggtaaagtttg

SEQ ID NO: 99270 - DNA, 13 bp, Artificial Sequence
  Oligonucleotide for detection of SNP TSC0024662
caaactttaccca

SEQ ID NO: 99271 - DNA, 13 bp, Artificial Sequence
  Oligonucleotide for detection of SNP TSC0024662
tgggtagagtttg

SEQ ID NO: 99272 - DNA, 13 bp, Artificial Sequence
  Oligonucleotide for detection of SNP TSC0024662
caaactctaccca

SEQ ID NO: 99273 - DNA, 13 bp, Artificial Sequence
  Oligonucleotide for detection of SNP TSC0024663
tgtgggatgttgy

SEQ ID NO: 99274 - DNA, 13 bp, Artificial Sequence
  Oligonucleotide for detection of SNP TSC0024663
rcaacatcccaca

SEQ ID NO: 99275 - DNA, 13 bp, Artificial Sequence
  Oligonucleotide for detection of SNP TSC0024663
tgtgggttgttgy

SEQ ID NO: 99276 - DNA, 13 bp, Artificial Sequence
  Oligonucleotide for detection of SNP TSC0024663
rcaacaacccaca

SEQ ID NO: 99277 - DNA, 13 bp, Artificial Sequence
  Oligonucleotide for detection of SNP TSC0024663
gtagtattttata

SEQ ID NO: 99278 - DNA, 13 bp, Artificial Sequence
  Oligonucleotide for detection of SNP TSC0024663
tataaaatactac

SEQ ID NO: 99279 - DNA, 13 bp, Artificial Sequence
  Oligonucleotide for detection of SNP TSC0024663
gtagtaatttata

SEQ ID NO: 99280 - DNA, 13 bp, Artificial Sequence
  Oligonucleotide for detection of SNP TSC0024663
tataaattactac

SEQ ID NO: 99281 - DNA, 13 bp, Artificial Sequence
  Oligonucleotide for detection of SNP TSC0024664
ggatggggataaa

SEQ ID NO: 99282 - DNA, 13 bp, Artificial Sequence
  Oligonucleotide for detection of SNP TSC0024664
tttatccccatcc

SEQ ID NO: 99283 - DNA, 13 bp, Artificial Sequence
  Oligonucleotide for detection of SNP TSC0024664
ggatggagataaa

SEQ ID NO: 99284 - DNA, 13 bp, Artificial Sequence
  Oligonucleotide for detection of SNP TSC0024664
tttatctccatcc

SEQ ID NO: 99285 - DNA, 13 bp, Artificial Sequence
  Oligonucleotide for detection of SNP TSC0024666
aatgtagaaatta

SEQ ID NO: 99286 - DNA, 13 bp, Artificial Sequence
  Oligonucleotide for detection of SNP TSC0024666
taatttctacatt

SEQ ID NO: 99287 - DNA, 13 bp, Artificial Sequence
  Oligonucleotide for detection of SNP TSC0024666
aatgtaaaaatta

SEQ ID NO: 99288 - DNA, 13 bp, Artificial Sequence
  Oligonucleotide for detection of SNP TSC0024666
taatttttacatt

SEQ ID NO: 99289 - DNA, 13 bp, Artificial Sequence
  Oligonucleotide for detection of SNP TSC0024667
tgtagatgttata

SEQ ID NO: 99290 - DNA, 13 bp, Artificial Sequence
  Oligonucleotide for detection of SNP TSC0024667
tataacatctaca

SEQ ID NO: 99291 - DNA, 13 bp, Artificial Sequence
  Oligonucleotide for detection of SNP TSC0024667
tgtagacgttata

SEQ ID NO: 99292 - DNA, 13 bp, Artificial Sequence
  Oligonucleotide for detection of SNP TSC0024667
tataacgtctaca

SEQ ID NO: 99293 - DNA, 13 bp, Artificial Sequence
  Oligonucleotide for detection of SNP TSC0024667
tatgatgtttgta

SEQ ID NO: 99294 - DNA, 13 bp, Artificial Sequence
  Oligonucleotide for detection of SNP TSC0024667
tacaaacatcata

SEQ ID NO: 99295 - DNA, 13 bp, Artificial Sequence
  Oligonucleotide for detection of SNP TSC0024667
tatgatatttgta

SEQ ID NO: 99296 - DNA, 13 bp, Artificial Sequence
  Oligonucleotide for detection of SNP TSC0024667
tacaaatatcata

SEQ ID NO: 99297 - DNA, 13 bp, Artificial Sequence
  Oligonucleotide for detection of SNP TSC0024667
tatgacgtttgta

SEQ ID NO: 99298 - DNA, 13 bp, Artificial Sequence
  Oligonucleotide for detection of SNP TSC0024667
tacaaacgtcata

SEQ ID NO: 99299 - DNA, 13 bp, Artificial Sequence
  Oligonucleotide for detection of SNP TSC0024671
ggtaggagtaata

SEQ ID NO: 99300 - DNA, 13 bp, Artificial Sequence
  Oligonucleotide for detection of SNP TSC0024671
tattactcctacc

SEQ ID NO: 99301 - DNA, 13 bp, Artificial Sequence
  Oligonucleotide for detection of SNP TSC0024671
ggtaggggtaata

SEQ ID NO: 99302 - DNA, 13 bp, Artificial Sequence
  Oligonucleotide for detection of SNP TSC0024671
tattacccctacc

SEQ ID NO: 99303 - DNA, 13 bp, Artificial Sequence
  Oligonucleotide for detection of SNP TSC0024672
gagttgagatttt

SEQ ID NO: 99304 - DNA, 13 bp, Artificial Sequence
  Oligonucleotide for detection of SNP TSC0024672
aaaatctcaactc

SEQ ID NO: 99305 - DNA, 13 bp, Artificial Sequence
  Oligonucleotide for detection of SNP TSC0024672
gagttgggatttt

SEQ ID NO: 99306 - DNA, 13 bp, Artificial Sequence
  Oligonucleotide for detection of SNP TSC0024672
aaaatcccaactc

SEQ ID NO: 99307 - DNA, 13 bp, Artificial Sequence
  Oligonucleotide for detection of SNP TSC0024674
aggagtatgagty

SEQ ID NO: 99308 - DNA, 13 bp, Artificial Sequence
  Oligonucleotide for detection of SNP TSC0024674
ractcatactcct

SEQ ID NO: 99309 - DNA, 13 bp, Artificial Sequence
  Oligonucleotide for detection of SNP TSC0024674
aggagtgtgagty

SEQ ID NO: 99310 - DNA, 13 bp, Artificial Sequence
  Oligonucleotide for detection of SNP TSC0024674
ractcacactcct

SEQ ID NO: 99311 - DNA, 13 bp, Artificial Sequence
  Oligonucleotide for detection of SNP TSC0024674
aggagcgtgagty

SEQ ID NO: 99312 - DNA, 13 bp, Artificial Sequence
  Oligonucleotide for detection of SNP TSC0024674
ractcacgctcct

SEQ ID NO: 99313 - DNA, 13 bp, Artificial Sequence
  Oligonucleotide for detection of SNP TSC0024674
ggtttatgttttt

SEQ ID NO: 99314 - DNA, 13 bp, Artificial Sequence
  Oligonucleotide for detection of SNP TSC0024674
aaaaacataaacc

SEQ ID NO: 99315 - DNA, 13 bp, Artificial Sequence
  Oligonucleotide for detection of SNP TSC0024674
ggtttacgttttt

SEQ ID NO: 99316 - DNA, 13 bp, Artificial Sequence
  Oligonucleotide for detection of SNP TSC0024674
aaaaacgtaaacc

SEQ ID NO: 99317 - DNA, 13 bp, Artificial Sequence
  Oligonucleotide for detection of SNP TSC0024675
gagtttgtattgg

SEQ ID NO: 99318 - DNA, 13 bp, Artificial Sequence
  Oligonucleotide for detection of SNP TSC0024675
ccaatacaaactc

SEQ ID NO: 99319 - DNA, 13 bp, Artificial Sequence
  Oligonucleotide for detection of SNP TSC0024675
gagtttatattgg

SEQ ID NO: 99320 - DNA, 13 bp, Artificial Sequence
  Oligonucleotide for detection of SNP TSC0024675
ccaatataaactc

SEQ ID NO: 99321 - DNA, 13 bp, Artificial Sequence
  Oligonucleotide for detection of SNP TSC0024679
ataatttgtgtat

SEQ ID NO: 99322 - DNA, 13 bp, Artificial Sequence
  Oligonucleotide for detection of SNP TSC0024679
atacacaaattat

SEQ ID NO: 99323 - DNA, 13 bp, Artificial Sequence
  Oligonucleotide for detection of SNP TSC0024679
ataattcgtgtat

SEQ ID NO: 99324 - DNA, 13 bp, Artificial Sequence
  Oligonucleotide for detection of SNP TSC0024679
atacacgaattat

SEQ ID NO: 99325 - DNA, 13 bp, Artificial Sequence
  Oligonucleotide for detection of SNP TSC0024679
atgtatgaattgt

SEQ ID NO: 99326 - DNA, 13 bp, Artificial Sequence
  Oligonucleotide for detection of SNP TSC0024679
acaattcatacat

SEQ ID NO: 99327 - DNA, 13 bp, Artificial Sequence
  Oligonucleotide for detection of SNP TSC0024679
atgtataaattgt

SEQ ID NO: 99328 - DNA, 13 bp, Artificial Sequence
  Oligonucleotide for detection of SNP TSC0024679
acaatttatacat

SEQ ID NO: 99329 - DNA, 13 bp, Artificial Sequence
  Oligonucleotide for detection of SNP TSC0024679
atgtacgaattgt

SEQ ID NO: 99330 - DNA, 13 bp, Artificial Sequence
  Oligonucleotide for detection of SNP TSC0024679
acaattcgtacat

SEQ ID NO: 99331 - DNA, 13 bp, Artificial Sequence
  Oligonucleotide for detection of SNP TSC0024681
gggggagagaagg

SEQ ID NO: 99332 - DNA, 13 bp, Artificial Sequence
  Oligonucleotide for detection of SNP TSC0024681
ccttctctccccc

SEQ ID NO: 99333 - DNA, 13 bp, Artificial Sequence
  Oligonucleotide for detection of SNP TSC0024681
gggggatagaagg

SEQ ID NO: 99334 - DNA, 13 bp, Artificial Sequence
  Oligonucleotide for detection of SNP TSC0024681
ccttctatccccc

SEQ ID NO: 99335 - DNA, 13 bp, Artificial Sequence
  Oligonucleotide for detection of SNP TSC0024683
aatgttatagttt

SEQ ID NO: 99336 - DNA, 13 bp, Artificial Sequence
  Oligonucleotide for detection of SNP TSC0024683
aaactataacatt

SEQ ID NO: 99337 - DNA, 13 bp, Artificial Sequence
  Oligonucleotide for detection of SNP TSC0024683
aatgttgtagttt

SEQ ID NO: 99338 - DNA, 13 bp, Artificial Sequence
  Oligonucleotide for detection of SNP TSC0024683
aaactacaacatt

SEQ ID NO: 99339 - DNA, 13 bp, Artificial Sequence
  Oligonucleotide for detection of SNP TSC0024686
agagttgttgtta

SEQ ID NO: 99340 - DNA, 13 bp, Artificial Sequence
  Oligonucleotide for detection of SNP TSC0024686
taacaacaactct

SEQ ID NO: 99341 - DNA, 13 bp, Artificial Sequence
  Oligonucleotide for detection of SNP TSC0024686
agagttattgtta

SEQ ID NO: 99342 - DNA, 13 bp, Artificial Sequence
  Oligonucleotide for detection of SNP TSC0024686
taacaataactct

SEQ ID NO: 99343 - DNA, 13 bp, Artificial Sequence
  Oligonucleotide for detection of SNP TSC0024687
ggttttttttgty

SEQ ID NO: 99344 - DNA, 13 bp, Artificial Sequence
  Oligonucleotide for detection of SNP TSC0024687
racaaaaaaaacc

SEQ ID NO: 99345 - DNA, 13 bp, Artificial Sequence
  Oligonucleotide for detection of SNP TSC0024687
gatagggaagaty

SEQ ID NO: 99346 - DNA, 13 bp, Artificial Sequence
  Oligonucleotide for detection of SNP TSC0024687
ratcttccctatc

SEQ ID NO: 99347 - DNA, 13 bp, Artificial Sequence
  Oligonucleotide for detection of SNP TSC0024687
gataggtaagaty

SEQ ID NO: 99348 - DNA, 13 bp, Artificial Sequence
  Oligonucleotide for detection of SNP TSC0024687
ratcttacctatc

SEQ ID NO: 99349 - DNA, 13 bp, Artificial Sequence
  Oligonucleotide for detection of SNP TSC0024693
tgtgttagtgttg

SEQ ID NO: 99350 - DNA, 13 bp, Artificial Sequence
  Oligonucleotide for detection of SNP TSC0024693
caacactaacaca

SEQ ID NO: 99351 - DNA, 13 bp, Artificial Sequence
  Oligonucleotide for detection of SNP TSC0024693
tgtgttggtgttg

SEQ ID NO: 99352 - DNA, 13 bp, Artificial Sequence
  Oligonucleotide for detection of SNP TSC0024693
caacaccaacaca

SEQ ID NO: 99353 - DNA, 13 bp, Artificial Sequence
  Oligonucleotide for detection of SNP TSC0024693
tgtgttagcgttg

SEQ ID NO: 99354 - DNA, 13 bp, Artificial Sequence
  Oligonucleotide for detection of SNP TSC0024693
caacgctaacaca

SEQ ID NO: 99355 - DNA, 13 bp, Artificial Sequence
  Oligonucleotide for detection of SNP TSC0024693
tgtgtcggtgttg

SEQ ID NO: 99356 - DNA, 13 bp, Artificial Sequence
  Oligonucleotide for detection of SNP TSC0024693
caacaccgacaca

SEQ ID NO: 99357 - DNA, 13 bp, Artificial Sequence
  Oligonucleotide for detection of SNP TSC0024693
tgtgttagtgtcg

SEQ ID NO: 99358 - DNA, 13 bp, Artificial Sequence
  Oligonucleotide for detection of SNP TSC0024693
cgacactaacaca

SEQ ID NO: 99359 - DNA, 13 bp, Artificial Sequence
  Oligonucleotide for detection of SNP TSC0024693
tgtgttggcgttg

SEQ ID NO: 99360 - DNA, 13 bp, Artificial Sequence
  Oligonucleotide for detection of SNP TSC0024693
caacgccaacaca

SEQ ID NO: 99361 - DNA, 13 bp, Artificial Sequence
  Oligonucleotide for detection of SNP TSC0024693
tgtgttagcgtcg

SEQ ID NO: 99362 - DNA, 13 bp, Artificial Sequence
  Oligonucleotide for detection of SNP TSC0024693
cgacgctaacaca

SEQ ID NO: 99363 - DNA, 13 bp, Artificial Sequence
  Oligonucleotide for detection of SNP TSC0024693
tgtgttggtgtcg

SEQ ID NO: 99364 - DNA, 13 bp, Artificial Sequence
  Oligonucleotide for detection of SNP TSC0024693
cgacaccaacaca

SEQ ID NO: 99365 - DNA, 13 bp, Artificial Sequence
  Oligonucleotide for detection of SNP TSC0024693
tgtgtcggcgttg

SEQ ID NO: 99366 - DNA, 13 bp, Artificial Sequence
  Oligonucleotide for detection of SNP TSC0024693
caacgccgacaca

SEQ ID NO: 99367 - DNA, 13 bp, Artificial Sequence
  Oligonucleotide for detection of SNP TSC0024693
tgtgtcggtgtcg

SEQ ID NO: 99368 - DNA, 13 bp, Artificial Sequence
  Oligonucleotide for detection of SNP TSC0024693
cgacaccgacaca

SEQ ID NO: 99369 - DNA, 13 bp, Artificial Sequence
  Oligonucleotide for detection of SNP TSC0024693
tgtgttggcgtcg

SEQ ID NO: 99370 - DNA, 13 bp, Artificial Sequence
  Oligonucleotide for detection of SNP TSC0024693
cgacgccaacaca

SEQ ID NO: 99371 - DNA, 13 bp, Artificial Sequence
  Oligonucleotide for detection of SNP TSC0024693
tgtgtcggcgtcg

SEQ ID NO: 99372 - DNA, 13 bp, Artificial Sequence
  Oligonucleotide for detection of SNP TSC0024693
cgacgccgacaca

SEQ ID NO: 99373 - DNA, 13 bp, Artificial Sequence
  Oligonucleotide for detection of SNP TSC0024693
tggtgttgatata

SEQ ID NO: 99374 - DNA, 13 bp, Artificial Sequence
  Oligonucleotide for detection of SNP TSC0024693
tatatcaacacca

SEQ ID NO: 99375 - DNA, 13 bp, Artificial Sequence
  Oligonucleotide for detection of SNP TSC0024693
cggtgttgatata

SEQ ID NO: 99376 - DNA, 13 bp, Artificial Sequence
  Oligonucleotide for detection of SNP TSC0024693
tatatcaacaccg

SEQ ID NO: 99377 - DNA, 13 bp, Artificial Sequence
  Oligonucleotide for detection of SNP TSC0024693
tggcgttgatata

SEQ ID NO: 99378 - DNA, 13 bp, Artificial Sequence
  Oligonucleotide for detection of SNP TSC0024693
tatatcaacgcca

SEQ ID NO: 99379 - DNA, 13 bp, Artificial Sequence
  Oligonucleotide for detection of SNP TSC0024693
cggcgttgatata

SEQ ID NO: 99380 - DNA, 13 bp, Artificial Sequence
  Oligonucleotide for detection of SNP TSC0024693
tatatcaacgccg

SEQ ID NO: 99381 - DNA, 13 bp, Artificial Sequence
  Oligonucleotide for detection of SNP TSC0024693
tggtgtcgatata

SEQ ID NO: 99382 - DNA, 13 bp, Artificial Sequence
  Oligonucleotide for detection of SNP TSC0024693
tatatcgacacca

SEQ ID NO: 99383 - DNA, 13 bp, Artificial Sequence
  Oligonucleotide for detection of SNP TSC0024693
cggtgtcgatata

SEQ ID NO: 99384 - DNA, 13 bp, Artificial Sequence
  Oligonucleotide for detection of SNP TSC0024693
tatatcgacaccg

SEQ ID NO: 99385 - DNA, 13 bp, Artificial Sequence
  Oligonucleotide for detection of SNP TSC0024693
tggcgtcgatata

SEQ ID NO: 99386 - DNA, 13 bp, Artificial Sequence
  Oligonucleotide for detection of SNP TSC0024693
tatatcgacgcca

SEQ ID NO: 99387 - DNA, 13 bp, Artificial Sequence
  Oligonucleotide for detection of SNP TSC0024693
cggcgtcgatata

SEQ ID NO: 99388 - DNA, 13 bp, Artificial Sequence
  Oligonucleotide for detection of SNP TSC0024693
tatatcgacgccg

SEQ ID NO: 99389 - DNA, 13 bp, Artificial Sequence
  Oligonucleotide for detection of SNP TSC0024694
atagataagaaaa

SEQ ID NO: 99390 - DNA, 13 bp, Artificial Sequence
  Oligonucleotide for detection of SNP TSC0024694
ttttcttatctat

SEQ ID NO: 99391 - DNA, 13 bp, Artificial Sequence
  Oligonucleotide for detection of SNP TSC0024694
atagattagaaaa

SEQ ID NO: 99392 - DNA, 13 bp, Artificial Sequence
  Oligonucleotide for detection of SNP TSC0024694
ttttctaatctat

SEQ ID NO: 99393 - DNA, 13 bp, Artificial Sequence
  Oligonucleotide for detection of SNP TSC0024697
tgtgttgtggaty

SEQ ID NO: 99394 - DNA, 13 bp, Artificial Sequence
  Oligonucleotide for detection of SNP TSC0024697
ratccacaacaca

SEQ ID NO: 99395 - DNA, 13 bp, Artificial Sequence
  Oligonucleotide for detection of SNP TSC0024697
tgtgttatggaty

SEQ ID NO: 99396 - DNA, 13 bp, Artificial Sequence
  Oligonucleotide for detection of SNP TSC0024697
ratccataacaca

SEQ ID NO: 99397 - DNA, 13 bp, Artificial Sequence
  Oligonucleotide for detection of SNP TSC0024698
atattgggtgtay

SEQ ID NO: 99398 - DNA, 13 bp, Artificial Sequence
  Oligonucleotide for detection of SNP TSC0024698
rtacacccaatat

SEQ ID NO: 99399 - DNA, 13 bp, Artificial Sequence
  Oligonucleotide for detection of SNP TSC0024698
atattgtgtgtay

SEQ ID NO: 99400 - DNA, 13 bp, Artificial Sequence
  Oligonucleotide for detection of SNP TSC0024698
rtacacacaatat

SEQ ID NO: 99401 - DNA, 13 bp, Artificial Sequence
  Oligonucleotide for detection of SNP TSC0024698
gtgtatttagtgt

SEQ ID NO: 99402 - DNA, 13 bp, Artificial Sequence
  Oligonucleotide for detection of SNP TSC0024698
acactaaatacac

SEQ ID NO: 99403 - DNA, 13 bp, Artificial Sequence
  Oligonucleotide for detection of SNP TSC0024698
gtgtatatagtgt

SEQ ID NO: 99404 - DNA, 13 bp, Artificial Sequence
  Oligonucleotide for detection of SNP TSC0024698
acactatatacac

SEQ ID NO: 99405 - DNA, 13 bp, Artificial Sequence
  Oligonucleotide for detection of SNP TSC0024701
aatgttggtttty

SEQ ID NO: 99406 - DNA, 13 bp, Artificial Sequence
  Oligonucleotide for detection of SNP TSC0024701
raaaaccaacatt

SEQ ID NO: 99407 - DNA, 13 bp, Artificial Sequence
  Oligonucleotide for detection of SNP TSC0024701
aatgtttgtttty

SEQ ID NO: 99408 - DNA, 13 bp, Artificial Sequence
  Oligonucleotide for detection of SNP TSC0024701
raaaacaaacatt

SEQ ID NO: 99409 - DNA, 13 bp, Artificial Sequence
  Oligonucleotide for detection of SNP TSC0024701
ggagattagtatt

SEQ ID NO: 99410 - DNA, 13 bp, Artificial Sequence
  Oligonucleotide for detection of SNP TSC0024701
aatactaatctcc

SEQ ID NO: 99411 - DNA, 13 bp, Artificial Sequence
  Oligonucleotide for detection of SNP TSC0024701
ggagataagtatt

SEQ ID NO: 99412 - DNA, 13 bp, Artificial Sequence
  Oligonucleotide for detection of SNP TSC0024701
aatacttatctcc

SEQ ID NO: 99413 - DNA, 13 bp, Artificial Sequence
  Oligonucleotide for detection of SNP TSC0024702
tttattttttgta

SEQ ID NO: 99414 - DNA, 13 bp, Artificial Sequence
  Oligonucleotide for detection of SNP TSC0024702
tacaaaaaataaa

SEQ ID NO: 99415 - DNA, 13 bp, Artificial Sequence
  Oligonucleotide for detection of SNP TSC0024702
tttattgtttgta

SEQ ID NO: 99416 - DNA, 13 bp, Artificial Sequence
  Oligonucleotide for detection of SNP TSC0024702
tacaaacaataaa

SEQ ID NO: 99417 - DNA, 13 bp, Artificial Sequence
  Oligonucleotide for detection of SNP TSC0024702
tgtaaagagtgaa

SEQ ID NO: 99418 - DNA, 13 bp, Artificial Sequence
  Oligonucleotide for detection of SNP TSC0024702
ttcactctttaca

SEQ ID NO: 99419 - DNA, 13 bp, Artificial Sequence
  Oligonucleotide for detection of SNP TSC0024702
tgtaaatagtgaa

SEQ ID NO: 99420 - DNA, 13 bp, Artificial Sequence
  Oligonucleotide for detection of SNP TSC0024702
ttcactatttaca

SEQ ID NO: 99421 - DNA, 13 bp, Artificial Sequence
  Oligonucleotide for detection of SNP TSC0024703
tttgtttggtagg

SEQ ID NO: 99422 - DNA, 13 bp, Artificial Sequence
  Oligonucleotide for detection of SNP TSC0024703
cctaccaaacaaa

SEQ ID NO: 99423 - DNA, 13 bp, Artificial Sequence
  Oligonucleotide for detection of SNP TSC0024703
tttgttcggtagg

SEQ ID NO: 99424 - DNA, 13 bp, Artificial Sequence
  Oligonucleotide for detection of SNP TSC0024703
cctaccgaacaaa

SEQ ID NO: 99425 - DNA, 13 bp, Artificial Sequence
  Oligonucleotide for detection of SNP TSC0024703
tttgttgggtaga

SEQ ID NO: 99426 - DNA, 13 bp, Artificial Sequence
  Oligonucleotide for detection of SNP TSC0024703
tctacccaacaaa

SEQ ID NO: 99427 - DNA, 13 bp, Artificial Sequence
  Oligonucleotide for detection of SNP TSC0024703
tttgttaggtaga

SEQ ID NO: 99428 - DNA, 13 bp, Artificial Sequence
  Oligonucleotide for detection of SNP TSC0024703
tctacctaacaaa

SEQ ID NO: 99429 - DNA, 13 bp, Artificial Sequence
  Oligonucleotide for detection of SNP TSC0024703
tttgtcgggtaga

SEQ ID NO: 99430 - DNA, 13 bp, Artificial Sequence
  Oligonucleotide for detection of SNP TSC0024703
tctacccgacaaa

SEQ ID NO: 99431 - DNA, 13 bp, Artificial Sequence
  Oligonucleotide for detection of SNP TSC0024704
ggggttatttgta

SEQ ID NO: 99432 - DNA, 13 bp, Artificial Sequence
  Oligonucleotide for detection of SNP TSC0024704
tacaaataacccc

SEQ ID NO: 99433 - DNA, 13 bp, Artificial Sequence
  Oligonucleotide for detection of SNP TSC0024704
ggggttttttgta

SEQ ID NO: 99434 - DNA, 13 bp, Artificial Sequence
  Oligonucleotide for detection of SNP TSC0024704
tacaaaaaacccc

SEQ ID NO: 99435 - DNA, 13 bp, Artificial Sequence
  Oligonucleotide for detection of SNP TSC0024704
tgtagatggttty

SEQ ID NO: 99436 - DNA, 13 bp, Artificial Sequence
  Oligonucleotide for detection of SNP TSC0024704
raaaccatctaca

SEQ ID NO: 99437 - DNA, 13 bp, Artificial Sequence
  Oligonucleotide for detection of SNP TSC0024704
tgtagaaggttty

SEQ ID NO: 99438 - DNA, 13 bp, Artificial Sequence
  Oligonucleotide for detection of SNP TSC0024704
raaaccttctaca

SEQ ID NO: 99439 - DNA, 13 bp, Artificial Sequence
  Oligonucleotide for detection of SNP TSC0024707
agtagagatggga

SEQ ID NO: 99440 - DNA, 13 bp, Artificial Sequence
  Oligonucleotide for detection of SNP TSC0024707
tcccatctctact

SEQ ID NO: 99441 - DNA, 13 bp, Artificial Sequence
  Oligonucleotide for detection of SNP TSC0024707
agtagaaatggga

SEQ ID NO: 99442 - DNA, 13 bp, Artificial Sequence
  Oligonucleotide for detection of SNP TSC0024707
tcccatttctact

SEQ ID NO: 99443 - DNA, 13 bp, Artificial Sequence
  Oligonucleotide for detection of SNP TSC0024707
agtagagacggga

SEQ ID NO: 99444 - DNA, 13 bp, Artificial Sequence
  Oligonucleotide for detection of SNP TSC0024707
tcccgtctctact

SEQ ID NO: 99445 - DNA, 13 bp, Artificial Sequence
  Oligonucleotide for detection of SNP TSC0024707
agtagaaacggga

SEQ ID NO: 99446 - DNA, 13 bp, Artificial Sequence
  Oligonucleotide for detection of SNP TSC0024707
tcccgtttctact

SEQ ID NO: 99447 - DNA, 13 bp, Artificial Sequence
  Oligonucleotide for detection of SNP TSC0024714
ttaaagaattgay

SEQ ID NO: 99448 - DNA, 13 bp, Artificial Sequence
  Oligonucleotide for detection of SNP TSC0024714
rtcaattctttaa

SEQ ID NO: 99449 - DNA, 13 bp, Artificial Sequence
  Oligonucleotide for detection of SNP TSC0024714
ttaaaggattgay

SEQ ID NO: 99450 - DNA, 13 bp, Artificial Sequence
  Oligonucleotide for detection of SNP TSC0024714
rtcaatcctttaa

SEQ ID NO: 99451 - DNA, 13 bp, Artificial Sequence
  Oligonucleotide for detection of SNP TSC0024715
tttgggtgataaa

SEQ ID NO: 99452 - DNA, 13 bp, Artificial Sequence
  Oligonucleotide for detection of SNP TSC0024715
tttatcacccaaa

SEQ ID NO: 99453 - DNA, 13 bp, Artificial Sequence
  Oligonucleotide for detection of SNP TSC0024715
tttgggcgataaa

SEQ ID NO: 99454 - DNA, 13 bp, Artificial Sequence
  Oligonucleotide for detection of SNP TSC0024715
tttatcgcccaaa

SEQ ID NO: 99455 - DNA, 13 bp, Artificial Sequence
  Oligonucleotide for detection of SNP TSC0024716
gaagtatatagtg

SEQ ID NO: 99456 - DNA, 13 bp, Artificial Sequence
  Oligonucleotide for detection of SNP TSC0024716
cactatatacttc

SEQ ID NO: 99457 - DNA, 13 bp, Artificial Sequence
  Oligonucleotide for detection of SNP TSC0024716
gaagtagatagtg

SEQ ID NO: 99458 - DNA, 13 bp, Artificial Sequence
  Oligonucleotide for detection of SNP TSC0024716
cactatctacttc

SEQ ID NO: 99459 - DNA, 13 bp, Artificial Sequence
  Oligonucleotide for detection of SNP TSC0024716
tattgtgtgttty

SEQ ID NO: 99460 - DNA, 13 bp, Artificial Sequence
  Oligonucleotide for detection of SNP TSC0024716
raaacacacaata

SEQ ID NO: 99461 - DNA, 13 bp, Artificial Sequence
  Oligonucleotide for detection of SNP TSC0024716
tattgtttgttty

SEQ ID NO: 99462 - DNA, 13 bp, Artificial Sequence
  Oligonucleotide for detection of SNP TSC0024716
raaacaaacaata

SEQ ID NO: 99463 - DNA, 13 bp, Artificial Sequence
  Oligonucleotide for detection of SNP TSC0024717
aattttattttgg

SEQ ID NO: 99464 - DNA, 13 bp, Artificial Sequence
  Oligonucleotide for detection of SNP TSC0024717
ccaaaataaaatt

SEQ ID NO: 99465 - DNA, 13 bp, Artificial Sequence
  Oligonucleotide for detection of SNP TSC0024717
aattttgttttgg

SEQ ID NO: 99466 - DNA, 13 bp, Artificial Sequence
  Oligonucleotide for detection of SNP TSC0024717
ccaaaacaaaatt

SEQ ID NO: 99467 - DNA, 13 bp, Artificial Sequence
  Oligonucleotide for detection of SNP TSC0024717
aatttcgttttgg

SEQ ID NO: 99468 - DNA, 13 bp, Artificial Sequence
  Oligonucleotide for detection of SNP TSC0024717
ccaaaacgaaatt

SEQ ID NO: 99469 - DNA, 13 bp, Artificial Sequence
  Oligonucleotide for detection of SNP TSC0024717
ttagggtgggatt

SEQ ID NO: 99470 - DNA, 13 bp, Artificial Sequence
  Oligonucleotide for detection of SNP TSC0024717
aatcccaccctaa

SEQ ID NO: 99471 - DNA, 13 bp, Artificial Sequence
  Oligonucleotide for detection of SNP TSC0024717
ttagggcgggatt

SEQ ID NO: 99472 - DNA, 13 bp, Artificial Sequence
  Oligonucleotide for detection of SNP TSC0024717
aatcccgccctaa

SEQ ID NO: 99473 - DNA, 13 bp, Artificial Sequence
  Oligonucleotide for detection of SNP TSC0024718
tttataagtgtty

SEQ ID NO: 99474 - DNA, 13 bp, Artificial Sequence
  Oligonucleotide for detection of SNP TSC0024718
raacacttataaa

SEQ ID NO: 99475 - DNA, 13 bp, Artificial Sequence
  Oligonucleotide for detection of SNP TSC0024718
tttataggtgtty

SEQ ID NO: 99476 - DNA, 13 bp, Artificial Sequence
  Oligonucleotide for detection of SNP TSC0024718
raacacctataaa

SEQ ID NO: 99477 - DNA, 13 bp, Artificial Sequence
  Oligonucleotide for detection of SNP TSC0024719
gatgggtgtttgt

SEQ ID NO: 99478 - DNA, 13 bp, Artificial Sequence
  Oligonucleotide for detection of SNP TSC0024719
acaaacacccatc

SEQ ID NO: 99479 - DNA, 13 bp, Artificial Sequence
  Oligonucleotide for detection of SNP TSC0024719
gacgggtgtttgt

SEQ ID NO: 99480 - DNA, 13 bp, Artificial Sequence
  Oligonucleotide for detection of SNP TSC0024719
acaaacacccgtc

SEQ ID NO: 99481 - DNA, 13 bp, Artificial Sequence
  Oligonucleotide for detection of SNP TSC0024719
gatgggcgtttgt

SEQ ID NO: 99482 - DNA, 13 bp, Artificial Sequence
  Oligonucleotide for detection of SNP TSC0024719
acaaacgcccatc

SEQ ID NO: 99483 - DNA, 13 bp, Artificial Sequence
  Oligonucleotide for detection of SNP TSC0024719
gacgggcgtttgt

SEQ ID NO: 99484 - DNA, 13 bp, Artificial Sequence
  Oligonucleotide for detection of SNP TSC0024719
acaaacgcccgtc

SEQ ID NO: 99485 - DNA, 13 bp, Artificial Sequence
  Oligonucleotide for detection of SNP TSC0024720
gaatgagtttaag

SEQ ID NO: 99486 - DNA, 13 bp, Artificial Sequence
  Oligonucleotide for detection of SNP TSC0024720
cttaaactcattc

SEQ ID NO: 99487 - DNA, 13 bp, Artificial Sequence
  Oligonucleotide for detection of SNP TSC0024720
gaatgattttaag

SEQ ID NO: 99488 - DNA, 13 bp, Artificial Sequence
  Oligonucleotide for detection of SNP TSC0024720
cttaaaatcattc

SEQ ID NO: 99489 - DNA, 13 bp, Artificial Sequence
  Oligonucleotide for detection of SNP TSC0024720
tttaagtttatty

SEQ ID NO: 99490 - DNA, 13 bp, Artificial Sequence
  Oligonucleotide for detection of SNP TSC0024720
raataaacttaaa

SEQ ID NO: 99491 - DNA, 13 bp, Artificial Sequence
  Oligonucleotide for detection of SNP TSC0024720
tttaagattatty

SEQ ID NO: 99492 - DNA, 13 bp, Artificial Sequence
  Oligonucleotide for detection of SNP TSC0024720
raataatcttaaa

SEQ ID NO: 99493 - DNA, 13 bp, Artificial Sequence
  Oligonucleotide for detection of SNP TSC0024721
ttattttgtggta

SEQ ID NO: 99494 - DNA, 13 bp, Artificial Sequence
  Oligonucleotide for detection of SNP TSC0024721
taccacaaaataa

SEQ ID NO: 99495 - DNA, 13 bp, Artificial Sequence
  Oligonucleotide for detection of SNP TSC0024721
ttatttcgtggta

SEQ ID NO: 99496 - DNA, 13 bp, Artificial Sequence
  Oligonucleotide for detection of SNP TSC0024721
taccacgaaataa

SEQ ID NO: 99497 - DNA, 13 bp, Artificial Sequence
  Oligonucleotide for detection of SNP TSC0024721
tgttatgaagtag

SEQ ID NO: 99498 - DNA, 13 bp, Artificial Sequence
  Oligonucleotide for detection of SNP TSC0024721
ctacttcataaca

SEQ ID NO: 99499 - DNA, 13 bp, Artificial Sequence
  Oligonucleotide for detection of SNP TSC0024721
tgttataaagtag

SEQ ID NO: 99500 - DNA, 13 bp, Artificial Sequence
  Oligonucleotide for detection of SNP TSC0024721
ctactttataaca

SEQ ID NO: 99501 - DNA, 13 bp, Artificial Sequence
  Oligonucleotide for detection of SNP TSC0024721
tgttacgaagtag

SEQ ID NO: 99502 - DNA, 13 bp, Artificial Sequence
  Oligonucleotide for detection of SNP TSC0024721
ctacttcgtaaca

SEQ ID NO: 99503 - DNA, 13 bp, Artificial Sequence
  Oligonucleotide for detection of SNP TSC0024722
ggaggatggaggt

SEQ ID NO: 99504 - DNA, 13 bp, Artificial Sequence
  Oligonucleotide for detection of SNP TSC0024722
acctccatcctcc

SEQ ID NO: 99505 - DNA, 13 bp, Artificial Sequence
  Oligonucleotide for detection of SNP TSC0024722
ggaggacggaggt

SEQ ID NO: 99506 - DNA, 13 bp, Artificial Sequence
  Oligonucleotide for detection of SNP TSC0024722
acctccgtcctcc

SEQ ID NO: 99507 - DNA, 13 bp, Artificial Sequence
  Oligonucleotide for detection of SNP TSC0024723
gtaaaatggataa

SEQ ID NO: 99508 - DNA, 13 bp, Artificial Sequence
  Oligonucleotide for detection of SNP TSC0024723
ttatccattttac

SEQ ID NO: 99509 - DNA, 13 bp, Artificial Sequence
  Oligonucleotide for detection of SNP TSC0024723
gtaaaacggataa

SEQ ID NO: 99510 - DNA, 13 bp, Artificial Sequence
  Oligonucleotide for detection of SNP TSC0024723
ttatccgttttac

SEQ ID NO: 99511 - DNA, 13 bp, Artificial Sequence
  Oligonucleotide for detection of SNP TSC0024723
ttgtttgttttgy

SEQ ID NO: 99512 - DNA, 13 bp, Artificial Sequence
  Oligonucleotide for detection of SNP TSC0024723
rcaaaacaaacaa

SEQ ID NO: 99513 - DNA, 13 bp, Artificial Sequence
  Oligonucleotide for detection of SNP TSC0024723
ttgtttattttgy

SEQ ID NO: 99514 - DNA, 13 bp, Artificial Sequence
  Oligonucleotide for detection of SNP TSC0024723
rcaaaataaacaa

SEQ ID NO: 99515 - DNA, 13 bp, Artificial Sequence
  Oligonucleotide for detection of SNP TSC0024723
ttgttcgttttgy

SEQ ID NO: 99516 - DNA, 13 bp, Artificial Sequence
  Oligonucleotide for detection of SNP TSC0024723
rcaaaacgaacaa

SEQ ID NO: 99517 - DNA, 13 bp, Artificial Sequence
  Oligonucleotide for detection of SNP TSC0024724
gagtttgagatag

SEQ ID NO: 99518 - DNA, 13 bp, Artificial Sequence
  Oligonucleotide for detection of SNP TSC0024724
ctatctcaaactc

SEQ ID NO: 99519 - DNA, 13 bp, Artificial Sequence
  Oligonucleotide for detection of SNP TSC0024724
gagttttagatag

SEQ ID NO: 99520 - DNA, 13 bp, Artificial Sequence
  Oligonucleotide for detection of SNP TSC0024724
ctatctaaaactc

SEQ ID NO: 99521 - DNA, 13 bp, Artificial Sequence
  Oligonucleotide for detection of SNP TSC0024724
gagttcgagatag

SEQ ID NO: 99522 - DNA, 13 bp, Artificial Sequence
  Oligonucleotide for detection of SNP TSC0024724
ctatctcgaactc

SEQ ID NO: 99523 - DNA, 13 bp, Artificial Sequence
  Oligonucleotide for detection of SNP TSC0024724
ttgttttgagtty

SEQ ID NO: 99524 - DNA, 13 bp, Artificial Sequence
  Oligonucleotide for detection of SNP TSC0024724
raactcaaaacaa

SEQ ID NO: 99525 - DNA, 13 bp, Artificial Sequence
  Oligonucleotide for detection of SNP TSC0024724
ttgtttagagtty

SEQ ID NO: 99526 - DNA, 13 bp, Artificial Sequence
  Oligonucleotide for detection of SNP TSC0024724
raactctaaacaa

SEQ ID NO: 99527 - DNA, 13 bp, Artificial Sequence
  Oligonucleotide for detection of SNP TSC0024724
ttgtttcgagtty

SEQ ID NO: 99528 - DNA, 13 bp, Artificial Sequence
  Oligonucleotide for detection of SNP TSC0024724
raactcgaaacaa

SEQ ID NO: 99529 - DNA, 13 bp, Artificial Sequence
  Oligonucleotide for detection of SNP TSC0024725
ttgtttattgtty

SEQ ID NO: 99530 - DNA, 13 bp, Artificial Sequence
  Oligonucleotide for detection of SNP TSC0024725
raacaataaacaa

SEQ ID NO: 99531 - DNA, 13 bp, Artificial Sequence
  Oligonucleotide for detection of SNP TSC0024725
gggtagtaagtaa

SEQ ID NO: 99532 - DNA, 13 bp, Artificial Sequence
  Oligonucleotide for detection of SNP TSC0024725
ttacttactaccc

SEQ ID NO: 99533 - DNA, 13 bp, Artificial Sequence
  Oligonucleotide for detection of SNP TSC0024725
gggtaggaagtaa

SEQ ID NO: 99534 - DNA, 13 bp, Artificial Sequence
  Oligonucleotide for detection of SNP TSC0024725
ttacttcctaccc

SEQ ID NO: 99535 - DNA, 13 bp, Artificial Sequence
  Oligonucleotide for detection of SNP TSC0024726
agatgaataaaga

SEQ ID NO: 99536 - DNA, 13 bp, Artificial Sequence
  Oligonucleotide for detection of SNP TSC0024726
tctttattcatct

SEQ ID NO: 99537 - DNA, 13 bp, Artificial Sequence
  Oligonucleotide for detection of SNP TSC0024726
agatgattaaaga

SEQ ID NO: 99538 - DNA, 13 bp, Artificial Sequence
  Oligonucleotide for detection of SNP TSC0024726
tctttaatcatct

SEQ ID NO: 99539 - DNA, 13 bp, Artificial Sequence
  Oligonucleotide for detection of SNP TSC0024726
tttttggttattt

SEQ ID NO: 99540 - DNA, 13 bp, Artificial Sequence
  Oligonucleotide for detection of SNP TSC0024726
aaataaccaaaaa

SEQ ID NO: 99541 - DNA, 13 bp, Artificial Sequence
  Oligonucleotide for detection of SNP TSC0024728
ttgtggggggaay

SEQ ID NO: 99542 - DNA, 13 bp, Artificial Sequence
  Oligonucleotide for detection of SNP TSC0024728
rttccccccacaa

SEQ ID NO: 99543 - DNA, 13 bp, Artificial Sequence
  Oligonucleotide for detection of SNP TSC0024728
ttgtggtgggaay

SEQ ID NO: 99544 - DNA, 13 bp, Artificial Sequence
  Oligonucleotide for detection of SNP TSC0024728
rttcccaccacaa

SEQ ID NO: 99545 - DNA, 13 bp, Artificial Sequence
  Oligonucleotide for detection of SNP TSC0024728
tcgtggggggaay

SEQ ID NO: 99546 - DNA, 13 bp, Artificial Sequence
  Oligonucleotide for detection of SNP TSC0024728
rttccccccacga

SEQ ID NO: 99547 - DNA, 13 bp, Artificial Sequence
  Oligonucleotide for detection of SNP TSC0024728
tcgtggtgggaay

SEQ ID NO: 99548 - DNA, 13 bp, Artificial Sequence
  Oligonucleotide for detection of SNP TSC0024728
rttcccaccacga

SEQ ID NO: 99549 - DNA, 13 bp, Artificial Sequence
  Oligonucleotide for detection of SNP TSC0024728
gttttttttatga

SEQ ID NO: 99550 - DNA, 13 bp, Artificial Sequence
  Oligonucleotide for detection of SNP TSC0024728
tcataaaaaaaac

SEQ ID NO: 99551 - DNA, 13 bp, Artificial Sequence
  Oligonucleotide for detection of SNP TSC0024728
gttttttttacga

SEQ ID NO: 99552 - DNA, 13 bp, Artificial Sequence
  Oligonucleotide for detection of SNP TSC0024728
tcgtaaaaaaaac

SEQ ID NO: 99553 - DNA, 13 bp, Artificial Sequence
  Oligonucleotide for detection of SNP TSC0024728
gtttttattacga

SEQ ID NO: 99554 - DNA, 13 bp, Artificial Sequence
  Oligonucleotide for detection of SNP TSC0024728
tcgtaataaaaac

SEQ ID NO: 99555 - DNA, 13 bp, Artificial Sequence
  Oligonucleotide for detection of SNP TSC0024730
gagtttgtttaga

SEQ ID NO: 99556 - DNA, 13 bp, Artificial Sequence
  Oligonucleotide for detection of SNP TSC0024730
tctaaacaaactc

SEQ ID NO: 99557 - DNA, 13 bp, Artificial Sequence
  Oligonucleotide for detection of SNP TSC0024730
gagtttttttaga

SEQ ID NO: 99558 - DNA, 13 bp, Artificial Sequence
  Oligonucleotide for detection of SNP TSC0024730
tctaaaaaaactc

SEQ ID NO: 99559 - DNA, 13 bp, Artificial Sequence
  Oligonucleotide for detection of SNP TSC0024730
tttgggtaaatty

SEQ ID NO: 99560 - DNA, 13 bp, Artificial Sequence
  Oligonucleotide for detection of SNP TSC0024730
raatttacccaaa

SEQ ID NO: 99561 - DNA, 13 bp, Artificial Sequence
  Oligonucleotide for detection of SNP TSC0024730
tttgggaaaatty

SEQ ID NO: 99562 - DNA, 13 bp, Artificial Sequence
  Oligonucleotide for detection of SNP TSC0024730
raattttcccaaa

SEQ ID NO: 99563 - DNA, 13 bp, Artificial Sequence
  Oligonucleotide for detection of SNP TSC0024731
tgaaaaaatagtt

SEQ ID NO: 99564 - DNA, 13 bp, Artificial Sequence
  Oligonucleotide for detection of SNP TSC0024731
aactattttttca

SEQ ID NO: 99565 - DNA, 13 bp, Artificial Sequence
  Oligonucleotide for detection of SNP TSC0024731
tgaaaagatagtt

SEQ ID NO: 99566 - DNA, 13 bp, Artificial Sequence
  Oligonucleotide for detection of SNP TSC0024731
aactatcttttca

SEQ ID NO: 99567 - DNA, 13 bp, Artificial Sequence
  Oligonucleotide for detection of SNP TSC0024732
attattgaaattt

SEQ ID NO: 99568 - DNA, 13 bp, Artificial Sequence
  Oligonucleotide for detection of SNP TSC0024732
aaatttcaataat

SEQ ID NO: 99569 - DNA, 13 bp, Artificial Sequence
  Oligonucleotide for detection of SNP TSC0024732
attattaaaattt

SEQ ID NO: 99570 - DNA, 13 bp, Artificial Sequence
  Oligonucleotide for detection of SNP TSC0024732
aaattttaataat

SEQ ID NO: 99571 - DNA, 13 bp, Artificial Sequence
  Oligonucleotide for detection of SNP TSC0024733
tattttgtggtta

SEQ ID NO: 99572 - DNA, 13 bp, Artificial Sequence
  Oligonucleotide for detection of SNP TSC0024733
taaccacaaaata

SEQ ID NO: 99573 - DNA, 13 bp, Artificial Sequence
  Oligonucleotide for detection of SNP TSC0024733
tattttatggtta

SEQ ID NO: 99574 - DNA, 13 bp, Artificial Sequence
  Oligonucleotide for detection of SNP TSC0024733
taaccataaaata

SEQ ID NO: 99575 - DNA, 13 bp, Artificial Sequence
  Oligonucleotide for detection of SNP TSC0024734
atatttaattgta

SEQ ID NO: 99576 - DNA, 13 bp, Artificial Sequence
  Oligonucleotide for detection of SNP TSC0024734
tacaattaaatat

SEQ ID NO: 99577 - DNA, 13 bp, Artificial Sequence
  Oligonucleotide for detection of SNP TSC0024734
atatttgattgta

SEQ ID NO: 99578 - DNA, 13 bp, Artificial Sequence
  Oligonucleotide for detection of SNP TSC0024734
tacaatcaaatat

SEQ ID NO: 99579 - DNA, 13 bp, Artificial Sequence
  Oligonucleotide for detection of SNP TSC0024734
atatttaatcgta

SEQ ID NO: 99580 - DNA, 13 bp, Artificial Sequence
  Oligonucleotide for detection of SNP TSC0024734
tacgattaaatat

SEQ ID NO: 99581 - DNA, 13 bp, Artificial Sequence
  Oligonucleotide for detection of SNP TSC0024734
atatttgatcgta

SEQ ID NO: 99582 - DNA, 13 bp, Artificial Sequence
  Oligonucleotide for detection of SNP TSC0024734
tacgatcaaatat

SEQ ID NO: 99583 - DNA, 13 bp, Artificial Sequence
  Oligonucleotide for detection of SNP TSC0024736
ggtgatagagtga

SEQ ID NO: 99584 - DNA, 13 bp, Artificial Sequence
  Oligonucleotide for detection of SNP TSC0024736
tcactctatcacc

SEQ ID NO: 99585 - DNA, 13 bp, Artificial Sequence
  Oligonucleotide for detection of SNP TSC0024736
ggtgatggagtga

SEQ ID NO: 99586 - DNA, 13 bp, Artificial Sequence
  Oligonucleotide for detection of SNP TSC0024736
tcactccatcacc

SEQ ID NO: 99587 - DNA, 13 bp, Artificial Sequence
  Oligonucleotide for detection of SNP TSC0024736
ggcgatagagtga

SEQ ID NO: 99588 - DNA, 13 bp, Artificial Sequence
  Oligonucleotide for detection of SNP TSC0024736
tcactctatcgcc

SEQ ID NO: 99589 - DNA, 13 bp, Artificial Sequence
  Oligonucleotide for detection of SNP TSC0024736
ggcgatggagtga

SEQ ID NO: 99590 - DNA, 13 bp, Artificial Sequence
  Oligonucleotide for detection of SNP TSC0024736
tcactccatcgcc

SEQ ID NO: 99591 - DNA, 13 bp, Artificial Sequence
  Oligonucleotide for detection of SNP TSC0024736
ggtgacggagtga

SEQ ID NO: 99592 - DNA, 13 bp, Artificial Sequence
  Oligonucleotide for detection of SNP TSC0024736
tcactccgtcacc

SEQ ID NO: 99593 - DNA, 13 bp, Artificial Sequence
  Oligonucleotide for detection of SNP TSC0024736
ggcgacggagtga

SEQ ID NO: 99594 - DNA, 13 bp, Artificial Sequence
  Oligonucleotide for detection of SNP TSC0024736
tcactccgtcgcc

SEQ ID NO: 99595 - DNA, 13 bp, Artificial Sequence
  Oligonucleotide for detection of SNP TSC0024736
ttattttgtcgty

SEQ ID NO: 99596 - DNA, 13 bp, Artificial Sequence
  Oligonucleotide for detection of SNP TSC0024736
racgacaaaataa

SEQ ID NO: 99597 - DNA, 13 bp, Artificial Sequence
  Oligonucleotide for detection of SNP TSC0024736
ttatttcgtcgty

SEQ ID NO: 99598 - DNA, 13 bp, Artificial Sequence
  Oligonucleotide for detection of SNP TSC0024736
racgacgaaataa

SEQ ID NO: 99599 - DNA, 13 bp, Artificial Sequence
  Oligonucleotide for detection of SNP TSC0024740
tggagaagttaag

SEQ ID NO: 99600 - DNA, 13 bp, Artificial Sequence
  Oligonucleotide for detection of SNP TSC0024740
cttaacttctcca

SEQ ID NO: 99601 - DNA, 13 bp, Artificial Sequence
  Oligonucleotide for detection of SNP TSC0024740
tggagaggttaag

SEQ ID NO: 99602 - DNA, 13 bp, Artificial Sequence
  Oligonucleotide for detection of SNP TSC0024740
cttaacctctcca

SEQ ID NO: 99603 - DNA, 13 bp, Artificial Sequence
  Oligonucleotide for detection of SNP TSC0024742
ttgttgagggtty

SEQ ID NO: 99604 - DNA, 13 bp, Artificial Sequence
  Oligonucleotide for detection of SNP TSC0024742
raaccctcaacaa

SEQ ID NO: 99605 - DNA, 13 bp, Artificial Sequence
  Oligonucleotide for detection of SNP TSC0024742
ttgttgggggtty

SEQ ID NO: 99606 - DNA, 13 bp, Artificial Sequence
  Oligonucleotide for detection of SNP TSC0024742
raacccccaacaa

SEQ ID NO: 99607 - DNA, 13 bp, Artificial Sequence
  Oligonucleotide for detection of SNP TSC0024743
aaatgggaaggta

SEQ ID NO: 99608 - DNA, 13 bp, Artificial Sequence
  Oligonucleotide for detection of SNP TSC0024743
taccttcccattt

SEQ ID NO: 99609 - DNA, 13 bp, Artificial Sequence
  Oligonucleotide for detection of SNP TSC0024743
aaatggaaaggta

SEQ ID NO: 99610 - DNA, 13 bp, Artificial Sequence
  Oligonucleotide for detection of SNP TSC0024743
tacctttccattt

SEQ ID NO: 99611 - DNA, 13 bp, Artificial Sequence
  Oligonucleotide for detection of SNP TSC0024745
tggtttagtgtaa

SEQ ID NO: 99612 - DNA, 13 bp, Artificial Sequence
  Oligonucleotide for detection of SNP TSC0024745
ttacactaaacca

SEQ ID NO: 99613 - DNA, 13 bp, Artificial Sequence
  Oligonucleotide for detection of SNP TSC0024745
tggtttggtgtaa

SEQ ID NO: 99614 - DNA, 13 bp, Artificial Sequence
  Oligonucleotide for detection of SNP TSC0024745
ttacaccaaacca

SEQ ID NO: 99615 - DNA, 13 bp, Artificial Sequence
  Oligonucleotide for detection of SNP TSC0024745
cggtttagtgtaa

SEQ ID NO: 99616 - DNA, 13 bp, Artificial Sequence
  Oligonucleotide for detection of SNP TSC0024745
ttacactaaaccg

SEQ ID NO: 99617 - DNA, 13 bp, Artificial Sequence
  Oligonucleotide for detection of SNP TSC0024745
cggtttggtgtaa

SEQ ID NO: 99618 - DNA, 13 bp, Artificial Sequence
  Oligonucleotide for detection of SNP TSC0024745
ttacaccaaaccg

SEQ ID NO: 99619 - DNA, 13 bp, Artificial Sequence
  Oligonucleotide for detection of SNP TSC0024745
tggttcggtgtaa

SEQ ID NO: 99620 - DNA, 13 bp, Artificial Sequence
  Oligonucleotide for detection of SNP TSC0024745
ttacaccgaacca

SEQ ID NO: 99621 - DNA, 13 bp, Artificial Sequence
  Oligonucleotide for detection of SNP TSC0024745
cggttcggtgtaa

SEQ ID NO: 99622 - DNA, 13 bp, Artificial Sequence
  Oligonucleotide for detection of SNP TSC0024745
ttacaccgaaccg

SEQ ID NO: 99623 - DNA, 13 bp, Artificial Sequence
  Oligonucleotide for detection of SNP TSC0024745
ttgtattgagttg

SEQ ID NO: 99624 - DNA, 13 bp, Artificial Sequence
  Oligonucleotide for detection of SNP TSC0024745
caactcaatacaa

SEQ ID NO: 99625 - DNA, 13 bp, Artificial Sequence
  Oligonucleotide for detection of SNP TSC0024745
ttgtattgagtcg

SEQ ID NO: 99626 - DNA, 13 bp, Artificial Sequence
  Oligonucleotide for detection of SNP TSC0024745
cgactcaatacaa

SEQ ID NO: 99627 - DNA, 13 bp, Artificial Sequence
  Oligonucleotide for detection of SNP TSC0024745
ttgtatcgagttg

SEQ ID NO: 99628 - DNA, 13 bp, Artificial Sequence
  Oligonucleotide for detection of SNP TSC0024745
caactcgatacaa

SEQ ID NO: 99629 - DNA, 13 bp, Artificial Sequence
  Oligonucleotide for detection of SNP TSC0024745
ttgtatcgagtcg

SEQ ID NO: 99630 - DNA, 13 bp, Artificial Sequence
  Oligonucleotide for detection of SNP TSC0024745
cgactcgatacaa

SEQ ID NO: 99631 - DNA, 13 bp, Artificial Sequence
  Oligonucleotide for detection of SNP TSC0024751
tgttaggatttag

SEQ ID NO: 99632 - DNA, 13 bp, Artificial Sequence
  Oligonucleotide for detection of SNP TSC0024751
ctaaatcctaaca

SEQ ID NO: 99633 - DNA, 13 bp, Artificial Sequence
  Oligonucleotide for detection of SNP TSC0024751
tgttagaatttag

SEQ ID NO: 99634 - DNA, 13 bp, Artificial Sequence
  Oligonucleotide for detection of SNP TSC0024751
ctaaattctaaca

SEQ ID NO: 99635 - DNA, 13 bp, Artificial Sequence
  Oligonucleotide for detection of SNP TSC0024752
tagttttgagggg

SEQ ID NO: 99636 - DNA, 13 bp, Artificial Sequence
  Oligonucleotide for detection of SNP TSC0024752
cccctcaaaacta

SEQ ID NO: 99637 - DNA, 13 bp, Artificial Sequence
  Oligonucleotide for detection of SNP TSC0024752
tagtttcgagggg

SEQ ID NO: 99638 - DNA, 13 bp, Artificial Sequence
  Oligonucleotide for detection of SNP TSC0024752
cccctcgaaacta

SEQ ID NO: 99639 - DNA, 13 bp, Artificial Sequence
  Oligonucleotide for detection of SNP TSC0024753
gatggttgggtty

SEQ ID NO: 99640 - DNA, 13 bp, Artificial Sequence
  Oligonucleotide for detection of SNP TSC0024753
raacccaaccatc

SEQ ID NO: 99641 - DNA, 13 bp, Artificial Sequence
  Oligonucleotide for detection of SNP TSC0024753
gatggtcgggtty

SEQ ID NO: 99642 - DNA, 13 bp, Artificial Sequence
  Oligonucleotide for detection of SNP TSC0024753
raacccgaccatc

SEQ ID NO: 99643 - DNA, 13 bp, Artificial Sequence
  Oligonucleotide for detection of SNP TSC0024753
gaatttggttaty

SEQ ID NO: 99644 - DNA, 13 bp, Artificial Sequence
  Oligonucleotide for detection of SNP TSC0024753
rataaccaaattc

SEQ ID NO: 99645 - DNA, 13 bp, Artificial Sequence
  Oligonucleotide for detection of SNP TSC0024753
gaatttagttaty

SEQ ID NO: 99646 - DNA, 13 bp, Artificial Sequence
  Oligonucleotide for detection of SNP TSC0024753
rataactaaattc

SEQ ID NO: 99647 - DNA, 13 bp, Artificial Sequence
  Oligonucleotide for detection of SNP TSC0024753
gaattcggttaty

SEQ ID NO: 99648 - DNA, 13 bp, Artificial Sequence
  Oligonucleotide for detection of SNP TSC0024753
rataaccgaattc

SEQ ID NO: 99649 - DNA, 13 bp, Artificial Sequence
  Oligonucleotide for detection of SNP TSC0024755
atattatttgtaa

SEQ ID NO: 99650 - DNA, 13 bp, Artificial Sequence
  Oligonucleotide for detection of SNP TSC0024755
ttacaaataatat

SEQ ID NO: 99651 - DNA, 13 bp, Artificial Sequence
  Oligonucleotide for detection of SNP TSC0024755
atattagttgtaa

SEQ ID NO: 99652 - DNA, 13 bp, Artificial Sequence
  Oligonucleotide for detection of SNP TSC0024755
ttacaactaatat

SEQ ID NO: 99653 - DNA, 13 bp, Artificial Sequence
  Oligonucleotide for detection of SNP TSC0024755
ttgtaggtaatgt

SEQ ID NO: 99654 - DNA, 13 bp, Artificial Sequence
  Oligonucleotide for detection of SNP TSC0024755
acattacctacaa

SEQ ID NO: 99655 - DNA, 13 bp, Artificial Sequence
  Oligonucleotide for detection of SNP TSC0024755
ttgtagttaatgt

SEQ ID NO: 99656 - DNA, 13 bp, Artificial Sequence
  Oligonucleotide for detection of SNP TSC0024755
acattaactacaa

SEQ ID NO: 99657 - DNA, 13 bp, Artificial Sequence
  Oligonucleotide for detection of SNP TSC0024756
ttgtattatgttt

SEQ ID NO: 99658 - DNA, 13 bp, Artificial Sequence
  Oligonucleotide for detection of SNP TSC0024756
aaacataatacaa

SEQ ID NO: 99659 - DNA, 13 bp, Artificial Sequence
  Oligonucleotide for detection of SNP TSC0024756
ttgtatgatgttt

SEQ ID NO: 99660 - DNA, 13 bp, Artificial Sequence
  Oligonucleotide for detection of SNP TSC0024756
aaacatcatacaa

SEQ ID NO: 99661 - DNA, 13 bp, Artificial Sequence
  Oligonucleotide for detection of SNP TSC0024756
aaatatgatatag

SEQ ID NO: 99662 - DNA, 13 bp, Artificial Sequence
  Oligonucleotide for detection of SNP TSC0024756
ctatatcatattt

SEQ ID NO: 99663 - DNA, 13 bp, Artificial Sequence
  Oligonucleotide for detection of SNP TSC0024756
aaatattatatag

SEQ ID NO: 99664 - DNA, 13 bp, Artificial Sequence
  Oligonucleotide for detection of SNP TSC0024756
ctatataatattt

SEQ ID NO: 99665 - DNA, 13 bp, Artificial Sequence
  Oligonucleotide for detection of SNP TSC0024757
agagagagtgagt

SEQ ID NO: 99666 - DNA, 13 bp, Artificial Sequence
  Oligonucleotide for detection of SNP TSC0024757
actcactctctct

SEQ ID NO: 99667 - DNA, 13 bp, Artificial Sequence
  Oligonucleotide for detection of SNP TSC0024757
agagagggtgagt

SEQ ID NO: 99668 - DNA, 13 bp, Artificial Sequence
  Oligonucleotide for detection of SNP TSC0024757
actcaccctctct

SEQ ID NO: 99669 - DNA, 13 bp, Artificial Sequence
  Oligonucleotide for detection of SNP TSC0024757
agagagagcgagt

SEQ ID NO: 99670 - DNA, 13 bp, Artificial Sequence
  Oligonucleotide for detection of SNP TSC0024757
actcgctctctct

SEQ ID NO: 99671 - DNA, 13 bp, Artificial Sequence
  Oligonucleotide for detection of SNP TSC0024757
agagagggcgagt

SEQ ID NO: 99672 - DNA, 13 bp, Artificial Sequence
  Oligonucleotide for detection of SNP TSC0024757
actcgccctctct

SEQ ID NO: 99673 - DNA, 13 bp, Artificial Sequence
  Oligonucleotide for detection of SNP TSC0024759
ttagttatataty

SEQ ID NO: 99674 - DNA, 13 bp, Artificial Sequence
  Oligonucleotide for detection of SNP TSC0024759
ratatataactaa

SEQ ID NO: 99675 - DNA, 13 bp, Artificial Sequence
  Oligonucleotide for detection of SNP TSC0024759
ttagttttataty

SEQ ID NO: 99676 - DNA, 13 bp, Artificial Sequence
  Oligonucleotide for detection of SNP TSC0024759
ratataaaactaa

SEQ ID NO: 99677 - DNA, 13 bp, Artificial Sequence
  Oligonucleotide for detection of SNP TSC0024759
ggtatgtagttgg

SEQ ID NO: 99678 - DNA, 13 bp, Artificial Sequence
  Oligonucleotide for detection of SNP TSC0024759
ccaactacatacc

SEQ ID NO: 99679 - DNA, 13 bp, Artificial Sequence
  Oligonucleotide for detection of SNP TSC0024759
ggtatggagttgg

SEQ ID NO: 99680 - DNA, 13 bp, Artificial Sequence
  Oligonucleotide for detection of SNP TSC0024759
ccaactccatacc

SEQ ID NO: 99681 - DNA, 13 bp, Artificial Sequence
  Oligonucleotide for detection of SNP TSC0024769
gattaaaattaty

SEQ ID NO: 99682 - DNA, 13 bp, Artificial Sequence
  Oligonucleotide for detection of SNP TSC0024769
rataattttaatc

SEQ ID NO: 99683 - DNA, 13 bp, Artificial Sequence
  Oligonucleotide for detection of SNP TSC0024769
gattaatattaty

SEQ ID NO: 99684 - DNA, 13 bp, Artificial Sequence
  Oligonucleotide for detection of SNP TSC0024769
rataatattaatc

SEQ ID NO: 99685 - DNA, 13 bp, Artificial Sequence
  Oligonucleotide for detection of SNP TSC0024769
gatgattttgaty

SEQ ID NO: 99686 - DNA, 13 bp, Artificial Sequence
  Oligonucleotide for detection of SNP TSC0024769
ratcaaaatcatc

SEQ ID NO: 99687 - DNA, 13 bp, Artificial Sequence
  Oligonucleotide for detection of SNP TSC0024769
gatgatattgaty

SEQ ID NO: 99688 - DNA, 13 bp, Artificial Sequence
  Oligonucleotide for detection of SNP TSC0024769
ratcaatatcatc

SEQ ID NO: 99689 - DNA, 13 bp, Artificial Sequence
  Oligonucleotide for detection of SNP TSC0024771
aaagtagtttttg

SEQ ID NO: 99690 - DNA, 13 bp, Artificial Sequence
  Oligonucleotide for detection of SNP TSC0024771
caaaaactacttt

SEQ ID NO: 99691 - DNA, 13 bp, Artificial Sequence
  Oligonucleotide for detection of SNP TSC0024771
taagagttgtttt

SEQ ID NO: 99692 - DNA, 13 bp, Artificial Sequence
  Oligonucleotide for detection of SNP TSC0024771
aaaacaactctta

SEQ ID NO: 99693 - DNA, 13 bp, Artificial Sequence
  Oligonucleotide for detection of SNP TSC0024771
taagagatgtttt

SEQ ID NO: 99694 - DNA, 13 bp, Artificial Sequence
  Oligonucleotide for detection of SNP TSC0024771
aaaacatctctta

SEQ ID NO: 99695 - DNA, 13 bp, Artificial Sequence
  Oligonucleotide for detection of SNP TSC0024774
tggtatgaaagay

SEQ ID NO: 99696 - DNA, 13 bp, Artificial Sequence
  Oligonucleotide for detection of SNP TSC0024774
rtctttcatacca

SEQ ID NO: 99697 - DNA, 13 bp, Artificial Sequence
  Oligonucleotide for detection of SNP TSC0024774
tggtataaaagay

SEQ ID NO: 99698 - DNA, 13 bp, Artificial Sequence
  Oligonucleotide for detection of SNP TSC0024774
rtcttttatacca

SEQ ID NO: 99699 - DNA, 13 bp, Artificial Sequence
  Oligonucleotide for detection of SNP TSC0024775
gaagtttttagaa

SEQ ID NO: 99700 - DNA, 13 bp, Artificial Sequence
  Oligonucleotide for detection of SNP TSC0024775
ttctaaaaacttc

SEQ ID NO: 99701 - DNA, 13 bp, Artificial Sequence
  Oligonucleotide for detection of SNP TSC0024775
gaagttgttagaa

SEQ ID NO: 99702 - DNA, 13 bp, Artificial Sequence
  Oligonucleotide for detection of SNP TSC0024775
ttctaacaacttc

SEQ ID NO: 99703 - DNA, 13 bp, Artificial Sequence
  Oligonucleotide for detection of SNP TSC0024775
gaagtcgttagaa

SEQ ID NO: 99704 - DNA, 13 bp, Artificial Sequence
  Oligonucleotide for detection of SNP TSC0024775
ttctaacgacttc

SEQ ID NO: 99705 - DNA, 13 bp, Artificial Sequence
  Oligonucleotide for detection of SNP TSC0024775
ttttaggggttty

SEQ ID NO: 99706 - DNA, 13 bp, Artificial Sequence
  Oligonucleotide for detection of SNP TSC0024775
raaacccctaaaa

SEQ ID NO: 99707 - DNA, 13 bp, Artificial Sequence
  Oligonucleotide for detection of SNP TSC0024778
agggttgaagatg

SEQ ID NO: 99708 - DNA, 13 bp, Artificial Sequence
  Oligonucleotide for detection of SNP TSC0024778
catcttcaaccct

SEQ ID NO: 99709 - DNA, 13 bp, Artificial Sequence
  Oligonucleotide for detection of SNP TSC0024778
agggttaaagatg

SEQ ID NO: 99710 - DNA, 13 bp, Artificial Sequence
  Oligonucleotide for detection of SNP TSC0024778
catctttaaccct

SEQ ID NO: 99711 - DNA, 13 bp, Artificial Sequence
  Oligonucleotide for detection of SNP TSC0024779
tttatttgtaggt

SEQ ID NO: 99712 - DNA, 13 bp, Artificial Sequence
  Oligonucleotide for detection of SNP TSC0024779
acctacaaataaa

SEQ ID NO: 99713 - DNA, 13 bp, Artificial Sequence
  Oligonucleotide for detection of SNP TSC0024779
tttattcgtaggt

SEQ ID NO: 99714 - DNA, 13 bp, Artificial Sequence
  Oligonucleotide for detection of SNP TSC0024779
acctacgaataaa

SEQ ID NO: 99715 - DNA, 13 bp, Artificial Sequence
  Oligonucleotide for detection of SNP TSC0024779
atttgtggataag

SEQ ID NO: 99716 - DNA, 13 bp, Artificial Sequence
  Oligonucleotide for detection of SNP TSC0024779
cttatccacaaat

SEQ ID NO: 99717 - DNA, 13 bp, Artificial Sequence
  Oligonucleotide for detection of SNP TSC0024779
atttgtagataag

SEQ ID NO: 99718 - DNA, 13 bp, Artificial Sequence
  Oligonucleotide for detection of SNP TSC0024779
cttatctacaaat

SEQ ID NO: 99719 - DNA, 13 bp, Artificial Sequence
  Oligonucleotide for detection of SNP TSC0024779
atttgcggataag

SEQ ID NO: 99720 - DNA, 13 bp, Artificial Sequence
  Oligonucleotide for detection of SNP TSC0024779
cttatccgcaaat

SEQ ID NO: 99721 - DNA, 13 bp, Artificial Sequence
  Oligonucleotide for detection of SNP TSC0024780
ttaaatgagtata

SEQ ID NO: 99722 - DNA, 13 bp, Artificial Sequence
  Oligonucleotide for detection of SNP TSC0024780
tatactcatttaa

SEQ ID NO: 99723 - DNA, 13 bp, Artificial Sequence
  Oligonucleotide for detection of SNP TSC0024780
ttaaataagtata

SEQ ID NO: 99724 - DNA, 13 bp, Artificial Sequence
  Oligonucleotide for detection of SNP TSC0024780
tatacttatttaa

SEQ ID NO: 99725 - DNA, 13 bp, Artificial Sequence
  Oligonucleotide for detection of SNP TSC0024786
gattttatttata

SEQ ID NO: 99726 - DNA, 13 bp, Artificial Sequence
  Oligonucleotide for detection of SNP TSC0024786
tataaataaaatc

SEQ ID NO: 99727 - DNA, 13 bp, Artificial Sequence
  Oligonucleotide for detection of SNP TSC0024786
gattttgtttata

SEQ ID NO: 99728 - DNA, 13 bp, Artificial Sequence
  Oligonucleotide for detection of SNP TSC0024786
tataaacaaaatc

SEQ ID NO: 99729 - DNA, 13 bp, Artificial Sequence
  Oligonucleotide for detection of SNP TSC0024786
gatttcgtttata

SEQ ID NO: 99730 - DNA, 13 bp, Artificial Sequence
  Oligonucleotide for detection of SNP TSC0024786
tataaacgaaatc

SEQ ID NO: 99731 - DNA, 13 bp, Artificial Sequence
  Oligonucleotide for detection of SNP TSC0024786
tatagatgaagty

SEQ ID NO: 99732 - DNA, 13 bp, Artificial Sequence
  Oligonucleotide for detection of SNP TSC0024786
racttcatctata

SEQ ID NO: 99733 - DNA, 13 bp, Artificial Sequence
  Oligonucleotide for detection of SNP TSC0024786
tatagacgaagty

SEQ ID NO: 99734 - DNA, 13 bp, Artificial Sequence
  Oligonucleotide for detection of SNP TSC0024786
racttcgtctata

SEQ ID NO: 99735 - DNA, 13 bp, Artificial Sequence
  Oligonucleotide for detection of SNP TSC0024787
ggattttttagtt

SEQ ID NO: 99736 - DNA, 13 bp, Artificial Sequence
  Oligonucleotide for detection of SNP TSC0024787
aactaaaaaatcc

SEQ ID NO: 99737 - DNA, 13 bp, Artificial Sequence
  Oligonucleotide for detection of SNP TSC0024787
ggatttgttagtt

SEQ ID NO: 99738 - DNA, 13 bp, Artificial Sequence
  Oligonucleotide for detection of SNP TSC0024787
aactaacaaatcc

SEQ ID NO: 99739 - DNA, 13 bp, Artificial Sequence
  Oligonucleotide for detection of SNP TSC0024787
agttgggaagtty

SEQ ID NO: 99740 - DNA, 13 bp, Artificial Sequence
  Oligonucleotide for detection of SNP TSC0024787
raacttcccaact

SEQ ID NO: 99741 - DNA, 13 bp, Artificial Sequence
  Oligonucleotide for detection of SNP TSC0024787
agttggtaagtty

SEQ ID NO: 99742 - DNA, 13 bp, Artificial Sequence
  Oligonucleotide for detection of SNP TSC0024787
raacttaccaact

SEQ ID NO: 99743 - DNA, 13 bp, Artificial Sequence
  Oligonucleotide for detection of SNP TSC0024793
ttttttttgaagy

SEQ ID NO: 99744 - DNA, 13 bp, Artificial Sequence
  Oligonucleotide for detection of SNP TSC0024793
rcttcaaaaaaaa

SEQ ID NO: 99745 - DNA, 13 bp, Artificial Sequence
  Oligonucleotide for detection of SNP TSC0024793
tttttcgtgaagy

SEQ ID NO: 99746 - DNA, 13 bp, Artificial Sequence
  Oligonucleotide for detection of SNP TSC0024793
rcttcacgaaaaa

SEQ ID NO: 99747 - DNA, 13 bp, Artificial Sequence
  Oligonucleotide for detection of SNP TSC0024793
gttttaggagagg

SEQ ID NO: 99748 - DNA, 13 bp, Artificial Sequence
  Oligonucleotide for detection of SNP TSC0024793
cctctcctaaaac

SEQ ID NO: 99749 - DNA, 13 bp, Artificial Sequence
  Oligonucleotide for detection of SNP TSC0024793
gttttatgagagg

SEQ ID NO: 99750 - DNA, 13 bp, Artificial Sequence
  Oligonucleotide for detection of SNP TSC0024793
cctctcataaaac

SEQ ID NO: 99751 - DNA, 13 bp, Artificial Sequence
  Oligonucleotide for detection of SNP TSC0024793
gttttacgagagg

SEQ ID NO: 99752 - DNA, 13 bp, Artificial Sequence
  Oligonucleotide for detection of SNP TSC0024793
cctctcgtaaaac

SEQ ID NO: 99753 - DNA, 13 bp, Artificial Sequence
  Oligonucleotide for detection of SNP TSC0024794
taaatatttttty

SEQ ID NO: 99754 - DNA, 13 bp, Artificial Sequence
  Oligonucleotide for detection of SNP TSC0024794
raaaaaatattta

SEQ ID NO: 99755 - DNA, 13 bp, Artificial Sequence
  Oligonucleotide for detection of SNP TSC0024794
taaatagttttty

SEQ ID NO: 99756 - DNA, 13 bp, Artificial Sequence
  Oligonucleotide for detection of SNP TSC0024794
raaaaactattta

SEQ ID NO: 99757 - DNA, 13 bp, Artificial Sequence
  Oligonucleotide for detection of SNP TSC0024794
gaaagggtatttg

SEQ ID NO: 99758 - DNA, 13 bp, Artificial Sequence
  Oligonucleotide for detection of SNP TSC0024794
caaataccctttc

SEQ ID NO: 99759 - DNA, 13 bp, Artificial Sequence
  Oligonucleotide for detection of SNP TSC0024794
gaaaggttatttg

SEQ ID NO: 99760 - DNA, 13 bp, Artificial Sequence
  Oligonucleotide for detection of SNP TSC0024794
caaataacctttc

SEQ ID NO: 99761 - DNA, 13 bp, Artificial Sequence
  Oligonucleotide for detection of SNP TSC0024796
gtagaaaaaaaga

SEQ ID NO: 99762 - DNA, 13 bp, Artificial Sequence
  Oligonucleotide for detection of SNP TSC0024796
tctttttttctac

SEQ ID NO: 99763 - DNA, 13 bp, Artificial Sequence
  Oligonucleotide for detection of SNP TSC0024796
gtagaagaaaaga

SEQ ID NO: 99764 - DNA, 13 bp, Artificial Sequence
  Oligonucleotide for detection of SNP TSC0024796
tcttttcttctac

SEQ ID NO: 99765 - DNA, 13 bp, Artificial Sequence
  Oligonucleotide for detection of SNP TSC0024797
ttgaggtggagtt

SEQ ID NO: 99766 - DNA, 13 bp, Artificial Sequence
  Oligonucleotide for detection of SNP TSC0024797
aactccacctcaa

SEQ ID NO: 99767 - DNA, 13 bp, Artificial Sequence
  Oligonucleotide for detection of SNP TSC0024797
ttgaggcggagtt

SEQ ID NO: 99768 - DNA, 13 bp, Artificial Sequence
  Oligonucleotide for detection of SNP TSC0024797
aactccgcctcaa

SEQ ID NO: 99769 - DNA, 13 bp, Artificial Sequence
  Oligonucleotide for detection of SNP TSC0024797
agttttgttttag

SEQ ID NO: 99770 - DNA, 13 bp, Artificial Sequence
  Oligonucleotide for detection of SNP TSC0024797
ctaaaacaaaact

SEQ ID NO: 99771 - DNA, 13 bp, Artificial Sequence
  Oligonucleotide for detection of SNP TSC0024797
agttttattttag

SEQ ID NO: 99772 - DNA, 13 bp, Artificial Sequence
  Oligonucleotide for detection of SNP TSC0024797
ctaaaataaaact

SEQ ID NO: 99773 - DNA, 13 bp, Artificial Sequence
  Oligonucleotide for detection of SNP TSC0024797
agtttcgttttag

SEQ ID NO: 99774 - DNA, 13 bp, Artificial Sequence
  Oligonucleotide for detection of SNP TSC0024797
ctaaaacgaaact

SEQ ID NO: 99775 - DNA, 13 bp, Artificial Sequence
  Oligonucleotide for detection of SNP TSC0024798
agatgagtatagy

SEQ ID NO: 99776 - DNA, 13 bp, Artificial Sequence
  Oligonucleotide for detection of SNP TSC0024798
rctatactcatct

SEQ ID NO: 99777 - DNA, 13 bp, Artificial Sequence
  Oligonucleotide for detection of SNP TSC0024798
agatgaatatagy

SEQ ID NO: 99778 - DNA, 13 bp, Artificial Sequence
  Oligonucleotide for detection of SNP TSC0024798
rctatattcatct

SEQ ID NO: 99779 - DNA, 13 bp, Artificial Sequence
  Oligonucleotide for detection of SNP TSC0024799
gtgatttgtgttg

SEQ ID NO: 99780 - DNA, 13 bp, Artificial Sequence
  Oligonucleotide for detection of SNP TSC0024799
caacacaaatcac

SEQ ID NO: 99781 - DNA, 13 bp, Artificial Sequence
  Oligonucleotide for detection of SNP TSC0024799
gtgattcgtgttg

SEQ ID NO: 99782 - DNA, 13 bp, Artificial Sequence
  Oligonucleotide for detection of SNP TSC0024799
caacacgaatcac

SEQ ID NO: 99783 - DNA, 13 bp, Artificial Sequence
  Oligonucleotide for detection of SNP TSC0024799
gtgatttgcgttg

SEQ ID NO: 99784 - DNA, 13 bp, Artificial Sequence
  Oligonucleotide for detection of SNP TSC0024799
caacgcaaatcac

SEQ ID NO: 99785 - DNA, 13 bp, Artificial Sequence
  Oligonucleotide for detection of SNP TSC0024799
gtgattcgcgttg

SEQ ID NO: 99786 - DNA, 13 bp, Artificial Sequence
  Oligonucleotide for detection of SNP TSC0024799
caacgcgaatcac

SEQ ID NO: 99787 - DNA, 13 bp, Artificial Sequence
  Oligonucleotide for detection of SNP TSC0024799
tagtgtgggttay

SEQ ID NO: 99788 - DNA, 13 bp, Artificial Sequence
  Oligonucleotide for detection of SNP TSC0024799
rtaacccacacta

SEQ ID NO: 99789 - DNA, 13 bp, Artificial Sequence
  Oligonucleotide for detection of SNP TSC0024799
tagtgtaggttay

SEQ ID NO: 99790 - DNA, 13 bp, Artificial Sequence
  Oligonucleotide for detection of SNP TSC0024799
rtaacctacacta

SEQ ID NO: 99791 - DNA, 13 bp, Artificial Sequence
  Oligonucleotide for detection of SNP TSC0024799
tagcgtgggttay

SEQ ID NO: 99792 - DNA, 13 bp, Artificial Sequence
  Oligonucleotide for detection of SNP TSC0024799
rtaacccacgcta

SEQ ID NO: 99793 - DNA, 13 bp, Artificial Sequence
  Oligonucleotide for detection of SNP TSC0024799
tagcgtaggttay

SEQ ID NO: 99794 - DNA, 13 bp, Artificial Sequence
  Oligonucleotide for detection of SNP TSC0024799
rtaacctacgcta

SEQ ID NO: 99795 - DNA, 13 bp, Artificial Sequence
  Oligonucleotide for detection of SNP TSC0024799
tagtgcgggttay

SEQ ID NO: 99796 - DNA, 13 bp, Artificial Sequence
  Oligonucleotide for detection of SNP TSC0024799
rtaacccgcacta

SEQ ID NO: 99797 - DNA, 13 bp, Artificial Sequence
  Oligonucleotide for detection of SNP TSC0024799
tagcgcgggttay

SEQ ID NO: 99798 - DNA, 13 bp, Artificial Sequence
  Oligonucleotide for detection of SNP TSC0024799
rtaacccgcgcta

SEQ ID NO: 99799 - DNA, 13 bp, Artificial Sequence
  Oligonucleotide for detection of SNP TSC0024800
gtgtttatttgcg

SEQ ID NO: 99800 - DNA, 13 bp, Artificial Sequence
  Oligonucleotide for detection of SNP TSC0024800
cgcaaataaacac

SEQ ID NO: 99801 - DNA, 13 bp, Artificial Sequence
  Oligonucleotide for detection of SNP TSC0024800
gtgtttgtttgcg

SEQ ID NO: 99802 - DNA, 13 bp, Artificial Sequence
  Oligonucleotide for detection of SNP TSC0024800
cgcaaacaaacac

SEQ ID NO: 99803 - DNA, 13 bp, Artificial Sequence
  Oligonucleotide for detection of SNP TSC0024800
gtgttcgtttgcg

SEQ ID NO: 99804 - DNA, 13 bp, Artificial Sequence
  Oligonucleotide for detection of SNP TSC0024800
cgcaaacgaacac

SEQ ID NO: 99805 - DNA, 13 bp, Artificial Sequence
  Oligonucleotide for detection of SNP TSC0024800
tgtagatgagtay

SEQ ID NO: 99806 - DNA, 13 bp, Artificial Sequence
  Oligonucleotide for detection of SNP TSC0024800
rtactcatctaca

SEQ ID NO: 99807 - DNA, 13 bp, Artificial Sequence
  Oligonucleotide for detection of SNP TSC0024800
cgtagatgagtay

SEQ ID NO: 99808 - DNA, 13 bp, Artificial Sequence
  Oligonucleotide for detection of SNP TSC0024800
rtactcatctacg

SEQ ID NO: 99809 - DNA, 13 bp, Artificial Sequence
  Oligonucleotide for detection of SNP TSC0024800
tgtagacgagtay

SEQ ID NO: 99810 - DNA, 13 bp, Artificial Sequence
  Oligonucleotide for detection of SNP TSC0024800
rtactcgtctaca

SEQ ID NO: 99811 - DNA, 13 bp, Artificial Sequence
  Oligonucleotide for detection of SNP TSC0024800
cgtagacgagtay

SEQ ID NO: 99812 - DNA, 13 bp, Artificial Sequence
  Oligonucleotide for detection of SNP TSC0024800
rtactcgtctacg

SEQ ID NO: 99813 - DNA, 13 bp, Artificial Sequence
  Oligonucleotide for detection of SNP TSC0024801
attggtatttaaa

SEQ ID NO: 99814 - DNA, 13 bp, Artificial Sequence
  Oligonucleotide for detection of SNP TSC0024801
tttaaataccaat

SEQ ID NO: 99815 - DNA, 13 bp, Artificial Sequence
  Oligonucleotide for detection of SNP TSC0024801
attggtgtttaaa

SEQ ID NO: 99816 - DNA, 13 bp, Artificial Sequence
  Oligonucleotide for detection of SNP TSC0024801
tttaaacaccaat

SEQ ID NO: 99817 - DNA, 13 bp, Artificial Sequence
  Oligonucleotide for detection of SNP TSC0024801
attggcgtttaaa

SEQ ID NO: 99818 - DNA, 13 bp, Artificial Sequence
  Oligonucleotide for detection of SNP TSC0024801
tttaaacgccaat

SEQ ID NO: 99819 - DNA, 13 bp, Artificial Sequence
  Oligonucleotide for detection of SNP TSC0024801
tttaaatgttaat

SEQ ID NO: 99820 - DNA, 13 bp, Artificial Sequence
  Oligonucleotide for detection of SNP TSC0024801
attaacatttaaa

SEQ ID NO: 99821 - DNA, 13 bp, Artificial Sequence
  Oligonucleotide for detection of SNP TSC0024801
tttaaacgttaat

SEQ ID NO: 99822 - DNA, 13 bp, Artificial Sequence
  Oligonucleotide for detection of SNP TSC0024801
attaacgtttaaa

SEQ ID NO: 99823 - DNA, 13 bp, Artificial Sequence
  Oligonucleotide for detection of SNP TSC0024809
agatatatatagy

SEQ ID NO: 99824 - DNA, 13 bp, Artificial Sequence
  Oligonucleotide for detection of SNP TSC0024809
rctatatatatct

SEQ ID NO: 99825 - DNA, 13 bp, Artificial Sequence
  Oligonucleotide for detection of SNP TSC0024809
agatatttatagy

SEQ ID NO: 99826 - DNA, 13 bp, Artificial Sequence
  Oligonucleotide for detection of SNP TSC0024809
rctataaatatct

SEQ ID NO: 99827 - DNA, 13 bp, Artificial Sequence
  Oligonucleotide for detection of SNP TSC0024809
gttatatatgttt

SEQ ID NO: 99828 - DNA, 13 bp, Artificial Sequence
  Oligonucleotide for detection of SNP TSC0024809
aaacatatataac

SEQ ID NO: 99829 - DNA, 13 bp, Artificial Sequence
  Oligonucleotide for detection of SNP TSC0024809
gttatagatgttt

SEQ ID NO: 99830 - DNA, 13 bp, Artificial Sequence
  Oligonucleotide for detection of SNP TSC0024809
aaacatctataac

SEQ ID NO: 99831 - DNA, 13 bp, Artificial Sequence
  Oligonucleotide for detection of SNP TSC0024810
gggtggggtttag

SEQ ID NO: 99832 - DNA, 13 bp, Artificial Sequence
  Oligonucleotide for detection of SNP TSC0024810
ctaaaccccaccc

SEQ ID NO: 99833 - DNA, 13 bp, Artificial Sequence
  Oligonucleotide for detection of SNP TSC0024810
gggtggagtttag

SEQ ID NO: 99834 - DNA, 13 bp, Artificial Sequence
  Oligonucleotide for detection of SNP TSC0024810
ctaaactccaccc

SEQ ID NO: 99835 - DNA, 13 bp, Artificial Sequence
  Oligonucleotide for detection of SNP TSC0024812
gaattgggagaaa

SEQ ID NO: 99836 - DNA, 13 bp, Artificial Sequence
  Oligonucleotide for detection of SNP TSC0024812
tttctcccaattc

SEQ ID NO: 99837 - DNA, 13 bp, Artificial Sequence
  Oligonucleotide for detection of SNP TSC0024812
gaattgtgagaaa

SEQ ID NO: 99838 - DNA, 13 bp, Artificial Sequence
  Oligonucleotide for detection of SNP TSC0024812
tttctcacaattc

SEQ ID NO: 99839 - DNA, 13 bp, Artificial Sequence
  Oligonucleotide for detection of SNP TSC0024813
aaataaatttttg

SEQ ID NO: 99840 - DNA, 13 bp, Artificial Sequence
  Oligonucleotide for detection of SNP TSC0024813
caaaaatttattt

SEQ ID NO: 99841 - DNA, 13 bp, Artificial Sequence
  Oligonucleotide for detection of SNP TSC0024813
aaataagtttttg

SEQ ID NO: 99842 - DNA, 13 bp, Artificial Sequence
  Oligonucleotide for detection of SNP TSC0024813
caaaaacttattt

SEQ ID NO: 99843 - DNA, 13 bp, Artificial Sequence
  Oligonucleotide for detection of SNP TSC0024814
aatgttaaaaggy

SEQ ID NO: 99844 - DNA, 13 bp, Artificial Sequence
  Oligonucleotide for detection of SNP TSC0024814
rccttttaacatt

SEQ ID NO: 99845 - DNA, 13 bp, Artificial Sequence
  Oligonucleotide for detection of SNP TSC0024814
aatgttgaaaggy

SEQ ID NO: 99846 - DNA, 13 bp, Artificial Sequence
  Oligonucleotide for detection of SNP TSC0024814
rcctttcaacatt

SEQ ID NO: 99847 - DNA, 13 bp, Artificial Sequence
  Oligonucleotide for detection of SNP TSC0024814
aatgtcgaaaggy

SEQ ID NO: 99848 - DNA, 13 bp, Artificial Sequence
  Oligonucleotide for detection of SNP TSC0024814
rcctttcgacatt

SEQ ID NO: 99849 - DNA, 13 bp, Artificial Sequence
  Oligonucleotide for detection of SNP TSC0024814
gttttttggtatt

SEQ ID NO: 99850 - DNA, 13 bp, Artificial Sequence
  Oligonucleotide for detection of SNP TSC0024814
aataccaaaaaac

SEQ ID NO: 99851 - DNA, 13 bp, Artificial Sequence
  Oligonucleotide for detection of SNP TSC0024814
gtttttcggtatt

SEQ ID NO: 99852 - DNA, 13 bp, Artificial Sequence
  Oligonucleotide for detection of SNP TSC0024814
aataccgaaaaac

SEQ ID NO: 99853 - DNA, 13 bp, Artificial Sequence
  Oligonucleotide for detection of SNP TSC0024816
atgtttgtttagg

SEQ ID NO: 99854 - DNA, 13 bp, Artificial Sequence
  Oligonucleotide for detection of SNP TSC0024816
cctaaacaaacat

SEQ ID NO: 99855 - DNA, 13 bp, Artificial Sequence
  Oligonucleotide for detection of SNP TSC0024816
atgtttatttagg

SEQ ID NO: 99856 - DNA, 13 bp, Artificial Sequence
  Oligonucleotide for detection of SNP TSC0024816
cctaaataaacat

SEQ ID NO: 99857 - DNA, 13 bp, Artificial Sequence
  Oligonucleotide for detection of SNP TSC0024817
aaatgagatgtgy

SEQ ID NO: 99858 - DNA, 13 bp, Artificial Sequence
  Oligonucleotide for detection of SNP TSC0024817
rcacatctcattt

SEQ ID NO: 99859 - DNA, 13 bp, Artificial Sequence
  Oligonucleotide for detection of SNP TSC0024817
aaatgaaatgtgy

SEQ ID NO: 99860 - DNA, 13 bp, Artificial Sequence
  Oligonucleotide for detection of SNP TSC0024817
rcacatttcattt

SEQ ID NO: 99861 - DNA, 13 bp, Artificial Sequence
  Oligonucleotide for detection of SNP TSC0024818
tattataaatttt

SEQ ID NO: 99862 - DNA, 13 bp, Artificial Sequence
  Oligonucleotide for detection of SNP TSC0024818
aaaatttataata

SEQ ID NO: 99863 - DNA, 13 bp, Artificial Sequence
  Oligonucleotide for detection of SNP TSC0024818
tattatgaatttt

SEQ ID NO: 99864 - DNA, 13 bp, Artificial Sequence
  Oligonucleotide for detection of SNP TSC0024818
aaaattcataata

SEQ ID NO: 99865 - DNA, 13 bp, Artificial Sequence
  Oligonucleotide for detection of SNP TSC0024818
tattacgaatttt

SEQ ID NO: 99866 - DNA, 13 bp, Artificial Sequence
  Oligonucleotide for detection of SNP TSC0024818
aaaattcgtaata

SEQ ID NO: 99867 - DNA, 13 bp, Artificial Sequence
  Oligonucleotide for detection of SNP TSC0024818
aaaatttgtaatg

SEQ ID NO: 99868 - DNA, 13 bp, Artificial Sequence
  Oligonucleotide for detection of SNP TSC0024818
cattacaaatttt

SEQ ID NO: 99869 - DNA, 13 bp, Artificial Sequence
  Oligonucleotide for detection of SNP TSC0024818
aaaattcgtaatg

SEQ ID NO: 99870 - DNA, 13 bp, Artificial Sequence
  Oligonucleotide for detection of SNP TSC0024818
cattacgaatttt

SEQ ID NO: 99871 - DNA, 13 bp, Artificial Sequence
  Oligonucleotide for detection of SNP TSC0024821
tttattgaaatat

SEQ ID NO: 99872 - DNA, 13 bp, Artificial Sequence
  Oligonucleotide for detection of SNP TSC0024821
atatttcaataaa

SEQ ID NO: 99873 - DNA, 13 bp, Artificial Sequence
  Oligonucleotide for detection of SNP TSC0024821
tttatttaaatat

SEQ ID NO: 99874 - DNA, 13 bp, Artificial Sequence
  Oligonucleotide for detection of SNP TSC0024821
atatttaaataaa

SEQ ID NO: 99875 - DNA, 13 bp, Artificial Sequence
  Oligonucleotide for detection of SNP TSC0024821
atattttaataaa

SEQ ID NO: 99876 - DNA, 13 bp, Artificial Sequence
  Oligonucleotide for detection of SNP TSC0024821
tttattaaaatat

SEQ ID NO: 99877 - DNA, 13 bp, Artificial Sequence
  Oligonucleotide for detection of SNP TSC0024822
ttaagggtaaagt

SEQ ID NO: 99878 - DNA, 13 bp, Artificial Sequence
  Oligonucleotide for detection of SNP TSC0024822
actttacccttaa

SEQ ID NO: 99879 - DNA, 13 bp, Artificial Sequence
  Oligonucleotide for detection of SNP TSC0024822
ttaaggataaagt

SEQ ID NO: 99880 - DNA, 13 bp, Artificial Sequence
  Oligonucleotide for detection of SNP TSC0024822
actttatccttaa

SEQ ID NO: 99881 - DNA, 13 bp, Artificial Sequence
  Oligonucleotide for detection of SNP TSC0024826
taaatttgttaat

SEQ ID NO: 99882 - DNA, 13 bp, Artificial Sequence
  Oligonucleotide for detection of SNP TSC0024826
attaacaaattta

SEQ ID NO: 99883 - DNA, 13 bp, Artificial Sequence
  Oligonucleotide for detection of SNP TSC0024826
taaattcgttaat

SEQ ID NO: 99884 - DNA, 13 bp, Artificial Sequence
  Oligonucleotide for detection of SNP TSC0024826
attaacgaattta

SEQ ID NO: 99885 - DNA, 13 bp, Artificial Sequence
  Oligonucleotide for detection of SNP TSC0024826
attggtgaatttg

SEQ ID NO: 99886 - DNA, 13 bp, Artificial Sequence
  Oligonucleotide for detection of SNP TSC0024826
caaattcaccaat

SEQ ID NO: 99887 - DNA, 13 bp, Artificial Sequence
  Oligonucleotide for detection of SNP TSC0024826
attggtaaatttg

SEQ ID NO: 99888 - DNA, 13 bp, Artificial Sequence
  Oligonucleotide for detection of SNP TSC0024826
caaatttaccaat

SEQ ID NO: 99889 - DNA, 13 bp, Artificial Sequence
  Oligonucleotide for detection of SNP TSC0024826
attggcgaatttg

SEQ ID NO: 99890 - DNA, 13 bp, Artificial Sequence
  Oligonucleotide for detection of SNP TSC0024826
caaattcgccaat

SEQ ID NO: 99891 - DNA, 13 bp, Artificial Sequence
  Oligonucleotide for detection of SNP TSC0024827
gtgttatgatata

SEQ ID NO: 99892 - DNA, 13 bp, Artificial Sequence
  Oligonucleotide for detection of SNP TSC0024827
tatatcataacac

SEQ ID NO: 99893 - DNA, 13 bp, Artificial Sequence
  Oligonucleotide for detection of SNP TSC0024827
gtgttacgatata

SEQ ID NO: 99894 - DNA, 13 bp, Artificial Sequence
  Oligonucleotide for detection of SNP TSC0024827
tatatcgtaacac

SEQ ID NO: 99895 - DNA, 13 bp, Artificial Sequence
  Oligonucleotide for detection of SNP TSC0024827
tgtgttgtagtay

SEQ ID NO: 99896 - DNA, 13 bp, Artificial Sequence
  Oligonucleotide for detection of SNP TSC0024827
rtactacaacaca

SEQ ID NO: 99897 - DNA, 13 bp, Artificial Sequence
  Oligonucleotide for detection of SNP TSC0024827
tgtgttatagtay

SEQ ID NO: 99898 - DNA, 13 bp, Artificial Sequence
  Oligonucleotide for detection of SNP TSC0024827
rtactataacaca

SEQ ID NO: 99899 - DNA, 13 bp, Artificial Sequence
  Oligonucleotide for detection of SNP TSC0024827
tgtgtcgtagtay

SEQ ID NO: 99900 - DNA, 13 bp, Artificial Sequence
  Oligonucleotide for detection of SNP TSC0024827
rtactacgacaca

SEQ ID NO: 99901 - DNA, 13 bp, Artificial Sequence
  Oligonucleotide for detection of SNP TSC0024828
gttgggattattg

SEQ ID NO: 99902 - DNA, 13 bp, Artificial Sequence
  Oligonucleotide for detection of SNP TSC0024828
caataatcccaac

SEQ ID NO: 99903 - DNA, 13 bp, Artificial Sequence
  Oligonucleotide for detection of SNP TSC0024828
gttggggttattg

SEQ ID NO: 99904 - DNA, 13 bp, Artificial Sequence
  Oligonucleotide for detection of SNP TSC0024828
caataaccccaac

SEQ ID NO: 99905 - DNA, 13 bp, Artificial Sequence
  Oligonucleotide for detection of SNP TSC0024834
ttttaggttatay

SEQ ID NO: 99906 - DNA, 13 bp, Artificial Sequence
  Oligonucleotide for detection of SNP TSC0024834
rtataacctaaaa

SEQ ID NO: 99907 - DNA, 13 bp, Artificial Sequence
  Oligonucleotide for detection of SNP TSC0024834
ttttagattatay

SEQ ID NO: 99908 - DNA, 13 bp, Artificial Sequence
  Oligonucleotide for detection of SNP TSC0024834
rtataatctaaaa

SEQ ID NO: 99909 - DNA, 13 bp, Artificial Sequence
  Oligonucleotide for detection of SNP TSC0024835
ttttttttttatg

SEQ ID NO: 99910 - DNA, 13 bp, Artificial Sequence
  Oligonucleotide for detection of SNP TSC0024835
cataaaaaaaaaa

SEQ ID NO: 99911 - DNA, 13 bp, Artificial Sequence
  Oligonucleotide for detection of SNP TSC0024835
tatagataaggaa

SEQ ID NO: 99912 - DNA, 13 bp, Artificial Sequence
  Oligonucleotide for detection of SNP TSC0024835
ttccttatctata

SEQ ID NO: 99913 - DNA, 13 bp, Artificial Sequence
  Oligonucleotide for detection of SNP TSC0024835
tatagaaaaggaa

SEQ ID NO: 99914 - DNA, 13 bp, Artificial Sequence
  Oligonucleotide for detection of SNP TSC0024835
ttccttttctata

SEQ ID NO: 99915 - DNA, 13 bp, Artificial Sequence
  Oligonucleotide for detection of SNP TSC0024836
tttttatagtatt

SEQ ID NO: 99916 - DNA, 13 bp, Artificial Sequence
  Oligonucleotide for detection of SNP TSC0024836
aatactataaaaa

SEQ ID NO: 99917 - DNA, 13 bp, Artificial Sequence
  Oligonucleotide for detection of SNP TSC0024836
tttttagagtatt

SEQ ID NO: 99918 - DNA, 13 bp, Artificial Sequence
  Oligonucleotide for detection of SNP TSC0024836
aatactctaaaaa

SEQ ID NO: 99919 - DNA, 13 bp, Artificial Sequence
  Oligonucleotide for detection of SNP TSC0024836
aatattgtaggaa

SEQ ID NO: 99920 - DNA, 13 bp, Artificial Sequence
  Oligonucleotide for detection of SNP TSC0024836
ttcctacaatatt

SEQ ID NO: 99921 - DNA, 13 bp, Artificial Sequence
  Oligonucleotide for detection of SNP TSC0024836
aatattttaggaa

SEQ ID NO: 99922 - DNA, 13 bp, Artificial Sequence
  Oligonucleotide for detection of SNP TSC0024836
ttcctaaaatatt

SEQ ID NO: 99923 - DNA, 13 bp, Artificial Sequence
  Oligonucleotide for detection of SNP TSC0024838
tagtttttgttag

SEQ ID NO: 99924 - DNA, 13 bp, Artificial Sequence
  Oligonucleotide for detection of SNP TSC0024838
ctaacaaaaacta

SEQ ID NO: 99925 - DNA, 13 bp, Artificial Sequence
  Oligonucleotide for detection of SNP TSC0024838
ttaatataaatta

SEQ ID NO: 99926 - DNA, 13 bp, Artificial Sequence
  Oligonucleotide for detection of SNP TSC0024838
taatttatattaa

SEQ ID NO: 99927 - DNA, 13 bp, Artificial Sequence
  Oligonucleotide for detection of SNP TSC0024838
ttaataaaaatta

SEQ ID NO: 99928 - DNA, 13 bp, Artificial Sequence
  Oligonucleotide for detection of SNP TSC0024838
taatttttattaa

SEQ ID NO: 99929 - DNA, 13 bp, Artificial Sequence
  Oligonucleotide for detection of SNP TSC0024840
aaatgagtgtgty

SEQ ID NO: 99930 - DNA, 13 bp, Artificial Sequence
  Oligonucleotide for detection of SNP TSC0024840
racacactcattt

SEQ ID NO: 99931 - DNA, 13 bp, Artificial Sequence
  Oligonucleotide for detection of SNP TSC0024840
aaatgaatgtgty

SEQ ID NO: 99932 - DNA, 13 bp, Artificial Sequence
  Oligonucleotide for detection of SNP TSC0024840
racacattcattt

SEQ ID NO: 99933 - DNA, 13 bp, Artificial Sequence
  Oligonucleotide for detection of SNP TSC0024842
tatatatgttagg

SEQ ID NO: 99934 - DNA, 13 bp, Artificial Sequence
  Oligonucleotide for detection of SNP TSC0024842
cctaacatatata

SEQ ID NO: 99935 - DNA, 13 bp, Artificial Sequence
  Oligonucleotide for detection of SNP TSC0024842
tatatacgttagg

SEQ ID NO: 99936 - DNA, 13 bp, Artificial Sequence
  Oligonucleotide for detection of SNP TSC0024842
cctaacgtatata

SEQ ID NO: 99937 - DNA, 13 bp, Artificial Sequence
  Oligonucleotide for detection of SNP TSC0024842
tttggtgtatatg

SEQ ID NO: 99938 - DNA, 13 bp, Artificial Sequence
  Oligonucleotide for detection of SNP TSC0024842
catatacaccaaa

SEQ ID NO: 99939 - DNA, 13 bp, Artificial Sequence
  Oligonucleotide for detection of SNP TSC0024842
tttggtatatatg

SEQ ID NO: 99940 - DNA, 13 bp, Artificial Sequence
  Oligonucleotide for detection of SNP TSC0024842
catatataccaaa

SEQ ID NO: 99941 - DNA, 13 bp, Artificial Sequence
  Oligonucleotide for detection of SNP TSC0024842
tttggcgtatatg

SEQ ID NO: 99942 - DNA, 13 bp, Artificial Sequence
  Oligonucleotide for detection of SNP TSC0024842
catatacgccaaa

SEQ ID NO: 99943 - DNA, 13 bp, Artificial Sequence
  Oligonucleotide for detection of SNP TSC0024843
tgaatggtttatt

SEQ ID NO: 99944 - DNA, 13 bp, Artificial Sequence
  Oligonucleotide for detection of SNP TSC0024843
aataaaccattca

SEQ ID NO: 99945 - DNA, 13 bp, Artificial Sequence
  Oligonucleotide for detection of SNP TSC0024843
tgaatgatttatt

SEQ ID NO: 99946 - DNA, 13 bp, Artificial Sequence
  Oligonucleotide for detection of SNP TSC0024843
aataaatcattca

SEQ ID NO: 99947 - DNA, 13 bp, Artificial Sequence
  Oligonucleotide for detection of SNP TSC0024849
gggttgaggagtg

SEQ ID NO: 99948 - DNA, 13 bp, Artificial Sequence
  Oligonucleotide for detection of SNP TSC0024849
cactcctcaaccc

SEQ ID NO: 99949 - DNA, 13 bp, Artificial Sequence
  Oligonucleotide for detection of SNP TSC0024849
gggttggggagtg

SEQ ID NO: 99950 - DNA, 13 bp, Artificial Sequence
  Oligonucleotide for detection of SNP TSC0024849
cactccccaaccc

SEQ ID NO: 99951 - DNA, 13 bp, Artificial Sequence
  Oligonucleotide for detection of SNP TSC0024849
gggtcgaggagtg

SEQ ID NO: 99952 - DNA, 13 bp, Artificial Sequence
  Oligonucleotide for detection of SNP TSC0024849
cactcctcgaccc

SEQ ID NO: 99953 - DNA, 13 bp, Artificial Sequence
  Oligonucleotide for detection of SNP TSC0024849
gggtcggggagtg

SEQ ID NO: 99954 - DNA, 13 bp, Artificial Sequence
  Oligonucleotide for detection of SNP TSC0024849
cactccccgaccc

SEQ ID NO: 99955 - DNA, 13 bp, Artificial Sequence
  Oligonucleotide for detection of SNP TSC0024850
tatgttggaatta

SEQ ID NO: 99956 - DNA, 13 bp, Artificial Sequence
  Oligonucleotide for detection of SNP TSC0024850
taattccaacata

SEQ ID NO: 99957 - DNA, 13 bp, Artificial Sequence
  Oligonucleotide for detection of SNP TSC0024850
tatgttagaatta

SEQ ID NO: 99958 - DNA, 13 bp, Artificial Sequence
  Oligonucleotide for detection of SNP TSC0024850
taattctaacata

SEQ ID NO: 99959 - DNA, 13 bp, Artificial Sequence
  Oligonucleotide for detection of SNP TSC0024851
attgagaagtttt

SEQ ID NO: 99960 - DNA, 13 bp, Artificial Sequence
  Oligonucleotide for detection of SNP TSC0024851
aaaacttctcaat

SEQ ID NO: 99961 - DNA, 13 bp, Artificial Sequence
  Oligonucleotide for detection of SNP TSC0024851
attgagtagtttt

SEQ ID NO: 99962 - DNA, 13 bp, Artificial Sequence
  Oligonucleotide for detection of SNP TSC0024851
aaaactactcaat

SEQ ID NO: 99963 - DNA, 13 bp, Artificial Sequence
  Oligonucleotide for detection of SNP TSC0024851
aaaattttttaat

SEQ ID NO: 99964 - DNA, 13 bp, Artificial Sequence
  Oligonucleotide for detection of SNP TSC0024851
attaaaaaatttt

SEQ ID NO: 99965 - DNA, 13 bp, Artificial Sequence
  Oligonucleotide for detection of SNP TSC0024851
aaaattatttaat

SEQ ID NO: 99966 - DNA, 13 bp, Artificial Sequence
  Oligonucleotide for detection of SNP TSC0024851
attaaataatttt

SEQ ID NO: 99967 - DNA, 13 bp, Artificial Sequence
  Oligonucleotide for detection of SNP TSC0024853
tagggatggttay

SEQ ID NO: 99968 - DNA, 13 bp, Artificial Sequence
  Oligonucleotide for detection of SNP TSC0024853
rtaaccatcccta

SEQ ID NO: 99969 - DNA, 13 bp, Artificial Sequence
  Oligonucleotide for detection of SNP TSC0024853
tagggacggttay

SEQ ID NO: 99970 - DNA, 13 bp, Artificial Sequence
  Oligonucleotide for detection of SNP TSC0024853
rtaaccgtcccta

SEQ ID NO: 99971 - DNA, 13 bp, Artificial Sequence
  Oligonucleotide for detection of SNP TSC0024854
gttatttgtagaa

SEQ ID NO: 99972 - DNA, 13 bp, Artificial Sequence
  Oligonucleotide for detection of SNP TSC0024854
ttctacaaataac

SEQ ID NO: 99973 - DNA, 13 bp, Artificial Sequence
  Oligonucleotide for detection of SNP TSC0024854
gttattcgtagaa

SEQ ID NO: 99974 - DNA, 13 bp, Artificial Sequence
  Oligonucleotide for detection of SNP TSC0024854
ttctacgaataac

SEQ ID NO: 99975 - DNA, 13 bp, Artificial Sequence
  Oligonucleotide for detection of SNP TSC0024854
ttttgtgggtgay

SEQ ID NO: 99976 - DNA, 13 bp, Artificial Sequence
  Oligonucleotide for detection of SNP TSC0024854
rtcacccacaaaa

SEQ ID NO: 99977 - DNA, 13 bp, Artificial Sequence
  Oligonucleotide for detection of SNP TSC0024854
ttttgtaggtgay

SEQ ID NO: 99978 - DNA, 13 bp, Artificial Sequence
  Oligonucleotide for detection of SNP TSC0024854
rtcacctacaaaa

SEQ ID NO: 99979 - DNA, 13 bp, Artificial Sequence
  Oligonucleotide for detection of SNP TSC0024854
ttttgcgggtgay

SEQ ID NO: 99980 - DNA, 13 bp, Artificial Sequence
  Oligonucleotide for detection of SNP TSC0024854
rtcacccgcaaaa

SEQ ID NO: 99981 - DNA, 13 bp, Artificial Sequence
  Oligonucleotide for detection of SNP TSC0024855
agatttagtatty

SEQ ID NO: 99982 - DNA, 13 bp, Artificial Sequence
  Oligonucleotide for detection of SNP TSC0024855
raatactaaatct

SEQ ID NO: 99983 - DNA, 13 bp, Artificial Sequence
  Oligonucleotide for detection of SNP TSC0024855
agatttggtatty

SEQ ID NO: 99984 - DNA, 13 bp, Artificial Sequence
  Oligonucleotide for detection of SNP TSC0024855
raataccaaatct

SEQ ID NO: 99985 - DNA, 13 bp, Artificial Sequence
  Oligonucleotide for detection of SNP TSC0024855
agattcggtatty

SEQ ID NO: 99986 - DNA, 13 bp, Artificial Sequence
  Oligonucleotide for detection of SNP TSC0024855
raataccgaatct

SEQ ID NO: 99987 - DNA, 13 bp, Artificial Sequence
  Oligonucleotide for detection of SNP TSC0024855
gaatgttgagttt

SEQ ID NO: 99988 - DNA, 13 bp, Artificial Sequence
  Oligonucleotide for detection of SNP TSC0024855
aaactcaacattc

SEQ ID NO: 99989 - DNA, 13 bp, Artificial Sequence
  Oligonucleotide for detection of SNP TSC0024855
gaatgtcgagttt

SEQ ID NO: 99990 - DNA, 13 bp, Artificial Sequence
  Oligonucleotide for detection of SNP TSC0024855
aaactcgacattc

SEQ ID NO: 99991 - DNA, 13 bp, Artificial Sequence
  Oligonucleotide for detection of SNP TSC0024859
ggtgggtggtggg

SEQ ID NO: 99992 - DNA, 13 bp, Artificial Sequence
  Oligonucleotide for detection of SNP TSC0024859
cccaccacccacc

SEQ ID NO: 99993 - DNA, 13 bp, Artificial Sequence
  Oligonucleotide for detection of SNP TSC0024859
ggcgggtggtggg

SEQ ID NO: 99994 - DNA, 13 bp, Artificial Sequence
  Oligonucleotide for detection of SNP TSC0024859
cccaccacccgcc

SEQ ID NO: 99995 - DNA, 13 bp, Artificial Sequence
  Oligonucleotide for detection of SNP TSC0024859
ggtgggcggtggg

SEQ ID NO: 99996 - DNA, 13 bp, Artificial Sequence
  Oligonucleotide for detection of SNP TSC0024859
cccaccgcccacc

SEQ ID NO: 99997 - DNA, 13 bp, Artificial Sequence
  Oligonucleotide for detection of SNP TSC0024859
ggtgggtggcggg

SEQ ID NO: 99998 - DNA, 13 bp, Artificial Sequence
  Oligonucleotide for detection of SNP TSC0024859
cccgccacccacc

SEQ ID NO: 99999 - DNA, 13 bp, Artificial Sequence
  Oligonucleotide for detection of SNP TSC0024859
ggcgggtggcggg

SEQ ID NO: 100000 - DNA, 13 bp, Artificial Sequence
  Oligonucleotide for detection of SNP TSC0024859
cccgccacccgcc

SEQ ID NO: 100001 - DNA, 13 bp, Artificial Sequence
  Oligonucleotide for detection of SNP TSC0024859
ggcgggcggtggg

SEQ ID NO: 100002 - DNA, 13 bp, Artificial Sequence
  Oligonucleotide for detection of SNP TSC0024859
cccaccgcccgcc

SEQ ID NO: 100003 - DNA, 13 bp, Artificial Sequence
  Oligonucleotide for detection of SNP TSC0024859
ggtgggcggcggg

SEQ ID NO: 100004 - DNA, 13 bp, Artificial Sequence
  Oligonucleotide for detection of SNP TSC0024859
cccgccgcccacc

SEQ ID NO: 100005 - DNA, 13 bp, Artificial Sequence
  Oligonucleotide for detection of SNP TSC0024859
ggcgggcggcggg

SEQ ID NO: 100006 - DNA, 13 bp, Artificial Sequence
  Oligonucleotide for detection of SNP TSC0024859
cccgccgcccgcc

SEQ ID NO: 100007 - DNA, 13 bp, Artificial Sequence
  Oligonucleotide for detection of SNP TSC0024859
ttcgttgtttgty

SEQ ID NO: 100008 - DNA, 13 bp, Artificial Sequence
  Oligonucleotide for detection of SNP TSC0024859
racaaacaacgaa

SEQ ID NO: 100009 - DNA, 13 bp, Artificial Sequence
  Oligonucleotide for detection of SNP TSC0024859
ttcgttatttgty

SEQ ID NO: 100010 - DNA, 13 bp, Artificial Sequence
  Oligonucleotide for detection of SNP TSC0024859
racaaataacgaa

SEQ ID NO: 100011 - DNA, 13 bp, Artificial Sequence
  Oligonucleotide for detection of SNP TSC0024859
tttgttattcgty

SEQ ID NO: 100012 - DNA, 13 bp, Artificial Sequence
  Oligonucleotide for detection of SNP TSC0024859
racgaataacaaa

SEQ ID NO: 100013 - DNA, 13 bp, Artificial Sequence
  Oligonucleotide for detection of SNP TSC0024859
tttgttgttcgty

SEQ ID NO: 100014 - DNA, 13 bp, Artificial Sequence
  Oligonucleotide for detection of SNP TSC0024859
racgaacaacaaa

SEQ ID NO: 100015 - DNA, 13 bp, Artificial Sequence
  Oligonucleotide for detection of SNP TSC0024859
ttcgttattcgty

SEQ ID NO: 100016 - DNA, 13 bp, Artificial Sequence
  Oligonucleotide for detection of SNP TSC0024859
racgaataacgaa

SEQ ID NO: 100017 - DNA, 13 bp, Artificial Sequence
  Oligonucleotide for detection of SNP TSC0024859
ttcgtcgtttgty

SEQ ID NO: 100018 - DNA, 13 bp, Artificial Sequence
  Oligonucleotide for detection of SNP TSC0024859
racaaacgacgaa

SEQ ID NO: 100019 - DNA, 13 bp, Artificial Sequence
  Oligonucleotide for detection of SNP TSC0024859
ttcgttgttcgty

SEQ ID NO: 100020 - DNA, 13 bp, Artificial Sequence
  Oligonucleotide for detection of SNP TSC0024859
racgaacaacgaa

SEQ ID NO: 100021 - DNA, 13 bp, Artificial Sequence
  Oligonucleotide for detection of SNP TSC0024859
tttgtcgttcgty

SEQ ID NO: 100022 - DNA, 13 bp, Artificial Sequence
  Oligonucleotide for detection of SNP TSC0024859
racgaacgacaaa

SEQ ID NO: 100023 - DNA, 13 bp, Artificial Sequence
  Oligonucleotide for detection of SNP TSC0024859
ttcgtcgttcgty

SEQ ID NO: 100024 - DNA, 13 bp, Artificial Sequence
  Oligonucleotide for detection of SNP TSC0024859
racgaacgacgaa

SEQ ID NO: 100025 - DNA, 13 bp, Artificial Sequence
  Oligonucleotide for detection of SNP TSC0024860
atgtataatggtt

SEQ ID NO: 100026 - DNA, 13 bp, Artificial Sequence
  Oligonucleotide for detection of SNP TSC0024860
aaccattatacat

SEQ ID NO: 100027 - DNA, 13 bp, Artificial Sequence
  Oligonucleotide for detection of SNP TSC0024860
atgtatgatggtt

SEQ ID NO: 100028 - DNA, 13 bp, Artificial Sequence
  Oligonucleotide for detection of SNP TSC0024860
aaccatcatacat

SEQ ID NO: 100029 - DNA, 13 bp, Artificial Sequence
  Oligonucleotide for detection of SNP TSC0024860
atgtacgatggtt

SEQ ID NO: 100030 - DNA, 13 bp, Artificial Sequence
  Oligonucleotide for detection of SNP TSC0024860
aaccatcgtacat

SEQ ID NO: 100031 - DNA, 13 bp, Artificial Sequence
  Oligonucleotide for detection of SNP TSC0024860
agttattgtgtat

SEQ ID NO: 100032 - DNA, 13 bp, Artificial Sequence
  Oligonucleotide for detection of SNP TSC0024860
atacacaataact

SEQ ID NO: 100033 - DNA, 13 bp, Artificial Sequence
  Oligonucleotide for detection of SNP TSC0024860
agttatcgtgtat

SEQ ID NO: 100034 - DNA, 13 bp, Artificial Sequence
  Oligonucleotide for detection of SNP TSC0024860
atacacgataact

SEQ ID NO: 100035 - DNA, 13 bp, Artificial Sequence
  Oligonucleotide for detection of SNP TSC0024865
ttttagtgatagy

SEQ ID NO: 100036 - DNA, 13 bp, Artificial Sequence
  Oligonucleotide for detection of SNP TSC0024865
rctatcactaaaa

SEQ ID NO: 100037 - DNA, 13 bp, Artificial Sequence
  Oligonucleotide for detection of SNP TSC0024865
ttttagggatagy

SEQ ID NO: 100038 - DNA, 13 bp, Artificial Sequence
  Oligonucleotide for detection of SNP TSC0024865
rctatccctaaaa

SEQ ID NO: 100039 - DNA, 13 bp, Artificial Sequence
  Oligonucleotide for detection of SNP TSC0024865
ttttagcgatagy

SEQ ID NO: 100040 - DNA, 13 bp, Artificial Sequence
  Oligonucleotide for detection of SNP TSC0024865
rctatcgctaaaa

SEQ ID NO: 100041 - DNA, 13 bp, Artificial Sequence
  Oligonucleotide for detection of SNP TSC0024865
gttattgttagaa

SEQ ID NO: 100042 - DNA, 13 bp, Artificial Sequence
  Oligonucleotide for detection of SNP TSC0024865
ttctaacaataac

SEQ ID NO: 100043 - DNA, 13 bp, Artificial Sequence
  Oligonucleotide for detection of SNP TSC0024865
gttatttttagaa

SEQ ID NO: 100044 - DNA, 13 bp, Artificial Sequence
  Oligonucleotide for detection of SNP TSC0024865
ttctaaaaataac

SEQ ID NO: 100045 - DNA, 13 bp, Artificial Sequence
  Oligonucleotide for detection of SNP TSC0024865
gttatcgttagaa

SEQ ID NO: 100046 - DNA, 13 bp, Artificial Sequence
  Oligonucleotide for detection of SNP TSC0024865
ttctaacgataac

SEQ ID NO: 100047 - DNA, 13 bp, Artificial Sequence
  Oligonucleotide for detection of SNP TSC0024866
ataatggttaaag

SEQ ID NO: 100048 - DNA, 13 bp, Artificial Sequence
  Oligonucleotide for detection of SNP TSC0024866
ctttaaccattat

SEQ ID NO: 100049 - DNA, 13 bp, Artificial Sequence
  Oligonucleotide for detection of SNP TSC0024866
ataatgattaaag

SEQ ID NO: 100050 - DNA, 13 bp, Artificial Sequence
  Oligonucleotide for detection of SNP TSC0024866
ctttaatcattat

SEQ ID NO: 100051 - DNA, 13 bp, Artificial Sequence
  Oligonucleotide for detection of SNP TSC0024867
tatgaagttatta

SEQ ID NO: 100052 - DNA, 13 bp, Artificial Sequence
  Oligonucleotide for detection of SNP TSC0024867
taataacttcata

SEQ ID NO: 100053 - DNA, 13 bp, Artificial Sequence
  Oligonucleotide for detection of SNP TSC0024867
tatgaaattatta

SEQ ID NO: 100054 - DNA, 13 bp, Artificial Sequence
  Oligonucleotide for detection of SNP TSC0024867
taataatttcata

SEQ ID NO: 100055 - DNA, 13 bp, Artificial Sequence
  Oligonucleotide for detection of SNP TSC0024868
tttttagtgtgaa

SEQ ID NO: 100056 - DNA, 13 bp, Artificial Sequence
  Oligonucleotide for detection of SNP TSC0024868
ttcacactaaaaa

SEQ ID NO: 100057 - DNA, 13 bp, Artificial Sequence
  Oligonucleotide for detection of SNP TSC0024868
tttttaatgtgaa

SEQ ID NO: 100058 - DNA, 13 bp, Artificial Sequence
  Oligonucleotide for detection of SNP TSC0024868
ttcacattaaaaa

SEQ ID NO: 100059 - DNA, 13 bp, Artificial Sequence
  Oligonucleotide for detection of SNP TSC0024871
tagaataatttag

SEQ ID NO: 100060 - DNA, 13 bp, Artificial Sequence
  Oligonucleotide for detection of SNP TSC0024871
ctaaattattcta

SEQ ID NO: 100061 - DNA, 13 bp, Artificial Sequence
  Oligonucleotide for detection of SNP TSC0024871
tagaattatttag

SEQ ID NO: 100062 - DNA, 13 bp, Artificial Sequence
  Oligonucleotide for detection of SNP TSC0024871
ctaaataattcta

SEQ ID NO: 100063 - DNA, 13 bp, Artificial Sequence
  Oligonucleotide for detection of SNP TSC0024871
ttggattgttttg

SEQ ID NO: 100064 - DNA, 13 bp, Artificial Sequence
  Oligonucleotide for detection of SNP TSC0024871
caaaacaatccaa

SEQ ID NO: 100065 - DNA, 13 bp, Artificial Sequence
  Oligonucleotide for detection of SNP TSC0024871
ttggatggttttg

SEQ ID NO: 100066 - DNA, 13 bp, Artificial Sequence
  Oligonucleotide for detection of SNP TSC0024871
caaaaccatccaa

SEQ ID NO: 100067 - DNA, 13 bp, Artificial Sequence
  Oligonucleotide for detection of SNP TSC0024872
tttttgttggttt

SEQ ID NO: 100068 - DNA, 13 bp, Artificial Sequence
  Oligonucleotide for detection of SNP TSC0024872
aaaccaacaaaaa

SEQ ID NO: 100069 - DNA, 13 bp, Artificial Sequence
  Oligonucleotide for detection of SNP TSC0024872
aggttagtagagg

SEQ ID NO: 100070 - DNA, 13 bp, Artificial Sequence
  Oligonucleotide for detection of SNP TSC0024872
cctctactaacct

SEQ ID NO: 100071 - DNA, 13 bp, Artificial Sequence
  Oligonucleotide for detection of SNP TSC0024872
aggttattagagg

SEQ ID NO: 100072 - DNA, 13 bp, Artificial Sequence
  Oligonucleotide for detection of SNP TSC0024872
cctctaataacct

SEQ ID NO: 100073 - DNA, 13 bp, Artificial Sequence
  Oligonucleotide for detection of SNP TSC0024874
tagggatttgagg

SEQ ID NO: 100074 - DNA, 13 bp, Artificial Sequence
  Oligonucleotide for detection of SNP TSC0024874
cctcaaatcccta

SEQ ID NO: 100075 - DNA, 13 bp, Artificial Sequence
  Oligonucleotide for detection of SNP TSC0024874
tagggaattgagg

SEQ ID NO: 100076 - DNA, 13 bp, Artificial Sequence
  Oligonucleotide for detection of SNP TSC0024874
cctcaattcccta

SEQ ID NO: 100077 - DNA, 13 bp, Artificial Sequence
  Oligonucleotide for detection of SNP TSC0024875
tgggttagtatta

SEQ ID NO: 100078 - DNA, 13 bp, Artificial Sequence
  Oligonucleotide for detection of SNP TSC0024875
taatactaaccca

SEQ ID NO: 100079 - DNA, 13 bp, Artificial Sequence
  Oligonucleotide for detection of SNP TSC0024875
tgggttggtatta

SEQ ID NO: 100080 - DNA, 13 bp, Artificial Sequence
  Oligonucleotide for detection of SNP TSC0024875
taataccaaccca

SEQ ID NO: 100081 - DNA, 13 bp, Artificial Sequence
  Oligonucleotide for detection of SNP TSC0024876
ggtttcgttttay

SEQ ID NO: 100082 - DNA, 13 bp, Artificial Sequence
  Oligonucleotide for detection of SNP TSC0024876
rtaaaacgaaacc

SEQ ID NO: 100083 - DNA, 13 bp, Artificial Sequence
  Oligonucleotide for detection of SNP TSC0024877
attttgagatttg

SEQ ID NO: 100084 - DNA, 13 bp, Artificial Sequence
  Oligonucleotide for detection of SNP TSC0024877
caaatctcaaaat

SEQ ID NO: 100085 - DNA, 13 bp, Artificial Sequence
  Oligonucleotide for detection of SNP TSC0024879
ttgataatatatt

SEQ ID NO: 100086 - DNA, 13 bp, Artificial Sequence
  Oligonucleotide for detection of SNP TSC0024879
aatatattatcaa

SEQ ID NO: 100087 - DNA, 13 bp, Artificial Sequence
  Oligonucleotide for detection of SNP TSC0024879
ttgatagtatatt

SEQ ID NO: 100088 - DNA, 13 bp, Artificial Sequence
  Oligonucleotide for detection of SNP TSC0024879
aatatactatcaa

SEQ ID NO: 100089 - DNA, 13 bp, Artificial Sequence
  Oligonucleotide for detection of SNP TSC0024880
gtgtatattttat

SEQ ID NO: 100090 - DNA, 13 bp, Artificial Sequence
  Oligonucleotide for detection of SNP TSC0024880
ataaaatatacac

SEQ ID NO: 100091 - DNA, 13 bp, Artificial Sequence
  Oligonucleotide for detection of SNP TSC0024880
gtgtattttttat

SEQ ID NO: 100092 - DNA, 13 bp, Artificial Sequence
  Oligonucleotide for detection of SNP TSC0024880
ataaaaaatacac

SEQ ID NO: 100093 - DNA, 13 bp, Artificial Sequence
  Oligonucleotide for detection of SNP TSC0024880
atgggatgtatay

SEQ ID NO: 100094 - DNA, 13 bp, Artificial Sequence
  Oligonucleotide for detection of SNP TSC0024880
rtatacatcccat

SEQ ID NO: 100095 - DNA, 13 bp, Artificial Sequence
  Oligonucleotide for detection of SNP TSC0024880
atgggaggtatay

SEQ ID NO: 100096 - DNA, 13 bp, Artificial Sequence
  Oligonucleotide for detection of SNP TSC0024880
rtatacctcccat

SEQ ID NO: 100097 - DNA, 13 bp, Artificial Sequence
  Oligonucleotide for detection of SNP TSC0024881
tttttgtatatty

SEQ ID NO: 100098 - DNA, 13 bp, Artificial Sequence
  Oligonucleotide for detection of SNP TSC0024881
raatatacaaaaa

SEQ ID NO: 100099 - DNA, 13 bp, Artificial Sequence
  Oligonucleotide for detection of SNP TSC0024881
tttttggatatty

SEQ ID NO: 100100 - DNA, 13 bp, Artificial Sequence
  Oligonucleotide for detection of SNP TSC0024881
raatatccaaaaa

SEQ ID NO: 100101 - DNA, 13 bp, Artificial Sequence
  Oligonucleotide for detection of SNP TSC0024881
gaatatgtaagaa

SEQ ID NO: 100102 - DNA, 13 bp, Artificial Sequence
  Oligonucleotide for detection of SNP TSC0024881
ttcttacatattc

SEQ ID NO: 100103 - DNA, 13 bp, Artificial Sequence
  Oligonucleotide for detection of SNP TSC0024881
gaatatttaagaa

SEQ ID NO: 100104 - DNA, 13 bp, Artificial Sequence
  Oligonucleotide for detection of SNP TSC0024881
ttcttaaatattc

SEQ ID NO: 100105 - DNA, 13 bp, Artificial Sequence
  Oligonucleotide for detection of SNP TSC0024882
atgagtgagtatg

SEQ ID NO: 100106 - DNA, 13 bp, Artificial Sequence
  Oligonucleotide for detection of SNP TSC0024882
catactcactcat

SEQ ID NO: 100107 - DNA, 13 bp, Artificial Sequence
  Oligonucleotide for detection of SNP TSC0024882
atgagtaagtatg

SEQ ID NO: 100108 - DNA, 13 bp, Artificial Sequence
  Oligonucleotide for detection of SNP TSC0024882
catacttactcat

SEQ ID NO: 100109 - DNA, 13 bp, Artificial Sequence
  Oligonucleotide for detection of SNP TSC0024882
acgagtgagtatg

SEQ ID NO: 100110 - DNA, 13 bp, Artificial Sequence
  Oligonucleotide for detection of SNP TSC0024882
catactcactcgt

SEQ ID NO: 100111 - DNA, 13 bp, Artificial Sequence
  Oligonucleotide for detection of SNP TSC0024882
acgagtaagtatg

SEQ ID NO: 100112 - DNA, 13 bp, Artificial Sequence
  Oligonucleotide for detection of SNP TSC0024882
catacttactcgt

SEQ ID NO: 100113 - DNA, 13 bp, Artificial Sequence
  Oligonucleotide for detection of SNP TSC0024885
gggtgtagcggtt

SEQ ID NO: 100114 - DNA, 13 bp, Artificial Sequence
  Oligonucleotide for detection of SNP TSC0024885
aaccgctacaccc

SEQ ID NO: 100115 - DNA, 13 bp, Artificial Sequence
  Oligonucleotide for detection of SNP TSC0024885
gggcgtagcggtt

SEQ ID NO: 100116 - DNA, 13 bp, Artificial Sequence
  Oligonucleotide for detection of SNP TSC0024885
aaccgctacgccc

SEQ ID NO: 100117 - DNA, 13 bp, Artificial Sequence
  Oligonucleotide for detection of SNP TSC0024885
gggtgtggcggtt

SEQ ID NO: 100118 - DNA, 13 bp, Artificial Sequence
  Oligonucleotide for detection of SNP TSC0024885
aaccgccacaccc

SEQ ID NO: 100119 - DNA, 13 bp, Artificial Sequence
  Oligonucleotide for detection of SNP TSC0024885
gggcgtggcggtt

SEQ ID NO: 100120 - DNA, 13 bp, Artificial Sequence
  Oligonucleotide for detection of SNP TSC0024885
aaccgccacgccc

SEQ ID NO: 100121 - DNA, 13 bp, Artificial Sequence
  Oligonucleotide for detection of SNP TSC0024885
gggtgcggcggtt

SEQ ID NO: 100122 - DNA, 13 bp, Artificial Sequence
  Oligonucleotide for detection of SNP TSC0024885
aaccgccgcaccc

SEQ ID NO: 100123 - DNA, 13 bp, Artificial Sequence
  Oligonucleotide for detection of SNP TSC0024885
gggcgcggcggtt

SEQ ID NO: 100124 - DNA, 13 bp, Artificial Sequence
  Oligonucleotide for detection of SNP TSC0024885
aaccgccgcgccc

SEQ ID NO: 100125 - DNA, 13 bp, Artificial Sequence
  Oligonucleotide for detection of SNP TSC0024885
agttgttgtgtty

SEQ ID NO: 100126 - DNA, 13 bp, Artificial Sequence
  Oligonucleotide for detection of SNP TSC0024885
raacacaacaact

SEQ ID NO: 100127 - DNA, 13 bp, Artificial Sequence
  Oligonucleotide for detection of SNP TSC0024885
agtcgttgtgtty

SEQ ID NO: 100128 - DNA, 13 bp, Artificial Sequence
  Oligonucleotide for detection of SNP TSC0024885
raacacaacgact

SEQ ID NO: 100129 - DNA, 13 bp, Artificial Sequence
  Oligonucleotide for detection of SNP TSC0024885
agttgttgcgtty

SEQ ID NO: 100130 - DNA, 13 bp, Artificial Sequence
  Oligonucleotide for detection of SNP TSC0024885
raacgcaacaact

SEQ ID NO: 100131 - DNA, 13 bp, Artificial Sequence
  Oligonucleotide for detection of SNP TSC0024885
agttgtcgtgtty

SEQ ID NO: 100132 - DNA, 13 bp, Artificial Sequence
  Oligonucleotide for detection of SNP TSC0024885
raacacgacaact

SEQ ID NO: 100133 - DNA, 13 bp, Artificial Sequence
  Oligonucleotide for detection of SNP TSC0024885
agtcgttgcgtty

SEQ ID NO: 100134 - DNA, 13 bp, Artificial Sequence
  Oligonucleotide for detection of SNP TSC0024885
raacgcaacgact

SEQ ID NO: 100135 - DNA, 13 bp, Artificial Sequence
  Oligonucleotide for detection of SNP TSC0024885
agtcgtcgtgtty

SEQ ID NO: 100136 - DNA, 13 bp, Artificial Sequence
  Oligonucleotide for detection of SNP TSC0024885
raacacgacgact

SEQ ID NO: 100137 - DNA, 13 bp, Artificial Sequence
  Oligonucleotide for detection of SNP TSC0024885
agttgtcgcgtty

SEQ ID NO: 100138 - DNA, 13 bp, Artificial Sequence
  Oligonucleotide for detection of SNP TSC0024885
raacgcgacaact

SEQ ID NO: 100139 - DNA, 13 bp, Artificial Sequence
  Oligonucleotide for detection of SNP TSC0024885
agtcgtcgcgtty

SEQ ID NO: 100140 - DNA, 13 bp, Artificial Sequence
  Oligonucleotide for detection of SNP TSC0024885
raacgcgacgact

SEQ ID NO: 100141 - DNA, 13 bp, Artificial Sequence
  Oligonucleotide for detection of SNP TSC0024887
ttagtagtttttt

SEQ ID NO: 100142 - DNA, 13 bp, Artificial Sequence
  Oligonucleotide for detection of SNP TSC0024887
aaaaaactactaa

SEQ ID NO: 100143 - DNA, 13 bp, Artificial Sequence
  Oligonucleotide for detection of SNP TSC0024887
aggagagtgttga

SEQ ID NO: 100144 - DNA, 13 bp, Artificial Sequence
  Oligonucleotide for detection of SNP TSC0024887
tcaacactctcct

SEQ ID NO: 100145 - DNA, 13 bp, Artificial Sequence
  Oligonucleotide for detection of SNP TSC0024887
aggagattgttga

SEQ ID NO: 100146 - DNA, 13 bp, Artificial Sequence
  Oligonucleotide for detection of SNP TSC0024887
tcaacaatctcct

SEQ ID NO: 100147 - DNA, 13 bp, Artificial Sequence
  Oligonucleotide for detection of SNP TSC0024888
attgtttggaaga

SEQ ID NO: 100148 - DNA, 13 bp, Artificial Sequence
  Oligonucleotide for detection of SNP TSC0024888
tcttccaaacaat

SEQ ID NO: 100149 - DNA, 13 bp, Artificial Sequence
  Oligonucleotide for detection of SNP TSC0024888
attgttgggaaga

SEQ ID NO: 100150 - DNA, 13 bp, Artificial Sequence
  Oligonucleotide for detection of SNP TSC0024888
tcttcccaacaat

SEQ ID NO: 100151 - DNA, 13 bp, Artificial Sequence
  Oligonucleotide for detection of SNP TSC0024888
attgttcggaaga

SEQ ID NO: 100152 - DNA, 13 bp, Artificial Sequence
  Oligonucleotide for detection of SNP TSC0024888
tcttccgaacaat

SEQ ID NO: 100153 - DNA, 13 bp, Artificial Sequence
  Oligonucleotide for detection of SNP TSC0024888
attgtcgggaaga

SEQ ID NO: 100154 - DNA, 13 bp, Artificial Sequence
  Oligonucleotide for detection of SNP TSC0024888
tcttcccgacaat

SEQ ID NO: 100155 - DNA, 13 bp, Artificial Sequence
  Oligonucleotide for detection of SNP TSC0024888
ttttttggatagt

SEQ ID NO: 100156 - DNA, 13 bp, Artificial Sequence
  Oligonucleotide for detection of SNP TSC0024888
actatccaaaaaa

SEQ ID NO: 100157 - DNA, 13 bp, Artificial Sequence
  Oligonucleotide for detection of SNP TSC0024888
tttttttgatagt

SEQ ID NO: 100158 - DNA, 13 bp, Artificial Sequence
  Oligonucleotide for detection of SNP TSC0024888
actatcaaaaaaa

SEQ ID NO: 100159 - DNA, 13 bp, Artificial Sequence
  Oligonucleotide for detection of SNP TSC0024888
tttttcggatagt

SEQ ID NO: 100160 - DNA, 13 bp, Artificial Sequence
  Oligonucleotide for detection of SNP TSC0024888
actatccgaaaaa

SEQ ID NO: 100161 - DNA, 13 bp, Artificial Sequence
  Oligonucleotide for detection of SNP TSC0024888
ttttttcgatagt

SEQ ID NO: 100162 - DNA, 13 bp, Artificial Sequence
  Oligonucleotide for detection of SNP TSC0024888
actatcgaaaaaa

SEQ ID NO: 100163 - DNA, 13 bp, Artificial Sequence
  Oligonucleotide for detection of SNP TSC0024889
ggaagatataggg

SEQ ID NO: 100164 - DNA, 13 bp, Artificial Sequence
  Oligonucleotide for detection of SNP TSC0024889
ccctatatcttcc

SEQ ID NO: 100165 - DNA, 13 bp, Artificial Sequence
  Oligonucleotide for detection of SNP TSC0024889
ggaagagataggg

SEQ ID NO: 100166 - DNA, 13 bp, Artificial Sequence
  Oligonucleotide for detection of SNP TSC0024889
ccctatctcttcc

SEQ ID NO: 100167 - DNA, 13 bp, Artificial Sequence
  Oligonucleotide for detection of SNP TSC0024890
gatagaaagtata

SEQ ID NO: 100168 - DNA, 13 bp, Artificial Sequence
  Oligonucleotide for detection of SNP TSC0024890
tatactttctatc

SEQ ID NO: 100169 - DNA, 13 bp, Artificial Sequence
  Oligonucleotide for detection of SNP TSC0024890
gatagagagtata

SEQ ID NO: 100170 - DNA, 13 bp, Artificial Sequence
  Oligonucleotide for detection of SNP TSC0024890
tatactctctatc

SEQ ID NO: 100171 - DNA, 13 bp, Artificial Sequence
  Oligonucleotide for detection of SNP TSC0024891
gtaggatgtatay

SEQ ID NO: 100172 - DNA, 13 bp, Artificial Sequence
  Oligonucleotide for detection of SNP TSC0024891
rtatacatcctac

SEQ ID NO: 100173 - DNA, 13 bp, Artificial Sequence
  Oligonucleotide for detection of SNP TSC0024891
gtaggacgtatay

SEQ ID NO: 100174 - DNA, 13 bp, Artificial Sequence
  Oligonucleotide for detection of SNP TSC0024891
rtatacgtcctac

SEQ ID NO: 100175 - DNA, 13 bp, Artificial Sequence
  Oligonucleotide for detection of SNP TSC0024891
gtgtgtgttttgy

SEQ ID NO: 100176 - DNA, 13 bp, Artificial Sequence
  Oligonucleotide for detection of SNP TSC0024891
rcaaaacacacac

SEQ ID NO: 100177 - DNA, 13 bp, Artificial Sequence
  Oligonucleotide for detection of SNP TSC0024891
gtgtgtattttgy

SEQ ID NO: 100178 - DNA, 13 bp, Artificial Sequence
  Oligonucleotide for detection of SNP TSC0024891
rcaaaatacacac

SEQ ID NO: 100179 - DNA, 13 bp, Artificial Sequence
  Oligonucleotide for detection of SNP TSC0024891
gtgtgcgttttgy

SEQ ID NO: 100180 - DNA, 13 bp, Artificial Sequence
  Oligonucleotide for detection of SNP TSC0024891
rcaaaacgcacac

SEQ ID NO: 100181 - DNA, 13 bp, Artificial Sequence
  Oligonucleotide for detection of SNP TSC0024892
ttagaaatttgta

SEQ ID NO: 100182 - DNA, 13 bp, Artificial Sequence
  Oligonucleotide for detection of SNP TSC0024892
tacaaatttctaa

SEQ ID NO: 100183 - DNA, 13 bp, Artificial Sequence
  Oligonucleotide for detection of SNP TSC0024892
ttagaattttgta

SEQ ID NO: 100184 - DNA, 13 bp, Artificial Sequence
  Oligonucleotide for detection of SNP TSC0024892
tacaaaattctaa

SEQ ID NO: 100185 - DNA, 13 bp, Artificial Sequence
  Oligonucleotide for detection of SNP TSC0024892
ttagaaattcgta

SEQ ID NO: 100186 - DNA, 13 bp, Artificial Sequence
  Oligonucleotide for detection of SNP TSC0024892
tacgaatttctaa

SEQ ID NO: 100187 - DNA, 13 bp, Artificial Sequence
  Oligonucleotide for detection of SNP TSC0024892
ttagaatttcgta

SEQ ID NO: 100188 - DNA, 13 bp, Artificial Sequence
  Oligonucleotide for detection of SNP TSC0024892
tacgaaattctaa

SEQ ID NO: 100189 - DNA, 13 bp, Artificial Sequence
  Oligonucleotide for detection of SNP TSC0024892
tgtgggtttttgg

SEQ ID NO: 100190 - DNA, 13 bp, Artificial Sequence
  Oligonucleotide for detection of SNP TSC0024892
ccaaaaacccaca

SEQ ID NO: 100191 - DNA, 13 bp, Artificial Sequence
  Oligonucleotide for detection of SNP TSC0024892
tgtggggttttgg

SEQ ID NO: 100192 - DNA, 13 bp, Artificial Sequence
  Oligonucleotide for detection of SNP TSC0024892
ccaaaaccccaca

SEQ ID NO: 100193 - DNA, 13 bp, Artificial Sequence
  Oligonucleotide for detection of SNP TSC0024892
tgcgggtttttgg

SEQ ID NO: 100194 - DNA, 13 bp, Artificial Sequence
  Oligonucleotide for detection of SNP TSC0024892
ccaaaaacccgca

SEQ ID NO: 100195 - DNA, 13 bp, Artificial Sequence
  Oligonucleotide for detection of SNP TSC0024892
tgcggggttttgg

SEQ ID NO: 100196 - DNA, 13 bp, Artificial Sequence
  Oligonucleotide for detection of SNP TSC0024892
ccaaaaccccgca

SEQ ID NO: 100197 - DNA, 13 bp, Artificial Sequence
  Oligonucleotide for detection of SNP TSC0024895
ttattgtattata

SEQ ID NO: 100198 - DNA, 13 bp, Artificial Sequence
  Oligonucleotide for detection of SNP TSC0024895
tataatacaataa

SEQ ID NO: 100199 - DNA, 13 bp, Artificial Sequence
  Oligonucleotide for detection of SNP TSC0024895
ttattggattata

SEQ ID NO: 100200 - DNA, 13 bp, Artificial Sequence
  Oligonucleotide for detection of SNP TSC0024895
tataatccaataa

SEQ ID NO: 100201 - DNA, 13 bp, Artificial Sequence
  Oligonucleotide for detection of SNP TSC0024895
tgtgatgtagtga

SEQ ID NO: 100202 - DNA, 13 bp, Artificial Sequence
  Oligonucleotide for detection of SNP TSC0024895
tcactacatcaca

SEQ ID NO: 100203 - DNA, 13 bp, Artificial Sequence
  Oligonucleotide for detection of SNP TSC0024895
tgtgatttagtga

SEQ ID NO: 100204 - DNA, 13 bp, Artificial Sequence
  Oligonucleotide for detection of SNP TSC0024895
tcactaaatcaca

SEQ ID NO: 100205 - DNA, 13 bp, Artificial Sequence
  Oligonucleotide for detection of SNP TSC0024896
tgggtatgggtgt

SEQ ID NO: 100206 - DNA, 13 bp, Artificial Sequence
  Oligonucleotide for detection of SNP TSC0024896
acacccataccca

SEQ ID NO: 100207 - DNA, 13 bp, Artificial Sequence
  Oligonucleotide for detection of SNP TSC0024896
tgggtacgggtgt

SEQ ID NO: 100208 - DNA, 13 bp, Artificial Sequence
  Oligonucleotide for detection of SNP TSC0024896
acacccgtaccca

SEQ ID NO: 100209 - DNA, 13 bp, Artificial Sequence
  Oligonucleotide for detection of SNP TSC0024896
atattcgtgttta

SEQ ID NO: 100210 - DNA, 13 bp, Artificial Sequence
  Oligonucleotide for detection of SNP TSC0024896
taaacacgaatat

SEQ ID NO: 100211 - DNA, 13 bp, Artificial Sequence
  Oligonucleotide for detection of SNP TSC0024897
ggatgggagagag

SEQ ID NO: 100212 - DNA, 13 bp, Artificial Sequence
  Oligonucleotide for detection of SNP TSC0024897
ctctctcccatcc

SEQ ID NO: 100213 - DNA, 13 bp, Artificial Sequence
  Oligonucleotide for detection of SNP TSC0024897
ggatggtagagag

SEQ ID NO: 100214 - DNA, 13 bp, Artificial Sequence
  Oligonucleotide for detection of SNP TSC0024897
ctctctaccatcc

SEQ ID NO: 100215 - DNA, 13 bp, Artificial Sequence
  Oligonucleotide for detection of SNP TSC0024898
agaagttagaaag

SEQ ID NO: 100216 - DNA, 13 bp, Artificial Sequence
  Oligonucleotide for detection of SNP TSC0024898
ctttctaacttct

SEQ ID NO: 100217 - DNA, 13 bp, Artificial Sequence
  Oligonucleotide for detection of SNP TSC0024898
agaagtaagaaag

SEQ ID NO: 100218 - DNA, 13 bp, Artificial Sequence
  Oligonucleotide for detection of SNP TSC0024898
ctttcttacttct

SEQ ID NO: 100219 - DNA, 13 bp, Artificial Sequence
  Oligonucleotide for detection of SNP TSC0024899
atataagtttatg

SEQ ID NO: 100220 - DNA, 13 bp, Artificial Sequence
  Oligonucleotide for detection of SNP TSC0024899
cataaacttatat

SEQ ID NO: 100221 - DNA, 13 bp, Artificial Sequence
  Oligonucleotide for detection of SNP TSC0024899
atataaatttatg

SEQ ID NO: 100222 - DNA, 13 bp, Artificial Sequence
  Oligonucleotide for detection of SNP TSC0024899
cataaatttatat

SEQ ID NO: 100223 - DNA, 13 bp, Artificial Sequence
  Oligonucleotide for detection of SNP TSC0024900
ttttgaaattgay

SEQ ID NO: 100224 - DNA, 13 bp, Artificial Sequence
  Oligonucleotide for detection of SNP TSC0024900
rtcaatttcaaaa

SEQ ID NO: 100225 - DNA, 13 bp, Artificial Sequence
  Oligonucleotide for detection of SNP TSC0024900
ttttgagattgay

SEQ ID NO: 100226 - DNA, 13 bp, Artificial Sequence
  Oligonucleotide for detection of SNP TSC0024900
rtcaatctcaaaa

SEQ ID NO: 100227 - DNA, 13 bp, Artificial Sequence
  Oligonucleotide for detection of SNP TSC0024901
atgaagatgatty

SEQ ID NO: 100228 - DNA, 13 bp, Artificial Sequence
  Oligonucleotide for detection of SNP TSC0024901
raatcatcttcat

SEQ ID NO: 100229 - DNA, 13 bp, Artificial Sequence
  Oligonucleotide for detection of SNP TSC0024901
atgaaggtgatty

SEQ ID NO: 100230 - DNA, 13 bp, Artificial Sequence
  Oligonucleotide for detection of SNP TSC0024901
raatcaccttcat

SEQ ID NO: 100231 - DNA, 13 bp, Artificial Sequence
  Oligonucleotide for detection of SNP TSC0024901
acgaagatgatty

SEQ ID NO: 100232 - DNA, 13 bp, Artificial Sequence
  Oligonucleotide for detection of SNP TSC0024901
raatcatcttcgt

SEQ ID NO: 100233 - DNA, 13 bp, Artificial Sequence
  Oligonucleotide for detection of SNP TSC0024901
acgaaggtgatty

SEQ ID NO: 100234 - DNA, 13 bp, Artificial Sequence
  Oligonucleotide for detection of SNP TSC0024901
raatcaccttcgt

SEQ ID NO: 100235 - DNA, 13 bp, Artificial Sequence
  Oligonucleotide for detection of SNP TSC0024904
ggggtgtgttagy

SEQ ID NO: 100236 - DNA, 13 bp, Artificial Sequence
  Oligonucleotide for detection of SNP TSC0024904
rctaacacacccc

SEQ ID NO: 100237 - DNA, 13 bp, Artificial Sequence
  Oligonucleotide for detection of SNP TSC0024904
ggggtgcgttagy

SEQ ID NO: 100238 - DNA, 13 bp, Artificial Sequence
  Oligonucleotide for detection of SNP TSC0024904
rctaacgcacccc

SEQ ID NO: 100239 - DNA, 13 bp, Artificial Sequence
  Oligonucleotide for detection of SNP TSC0024904
gttggtgtattty

SEQ ID NO: 100240 - DNA, 13 bp, Artificial Sequence
  Oligonucleotide for detection of SNP TSC0024904
raaatacaccaac

SEQ ID NO: 100241 - DNA, 13 bp, Artificial Sequence
  Oligonucleotide for detection of SNP TSC0024904
gttggtatattty

SEQ ID NO: 100242 - DNA, 13 bp, Artificial Sequence
  Oligonucleotide for detection of SNP TSC0024904
raaatataccaac

SEQ ID NO: 100243 - DNA, 13 bp, Artificial Sequence
  Oligonucleotide for detection of SNP TSC0024904
gttggcgtattty

SEQ ID NO: 100244 - DNA, 13 bp, Artificial Sequence
  Oligonucleotide for detection of SNP TSC0024904
raaatacgccaac

SEQ ID NO: 100245 - DNA, 13 bp, Artificial Sequence
  Oligonucleotide for detection of SNP TSC0024905
tatttaaatttta

SEQ ID NO: 100246 - DNA, 13 bp, Artificial Sequence
  Oligonucleotide for detection of SNP TSC0024905
taaaatttaaata

SEQ ID NO: 100247 - DNA, 13 bp, Artificial Sequence
  Oligonucleotide for detection of SNP TSC0024905
tatttagatttta

SEQ ID NO: 100248 - DNA, 13 bp, Artificial Sequence
  Oligonucleotide for detection of SNP TSC0024905
taaaatctaaata

SEQ ID NO: 100249 - DNA, 13 bp, Artificial Sequence
  Oligonucleotide for detection of SNP TSC0024909
tatattatgtttg

SEQ ID NO: 100250 - DNA, 13 bp, Artificial Sequence
  Oligonucleotide for detection of SNP TSC0024909
caaacataatata

SEQ ID NO: 100251 - DNA, 13 bp, Artificial Sequence
  Oligonucleotide for detection of SNP TSC0024909
tatattttgtttg

SEQ ID NO: 100252 - DNA, 13 bp, Artificial Sequence
  Oligonucleotide for detection of SNP TSC0024909
caaacaaaatata

SEQ ID NO: 100253 - DNA, 13 bp, Artificial Sequence
  Oligonucleotide for detection of SNP TSC0024909
taggtatggtatg

SEQ ID NO: 100254 - DNA, 13 bp, Artificial Sequence
  Oligonucleotide for detection of SNP TSC0024909
cataccataccta

SEQ ID NO: 100255 - DNA, 13 bp, Artificial Sequence
  Oligonucleotide for detection of SNP TSC0024909
taggtaaggtatg

SEQ ID NO: 100256 - DNA, 13 bp, Artificial Sequence
  Oligonucleotide for detection of SNP TSC0024909
cataccttaccta

SEQ ID NO: 100257 - DNA, 13 bp, Artificial Sequence
  Oligonucleotide for detection of SNP TSC0024910
atgagtgtaattt

SEQ ID NO: 100258 - DNA, 13 bp, Artificial Sequence
  Oligonucleotide for detection of SNP TSC0024910
aaattacactcat

SEQ ID NO: 100259 - DNA, 13 bp, Artificial Sequence
  Oligonucleotide for detection of SNP TSC0024910
atgagtttaattt

SEQ ID NO: 100260 - DNA, 13 bp, Artificial Sequence
  Oligonucleotide for detection of SNP TSC0024910
aaattaaactcat

SEQ ID NO: 100261 - DNA, 13 bp, Artificial Sequence
  Oligonucleotide for detection of SNP TSC0024910
atgagcgtaattt

SEQ ID NO: 100262 - DNA, 13 bp, Artificial Sequence
  Oligonucleotide for detection of SNP TSC0024910
aaattacgctcat

SEQ ID NO: 100263 - DNA, 13 bp, Artificial Sequence
  Oligonucleotide for detection of SNP TSC0024910
aggttgtgtttat

SEQ ID NO: 100264 - DNA, 13 bp, Artificial Sequence
  Oligonucleotide for detection of SNP TSC0024910
ataaacacaacct

SEQ ID NO: 100265 - DNA, 13 bp, Artificial Sequence
  Oligonucleotide for detection of SNP TSC0024910
aggttgagtttat

SEQ ID NO: 100266 - DNA, 13 bp, Artificial Sequence
  Oligonucleotide for detection of SNP TSC0024910
ataaactcaacct

SEQ ID NO: 100267 - DNA, 13 bp, Artificial Sequence
  Oligonucleotide for detection of SNP TSC0024910
aggttgcgtttat

SEQ ID NO: 100268 - DNA, 13 bp, Artificial Sequence
  Oligonucleotide for detection of SNP TSC0024910
ataaacgcaacct

SEQ ID NO: 100269 - DNA, 13 bp, Artificial Sequence
  Oligonucleotide for detection of SNP TSC0024917
ggtttagagaggt

SEQ ID NO: 100270 - DNA, 13 bp, Artificial Sequence
  Oligonucleotide for detection of SNP TSC0024917
acctctctaaacc

SEQ ID NO: 100271 - DNA, 13 bp, Artificial Sequence
  Oligonucleotide for detection of SNP TSC0024917
ggtttaaagaggt

SEQ ID NO: 100272 - DNA, 13 bp, Artificial Sequence
  Oligonucleotide for detection of SNP TSC0024917
acctctttaaacc

SEQ ID NO: 100273 - DNA, 13 bp, Artificial Sequence
  Oligonucleotide for detection of SNP TSC0024918
aagtaaattaaay

SEQ ID NO: 100274 - DNA, 13 bp, Artificial Sequence
  Oligonucleotide for detection of SNP TSC0024918
rtttaatttactt

SEQ ID NO: 100275 - DNA, 13 bp, Artificial Sequence
  Oligonucleotide for detection of SNP TSC0024918
aagtaatttaaay

SEQ ID NO: 100276 - DNA, 13 bp, Artificial Sequence
  Oligonucleotide for detection of SNP TSC0024918
rtttaaattactt

SEQ ID NO: 100277 - DNA, 13 bp, Artificial Sequence
  Oligonucleotide for detection of SNP TSC0024918
gtttaatttgttt

SEQ ID NO: 100278 - DNA, 13 bp, Artificial Sequence
  Oligonucleotide for detection of SNP TSC0024918
aaacaaattaaac

SEQ ID NO: 100279 - DNA, 13 bp, Artificial Sequence
  Oligonucleotide for detection of SNP TSC0024918
gtttaaattgttt

SEQ ID NO: 100280 - DNA, 13 bp, Artificial Sequence
  Oligonucleotide for detection of SNP TSC0024918
aaacaatttaaac

SEQ ID NO: 100281 - DNA, 13 bp, Artificial Sequence
  Oligonucleotide for detection of SNP TSC0024919
ggggaaaaattta

SEQ ID NO: 100282 - DNA, 13 bp, Artificial Sequence
  Oligonucleotide for detection of SNP TSC0024919
taaatttttcccc

SEQ ID NO: 100283 - DNA, 13 bp, Artificial Sequence
  Oligonucleotide for detection of SNP TSC0024919
ggggaagaattta

SEQ ID NO: 100284 - DNA, 13 bp, Artificial Sequence
  Oligonucleotide for detection of SNP TSC0024919
taaattcttcccc

SEQ ID NO: 100285 - DNA, 13 bp, Artificial Sequence
  Oligonucleotide for detection of SNP TSC0024929
gatattatgatag

SEQ ID NO: 100286 - DNA, 13 bp, Artificial Sequence
  Oligonucleotide for detection of SNP TSC0024929
ctatcataatatc

SEQ ID NO: 100287 - DNA, 13 bp, Artificial Sequence
  Oligonucleotide for detection of SNP TSC0024929
gatattgtgatag

SEQ ID NO: 100288 - DNA, 13 bp, Artificial Sequence
  Oligonucleotide for detection of SNP TSC0024929
ctatcacaatatc

SEQ ID NO: 100289 - DNA, 13 bp, Artificial Sequence
  Oligonucleotide for detection of SNP TSC0024929
gatattacgatag

SEQ ID NO: 100290 - DNA, 13 bp, Artificial Sequence
  Oligonucleotide for detection of SNP TSC0024929
ctatcgtaatatc

SEQ ID NO: 100291 - DNA, 13 bp, Artificial Sequence
  Oligonucleotide for detection of SNP TSC0024929
gatatcgtgatag

SEQ ID NO: 100292 - DNA, 13 bp, Artificial Sequence
  Oligonucleotide for detection of SNP TSC0024929
ctatcacgatatc

SEQ ID NO: 100293 - DNA, 13 bp, Artificial Sequence
  Oligonucleotide for detection of SNP TSC0024929
gatattgcgatag

SEQ ID NO: 100294 - DNA, 13 bp, Artificial Sequence
  Oligonucleotide for detection of SNP TSC0024929
ctatcgcaatatc

SEQ ID NO: 100295 - DNA, 13 bp, Artificial Sequence
  Oligonucleotide for detection of SNP TSC0024929
gatatcgcgatag

SEQ ID NO: 100296 - DNA, 13 bp, Artificial Sequence
  Oligonucleotide for detection of SNP TSC0024929
ctatcgcgatatc

SEQ ID NO: 100297 - DNA, 13 bp, Artificial Sequence
  Oligonucleotide for detection of SNP TSC0024929
ttgttgtggtgty

SEQ ID NO: 100298 - DNA, 13 bp, Artificial Sequence
  Oligonucleotide for detection of SNP TSC0024929
racaccacaacaa

SEQ ID NO: 100299 - DNA, 13 bp, Artificial Sequence
  Oligonucleotide for detection of SNP TSC0024929
ttgtcgtggtgty

SEQ ID NO: 100300 - DNA, 13 bp, Artificial Sequence
  Oligonucleotide for detection of SNP TSC0024929
racaccacgacaa

SEQ ID NO: 100301 - DNA, 13 bp, Artificial Sequence
  Oligonucleotide for detection of SNP TSC0024929
ttgttgcggtgty

SEQ ID NO: 100302 - DNA, 13 bp, Artificial Sequence
  Oligonucleotide for detection of SNP TSC0024929
racaccgcaacaa

SEQ ID NO: 100303 - DNA, 13 bp, Artificial Sequence
  Oligonucleotide for detection of SNP TSC0024929
ttgtcgcggtgty

SEQ ID NO: 100304 - DNA, 13 bp, Artificial Sequence
  Oligonucleotide for detection of SNP TSC0024929
racaccgcgacaa

SEQ ID NO: 100305 - DNA, 13 bp, Artificial Sequence
  Oligonucleotide for detection of SNP TSC0024930
attatggttattt

SEQ ID NO: 100306 - DNA, 13 bp, Artificial Sequence
  Oligonucleotide for detection of SNP TSC0024930
aaataaccataat

SEQ ID NO: 100307 - DNA, 13 bp, Artificial Sequence
  Oligonucleotide for detection of SNP TSC0024930
attatgattattt

SEQ ID NO: 100308 - DNA, 13 bp, Artificial Sequence
  Oligonucleotide for detection of SNP TSC0024930
aaataatcataat

SEQ ID NO: 100309 - DNA, 13 bp, Artificial Sequence
  Oligonucleotide for detection of SNP TSC0024937
aggtaaggaatty

SEQ ID NO: 100310 - DNA, 13 bp, Artificial Sequence
  Oligonucleotide for detection of SNP TSC0024937
raattccttacct

SEQ ID NO: 100311 - DNA, 13 bp, Artificial Sequence
  Oligonucleotide for detection of SNP TSC0024937
aggtaaagaatty

SEQ ID NO: 100312 - DNA, 13 bp, Artificial Sequence
  Oligonucleotide for detection of SNP TSC0024937
raattctttacct

SEQ ID NO: 100313 - DNA, 13 bp, Artificial Sequence
  Oligonucleotide for detection of SNP TSC0024938
gggagagaaatty

SEQ ID NO: 100314 - DNA, 13 bp, Artificial Sequence
  Oligonucleotide for detection of SNP TSC0024938
raatttctctccc

SEQ ID NO: 100315 - DNA, 13 bp, Artificial Sequence
  Oligonucleotide for detection of SNP TSC0024938
gggagaaaaatty

SEQ ID NO: 100316 - DNA, 13 bp, Artificial Sequence
  Oligonucleotide for detection of SNP TSC0024938
raatttttctccc

SEQ ID NO: 100317 - DNA, 13 bp, Artificial Sequence
  Oligonucleotide for detection of SNP TSC0024941
ttaggtgttgtag

SEQ ID NO: 100318 - DNA, 13 bp, Artificial Sequence
  Oligonucleotide for detection of SNP TSC0024941
ctacaacacctaa

SEQ ID NO: 100319 - DNA, 13 bp, Artificial Sequence
  Oligonucleotide for detection of SNP TSC0024941
ttaggtattgtag

SEQ ID NO: 100320 - DNA, 13 bp, Artificial Sequence
  Oligonucleotide for detection of SNP TSC0024941
ctacaatacctaa

SEQ ID NO: 100321 - DNA, 13 bp, Artificial Sequence
  Oligonucleotide for detection of SNP TSC0024945
agttttaaagtgt

SEQ ID NO: 100322 - DNA, 13 bp, Artificial Sequence
  Oligonucleotide for detection of SNP TSC0024945
acactttaaaact

SEQ ID NO: 100323 - DNA, 13 bp, Artificial Sequence
  Oligonucleotide for detection of SNP TSC0024945
agttttgaagtgt

SEQ ID NO: 100324 - DNA, 13 bp, Artificial Sequence
  Oligonucleotide for detection of SNP TSC0024945
acacttcaaaact

SEQ ID NO: 100325 - DNA, 13 bp, Artificial Sequence
  Oligonucleotide for detection of SNP TSC0024949
gaaagtgagaatg

SEQ ID NO: 100326 - DNA, 13 bp, Artificial Sequence
  Oligonucleotide for detection of SNP TSC0024949
cattctcactttc

SEQ ID NO: 100327 - DNA, 13 bp, Artificial Sequence
  Oligonucleotide for detection of SNP TSC0024949
gaaagtaagaatg

SEQ ID NO: 100328 - DNA, 13 bp, Artificial Sequence
  Oligonucleotide for detection of SNP TSC0024949
cattcttactttc

SEQ ID NO: 100329 - DNA, 13 bp, Artificial Sequence
  Oligonucleotide for detection of SNP TSC0024950
tatgagtgtgttt

SEQ ID NO: 100330 - DNA, 13 bp, Artificial Sequence
  Oligonucleotide for detection of SNP TSC0024950
aaacacactcata

SEQ ID NO: 100331 - DNA, 13 bp, Artificial Sequence
  Oligonucleotide for detection of SNP TSC0024950
tatgagcgtgttt

SEQ ID NO: 100332 - DNA, 13 bp, Artificial Sequence
  Oligonucleotide for detection of SNP TSC0024950
aaacacgctcata

SEQ ID NO: 100333 - DNA, 13 bp, Artificial Sequence
  Oligonucleotide for detection of SNP TSC0024950
aggtatgtttata

SEQ ID NO: 100334 - DNA, 13 bp, Artificial Sequence
  Oligonucleotide for detection of SNP TSC0024950
tataaacatacct

SEQ ID NO: 100335 - DNA, 13 bp, Artificial Sequence
  Oligonucleotide for detection of SNP TSC0024950
aggtatatttata

SEQ ID NO: 100336 - DNA, 13 bp, Artificial Sequence
  Oligonucleotide for detection of SNP TSC0024950
tataaatatacct

SEQ ID NO: 100337 - DNA, 13 bp, Artificial Sequence
  Oligonucleotide for detection of SNP TSC0024950
aggtacgtttata

SEQ ID NO: 100338 - DNA, 13 bp, Artificial Sequence
  Oligonucleotide for detection of SNP TSC0024950
tataaacgtacct

SEQ ID NO: 100339 - DNA, 13 bp, Artificial Sequence
  Oligonucleotide for detection of SNP TSC0024951
gtttttagagtty

SEQ ID NO: 100340 - DNA, 13 bp, Artificial Sequence
  Oligonucleotide for detection of SNP TSC0024951
raactctaaaaac

SEQ ID NO: 100341 - DNA, 13 bp, Artificial Sequence
  Oligonucleotide for detection of SNP TSC0024951
gtttttggagtty

SEQ ID NO: 100342 - DNA, 13 bp, Artificial Sequence
  Oligonucleotide for detection of SNP TSC0024951
raactccaaaaac

SEQ ID NO: 100343 - DNA, 13 bp, Artificial Sequence
  Oligonucleotide for detection of SNP TSC0024953
gaaggtagttttt

SEQ ID NO: 100344 - DNA, 13 bp, Artificial Sequence
  Oligonucleotide for detection of SNP TSC0024953
aaaaactaccttc

SEQ ID NO: 100345 - DNA, 13 bp, Artificial Sequence
  Oligonucleotide for detection of SNP TSC0024953
gaaggtggttttt

SEQ ID NO: 100346 - DNA, 13 bp, Artificial Sequence
  Oligonucleotide for detection of SNP TSC0024953
aaaaaccaccttc

SEQ ID NO: 100347 - DNA, 13 bp, Artificial Sequence
  Oligonucleotide for detection of SNP TSC0024956
ttgtataattagt

SEQ ID NO: 100348 - DNA, 13 bp, Artificial Sequence
  Oligonucleotide for detection of SNP TSC0024956
actaattatacaa

SEQ ID NO: 100349 - DNA, 13 bp, Artificial Sequence
  Oligonucleotide for detection of SNP TSC0024956
ttgtattattagt

SEQ ID NO: 100350 - DNA, 13 bp, Artificial Sequence
  Oligonucleotide for detection of SNP TSC0024956
actaataatacaa

SEQ ID NO: 100351 - DNA, 13 bp, Artificial Sequence
  Oligonucleotide for detection of SNP TSC0024956
attagttatgtaa

SEQ ID NO: 100352 - DNA, 13 bp, Artificial Sequence
  Oligonucleotide for detection of SNP TSC0024956
ttacataactaat

SEQ ID NO: 100353 - DNA, 13 bp, Artificial Sequence
  Oligonucleotide for detection of SNP TSC0024956
attagtaatgtaa

SEQ ID NO: 100354 - DNA, 13 bp, Artificial Sequence
  Oligonucleotide for detection of SNP TSC0024956
ttacattactaat

SEQ ID NO: 100355 - DNA, 13 bp, Artificial Sequence
  Oligonucleotide for detection of SNP TSC0024957
aaaaagaaaataa

SEQ ID NO: 100356 - DNA, 13 bp, Artificial Sequence
  Oligonucleotide for detection of SNP TSC0024957
ttattttcttttt

SEQ ID NO: 100357 - DNA, 13 bp, Artificial Sequence
  Oligonucleotide for detection of SNP TSC0024957
aaaaagtaaataa

SEQ ID NO: 100358 - DNA, 13 bp, Artificial Sequence
  Oligonucleotide for detection of SNP TSC0024957
ttatttacttttt

SEQ ID NO: 100359 - DNA, 13 bp, Artificial Sequence
  Oligonucleotide for detection of SNP TSC0024961
ttttggaagtaga

SEQ ID NO: 100360 - DNA, 13 bp, Artificial Sequence
  Oligonucleotide for detection of SNP TSC0024961
tctacttccaaaa

SEQ ID NO: 100361 - DNA, 13 bp, Artificial Sequence
  Oligonucleotide for detection of SNP TSC0024961
ttttgggagtaga

SEQ ID NO: 100362 - DNA, 13 bp, Artificial Sequence
  Oligonucleotide for detection of SNP TSC0024961
tctactcccaaaa

SEQ ID NO: 100363 - DNA, 13 bp, Artificial Sequence
  Oligonucleotide for detection of SNP TSC0024963
gatgtatgtttgt

SEQ ID NO: 100364 - DNA, 13 bp, Artificial Sequence
  Oligonucleotide for detection of SNP TSC0024963
acaaacatacatc

SEQ ID NO: 100365 - DNA, 13 bp, Artificial Sequence
  Oligonucleotide for detection of SNP TSC0024963
gatgtacgtttgt

SEQ ID NO: 100366 - DNA, 13 bp, Artificial Sequence
  Oligonucleotide for detection of SNP TSC0024963
acaaacgtacatc

SEQ ID NO: 100367 - DNA, 13 bp, Artificial Sequence
  Oligonucleotide for detection of SNP TSC0024963
ataggtgtgtaty

SEQ ID NO: 100368 - DNA, 13 bp, Artificial Sequence
  Oligonucleotide for detection of SNP TSC0024963
ratacacacctat

SEQ ID NO: 100369 - DNA, 13 bp, Artificial Sequence
  Oligonucleotide for detection of SNP TSC0024963
ataggtatgtaty

SEQ ID NO: 100370 - DNA, 13 bp, Artificial Sequence
  Oligonucleotide for detection of SNP TSC0024963
ratacatacctat

SEQ ID NO: 100371 - DNA, 13 bp, Artificial Sequence
  Oligonucleotide for detection of SNP TSC0024963
ataggcgtgtaty

SEQ ID NO: 100372 - DNA, 13 bp, Artificial Sequence
  Oligonucleotide for detection of SNP TSC0024963
ratacacgcctat

SEQ ID NO: 100373 - DNA, 13 bp, Artificial Sequence
  Oligonucleotide for detection of SNP TSC0024965
agagaaaagaaag

SEQ ID NO: 100374 - DNA, 13 bp, Artificial Sequence
  Oligonucleotide for detection of SNP TSC0024965
ctttcttttctct

SEQ ID NO: 100375 - DNA, 13 bp, Artificial Sequence
  Oligonucleotide for detection of SNP TSC0024965
agagaatagaaag

SEQ ID NO: 100376 - DNA, 13 bp, Artificial Sequence
  Oligonucleotide for detection of SNP TSC0024965
ctttctattctct

SEQ ID NO: 100377 - DNA, 13 bp, Artificial Sequence
  Oligonucleotide for detection of SNP TSC0024966
tagtttagggaay

SEQ ID NO: 100378 - DNA, 13 bp, Artificial Sequence
  Oligonucleotide for detection of SNP TSC0024966
rttccctaaacta

SEQ ID NO: 100379 - DNA, 13 bp, Artificial Sequence
  Oligonucleotide for detection of SNP TSC0024966
tagtttggggaay

SEQ ID NO: 100380 - DNA, 13 bp, Artificial Sequence
  Oligonucleotide for detection of SNP TSC0024966
rttccccaaacta

SEQ ID NO: 100381 - DNA, 13 bp, Artificial Sequence
  Oligonucleotide for detection of SNP TSC0024968
tagttagtggaty

SEQ ID NO: 100382 - DNA, 13 bp, Artificial Sequence
  Oligonucleotide for detection of SNP TSC0024968
ratccactaacta

SEQ ID NO: 100383 - DNA, 13 bp, Artificial Sequence
  Oligonucleotide for detection of SNP TSC0024968
tagttaatggaty

SEQ ID NO: 100384 - DNA, 13 bp, Artificial Sequence
  Oligonucleotide for detection of SNP TSC0024968
ratccattaacta

SEQ ID NO: 100385 - DNA, 13 bp, Artificial Sequence
  Oligonucleotide for detection of SNP TSC0024973
ggtgggtgtggta

SEQ ID NO: 100386 - DNA, 13 bp, Artificial Sequence
  Oligonucleotide for detection of SNP TSC0024973
taccacacccacc

SEQ ID NO: 100387 - DNA, 13 bp, Artificial Sequence
  Oligonucleotide for detection of SNP TSC0024973
ggtgggcgtggta

SEQ ID NO: 100388 - DNA, 13 bp, Artificial Sequence
  Oligonucleotide for detection of SNP TSC0024973
taccacgcccacc

SEQ ID NO: 100389 - DNA, 13 bp, Artificial Sequence
  Oligonucleotide for detection of SNP TSC0024973
tattatgtttaty

SEQ ID NO: 100390 - DNA, 13 bp, Artificial Sequence
  Oligonucleotide for detection of SNP TSC0024973
rataaacataata

SEQ ID NO: 100391 - DNA, 13 bp, Artificial Sequence
  Oligonucleotide for detection of SNP TSC0024973
tattatatttaty

SEQ ID NO: 100392 - DNA, 13 bp, Artificial Sequence
  Oligonucleotide for detection of SNP TSC0024973
rataaatataata

SEQ ID NO: 100393 - DNA, 13 bp, Artificial Sequence
  Oligonucleotide for detection of SNP TSC0024973
tattacgtttaty

SEQ ID NO: 100394 - DNA, 13 bp, Artificial Sequence
  Oligonucleotide for detection of SNP TSC0024973
rataaacgtaata

SEQ ID NO: 100395 - DNA, 13 bp, Artificial Sequence
  Oligonucleotide for detection of SNP TSC0024977
ttgttaattagga

SEQ ID NO: 100396 - DNA, 13 bp, Artificial Sequence
  Oligonucleotide for detection of SNP TSC0024977
tcctaattaacaa

SEQ ID NO: 100397 - DNA, 13 bp, Artificial Sequence
  Oligonucleotide for detection of SNP TSC0024977
ttgttagttagga

SEQ ID NO: 100398 - DNA, 13 bp, Artificial Sequence
  Oligonucleotide for detection of SNP TSC0024977
tcctaactaacaa

SEQ ID NO: 100399 - DNA, 13 bp, Artificial Sequence
  Oligonucleotide for detection of SNP TSC0024987
tttttatgttgga

SEQ ID NO: 100400 - DNA, 13 bp, Artificial Sequence
  Oligonucleotide for detection of SNP TSC0024987
tccaacataaaaa

SEQ ID NO: 100401 - DNA, 13 bp, Artificial Sequence
  Oligonucleotide for detection of SNP TSC0024987
tttagtttggggg

SEQ ID NO: 100402 - DNA, 13 bp, Artificial Sequence
  Oligonucleotide for detection of SNP TSC0024987
cccccaaactaaa

SEQ ID NO: 100403 - DNA, 13 bp, Artificial Sequence
  Oligonucleotide for detection of SNP TSC0024987
tttagtatggggg

SEQ ID NO: 100404 - DNA, 13 bp, Artificial Sequence
  Oligonucleotide for detection of SNP TSC0024987
cccccatactaaa

SEQ ID NO: 100405 - DNA, 13 bp, Artificial Sequence
  Oligonucleotide for detection of SNP TSC0024988
gtttttaggaggy

SEQ ID NO: 100406 - DNA, 13 bp, Artificial Sequence
  Oligonucleotide for detection of SNP TSC0024988
rcctcctaaaaac

SEQ ID NO: 100407 - DNA, 13 bp, Artificial Sequence
  Oligonucleotide for detection of SNP TSC0024988
gttttttggaggy

SEQ ID NO: 100408 - DNA, 13 bp, Artificial Sequence
  Oligonucleotide for detection of SNP TSC0024988
rcctccaaaaaac

SEQ ID NO: 100409 - DNA, 13 bp, Artificial Sequence
  Oligonucleotide for detection of SNP TSC0024988
gtttttcggaggy

SEQ ID NO: 100410 - DNA, 13 bp, Artificial Sequence
  Oligonucleotide for detection of SNP TSC0024988
rcctccgaaaaac

SEQ ID NO: 100411 - DNA, 13 bp, Artificial Sequence
  Oligonucleotide for detection of SNP TSC0024988
gttttttaaaaay

SEQ ID NO: 100412 - DNA, 13 bp, Artificial Sequence
  Oligonucleotide for detection of SNP TSC0024988
rtttttaaaaaac

SEQ ID NO: 100413 - DNA, 13 bp, Artificial Sequence
  Oligonucleotide for detection of SNP TSC0024988
gtttttgaaaaay

SEQ ID NO: 100414 - DNA, 13 bp, Artificial Sequence
  Oligonucleotide for detection of SNP TSC0024988
rtttttcaaaaac

SEQ ID NO: 100415 - DNA, 13 bp, Artificial Sequence
  Oligonucleotide for detection of SNP TSC0024988
gttttcgaaaaay

SEQ ID NO: 100416 - DNA, 13 bp, Artificial Sequence
  Oligonucleotide for detection of SNP TSC0024988
rtttttcgaaaac

SEQ ID NO: 100417 - DNA, 13 bp, Artificial Sequence
  Oligonucleotide for detection of SNP TSC0024989
gttgtttttattg

SEQ ID NO: 100418 - DNA, 13 bp, Artificial Sequence
  Oligonucleotide for detection of SNP TSC0024989
caataaaaacaac

SEQ ID NO: 100419 - DNA, 13 bp, Artificial Sequence
  Oligonucleotide for detection of SNP TSC0024989
gttgttgttattg

SEQ ID NO: 100420 - DNA, 13 bp, Artificial Sequence
  Oligonucleotide for detection of SNP TSC0024989
caataacaacaac

SEQ ID NO: 100421 - DNA, 13 bp, Artificial Sequence
  Oligonucleotide for detection of SNP TSC0024989
gttgtcgttattg

SEQ ID NO: 100422 - DNA, 13 bp, Artificial Sequence
  Oligonucleotide for detection of SNP TSC0024989
caataacgacaac

SEQ ID NO: 100423 - DNA, 13 bp, Artificial Sequence
  Oligonucleotide for detection of SNP TSC0024989
taataaggataay

SEQ ID NO: 100424 - DNA, 13 bp, Artificial Sequence
  Oligonucleotide for detection of SNP TSC0024989
rttatccttatta

SEQ ID NO: 100425 - DNA, 13 bp, Artificial Sequence
  Oligonucleotide for detection of SNP TSC0024989
taataatgataay

SEQ ID NO: 100426 - DNA, 13 bp, Artificial Sequence
  Oligonucleotide for detection of SNP TSC0024989
rttatcattatta

SEQ ID NO: 100427 - DNA, 13 bp, Artificial Sequence
  Oligonucleotide for detection of SNP TSC0024989
taataacgataay

SEQ ID NO: 100428 - DNA, 13 bp, Artificial Sequence
  Oligonucleotide for detection of SNP TSC0024989
rttatcgttatta

SEQ ID NO: 100429 - DNA, 13 bp, Artificial Sequence
  Oligonucleotide for detection of SNP TSC0024990
gtttttattgttg

SEQ ID NO: 100430 - DNA, 13 bp, Artificial Sequence
  Oligonucleotide for detection of SNP TSC0024990
caacaataaaaac

SEQ ID NO: 100431 - DNA, 13 bp, Artificial Sequence
  Oligonucleotide for detection of SNP TSC0024998
gaatgtatggtta

SEQ ID NO: 100432 - DNA, 13 bp, Artificial Sequence
  Oligonucleotide for detection of SNP TSC0024998
taaccatacattc

SEQ ID NO: 100433 - DNA, 13 bp, Artificial Sequence
  Oligonucleotide for detection of SNP TSC0024998
gaatgtgtggtta

SEQ ID NO: 100434 - DNA, 13 bp, Artificial Sequence
  Oligonucleotide for detection of SNP TSC0024998
taaccacacattc

SEQ ID NO: 100435 - DNA, 13 bp, Artificial Sequence
  Oligonucleotide for detection of SNP TSC0024998
gaatgcgtggtta

SEQ ID NO: 100436 - DNA, 13 bp, Artificial Sequence
  Oligonucleotide for detection of SNP TSC0024998
taaccacgcattc

SEQ ID NO: 100437 - DNA, 13 bp, Artificial Sequence
  Oligonucleotide for detection of SNP TSC0024998
taattatgtatty

SEQ ID NO: 100438 - DNA, 13 bp, Artificial Sequence
  Oligonucleotide for detection of SNP TSC0024998
raatacataatta

SEQ ID NO: 100439 - DNA, 13 bp, Artificial Sequence
  Oligonucleotide for detection of SNP TSC0024998
taattacgtatty

SEQ ID NO: 100440 - DNA, 13 bp, Artificial Sequence
  Oligonucleotide for detection of SNP TSC0024998
raatacgtaatta

SEQ ID NO: 100441 - DNA, 13 bp, Artificial Sequence
  Oligonucleotide for detection of SNP TSC0024999
ggggatggagaat

SEQ ID NO: 100442 - DNA, 13 bp, Artificial Sequence
  Oligonucleotide for detection of SNP TSC0024999
attctccatcccc

SEQ ID NO: 100443 - DNA, 13 bp, Artificial Sequence
  Oligonucleotide for detection of SNP TSC0024999
ggggatagagaat

SEQ ID NO: 100444 - DNA, 13 bp, Artificial Sequence
  Oligonucleotide for detection of SNP TSC0024999
attctctatcccc

SEQ ID NO: 100445 - DNA, 13 bp, Artificial Sequence
  Oligonucleotide for detection of SNP TSC0024999
ggggacggagaat

SEQ ID NO: 100446 - DNA, 13 bp, Artificial Sequence
  Oligonucleotide for detection of SNP TSC0024999
attctccgtcccc

SEQ ID NO: 100447 - DNA, 13 bp, Artificial Sequence
  Oligonucleotide for detection of SNP TSC0025000
aaggggtgggttt

SEQ ID NO: 100448 - DNA, 13 bp, Artificial Sequence
  Oligonucleotide for detection of SNP TSC0025000
aaacccacccctt

SEQ ID NO: 100449 - DNA, 13 bp, Artificial Sequence
  Oligonucleotide for detection of SNP TSC0025000
aaggggcgggttt

SEQ ID NO: 100450 - DNA, 13 bp, Artificial Sequence
  Oligonucleotide for detection of SNP TSC0025000
aaacccgcccctt

SEQ ID NO: 100451 - DNA, 13 bp, Artificial Sequence
  Oligonucleotide for detection of SNP TSC0025000
aggtttgtttttt

SEQ ID NO: 100452 - DNA, 13 bp, Artificial Sequence
  Oligonucleotide for detection of SNP TSC0025000
aaaaaacaaacct

SEQ ID NO: 100453 - DNA, 13 bp, Artificial Sequence
  Oligonucleotide for detection of SNP TSC0025000
aggtttatttttt

SEQ ID NO: 100454 - DNA, 13 bp, Artificial Sequence
  Oligonucleotide for detection of SNP TSC0025000
aaaaaataaacct

SEQ ID NO: 100455 - DNA, 13 bp, Artificial Sequence
  Oligonucleotide for detection of SNP TSC0025000
aggttcgtttttt

SEQ ID NO: 100456 - DNA, 13 bp, Artificial Sequence
  Oligonucleotide for detection of SNP TSC0025000
aaaaaacgaacct

SEQ ID NO: 100457 - DNA, 13 bp, Artificial Sequence
  Oligonucleotide for detection of SNP TSC0025001
tttgggtaatttt

SEQ ID NO: 100458 - DNA, 13 bp, Artificial Sequence
  Oligonucleotide for detection of SNP TSC0025001
aaaattacccaaa

SEQ ID NO: 100459 - DNA, 13 bp, Artificial Sequence
  Oligonucleotide for detection of SNP TSC0025001
tttggggaatttt

SEQ ID NO: 100460 - DNA, 13 bp, Artificial Sequence
  Oligonucleotide for detection of SNP TSC0025001
aaaattccccaaa

SEQ ID NO: 100461 - DNA, 13 bp, Artificial Sequence
  Oligonucleotide for detection of SNP TSC0025001
agggttgtttagg

SEQ ID NO: 100462 - DNA, 13 bp, Artificial Sequence
  Oligonucleotide for detection of SNP TSC0025001
cctaaacaaccct

SEQ ID NO: 100463 - DNA, 13 bp, Artificial Sequence
  Oligonucleotide for detection of SNP TSC0025001
agggttttttagg

SEQ ID NO: 100464 - DNA, 13 bp, Artificial Sequence
  Oligonucleotide for detection of SNP TSC0025001
cctaaaaaaccct

SEQ ID NO: 100465 - DNA, 13 bp, Artificial Sequence
  Oligonucleotide for detection of SNP TSC0025002
ttgttttggatty

SEQ ID NO: 100466 - DNA, 13 bp, Artificial Sequence
  Oligonucleotide for detection of SNP TSC0025002
raatccaaaacaa

SEQ ID NO: 100467 - DNA, 13 bp, Artificial Sequence
  Oligonucleotide for detection of SNP TSC0025002
ttgtttcggatty

SEQ ID NO: 100468 - DNA, 13 bp, Artificial Sequence
  Oligonucleotide for detection of SNP TSC0025002
raatccgaaacaa

SEQ ID NO: 100469 - DNA, 13 bp, Artificial Sequence
  Oligonucleotide for detection of SNP TSC0025002
gagtttgaggtag

SEQ ID NO: 100470 - DNA, 13 bp, Artificial Sequence
  Oligonucleotide for detection of SNP TSC0025002
ctacctcaaactc

SEQ ID NO: 100471 - DNA, 13 bp, Artificial Sequence
  Oligonucleotide for detection of SNP TSC0025002
gagtttaaggtag

SEQ ID NO: 100472 - DNA, 13 bp, Artificial Sequence
  Oligonucleotide for detection of SNP TSC0025002
ctaccttaaactc

SEQ ID NO: 100473 - DNA, 13 bp, Artificial Sequence
  Oligonucleotide for detection of SNP TSC0025002
gagttcgaggtag

SEQ ID NO: 100474 - DNA, 13 bp, Artificial Sequence
  Oligonucleotide for detection of SNP TSC0025002
ctacctcgaactc

SEQ ID NO: 100475 - DNA, 13 bp, Artificial Sequence
  Oligonucleotide for detection of SNP TSC0025003
ttttcgattattt

SEQ ID NO: 100476 - DNA, 13 bp, Artificial Sequence
  Oligonucleotide for detection of SNP TSC0025003
aaataatcgaaaa

SEQ ID NO: 100477 - DNA, 13 bp, Artificial Sequence
  Oligonucleotide for detection of SNP TSC0025003
ttttcggttattt

SEQ ID NO: 100478 - DNA, 13 bp, Artificial Sequence
  Oligonucleotide for detection of SNP TSC0025003
aaataaccgaaaa

SEQ ID NO: 100479 - DNA, 13 bp, Artificial Sequence
  Oligonucleotide for detection of SNP TSC0025006
aatgttatggtat

SEQ ID NO: 100480 - DNA, 13 bp, Artificial Sequence
  Oligonucleotide for detection of SNP TSC0025006
ataccataacatt

SEQ ID NO: 100481 - DNA, 13 bp, Artificial Sequence
  Oligonucleotide for detection of SNP TSC0025006
aatgttgtggtat

SEQ ID NO: 100482 - DNA, 13 bp, Artificial Sequence
  Oligonucleotide for detection of SNP TSC0025006
ataccacaacatt

SEQ ID NO: 100483 - DNA, 13 bp, Artificial Sequence
  Oligonucleotide for detection of SNP TSC0025006
aacgttatggtat

SEQ ID NO: 100484 - DNA, 13 bp, Artificial Sequence
  Oligonucleotide for detection of SNP TSC0025006
ataccataacgtt

SEQ ID NO: 100485 - DNA, 13 bp, Artificial Sequence
  Oligonucleotide for detection of SNP TSC0025006
aacgttgtggtat

SEQ ID NO: 100486 - DNA, 13 bp, Artificial Sequence
  Oligonucleotide for detection of SNP TSC0025006
ataccacaacgtt

SEQ ID NO: 100487 - DNA, 13 bp, Artificial Sequence
  Oligonucleotide for detection of SNP TSC0025006
aatgtcgtggtat

SEQ ID NO: 100488 - DNA, 13 bp, Artificial Sequence
  Oligonucleotide for detection of SNP TSC0025006
ataccacgacatt

SEQ ID NO: 100489 - DNA, 13 bp, Artificial Sequence
  Oligonucleotide for detection of SNP TSC0025006
aacgtcgtggtat

SEQ ID NO: 100490 - DNA, 13 bp, Artificial Sequence
  Oligonucleotide for detection of SNP TSC0025006
ataccacgacgtt

SEQ ID NO: 100491 - DNA, 13 bp, Artificial Sequence
  Oligonucleotide for detection of SNP TSC0025006
atgttatggtgtt

SEQ ID NO: 100492 - DNA, 13 bp, Artificial Sequence
  Oligonucleotide for detection of SNP TSC0025006
aacaccataacat

SEQ ID NO: 100493 - DNA, 13 bp, Artificial Sequence
  Oligonucleotide for detection of SNP TSC0025006
atgttatggcgtt

SEQ ID NO: 100494 - DNA, 13 bp, Artificial Sequence
  Oligonucleotide for detection of SNP TSC0025006
aacgccataacat

SEQ ID NO: 100495 - DNA, 13 bp, Artificial Sequence
  Oligonucleotide for detection of SNP TSC0025006
atgttacggtgtt

SEQ ID NO: 100496 - DNA, 13 bp, Artificial Sequence
  Oligonucleotide for detection of SNP TSC0025006
aacaccgtaacat

SEQ ID NO: 100497 - DNA, 13 bp, Artificial Sequence
  Oligonucleotide for detection of SNP TSC0025006
atgttacggcgtt

SEQ ID NO: 100498 - DNA, 13 bp, Artificial Sequence
  Oligonucleotide for detection of SNP TSC0025006
aacgccgtaacat

SEQ ID NO: 100499 - DNA, 13 bp, Artificial Sequence
  Oligonucleotide for detection of SNP TSC0025007
ttttggtgaaaga

SEQ ID NO: 100500 - DNA, 13 bp, Artificial Sequence
  Oligonucleotide for detection of SNP TSC0025007
tctttcaccaaaa

SEQ ID NO: 100501 - DNA, 13 bp, Artificial Sequence
  Oligonucleotide for detection of SNP TSC0025007
ttttggcgaaaga

SEQ ID NO: 100502 - DNA, 13 bp, Artificial Sequence
  Oligonucleotide for detection of SNP TSC0025007
tctttcgccaaaa

SEQ ID NO: 100503 - DNA, 13 bp, Artificial Sequence
  Oligonucleotide for detection of SNP TSC0025007
tttttcgttagga

SEQ ID NO: 100504 - DNA, 13 bp, Artificial Sequence
  Oligonucleotide for detection of SNP TSC0025007
tcctaacgaaaaa

SEQ ID NO: 100505 - DNA, 13 bp, Artificial Sequence
  Oligonucleotide for detection of SNP TSC0025008
aaatgtgtataaa

SEQ ID NO: 100506 - DNA, 13 bp, Artificial Sequence
  Oligonucleotide for detection of SNP TSC0025008
tttatacacattt

SEQ ID NO: 100507 - DNA, 13 bp, Artificial Sequence
  Oligonucleotide for detection of SNP TSC0025008
aaatgtttataaa

SEQ ID NO: 100508 - DNA, 13 bp, Artificial Sequence
  Oligonucleotide for detection of SNP TSC0025008
tttataaacattt

SEQ ID NO: 100509 - DNA, 13 bp, Artificial Sequence
  Oligonucleotide for detection of SNP TSC0025008
tttgtgtatattt

SEQ ID NO: 100510 - DNA, 13 bp, Artificial Sequence
  Oligonucleotide for detection of SNP TSC0025008
aaatatacacaaa

SEQ ID NO: 100511 - DNA, 13 bp, Artificial Sequence
  Oligonucleotide for detection of SNP TSC0025008
tttgtgaatattt

SEQ ID NO: 100512 - DNA, 13 bp, Artificial Sequence
  Oligonucleotide for detection of SNP TSC0025008
aaatattcacaaa

SEQ ID NO: 100513 - DNA, 13 bp, Artificial Sequence
  Oligonucleotide for detection of SNP TSC0025009
aaattggttaaaa

SEQ ID NO: 100514 - DNA, 13 bp, Artificial Sequence
  Oligonucleotide for detection of SNP TSC0025009
ttttaaccaattt

SEQ ID NO: 100515 - DNA, 13 bp, Artificial Sequence
  Oligonucleotide for detection of SNP TSC0025009
aaattgtttaaaa

SEQ ID NO: 100516 - DNA, 13 bp, Artificial Sequence
  Oligonucleotide for detection of SNP TSC0025009
ttttaaacaattt

SEQ ID NO: 100517 - DNA, 13 bp, Artificial Sequence
  Oligonucleotide for detection of SNP TSC0025009
ttttagatagttt

SEQ ID NO: 100518 - DNA, 13 bp, Artificial Sequence
  Oligonucleotide for detection of SNP TSC0025009
aaactatctaaaa

SEQ ID NO: 100519 - DNA, 13 bp, Artificial Sequence
  Oligonucleotide for detection of SNP TSC0025010
aagttttaggggy

SEQ ID NO: 100520 - DNA, 13 bp, Artificial Sequence
  Oligonucleotide for detection of SNP TSC0025010
rcccctaaaactt

SEQ ID NO: 100521 - DNA, 13 bp, Artificial Sequence
  Oligonucleotide for detection of SNP TSC0025010
aagtttgaggggy

SEQ ID NO: 100522 - DNA, 13 bp, Artificial Sequence
  Oligonucleotide for detection of SNP TSC0025010
rcccctcaaactt

SEQ ID NO: 100523 - DNA, 13 bp, Artificial Sequence
  Oligonucleotide for detection of SNP TSC0025010
aagttcgaggggy

SEQ ID NO: 100524 - DNA, 13 bp, Artificial Sequence
  Oligonucleotide for detection of SNP TSC0025010
rcccctcgaactt

SEQ ID NO: 100525 - DNA, 13 bp, Artificial Sequence
  Oligonucleotide for detection of SNP TSC0025010
gtttttggagttt

SEQ ID NO: 100526 - DNA, 13 bp, Artificial Sequence
  Oligonucleotide for detection of SNP TSC0025010
aaactccaaaaac

SEQ ID NO: 100527 - DNA, 13 bp, Artificial Sequence
  Oligonucleotide for detection of SNP TSC0025010
gttttttgagttt

SEQ ID NO: 100528 - DNA, 13 bp, Artificial Sequence
  Oligonucleotide for detection of SNP TSC0025010
aaactcaaaaaac

SEQ ID NO: 100529 - DNA, 13 bp, Artificial Sequence
  Oligonucleotide for detection of SNP TSC0025010
gtttttcgagttt

SEQ ID NO: 100530 - DNA, 13 bp, Artificial Sequence
  Oligonucleotide for detection of SNP TSC0025010
aaactcgaaaaac

SEQ ID NO: 100531 - DNA, 13 bp, Artificial Sequence
  Oligonucleotide for detection of SNP TSC0025011
tatttttttttay

SEQ ID NO: 100532 - DNA, 13 bp, Artificial Sequence
  Oligonucleotide for detection of SNP TSC0025011
rtaaaaaaaaata

SEQ ID NO: 100533 - DNA, 13 bp, Artificial Sequence
  Oligonucleotide for detection of SNP TSC0025011
gtgagggaaaatg

SEQ ID NO: 100534 - DNA, 13 bp, Artificial Sequence
  Oligonucleotide for detection of SNP TSC0025011
cattttccctcac

SEQ ID NO: 100535 - DNA, 13 bp, Artificial Sequence
  Oligonucleotide for detection of SNP TSC0025011
gtgaggtaaaatg

SEQ ID NO: 100536 - DNA, 13 bp, Artificial Sequence
  Oligonucleotide for detection of SNP TSC0025011
cattttacctcac

SEQ ID NO: 100537 - DNA, 13 bp, Artificial Sequence
  Oligonucleotide for detection of SNP TSC0025012
taatataagaagy

SEQ ID NO: 100538 - DNA, 13 bp, Artificial Sequence
  Oligonucleotide for detection of SNP TSC0025012
rcttcttatatta

SEQ ID NO: 100539 - DNA, 13 bp, Artificial Sequence
  Oligonucleotide for detection of SNP TSC0025012
taatattagaagy

SEQ ID NO: 100540 - DNA, 13 bp, Artificial Sequence
  Oligonucleotide for detection of SNP TSC0025012
rcttctaatatta

SEQ ID NO: 100541 - DNA, 13 bp, Artificial Sequence
  Oligonucleotide for detection of SNP TSC0025012
gttttttatattg

SEQ ID NO: 100542 - DNA, 13 bp, Artificial Sequence
  Oligonucleotide for detection of SNP TSC0025012
caatataaaaaac

SEQ ID NO: 100543 - DNA, 13 bp, Artificial Sequence
  Oligonucleotide for detection of SNP TSC0025013
aatataagaagta

SEQ ID NO: 100544 - DNA, 13 bp, Artificial Sequence
  Oligonucleotide for detection of SNP TSC0025013
tacttcttatatt

SEQ ID NO: 100545 - DNA, 13 bp, Artificial Sequence
  Oligonucleotide for detection of SNP TSC0025013
aatatatgaagta

SEQ ID NO: 100546 - DNA, 13 bp, Artificial Sequence
  Oligonucleotide for detection of SNP TSC0025013
tacttcatatatt

SEQ ID NO: 100547 - DNA, 13 bp, Artificial Sequence
  Oligonucleotide for detection of SNP TSC0025013
tgttttttatatt

SEQ ID NO: 100548 - DNA, 13 bp, Artificial Sequence
  Oligonucleotide for detection of SNP TSC0025013
aatataaaaaaca

SEQ ID NO: 100549 - DNA, 13 bp, Artificial Sequence
  Oligonucleotide for detection of SNP TSC0025013
tgttttatatatt

SEQ ID NO: 100550 - DNA, 13 bp, Artificial Sequence
  Oligonucleotide for detection of SNP TSC0025013
aatatataaaaca

SEQ ID NO: 100551 - DNA, 13 bp, Artificial Sequence
  Oligonucleotide for detection of SNP TSC0025014
agatgggatgtty

SEQ ID NO: 100552 - DNA, 13 bp, Artificial Sequence
  Oligonucleotide for detection of SNP TSC0025014
raacatcccatct

SEQ ID NO: 100553 - DNA, 13 bp, Artificial Sequence
  Oligonucleotide for detection of SNP TSC0025014
agatggaatgtty

SEQ ID NO: 100554 - DNA, 13 bp, Artificial Sequence
  Oligonucleotide for detection of SNP TSC0025014
raacattccatct

SEQ ID NO: 100555 - DNA, 13 bp, Artificial Sequence
  Oligonucleotide for detection of SNP TSC0025016
tataatgggatgg

SEQ ID NO: 100556 - DNA, 13 bp, Artificial Sequence
  Oligonucleotide for detection of SNP TSC0025016
ccatcccattata

SEQ ID NO: 100557 - DNA, 13 bp, Artificial Sequence
  Oligonucleotide for detection of SNP TSC0025016
tataataggatgg

SEQ ID NO: 100558 - DNA, 13 bp, Artificial Sequence
  Oligonucleotide for detection of SNP TSC0025016
ccatcctattata

SEQ ID NO: 100559 - DNA, 13 bp, Artificial Sequence
  Oligonucleotide for detection of SNP TSC0025016
tataacgggatgg

SEQ ID NO: 100560 - DNA, 13 bp, Artificial Sequence
  Oligonucleotide for detection of SNP TSC0025016
ccatcccgttata

SEQ ID NO: 100561 - DNA, 13 bp, Artificial Sequence
  Oligonucleotide for detection of SNP TSC0025018
taggagattatag

SEQ ID NO: 100562 - DNA, 13 bp, Artificial Sequence
  Oligonucleotide for detection of SNP TSC0025018
ctataatctccta

SEQ ID NO: 100563 - DNA, 13 bp, Artificial Sequence
  Oligonucleotide for detection of SNP TSC0025018
taggagtttatag

SEQ ID NO: 100564 - DNA, 13 bp, Artificial Sequence
  Oligonucleotide for detection of SNP TSC0025018
ctataaactccta

SEQ ID NO: 100565 - DNA, 13 bp, Artificial Sequence
  Oligonucleotide for detection of SNP TSC0025018
ttatagttttttg

SEQ ID NO: 100566 - DNA, 13 bp, Artificial Sequence
  Oligonucleotide for detection of SNP TSC0025018
caaaaaactataa

SEQ ID NO: 100567 - DNA, 13 bp, Artificial Sequence
  Oligonucleotide for detection of SNP TSC0025018
ttatagatttttg

SEQ ID NO: 100568 - DNA, 13 bp, Artificial Sequence
  Oligonucleotide for detection of SNP TSC0025018
caaaaatctataa

SEQ ID NO: 100569 - DNA, 13 bp, Artificial Sequence
  Oligonucleotide for detection of SNP TSC0025019
ttggtgattttay

SEQ ID NO: 100570 - DNA, 13 bp, Artificial Sequence
  Oligonucleotide for detection of SNP TSC0025019
rtaaaatcaccaa

SEQ ID NO: 100571 - DNA, 13 bp, Artificial Sequence
  Oligonucleotide for detection of SNP TSC0025019
ttggtgtttttay

SEQ ID NO: 100572 - DNA, 13 bp, Artificial Sequence
  Oligonucleotide for detection of SNP TSC0025019
rtaaaaacaccaa

SEQ ID NO: 100573 - DNA, 13 bp, Artificial Sequence
  Oligonucleotide for detection of SNP TSC0025019
tcggtgattttay

SEQ ID NO: 100574 - DNA, 13 bp, Artificial Sequence
  Oligonucleotide for detection of SNP TSC0025019
rtaaaatcaccga

SEQ ID NO: 100575 - DNA, 13 bp, Artificial Sequence
  Oligonucleotide for detection of SNP TSC0025019
tcggtgtttttay

SEQ ID NO: 100576 - DNA, 13 bp, Artificial Sequence
  Oligonucleotide for detection of SNP TSC0025019
rtaaaaacaccga

SEQ ID NO: 100577 - DNA, 13 bp, Artificial Sequence
  Oligonucleotide for detection of SNP TSC0025019
gtgaaattattgg

SEQ ID NO: 100578 - DNA, 13 bp, Artificial Sequence
  Oligonucleotide for detection of SNP TSC0025019
ccaataatttcac

SEQ ID NO: 100579 - DNA, 13 bp, Artificial Sequence
  Oligonucleotide for detection of SNP TSC0025019
gtgaaagtattgg

SEQ ID NO: 100580 - DNA, 13 bp, Artificial Sequence
  Oligonucleotide for detection of SNP TSC0025019
ccaatactttcac

SEQ ID NO: 100581 - DNA, 13 bp, Artificial Sequence
  Oligonucleotide for detection of SNP TSC0025019
gtgaaattatcgg

SEQ ID NO: 100582 - DNA, 13 bp, Artificial Sequence
  Oligonucleotide for detection of SNP TSC0025019
ccgataatttcac

SEQ ID NO: 100583 - DNA, 13 bp, Artificial Sequence
  Oligonucleotide for detection of SNP TSC0025019
gtgaaagtatcgg

SEQ ID NO: 100584 - DNA, 13 bp, Artificial Sequence
  Oligonucleotide for detection of SNP TSC0025019
ccgatactttcac

SEQ ID NO: 100585 - DNA, 13 bp, Artificial Sequence
  Oligonucleotide for detection of SNP TSC0025021
aaatggagaaggg

SEQ ID NO: 100586 - DNA, 13 bp, Artificial Sequence
  Oligonucleotide for detection of SNP TSC0025021
cccttctccattt

SEQ ID NO: 100587 - DNA, 13 bp, Artificial Sequence
  Oligonucleotide for detection of SNP TSC0025021
aaatggggaaggg

SEQ ID NO: 100588 - DNA, 13 bp, Artificial Sequence
  Oligonucleotide for detection of SNP TSC0025021
cccttccccattt

SEQ ID NO: 100589 - DNA, 13 bp, Artificial Sequence
  Oligonucleotide for detection of SNP TSC0025022
ataattgattatt

SEQ ID NO: 100590 - DNA, 13 bp, Artificial Sequence
  Oligonucleotide for detection of SNP TSC0025022
aataatcaattat

SEQ ID NO: 100591 - DNA, 13 bp, Artificial Sequence
  Oligonucleotide for detection of SNP TSC0025022
ataattaattatt

SEQ ID NO: 100592 - DNA, 13 bp, Artificial Sequence
  Oligonucleotide for detection of SNP TSC0025022
aataattaattat

SEQ ID NO: 100593 - DNA, 13 bp, Artificial Sequence
  Oligonucleotide for detection of SNP TSC0025023
gagagagttttaa

SEQ ID NO: 100594 - DNA, 13 bp, Artificial Sequence
  Oligonucleotide for detection of SNP TSC0025023
ttaaaactctctc

SEQ ID NO: 100595 - DNA, 13 bp, Artificial Sequence
  Oligonucleotide for detection of SNP TSC0025023
gagagaattttaa

SEQ ID NO: 100596 - DNA, 13 bp, Artificial Sequence
  Oligonucleotide for detection of SNP TSC0025023
ttaaaattctctc

SEQ ID NO: 100597 - DNA, 13 bp, Artificial Sequence
  Oligonucleotide for detection of SNP TSC0025024
atattggttattt

SEQ ID NO: 100598 - DNA, 13 bp, Artificial Sequence
  Oligonucleotide for detection of SNP TSC0025024
aaataaccaatat

SEQ ID NO: 100599 - DNA, 13 bp, Artificial Sequence
  Oligonucleotide for detection of SNP TSC0025024
atattgtttattt

SEQ ID NO: 100600 - DNA, 13 bp, Artificial Sequence
  Oligonucleotide for detection of SNP TSC0025024
aaataaacaatat

SEQ ID NO: 100601 - DNA, 13 bp, Artificial Sequence
  Oligonucleotide for detection of SNP TSC0025024
aggtagttagtat

SEQ ID NO: 100602 - DNA, 13 bp, Artificial Sequence
  Oligonucleotide for detection of SNP TSC0025024
atactaactacct

SEQ ID NO: 100603 - DNA, 13 bp, Artificial Sequence
  Oligonucleotide for detection of SNP TSC0025024
aggtagatagtat

SEQ ID NO: 100604 - DNA, 13 bp, Artificial Sequence
  Oligonucleotide for detection of SNP TSC0025024
atactatctacct

SEQ ID NO: 100605 - DNA, 13 bp, Artificial Sequence
  Oligonucleotide for detection of SNP TSC0025026
tttgatattagga

SEQ ID NO: 100606 - DNA, 13 bp, Artificial Sequence
  Oligonucleotide for detection of SNP TSC0025026
tcctaatatcaaa

SEQ ID NO: 100607 - DNA, 13 bp, Artificial Sequence
  Oligonucleotide for detection of SNP TSC0025026
tttgatgttagga

SEQ ID NO: 100608 - DNA, 13 bp, Artificial Sequence
  Oligonucleotide for detection of SNP TSC0025026
tcctaacatcaaa

SEQ ID NO: 100609 - DNA, 13 bp, Artificial Sequence
  Oligonucleotide for detection of SNP TSC0025026
tttgacgttagga

SEQ ID NO: 100610 - DNA, 13 bp, Artificial Sequence
  Oligonucleotide for detection of SNP TSC0025026
tcctaacgtcaaa

SEQ ID NO: 100611 - DNA, 13 bp, Artificial Sequence
  Oligonucleotide for detection of SNP TSC0025026
ttttggtgttaag

SEQ ID NO: 100612 - DNA, 13 bp, Artificial Sequence
  Oligonucleotide for detection of SNP TSC0025026
cttaacaccaaaa

SEQ ID NO: 100613 - DNA, 13 bp, Artificial Sequence
  Oligonucleotide for detection of SNP TSC0025026
ttttggcgttaag

SEQ ID NO: 100614 - DNA, 13 bp, Artificial Sequence
  Oligonucleotide for detection of SNP TSC0025026
cttaacgccaaaa

SEQ ID NO: 100615 - DNA, 13 bp, Artificial Sequence
  Oligonucleotide for detection of SNP TSC0025034
gatttataatttt

SEQ ID NO: 100616 - DNA, 13 bp, Artificial Sequence
  Oligonucleotide for detection of SNP TSC0025034
aaaattataaatc

SEQ ID NO: 100617 - DNA, 13 bp, Artificial Sequence
  Oligonucleotide for detection of SNP TSC0025034
gatttagaatttt

SEQ ID NO: 100618 - DNA, 13 bp, Artificial Sequence
  Oligonucleotide for detection of SNP TSC0025034
aaaattctaaatc

SEQ ID NO: 100619 - DNA, 13 bp, Artificial Sequence
  Oligonucleotide for detection of SNP TSC0025034
agagttgtgagty

SEQ ID NO: 100620 - DNA, 13 bp, Artificial Sequence
  Oligonucleotide for detection of SNP TSC0025034
ractcacaactct

SEQ ID NO: 100621 - DNA, 13 bp, Artificial Sequence
  Oligonucleotide for detection of SNP TSC0025034
agagttttgagty

SEQ ID NO: 100622 - DNA, 13 bp, Artificial Sequence
  Oligonucleotide for detection of SNP TSC0025034
ractcaaaactct

SEQ ID NO: 100623 - DNA, 13 bp, Artificial Sequence
  Oligonucleotide for detection of SNP TSC0025036
atgtttatagtta

SEQ ID NO: 100624 - DNA, 13 bp, Artificial Sequence
  Oligonucleotide for detection of SNP TSC0025036
taactataaacat

SEQ ID NO: 100625 - DNA, 13 bp, Artificial Sequence
  Oligonucleotide for detection of SNP TSC0025036
atgtttgtagtta

SEQ ID NO: 100626 - DNA, 13 bp, Artificial Sequence
  Oligonucleotide for detection of SNP TSC0025036
taactacaaacat

SEQ ID NO: 100627 - DNA, 13 bp, Artificial Sequence
  Oligonucleotide for detection of SNP TSC0025036
acgtttatagtta

SEQ ID NO: 100628 - DNA, 13 bp, Artificial Sequence
  Oligonucleotide for detection of SNP TSC0025036
taactataaacgt

SEQ ID NO: 100629 - DNA, 13 bp, Artificial Sequence
  Oligonucleotide for detection of SNP TSC0025036
acgtttgtagtta

SEQ ID NO: 100630 - DNA, 13 bp, Artificial Sequence
  Oligonucleotide for detection of SNP TSC0025036
taactacaaacgt

SEQ ID NO: 100631 - DNA, 13 bp, Artificial Sequence
  Oligonucleotide for detection of SNP TSC0025036
atgttcgtagtta

SEQ ID NO: 100632 - DNA, 13 bp, Artificial Sequence
  Oligonucleotide for detection of SNP TSC0025036
taactacgaacat

SEQ ID NO: 100633 - DNA, 13 bp, Artificial Sequence
  Oligonucleotide for detection of SNP TSC0025036
acgttcgtagtta

SEQ ID NO: 100634 - DNA, 13 bp, Artificial Sequence
  Oligonucleotide for detection of SNP TSC0025036
taactacgaacgt

SEQ ID NO: 100635 - DNA, 13 bp, Artificial Sequence
  Oligonucleotide for detection of SNP TSC0025036
tagttgtgaatgt

SEQ ID NO: 100636 - DNA, 13 bp, Artificial Sequence
  Oligonucleotide for detection of SNP TSC0025036
acattcacaacta

SEQ ID NO: 100637 - DNA, 13 bp, Artificial Sequence
  Oligonucleotide for detection of SNP TSC0025036
tagttgtgaacgt

SEQ ID NO: 100638 - DNA, 13 bp, Artificial Sequence
  Oligonucleotide for detection of SNP TSC0025036
acgttcacaacta

SEQ ID NO: 100639 - DNA, 13 bp, Artificial Sequence
  Oligonucleotide for detection of SNP TSC0025036
tagttgcgaatgt

SEQ ID NO: 100640 - DNA, 13 bp, Artificial Sequence
  Oligonucleotide for detection of SNP TSC0025036
acattcgcaacta

SEQ ID NO: 100641 - DNA, 13 bp, Artificial Sequence
  Oligonucleotide for detection of SNP TSC0025036
tagttgcgaacgt

SEQ ID NO: 100642 - DNA, 13 bp, Artificial Sequence
  Oligonucleotide for detection of SNP TSC0025036
acgttcgcaacta

SEQ ID NO: 100643 - DNA, 13 bp, Artificial Sequence
  Oligonucleotide for detection of SNP TSC0025037
ttagttgtgaatg

SEQ ID NO: 100644 - DNA, 13 bp, Artificial Sequence
  Oligonucleotide for detection of SNP TSC0025037
cattcacaactaa

SEQ ID NO: 100645 - DNA, 13 bp, Artificial Sequence
  Oligonucleotide for detection of SNP TSC0025037
ttagttatgaatg

SEQ ID NO: 100646 - DNA, 13 bp, Artificial Sequence
  Oligonucleotide for detection of SNP TSC0025037
cattcataactaa

SEQ ID NO: 100647 - DNA, 13 bp, Artificial Sequence
  Oligonucleotide for detection of SNP TSC0025037
ttagttgtgaacg

SEQ ID NO: 100648 - DNA, 13 bp, Artificial Sequence
  Oligonucleotide for detection of SNP TSC0025037
cgttcacaactaa

SEQ ID NO: 100649 - DNA, 13 bp, Artificial Sequence
  Oligonucleotide for detection of SNP TSC0025037
ttagttatgaacg

SEQ ID NO: 100650 - DNA, 13 bp, Artificial Sequence
  Oligonucleotide for detection of SNP TSC0025037
cgttcataactaa

SEQ ID NO: 100651 - DNA, 13 bp, Artificial Sequence
  Oligonucleotide for detection of SNP TSC0025040
attattatataat

SEQ ID NO: 100652 - DNA, 13 bp, Artificial Sequence
  Oligonucleotide for detection of SNP TSC0025040
attatataataat

SEQ ID NO: 100653 - DNA, 13 bp, Artificial Sequence
  Oligonucleotide for detection of SNP TSC0025040
attattgtataat

SEQ ID NO: 100654 - DNA, 13 bp, Artificial Sequence
  Oligonucleotide for detection of SNP TSC0025040
attatacaataat

SEQ ID NO: 100655 - DNA, 13 bp, Artificial Sequence
  Oligonucleotide for detection of SNP TSC0025040
attatcgtataat

SEQ ID NO: 100656 - DNA, 13 bp, Artificial Sequence
  Oligonucleotide for detection of SNP TSC0025040
attatacgataat

SEQ ID NO: 100657 - DNA, 13 bp, Artificial Sequence
  Oligonucleotide for detection of SNP TSC0025040
attatatggtgat

SEQ ID NO: 100658 - DNA, 13 bp, Artificial Sequence
  Oligonucleotide for detection of SNP TSC0025040
atcaccatataat

SEQ ID NO: 100659 - DNA, 13 bp, Artificial Sequence
  Oligonucleotide for detection of SNP TSC0025040
attatacggtgat

SEQ ID NO: 100660 - DNA, 13 bp, Artificial Sequence
  Oligonucleotide for detection of SNP TSC0025040
atcaccgtataat

SEQ ID NO: 100661 - DNA, 13 bp, Artificial Sequence
  Oligonucleotide for detection of SNP TSC0025043
tttatgattaaat

SEQ ID NO: 100662 - DNA, 13 bp, Artificial Sequence
  Oligonucleotide for detection of SNP TSC0025043
atttaatcataaa

SEQ ID NO: 100663 - DNA, 13 bp, Artificial Sequence
  Oligonucleotide for detection of SNP TSC0025043
tttatggttaaat

SEQ ID NO: 100664 - DNA, 13 bp, Artificial Sequence
  Oligonucleotide for detection of SNP TSC0025043
atttaaccataaa

SEQ ID NO: 100665 - DNA, 13 bp, Artificial Sequence
  Oligonucleotide for detection of SNP TSC0025046
gggttatgggtgg

SEQ ID NO: 100666 - DNA, 13 bp, Artificial Sequence
  Oligonucleotide for detection of SNP TSC0025046
ccacccataaccc

SEQ ID NO: 100667 - DNA, 13 bp, Artificial Sequence
  Oligonucleotide for detection of SNP TSC0025046
gggttacgggtgg

SEQ ID NO: 100668 - DNA, 13 bp, Artificial Sequence
  Oligonucleotide for detection of SNP TSC0025046
ccacccgtaaccc

SEQ ID NO: 100669 - DNA, 13 bp, Artificial Sequence
  Oligonucleotide for detection of SNP TSC0025046
ttatttgtagtty

SEQ ID NO: 100670 - DNA, 13 bp, Artificial Sequence
  Oligonucleotide for detection of SNP TSC0025046
raactacaaataa

SEQ ID NO: 100671 - DNA, 13 bp, Artificial Sequence
  Oligonucleotide for detection of SNP TSC0025046
ttatttatagtty

SEQ ID NO: 100672 - DNA, 13 bp, Artificial Sequence
  Oligonucleotide for detection of SNP TSC0025046
raactataaataa

SEQ ID NO: 100673 - DNA, 13 bp, Artificial Sequence
  Oligonucleotide for detection of SNP TSC0025046
ttattcgtagtty

SEQ ID NO: 100674 - DNA, 13 bp, Artificial Sequence
  Oligonucleotide for detection of SNP TSC0025046
raactacgaataa

SEQ ID NO: 100675 - DNA, 13 bp, Artificial Sequence
  Oligonucleotide for detection of SNP TSC0025047
tatttgatttaga

SEQ ID NO: 100676 - DNA, 13 bp, Artificial Sequence
  Oligonucleotide for detection of SNP TSC0025047
tctaaatcaaata

SEQ ID NO: 100677 - DNA, 13 bp, Artificial Sequence
  Oligonucleotide for detection of SNP TSC0025047
tatttggtttaga

SEQ ID NO: 100678 - DNA, 13 bp, Artificial Sequence
  Oligonucleotide for detection of SNP TSC0025047
tctaaaccaaata

SEQ ID NO: 100679 - DNA, 13 bp, Artificial Sequence
  Oligonucleotide for detection of SNP TSC0025048
tttaatgtgtttt

SEQ ID NO: 100680 - DNA, 13 bp, Artificial Sequence
  Oligonucleotide for detection of SNP TSC0025048
aaaacacattaaa

SEQ ID NO: 100681 - DNA, 13 bp, Artificial Sequence
  Oligonucleotide for detection of SNP TSC0025048
tttaatttgtttt

SEQ ID NO: 100682 - DNA, 13 bp, Artificial Sequence
  Oligonucleotide for detection of SNP TSC0025048
aaaacaaattaaa

SEQ ID NO: 100683 - DNA, 13 bp, Artificial Sequence
  Oligonucleotide for detection of SNP TSC0025048
aaagtatattaga

SEQ ID NO: 100684 - DNA, 13 bp, Artificial Sequence
  Oligonucleotide for detection of SNP TSC0025048
tctaatatacttt

SEQ ID NO: 100685 - DNA, 13 bp, Artificial Sequence
  Oligonucleotide for detection of SNP TSC0025048
aaagtaaattaga

SEQ ID NO: 100686 - DNA, 13 bp, Artificial Sequence
  Oligonucleotide for detection of SNP TSC0025048
tctaatttacttt

SEQ ID NO: 100687 - DNA, 13 bp, Artificial Sequence
  Oligonucleotide for detection of SNP TSC0025049
ttatttggttgty

SEQ ID NO: 100688 - DNA, 13 bp, Artificial Sequence
  Oligonucleotide for detection of SNP TSC0025049
racaaccaaataa

SEQ ID NO: 100689 - DNA, 13 bp, Artificial Sequence
  Oligonucleotide for detection of SNP TSC0025049
ttattcggttgty

SEQ ID NO: 100690 - DNA, 13 bp, Artificial Sequence
  Oligonucleotide for detection of SNP TSC0025049
racaaccgaataa

SEQ ID NO: 100691 - DNA, 13 bp, Artificial Sequence
  Oligonucleotide for detection of SNP TSC0025049
ggtaattgagtga

SEQ ID NO: 100692 - DNA, 13 bp, Artificial Sequence
  Oligonucleotide for detection of SNP TSC0025049
tcactcaattacc

SEQ ID NO: 100693 - DNA, 13 bp, Artificial Sequence
  Oligonucleotide for detection of SNP TSC0025049
ggtaatcgagtga

SEQ ID NO: 100694 - DNA, 13 bp, Artificial Sequence
  Oligonucleotide for detection of SNP TSC0025049
tcactcgattacc

SEQ ID NO: 100695 - DNA, 13 bp, Artificial Sequence
  Oligonucleotide for detection of SNP TSC0025050
agttgttgttaat

SEQ ID NO: 100696 - DNA, 13 bp, Artificial Sequence
  Oligonucleotide for detection of SNP TSC0025050
attaacaacaact

SEQ ID NO: 100697 - DNA, 13 bp, Artificial Sequence
  Oligonucleotide for detection of SNP TSC0025050
agttgtcgttaat

SEQ ID NO: 100698 - DNA, 13 bp, Artificial Sequence
  Oligonucleotide for detection of SNP TSC0025050
attaacgacaact

SEQ ID NO: 100699 - DNA, 13 bp, Artificial Sequence
  Oligonucleotide for detection of SNP TSC0025050
attgatggtagtt

SEQ ID NO: 100700 - DNA, 13 bp, Artificial Sequence
  Oligonucleotide for detection of SNP TSC0025050
aactaccatcaat

SEQ ID NO: 100701 - DNA, 13 bp, Artificial Sequence
  Oligonucleotide for detection of SNP TSC0025050
attgatagtagtt

SEQ ID NO: 100702 - DNA, 13 bp, Artificial Sequence
  Oligonucleotide for detection of SNP TSC0025050
aactactatcaat

SEQ ID NO: 100703 - DNA, 13 bp, Artificial Sequence
  Oligonucleotide for detection of SNP TSC0025050
attgacggtagtt

SEQ ID NO: 100704 - DNA, 13 bp, Artificial Sequence
  Oligonucleotide for detection of SNP TSC0025050
aactaccgtcaat

SEQ ID NO: 100705 - DNA, 13 bp, Artificial Sequence
  Oligonucleotide for detection of SNP TSC0025051
tagtggtggaaty

SEQ ID NO: 100706 - DNA, 13 bp, Artificial Sequence
  Oligonucleotide for detection of SNP TSC0025051
rattccaccacta

SEQ ID NO: 100707 - DNA, 13 bp, Artificial Sequence
  Oligonucleotide for detection of SNP TSC0025051
tagtggcggaaty

SEQ ID NO: 100708 - DNA, 13 bp, Artificial Sequence
  Oligonucleotide for detection of SNP TSC0025051
rattccgccacta

SEQ ID NO: 100709 - DNA, 13 bp, Artificial Sequence
  Oligonucleotide for detection of SNP TSC0025052
gtggttatatttt

SEQ ID NO: 100710 - DNA, 13 bp, Artificial Sequence
  Oligonucleotide for detection of SNP TSC0025052
aaaatataaccac

SEQ ID NO: 100711 - DNA, 13 bp, Artificial Sequence
  Oligonucleotide for detection of SNP TSC0025052
gtggttgtatttt

SEQ ID NO: 100712 - DNA, 13 bp, Artificial Sequence
  Oligonucleotide for detection of SNP TSC0025052
aaaatacaaccac

SEQ ID NO: 100713 - DNA, 13 bp, Artificial Sequence
  Oligonucleotide for detection of SNP TSC0025052
gcggttatatttt

SEQ ID NO: 100714 - DNA, 13 bp, Artificial Sequence
  Oligonucleotide for detection of SNP TSC0025052
aaaatataaccgc

SEQ ID NO: 100715 - DNA, 13 bp, Artificial Sequence
  Oligonucleotide for detection of SNP TSC0025052
gcggttgtatttt

SEQ ID NO: 100716 - DNA, 13 bp, Artificial Sequence
  Oligonucleotide for detection of SNP TSC0025052
aaaatacaaccgc

SEQ ID NO: 100717 - DNA, 13 bp, Artificial Sequence
  Oligonucleotide for detection of SNP TSC0025052
gtggtcgtatttt

SEQ ID NO: 100718 - DNA, 13 bp, Artificial Sequence
  Oligonucleotide for detection of SNP TSC0025052
aaaatacgaccac

SEQ ID NO: 100719 - DNA, 13 bp, Artificial Sequence
  Oligonucleotide for detection of SNP TSC0025052
gcggtcgtatttt

SEQ ID NO: 100720 - DNA, 13 bp, Artificial Sequence
  Oligonucleotide for detection of SNP TSC0025052
aaaatacgaccgc

SEQ ID NO: 100721 - DNA, 13 bp, Artificial Sequence
  Oligonucleotide for detection of SNP TSC0025052
aaaatgtggttgy

SEQ ID NO: 100722 - DNA, 13 bp, Artificial Sequence
  Oligonucleotide for detection of SNP TSC0025052
rcaaccacatttt

SEQ ID NO: 100723 - DNA, 13 bp, Artificial Sequence
  Oligonucleotide for detection of SNP TSC0025052
aaaatgtggtcgy

SEQ ID NO: 100724 - DNA, 13 bp, Artificial Sequence
  Oligonucleotide for detection of SNP TSC0025052
rcgaccacatttt

SEQ ID NO: 100725 - DNA, 13 bp, Artificial Sequence
  Oligonucleotide for detection of SNP TSC0025052
aaaatgcggttgy

SEQ ID NO: 100726 - DNA, 13 bp, Artificial Sequence
  Oligonucleotide for detection of SNP TSC0025052
rcaaccgcatttt

SEQ ID NO: 100727 - DNA, 13 bp, Artificial Sequence
  Oligonucleotide for detection of SNP TSC0025052
aaaatgcggtcgy

SEQ ID NO: 100728 - DNA, 13 bp, Artificial Sequence
  Oligonucleotide for detection of SNP TSC0025052
rcgaccgcatttt

SEQ ID NO: 100729 - DNA, 13 bp, Artificial Sequence
  Oligonucleotide for detection of SNP TSC0025054
gtattcgtgaaag

SEQ ID NO: 100730 - DNA, 13 bp, Artificial Sequence
  Oligonucleotide for detection of SNP TSC0025054
ctttcacgaatac

SEQ ID NO: 100731 - DNA, 13 bp, Artificial Sequence
  Oligonucleotide for detection of SNP TSC0025054
tttttatgagtgy

SEQ ID NO: 100732 - DNA, 13 bp, Artificial Sequence
  Oligonucleotide for detection of SNP TSC0025054
rcactcataaaaa

SEQ ID NO: 100733 - DNA, 13 bp, Artificial Sequence
  Oligonucleotide for detection of SNP TSC0025054
tttttacgagtgy

SEQ ID NO: 100734 - DNA, 13 bp, Artificial Sequence
  Oligonucleotide for detection of SNP TSC0025054
rcactcgtaaaaa

SEQ ID NO: 100735 - DNA, 13 bp, Artificial Sequence
  Oligonucleotide for detection of SNP TSC0025055
tggagaagtgttt

SEQ ID NO: 100736 - DNA, 13 bp, Artificial Sequence
  Oligonucleotide for detection of SNP TSC0025055
aaacacttctcca

SEQ ID NO: 100737 - DNA, 13 bp, Artificial Sequence
  Oligonucleotide for detection of SNP TSC0025055
tggagaggtgttt

SEQ ID NO: 100738 - DNA, 13 bp, Artificial Sequence
  Oligonucleotide for detection of SNP TSC0025055
aaacacctctcca

SEQ ID NO: 100739 - DNA, 13 bp, Artificial Sequence
  Oligonucleotide for detection of SNP TSC0025055
cggagaagtgttt

SEQ ID NO: 100740 - DNA, 13 bp, Artificial Sequence
  Oligonucleotide for detection of SNP TSC0025055
aaacacttctccg

SEQ ID NO: 100741 - DNA, 13 bp, Artificial Sequence
  Oligonucleotide for detection of SNP TSC0025055
cggagaggtgttt

SEQ ID NO: 100742 - DNA, 13 bp, Artificial Sequence
  Oligonucleotide for detection of SNP TSC0025055
aaacacctctccg

SEQ ID NO: 100743 - DNA, 13 bp, Artificial Sequence
  Oligonucleotide for detection of SNP TSC0025062
ggaaatattgtty

SEQ ID NO: 100744 - DNA, 13 bp, Artificial Sequence
  Oligonucleotide for detection of SNP TSC0025062
raacaatatttcc

SEQ ID NO: 100745 - DNA, 13 bp, Artificial Sequence
  Oligonucleotide for detection of SNP TSC0025062
ggaaattttgtty

SEQ ID NO: 100746 - DNA, 13 bp, Artificial Sequence
  Oligonucleotide for detection of SNP TSC0025062
raacaaaatttcc

SEQ ID NO: 100747 - DNA, 13 bp, Artificial Sequence
  Oligonucleotide for detection of SNP TSC0025062
gggtagggtttty

SEQ ID NO: 100748 - DNA, 13 bp, Artificial Sequence
  Oligonucleotide for detection of SNP TSC0025062
raaaaccctaccc

SEQ ID NO: 100749 - DNA, 13 bp, Artificial Sequence
  Oligonucleotide for detection of SNP TSC0025063
atttagttaggaa

SEQ ID NO: 100750 - DNA, 13 bp, Artificial Sequence
  Oligonucleotide for detection of SNP TSC0025063
ttcctaactaaat

SEQ ID NO: 100751 - DNA, 13 bp, Artificial Sequence
  Oligonucleotide for detection of SNP TSC0025063
atttaggtaggaa

SEQ ID NO: 100752 - DNA, 13 bp, Artificial Sequence
  Oligonucleotide for detection of SNP TSC0025063
ttcctacctaaat

SEQ ID NO: 100753 - DNA, 13 bp, Artificial Sequence
  Oligonucleotide for detection of SNP TSC0025063
tttttggttgggt

SEQ ID NO: 100754 - DNA, 13 bp, Artificial Sequence
  Oligonucleotide for detection of SNP TSC0025063
acccaaccaaaaa

SEQ ID NO: 100755 - DNA, 13 bp, Artificial Sequence
  Oligonucleotide for detection of SNP TSC0025063
tttttgtttgggt

SEQ ID NO: 100756 - DNA, 13 bp, Artificial Sequence
  Oligonucleotide for detection of SNP TSC0025063
acccaaacaaaaa

SEQ ID NO: 100757 - DNA, 13 bp, Artificial Sequence
  Oligonucleotide for detection of SNP TSC0025067
tgtttaatatagy

SEQ ID NO: 100758 - DNA, 13 bp, Artificial Sequence
  Oligonucleotide for detection of SNP TSC0025067
rctatattaaaca

SEQ ID NO: 100759 - DNA, 13 bp, Artificial Sequence
  Oligonucleotide for detection of SNP TSC0025067
tgtttagtatagy

SEQ ID NO: 100760 - DNA, 13 bp, Artificial Sequence
  Oligonucleotide for detection of SNP TSC0025067
rctatactaaaca

SEQ ID NO: 100761 - DNA, 13 bp, Artificial Sequence
  Oligonucleotide for detection of SNP TSC0025068
tgtgggggttgtg

SEQ ID NO: 100762 - DNA, 13 bp, Artificial Sequence
  Oligonucleotide for detection of SNP TSC0025068
cacaacccccaca

SEQ ID NO: 100763 - DNA, 13 bp, Artificial Sequence
  Oligonucleotide for detection of SNP TSC0025068
tgtgggagttgtg

SEQ ID NO: 100764 - DNA, 13 bp, Artificial Sequence
  Oligonucleotide for detection of SNP TSC0025068
cacaactcccaca

SEQ ID NO: 100765 - DNA, 13 bp, Artificial Sequence
  Oligonucleotide for detection of SNP TSC0025068
cgtgggggttgtg

SEQ ID NO: 100766 - DNA, 13 bp, Artificial Sequence
  Oligonucleotide for detection of SNP TSC0025068
cacaacccccacg

SEQ ID NO: 100767 - DNA, 13 bp, Artificial Sequence
  Oligonucleotide for detection of SNP TSC0025068
cgtgggagttgtg

SEQ ID NO: 100768 - DNA, 13 bp, Artificial Sequence
  Oligonucleotide for detection of SNP TSC0025068
cacaactcccacg

SEQ ID NO: 100769 - DNA, 13 bp, Artificial Sequence
  Oligonucleotide for detection of SNP TSC0025069
ataataaggattg

SEQ ID NO: 100770 - DNA, 13 bp, Artificial Sequence
  Oligonucleotide for detection of SNP TSC0025069
caatccttattat

SEQ ID NO: 100771 - DNA, 13 bp, Artificial Sequence
  Oligonucleotide for detection of SNP TSC0025069
ataatagggattg

SEQ ID NO: 100772 - DNA, 13 bp, Artificial Sequence
  Oligonucleotide for detection of SNP TSC0025069
caatccctattat

SEQ ID NO: 100773 - DNA, 13 bp, Artificial Sequence
  Oligonucleotide for detection of SNP TSC0025070
tttttcgaatttt

SEQ ID NO: 100774 - DNA, 13 bp, Artificial Sequence
  Oligonucleotide for detection of SNP TSC0025070
aaaattcgaaaaa

SEQ ID NO: 100775 - DNA, 13 bp, Artificial Sequence
  Oligonucleotide for detection of SNP TSC0025070
aaaattggaaaaa

SEQ ID NO: 100776 - DNA, 13 bp, Artificial Sequence
  Oligonucleotide for detection of SNP TSC0025070
tttttccaatttt

SEQ ID NO: 100777 - DNA, 13 bp, Artificial Sequence
  Oligonucleotide for detection of SNP TSC0025070
aaaatttgaaaaa

SEQ ID NO: 100778 - DNA, 13 bp, Artificial Sequence
  Oligonucleotide for detection of SNP TSC0025070
tttttcaaatttt

SEQ ID NO: 100779 - DNA, 13 bp, Artificial Sequence
  Oligonucleotide for detection of SNP TSC0025071
ggatgggtgagaa

SEQ ID NO: 100780 - DNA, 13 bp, Artificial Sequence
  Oligonucleotide for detection of SNP TSC0025071
ttctcacccatcc

SEQ ID NO: 100781 - DNA, 13 bp, Artificial Sequence
  Oligonucleotide for detection of SNP TSC0025071
ggatggttgagaa

SEQ ID NO: 100782 - DNA, 13 bp, Artificial Sequence
  Oligonucleotide for detection of SNP TSC0025071
ttctcaaccatcc

SEQ ID NO: 100783 - DNA, 13 bp, Artificial Sequence
  Oligonucleotide for detection of SNP TSC0025071
tttttatttatty

SEQ ID NO: 100784 - DNA, 13 bp, Artificial Sequence
  Oligonucleotide for detection of SNP TSC0025071
raataaataaaaa

SEQ ID NO: 100785 - DNA, 13 bp, Artificial Sequence
  Oligonucleotide for detection of SNP TSC0025071
tttttaattatty

SEQ ID NO: 100786 - DNA, 13 bp, Artificial Sequence
  Oligonucleotide for detection of SNP TSC0025071
raataattaaaaa

SEQ ID NO: 100787 - DNA, 13 bp, Artificial Sequence
  Oligonucleotide for detection of SNP TSC0025072
gagagtgaatata

SEQ ID NO: 100788 - DNA, 13 bp, Artificial Sequence
  Oligonucleotide for detection of SNP TSC0025072
tatattcactctc

SEQ ID NO: 100789 - DNA, 13 bp, Artificial Sequence
  Oligonucleotide for detection of SNP TSC0025072
gagagtaaatata

SEQ ID NO: 100790 - DNA, 13 bp, Artificial Sequence
  Oligonucleotide for detection of SNP TSC0025072
tatatttactctc

SEQ ID NO: 100791 - DNA, 13 bp, Artificial Sequence
  Oligonucleotide for detection of SNP TSC0025073
tataataattttt

SEQ ID NO: 100792 - DNA, 13 bp, Artificial Sequence
  Oligonucleotide for detection of SNP TSC0025073
aaaaattattata

SEQ ID NO: 100793 - DNA, 13 bp, Artificial Sequence
  Oligonucleotide for detection of SNP TSC0025073
tataatgattttt

SEQ ID NO: 100794 - DNA, 13 bp, Artificial Sequence
  Oligonucleotide for detection of SNP TSC0025073
aaaaatcattata

SEQ ID NO: 100795 - DNA, 13 bp, Artificial Sequence
  Oligonucleotide for detection of SNP TSC0025074
aatttatggatgt

SEQ ID NO: 100796 - DNA, 13 bp, Artificial Sequence
  Oligonucleotide for detection of SNP TSC0025074
acatccataaatt

SEQ ID NO: 100797 - DNA, 13 bp, Artificial Sequence
  Oligonucleotide for detection of SNP TSC0025074
aatttacggatgt

SEQ ID NO: 100798 - DNA, 13 bp, Artificial Sequence
  Oligonucleotide for detection of SNP TSC0025074
acatccgtaaatt

SEQ ID NO: 100799 - DNA, 13 bp, Artificial Sequence
  Oligonucleotide for detection of SNP TSC0025074
atatttgtagatt

SEQ ID NO: 100800 - DNA, 13 bp, Artificial Sequence
  Oligonucleotide for detection of SNP TSC0025074
aatctacaaatat

SEQ ID NO: 100801 - DNA, 13 bp, Artificial Sequence
  Oligonucleotide for detection of SNP TSC0025074
atatttatagatt

SEQ ID NO: 100802 - DNA, 13 bp, Artificial Sequence
  Oligonucleotide for detection of SNP TSC0025074
aatctataaatat

SEQ ID NO: 100803 - DNA, 13 bp, Artificial Sequence
  Oligonucleotide for detection of SNP TSC0025074
atattcgtagatt

SEQ ID NO: 100804 - DNA, 13 bp, Artificial Sequence
  Oligonucleotide for detection of SNP TSC0025074
aatctacgaatat

SEQ ID NO: 100805 - DNA, 13 bp, Artificial Sequence
  Oligonucleotide for detection of SNP TSC0025081
ttttagagagtat

SEQ ID NO: 100806 - DNA, 13 bp, Artificial Sequence
  Oligonucleotide for detection of SNP TSC0025081
atactctctaaaa

SEQ ID NO: 100807 - DNA, 13 bp, Artificial Sequence
  Oligonucleotide for detection of SNP TSC0025081
ttttagggagtat

SEQ ID NO: 100808 - DNA, 13 bp, Artificial Sequence
  Oligonucleotide for detection of SNP TSC0025081
atactccctaaaa

SEQ ID NO: 100809 - DNA, 13 bp, Artificial Sequence
  Oligonucleotide for detection of SNP TSC0025082
atattgttataaa

SEQ ID NO: 100810 - DNA, 13 bp, Artificial Sequence
  Oligonucleotide for detection of SNP TSC0025082
tttataacaatat

SEQ ID NO: 100811 - DNA, 13 bp, Artificial Sequence
  Oligonucleotide for detection of SNP TSC0025082
atattggtataaa

SEQ ID NO: 100812 - DNA, 13 bp, Artificial Sequence
  Oligonucleotide for detection of SNP TSC0025082
tttataccaatat

SEQ ID NO: 100813 - DNA, 13 bp, Artificial Sequence
  Oligonucleotide for detection of SNP TSC0025082
tttatagtagtgt

SEQ ID NO: 100814 - DNA, 13 bp, Artificial Sequence
  Oligonucleotide for detection of SNP TSC0025082
acactactataaa

SEQ ID NO: 100815 - DNA, 13 bp, Artificial Sequence
  Oligonucleotide for detection of SNP TSC0025082
tttatattagtgt

SEQ ID NO: 100816 - DNA, 13 bp, Artificial Sequence
  Oligonucleotide for detection of SNP TSC0025082
acactaatataaa

SEQ ID NO: 100817 - DNA, 13 bp, Artificial Sequence
  Oligonucleotide for detection of SNP TSC0025083
atagataatttgy

SEQ ID NO: 100818 - DNA, 13 bp, Artificial Sequence
  Oligonucleotide for detection of SNP TSC0025083
rcaaattatctat

SEQ ID NO: 100819 - DNA, 13 bp, Artificial Sequence
  Oligonucleotide for detection of SNP TSC0025083
atagattatttgy

SEQ ID NO: 100820 - DNA, 13 bp, Artificial Sequence
  Oligonucleotide for detection of SNP TSC0025083
rcaaataatctat

SEQ ID NO: 100821 - DNA, 13 bp, Artificial Sequence
  Oligonucleotide for detection of SNP TSC0025083
gtaagttatttat

SEQ ID NO: 100822 - DNA, 13 bp, Artificial Sequence
  Oligonucleotide for detection of SNP TSC0025083
ataaataacttac

SEQ ID NO: 100823 - DNA, 13 bp, Artificial Sequence
  Oligonucleotide for detection of SNP TSC0025083
gtaagtgatttat

SEQ ID NO: 100824 - DNA, 13 bp, Artificial Sequence
  Oligonucleotide for detection of SNP TSC0025083
ataaatcacttac

SEQ ID NO: 100825 - DNA, 13 bp, Artificial Sequence
  Oligonucleotide for detection of SNP TSC0025085
gaggttgtggtag

SEQ ID NO: 100826 - DNA, 13 bp, Artificial Sequence
  Oligonucleotide for detection of SNP TSC0025085
ctaccacaacctc

SEQ ID NO: 100827 - DNA, 13 bp, Artificial Sequence
  Oligonucleotide for detection of SNP TSC0025085
gaggttatggtag

SEQ ID NO: 100828 - DNA, 13 bp, Artificial Sequence
  Oligonucleotide for detection of SNP TSC0025085
ctaccataacctc

SEQ ID NO: 100829 - DNA, 13 bp, Artificial Sequence
  Oligonucleotide for detection of SNP TSC0025086
ggaattatatgtg

SEQ ID NO: 100830 - DNA, 13 bp, Artificial Sequence
  Oligonucleotide for detection of SNP TSC0025086
cacatataattcc

SEQ ID NO: 100831 - DNA, 13 bp, Artificial Sequence
  Oligonucleotide for detection of SNP TSC0025086
ggaattgtatgtg

SEQ ID NO: 100832 - DNA, 13 bp, Artificial Sequence
  Oligonucleotide for detection of SNP TSC0025086
cacatacaattcc

SEQ ID NO: 100833 - DNA, 13 bp, Artificial Sequence
  Oligonucleotide for detection of SNP TSC0025086
ggaattatacgtg

SEQ ID NO: 100834 - DNA, 13 bp, Artificial Sequence
  Oligonucleotide for detection of SNP TSC0025086
cacgtataattcc

SEQ ID NO: 100835 - DNA, 13 bp, Artificial Sequence
  Oligonucleotide for detection of SNP TSC0025086
ggaattgtacgtg

SEQ ID NO: 100836 - DNA, 13 bp, Artificial Sequence
  Oligonucleotide for detection of SNP TSC0025086
cacgtacaattcc

SEQ ID NO: 100837 - DNA, 13 bp, Artificial Sequence
  Oligonucleotide for detection of SNP TSC0025087
tttataggatgtt

SEQ ID NO: 100838 - DNA, 13 bp, Artificial Sequence
  Oligonucleotide for detection of SNP TSC0025087
aacatcctataaa

SEQ ID NO: 100839 - DNA, 13 bp, Artificial Sequence
  Oligonucleotide for detection of SNP TSC0025087
tttatatgatgtt

SEQ ID NO: 100840 - DNA, 13 bp, Artificial Sequence
  Oligonucleotide for detection of SNP TSC0025087
aacatcatataaa

SEQ ID NO: 100841 - DNA, 13 bp, Artificial Sequence
  Oligonucleotide for detection of SNP TSC0025087
aatattttataag

SEQ ID NO: 100842 - DNA, 13 bp, Artificial Sequence
  Oligonucleotide for detection of SNP TSC0025087
cttataaaatatt

SEQ ID NO: 100843 - DNA, 13 bp, Artificial Sequence
  Oligonucleotide for detection of SNP TSC0025087
aatattatataag

SEQ ID NO: 100844 - DNA, 13 bp, Artificial Sequence
  Oligonucleotide for detection of SNP TSC0025087
cttatataatatt

SEQ ID NO: 100845 - DNA, 13 bp, Artificial Sequence
  Oligonucleotide for detection of SNP TSC0025088
tagataatttatg

SEQ ID NO: 100846 - DNA, 13 bp, Artificial Sequence
  Oligonucleotide for detection of SNP TSC0025088
cataaattatcta

SEQ ID NO: 100847 - DNA, 13 bp, Artificial Sequence
  Oligonucleotide for detection of SNP TSC0025088
tagatagtttatg

SEQ ID NO: 100848 - DNA, 13 bp, Artificial Sequence
  Oligonucleotide for detection of SNP TSC0025088
cataaactatcta

SEQ ID NO: 100849 - DNA, 13 bp, Artificial Sequence
  Oligonucleotide for detection of SNP TSC0025089
taaaattgaaatt

SEQ ID NO: 100850 - DNA, 13 bp, Artificial Sequence
  Oligonucleotide for detection of SNP TSC0025089
aatttcaatttta

SEQ ID NO: 100851 - DNA, 13 bp, Artificial Sequence
  Oligonucleotide for detection of SNP TSC0025089
taaaatcgaaatt

SEQ ID NO: 100852 - DNA, 13 bp, Artificial Sequence
  Oligonucleotide for detection of SNP TSC0025089
aatttcgatttta

SEQ ID NO: 100853 - DNA, 13 bp, Artificial Sequence
  Oligonucleotide for detection of SNP TSC0025089
aattttggtttta

SEQ ID NO: 100854 - DNA, 13 bp, Artificial Sequence
  Oligonucleotide for detection of SNP TSC0025089
taaaaccaaaatt

SEQ ID NO: 100855 - DNA, 13 bp, Artificial Sequence
  Oligonucleotide for detection of SNP TSC0025089
aattttagtttta

SEQ ID NO: 100856 - DNA, 13 bp, Artificial Sequence
  Oligonucleotide for detection of SNP TSC0025089
taaaactaaaatt

SEQ ID NO: 100857 - DNA, 13 bp, Artificial Sequence
  Oligonucleotide for detection of SNP TSC0025089
aatttcggtttta

SEQ ID NO: 100858 - DNA, 13 bp, Artificial Sequence
  Oligonucleotide for detection of SNP TSC0025089
taaaaccgaaatt

SEQ ID NO: 100859 - DNA, 13 bp, Artificial Sequence
  Oligonucleotide for detection of SNP TSC0025092
ttgtggattgtta

SEQ ID NO: 100860 - DNA, 13 bp, Artificial Sequence
  Oligonucleotide for detection of SNP TSC0025092
taacaatccacaa

SEQ ID NO: 100861 - DNA, 13 bp, Artificial Sequence
  Oligonucleotide for detection of SNP TSC0025092
ttgtggtttgtta

SEQ ID NO: 100862 - DNA, 13 bp, Artificial Sequence
  Oligonucleotide for detection of SNP TSC0025092
taacaaaccacaa

SEQ ID NO: 100863 - DNA, 13 bp, Artificial Sequence
  Oligonucleotide for detection of SNP TSC0025092
taatagtttatag

SEQ ID NO: 100864 - DNA, 13 bp, Artificial Sequence
  Oligonucleotide for detection of SNP TSC0025092
ctataaactatta

SEQ ID NO: 100865 - DNA, 13 bp, Artificial Sequence
  Oligonucleotide for detection of SNP TSC0025092
taataggttatag

SEQ ID NO: 100866 - DNA, 13 bp, Artificial Sequence
  Oligonucleotide for detection of SNP TSC0025092
ctataacctatta

SEQ ID NO: 100867 - DNA, 13 bp, Artificial Sequence
  Oligonucleotide for detection of SNP TSC0025093
gttagtagtagta

SEQ ID NO: 100868 - DNA, 13 bp, Artificial Sequence
  Oligonucleotide for detection of SNP TSC0025093
tactactactaac

SEQ ID NO: 100869 - DNA, 13 bp, Artificial Sequence
  Oligonucleotide for detection of SNP TSC0025093
gttagtggtagta

SEQ ID NO: 100870 - DNA, 13 bp, Artificial Sequence
  Oligonucleotide for detection of SNP TSC0025093
tactaccactaac

SEQ ID NO: 100871 - DNA, 13 bp, Artificial Sequence
  Oligonucleotide for detection of SNP TSC0025093
gttagcggtagta

SEQ ID NO: 100872 - DNA, 13 bp, Artificial Sequence
  Oligonucleotide for detection of SNP TSC0025093
tactaccgctaac

SEQ ID NO: 100873 - DNA, 13 bp, Artificial Sequence
  Oligonucleotide for detection of SNP TSC0025093
tgttattgttgay

SEQ ID NO: 100874 - DNA, 13 bp, Artificial Sequence
  Oligonucleotide for detection of SNP TSC0025093
rtcaacaataaca

SEQ ID NO: 100875 - DNA, 13 bp, Artificial Sequence
  Oligonucleotide for detection of SNP TSC0025093
tgttatcgttgay

SEQ ID NO: 100876 - DNA, 13 bp, Artificial Sequence
  Oligonucleotide for detection of SNP TSC0025093
rtcaacgataaca

SEQ ID NO: 100877 - DNA, 13 bp, Artificial Sequence
  Oligonucleotide for detection of SNP TSC0025096
gatttaaagtttt

SEQ ID NO: 100878 - DNA, 13 bp, Artificial Sequence
  Oligonucleotide for detection of SNP TSC0025096
aaaactttaaatc

SEQ ID NO: 100879 - DNA, 13 bp, Artificial Sequence
  Oligonucleotide for detection of SNP TSC0025096
gatttatagtttt

SEQ ID NO: 100880 - DNA, 13 bp, Artificial Sequence
  Oligonucleotide for detection of SNP TSC0025096
aaaactataaatc

SEQ ID NO: 100881 - DNA, 13 bp, Artificial Sequence
  Oligonucleotide for detection of SNP TSC0025096
agaattttgagty

SEQ ID NO: 100882 - DNA, 13 bp, Artificial Sequence
  Oligonucleotide for detection of SNP TSC0025096
ractcaaaattct

SEQ ID NO: 100883 - DNA, 13 bp, Artificial Sequence
  Oligonucleotide for detection of SNP TSC0025096
agaattgtgagty

SEQ ID NO: 100884 - DNA, 13 bp, Artificial Sequence
  Oligonucleotide for detection of SNP TSC0025096
ractcacaattct

SEQ ID NO: 100885 - DNA, 13 bp, Artificial Sequence
  Oligonucleotide for detection of SNP TSC0025103
attatattggtga

SEQ ID NO: 100886 - DNA, 13 bp, Artificial Sequence
  Oligonucleotide for detection of SNP TSC0025103
tcaccaatataat

SEQ ID NO: 100887 - DNA, 13 bp, Artificial Sequence
  Oligonucleotide for detection of SNP TSC0025103
attatatcggtga

SEQ ID NO: 100888 - DNA, 13 bp, Artificial Sequence
  Oligonucleotide for detection of SNP TSC0025103
tcaccgatataat

SEQ ID NO: 100889 - DNA, 13 bp, Artificial Sequence
  Oligonucleotide for detection of SNP TSC0025103
attatagcggtga

SEQ ID NO: 100890 - DNA, 13 bp, Artificial Sequence
  Oligonucleotide for detection of SNP TSC0025103
tcaccgctataat

SEQ ID NO: 100891 - DNA, 13 bp, Artificial Sequence
  Oligonucleotide for detection of SNP TSC0025103
ttattggtgtggt

SEQ ID NO: 100892 - DNA, 13 bp, Artificial Sequence
  Oligonucleotide for detection of SNP TSC0025103
accacaccaataa

SEQ ID NO: 100893 - DNA, 13 bp, Artificial Sequence
  Oligonucleotide for detection of SNP TSC0025103
ttattgttgtggt

SEQ ID NO: 100894 - DNA, 13 bp, Artificial Sequence
  Oligonucleotide for detection of SNP TSC0025103
accacaacaataa

SEQ ID NO: 100895 - DNA, 13 bp, Artificial Sequence
  Oligonucleotide for detection of SNP TSC0025103
ttatcggtgtggt

SEQ ID NO: 100896 - DNA, 13 bp, Artificial Sequence
  Oligonucleotide for detection of SNP TSC0025103
accacaccgataa

SEQ ID NO: 100897 - DNA, 13 bp, Artificial Sequence
  Oligonucleotide for detection of SNP TSC0025103
ttatcgttgtggt

SEQ ID NO: 100898 - DNA, 13 bp, Artificial Sequence
  Oligonucleotide for detection of SNP TSC0025103
accacaacgataa

SEQ ID NO: 100899 - DNA, 13 bp, Artificial Sequence
  Oligonucleotide for detection of SNP TSC0025108
tatattaagttty

SEQ ID NO: 100900 - DNA, 13 bp, Artificial Sequence
  Oligonucleotide for detection of SNP TSC0025108
raaacttaatata

SEQ ID NO: 100901 - DNA, 13 bp, Artificial Sequence
  Oligonucleotide for detection of SNP TSC0025108
tatattgagttty

SEQ ID NO: 100902 - DNA, 13 bp, Artificial Sequence
  Oligonucleotide for detection of SNP TSC0025108
raaactcaatata

SEQ ID NO: 100903 - DNA, 13 bp, Artificial Sequence
  Oligonucleotide for detection of SNP TSC0025108
tatatcgagttty

SEQ ID NO: 100904 - DNA, 13 bp, Artificial Sequence
  Oligonucleotide for detection of SNP TSC0025108
raaactcgatata

SEQ ID NO: 100905 - DNA, 13 bp, Artificial Sequence
  Oligonucleotide for detection of SNP TSC0025108
ggagtttggtgtg

SEQ ID NO: 100906 - DNA, 13 bp, Artificial Sequence
  Oligonucleotide for detection of SNP TSC0025108
cacaccaaactcc

SEQ ID NO: 100907 - DNA, 13 bp, Artificial Sequence
  Oligonucleotide for detection of SNP TSC0025108
ggagttcggtgtg

SEQ ID NO: 100908 - DNA, 13 bp, Artificial Sequence
  Oligonucleotide for detection of SNP TSC0025108
cacaccgaactcc

SEQ ID NO: 100909 - DNA, 13 bp, Artificial Sequence
  Oligonucleotide for detection of SNP TSC0025109
ttgatgatattgy

SEQ ID NO: 100910 - DNA, 13 bp, Artificial Sequence
  Oligonucleotide for detection of SNP TSC0025109
rcaatatcatcaa

SEQ ID NO: 100911 - DNA, 13 bp, Artificial Sequence
  Oligonucleotide for detection of SNP TSC0025109
ttgatggtattgy

SEQ ID NO: 100912 - DNA, 13 bp, Artificial Sequence
  Oligonucleotide for detection of SNP TSC0025109
rcaataccatcaa

SEQ ID NO: 100913 - DNA, 13 bp, Artificial Sequence
  Oligonucleotide for detection of SNP TSC0025110
tttgggatattag

SEQ ID NO: 100914 - DNA, 13 bp, Artificial Sequence
  Oligonucleotide for detection of SNP TSC0025110
ctaatatcccaaa

SEQ ID NO: 100915 - DNA, 13 bp, Artificial Sequence
  Oligonucleotide for detection of SNP TSC0025110
tttgggttattag

SEQ ID NO: 100916 - DNA, 13 bp, Artificial Sequence
  Oligonucleotide for detection of SNP TSC0025110
ctaataacccaaa

SEQ ID NO: 100917 - DNA, 13 bp, Artificial Sequence
  Oligonucleotide for detection of SNP TSC0025110
ttaatgttttaaa

SEQ ID NO: 100918 - DNA, 13 bp, Artificial Sequence
  Oligonucleotide for detection of SNP TSC0025110
tttaaaacattaa

SEQ ID NO: 100919 - DNA, 13 bp, Artificial Sequence
  Oligonucleotide for detection of SNP TSC0025110
ttaatgatttaaa

SEQ ID NO: 100920 - DNA, 13 bp, Artificial Sequence
  Oligonucleotide for detection of SNP TSC0025110
tttaaatcattaa

SEQ ID NO: 100921 - DNA, 13 bp, Artificial Sequence
  Oligonucleotide for detection of SNP TSC0025111
ttaagagtggaag

SEQ ID NO: 100922 - DNA, 13 bp, Artificial Sequence
  Oligonucleotide for detection of SNP TSC0025111
cttccactcttaa

SEQ ID NO: 100923 - DNA, 13 bp, Artificial Sequence
  Oligonucleotide for detection of SNP TSC0025111
ttaagattggaag

SEQ ID NO: 100924 - DNA, 13 bp, Artificial Sequence
  Oligonucleotide for detection of SNP TSC0025111
cttccaatcttaa

SEQ ID NO: 100925 - DNA, 13 bp, Artificial Sequence
  Oligonucleotide for detection of SNP TSC0025113
aatggggataata

SEQ ID NO: 100926 - DNA, 13 bp, Artificial Sequence
  Oligonucleotide for detection of SNP TSC0025113
tattatccccatt

SEQ ID NO: 100927 - DNA, 13 bp, Artificial Sequence
  Oligonucleotide for detection of SNP TSC0025113
aatgggaataata

SEQ ID NO: 100928 - DNA, 13 bp, Artificial Sequence
  Oligonucleotide for detection of SNP TSC0025113
tattattcccatt

SEQ ID NO: 100929 - DNA, 13 bp, Artificial Sequence
  Oligonucleotide for detection of SNP TSC0025122
gtgttttggaaga

SEQ ID NO: 100930 - DNA, 13 bp, Artificial Sequence
  Oligonucleotide for detection of SNP TSC0025122
tcttccaaaacac

SEQ ID NO: 100931 - DNA, 13 bp, Artificial Sequence
  Oligonucleotide for detection of SNP TSC0025122
gtgtttcggaaga

SEQ ID NO: 100932 - DNA, 13 bp, Artificial Sequence
  Oligonucleotide for detection of SNP TSC0025122
tcttccgaaacac

SEQ ID NO: 100933 - DNA, 13 bp, Artificial Sequence
  Oligonucleotide for detection of SNP TSC0025122
ttttttggggtay

SEQ ID NO: 100934 - DNA, 13 bp, Artificial Sequence
  Oligonucleotide for detection of SNP TSC0025122
rtaccccaaaaaa

SEQ ID NO: 100935 - DNA, 13 bp, Artificial Sequence
  Oligonucleotide for detection of SNP TSC0025122
ttttttagggtay

SEQ ID NO: 100936 - DNA, 13 bp, Artificial Sequence
  Oligonucleotide for detection of SNP TSC0025122
rtaccctaaaaaa

SEQ ID NO: 100937 - DNA, 13 bp, Artificial Sequence
  Oligonucleotide for detection of SNP TSC0025122
tttttcggggtay

SEQ ID NO: 100938 - DNA, 13 bp, Artificial Sequence
  Oligonucleotide for detection of SNP TSC0025122
rtaccccgaaaaa

SEQ ID NO: 100939 - DNA, 13 bp, Artificial Sequence
  Oligonucleotide for detection of SNP TSC0025123
aggaagtggaggg

SEQ ID NO: 100940 - DNA, 13 bp, Artificial Sequence
  Oligonucleotide for detection of SNP TSC0025123
ccctccacttcct

SEQ ID NO: 100941 - DNA, 13 bp, Artificial Sequence
  Oligonucleotide for detection of SNP TSC0025123
aggaaggggaggg

SEQ ID NO: 100942 - DNA, 13 bp, Artificial Sequence
  Oligonucleotide for detection of SNP TSC0025123
ccctccccttcct

SEQ ID NO: 100943 - DNA, 13 bp, Artificial Sequence
  Oligonucleotide for detection of SNP TSC0025123
aggaagcggaggg

SEQ ID NO: 100944 - DNA, 13 bp, Artificial Sequence
  Oligonucleotide for detection of SNP TSC0025123
ccctccgcttcct

SEQ ID NO: 100945 - DNA, 13 bp, Artificial Sequence
  Oligonucleotide for detection of SNP TSC0025126
ggttatattttgg

SEQ ID NO: 100946 - DNA, 13 bp, Artificial Sequence
  Oligonucleotide for detection of SNP TSC0025126
ccaaaatataacc

SEQ ID NO: 100947 - DNA, 13 bp, Artificial Sequence
  Oligonucleotide for detection of SNP TSC0025126
ggttatgttttgg

SEQ ID NO: 100948 - DNA, 13 bp, Artificial Sequence
  Oligonucleotide for detection of SNP TSC0025126
ccaaaacataacc

SEQ ID NO: 100949 - DNA, 13 bp, Artificial Sequence
  Oligonucleotide for detection of SNP TSC0025127
aggggatagttgg

SEQ ID NO: 100950 - DNA, 13 bp, Artificial Sequence
  Oligonucleotide for detection of SNP TSC0025127
ccaactatcccct

SEQ ID NO: 100951 - DNA, 13 bp, Artificial Sequence
  Oligonucleotide for detection of SNP TSC0025127
aggggagagttgg

SEQ ID NO: 100952 - DNA, 13 bp, Artificial Sequence
  Oligonucleotide for detection of SNP TSC0025127
ccaactctcccct

SEQ ID NO: 100953 - DNA, 13 bp, Artificial Sequence
  Oligonucleotide for detection of SNP TSC0025129
atttttagaggtg

SEQ ID NO: 100954 - DNA, 13 bp, Artificial Sequence
  Oligonucleotide for detection of SNP TSC0025129
cacctctaaaaat

SEQ ID NO: 100955 - DNA, 13 bp, Artificial Sequence
  Oligonucleotide for detection of SNP TSC0025129
atttttggaggtg

SEQ ID NO: 100956 - DNA, 13 bp, Artificial Sequence
  Oligonucleotide for detection of SNP TSC0025129
cacctccaaaaat

SEQ ID NO: 100957 - DNA, 13 bp, Artificial Sequence
  Oligonucleotide for detection of SNP TSC0025129
attttcggaggtg

SEQ ID NO: 100958 - DNA, 13 bp, Artificial Sequence
  Oligonucleotide for detection of SNP TSC0025129
cacctccgaaaat

SEQ ID NO: 100959 - DNA, 13 bp, Artificial Sequence
  Oligonucleotide for detection of SNP TSC0025129
tatttttgagagt

SEQ ID NO: 100960 - DNA, 13 bp, Artificial Sequence
  Oligonucleotide for detection of SNP TSC0025129
actctcaaaaata

SEQ ID NO: 100961 - DNA, 13 bp, Artificial Sequence
  Oligonucleotide for detection of SNP TSC0025129
tattttcgagagt

SEQ ID NO: 100962 - DNA, 13 bp, Artificial Sequence
  Oligonucleotide for detection of SNP TSC0025129
actctcgaaaata

SEQ ID NO: 100963 - DNA, 13 bp, Artificial Sequence
  Oligonucleotide for detection of SNP TSC0025135
attttagggtttt

SEQ ID NO: 100964 - DNA, 13 bp, Artificial Sequence
  Oligonucleotide for detection of SNP TSC0025135
aaaaccctaaaat

SEQ ID NO: 100965 - DNA, 13 bp, Artificial Sequence
  Oligonucleotide for detection of SNP TSC0025135
attttatggtttt

SEQ ID NO: 100966 - DNA, 13 bp, Artificial Sequence
  Oligonucleotide for detection of SNP TSC0025135
aaaaccataaaat

SEQ ID NO: 100967 - DNA, 13 bp, Artificial Sequence
  Oligonucleotide for detection of SNP TSC0025135
aaagttttaagat

SEQ ID NO: 100968 - DNA, 13 bp, Artificial Sequence
  Oligonucleotide for detection of SNP TSC0025135
atcttaaaacttt

SEQ ID NO: 100969 - DNA, 13 bp, Artificial Sequence
  Oligonucleotide for detection of SNP TSC0025135
aaagttataagat

SEQ ID NO: 100970 - DNA, 13 bp, Artificial Sequence
  Oligonucleotide for detection of SNP TSC0025135
atcttataacttt

SEQ ID NO: 100971 - DNA, 13 bp, Artificial Sequence
  Oligonucleotide for detection of SNP TSC0025140
gagtttatttttt

SEQ ID NO: 100972 - DNA, 13 bp, Artificial Sequence
  Oligonucleotide for detection of SNP TSC0025140
aaaaaataaactc

SEQ ID NO: 100973 - DNA, 13 bp, Artificial Sequence
  Oligonucleotide for detection of SNP TSC0025140
gagtttttttttt

SEQ ID NO: 100974 - DNA, 13 bp, Artificial Sequence
  Oligonucleotide for detection of SNP TSC0025140
aaaaaaaaaactc

SEQ ID NO: 100975 - DNA, 13 bp, Artificial Sequence
  Oligonucleotide for detection of SNP TSC0025140
aaaaaataaatty

SEQ ID NO: 100976 - DNA, 13 bp, Artificial Sequence
  Oligonucleotide for detection of SNP TSC0025140
raatttatttttt

SEQ ID NO: 100977 - DNA, 13 bp, Artificial Sequence
  Oligonucleotide for detection of SNP TSC0025140
aaaaaaaaaatty

SEQ ID NO: 100978 - DNA, 13 bp, Artificial Sequence
  Oligonucleotide for detection of SNP TSC0025140
raatttttttttt

SEQ ID NO: 100979 - DNA, 13 bp, Artificial Sequence
  Oligonucleotide for detection of SNP TSC0025141
ttgattgtgttta

SEQ ID NO: 100980 - DNA, 13 bp, Artificial Sequence
  Oligonucleotide for detection of SNP TSC0025141
taaacacaatcaa

SEQ ID NO: 100981 - DNA, 13 bp, Artificial Sequence
  Oligonucleotide for detection of SNP TSC0025141
ttgattatgttta

SEQ ID NO: 100982 - DNA, 13 bp, Artificial Sequence
  Oligonucleotide for detection of SNP TSC0025141
taaacataatcaa

SEQ ID NO: 100983 - DNA, 13 bp, Artificial Sequence
  Oligonucleotide for detection of SNP TSC0025142
gtgtgtatgtgga

SEQ ID NO: 100984 - DNA, 13 bp, Artificial Sequence
  Oligonucleotide for detection of SNP TSC0025142
tccacatacacac

SEQ ID NO: 100985 - DNA, 13 bp, Artificial Sequence
  Oligonucleotide for detection of SNP TSC0025142
gtgtgtgtgtgga

SEQ ID NO: 100986 - DNA, 13 bp, Artificial Sequence
  Oligonucleotide for detection of SNP TSC0025142
tccacacacacac

SEQ ID NO: 100987 - DNA, 13 bp, Artificial Sequence
  Oligonucleotide for detection of SNP TSC0025142
gtgtgtacgtgga

SEQ ID NO: 100988 - DNA, 13 bp, Artificial Sequence
  Oligonucleotide for detection of SNP TSC0025142
tccacgtacacac

SEQ ID NO: 100989 - DNA, 13 bp, Artificial Sequence
  Oligonucleotide for detection of SNP TSC0025142
gtgtgtgcgtgga

SEQ ID NO: 100990 - DNA, 13 bp, Artificial Sequence
  Oligonucleotide for detection of SNP TSC0025142
tccacgcacacac

SEQ ID NO: 100991 - DNA, 13 bp, Artificial Sequence
  Oligonucleotide for detection of SNP TSC0025143
tttttatgttgtg

SEQ ID NO: 100992 - DNA, 13 bp, Artificial Sequence
  Oligonucleotide for detection of SNP TSC0025143
cacaacataaaaa

SEQ ID NO: 100993 - DNA, 13 bp, Artificial Sequence
  Oligonucleotide for detection of SNP TSC0025143
tttttacgttgtg

SEQ ID NO: 100994 - DNA, 13 bp, Artificial Sequence
  Oligonucleotide for detection of SNP TSC0025143
cacaacgtaaaaa

SEQ ID NO: 100995 - DNA, 13 bp, Artificial Sequence
  Oligonucleotide for detection of SNP TSC0025143
tttttatgttgcg

SEQ ID NO: 100996 - DNA, 13 bp, Artificial Sequence
  Oligonucleotide for detection of SNP TSC0025143
cgcaacataaaaa

SEQ ID NO: 100997 - DNA, 13 bp, Artificial Sequence
  Oligonucleotide for detection of SNP TSC0025143
tttttacgttgcg

SEQ ID NO: 100998 - DNA, 13 bp, Artificial Sequence
  Oligonucleotide for detection of SNP TSC0025143
cgcaacgtaaaaa

SEQ ID NO: 100999 - DNA, 13 bp, Artificial Sequence
  Oligonucleotide for detection of SNP TSC0025143
tgtaatgtggggg

SEQ ID NO: 101000 - DNA, 13 bp, Artificial Sequence
  Oligonucleotide for detection of SNP TSC0025143
cccccacattaca

SEQ ID NO: 101001 - DNA, 13 bp, Artificial Sequence
  Oligonucleotide for detection of SNP TSC0025143
tgtaatatggggg

SEQ ID NO: 101002 - DNA, 13 bp, Artificial Sequence
  Oligonucleotide for detection of SNP TSC0025143
cccccatattaca

SEQ ID NO: 101003 - DNA, 13 bp, Artificial Sequence
  Oligonucleotide for detection of SNP TSC0025143
cgtaatgtggggg

SEQ ID NO: 101004 - DNA, 13 bp, Artificial Sequence
  Oligonucleotide for detection of SNP TSC0025143
cccccacattacg

SEQ ID NO: 101005 - DNA, 13 bp, Artificial Sequence
  Oligonucleotide for detection of SNP TSC0025143
cgtaatatggggg

SEQ ID NO: 101006 - DNA, 13 bp, Artificial Sequence
  Oligonucleotide for detection of SNP TSC0025143
cccccatattacg

SEQ ID NO: 101007 - DNA, 13 bp, Artificial Sequence
  Oligonucleotide for detection of SNP TSC0025143
tgtaacgtggggg

SEQ ID NO: 101008 - DNA, 13 bp, Artificial Sequence
  Oligonucleotide for detection of SNP TSC0025143
cccccacgttaca

SEQ ID NO: 101009 - DNA, 13 bp, Artificial Sequence
  Oligonucleotide for detection of SNP TSC0025143
cgtaacgtggggg

SEQ ID NO: 101010 - DNA, 13 bp, Artificial Sequence
  Oligonucleotide for detection of SNP TSC0025143
cccccacgttacg

SEQ ID NO: 101011 - DNA, 13 bp, Artificial Sequence
  Oligonucleotide for detection of SNP TSC0025144
atttttgtttggg

SEQ ID NO: 101012 - DNA, 13 bp, Artificial Sequence
  Oligonucleotide for detection of SNP TSC0025144
cccaaacaaaaat

SEQ ID NO: 101013 - DNA, 13 bp, Artificial Sequence
  Oligonucleotide for detection of SNP TSC0025144
atttttttttggg

SEQ ID NO: 101014 - DNA, 13 bp, Artificial Sequence
  Oligonucleotide for detection of SNP TSC0025144
cccaaaaaaaaat

SEQ ID NO: 101015 - DNA, 13 bp, Artificial Sequence
  Oligonucleotide for detection of SNP TSC0025144
tttagataggagt

SEQ ID NO: 101016 - DNA, 13 bp, Artificial Sequence
  Oligonucleotide for detection of SNP TSC0025144
actcctatctaaa

SEQ ID NO: 101017 - DNA, 13 bp, Artificial Sequence
  Oligonucleotide for detection of SNP TSC0025144
tttagaaaggagt

SEQ ID NO: 101018 - DNA, 13 bp, Artificial Sequence
  Oligonucleotide for detection of SNP TSC0025144
actcctttctaaa

SEQ ID NO: 101019 - DNA, 13 bp, Artificial Sequence
  Oligonucleotide for detection of SNP TSC0025145
gttagagagtatg

SEQ ID NO: 101020 - DNA, 13 bp, Artificial Sequence
  Oligonucleotide for detection of SNP TSC0025145
catactctctaac

SEQ ID NO: 101021 - DNA, 13 bp, Artificial Sequence
  Oligonucleotide for detection of SNP TSC0025145
gttagatagtatg

SEQ ID NO: 101022 - DNA, 13 bp, Artificial Sequence
  Oligonucleotide for detection of SNP TSC0025145
catactatctaac

SEQ ID NO: 101023 - DNA, 13 bp, Artificial Sequence
  Oligonucleotide for detection of SNP TSC0025145
tatgttttttggy

SEQ ID NO: 101024 - DNA, 13 bp, Artificial Sequence
  Oligonucleotide for detection of SNP TSC0025145
rccaaaaaacata

SEQ ID NO: 101025 - DNA, 13 bp, Artificial Sequence
  Oligonucleotide for detection of SNP TSC0025145
tatgttatttggy

SEQ ID NO: 101026 - DNA, 13 bp, Artificial Sequence
  Oligonucleotide for detection of SNP TSC0025145
rccaaataacata

SEQ ID NO: 101027 - DNA, 13 bp, Artificial Sequence
  Oligonucleotide for detection of SNP TSC0025146
ttttttgtgtagy

SEQ ID NO: 101028 - DNA, 13 bp, Artificial Sequence
  Oligonucleotide for detection of SNP TSC0025146
rctacacaaaaaa

SEQ ID NO: 101029 - DNA, 13 bp, Artificial Sequence
  Oligonucleotide for detection of SNP TSC0025146
ttttttatgtagy

SEQ ID NO: 101030 - DNA, 13 bp, Artificial Sequence
  Oligonucleotide for detection of SNP TSC0025146
rctacataaaaaa

SEQ ID NO: 101031 - DNA, 13 bp, Artificial Sequence
  Oligonucleotide for detection of SNP TSC0025147
tatgtaattttgy

SEQ ID NO: 101032 - DNA, 13 bp, Artificial Sequence
  Oligonucleotide for detection of SNP TSC0025147
rcaaaattacata

SEQ ID NO: 101033 - DNA, 13 bp, Artificial Sequence
  Oligonucleotide for detection of SNP TSC0025147
tatgtagttttgy

SEQ ID NO: 101034 - DNA, 13 bp, Artificial Sequence
  Oligonucleotide for detection of SNP TSC0025147
rcaaaactacata

SEQ ID NO: 101035 - DNA, 13 bp, Artificial Sequence
  Oligonucleotide for detection of SNP TSC0025148
gtttgtagtgagg

SEQ ID NO: 101036 - DNA, 13 bp, Artificial Sequence
  Oligonucleotide for detection of SNP TSC0025148
cctcactacaaac

SEQ ID NO: 101037 - DNA, 13 bp, Artificial Sequence
  Oligonucleotide for detection of SNP TSC0025148
gtttgtggtgagg

SEQ ID NO: 101038 - DNA, 13 bp, Artificial Sequence
  Oligonucleotide for detection of SNP TSC0025148
cctcaccacaaac

SEQ ID NO: 101039 - DNA, 13 bp, Artificial Sequence
  Oligonucleotide for detection of SNP TSC0025148
gttcgtagtgagg

SEQ ID NO: 101040 - DNA, 13 bp, Artificial Sequence
  Oligonucleotide for detection of SNP TSC0025148
cctcactacgaac

SEQ ID NO: 101041 - DNA, 13 bp, Artificial Sequence
  Oligonucleotide for detection of SNP TSC0025148
gttcgtggtgagg

SEQ ID NO: 101042 - DNA, 13 bp, Artificial Sequence
  Oligonucleotide for detection of SNP TSC0025148
cctcaccacgaac

SEQ ID NO: 101043 - DNA, 13 bp, Artificial Sequence
  Oligonucleotide for detection of SNP TSC0025150
ggtggggtattgt

SEQ ID NO: 101044 - DNA, 13 bp, Artificial Sequence
  Oligonucleotide for detection of SNP TSC0025150
acaataccccacc

SEQ ID NO: 101045 - DNA, 13 bp, Artificial Sequence
  Oligonucleotide for detection of SNP TSC0025150
ggtgggttattgt

SEQ ID NO: 101046 - DNA, 13 bp, Artificial Sequence
  Oligonucleotide for detection of SNP TSC0025150
acaataacccacc

SEQ ID NO: 101047 - DNA, 13 bp, Artificial Sequence
  Oligonucleotide for detection of SNP TSC0025150
ggcggggtattgt

SEQ ID NO: 101048 - DNA, 13 bp, Artificial Sequence
  Oligonucleotide for detection of SNP TSC0025150
acaataccccgcc

SEQ ID NO: 101049 - DNA, 13 bp, Artificial Sequence
  Oligonucleotide for detection of SNP TSC0025150
ggcgggttattgt

SEQ ID NO: 101050 - DNA, 13 bp, Artificial Sequence
  Oligonucleotide for detection of SNP TSC0025150
acaataacccgcc

SEQ ID NO: 101051 - DNA, 13 bp, Artificial Sequence
  Oligonucleotide for detection of SNP TSC0025150
ggtggggtatcgt

SEQ ID NO: 101052 - DNA, 13 bp, Artificial Sequence
  Oligonucleotide for detection of SNP TSC0025150
acgataccccacc

SEQ ID NO: 101053 - DNA, 13 bp, Artificial Sequence
  Oligonucleotide for detection of SNP TSC0025150
ggtgggttatcgt

SEQ ID NO: 101054 - DNA, 13 bp, Artificial Sequence
  Oligonucleotide for detection of SNP TSC0025150
acgataacccacc

SEQ ID NO: 101055 - DNA, 13 bp, Artificial Sequence
  Oligonucleotide for detection of SNP TSC0025150
ggcggggtatcgt

SEQ ID NO: 101056 - DNA, 13 bp, Artificial Sequence
  Oligonucleotide for detection of SNP TSC0025150
acgataccccgcc

SEQ ID NO: 101057 - DNA, 13 bp, Artificial Sequence
  Oligonucleotide for detection of SNP TSC0025150
ggcgggttatcgt

SEQ ID NO: 101058 - DNA, 13 bp, Artificial Sequence
  Oligonucleotide for detection of SNP TSC0025150
acgataacccgcc

SEQ ID NO: 101059 - DNA, 13 bp, Artificial Sequence
  Oligonucleotide for detection of SNP TSC0025150
atgatgttttgty

SEQ ID NO: 101060 - DNA, 13 bp, Artificial Sequence
  Oligonucleotide for detection of SNP TSC0025150
racaaaacatcat

SEQ ID NO: 101061 - DNA, 13 bp, Artificial Sequence
  Oligonucleotide for detection of SNP TSC0025150
atgatgatttgty

SEQ ID NO: 101062 - DNA, 13 bp, Artificial Sequence
  Oligonucleotide for detection of SNP TSC0025150
racaaatcatcat

SEQ ID NO: 101063 - DNA, 13 bp, Artificial Sequence
  Oligonucleotide for detection of SNP TSC0025150
acgatgttttgty

SEQ ID NO: 101064 - DNA, 13 bp, Artificial Sequence
  Oligonucleotide for detection of SNP TSC0025150
racaaaacatcgt

SEQ ID NO: 101065 - DNA, 13 bp, Artificial Sequence
  Oligonucleotide for detection of SNP TSC0025150
acgatgatttgty

SEQ ID NO: 101066 - DNA, 13 bp, Artificial Sequence
  Oligonucleotide for detection of SNP TSC0025150
racaaatcatcgt

SEQ ID NO: 101067 - DNA, 13 bp, Artificial Sequence
  Oligonucleotide for detection of SNP TSC0025150
atgatgtttcgty

SEQ ID NO: 101068 - DNA, 13 bp, Artificial Sequence
  Oligonucleotide for detection of SNP TSC0025150
racgaaacatcat

SEQ ID NO: 101069 - DNA, 13 bp, Artificial Sequence
  Oligonucleotide for detection of SNP TSC0025150
atgatgattcgty

SEQ ID NO: 101070 - DNA, 13 bp, Artificial Sequence
  Oligonucleotide for detection of SNP TSC0025150
racgaatcatcat

SEQ ID NO: 101071 - DNA, 13 bp, Artificial Sequence
  Oligonucleotide for detection of SNP TSC0025150
acgatgtttcgty

SEQ ID NO: 101072 - DNA, 13 bp, Artificial Sequence
  Oligonucleotide for detection of SNP TSC0025150
racgaaacatcgt

SEQ ID NO: 101073 - DNA, 13 bp, Artificial Sequence
  Oligonucleotide for detection of SNP TSC0025150
acgatgattcgty

SEQ ID NO: 101074 - DNA, 13 bp, Artificial Sequence
  Oligonucleotide for detection of SNP TSC0025150
racgaatcatcgt

SEQ ID NO: 101075 - DNA, 13 bp, Artificial Sequence
  Oligonucleotide for detection of SNP TSC0025155
aatgagatagaat

SEQ ID NO: 101076 - DNA, 13 bp, Artificial Sequence
  Oligonucleotide for detection of SNP TSC0025155
attctatctcatt

SEQ ID NO: 101077 - DNA, 13 bp, Artificial Sequence
  Oligonucleotide for detection of SNP TSC0025155
aatgaggtagaat

SEQ ID NO: 101078 - DNA, 13 bp, Artificial Sequence
  Oligonucleotide for detection of SNP TSC0025155
attctacctcatt

SEQ ID NO: 101079 - DNA, 13 bp, Artificial Sequence
  Oligonucleotide for detection of SNP TSC0025156
aatggaatgttag

SEQ ID NO: 101080 - DNA, 13 bp, Artificial Sequence
  Oligonucleotide for detection of SNP TSC0025156
ctaacattccatt

SEQ ID NO: 101081 - DNA, 13 bp, Artificial Sequence
  Oligonucleotide for detection of SNP TSC0025156
aatggagtgttag

SEQ ID NO: 101082 - DNA, 13 bp, Artificial Sequence
  Oligonucleotide for detection of SNP TSC0025156
ctaacactccatt

SEQ ID NO: 101083 - DNA, 13 bp, Artificial Sequence
  Oligonucleotide for detection of SNP TSC0025157
gaaattatttaag

SEQ ID NO: 101084 - DNA, 13 bp, Artificial Sequence
  Oligonucleotide for detection of SNP TSC0025157
cttaaataatttc

SEQ ID NO: 101085 - DNA, 13 bp, Artificial Sequence
  Oligonucleotide for detection of SNP TSC0025157
gaaattttttaag

SEQ ID NO: 101086 - DNA, 13 bp, Artificial Sequence
  Oligonucleotide for detection of SNP TSC0025157
cttaaaaaatttc

SEQ ID NO: 101087 - DNA, 13 bp, Artificial Sequence
  Oligonucleotide for detection of SNP TSC0025157
tttgaataattty

SEQ ID NO: 101088 - DNA, 13 bp, Artificial Sequence
  Oligonucleotide for detection of SNP TSC0025157
raaattattcaaa

SEQ ID NO: 101089 - DNA, 13 bp, Artificial Sequence
  Oligonucleotide for detection of SNP TSC0025157
tttgaaaaattty

SEQ ID NO: 101090 - DNA, 13 bp, Artificial Sequence
  Oligonucleotide for detection of SNP TSC0025157
raaatttttcaaa

SEQ ID NO: 101091 - DNA, 13 bp, Artificial Sequence
  Oligonucleotide for detection of SNP TSC0025158
tttatggtaaagt

SEQ ID NO: 101092 - DNA, 13 bp, Artificial Sequence
  Oligonucleotide for detection of SNP TSC0025158
actttaccataaa

SEQ ID NO: 101093 - DNA, 13 bp, Artificial Sequence
  Oligonucleotide for detection of SNP TSC0025158
tttatgttaaagt

SEQ ID NO: 101094 - DNA, 13 bp, Artificial Sequence
  Oligonucleotide for detection of SNP TSC0025158
actttaacataaa

SEQ ID NO: 101095 - DNA, 13 bp, Artificial Sequence
  Oligonucleotide for detection of SNP TSC0025158
tttacggtaaagt

SEQ ID NO: 101096 - DNA, 13 bp, Artificial Sequence
  Oligonucleotide for detection of SNP TSC0025158
actttaccgtaaa

SEQ ID NO: 101097 - DNA, 13 bp, Artificial Sequence
  Oligonucleotide for detection of SNP TSC0025158
tttacgttaaagt

SEQ ID NO: 101098 - DNA, 13 bp, Artificial Sequence
  Oligonucleotide for detection of SNP TSC0025158
actttaacgtaaa

SEQ ID NO: 101099 - DNA, 13 bp, Artificial Sequence
  Oligonucleotide for detection of SNP TSC0025158
attttaatgtaaa

SEQ ID NO: 101100 - DNA, 13 bp, Artificial Sequence
  Oligonucleotide for detection of SNP TSC0025158
tttacattaaaat

SEQ ID NO: 101101 - DNA, 13 bp, Artificial Sequence
  Oligonucleotide for detection of SNP TSC0025158
attttatcgtaaa

SEQ ID NO: 101102 - DNA, 13 bp, Artificial Sequence
  Oligonucleotide for detection of SNP TSC0025158
tttacgataaaat

SEQ ID NO: 101103 - DNA, 13 bp, Artificial Sequence
  Oligonucleotide for detection of SNP TSC0025158
attttaacgtaaa

SEQ ID NO: 101104 - DNA, 13 bp, Artificial Sequence
  Oligonucleotide for detection of SNP TSC0025158
tttacgttaaaat

SEQ ID NO: 101105 - DNA, 13 bp, Artificial Sequence
  Oligonucleotide for detection of SNP TSC0025159
agggaaatttatt

SEQ ID NO: 101106 - DNA, 13 bp, Artificial Sequence
  Oligonucleotide for detection of SNP TSC0025159
aataaatttccct

SEQ ID NO: 101107 - DNA, 13 bp, Artificial Sequence
  Oligonucleotide for detection of SNP TSC0025159
agggaattttatt

SEQ ID NO: 101108 - DNA, 13 bp, Artificial Sequence
  Oligonucleotide for detection of SNP TSC0025159
aataaaattccct

SEQ ID NO: 101109 - DNA, 13 bp, Artificial Sequence
  Oligonucleotide for detection of SNP TSC0025159
aatgggttttttt

SEQ ID NO: 101110 - DNA, 13 bp, Artificial Sequence
  Oligonucleotide for detection of SNP TSC0025159
aaaaaaacccatt

SEQ ID NO: 101111 - DNA, 13 bp, Artificial Sequence
  Oligonucleotide for detection of SNP TSC0025159
aatggggtttttt

SEQ ID NO: 101112 - DNA, 13 bp, Artificial Sequence
  Oligonucleotide for detection of SNP TSC0025159
aaaaaaccccatt

SEQ ID NO: 101113 - DNA, 13 bp, Artificial Sequence
  Oligonucleotide for detection of SNP TSC0025160
tttagtgaattta

SEQ ID NO: 101114 - DNA, 13 bp, Artificial Sequence
  Oligonucleotide for detection of SNP TSC0025160
taaattcactaaa

SEQ ID NO: 101115 - DNA, 13 bp, Artificial Sequence
  Oligonucleotide for detection of SNP TSC0025160
tttagttaattta

SEQ ID NO: 101116 - DNA, 13 bp, Artificial Sequence
  Oligonucleotide for detection of SNP TSC0025160
taaattaactaaa

SEQ ID NO: 101117 - DNA, 13 bp, Artificial Sequence
  Oligonucleotide for detection of SNP TSC0025160
tgggtttattaaa

SEQ ID NO: 101118 - DNA, 13 bp, Artificial Sequence
  Oligonucleotide for detection of SNP TSC0025160
tttaataaaccca

SEQ ID NO: 101119 - DNA, 13 bp, Artificial Sequence
  Oligonucleotide for detection of SNP TSC0025160
tgggttaattaaa

SEQ ID NO: 101120 - DNA, 13 bp, Artificial Sequence
  Oligonucleotide for detection of SNP TSC0025160
tttaattaaccca

SEQ ID NO: 101121 - DNA, 13 bp, Artificial Sequence
  Oligonucleotide for detection of SNP TSC0025161
taagtaattgggg

SEQ ID NO: 101122 - DNA, 13 bp, Artificial Sequence
  Oligonucleotide for detection of SNP TSC0025161
ccccaattactta

SEQ ID NO: 101123 - DNA, 13 bp, Artificial Sequence
  Oligonucleotide for detection of SNP TSC0025161
taagtagttgggg

SEQ ID NO: 101124 - DNA, 13 bp, Artificial Sequence
  Oligonucleotide for detection of SNP TSC0025161
ccccaactactta

SEQ ID NO: 101125 - DNA, 13 bp, Artificial Sequence
  Oligonucleotide for detection of SNP TSC0025162
ttaaatatgtgta

SEQ ID NO: 101126 - DNA, 13 bp, Artificial Sequence
  Oligonucleotide for detection of SNP TSC0025162
tacacatatttaa

SEQ ID NO: 101127 - DNA, 13 bp, Artificial Sequence
  Oligonucleotide for detection of SNP TSC0025162
ttaaatttgtgta

SEQ ID NO: 101128 - DNA, 13 bp, Artificial Sequence
  Oligonucleotide for detection of SNP TSC0025162
tacacaaatttaa

SEQ ID NO: 101129 - DNA, 13 bp, Artificial Sequence
  Oligonucleotide for detection of SNP TSC0025162
tgtatatgtttga

SEQ ID NO: 101130 - DNA, 13 bp, Artificial Sequence
  Oligonucleotide for detection of SNP TSC0025162
tcaaacatataca

SEQ ID NO: 101131 - DNA, 13 bp, Artificial Sequence
  Oligonucleotide for detection of SNP TSC0025162
tgtataggtttga

SEQ ID NO: 101132 - DNA, 13 bp, Artificial Sequence
  Oligonucleotide for detection of SNP TSC0025162
tcaaacctataca

SEQ ID NO: 101133 - DNA, 13 bp, Artificial Sequence
  Oligonucleotide for detection of SNP TSC0025163
aagtattgggggg

SEQ ID NO: 101134 - DNA, 13 bp, Artificial Sequence
  Oligonucleotide for detection of SNP TSC0025163
ccccccaatactt

SEQ ID NO: 101135 - DNA, 13 bp, Artificial Sequence
  Oligonucleotide for detection of SNP TSC0025163
aagtatggggggg

SEQ ID NO: 101136 - DNA, 13 bp, Artificial Sequence
  Oligonucleotide for detection of SNP TSC0025163
cccccccatactt

SEQ ID NO: 101137 - DNA, 13 bp, Artificial Sequence
  Oligonucleotide for detection of SNP TSC0025164
gtataatggaagg

SEQ ID NO: 101138 - DNA, 13 bp, Artificial Sequence
  Oligonucleotide for detection of SNP TSC0025164
ccttccattatac

SEQ ID NO: 101139 - DNA, 13 bp, Artificial Sequence
  Oligonucleotide for detection of SNP TSC0025164
gtataacggaagg

SEQ ID NO: 101140 - DNA, 13 bp, Artificial Sequence
  Oligonucleotide for detection of SNP TSC0025164
ccttccgttatac

SEQ ID NO: 101141 - DNA, 13 bp, Artificial Sequence
  Oligonucleotide for detection of SNP TSC0025164
ttttttgttgtgy

SEQ ID NO: 101142 - DNA, 13 bp, Artificial Sequence
  Oligonucleotide for detection of SNP TSC0025164
rcacaacaaaaaa

SEQ ID NO: 101143 - DNA, 13 bp, Artificial Sequence
  Oligonucleotide for detection of SNP TSC0025164
tttttcgttgtgy

SEQ ID NO: 101144 - DNA, 13 bp, Artificial Sequence
  Oligonucleotide for detection of SNP TSC0025164
rcacaacgaaaaa

SEQ ID NO: 101145 - DNA, 13 bp, Artificial Sequence
  Oligonucleotide for detection of SNP TSC0025165
gtgggtagataag

SEQ ID NO: 101146 - DNA, 13 bp, Artificial Sequence
  Oligonucleotide for detection of SNP TSC0025165
cttatctacccac

SEQ ID NO: 101147 - DNA, 13 bp, Artificial Sequence
  Oligonucleotide for detection of SNP TSC0025165
gtgggtggataag

SEQ ID NO: 101148 - DNA, 13 bp, Artificial Sequence
  Oligonucleotide for detection of SNP TSC0025165
cttatccacccac

SEQ ID NO: 101149 - DNA, 13 bp, Artificial Sequence
  Oligonucleotide for detection of SNP TSC0025166
ttgttgtgggaag

SEQ ID NO: 101150 - DNA, 13 bp, Artificial Sequence
  Oligonucleotide for detection of SNP TSC0025166
cttcccacaacaa

SEQ ID NO: 101151 - DNA, 13 bp, Artificial Sequence
  Oligonucleotide for detection of SNP TSC0025166
ttgttgcgggaag

SEQ ID NO: 101152 - DNA, 13 bp, Artificial Sequence
  Oligonucleotide for detection of SNP TSC0025166
cttcccgcaacaa

SEQ ID NO: 101153 - DNA, 13 bp, Artificial Sequence
  Oligonucleotide for detection of SNP TSC0025167
gagttgtggtaga

SEQ ID NO: 101154 - DNA, 13 bp, Artificial Sequence
  Oligonucleotide for detection of SNP TSC0025167
tctaccacaactc

SEQ ID NO: 101155 - DNA, 13 bp, Artificial Sequence
  Oligonucleotide for detection of SNP TSC0025167
gagttgcggtaga

SEQ ID NO: 101156 - DNA, 13 bp, Artificial Sequence
  Oligonucleotide for detection of SNP TSC0025167
tctaccgcaactc

SEQ ID NO: 101157 - DNA, 13 bp, Artificial Sequence
  Oligonucleotide for detection of SNP TSC0025167
tttgttgtagtty

SEQ ID NO: 101158 - DNA, 13 bp, Artificial Sequence
  Oligonucleotide for detection of SNP TSC0025167
raactacaacaaa

SEQ ID NO: 101159 - DNA, 13 bp, Artificial Sequence
  Oligonucleotide for detection of SNP TSC0025167
tttgttatagtty

SEQ ID NO: 101160 - DNA, 13 bp, Artificial Sequence
  Oligonucleotide for detection of SNP TSC0025167
raactataacaaa

SEQ ID NO: 101161 - DNA, 13 bp, Artificial Sequence
  Oligonucleotide for detection of SNP TSC0025167
tttgtcgtagtty

SEQ ID NO: 101162 - DNA, 13 bp, Artificial Sequence
  Oligonucleotide for detection of SNP TSC0025167
raactacgacaaa

SEQ ID NO: 101163 - DNA, 13 bp, Artificial Sequence
  Oligonucleotide for detection of SNP TSC0025168
aaaaattagttat

SEQ ID NO: 101164 - DNA, 13 bp, Artificial Sequence
  Oligonucleotide for detection of SNP TSC0025168
ataactaattttt

SEQ ID NO: 101165 - DNA, 13 bp, Artificial Sequence
  Oligonucleotide for detection of SNP TSC0025168
aaaaacgagttat

SEQ ID NO: 101166 - DNA, 13 bp, Artificial Sequence
  Oligonucleotide for detection of SNP TSC0025168
ataactcgttttt

SEQ ID NO: 101167 - DNA, 13 bp, Artificial Sequence
  Oligonucleotide for detection of SNP TSC0025168
atggttggttttt

SEQ ID NO: 101168 - DNA, 13 bp, Artificial Sequence
  Oligonucleotide for detection of SNP TSC0025168
aaaaaccaaccat

SEQ ID NO: 101169 - DNA, 13 bp, Artificial Sequence
  Oligonucleotide for detection of SNP TSC0025168
atggtttgttttt

SEQ ID NO: 101170 - DNA, 13 bp, Artificial Sequence
  Oligonucleotide for detection of SNP TSC0025168
aaaaacaaaccat

SEQ ID NO: 101171 - DNA, 13 bp, Artificial Sequence
  Oligonucleotide for detection of SNP TSC0025168
atggttcgttttt

SEQ ID NO: 101172 - DNA, 13 bp, Artificial Sequence
  Oligonucleotide for detection of SNP TSC0025168
aaaaacgaaccat

SEQ ID NO: 101173 - DNA, 13 bp, Artificial Sequence
  Oligonucleotide for detection of SNP TSC0025171
ggggggttagtay

SEQ ID NO: 101174 - DNA, 13 bp, Artificial Sequence
  Oligonucleotide for detection of SNP TSC0025171
rtactaacccccc

SEQ ID NO: 101175 - DNA, 13 bp, Artificial Sequence
  Oligonucleotide for detection of SNP TSC0025171
gggggggtagtay

SEQ ID NO: 101176 - DNA, 13 bp, Artificial Sequence
  Oligonucleotide for detection of SNP TSC0025171
rtactaccccccc

SEQ ID NO: 101177 - DNA, 13 bp, Artificial Sequence
  Oligonucleotide for detection of SNP TSC0025171
gtgttgtttttty

SEQ ID NO: 101178 - DNA, 13 bp, Artificial Sequence
  Oligonucleotide for detection of SNP TSC0025171
raaaaaacaacac

SEQ ID NO: 101179 - DNA, 13 bp, Artificial Sequence
  Oligonucleotide for detection of SNP TSC0025172
aggggggtttttt

SEQ ID NO: 101180 - DNA, 13 bp, Artificial Sequence
  Oligonucleotide for detection of SNP TSC0025172
aaaaaacccccct

SEQ ID NO: 101181 - DNA, 13 bp, Artificial Sequence
  Oligonucleotide for detection of SNP TSC0025172
agggggatttttt

SEQ ID NO: 101182 - DNA, 13 bp, Artificial Sequence
  Oligonucleotide for detection of SNP TSC0025172
aaaaaatccccct

SEQ ID NO: 101183 - DNA, 13 bp, Artificial Sequence
  Oligonucleotide for detection of SNP TSC0025175
tgaaggggtgtta

SEQ ID NO: 101184 - DNA, 13 bp, Artificial Sequence
  Oligonucleotide for detection of SNP TSC0025175
taacaccccttca

SEQ ID NO: 101185 - DNA, 13 bp, Artificial Sequence
  Oligonucleotide for detection of SNP TSC0025175
tgaaggagtgtta

SEQ ID NO: 101186 - DNA, 13 bp, Artificial Sequence
  Oligonucleotide for detection of SNP TSC0025175
taacactccttca

SEQ ID NO: 101187 - DNA, 13 bp, Artificial Sequence
  Oligonucleotide for detection of SNP TSC0025176
atataaatgttta

SEQ ID NO: 101188 - DNA, 13 bp, Artificial Sequence
  Oligonucleotide for detection of SNP TSC0025176
taaacatttatat

SEQ ID NO: 101189 - DNA, 13 bp, Artificial Sequence
  Oligonucleotide for detection of SNP TSC0025176
atataagtgttta

SEQ ID NO: 101190 - DNA, 13 bp, Artificial Sequence
  Oligonucleotide for detection of SNP TSC0025176
taaacacttatat

SEQ ID NO: 101191 - DNA, 13 bp, Artificial Sequence
  Oligonucleotide for detection of SNP TSC0025180
ttgttagatgttg

SEQ ID NO: 101192 - DNA, 13 bp, Artificial Sequence
  Oligonucleotide for detection of SNP TSC0025180
caacatctaacaa

SEQ ID NO: 101193 - DNA, 13 bp, Artificial Sequence
  Oligonucleotide for detection of SNP TSC0025180
ttgttaaatgttg

SEQ ID NO: 101194 - DNA, 13 bp, Artificial Sequence
  Oligonucleotide for detection of SNP TSC0025180
caacatttaacaa

SEQ ID NO: 101195 - DNA, 13 bp, Artificial Sequence
  Oligonucleotide for detection of SNP TSC0025181
tagtatgtagaga

SEQ ID NO: 101196 - DNA, 13 bp, Artificial Sequence
  Oligonucleotide for detection of SNP TSC0025181
tctctacatacta

SEQ ID NO: 101197 - DNA, 13 bp, Artificial Sequence
  Oligonucleotide for detection of SNP TSC0025181
tagtatatagaga

SEQ ID NO: 101198 - DNA, 13 bp, Artificial Sequence
  Oligonucleotide for detection of SNP TSC0025181
tctctatatacta

SEQ ID NO: 101199 - DNA, 13 bp, Artificial Sequence
  Oligonucleotide for detection of SNP TSC0025182
gaattatagtttt

SEQ ID NO: 101200 - DNA, 13 bp, Artificial Sequence
  Oligonucleotide for detection of SNP TSC0025182
aaaactataattc

SEQ ID NO: 101201 - DNA, 13 bp, Artificial Sequence
  Oligonucleotide for detection of SNP TSC0025182
gaattagagtttt

SEQ ID NO: 101202 - DNA, 13 bp, Artificial Sequence
  Oligonucleotide for detection of SNP TSC0025182
aaaactctaattc

SEQ ID NO: 101203 - DNA, 13 bp, Artificial Sequence
  Oligonucleotide for detection of SNP TSC0025182
aagattgtagtty

SEQ ID NO: 101204 - DNA, 13 bp, Artificial Sequence
  Oligonucleotide for detection of SNP TSC0025182
raactacaatctt

SEQ ID NO: 101205 - DNA, 13 bp, Artificial Sequence
  Oligonucleotide for detection of SNP TSC0025182
aagattttagtty

SEQ ID NO: 101206 - DNA, 13 bp, Artificial Sequence
  Oligonucleotide for detection of SNP TSC0025182
raactaaaatctt

SEQ ID NO: 101207 - DNA, 13 bp, Artificial Sequence
  Oligonucleotide for detection of SNP TSC0025183
taaattatgggtt

SEQ ID NO: 101208 - DNA, 13 bp, Artificial Sequence
  Oligonucleotide for detection of SNP TSC0025183
aacccataattta

SEQ ID NO: 101209 - DNA, 13 bp, Artificial Sequence
  Oligonucleotide for detection of SNP TSC0025183
taaattgtgggtt

SEQ ID NO: 101210 - DNA, 13 bp, Artificial Sequence
  Oligonucleotide for detection of SNP TSC0025183
aacccacaattta

SEQ ID NO: 101211 - DNA, 13 bp, Artificial Sequence
  Oligonucleotide for detection of SNP TSC0025184
tattatgttttay

SEQ ID NO: 101212 - DNA, 13 bp, Artificial Sequence
  Oligonucleotide for detection of SNP TSC0025184
rtaaaacataata

SEQ ID NO: 101213 - DNA, 13 bp, Artificial Sequence
  Oligonucleotide for detection of SNP TSC0025184
tattattttttay

SEQ ID NO: 101214 - DNA, 13 bp, Artificial Sequence
  Oligonucleotide for detection of SNP TSC0025184
rtaaaaaataata

SEQ ID NO: 101215 - DNA, 13 bp, Artificial Sequence
  Oligonucleotide for detection of SNP TSC0025184
gtggagtatggtg

SEQ ID NO: 101216 - DNA, 13 bp, Artificial Sequence
  Oligonucleotide for detection of SNP TSC0025184
caccatactccac

SEQ ID NO: 101217 - DNA, 13 bp, Artificial Sequence
  Oligonucleotide for detection of SNP TSC0025184
gtggagaatggtg

SEQ ID NO: 101218 - DNA, 13 bp, Artificial Sequence
  Oligonucleotide for detection of SNP TSC0025184
caccattctccac

SEQ ID NO: 101219 - DNA, 13 bp, Artificial Sequence
  Oligonucleotide for detection of SNP TSC0025191
tttttttttattg

SEQ ID NO: 101220 - DNA, 13 bp, Artificial Sequence
  Oligonucleotide for detection of SNP TSC0025191
caataaaaaaaaa

SEQ ID NO: 101221 - DNA, 13 bp, Artificial Sequence
  Oligonucleotide for detection of SNP TSC0025192
tgatatatggatt

SEQ ID NO: 101222 - DNA, 13 bp, Artificial Sequence
  Oligonucleotide for detection of SNP TSC0025192
aatccatatatca

SEQ ID NO: 101223 - DNA, 13 bp, Artificial Sequence
  Oligonucleotide for detection of SNP TSC0025192
tgatatgtggatt

SEQ ID NO: 101224 - DNA, 13 bp, Artificial Sequence
  Oligonucleotide for detection of SNP TSC0025192
aatccacatatca

SEQ ID NO: 101225 - DNA, 13 bp, Artificial Sequence
  Oligonucleotide for detection of SNP TSC0025192
tgatacgtggatt

SEQ ID NO: 101226 - DNA, 13 bp, Artificial Sequence
  Oligonucleotide for detection of SNP TSC0025192
aatccacgtatca

SEQ ID NO: 101227 - DNA, 13 bp, Artificial Sequence
  Oligonucleotide for detection of SNP TSC0025192
agtttatgtgtta

SEQ ID NO: 101228 - DNA, 13 bp, Artificial Sequence
  Oligonucleotide for detection of SNP TSC0025192
taacacataaact

SEQ ID NO: 101229 - DNA, 13 bp, Artificial Sequence
  Oligonucleotide for detection of SNP TSC0025192
agtttacgtgtta

SEQ ID NO: 101230 - DNA, 13 bp, Artificial Sequence
  Oligonucleotide for detection of SNP TSC0025192
taacacgtaaact

SEQ ID NO: 101231 - DNA, 13 bp, Artificial Sequence
  Oligonucleotide for detection of SNP TSC0025196
tttttatgagagy

SEQ ID NO: 101232 - DNA, 13 bp, Artificial Sequence
  Oligonucleotide for detection of SNP TSC0025196
rctctcataaaaa

SEQ ID NO: 101233 - DNA, 13 bp, Artificial Sequence
  Oligonucleotide for detection of SNP TSC0025196
tttttacgagagy

SEQ ID NO: 101234 - DNA, 13 bp, Artificial Sequence
  Oligonucleotide for detection of SNP TSC0025196
rctctcgtaaaaa

SEQ ID NO: 101235 - DNA, 13 bp, Artificial Sequence
  Oligonucleotide for detection of SNP TSC0025196
gtttttgtgaaga

SEQ ID NO: 101236 - DNA, 13 bp, Artificial Sequence
  Oligonucleotide for detection of SNP TSC0025196
tcttcacaaaaac

SEQ ID NO: 101237 - DNA, 13 bp, Artificial Sequence
  Oligonucleotide for detection of SNP TSC0025196
gtttttatgaaga

SEQ ID NO: 101238 - DNA, 13 bp, Artificial Sequence
  Oligonucleotide for detection of SNP TSC0025196
tcttcataaaaac

SEQ ID NO: 101239 - DNA, 13 bp, Artificial Sequence
  Oligonucleotide for detection of SNP TSC0025196
gttttcgtgaaga

SEQ ID NO: 101240 - DNA, 13 bp, Artificial Sequence
  Oligonucleotide for detection of SNP TSC0025196
tcttcacgaaaac

SEQ ID NO: 101241 - DNA, 13 bp, Artificial Sequence
  Oligonucleotide for detection of SNP TSC0025200
tgaggaaggagag

SEQ ID NO: 101242 - DNA, 13 bp, Artificial Sequence
  Oligonucleotide for detection of SNP TSC0025200
ctctccttcctca

SEQ ID NO: 101243 - DNA, 13 bp, Artificial Sequence
  Oligonucleotide for detection of SNP TSC0025200
tgaggagggagag

SEQ ID NO: 101244 - DNA, 13 bp, Artificial Sequence
  Oligonucleotide for detection of SNP TSC0025200
ctctccctcctca

SEQ ID NO: 101245 - DNA, 13 bp, Artificial Sequence
  Oligonucleotide for detection of SNP TSC0025206
ttagggagtttgg

SEQ ID NO: 101246 - DNA, 13 bp, Artificial Sequence
  Oligonucleotide for detection of SNP TSC0025206
ccaaactccctaa

SEQ ID NO: 101247 - DNA, 13 bp, Artificial Sequence
  Oligonucleotide for detection of SNP TSC0025206
ttagggtgtttgg

SEQ ID NO: 101248 - DNA, 13 bp, Artificial Sequence
  Oligonucleotide for detection of SNP TSC0025206
ccaaacaccctaa

SEQ ID NO: 101249 - DNA, 13 bp, Artificial Sequence
  Oligonucleotide for detection of SNP TSC0025206
ttagggagttcgg

SEQ ID NO: 101250 - DNA, 13 bp, Artificial Sequence
  Oligonucleotide for detection of SNP TSC0025206
ccgaactccctaa

SEQ ID NO: 101251 - DNA, 13 bp, Artificial Sequence
  Oligonucleotide for detection of SNP TSC0025206
ttagggtgttcgg

SEQ ID NO: 101252 - DNA, 13 bp, Artificial Sequence
  Oligonucleotide for detection of SNP TSC0025206
ccgaacaccctaa

SEQ ID NO: 101253 - DNA, 13 bp, Artificial Sequence
  Oligonucleotide for detection of SNP TSC0025206
ttgaattttttgg

SEQ ID NO: 101254 - DNA, 13 bp, Artificial Sequence
  Oligonucleotide for detection of SNP TSC0025206
ccaaaaaattcaa

SEQ ID NO: 101255 - DNA, 13 bp, Artificial Sequence
  Oligonucleotide for detection of SNP TSC0025206
ttgaatattttgg

SEQ ID NO: 101256 - DNA, 13 bp, Artificial Sequence
  Oligonucleotide for detection of SNP TSC0025206
ccaaaatattcaa

SEQ ID NO: 101257 - DNA, 13 bp, Artificial Sequence
  Oligonucleotide for detection of SNP TSC0025206
tcgaattttttgg

SEQ ID NO: 101258 - DNA, 13 bp, Artificial Sequence
  Oligonucleotide for detection of SNP TSC0025206
ccaaaaaattcga

SEQ ID NO: 101259 - DNA, 13 bp, Artificial Sequence
  Oligonucleotide for detection of SNP TSC0025206
tcgaatattttgg

SEQ ID NO: 101260 - DNA, 13 bp, Artificial Sequence
  Oligonucleotide for detection of SNP TSC0025206
ccaaaatattcga

SEQ ID NO: 101261 - DNA, 13 bp, Artificial Sequence
  Oligonucleotide for detection of SNP TSC0025207
tgttaggggggag

SEQ ID NO: 101262 - DNA, 13 bp, Artificial Sequence
  Oligonucleotide for detection of SNP TSC0025207
ctcccccctaaca

SEQ ID NO: 101263 - DNA, 13 bp, Artificial Sequence
  Oligonucleotide for detection of SNP TSC0025207
tgttagtggggag

SEQ ID NO: 101264 - DNA, 13 bp, Artificial Sequence
  Oligonucleotide for detection of SNP TSC0025207
ctccccactaaca

SEQ ID NO: 101265 - DNA, 13 bp, Artificial Sequence
  Oligonucleotide for detection of SNP TSC0025207
tttttttttgata

SEQ ID NO: 101266 - DNA, 13 bp, Artificial Sequence
  Oligonucleotide for detection of SNP TSC0025207
tatcaaaaaaaaa

SEQ ID NO: 101267 - DNA, 13 bp, Artificial Sequence
  Oligonucleotide for detection of SNP TSC0025209
aaaaatgaaaaaa

SEQ ID NO: 101268 - DNA, 13 bp, Artificial Sequence
  Oligonucleotide for detection of SNP TSC0025209
ttttttcattttt

SEQ ID NO: 101269 - DNA, 13 bp, Artificial Sequence
  Oligonucleotide for detection of SNP TSC0025213
agaagtaaagggg

SEQ ID NO: 101270 - DNA, 13 bp, Artificial Sequence
  Oligonucleotide for detection of SNP TSC0025213
cccctttacttct

SEQ ID NO: 101271 - DNA, 13 bp, Artificial Sequence
  Oligonucleotide for detection of SNP TSC0025213
agaagttaagggg

SEQ ID NO: 101272 - DNA, 13 bp, Artificial Sequence
  Oligonucleotide for detection of SNP TSC0025213
ccccttaacttct

SEQ ID NO: 101273 - DNA, 13 bp, Artificial Sequence
  Oligonucleotide for detection of SNP TSC0025214
ttataggggaaag

SEQ ID NO: 101274 - DNA, 13 bp, Artificial Sequence
  Oligonucleotide for detection of SNP TSC0025214
ctttcccctataa

SEQ ID NO: 101275 - DNA, 13 bp, Artificial Sequence
  Oligonucleotide for detection of SNP TSC0025214
ttatagtggaaag

SEQ ID NO: 101276 - DNA, 13 bp, Artificial Sequence
  Oligonucleotide for detection of SNP TSC0025214
ctttccactataa

SEQ ID NO: 101277 - DNA, 13 bp, Artificial Sequence
  Oligonucleotide for detection of SNP TSC0025214
tttttttttgtgg

SEQ ID NO: 101278 - DNA, 13 bp, Artificial Sequence
  Oligonucleotide for detection of SNP TSC0025214
ccacaaaaaaaaa

SEQ ID NO: 101279 - DNA, 13 bp, Artificial Sequence
  Oligonucleotide for detection of SNP TSC0025214
ttttttattgtgg

SEQ ID NO: 101280 - DNA, 13 bp, Artificial Sequence
  Oligonucleotide for detection of SNP TSC0025214
ccacaataaaaaa

SEQ ID NO: 101281 - DNA, 13 bp, Artificial Sequence
  Oligonucleotide for detection of SNP TSC0025215
gtatatatgttta

SEQ ID NO: 101282 - DNA, 13 bp, Artificial Sequence
  Oligonucleotide for detection of SNP TSC0025215
taaacatatatac

SEQ ID NO: 101283 - DNA, 13 bp, Artificial Sequence
  Oligonucleotide for detection of SNP TSC0025215
gtatatgtgttta

SEQ ID NO: 101284 - DNA, 13 bp, Artificial Sequence
  Oligonucleotide for detection of SNP TSC0025215
taaacacatatac

SEQ ID NO: 101285 - DNA, 13 bp, Artificial Sequence
  Oligonucleotide for detection of SNP TSC0025218
ttttattgtttgg

SEQ ID NO: 101286 - DNA, 13 bp, Artificial Sequence
  Oligonucleotide for detection of SNP TSC0025218
ccaaacaataaaa

SEQ ID NO: 101287 - DNA, 13 bp, Artificial Sequence
  Oligonucleotide for detection of SNP TSC0025218
ttttatcgtttgg

SEQ ID NO: 101288 - DNA, 13 bp, Artificial Sequence
  Oligonucleotide for detection of SNP TSC0025218
ccaaacgataaaa

SEQ ID NO: 101289 - DNA, 13 bp, Artificial Sequence
  Oligonucleotide for detection of SNP TSC0025218
ttaaatggtggga

SEQ ID NO: 101290 - DNA, 13 bp, Artificial Sequence
  Oligonucleotide for detection of SNP TSC0025218
tcccaccatttaa

SEQ ID NO: 101291 - DNA, 13 bp, Artificial Sequence
  Oligonucleotide for detection of SNP TSC0025218
ttaaatagtggga

SEQ ID NO: 101292 - DNA, 13 bp, Artificial Sequence
  Oligonucleotide for detection of SNP TSC0025218
tcccactatttaa

SEQ ID NO: 101293 - DNA, 13 bp, Artificial Sequence
  Oligonucleotide for detection of SNP TSC0025218
ttaaacggtggga

SEQ ID NO: 101294 - DNA, 13 bp, Artificial Sequence
  Oligonucleotide for detection of SNP TSC0025218
tcccaccgtttaa

SEQ ID NO: 101295 - DNA, 13 bp, Artificial Sequence
  Oligonucleotide for detection of SNP TSC0025220
ttttgtaaagaag

SEQ ID NO: 101296 - DNA, 13 bp, Artificial Sequence
  Oligonucleotide for detection of SNP TSC0025220
cttctttacaaaa

SEQ ID NO: 101297 - DNA, 13 bp, Artificial Sequence
  Oligonucleotide for detection of SNP TSC0025220
ttttgtgaagaag

SEQ ID NO: 101298 - DNA, 13 bp, Artificial Sequence
  Oligonucleotide for detection of SNP TSC0025220
cttcttcacaaaa

SEQ ID NO: 101299 - DNA, 13 bp, Artificial Sequence
  Oligonucleotide for detection of SNP TSC0025220
ttttgcgaagaag

SEQ ID NO: 101300 - DNA, 13 bp, Artificial Sequence
  Oligonucleotide for detection of SNP TSC0025220
cttcttcgcaaaa

SEQ ID NO: 101301 - DNA, 13 bp, Artificial Sequence
  Oligonucleotide for detection of SNP TSC0025220
tttttttgtaaaa

SEQ ID NO: 101302 - DNA, 13 bp, Artificial Sequence
  Oligonucleotide for detection of SNP TSC0025220
ttttacaaaaaaa

SEQ ID NO: 101303 - DNA, 13 bp, Artificial Sequence
  Oligonucleotide for detection of SNP TSC0025220
ttttttcgtaaaa

SEQ ID NO: 101304 - DNA, 13 bp, Artificial Sequence
  Oligonucleotide for detection of SNP TSC0025220
ttttacgaaaaaa

SEQ ID NO: 101305 - DNA, 13 bp, Artificial Sequence
  Oligonucleotide for detection of SNP TSC0025221
attttaatgtagy

SEQ ID NO: 101306 - DNA, 13 bp, Artificial Sequence
  Oligonucleotide for detection of SNP TSC0025221
rctacattaaaat

SEQ ID NO: 101307 - DNA, 13 bp, Artificial Sequence
  Oligonucleotide for detection of SNP TSC0025221
attttagtgtagy

SEQ ID NO: 101308 - DNA, 13 bp, Artificial Sequence
  Oligonucleotide for detection of SNP TSC0025221
rctacactaaaat

SEQ ID NO: 101309 - DNA, 13 bp, Artificial Sequence
  Oligonucleotide for detection of SNP TSC0025222
agtatagggtttg

SEQ ID NO: 101310 - DNA, 13 bp, Artificial Sequence
  Oligonucleotide for detection of SNP TSC0025222
caaaccctatact

SEQ ID NO: 101311 - DNA, 13 bp, Artificial Sequence
  Oligonucleotide for detection of SNP TSC0025222
agtataaggtttg

SEQ ID NO: 101312 - DNA, 13 bp, Artificial Sequence
  Oligonucleotide for detection of SNP TSC0025222
caaaccttatact

SEQ ID NO: 101313 - DNA, 13 bp, Artificial Sequence
  Oligonucleotide for detection of SNP TSC0025223
tggtttgaaggta

SEQ ID NO: 101314 - DNA, 13 bp, Artificial Sequence
  Oligonucleotide for detection of SNP TSC0025223
taccttcaaacca

SEQ ID NO: 101315 - DNA, 13 bp, Artificial Sequence
  Oligonucleotide for detection of SNP TSC0025223
tggtttaaaggta

SEQ ID NO: 101316 - DNA, 13 bp, Artificial Sequence
  Oligonucleotide for detection of SNP TSC0025223
tacctttaaacca

SEQ ID NO: 101317 - DNA, 13 bp, Artificial Sequence
  Oligonucleotide for detection of SNP TSC0025228
tatttatttatty

SEQ ID NO: 101318 - DNA, 13 bp, Artificial Sequence
  Oligonucleotide for detection of SNP TSC0025228
raataaataaata

SEQ ID NO: 101319 - DNA, 13 bp, Artificial Sequence
  Oligonucleotide for detection of SNP TSC0025228
gaataagtagata

SEQ ID NO: 101320 - DNA, 13 bp, Artificial Sequence
  Oligonucleotide for detection of SNP TSC0025228
tatctacttattc

SEQ ID NO: 101321 - DNA, 13 bp, Artificial Sequence
  Oligonucleotide for detection of SNP TSC0025228
gaataattagata

SEQ ID NO: 101322 - DNA, 13 bp, Artificial Sequence
  Oligonucleotide for detection of SNP TSC0025228
tatctaattattc

SEQ ID NO: 101323 - DNA, 13 bp, Artificial Sequence
  Oligonucleotide for detection of SNP TSC0025233
tttagggttgaty

SEQ ID NO: 101324 - DNA, 13 bp, Artificial Sequence
  Oligonucleotide for detection of SNP TSC0025233
ratcaaccctaaa

SEQ ID NO: 101325 - DNA, 13 bp, Artificial Sequence
  Oligonucleotide for detection of SNP TSC0025233
tttaggattgaty

SEQ ID NO: 101326 - DNA, 13 bp, Artificial Sequence
  Oligonucleotide for detection of SNP TSC0025233
ratcaatcctaaa

SEQ ID NO: 101327 - DNA, 13 bp, Artificial Sequence
  Oligonucleotide for detection of SNP TSC0025234
ttaattttattaa

SEQ ID NO: 101328 - DNA, 13 bp, Artificial Sequence
  Oligonucleotide for detection of SNP TSC0025234
ttaataaaattaa

SEQ ID NO: 101329 - DNA, 13 bp, Artificial Sequence
  Oligonucleotide for detection of SNP TSC0025234
ttaatggaattag

SEQ ID NO: 101330 - DNA, 13 bp, Artificial Sequence
  Oligonucleotide for detection of SNP TSC0025234
ctaattccattaa

SEQ ID NO: 101331 - DNA, 13 bp, Artificial Sequence
  Oligonucleotide for detection of SNP TSC0025234
ttaatgtaattag

SEQ ID NO: 101332 - DNA, 13 bp, Artificial Sequence
  Oligonucleotide for detection of SNP TSC0025234
ctaattacattaa

SEQ ID NO: 101333 - DNA, 13 bp, Artificial Sequence
  Oligonucleotide for detection of SNP TSC0025235
taggtggttttty

SEQ ID NO: 101334 - DNA, 13 bp, Artificial Sequence
  Oligonucleotide for detection of SNP TSC0025235
raaaaaccaccta

SEQ ID NO: 101335 - DNA, 13 bp, Artificial Sequence
  Oligonucleotide for detection of SNP TSC0025235
taggtgattttty

SEQ ID NO: 101336 - DNA, 13 bp, Artificial Sequence
  Oligonucleotide for detection of SNP TSC0025235
raaaaatcaccta

SEQ ID NO: 101337 - DNA, 13 bp, Artificial Sequence
  Oligonucleotide for detection of SNP TSC0025238
taagtatatttty

SEQ ID NO: 101338 - DNA, 13 bp, Artificial Sequence
  Oligonucleotide for detection of SNP TSC0025238
raaaatatactta

SEQ ID NO: 101339 - DNA, 13 bp, Artificial Sequence
  Oligonucleotide for detection of SNP TSC0025238
ggaaatttgtttg

SEQ ID NO: 101340 - DNA, 13 bp, Artificial Sequence
  Oligonucleotide for detection of SNP TSC0025238
caaacaaatttcc

SEQ ID NO: 101341 - DNA, 13 bp, Artificial Sequence
  Oligonucleotide for detection of SNP TSC0025238
ggaaatatgtttg

SEQ ID NO: 101342 - DNA, 13 bp, Artificial Sequence
  Oligonucleotide for detection of SNP TSC0025238
caaacatatttcc

SEQ ID NO: 101343 - DNA, 13 bp, Artificial Sequence
  Oligonucleotide for detection of SNP TSC0025241
aaaatgtatagtt

SEQ ID NO: 101344 - DNA, 13 bp, Artificial Sequence
  Oligonucleotide for detection of SNP TSC0025241
aactatacatttt

SEQ ID NO: 101345 - DNA, 13 bp, Artificial Sequence
  Oligonucleotide for detection of SNP TSC0025241
aaaatggatagtt

SEQ ID NO: 101346 - DNA, 13 bp, Artificial Sequence
  Oligonucleotide for detection of SNP TSC0025241
aactatccatttt

SEQ ID NO: 101347 - DNA, 13 bp, Artificial Sequence
  Oligonucleotide for detection of SNP TSC0025241
aattatgtatttt

SEQ ID NO: 101348 - DNA, 13 bp, Artificial Sequence
  Oligonucleotide for detection of SNP TSC0025241
aaaatacataatt

SEQ ID NO: 101349 - DNA, 13 bp, Artificial Sequence
  Oligonucleotide for detection of SNP TSC0025241
aattatttatttt

SEQ ID NO: 101350 - DNA, 13 bp, Artificial Sequence
  Oligonucleotide for detection of SNP TSC0025241
aaaataaataatt

SEQ ID NO: 101351 - DNA, 13 bp, Artificial Sequence
  Oligonucleotide for detection of SNP TSC0025242
ttagaagagattg

SEQ ID NO: 101352 - DNA, 13 bp, Artificial Sequence
  Oligonucleotide for detection of SNP TSC0025242
caatctcttctaa

SEQ ID NO: 101353 - DNA, 13 bp, Artificial Sequence
  Oligonucleotide for detection of SNP TSC0025242
ttagaaaagattg

SEQ ID NO: 101354 - DNA, 13 bp, Artificial Sequence
  Oligonucleotide for detection of SNP TSC0025242
caatcttttctaa

SEQ ID NO: 101355 - DNA, 13 bp, Artificial Sequence
  Oligonucleotide for detection of SNP TSC0025244
ggtgtgtggtgat

SEQ ID NO: 101356 - DNA, 13 bp, Artificial Sequence
  Oligonucleotide for detection of SNP TSC0025244
atcaccacacacc

SEQ ID NO: 101357 - DNA, 13 bp, Artificial Sequence
  Oligonucleotide for detection of SNP TSC0025244
ggtgcgtggtgat

SEQ ID NO: 101358 - DNA, 13 bp, Artificial Sequence
  Oligonucleotide for detection of SNP TSC0025244
atcaccacgcacc

SEQ ID NO: 101359 - DNA, 13 bp, Artificial Sequence
  Oligonucleotide for detection of SNP TSC0025244
ggtgtgcggtgat

SEQ ID NO: 101360 - DNA, 13 bp, Artificial Sequence
  Oligonucleotide for detection of SNP TSC0025244
atcaccgcacacc

SEQ ID NO: 101361 - DNA, 13 bp, Artificial Sequence
  Oligonucleotide for detection of SNP TSC0025244
ggtgcgcggtgat

SEQ ID NO: 101362 - DNA, 13 bp, Artificial Sequence
  Oligonucleotide for detection of SNP TSC0025244
atcaccgcgcacc

SEQ ID NO: 101363 - DNA, 13 bp, Artificial Sequence
  Oligonucleotide for detection of SNP TSC0025244
attattacgtaty

SEQ ID NO: 101364 - DNA, 13 bp, Artificial Sequence
  Oligonucleotide for detection of SNP TSC0025244
ratacgtaataat

SEQ ID NO: 101365 - DNA, 13 bp, Artificial Sequence
  Oligonucleotide for detection of SNP TSC0025244
attattgcgtaty

SEQ ID NO: 101366 - DNA, 13 bp, Artificial Sequence
  Oligonucleotide for detection of SNP TSC0025244
ratacgcaataat

SEQ ID NO: 101367 - DNA, 13 bp, Artificial Sequence
  Oligonucleotide for detection of SNP TSC0025244
attatcgcgtaty

SEQ ID NO: 101368 - DNA, 13 bp, Artificial Sequence
  Oligonucleotide for detection of SNP TSC0025244
ratacgcgataat

SEQ ID NO: 101369 - DNA, 13 bp, Artificial Sequence
  Oligonucleotide for detection of SNP TSC0025245
tttttgtgggggt

SEQ ID NO: 101370 - DNA, 13 bp, Artificial Sequence
  Oligonucleotide for detection of SNP TSC0025245
acccccacaaaaa

SEQ ID NO: 101371 - DNA, 13 bp, Artificial Sequence
  Oligonucleotide for detection of SNP TSC0025245
tttttgggggggt

SEQ ID NO: 101372 - DNA, 13 bp, Artificial Sequence
  Oligonucleotide for detection of SNP TSC0025245
acccccccaaaaa

SEQ ID NO: 101373 - DNA, 13 bp, Artificial Sequence
  Oligonucleotide for detection of SNP TSC0025245
tttttgcgggggt

SEQ ID NO: 101374 - DNA, 13 bp, Artificial Sequence
  Oligonucleotide for detection of SNP TSC0025245
acccccgcaaaaa

SEQ ID NO: 101375 - DNA, 13 bp, Artificial Sequence
  Oligonucleotide for detection of SNP TSC0025245
atttttgtaaaga

SEQ ID NO: 101376 - DNA, 13 bp, Artificial Sequence
  Oligonucleotide for detection of SNP TSC0025245
tctttacaaaaat

SEQ ID NO: 101377 - DNA, 13 bp, Artificial Sequence
  Oligonucleotide for detection of SNP TSC0025245
atttttttaaaga

SEQ ID NO: 101378 - DNA, 13 bp, Artificial Sequence
  Oligonucleotide for detection of SNP TSC0025245
tctttaaaaaaat

SEQ ID NO: 101379 - DNA, 13 bp, Artificial Sequence
  Oligonucleotide for detection of SNP TSC0025245
attttcgtaaaga

SEQ ID NO: 101380 - DNA, 13 bp, Artificial Sequence
  Oligonucleotide for detection of SNP TSC0025245
tctttacgaaaat

SEQ ID NO: 101381 - DNA, 13 bp, Artificial Sequence
  Oligonucleotide for detection of SNP TSC0025246
tgtggtagtagty

SEQ ID NO: 101382 - DNA, 13 bp, Artificial Sequence
  Oligonucleotide for detection of SNP TSC0025246
ractactaccaca

SEQ ID NO: 101383 - DNA, 13 bp, Artificial Sequence
  Oligonucleotide for detection of SNP TSC0025246
tgtggtggtagty

SEQ ID NO: 101384 - DNA, 13 bp, Artificial Sequence
  Oligonucleotide for detection of SNP TSC0025246
ractaccaccaca

SEQ ID NO: 101385 - DNA, 13 bp, Artificial Sequence
  Oligonucleotide for detection of SNP TSC0025246
tgtggcggtagty

SEQ ID NO: 101386 - DNA, 13 bp, Artificial Sequence
  Oligonucleotide for detection of SNP TSC0025246
ractaccgccaca

SEQ ID NO: 101387 - DNA, 13 bp, Artificial Sequence
  Oligonucleotide for detection of SNP TSC0025247
ttatggtgtgata

SEQ ID NO: 101388 - DNA, 13 bp, Artificial Sequence
  Oligonucleotide for detection of SNP TSC0025247
tatcacaccataa

SEQ ID NO: 101389 - DNA, 13 bp, Artificial Sequence
  Oligonucleotide for detection of SNP TSC0025247
ttatggcgtgata

SEQ ID NO: 101390 - DNA, 13 bp, Artificial Sequence
  Oligonucleotide for detection of SNP TSC0025247
tatcacgccataa

SEQ ID NO: 101391 - DNA, 13 bp, Artificial Sequence
  Oligonucleotide for detection of SNP TSC0025247
tgttatgttatag

SEQ ID NO: 101392 - DNA, 13 bp, Artificial Sequence
  Oligonucleotide for detection of SNP TSC0025247
ctataacataaca

SEQ ID NO: 101393 - DNA, 13 bp, Artificial Sequence
  Oligonucleotide for detection of SNP TSC0025247
tgttatattatag

SEQ ID NO: 101394 - DNA, 13 bp, Artificial Sequence
  Oligonucleotide for detection of SNP TSC0025247
ctataatataaca

SEQ ID NO: 101395 - DNA, 13 bp, Artificial Sequence
  Oligonucleotide for detection of SNP TSC0025247
tgttacgttatag

SEQ ID NO: 101396 - DNA, 13 bp, Artificial Sequence
  Oligonucleotide for detection of SNP TSC0025247
ctataacgtaaca

SEQ ID NO: 101397 - DNA, 13 bp, Artificial Sequence
  Oligonucleotide for detection of SNP TSC0025249
ggggggggggggg

SEQ ID NO: 101398 - DNA, 13 bp, Artificial Sequence
  Oligonucleotide for detection of SNP TSC0025249
ccccccccccccc

SEQ ID NO: 101399 - DNA, 13 bp, Artificial Sequence
  Oligonucleotide for detection of SNP TSC0025249
ggggggtgggggg

SEQ ID NO: 101400 - DNA, 13 bp, Artificial Sequence
  Oligonucleotide for detection of SNP TSC0025249
ccccccacccccc

SEQ ID NO: 101401 - DNA, 13 bp, Artificial Sequence
  Oligonucleotide for detection of SNP TSC0025250
aagattgtatggg

SEQ ID NO: 101402 - DNA, 13 bp, Artificial Sequence
  Oligonucleotide for detection of SNP TSC0025250
cccatacaatctt

SEQ ID NO: 101403 - DNA, 13 bp, Artificial Sequence
  Oligonucleotide for detection of SNP TSC0025250
aagattttatggg

SEQ ID NO: 101404 - DNA, 13 bp, Artificial Sequence
  Oligonucleotide for detection of SNP TSC0025250
cccataaaatctt

SEQ ID NO: 101405 - DNA, 13 bp, Artificial Sequence
  Oligonucleotide for detection of SNP TSC0025250
tttatgtaatttt

SEQ ID NO: 101406 - DNA, 13 bp, Artificial Sequence
  Oligonucleotide for detection of SNP TSC0025250
aaaattacataaa

SEQ ID NO: 101407 - DNA, 13 bp, Artificial Sequence
  Oligonucleotide for detection of SNP TSC0025250
tttatgaaatttt

SEQ ID NO: 101408 - DNA, 13 bp, Artificial Sequence
  Oligonucleotide for detection of SNP TSC0025250
aaaatttcataaa

SEQ ID NO: 101409 - DNA, 13 bp, Artificial Sequence
  Oligonucleotide for detection of SNP TSC0025251
aggtagtgttaaa

SEQ ID NO: 101410 - DNA, 13 bp, Artificial Sequence
  Oligonucleotide for detection of SNP TSC0025251
tttaacactacct

SEQ ID NO: 101411 - DNA, 13 bp, Artificial Sequence
  Oligonucleotide for detection of SNP TSC0025251
aggtagcgttaaa

SEQ ID NO: 101412 - DNA, 13 bp, Artificial Sequence
  Oligonucleotide for detection of SNP TSC0025251
tttaacgctacct

SEQ ID NO: 101413 - DNA, 13 bp, Artificial Sequence
  Oligonucleotide for detection of SNP TSC0025251
tttgatattgttt

SEQ ID NO: 101414 - DNA, 13 bp, Artificial Sequence
  Oligonucleotide for detection of SNP TSC0025251
aaacaatatcaaa

SEQ ID NO: 101415 - DNA, 13 bp, Artificial Sequence
  Oligonucleotide for detection of SNP TSC0025251
tttgacgttgttt

SEQ ID NO: 101416 - DNA, 13 bp, Artificial Sequence
  Oligonucleotide for detection of SNP TSC0025251
aaacaacgtcaaa

SEQ ID NO: 101417 - DNA, 13 bp, Artificial Sequence
  Oligonucleotide for detection of SNP TSC0025252
aaggagatttagg

SEQ ID NO: 101418 - DNA, 13 bp, Artificial Sequence
  Oligonucleotide for detection of SNP TSC0025252
cctaaatctcctt

SEQ ID NO: 101419 - DNA, 13 bp, Artificial Sequence
  Oligonucleotide for detection of SNP TSC0025252
aaggagttttagg

SEQ ID NO: 101420 - DNA, 13 bp, Artificial Sequence
  Oligonucleotide for detection of SNP TSC0025252
cctaaaactcctt

SEQ ID NO: 101421 - DNA, 13 bp, Artificial Sequence
  Oligonucleotide for detection of SNP TSC0025252
tttgaattttttt

SEQ ID NO: 101422 - DNA, 13 bp, Artificial Sequence
  Oligonucleotide for detection of SNP TSC0025252
aaaaaaattcaaa

SEQ ID NO: 101423 - DNA, 13 bp, Artificial Sequence
  Oligonucleotide for detection of SNP TSC0025255
gtggggggagtat

SEQ ID NO: 101424 - DNA, 13 bp, Artificial Sequence
  Oligonucleotide for detection of SNP TSC0025255
atactccccccac

SEQ ID NO: 101425 - DNA, 13 bp, Artificial Sequence
  Oligonucleotide for detection of SNP TSC0025255
gtggggagagtat

SEQ ID NO: 101426 - DNA, 13 bp, Artificial Sequence
  Oligonucleotide for detection of SNP TSC0025255
atactctccccac

SEQ ID NO: 101427 - DNA, 13 bp, Artificial Sequence
  Oligonucleotide for detection of SNP TSC0025259
ttgtaggggatgg

SEQ ID NO: 101428 - DNA, 13 bp, Artificial Sequence
  Oligonucleotide for detection of SNP TSC0025259
ccatcccctacaa

SEQ ID NO: 101429 - DNA, 13 bp, Artificial Sequence
  Oligonucleotide for detection of SNP TSC0025259
ttgtagaggatgg

SEQ ID NO: 101430 - DNA, 13 bp, Artificial Sequence
  Oligonucleotide for detection of SNP TSC0025259
ccatcctctacaa

SEQ ID NO: 101431 - DNA, 13 bp, Artificial Sequence
  Oligonucleotide for detection of SNP TSC0025260
ttgggggaaatta

SEQ ID NO: 101432 - DNA, 13 bp, Artificial Sequence
  Oligonucleotide for detection of SNP TSC0025260
taatttcccccaa

SEQ ID NO: 101433 - DNA, 13 bp, Artificial Sequence
  Oligonucleotide for detection of SNP TSC0025260
ttggggaaaatta

SEQ ID NO: 101434 - DNA, 13 bp, Artificial Sequence
  Oligonucleotide for detection of SNP TSC0025260
taattttccccaa

SEQ ID NO: 101435 - DNA, 13 bp, Artificial Sequence
  Oligonucleotide for detection of SNP TSC0025263
atattggttgttg

SEQ ID NO: 101436 - DNA, 13 bp, Artificial Sequence
  Oligonucleotide for detection of SNP TSC0025263
caacaaccaatat

SEQ ID NO: 101437 - DNA, 13 bp, Artificial Sequence
  Oligonucleotide for detection of SNP TSC0025263
atattgtttgttg

SEQ ID NO: 101438 - DNA, 13 bp, Artificial Sequence
  Oligonucleotide for detection of SNP TSC0025263
caacaaacaatat

SEQ ID NO: 101439 - DNA, 13 bp, Artificial Sequence
  Oligonucleotide for detection of SNP TSC0025263
tagtagttaatgt

SEQ ID NO: 101440 - DNA, 13 bp, Artificial Sequence
  Oligonucleotide for detection of SNP TSC0025263
acattaactacta

SEQ ID NO: 101441 - DNA, 13 bp, Artificial Sequence
  Oligonucleotide for detection of SNP TSC0025263
tagtagataatgt

SEQ ID NO: 101442 - DNA, 13 bp, Artificial Sequence
  Oligonucleotide for detection of SNP TSC0025263
acattatctacta

SEQ ID NO: 101443 - DNA, 13 bp, Artificial Sequence
  Oligonucleotide for detection of SNP TSC0025270
ttttggatatgat

SEQ ID NO: 101444 - DNA, 13 bp, Artificial Sequence
  Oligonucleotide for detection of SNP TSC0025270
atcatatccaaaa

SEQ ID NO: 101445 - DNA, 13 bp, Artificial Sequence
  Oligonucleotide for detection of SNP TSC0025270
ttttggttatgat

SEQ ID NO: 101446 - DNA, 13 bp, Artificial Sequence
  Oligonucleotide for detection of SNP TSC0025270
atcataaccaaaa

SEQ ID NO: 101447 - DNA, 13 bp, Artificial Sequence
  Oligonucleotide for detection of SNP TSC0025270
attatatttaggg

SEQ ID NO: 101448 - DNA, 13 bp, Artificial Sequence
  Oligonucleotide for detection of SNP TSC0025270
ccctaaatataat

SEQ ID NO: 101449 - DNA, 13 bp, Artificial Sequence
  Oligonucleotide for detection of SNP TSC0025270
attataattaggg

SEQ ID NO: 101450 - DNA, 13 bp, Artificial Sequence
  Oligonucleotide for detection of SNP TSC0025270
ccctaattataat

SEQ ID NO: 101451 - DNA, 13 bp, Artificial Sequence
  Oligonucleotide for detection of SNP TSC0025271
ttatgatggtatg

SEQ ID NO: 101452 - DNA, 13 bp, Artificial Sequence
  Oligonucleotide for detection of SNP TSC0025271
cataccatcataa

SEQ ID NO: 101453 - DNA, 13 bp, Artificial Sequence
  Oligonucleotide for detection of SNP TSC0025271
ttatgagggtatg

SEQ ID NO: 101454 - DNA, 13 bp, Artificial Sequence
  Oligonucleotide for detection of SNP TSC0025271
cataccctcataa

SEQ ID NO: 101455 - DNA, 13 bp, Artificial Sequence
  Oligonucleotide for detection of SNP TSC0025271
ttacgatggtatg

SEQ ID NO: 101456 - DNA, 13 bp, Artificial Sequence
  Oligonucleotide for detection of SNP TSC0025271
cataccatcgtaa

SEQ ID NO: 101457 - DNA, 13 bp, Artificial Sequence
  Oligonucleotide for detection of SNP TSC0025271
ttacgagggtatg

SEQ ID NO: 101458 - DNA, 13 bp, Artificial Sequence
  Oligonucleotide for detection of SNP TSC0025271
cataccctcgtaa

SEQ ID NO: 101459 - DNA, 13 bp, Artificial Sequence
  Oligonucleotide for detection of SNP TSC0025271
ttatgacggtatg

SEQ ID NO: 101460 - DNA, 13 bp, Artificial Sequence
  Oligonucleotide for detection of SNP TSC0025271
cataccgtcataa

SEQ ID NO: 101461 - DNA, 13 bp, Artificial Sequence
  Oligonucleotide for detection of SNP TSC0025271
ttatgagggtacg

SEQ ID NO: 101462 - DNA, 13 bp, Artificial Sequence
  Oligonucleotide for detection of SNP TSC0025271
cgtaccctcataa

SEQ ID NO: 101463 - DNA, 13 bp, Artificial Sequence
  Oligonucleotide for detection of SNP TSC0025271
ttatgatggtacg

SEQ ID NO: 101464 - DNA, 13 bp, Artificial Sequence
  Oligonucleotide for detection of SNP TSC0025271
cgtaccatcataa

SEQ ID NO: 101465 - DNA, 13 bp, Artificial Sequence
  Oligonucleotide for detection of SNP TSC0025271
ttacgagggtacg

SEQ ID NO: 101466 - DNA, 13 bp, Artificial Sequence
  Oligonucleotide for detection of SNP TSC0025271
cgtaccctcgtaa

SEQ ID NO: 101467 - DNA, 13 bp, Artificial Sequence
  Oligonucleotide for detection of SNP TSC0025271
ttacgacggtatg

SEQ ID NO: 101468 - DNA, 13 bp, Artificial Sequence
  Oligonucleotide for detection of SNP TSC0025271
cataccgtcgtaa

SEQ ID NO: 101469 - DNA, 13 bp, Artificial Sequence
  Oligonucleotide for detection of SNP TSC0025271
ttacgatggtacg

SEQ ID NO: 101470 - DNA, 13 bp, Artificial Sequence
  Oligonucleotide for detection of SNP TSC0025271
cgtaccatcgtaa

SEQ ID NO: 101471 - DNA, 13 bp, Artificial Sequence
  Oligonucleotide for detection of SNP TSC0025271
ttatgacggtacg

SEQ ID NO: 101472 - DNA, 13 bp, Artificial Sequence
  Oligonucleotide for detection of SNP TSC0025271
cgtaccgtcataa

SEQ ID NO: 101473 - DNA, 13 bp, Artificial Sequence
  Oligonucleotide for detection of SNP TSC0025271
ttacgacggtacg

SEQ ID NO: 101474 - DNA, 13 bp, Artificial Sequence
  Oligonucleotide for detection of SNP TSC0025271
cgtaccgtcgtaa

SEQ ID NO: 101475 - DNA, 13 bp, Artificial Sequence
  Oligonucleotide for detection of SNP TSC0025271
tgtgttgttgtag

SEQ ID NO: 101476 - DNA, 13 bp, Artificial Sequence
  Oligonucleotide for detection of SNP TSC0025271
ctacaacaacaca

SEQ ID NO: 101477 - DNA, 13 bp, Artificial Sequence
  Oligonucleotide for detection of SNP TSC0025271
tgtgtttttgtag

SEQ ID NO: 101478 - DNA, 13 bp, Artificial Sequence
  Oligonucleotide for detection of SNP TSC0025271
ctacaaaaacaca

SEQ ID NO: 101479 - DNA, 13 bp, Artificial Sequence
  Oligonucleotide for detection of SNP TSC0025271
cgtgttgttgtag

SEQ ID NO: 101480 - DNA, 13 bp, Artificial Sequence
  Oligonucleotide for detection of SNP TSC0025271
ctacaacaacacg

SEQ ID NO: 101481 - DNA, 13 bp, Artificial Sequence
  Oligonucleotide for detection of SNP TSC0025271
cgtgtttttgtag

SEQ ID NO: 101482 - DNA, 13 bp, Artificial Sequence
  Oligonucleotide for detection of SNP TSC0025271
ctacaaaaacacg

SEQ ID NO: 101483 - DNA, 13 bp, Artificial Sequence
  Oligonucleotide for detection of SNP TSC0025271
tgtgtcgttgtag

SEQ ID NO: 101484 - DNA, 13 bp, Artificial Sequence
  Oligonucleotide for detection of SNP TSC0025271
ctacaacgacaca

SEQ ID NO: 101485 - DNA, 13 bp, Artificial Sequence
  Oligonucleotide for detection of SNP TSC0025271
tgtgttttcgtag

SEQ ID NO: 101486 - DNA, 13 bp, Artificial Sequence
  Oligonucleotide for detection of SNP TSC0025271
ctacgaaaacaca

SEQ ID NO: 101487 - DNA, 13 bp, Artificial Sequence
  Oligonucleotide for detection of SNP TSC0025271
tgtgttgtcgtag

SEQ ID NO: 101488 - DNA, 13 bp, Artificial Sequence
  Oligonucleotide for detection of SNP TSC0025271
ctacgacaacaca

SEQ ID NO: 101489 - DNA, 13 bp, Artificial Sequence
  Oligonucleotide for detection of SNP TSC0025271
cgtgttttcgtag

SEQ ID NO: 101490 - DNA, 13 bp, Artificial Sequence
  Oligonucleotide for detection of SNP TSC0025271
ctacgaaaacacg

SEQ ID NO: 101491 - DNA, 13 bp, Artificial Sequence
  Oligonucleotide for detection of SNP TSC0025271
cgtgtcgttgtag

SEQ ID NO: 101492 - DNA, 13 bp, Artificial Sequence
  Oligonucleotide for detection of SNP TSC0025271
ctacaacgacacg

SEQ ID NO: 101493 - DNA, 13 bp, Artificial Sequence
  Oligonucleotide for detection of SNP TSC0025271
cgtgttgtcgtag

SEQ ID NO: 101494 - DNA, 13 bp, Artificial Sequence
  Oligonucleotide for detection of SNP TSC0025271
ctacgacaacacg

SEQ ID NO: 101495 - DNA, 13 bp, Artificial Sequence
  Oligonucleotide for detection of SNP TSC0025271
tgtgtcgtcgtag

SEQ ID NO: 101496 - DNA, 13 bp, Artificial Sequence
  Oligonucleotide for detection of SNP TSC0025271
ctacgacgacaca

SEQ ID NO: 101497 - DNA, 13 bp, Artificial Sequence
  Oligonucleotide for detection of SNP TSC0025271
cgtgtcgtcgtag

SEQ ID NO: 101498 - DNA, 13 bp, Artificial Sequence
  Oligonucleotide for detection of SNP TSC0025271
ctacgacgacacg

SEQ ID NO: 101499 - DNA, 13 bp, Artificial Sequence
  Oligonucleotide for detection of SNP TSC0025272
tagttattaagtt

SEQ ID NO: 101500 - DNA, 13 bp, Artificial Sequence
  Oligonucleotide for detection of SNP TSC0025272
aacttaataacta

SEQ ID NO: 101501 - DNA, 13 bp, Artificial Sequence
  Oligonucleotide for detection of SNP TSC0025272
tagttagtaagtt

SEQ ID NO: 101502 - DNA, 13 bp, Artificial Sequence
  Oligonucleotide for detection of SNP TSC0025272
aacttactaacta

SEQ ID NO: 101503 - DNA, 13 bp, Artificial Sequence
  Oligonucleotide for detection of SNP TSC0025272
aatttagtagttg

SEQ ID NO: 101504 - DNA, 13 bp, Artificial Sequence
  Oligonucleotide for detection of SNP TSC0025272
caactactaaatt

SEQ ID NO: 101505 - DNA, 13 bp, Artificial Sequence
  Oligonucleotide for detection of SNP TSC0025272
aatttattagttg

SEQ ID NO: 101506 - DNA, 13 bp, Artificial Sequence
  Oligonucleotide for detection of SNP TSC0025272
caactaataaatt

SEQ ID NO: 101507 - DNA, 13 bp, Artificial Sequence
  Oligonucleotide for detection of SNP TSC0025274
gtgataattgtat

SEQ ID NO: 101508 - DNA, 13 bp, Artificial Sequence
  Oligonucleotide for detection of SNP TSC0025274
atacaattatcac

SEQ ID NO: 101509 - DNA, 13 bp, Artificial Sequence
  Oligonucleotide for detection of SNP TSC0025274
gtgatatttgtat

SEQ ID NO: 101510 - DNA, 13 bp, Artificial Sequence
  Oligonucleotide for detection of SNP TSC0025274
atacaaatatcac

SEQ ID NO: 101511 - DNA, 13 bp, Artificial Sequence
  Oligonucleotide for detection of SNP TSC0025274
atataattattay

SEQ ID NO: 101512 - DNA, 13 bp, Artificial Sequence
  Oligonucleotide for detection of SNP TSC0025274
rtaataattatat

SEQ ID NO: 101513 - DNA, 13 bp, Artificial Sequence
  Oligonucleotide for detection of SNP TSC0025274
atataaatattay

SEQ ID NO: 101514 - DNA, 13 bp, Artificial Sequence
  Oligonucleotide for detection of SNP TSC0025274
rtaatatttatat

SEQ ID NO: 101515 - DNA, 13 bp, Artificial Sequence
  Oligonucleotide for detection of SNP TSC0025275
atttatagaaatg

SEQ ID NO: 101516 - DNA, 13 bp, Artificial Sequence
  Oligonucleotide for detection of SNP TSC0025275
catttctataaat

SEQ ID NO: 101517 - DNA, 13 bp, Artificial Sequence
  Oligonucleotide for detection of SNP TSC0025275
atttattgaaatg

SEQ ID NO: 101518 - DNA, 13 bp, Artificial Sequence
  Oligonucleotide for detection of SNP TSC0025275
catttcaataaat

SEQ ID NO: 101519 - DNA, 13 bp, Artificial Sequence
  Oligonucleotide for detection of SNP TSC0025275
atttatagaaacg

SEQ ID NO: 101520 - DNA, 13 bp, Artificial Sequence
  Oligonucleotide for detection of SNP TSC0025275
cgtttctataaat

SEQ ID NO: 101521 - DNA, 13 bp, Artificial Sequence
  Oligonucleotide for detection of SNP TSC0025275
atttattgaaacg

SEQ ID NO: 101522 - DNA, 13 bp, Artificial Sequence
  Oligonucleotide for detection of SNP TSC0025275
cgtttcaataaat

SEQ ID NO: 101523 - DNA, 13 bp, Artificial Sequence
  Oligonucleotide for detection of SNP TSC0025275
tgttttagtgagt

SEQ ID NO: 101524 - DNA, 13 bp, Artificial Sequence
  Oligonucleotide for detection of SNP TSC0025275
actcactaaaaca

SEQ ID NO: 101525 - DNA, 13 bp, Artificial Sequence
  Oligonucleotide for detection of SNP TSC0025275
cgtttttgtgagt

SEQ ID NO: 101526 - DNA, 13 bp, Artificial Sequence
  Oligonucleotide for detection of SNP TSC0025275
actcacaaaaacg

SEQ ID NO: 101527 - DNA, 13 bp, Artificial Sequence
  Oligonucleotide for detection of SNP TSC0025275
cgttttagtgagt

SEQ ID NO: 101528 - DNA, 13 bp, Artificial Sequence
  Oligonucleotide for detection of SNP TSC0025275
actcactaaaacg

SEQ ID NO: 101529 - DNA, 13 bp, Artificial Sequence
  Oligonucleotide for detection of SNP TSC0025276
ttagttaggggaa

SEQ ID NO: 101530 - DNA, 13 bp, Artificial Sequence
  Oligonucleotide for detection of SNP TSC0025276
ttcccctaactaa

SEQ ID NO: 101531 - DNA, 13 bp, Artificial Sequence
  Oligonucleotide for detection of SNP TSC0025276
ttagtttggggaa

SEQ ID NO: 101532 - DNA, 13 bp, Artificial Sequence
  Oligonucleotide for detection of SNP TSC0025276
ttccccaaactaa

SEQ ID NO: 101533 - DNA, 13 bp, Artificial Sequence
  Oligonucleotide for detection of SNP TSC0025276
tttttttggttga

SEQ ID NO: 101534 - DNA, 13 bp, Artificial Sequence
  Oligonucleotide for detection of SNP TSC0025276
tcaaccaaaaaaa

SEQ ID NO: 101535 - DNA, 13 bp, Artificial Sequence
  Oligonucleotide for detection of SNP TSC0025276
ttttttaggttga

SEQ ID NO: 101536 - DNA, 13 bp, Artificial Sequence
  Oligonucleotide for detection of SNP TSC0025276
tcaacctaaaaaa

SEQ ID NO: 101537 - DNA, 13 bp, Artificial Sequence
  Oligonucleotide for detection of SNP TSC0025278
ttatatatgttaa

SEQ ID NO: 101538 - DNA, 13 bp, Artificial Sequence
  Oligonucleotide for detection of SNP TSC0025278
ttaacatatataa

SEQ ID NO: 101539 - DNA, 13 bp, Artificial Sequence
  Oligonucleotide for detection of SNP TSC0025278
ttatatgtgttaa

SEQ ID NO: 101540 - DNA, 13 bp, Artificial Sequence
  Oligonucleotide for detection of SNP TSC0025278
ttaacacatataa

SEQ ID NO: 101541 - DNA, 13 bp, Artificial Sequence
  Oligonucleotide for detection of SNP TSC0025282
aagagtagagggg

SEQ ID NO: 101542 - DNA, 13 bp, Artificial Sequence
  Oligonucleotide for detection of SNP TSC0025282
cccctctactctt

SEQ ID NO: 101543 - DNA, 13 bp, Artificial Sequence
  Oligonucleotide for detection of SNP TSC0025282
aagagtggagggg

SEQ ID NO: 101544 - DNA, 13 bp, Artificial Sequence
  Oligonucleotide for detection of SNP TSC0025282
cccctccactctt

SEQ ID NO: 101545 - DNA, 13 bp, Artificial Sequence
  Oligonucleotide for detection of SNP TSC0025282
aagagcggagggg

SEQ ID NO: 101546 - DNA, 13 bp, Artificial Sequence
  Oligonucleotide for detection of SNP TSC0025282
cccctccgctctt

SEQ ID NO: 101547 - DNA, 13 bp, Artificial Sequence
  Oligonucleotide for detection of SNP TSC0025284
gagtttattttgy

SEQ ID NO: 101548 - DNA, 13 bp, Artificial Sequence
  Oligonucleotide for detection of SNP TSC0025284
rcaaaataaactc

SEQ ID NO: 101549 - DNA, 13 bp, Artificial Sequence
  Oligonucleotide for detection of SNP TSC0025284
gagtttgttttgy

SEQ ID NO: 101550 - DNA, 13 bp, Artificial Sequence
  Oligonucleotide for detection of SNP TSC0025284
rcaaaacaaactc

SEQ ID NO: 101551 - DNA, 13 bp, Artificial Sequence
  Oligonucleotide for detection of SNP TSC0025284
gagttcgttttgy

SEQ ID NO: 101552 - DNA, 13 bp, Artificial Sequence
  Oligonucleotide for detection of SNP TSC0025284
rcaaaacgaactc

SEQ ID NO: 101553 - DNA, 13 bp, Artificial Sequence
  Oligonucleotide for detection of SNP TSC0025284
gtagagtgggtty

SEQ ID NO: 101554 - DNA, 13 bp, Artificial Sequence
  Oligonucleotide for detection of SNP TSC0025284
raacccactctac

SEQ ID NO: 101555 - DNA, 13 bp, Artificial Sequence
  Oligonucleotide for detection of SNP TSC0025284
gtagagcgggtty

SEQ ID NO: 101556 - DNA, 13 bp, Artificial Sequence
  Oligonucleotide for detection of SNP TSC0025284
raacccgctctac

SEQ ID NO: 101557 - DNA, 13 bp, Artificial Sequence
  Oligonucleotide for detection of SNP TSC0025290
gtttggataaaaa

SEQ ID NO: 101558 - DNA, 13 bp, Artificial Sequence
  Oligonucleotide for detection of SNP TSC0025290
tttttatccaaac

SEQ ID NO: 101559 - DNA, 13 bp, Artificial Sequence
  Oligonucleotide for detection of SNP TSC0025290
gtttggttaaaaa

SEQ ID NO: 101560 - DNA, 13 bp, Artificial Sequence
  Oligonucleotide for detection of SNP TSC0025290
tttttaaccaaac

SEQ ID NO: 101561 - DNA, 13 bp, Artificial Sequence
  Oligonucleotide for detection of SNP TSC0025290
tttttgtttagay

SEQ ID NO: 101562 - DNA, 13 bp, Artificial Sequence
  Oligonucleotide for detection of SNP TSC0025290
rtctaaacaaaaa

SEQ ID NO: 101563 - DNA, 13 bp, Artificial Sequence
  Oligonucleotide for detection of SNP TSC0025290
tttttgattagay

SEQ ID NO: 101564 - DNA, 13 bp, Artificial Sequence
  Oligonucleotide for detection of SNP TSC0025290
rtctaatcaaaaa

SEQ ID NO: 101565 - DNA, 13 bp, Artificial Sequence
  Oligonucleotide for detection of SNP TSC0025295
gtttttattggtg

SEQ ID NO: 101566 - DNA, 13 bp, Artificial Sequence
  Oligonucleotide for detection of SNP TSC0025295
caccaataaaaac

SEQ ID NO: 101567 - DNA, 13 bp, Artificial Sequence
  Oligonucleotide for detection of SNP TSC0025295
gttttttttggtg

SEQ ID NO: 101568 - DNA, 13 bp, Artificial Sequence
  Oligonucleotide for detection of SNP TSC0025295
caccaaaaaaaac

SEQ ID NO: 101569 - DNA, 13 bp, Artificial Sequence
  Oligonucleotide for detection of SNP TSC0025295
gtttttatcggtg

SEQ ID NO: 101570 - DNA, 13 bp, Artificial Sequence
  Oligonucleotide for detection of SNP TSC0025295
caccgataaaaac

SEQ ID NO: 101571 - DNA, 13 bp, Artificial Sequence
  Oligonucleotide for detection of SNP TSC0025295
gtttttttcggtg

SEQ ID NO: 101572 - DNA, 13 bp, Artificial Sequence
  Oligonucleotide for detection of SNP TSC0025295
caccgaaaaaaac

SEQ ID NO: 101573 - DNA, 13 bp, Artificial Sequence
  Oligonucleotide for detection of SNP TSC0025295
tattgatggagay

SEQ ID NO: 101574 - DNA, 13 bp, Artificial Sequence
  Oligonucleotide for detection of SNP TSC0025295
rtctccatcaata

SEQ ID NO: 101575 - DNA, 13 bp, Artificial Sequence
  Oligonucleotide for detection of SNP TSC0025295
tattgagggagay

SEQ ID NO: 101576 - DNA, 13 bp, Artificial Sequence
  Oligonucleotide for detection of SNP TSC0025295
rtctccctcaata

SEQ ID NO: 101577 - DNA, 13 bp, Artificial Sequence
  Oligonucleotide for detection of SNP TSC0025295
tatcgatggagay

SEQ ID NO: 101578 - DNA, 13 bp, Artificial Sequence
  Oligonucleotide for detection of SNP TSC0025295
rtctccatcgata

SEQ ID NO: 101579 - DNA, 13 bp, Artificial Sequence
  Oligonucleotide for detection of SNP TSC0025295
tatcgagggagay

SEQ ID NO: 101580 - DNA, 13 bp, Artificial Sequence
  Oligonucleotide for detection of SNP TSC0025295
rtctccctcgata

SEQ ID NO: 101581 - DNA, 13 bp, Artificial Sequence
  Oligonucleotide for detection of SNP TSC0025296
ttttgttggtata

SEQ ID NO: 101582 - DNA, 13 bp, Artificial Sequence
  Oligonucleotide for detection of SNP TSC0025296
tataccaacaaaa

SEQ ID NO: 101583 - DNA, 13 bp, Artificial Sequence
  Oligonucleotide for detection of SNP TSC0025296
ttttgtcggtata

SEQ ID NO: 101584 - DNA, 13 bp, Artificial Sequence
  Oligonucleotide for detection of SNP TSC0025296
tataccgacaaaa

SEQ ID NO: 101585 - DNA, 13 bp, Artificial Sequence
  Oligonucleotide for detection of SNP TSC0025296
tgtgttggtaaaa

SEQ ID NO: 101586 - DNA, 13 bp, Artificial Sequence
  Oligonucleotide for detection of SNP TSC0025296
ttttaccaacaca

SEQ ID NO: 101587 - DNA, 13 bp, Artificial Sequence
  Oligonucleotide for detection of SNP TSC0025296
tgtgttagtaaaa

SEQ ID NO: 101588 - DNA, 13 bp, Artificial Sequence
  Oligonucleotide for detection of SNP TSC0025296
ttttactaacaca

SEQ ID NO: 101589 - DNA, 13 bp, Artificial Sequence
  Oligonucleotide for detection of SNP TSC0025296
tgtgtcggtaaaa

SEQ ID NO: 101590 - DNA, 13 bp, Artificial Sequence
  Oligonucleotide for detection of SNP TSC0025296
ttttaccgacaca

SEQ ID NO: 101591 - DNA, 13 bp, Artificial Sequence
  Oligonucleotide for detection of SNP TSC0025297
ttgagagtgatty

SEQ ID NO: 101592 - DNA, 13 bp, Artificial Sequence
  Oligonucleotide for detection of SNP TSC0025297
raatcactctcaa

SEQ ID NO: 101593 - DNA, 13 bp, Artificial Sequence
  Oligonucleotide for detection of SNP TSC0025297
ttgagaatgatty

SEQ ID NO: 101594 - DNA, 13 bp, Artificial Sequence
  Oligonucleotide for detection of SNP TSC0025297
raatcattctcaa

SEQ ID NO: 101595 - DNA, 13 bp, Artificial Sequence
  Oligonucleotide for detection of SNP TSC0025297
ttgagagcgatty

SEQ ID NO: 101596 - DNA, 13 bp, Artificial Sequence
  Oligonucleotide for detection of SNP TSC0025297
raatcgctctcaa

SEQ ID NO: 101597 - DNA, 13 bp, Artificial Sequence
  Oligonucleotide for detection of SNP TSC0025297
ttgagaacgatty

SEQ ID NO: 101598 - DNA, 13 bp, Artificial Sequence
  Oligonucleotide for detection of SNP TSC0025297
raatcgttctcaa

SEQ ID NO: 101599 - DNA, 13 bp, Artificial Sequence
  Oligonucleotide for detection of SNP TSC0025301
aggaggtgttgag

SEQ ID NO: 101600 - DNA, 13 bp, Artificial Sequence
  Oligonucleotide for detection of SNP TSC0025301
ctcaacacctcct

SEQ ID NO: 101601 - DNA, 13 bp, Artificial Sequence
  Oligonucleotide for detection of SNP TSC0025301
aggaggcgttgag

SEQ ID NO: 101602 - DNA, 13 bp, Artificial Sequence
  Oligonucleotide for detection of SNP TSC0025301
ctcaacgcctcct

SEQ ID NO: 101603 - DNA, 13 bp, Artificial Sequence
  Oligonucleotide for detection of SNP TSC0025301
aggaggtgtcgag

SEQ ID NO: 101604 - DNA, 13 bp, Artificial Sequence
  Oligonucleotide for detection of SNP TSC0025301
ctcgacacctcct

SEQ ID NO: 101605 - DNA, 13 bp, Artificial Sequence
  Oligonucleotide for detection of SNP TSC0025301
aggaggcgtcgag

SEQ ID NO: 101606 - DNA, 13 bp, Artificial Sequence
  Oligonucleotide for detection of SNP TSC0025301
ctcgacgcctcct

SEQ ID NO: 101607 - DNA, 13 bp, Artificial Sequence
  Oligonucleotide for detection of SNP TSC0025301
ttcggtgtttttt

SEQ ID NO: 101608 - DNA, 13 bp, Artificial Sequence
  Oligonucleotide for detection of SNP TSC0025301
aaaaaacaccgaa

SEQ ID NO: 101609 - DNA, 13 bp, Artificial Sequence
  Oligonucleotide for detection of SNP TSC0025301
ttcggcgtttttt

SEQ ID NO: 101610 - DNA, 13 bp, Artificial Sequence
  Oligonucleotide for detection of SNP TSC0025301
aaaaaacgccgaa

SEQ ID NO: 101611 - DNA, 13 bp, Artificial Sequence
  Oligonucleotide for detection of SNP TSC0025313
gtggaaatgattt

SEQ ID NO: 101612 - DNA, 13 bp, Artificial Sequence
  Oligonucleotide for detection of SNP TSC0025313
aaatcatttccac

SEQ ID NO: 101613 - DNA, 13 bp, Artificial Sequence
  Oligonucleotide for detection of SNP TSC0025313
gtggaagtgattt

SEQ ID NO: 101614 - DNA, 13 bp, Artificial Sequence
  Oligonucleotide for detection of SNP TSC0025313
aaatcacttccac

SEQ ID NO: 101615 - DNA, 13 bp, Artificial Sequence
  Oligonucleotide for detection of SNP TSC0025314
ttttttattaggy

SEQ ID NO: 101616 - DNA, 13 bp, Artificial Sequence
  Oligonucleotide for detection of SNP TSC0025314
rcctaataaaaaa

SEQ ID NO: 101617 - DNA, 13 bp, Artificial Sequence
  Oligonucleotide for detection of SNP TSC0025314
ttttttgttaggy

SEQ ID NO: 101618 - DNA, 13 bp, Artificial Sequence
  Oligonucleotide for detection of SNP TSC0025314
rcctaacaaaaaa

SEQ ID NO: 101619 - DNA, 13 bp, Artificial Sequence
  Oligonucleotide for detection of SNP TSC0025314
tttttcgttaggy

SEQ ID NO: 101620 - DNA, 13 bp, Artificial Sequence
  Oligonucleotide for detection of SNP TSC0025314
rcctaacgaaaaa

SEQ ID NO: 101621 - DNA, 13 bp, Artificial Sequence
  Oligonucleotide for detection of SNP TSC0025314
gtttggtggaggg

SEQ ID NO: 101622 - DNA, 13 bp, Artificial Sequence
  Oligonucleotide for detection of SNP TSC0025314
ccctccaccaaac

SEQ ID NO: 101623 - DNA, 13 bp, Artificial Sequence
  Oligonucleotide for detection of SNP TSC0025314
gtttggcggaggg

SEQ ID NO: 101624 - DNA, 13 bp, Artificial Sequence
  Oligonucleotide for detection of SNP TSC0025314
ccctccgccaaac

SEQ ID NO: 101625 - DNA, 13 bp, Artificial Sequence
  Oligonucleotide for detection of SNP TSC0025315
tgtttgatatatt

SEQ ID NO: 101626 - DNA, 13 bp, Artificial Sequence
  Oligonucleotide for detection of SNP TSC0025315
aatatatcaaaca

SEQ ID NO: 101627 - DNA, 13 bp, Artificial Sequence
  Oligonucleotide for detection of SNP TSC0025315
tgtttggtatatt

SEQ ID NO: 101628 - DNA, 13 bp, Artificial Sequence
  Oligonucleotide for detection of SNP TSC0025315
aatataccaaaca

SEQ ID NO: 101629 - DNA, 13 bp, Artificial Sequence
  Oligonucleotide for detection of SNP TSC0025316
atttaaaattaty

SEQ ID NO: 101630 - DNA, 13 bp, Artificial Sequence
  Oligonucleotide for detection of SNP TSC0025316
rataattttaaat

SEQ ID NO: 101631 - DNA, 13 bp, Artificial Sequence
  Oligonucleotide for detection of SNP TSC0025316
atttaagattaty

SEQ ID NO: 101632 - DNA, 13 bp, Artificial Sequence
  Oligonucleotide for detection of SNP TSC0025316
rataatcttaaat

SEQ ID NO: 101633 - DNA, 13 bp, Artificial Sequence
  Oligonucleotide for detection of SNP TSC0025319
tgtttttggaggg

SEQ ID NO: 101634 - DNA, 13 bp, Artificial Sequence
  Oligonucleotide for detection of SNP TSC0025319
ccctccaaaaaca

SEQ ID NO: 101635 - DNA, 13 bp, Artificial Sequence
  Oligonucleotide for detection of SNP TSC0025319
cgtttttggaggg

SEQ ID NO: 101636 - DNA, 13 bp, Artificial Sequence
  Oligonucleotide for detection of SNP TSC0025319
ccctccaaaaacg

SEQ ID NO: 101637 - DNA, 13 bp, Artificial Sequence
  Oligonucleotide for detection of SNP TSC0025319
tgttttcggaggg

SEQ ID NO: 101638 - DNA, 13 bp, Artificial Sequence
  Oligonucleotide for detection of SNP TSC0025319
ccctccgaaaaca

SEQ ID NO: 101639 - DNA, 13 bp, Artificial Sequence
  Oligonucleotide for detection of SNP TSC0025319
cgttttcggaggg

SEQ ID NO: 101640 - DNA, 13 bp, Artificial Sequence
  Oligonucleotide for detection of SNP TSC0025319
ccctccgaaaacg

SEQ ID NO: 101641 - DNA, 13 bp, Artificial Sequence
  Oligonucleotide for detection of SNP TSC0025319
ttttttggaagtg

SEQ ID NO: 101642 - DNA, 13 bp, Artificial Sequence
  Oligonucleotide for detection of SNP TSC0025319
cacttccaaaaaa

SEQ ID NO: 101643 - DNA, 13 bp, Artificial Sequence
  Oligonucleotide for detection of SNP TSC0025319
ttttttagaagtg

SEQ ID NO: 101644 - DNA, 13 bp, Artificial Sequence
  Oligonucleotide for detection of SNP TSC0025319
cacttctaaaaaa

SEQ ID NO: 101645 - DNA, 13 bp, Artificial Sequence
  Oligonucleotide for detection of SNP TSC0025319
tttttcggaagtg

SEQ ID NO: 101646 - DNA, 13 bp, Artificial Sequence
  Oligonucleotide for detection of SNP TSC0025319
cacttccgaaaaa

SEQ ID NO: 101647 - DNA, 13 bp, Artificial Sequence
  Oligonucleotide for detection of SNP TSC0025319
ttttttagaagcg

SEQ ID NO: 101648 - DNA, 13 bp, Artificial Sequence
  Oligonucleotide for detection of SNP TSC0025319
cgcttctaaaaaa

SEQ ID NO: 101649 - DNA, 13 bp, Artificial Sequence
  Oligonucleotide for detection of SNP TSC0025319
ttttttggaagcg

SEQ ID NO: 101650 - DNA, 13 bp, Artificial Sequence
  Oligonucleotide for detection of SNP TSC0025319
cgcttccaaaaaa

SEQ ID NO: 101651 - DNA, 13 bp, Artificial Sequence
  Oligonucleotide for detection of SNP TSC0025319
tttttcggaagcg

SEQ ID NO: 101652 - DNA, 13 bp, Artificial Sequence
  Oligonucleotide for detection of SNP TSC0025319
cgcttccgaaaaa

SEQ ID NO: 101653 - DNA, 13 bp, Artificial Sequence
  Oligonucleotide for detection of SNP TSC0025321
aattttagtaagt

SEQ ID NO: 101654 - DNA, 13 bp, Artificial Sequence
  Oligonucleotide for detection of SNP TSC0025321
acttactaaaatt

SEQ ID NO: 101655 - DNA, 13 bp, Artificial Sequence
  Oligonucleotide for detection of SNP TSC0025321
aattttggtaagt

SEQ ID NO: 101656 - DNA, 13 bp, Artificial Sequence
  Oligonucleotide for detection of SNP TSC0025321
acttaccaaaatt

SEQ ID NO: 101657 - DNA, 13 bp, Artificial Sequence
  Oligonucleotide for detection of SNP TSC0025321
aatttcggtaagt

SEQ ID NO: 101658 - DNA, 13 bp, Artificial Sequence
  Oligonucleotide for detection of SNP TSC0025321
acttaccgaaatt

SEQ ID NO: 101659 - DNA, 13 bp, Artificial Sequence
  Oligonucleotide for detection of SNP TSC0025321
atttattgaagtt

SEQ ID NO: 101660 - DNA, 13 bp, Artificial Sequence
  Oligonucleotide for detection of SNP TSC0025321
aacttcaataaat

SEQ ID NO: 101661 - DNA, 13 bp, Artificial Sequence
  Oligonucleotide for detection of SNP TSC0025321
atttatcgaagtt

SEQ ID NO: 101662 - DNA, 13 bp, Artificial Sequence
  Oligonucleotide for detection of SNP TSC0025321
aacttcgataaat

SEQ ID NO: 101663 - DNA, 13 bp, Artificial Sequence
  Oligonucleotide for detection of SNP TSC0025322
taaagatgttaag

SEQ ID NO: 101664 - DNA, 13 bp, Artificial Sequence
  Oligonucleotide for detection of SNP TSC0025322
cttaacatcttta

SEQ ID NO: 101665 - DNA, 13 bp, Artificial Sequence
  Oligonucleotide for detection of SNP TSC0025322
taaagacgttaag

SEQ ID NO: 101666 - DNA, 13 bp, Artificial Sequence
  Oligonucleotide for detection of SNP TSC0025322
cttaacgtcttta

SEQ ID NO: 101667 - DNA, 13 bp, Artificial Sequence
  Oligonucleotide for detection of SNP TSC0025323
tgattgggttttt

SEQ ID NO: 101668 - DNA, 13 bp, Artificial Sequence
  Oligonucleotide for detection of SNP TSC0025323
aaaaacccaatca

SEQ ID NO: 101669 - DNA, 13 bp, Artificial Sequence
  Oligonucleotide for detection of SNP TSC0025323
aagagtttaatta

SEQ ID NO: 101670 - DNA, 13 bp, Artificial Sequence
  Oligonucleotide for detection of SNP TSC0025323
taattaaactctt

SEQ ID NO: 101671 - DNA, 13 bp, Artificial Sequence
  Oligonucleotide for detection of SNP TSC0025323
aagagtataatta

SEQ ID NO: 101672 - DNA, 13 bp, Artificial Sequence
  Oligonucleotide for detection of SNP TSC0025323
taattatactctt

SEQ ID NO: 101673 - DNA, 13 bp, Artificial Sequence
  Oligonucleotide for detection of SNP TSC0025324
aatgtgaattata

SEQ ID NO: 101674 - DNA, 13 bp, Artificial Sequence
  Oligonucleotide for detection of SNP TSC0025324
tataattcacatt

SEQ ID NO: 101675 - DNA, 13 bp, Artificial Sequence
  Oligonucleotide for detection of SNP TSC0025324
aatgtggattata

SEQ ID NO: 101676 - DNA, 13 bp, Artificial Sequence
  Oligonucleotide for detection of SNP TSC0025324
tataatccacatt

SEQ ID NO: 101677 - DNA, 13 bp, Artificial Sequence
  Oligonucleotide for detection of SNP TSC0025325
gttggtataggaa

SEQ ID NO: 101678 - DNA, 13 bp, Artificial Sequence
  Oligonucleotide for detection of SNP TSC0025325
ttcctataccaac

SEQ ID NO: 101679 - DNA, 13 bp, Artificial Sequence
  Oligonucleotide for detection of SNP TSC0025325
gttggtgtaggaa

SEQ ID NO: 101680 - DNA, 13 bp, Artificial Sequence
  Oligonucleotide for detection of SNP TSC0025325
ttcctacaccaac

SEQ ID NO: 101681 - DNA, 13 bp, Artificial Sequence
  Oligonucleotide for detection of SNP TSC0025325
gttggcgtaggaa

SEQ ID NO: 101682 - DNA, 13 bp, Artificial Sequence
  Oligonucleotide for detection of SNP TSC0025325
ttcctacgccaac

SEQ ID NO: 101683 - DNA, 13 bp, Artificial Sequence
  Oligonucleotide for detection of SNP TSC0025325
tttttatgttaay

SEQ ID NO: 101684 - DNA, 13 bp, Artificial Sequence
  Oligonucleotide for detection of SNP TSC0025325
rttaacataaaaa

SEQ ID NO: 101685 - DNA, 13 bp, Artificial Sequence
  Oligonucleotide for detection of SNP TSC0025325
tttttacgttaay

SEQ ID NO: 101686 - DNA, 13 bp, Artificial Sequence
  Oligonucleotide for detection of SNP TSC0025325
rttaacgtaaaaa

SEQ ID NO: 101687 - DNA, 13 bp, Artificial Sequence
  Oligonucleotide for detection of SNP TSC0025326
gtgtttatggttt

SEQ ID NO: 101688 - DNA, 13 bp, Artificial Sequence
  Oligonucleotide for detection of SNP TSC0025326
aaaccataaacac

SEQ ID NO: 101689 - DNA, 13 bp, Artificial Sequence
  Oligonucleotide for detection of SNP TSC0025326
gtgtttgtggttt

SEQ ID NO: 101690 - DNA, 13 bp, Artificial Sequence
  Oligonucleotide for detection of SNP TSC0025326
aaaccacaaacac

SEQ ID NO: 101691 - DNA, 13 bp, Artificial Sequence
  Oligonucleotide for detection of SNP TSC0025326
gtgttcgtggttt

SEQ ID NO: 101692 - DNA, 13 bp, Artificial Sequence
  Oligonucleotide for detection of SNP TSC0025326
aaaccacgaacac

SEQ ID NO: 101693 - DNA, 13 bp, Artificial Sequence
  Oligonucleotide for detection of SNP TSC0025326
aggttatgggtay

SEQ ID NO: 101694 - DNA, 13 bp, Artificial Sequence
  Oligonucleotide for detection of SNP TSC0025326
rtacccataacct

SEQ ID NO: 101695 - DNA, 13 bp, Artificial Sequence
  Oligonucleotide for detection of SNP TSC0025326
aggttacgggtay

SEQ ID NO: 101696 - DNA, 13 bp, Artificial Sequence
  Oligonucleotide for detection of SNP TSC0025326
rtacccgtaacct

SEQ ID NO: 101697 - DNA, 13 bp, Artificial Sequence
  Oligonucleotide for detection of SNP TSC0025328
tgtggtagttaty

SEQ ID NO: 101698 - DNA, 13 bp, Artificial Sequence
  Oligonucleotide for detection of SNP TSC0025328
rataactaccaca

SEQ ID NO: 101699 - DNA, 13 bp, Artificial Sequence
  Oligonucleotide for detection of SNP TSC0025328
tgtggtggttaty

SEQ ID NO: 101700 - DNA, 13 bp, Artificial Sequence
  Oligonucleotide for detection of SNP TSC0025328
rataaccaccaca

SEQ ID NO: 101701 - DNA, 13 bp, Artificial Sequence
  Oligonucleotide for detection of SNP TSC0025329
tgttgtaattgtg

SEQ ID NO: 101702 - DNA, 13 bp, Artificial Sequence
  Oligonucleotide for detection of SNP TSC0025329
cacaattacaaca

SEQ ID NO: 101703 - DNA, 13 bp, Artificial Sequence
  Oligonucleotide for detection of SNP TSC0025329
tgttgtgattgtg

SEQ ID NO: 101704 - DNA, 13 bp, Artificial Sequence
  Oligonucleotide for detection of SNP TSC0025329
cacaatcacaaca

SEQ ID NO: 101705 - DNA, 13 bp, Artificial Sequence
  Oligonucleotide for detection of SNP TSC0025329
tgttgcgattgtg

SEQ ID NO: 101706 - DNA, 13 bp, Artificial Sequence
  Oligonucleotide for detection of SNP TSC0025329
cacaatcgcaaca

SEQ ID NO: 101707 - DNA, 13 bp, Artificial Sequence
  Oligonucleotide for detection of SNP TSC0025329
tatagttgtagta

SEQ ID NO: 101708 - DNA, 13 bp, Artificial Sequence
  Oligonucleotide for detection of SNP TSC0025329
tactacaactata

SEQ ID NO: 101709 - DNA, 13 bp, Artificial Sequence
  Oligonucleotide for detection of SNP TSC0025329
tatagtcgtagta

SEQ ID NO: 101710 - DNA, 13 bp, Artificial Sequence
  Oligonucleotide for detection of SNP TSC0025329
tactacgactata

SEQ ID NO: 101711 - DNA, 13 bp, Artificial Sequence
  Oligonucleotide for detection of SNP TSC0025330
aaagttggtatat

SEQ ID NO: 101712 - DNA, 13 bp, Artificial Sequence
  Oligonucleotide for detection of SNP TSC0025330
atataccaacttt

SEQ ID NO: 101713 - DNA, 13 bp, Artificial Sequence
  Oligonucleotide for detection of SNP TSC0025330
aaagtttgtatat

SEQ ID NO: 101714 - DNA, 13 bp, Artificial Sequence
  Oligonucleotide for detection of SNP TSC0025330
atatacaaacttt

SEQ ID NO: 101715 - DNA, 13 bp, Artificial Sequence
  Oligonucleotide for detection of SNP TSC0025330
atgtattagtttt

SEQ ID NO: 101716 - DNA, 13 bp, Artificial Sequence
  Oligonucleotide for detection of SNP TSC0025330
aaaactaatacat

SEQ ID NO: 101717 - DNA, 13 bp, Artificial Sequence
  Oligonucleotide for detection of SNP TSC0025330
atgtataagtttt

SEQ ID NO: 101718 - DNA, 13 bp, Artificial Sequence
  Oligonucleotide for detection of SNP TSC0025330
aaaacttatacat

SEQ ID NO: 101719 - DNA, 13 bp, Artificial Sequence
  Oligonucleotide for detection of SNP TSC0025331
gataatatggagg

SEQ ID NO: 101720 - DNA, 13 bp, Artificial Sequence
  Oligonucleotide for detection of SNP TSC0025331
cctccatattatc

SEQ ID NO: 101721 - DNA, 13 bp, Artificial Sequence
  Oligonucleotide for detection of SNP TSC0025331
gataatgtggagg

SEQ ID NO: 101722 - DNA, 13 bp, Artificial Sequence
  Oligonucleotide for detection of SNP TSC0025331
cctccacattatc

SEQ ID NO: 101723 - DNA, 13 bp, Artificial Sequence
  Oligonucleotide for detection of SNP TSC0025331
gataacgtggagg

SEQ ID NO: 101724 - DNA, 13 bp, Artificial Sequence
  Oligonucleotide for detection of SNP TSC0025331
cctccacgttatc

SEQ ID NO: 101725 - DNA, 13 bp, Artificial Sequence
  Oligonucleotide for detection of SNP TSC0025331
tttttatgttgty

SEQ ID NO: 101726 - DNA, 13 bp, Artificial Sequence
  Oligonucleotide for detection of SNP TSC0025331
racaacataaaaa

SEQ ID NO: 101727 - DNA, 13 bp, Artificial Sequence
  Oligonucleotide for detection of SNP TSC0025331
tttttacgttgty

SEQ ID NO: 101728 - DNA, 13 bp, Artificial Sequence
  Oligonucleotide for detection of SNP TSC0025331
racaacgtaaaaa

SEQ ID NO: 101729 - DNA, 13 bp, Artificial Sequence
  Oligonucleotide for detection of SNP TSC0025337
tgtttaattggaa

SEQ ID NO: 101730 - DNA, 13 bp, Artificial Sequence
  Oligonucleotide for detection of SNP TSC0025337
ttccaattaaaca

SEQ ID NO: 101731 - DNA, 13 bp, Artificial Sequence
  Oligonucleotide for detection of SNP TSC0025337
tgtttagttggaa

SEQ ID NO: 101732 - DNA, 13 bp, Artificial Sequence
  Oligonucleotide for detection of SNP TSC0025337
ttccaactaaaca

SEQ ID NO: 101733 - DNA, 13 bp, Artificial Sequence
  Oligonucleotide for detection of SNP TSC0025338
tgtgtggtggtay

SEQ ID NO: 101734 - DNA, 13 bp, Artificial Sequence
  Oligonucleotide for detection of SNP TSC0025338
rtaccaccacaca

SEQ ID NO: 101735 - DNA, 13 bp, Artificial Sequence
  Oligonucleotide for detection of SNP TSC0025338
tgtgtgttggtay

SEQ ID NO: 101736 - DNA, 13 bp, Artificial Sequence
  Oligonucleotide for detection of SNP TSC0025338
rtaccaacacaca

SEQ ID NO: 101737 - DNA, 13 bp, Artificial Sequence
  Oligonucleotide for detection of SNP TSC0025338
tgcgtggtggtay

SEQ ID NO: 101738 - DNA, 13 bp, Artificial Sequence
  Oligonucleotide for detection of SNP TSC0025338
rtaccaccacgca

SEQ ID NO: 101739 - DNA, 13 bp, Artificial Sequence
  Oligonucleotide for detection of SNP TSC0025338
tgcgtgttggtay

SEQ ID NO: 101740 - DNA, 13 bp, Artificial Sequence
  Oligonucleotide for detection of SNP TSC0025338
rtaccaacacgca

SEQ ID NO: 101741 - DNA, 13 bp, Artificial Sequence
  Oligonucleotide for detection of SNP TSC0025338
tgtgcggtggtay

SEQ ID NO: 101742 - DNA, 13 bp, Artificial Sequence
  Oligonucleotide for detection of SNP TSC0025338
rtaccaccgcaca

SEQ ID NO: 101743 - DNA, 13 bp, Artificial Sequence
  Oligonucleotide for detection of SNP TSC0025338
tgtgcgttggtay

SEQ ID NO: 101744 - DNA, 13 bp, Artificial Sequence
  Oligonucleotide for detection of SNP TSC0025338
rtaccaacgcaca

SEQ ID NO: 101745 - DNA, 13 bp, Artificial Sequence
  Oligonucleotide for detection of SNP TSC0025338
tgcgcggtggtay

SEQ ID NO: 101746 - DNA, 13 bp, Artificial Sequence
  Oligonucleotide for detection of SNP TSC0025338
rtaccaccgcgca

SEQ ID NO: 101747 - DNA, 13 bp, Artificial Sequence
  Oligonucleotide for detection of SNP TSC0025338
tgcgcgttggtay

SEQ ID NO: 101748 - DNA, 13 bp, Artificial Sequence
  Oligonucleotide for detection of SNP TSC0025338
rtaccaacgcgca

SEQ ID NO: 101749 - DNA, 13 bp, Artificial Sequence
  Oligonucleotide for detection of SNP TSC0025338
gtgttattgtgta

SEQ ID NO: 101750 - DNA, 13 bp, Artificial Sequence
  Oligonucleotide for detection of SNP TSC0025338
tacacaataacac

SEQ ID NO: 101751 - DNA, 13 bp, Artificial Sequence
  Oligonucleotide for detection of SNP TSC0025338
gtgttaatgtgta

SEQ ID NO: 101752 - DNA, 13 bp, Artificial Sequence
  Oligonucleotide for detection of SNP TSC0025338
tacacattaacac

SEQ ID NO: 101753 - DNA, 13 bp, Artificial Sequence
  Oligonucleotide for detection of SNP TSC0025338
gtgttatcgtgta

SEQ ID NO: 101754 - DNA, 13 bp, Artificial Sequence
  Oligonucleotide for detection of SNP TSC0025338
tacacgataacac

SEQ ID NO: 101755 - DNA, 13 bp, Artificial Sequence
  Oligonucleotide for detection of SNP TSC0025338
gtgttaacgtgta

SEQ ID NO: 101756 - DNA, 13 bp, Artificial Sequence
  Oligonucleotide for detection of SNP TSC0025338
tacacgttaacac

SEQ ID NO: 101757 - DNA, 13 bp, Artificial Sequence
  Oligonucleotide for detection of SNP TSC0025338
gtgttattgcgta

SEQ ID NO: 101758 - DNA, 13 bp, Artificial Sequence
  Oligonucleotide for detection of SNP TSC0025338
tacgcaataacac

SEQ ID NO: 101759 - DNA, 13 bp, Artificial Sequence
  Oligonucleotide for detection of SNP TSC0025338
gtgttaatgcgta

SEQ ID NO: 101760 - DNA, 13 bp, Artificial Sequence
  Oligonucleotide for detection of SNP TSC0025338
tacgcattaacac

SEQ ID NO: 101761 - DNA, 13 bp, Artificial Sequence
  Oligonucleotide for detection of SNP TSC0025338
gtgttatcgcgta

SEQ ID NO: 101762 - DNA, 13 bp, Artificial Sequence
  Oligonucleotide for detection of SNP TSC0025338
tacgcgataacac

SEQ ID NO: 101763 - DNA, 13 bp, Artificial Sequence
  Oligonucleotide for detection of SNP TSC0025338
gtgttaacgcgta

SEQ ID NO: 101764 - DNA, 13 bp, Artificial Sequence
  Oligonucleotide for detection of SNP TSC0025338
tacgcgttaacac

SEQ ID NO: 101765 - DNA, 13 bp, Artificial Sequence
  Oligonucleotide for detection of SNP TSC0025339
ttgggggatttag

SEQ ID NO: 101766 - DNA, 13 bp, Artificial Sequence
  Oligonucleotide for detection of SNP TSC0025339
ctaaatcccccaa

SEQ ID NO: 101767 - DNA, 13 bp, Artificial Sequence
  Oligonucleotide for detection of SNP TSC0025339
ttggggtatttag

SEQ ID NO: 101768 - DNA, 13 bp, Artificial Sequence
  Oligonucleotide for detection of SNP TSC0025339
ctaaataccccaa

SEQ ID NO: 101769 - DNA, 13 bp, Artificial Sequence
  Oligonucleotide for detection of SNP TSC0025339
ttgagttttttag

SEQ ID NO: 101770 - DNA, 13 bp, Artificial Sequence
  Oligonucleotide for detection of SNP TSC0025339
ctaaaaaactcaa

SEQ ID NO: 101771 - DNA, 13 bp, Artificial Sequence
  Oligonucleotide for detection of SNP TSC0025339
ttgagtattttag

SEQ ID NO: 101772 - DNA, 13 bp, Artificial Sequence
  Oligonucleotide for detection of SNP TSC0025339
ctaaaatactcaa

SEQ ID NO: 101773 - DNA, 13 bp, Artificial Sequence
  Oligonucleotide for detection of SNP TSC0025340
gtagtagagttgt

SEQ ID NO: 101774 - DNA, 13 bp, Artificial Sequence
  Oligonucleotide for detection of SNP TSC0025340
acaactctactac

SEQ ID NO: 101775 - DNA, 13 bp, Artificial Sequence
  Oligonucleotide for detection of SNP TSC0025340
gtagtaaagttgt

SEQ ID NO: 101776 - DNA, 13 bp, Artificial Sequence
  Oligonucleotide for detection of SNP TSC0025340
acaactttactac

SEQ ID NO: 101777 - DNA, 13 bp, Artificial Sequence
  Oligonucleotide for detection of SNP TSC0025341
ttgtgaagtgggt

SEQ ID NO: 101778 - DNA, 13 bp, Artificial Sequence
  Oligonucleotide for detection of SNP TSC0025341
acccacttcacaa

SEQ ID NO: 101779 - DNA, 13 bp, Artificial Sequence
  Oligonucleotide for detection of SNP TSC0025341
ttgtgatgtgggt

SEQ ID NO: 101780 - DNA, 13 bp, Artificial Sequence
  Oligonucleotide for detection of SNP TSC0025341
acccacatcacaa

SEQ ID NO: 101781 - DNA, 13 bp, Artificial Sequence
  Oligonucleotide for detection of SNP TSC0025341
atttattttatag

SEQ ID NO: 101782 - DNA, 13 bp, Artificial Sequence
  Oligonucleotide for detection of SNP TSC0025341
ctataaaataaat

SEQ ID NO: 101783 - DNA, 13 bp, Artificial Sequence
  Oligonucleotide for detection of SNP TSC0025341
atttatattatag

SEQ ID NO: 101784 - DNA, 13 bp, Artificial Sequence
  Oligonucleotide for detection of SNP TSC0025341
ctataatataaat

SEQ ID NO: 101785 - DNA, 13 bp, Artificial Sequence
  Oligonucleotide for detection of SNP TSC0025342
aaagatatatttg

SEQ ID NO: 101786 - DNA, 13 bp, Artificial Sequence
  Oligonucleotide for detection of SNP TSC0025342
caaatatatcttt

SEQ ID NO: 101787 - DNA, 13 bp, Artificial Sequence
  Oligonucleotide for detection of SNP TSC0025342
aaagatgtatttg

SEQ ID NO: 101788 - DNA, 13 bp, Artificial Sequence
  Oligonucleotide for detection of SNP TSC0025342
caaatacatcttt

SEQ ID NO: 101789 - DNA, 13 bp, Artificial Sequence
  Oligonucleotide for detection of SNP TSC0025342
aaagacgtatttg

SEQ ID NO: 101790 - DNA, 13 bp, Artificial Sequence
  Oligonucleotide for detection of SNP TSC0025342
caaatacgtcttt

SEQ ID NO: 101791 - DNA, 13 bp, Artificial Sequence
  Oligonucleotide for detection of SNP TSC0025342
tagatacgttttt

SEQ ID NO: 101792 - DNA, 13 bp, Artificial Sequence
  Oligonucleotide for detection of SNP TSC0025342
aaaaacgtatcta

SEQ ID NO: 101793 - DNA, 13 bp, Artificial Sequence
  Oligonucleotide for detection of SNP TSC0025343
gttttttggtgtg

SEQ ID NO: 101794 - DNA, 13 bp, Artificial Sequence
  Oligonucleotide for detection of SNP TSC0025343
cacaccaaaaaac

SEQ ID NO: 101795 - DNA, 13 bp, Artificial Sequence
  Oligonucleotide for detection of SNP TSC0025343
gtttttgggtgtg

SEQ ID NO: 101796 - DNA, 13 bp, Artificial Sequence
  Oligonucleotide for detection of SNP TSC0025343
cacacccaaaaac

SEQ ID NO: 101797 - DNA, 13 bp, Artificial Sequence
  Oligonucleotide for detection of SNP TSC0025343
gtttttcggtgtg

SEQ ID NO: 101798 - DNA, 13 bp, Artificial Sequence
  Oligonucleotide for detection of SNP TSC0025343
cacaccgaaaaac

SEQ ID NO: 101799 - DNA, 13 bp, Artificial Sequence
  Oligonucleotide for detection of SNP TSC0025343
tatattgagaagy

SEQ ID NO: 101800 - DNA, 13 bp, Artificial Sequence
  Oligonucleotide for detection of SNP TSC0025343
rcttctcaatata

SEQ ID NO: 101801 - DNA, 13 bp, Artificial Sequence
  Oligonucleotide for detection of SNP TSC0025343
tatatttagaagy

SEQ ID NO: 101802 - DNA, 13 bp, Artificial Sequence
  Oligonucleotide for detection of SNP TSC0025343
rcttctaaatata

SEQ ID NO: 101803 - DNA, 13 bp, Artificial Sequence
  Oligonucleotide for detection of SNP TSC0025343
tatatcgagaagy

SEQ ID NO: 101804 - DNA, 13 bp, Artificial Sequence
  Oligonucleotide for detection of SNP TSC0025343
rcttctcgatata

SEQ ID NO: 101805 - DNA, 13 bp, Artificial Sequence
  Oligonucleotide for detection of SNP TSC0025344
tagaaagtttatt

SEQ ID NO: 101806 - DNA, 13 bp, Artificial Sequence
  Oligonucleotide for detection of SNP TSC0025344
aataaactttcta

SEQ ID NO: 101807 - DNA, 13 bp, Artificial Sequence
  Oligonucleotide for detection of SNP TSC0025344
tagaaaatttatt

SEQ ID NO: 101808 - DNA, 13 bp, Artificial Sequence
  Oligonucleotide for detection of SNP TSC0025344
aataaattttcta

SEQ ID NO: 101809 - DNA, 13 bp, Artificial Sequence
  Oligonucleotide for detection of SNP TSC0025345
tgggggaagatat

SEQ ID NO: 101810 - DNA, 13 bp, Artificial Sequence
  Oligonucleotide for detection of SNP TSC0025345
atatcttccccca

SEQ ID NO: 101811 - DNA, 13 bp, Artificial Sequence
  Oligonucleotide for detection of SNP TSC0025345
tggggggagatat

SEQ ID NO: 101812 - DNA, 13 bp, Artificial Sequence
  Oligonucleotide for detection of SNP TSC0025345
atatctcccccca

SEQ ID NO: 101813 - DNA, 13 bp, Artificial Sequence
  Oligonucleotide for detection of SNP TSC0025346
agattaatgtaga

SEQ ID NO: 101814 - DNA, 13 bp, Artificial Sequence
  Oligonucleotide for detection of SNP TSC0025346
tctacattaatct

SEQ ID NO: 101815 - DNA, 13 bp, Artificial Sequence
  Oligonucleotide for detection of SNP TSC0025346
agattagtgtaga

SEQ ID NO: 101816 - DNA, 13 bp, Artificial Sequence
  Oligonucleotide for detection of SNP TSC0025346
tctacactaatct

SEQ ID NO: 101817 - DNA, 13 bp, Artificial Sequence
  Oligonucleotide for detection of SNP TSC0025347
aaggttggggtaa

SEQ ID NO: 101818 - DNA, 13 bp, Artificial Sequence
  Oligonucleotide for detection of SNP TSC0025347
ttaccccaacctt

SEQ ID NO: 101819 - DNA, 13 bp, Artificial Sequence
  Oligonucleotide for detection of SNP TSC0025347
aaggttagggtaa

SEQ ID NO: 101820 - DNA, 13 bp, Artificial Sequence
  Oligonucleotide for detection of SNP TSC0025347
ttaccctaacctt

SEQ ID NO: 101821 - DNA, 13 bp, Artificial Sequence
  Oligonucleotide for detection of SNP TSC0025348
ggtttggattgaa

SEQ ID NO: 101822 - DNA, 13 bp, Artificial Sequence
  Oligonucleotide for detection of SNP TSC0025348
ttcaatccaaacc

SEQ ID NO: 101823 - DNA, 13 bp, Artificial Sequence
  Oligonucleotide for detection of SNP TSC0025348
ggtttgaattgaa

SEQ ID NO: 101824 - DNA, 13 bp, Artificial Sequence
  Oligonucleotide for detection of SNP TSC0025348
ttcaattcaaacc

SEQ ID NO: 101825 - DNA, 13 bp, Artificial Sequence
  Oligonucleotide for detection of SNP TSC0025349
aatagagtatttg

SEQ ID NO: 101826 - DNA, 13 bp, Artificial Sequence
  Oligonucleotide for detection of SNP TSC0025349
caaatactctatt

SEQ ID NO: 101827 - DNA, 13 bp, Artificial Sequence
  Oligonucleotide for detection of SNP TSC0025349
aatagaatatttg

SEQ ID NO: 101828 - DNA, 13 bp, Artificial Sequence
  Oligonucleotide for detection of SNP TSC0025349
caaatattctatt

SEQ ID NO: 101829 - DNA, 13 bp, Artificial Sequence
  Oligonucleotide for detection of SNP TSC0025350
gagttgggagaty

SEQ ID NO: 101830 - DNA, 13 bp, Artificial Sequence
  Oligonucleotide for detection of SNP TSC0025350
ratctcccaactc

SEQ ID NO: 101831 - DNA, 13 bp, Artificial Sequence
  Oligonucleotide for detection of SNP TSC0025350
gagttgagagaty

SEQ ID NO: 101832 - DNA, 13 bp, Artificial Sequence
  Oligonucleotide for detection of SNP TSC0025350
ratctctcaactc

SEQ ID NO: 101833 - DNA, 13 bp, Artificial Sequence
  Oligonucleotide for detection of SNP TSC0025351
aaagtgagtagag

SEQ ID NO: 101834 - DNA, 13 bp, Artificial Sequence
  Oligonucleotide for detection of SNP TSC0025351
ctctactcacttt

SEQ ID NO: 101835 - DNA, 13 bp, Artificial Sequence
  Oligonucleotide for detection of SNP TSC0025351
aaagtgggtagag

SEQ ID NO: 101836 - DNA, 13 bp, Artificial Sequence
  Oligonucleotide for detection of SNP TSC0025351
ctctacccacttt

SEQ ID NO: 101837 - DNA, 13 bp, Artificial Sequence
  Oligonucleotide for detection of SNP TSC0025351
aaagcgagtagag

SEQ ID NO: 101838 - DNA, 13 bp, Artificial Sequence
  Oligonucleotide for detection of SNP TSC0025351
ctctactcgcttt

SEQ ID NO: 101839 - DNA, 13 bp, Artificial Sequence
  Oligonucleotide for detection of SNP TSC0025351
aaagcgggtagag

SEQ ID NO: 101840 - DNA, 13 bp, Artificial Sequence
  Oligonucleotide for detection of SNP TSC0025351
ctctacccgcttt

SEQ ID NO: 101841 - DNA, 13 bp, Artificial Sequence
  Oligonucleotide for detection of SNP TSC0025357
gtgtgggggttta

SEQ ID NO: 101842 - DNA, 13 bp, Artificial Sequence
  Oligonucleotide for detection of SNP TSC0025357
taaacccccacac

SEQ ID NO: 101843 - DNA, 13 bp, Artificial Sequence
  Oligonucleotide for detection of SNP TSC0025357
gtgtggtggttta

SEQ ID NO: 101844 - DNA, 13 bp, Artificial Sequence
  Oligonucleotide for detection of SNP TSC0025357
taaaccaccacac

SEQ ID NO: 101845 - DNA, 13 bp, Artificial Sequence
  Oligonucleotide for detection of SNP TSC0025357
gcgtgggggttta

SEQ ID NO: 101846 - DNA, 13 bp, Artificial Sequence
  Oligonucleotide for detection of SNP TSC0025357
taaacccccacgc

SEQ ID NO: 101847 - DNA, 13 bp, Artificial Sequence
  Oligonucleotide for detection of SNP TSC0025357
gcgtggtggttta

SEQ ID NO: 101848 - DNA, 13 bp, Artificial Sequence
  Oligonucleotide for detection of SNP TSC0025357
taaaccaccacgc

SEQ ID NO: 101849 - DNA, 13 bp, Artificial Sequence
  Oligonucleotide for detection of SNP TSC0025357
gtgcgggggttta

SEQ ID NO: 101850 - DNA, 13 bp, Artificial Sequence
  Oligonucleotide for detection of SNP TSC0025357
taaacccccgcac

SEQ ID NO: 101851 - DNA, 13 bp, Artificial Sequence
  Oligonucleotide for detection of SNP TSC0025357
gtgcggtggttta

SEQ ID NO: 101852 - DNA, 13 bp, Artificial Sequence
  Oligonucleotide for detection of SNP TSC0025357
taaaccaccgcac

SEQ ID NO: 101853 - DNA, 13 bp, Artificial Sequence
  Oligonucleotide for detection of SNP TSC0025357
gcgcgggggttta

SEQ ID NO: 101854 - DNA, 13 bp, Artificial Sequence
  Oligonucleotide for detection of SNP TSC0025357
taaacccccgcgc

SEQ ID NO: 101855 - DNA, 13 bp, Artificial Sequence
  Oligonucleotide for detection of SNP TSC0025357
gcgcggtggttta

SEQ ID NO: 101856 - DNA, 13 bp, Artificial Sequence
  Oligonucleotide for detection of SNP TSC0025357
taaaccaccgcgc

SEQ ID NO: 101857 - DNA, 13 bp, Artificial Sequence
  Oligonucleotide for detection of SNP TSC0025357
tgagtttttgtgy

SEQ ID NO: 101858 - DNA, 13 bp, Artificial Sequence
  Oligonucleotide for detection of SNP TSC0025357
rcacaaaaactca

SEQ ID NO: 101859 - DNA, 13 bp, Artificial Sequence
  Oligonucleotide for detection of SNP TSC0025357
tgagttattgtgy

SEQ ID NO: 101860 - DNA, 13 bp, Artificial Sequence
  Oligonucleotide for detection of SNP TSC0025357
rcacaataactca

SEQ ID NO: 101861 - DNA, 13 bp, Artificial Sequence
  Oligonucleotide for detection of SNP TSC0025357
tgagttttcgtgy

SEQ ID NO: 101862 - DNA, 13 bp, Artificial Sequence
  Oligonucleotide for detection of SNP TSC0025357
rcacgaaaactca

SEQ ID NO: 101863 - DNA, 13 bp, Artificial Sequence
  Oligonucleotide for detection of SNP TSC0025357
tgagttatcgtgy

SEQ ID NO: 101864 - DNA, 13 bp, Artificial Sequence
  Oligonucleotide for detection of SNP TSC0025357
rcacgataactca

SEQ ID NO: 101865 - DNA, 13 bp, Artificial Sequence
  Oligonucleotide for detection of SNP TSC0025357
tgagtttttgcgy

SEQ ID NO: 101866 - DNA, 13 bp, Artificial Sequence
  Oligonucleotide for detection of SNP TSC0025357
rcgcaaaaactca

SEQ ID NO: 101867 - DNA, 13 bp, Artificial Sequence
  Oligonucleotide for detection of SNP TSC0025357
tgagttattgcgy

SEQ ID NO: 101868 - DNA, 13 bp, Artificial Sequence
  Oligonucleotide for detection of SNP TSC0025357
rcgcaataactca

SEQ ID NO: 101869 - DNA, 13 bp, Artificial Sequence
  Oligonucleotide for detection of SNP TSC0025357
tgagttttcgcgy

SEQ ID NO: 101870 - DNA, 13 bp, Artificial Sequence
  Oligonucleotide for detection of SNP TSC0025357
rcgcgaaaactca

SEQ ID NO: 101871 - DNA, 13 bp, Artificial Sequence
  Oligonucleotide for detection of SNP TSC0025357
tgagttatcgcgy

SEQ ID NO: 101872 - DNA, 13 bp, Artificial Sequence
  Oligonucleotide for detection of SNP TSC0025357
rcgcgataactca

SEQ ID NO: 101873 - DNA, 13 bp, Artificial Sequence
  Oligonucleotide for detection of SNP TSC0025359
gaagatgtggatg

SEQ ID NO: 101874 - DNA, 13 bp, Artificial Sequence
  Oligonucleotide for detection of SNP TSC0025359
catccacatcttc

SEQ ID NO: 101875 - DNA, 13 bp, Artificial Sequence
  Oligonucleotide for detection of SNP TSC0025359
gaagatatggatg

SEQ ID NO: 101876 - DNA, 13 bp, Artificial Sequence
  Oligonucleotide for detection of SNP TSC0025359
catccatatcttc

SEQ ID NO: 101877 - DNA, 13 bp, Artificial Sequence
  Oligonucleotide for detection of SNP TSC0025359
gaagacgtggatg

SEQ ID NO: 101878 - DNA, 13 bp, Artificial Sequence
  Oligonucleotide for detection of SNP TSC0025359
catccacgtcttc

SEQ ID NO: 101879 - DNA, 13 bp, Artificial Sequence
  Oligonucleotide for detection of SNP TSC0025362
gtatggggggaty

SEQ ID NO: 101880 - DNA, 13 bp, Artificial Sequence
  Oligonucleotide for detection of SNP TSC0025362
ratccccccatac

SEQ ID NO: 101881 - DNA, 13 bp, Artificial Sequence
  Oligonucleotide for detection of SNP TSC0025362
gtatggagggaty

SEQ ID NO: 101882 - DNA, 13 bp, Artificial Sequence
  Oligonucleotide for detection of SNP TSC0025362
ratccctccatac

SEQ ID NO: 101883 - DNA, 13 bp, Artificial Sequence
  Oligonucleotide for detection of SNP TSC0025363
tttgggggaggtt

SEQ ID NO: 101884 - DNA, 13 bp, Artificial Sequence
  Oligonucleotide for detection of SNP TSC0025363
aacctcccccaaa

SEQ ID NO: 101885 - DNA, 13 bp, Artificial Sequence
  Oligonucleotide for detection of SNP TSC0025363
tttgggagaggtt

SEQ ID NO: 101886 - DNA, 13 bp, Artificial Sequence
  Oligonucleotide for detection of SNP TSC0025363
aacctctcccaaa

SEQ ID NO: 101887 - DNA, 13 bp, Artificial Sequence
  Oligonucleotide for detection of SNP TSC0025363
ttcgggggaggtt

SEQ ID NO: 101888 - DNA, 13 bp, Artificial Sequence
  Oligonucleotide for detection of SNP TSC0025363
aacctcccccgaa

SEQ ID NO: 101889 - DNA, 13 bp, Artificial Sequence
  Oligonucleotide for detection of SNP TSC0025363
ttcgggagaggtt

SEQ ID NO: 101890 - DNA, 13 bp, Artificial Sequence
  Oligonucleotide for detection of SNP TSC0025363
aacctctcccgaa

SEQ ID NO: 101891 - DNA, 13 bp, Artificial Sequence
  Oligonucleotide for detection of SNP TSC0025364
tttgttgttaagg

SEQ ID NO: 101892 - DNA, 13 bp, Artificial Sequence
  Oligonucleotide for detection of SNP TSC0025364
ccttaacaacaaa

SEQ ID NO: 101893 - DNA, 13 bp, Artificial Sequence
  Oligonucleotide for detection of SNP TSC0025364
tttgtttttaagg

SEQ ID NO: 101894 - DNA, 13 bp, Artificial Sequence
  Oligonucleotide for detection of SNP TSC0025364
ccttaaaaacaaa

SEQ ID NO: 101895 - DNA, 13 bp, Artificial Sequence
  Oligonucleotide for detection of SNP TSC0025364
tttgtcgttaagg

SEQ ID NO: 101896 - DNA, 13 bp, Artificial Sequence
  Oligonucleotide for detection of SNP TSC0025364
ccttaacgacaaa

SEQ ID NO: 101897 - DNA, 13 bp, Artificial Sequence
  Oligonucleotide for detection of SNP TSC0025364
ttttgatgataga

SEQ ID NO: 101898 - DNA, 13 bp, Artificial Sequence
  Oligonucleotide for detection of SNP TSC0025364
tctatcatcaaaa

SEQ ID NO: 101899 - DNA, 13 bp, Artificial Sequence
  Oligonucleotide for detection of SNP TSC0025364
ttttgaagataga

SEQ ID NO: 101900 - DNA, 13 bp, Artificial Sequence
  Oligonucleotide for detection of SNP TSC0025364
tctatcttcaaaa

SEQ ID NO: 101901 - DNA, 13 bp, Artificial Sequence
  Oligonucleotide for detection of SNP TSC0025364
ttttgacgataga

SEQ ID NO: 101902 - DNA, 13 bp, Artificial Sequence
  Oligonucleotide for detection of SNP TSC0025364
tctatcgtcaaaa

SEQ ID NO: 101903 - DNA, 13 bp, Artificial Sequence
  Oligonucleotide for detection of SNP TSC0025370
gagaatgtggata

SEQ ID NO: 101904 - DNA, 13 bp, Artificial Sequence
  Oligonucleotide for detection of SNP TSC0025370
tatccacattctc

SEQ ID NO: 101905 - DNA, 13 bp, Artificial Sequence
  Oligonucleotide for detection of SNP TSC0025370
gagaatatggata

SEQ ID NO: 101906 - DNA, 13 bp, Artificial Sequence
  Oligonucleotide for detection of SNP TSC0025370
tatccatattctc

SEQ ID NO: 101907 - DNA, 13 bp, Artificial Sequence
  Oligonucleotide for detection of SNP TSC0025371
tgggttatgttta

SEQ ID NO: 101908 - DNA, 13 bp, Artificial Sequence
  Oligonucleotide for detection of SNP TSC0025371
taaacataaccca

SEQ ID NO: 101909 - DNA, 13 bp, Artificial Sequence
  Oligonucleotide for detection of SNP TSC0025372
tgtttgtaatttt

SEQ ID NO: 101910 - DNA, 13 bp, Artificial Sequence
  Oligonucleotide for detection of SNP TSC0025372
aaaattacaaaca

SEQ ID NO: 101911 - DNA, 13 bp, Artificial Sequence
  Oligonucleotide for detection of SNP TSC0025372
tgtttggaatttt

SEQ ID NO: 101912 - DNA, 13 bp, Artificial Sequence
  Oligonucleotide for detection of SNP TSC0025372
aaaattccaaaca

SEQ ID NO: 101913 - DNA, 13 bp, Artificial Sequence
  Oligonucleotide for detection of SNP TSC0025372
agagttgtaagta

SEQ ID NO: 101914 - DNA, 13 bp, Artificial Sequence
  Oligonucleotide for detection of SNP TSC0025372
tacttacaactct

SEQ ID NO: 101915 - DNA, 13 bp, Artificial Sequence
  Oligonucleotide for detection of SNP TSC0025372
agagttttaagta

SEQ ID NO: 101916 - DNA, 13 bp, Artificial Sequence
  Oligonucleotide for detection of SNP TSC0025372
tacttaaaactct

SEQ ID NO: 101917 - DNA, 13 bp, Artificial Sequence
  Oligonucleotide for detection of SNP TSC0025379
ttaagtatttttg

SEQ ID NO: 101918 - DNA, 13 bp, Artificial Sequence
  Oligonucleotide for detection of SNP TSC0025379
caaaaatacttaa

SEQ ID NO: 101919 - DNA, 13 bp, Artificial Sequence
  Oligonucleotide for detection of SNP TSC0025379
ttaagtttttttg

SEQ ID NO: 101920 - DNA, 13 bp, Artificial Sequence
  Oligonucleotide for detection of SNP TSC0025379
caaaaaaacttaa

SEQ ID NO: 101921 - DNA, 13 bp, Artificial Sequence
  Oligonucleotide for detection of SNP TSC0025379
taggaatgtttag

SEQ ID NO: 101922 - DNA, 13 bp, Artificial Sequence
  Oligonucleotide for detection of SNP TSC0025379
ctaaacattccta

SEQ ID NO: 101923 - DNA, 13 bp, Artificial Sequence
  Oligonucleotide for detection of SNP TSC0025379
taggaaagtttag

SEQ ID NO: 101924 - DNA, 13 bp, Artificial Sequence
  Oligonucleotide for detection of SNP TSC0025379
ctaaactttccta

SEQ ID NO: 101925 - DNA, 13 bp, Artificial Sequence
  Oligonucleotide for detection of SNP TSC0025380
atgtttgtataga

SEQ ID NO: 101926 - DNA, 13 bp, Artificial Sequence
  Oligonucleotide for detection of SNP TSC0025380
tctatacaaacat

SEQ ID NO: 101927 - DNA, 13 bp, Artificial Sequence
  Oligonucleotide for detection of SNP TSC0025380
atgtttatataga

SEQ ID NO: 101928 - DNA, 13 bp, Artificial Sequence
  Oligonucleotide for detection of SNP TSC0025380
tctatataaacat

SEQ ID NO: 101929 - DNA, 13 bp, Artificial Sequence
  Oligonucleotide for detection of SNP TSC0025381
gatgttgttatgt

SEQ ID NO: 101930 - DNA, 13 bp, Artificial Sequence
  Oligonucleotide for detection of SNP TSC0025381
acataacaacatc

SEQ ID NO: 101931 - DNA, 13 bp, Artificial Sequence
  Oligonucleotide for detection of SNP TSC0025381
gatgtttttatgt

SEQ ID NO: 101932 - DNA, 13 bp, Artificial Sequence
  Oligonucleotide for detection of SNP TSC0025381
acataaaaacatc

SEQ ID NO: 101933 - DNA, 13 bp, Artificial Sequence
  Oligonucleotide for detection of SNP TSC0025381
atatggtaataty

SEQ ID NO: 101934 - DNA, 13 bp, Artificial Sequence
  Oligonucleotide for detection of SNP TSC0025381
ratattaccatat

SEQ ID NO: 101935 - DNA, 13 bp, Artificial Sequence
  Oligonucleotide for detection of SNP TSC0025381
atatggaaataty

SEQ ID NO: 101936 - DNA, 13 bp, Artificial Sequence
  Oligonucleotide for detection of SNP TSC0025381
ratatttccatat

SEQ ID NO: 101937 - DNA, 13 bp, Artificial Sequence
  Oligonucleotide for detection of SNP TSC0025382
aggttggtaatag

SEQ ID NO: 101938 - DNA, 13 bp, Artificial Sequence
  Oligonucleotide for detection of SNP TSC0025382
ctattaccaacct

SEQ ID NO: 101939 - DNA, 13 bp, Artificial Sequence
  Oligonucleotide for detection of SNP TSC0025382
aggttgataatag

SEQ ID NO: 101940 - DNA, 13 bp, Artificial Sequence
  Oligonucleotide for detection of SNP TSC0025382
ctattatcaacct

SEQ ID NO: 101941 - DNA, 13 bp, Artificial Sequence
  Oligonucleotide for detection of SNP TSC0025386
ttaatttgtatgg

SEQ ID NO: 101942 - DNA, 13 bp, Artificial Sequence
  Oligonucleotide for detection of SNP TSC0025386
ccatacaaattaa

SEQ ID NO: 101943 - DNA, 13 bp, Artificial Sequence
  Oligonucleotide for detection of SNP TSC0025386
ttaattcgtatgg

SEQ ID NO: 101944 - DNA, 13 bp, Artificial Sequence
  Oligonucleotide for detection of SNP TSC0025386
ccatacgaattaa

SEQ ID NO: 101945 - DNA, 13 bp, Artificial Sequence
  Oligonucleotide for detection of SNP TSC0025386
ttatgtgggttga

SEQ ID NO: 101946 - DNA, 13 bp, Artificial Sequence
  Oligonucleotide for detection of SNP TSC0025386
tcaacccacataa

SEQ ID NO: 101947 - DNA, 13 bp, Artificial Sequence
  Oligonucleotide for detection of SNP TSC0025386
ttatgtaggttga

SEQ ID NO: 101948 - DNA, 13 bp, Artificial Sequence
  Oligonucleotide for detection of SNP TSC0025386
tcaacctacataa

SEQ ID NO: 101949 - DNA, 13 bp, Artificial Sequence
  Oligonucleotide for detection of SNP TSC0025386
ttatgcgggttga

SEQ ID NO: 101950 - DNA, 13 bp, Artificial Sequence
  Oligonucleotide for detection of SNP TSC0025386
tcaacccgcataa

SEQ ID NO: 101951 - DNA, 13 bp, Artificial Sequence
  Oligonucleotide for detection of SNP TSC0025391
gtggtttatgttt

SEQ ID NO: 101952 - DNA, 13 bp, Artificial Sequence
  Oligonucleotide for detection of SNP TSC0025391
aaacataaaccac

SEQ ID NO: 101953 - DNA, 13 bp, Artificial Sequence
  Oligonucleotide for detection of SNP TSC0025391
gtggttaatgttt

SEQ ID NO: 101954 - DNA, 13 bp, Artificial Sequence
  Oligonucleotide for detection of SNP TSC0025391
aaacattaaccac

SEQ ID NO: 101955 - DNA, 13 bp, Artificial Sequence
  Oligonucleotide for detection of SNP TSC0025391
gtggtttacgttt

SEQ ID NO: 101956 - DNA, 13 bp, Artificial Sequence
  Oligonucleotide for detection of SNP TSC0025391
aaacgtaaaccac

SEQ ID NO: 101957 - DNA, 13 bp, Artificial Sequence
  Oligonucleotide for detection of SNP TSC0025391
gtggttaacgttt

SEQ ID NO: 101958 - DNA, 13 bp, Artificial Sequence
  Oligonucleotide for detection of SNP TSC0025391
aaacgttaaccac

SEQ ID NO: 101959 - DNA, 13 bp, Artificial Sequence
  Oligonucleotide for detection of SNP TSC0025392
ttttgtgttttat

SEQ ID NO: 101960 - DNA, 13 bp, Artificial Sequence
  Oligonucleotide for detection of SNP TSC0025392
ataaaacacaaaa

SEQ ID NO: 101961 - DNA, 13 bp, Artificial Sequence
  Oligonucleotide for detection of SNP TSC0025392
ttttgtattttat

SEQ ID NO: 101962 - DNA, 13 bp, Artificial Sequence
  Oligonucleotide for detection of SNP TSC0025392
ataaaatacaaaa

SEQ ID NO: 101963 - DNA, 13 bp, Artificial Sequence
  Oligonucleotide for detection of SNP TSC0025393
aaaaagtgggggg

SEQ ID NO: 101964 - DNA, 13 bp, Artificial Sequence
  Oligonucleotide for detection of SNP TSC0025393
ccccccacttttt

SEQ ID NO: 101965 - DNA, 13 bp, Artificial Sequence
  Oligonucleotide for detection of SNP TSC0025393
aaaaagcgggggg

SEQ ID NO: 101966 - DNA, 13 bp, Artificial Sequence
  Oligonucleotide for detection of SNP TSC0025393
ccccccgcttttt

SEQ ID NO: 101967 - DNA, 13 bp, Artificial Sequence
  Oligonucleotide for detection of SNP TSC0025395
ttttgagttggtt

SEQ ID NO: 101968 - DNA, 13 bp, Artificial Sequence
  Oligonucleotide for detection of SNP TSC0025395
aaccaactcaaaa

SEQ ID NO: 101969 - DNA, 13 bp, Artificial Sequence
  Oligonucleotide for detection of SNP TSC0025396
ttttaagaaaaaa

SEQ ID NO: 101970 - DNA, 13 bp, Artificial Sequence
  Oligonucleotide for detection of SNP TSC0025396
ttttttcttaaaa

SEQ ID NO: 101971 - DNA, 13 bp, Artificial Sequence
  Oligonucleotide for detection of SNP TSC0025398
tttaatatatatt

SEQ ID NO: 101972 - DNA, 13 bp, Artificial Sequence
  Oligonucleotide for detection of SNP TSC0025398
aatatatattaaa

SEQ ID NO: 101973 - DNA, 13 bp, Artificial Sequence
  Oligonucleotide for detection of SNP TSC0025398
tttaatgtatatt

SEQ ID NO: 101974 - DNA, 13 bp, Artificial Sequence
  Oligonucleotide for detection of SNP TSC0025398
aatatacattaaa

SEQ ID NO: 101975 - DNA, 13 bp, Artificial Sequence
  Oligonucleotide for detection of SNP TSC0025398
tttaacgtatatt

SEQ ID NO: 101976 - DNA, 13 bp, Artificial Sequence
  Oligonucleotide for detection of SNP TSC0025398
aatatacgttaaa

SEQ ID NO: 101977 - DNA, 13 bp, Artificial Sequence
  Oligonucleotide for detection of SNP TSC0025398
agtgtgtgttggg

SEQ ID NO: 101978 - DNA, 13 bp, Artificial Sequence
  Oligonucleotide for detection of SNP TSC0025398
cccaacacacact

SEQ ID NO: 101979 - DNA, 13 bp, Artificial Sequence
  Oligonucleotide for detection of SNP TSC0025398
agtgtgcgttggg

SEQ ID NO: 101980 - DNA, 13 bp, Artificial Sequence
  Oligonucleotide for detection of SNP TSC0025398
cccaacgcacact

SEQ ID NO: 101981 - DNA, 13 bp, Artificial Sequence
  Oligonucleotide for detection of SNP TSC0025401
tatggggaaaaty

SEQ ID NO: 101982 - DNA, 13 bp, Artificial Sequence
  Oligonucleotide for detection of SNP TSC0025401
rattttccccata

SEQ ID NO: 101983 - DNA, 13 bp, Artificial Sequence
  Oligonucleotide for detection of SNP TSC0025401
tatgggaaaaaty

SEQ ID NO: 101984 - DNA, 13 bp, Artificial Sequence
  Oligonucleotide for detection of SNP TSC0025401
ratttttcccata

SEQ ID NO: 101985 - DNA, 13 bp, Artificial Sequence
  Oligonucleotide for detection of SNP TSC0025402
gtaaaagtatgat

SEQ ID NO: 101986 - DNA, 13 bp, Artificial Sequence
  Oligonucleotide for detection of SNP TSC0025402
atcatacttttac

SEQ ID NO: 101987 - DNA, 13 bp, Artificial Sequence
  Oligonucleotide for detection of SNP TSC0025402
gtaaaaatatgat

SEQ ID NO: 101988 - DNA, 13 bp, Artificial Sequence
  Oligonucleotide for detection of SNP TSC0025402
atcatatttttac

SEQ ID NO: 101989 - DNA, 13 bp, Artificial Sequence
  Oligonucleotide for detection of SNP TSC0025406
ttatagtaatgta

SEQ ID NO: 101990 - DNA, 13 bp, Artificial Sequence
  Oligonucleotide for detection of SNP TSC0025406
tacattactataa

SEQ ID NO: 101991 - DNA, 13 bp, Artificial Sequence
  Oligonucleotide for detection of SNP TSC0025406
ttataggaatgta

SEQ ID NO: 101992 - DNA, 13 bp, Artificial Sequence
  Oligonucleotide for detection of SNP TSC0025406
tacattcctataa

SEQ ID NO: 101993 - DNA, 13 bp, Artificial Sequence
  Oligonucleotide for detection of SNP TSC0025406
ttatagtaacgta

SEQ ID NO: 101994 - DNA, 13 bp, Artificial Sequence
  Oligonucleotide for detection of SNP TSC0025406
tacgttactataa

SEQ ID NO: 101995 - DNA, 13 bp, Artificial Sequence
  Oligonucleotide for detection of SNP TSC0025406
ttataggaacgta

SEQ ID NO: 101996 - DNA, 13 bp, Artificial Sequence
  Oligonucleotide for detection of SNP TSC0025406
tacgttcctataa

SEQ ID NO: 101997 - DNA, 13 bp, Artificial Sequence
  Oligonucleotide for detection of SNP TSC0025406
tgtgttgttgtaa

SEQ ID NO: 101998 - DNA, 13 bp, Artificial Sequence
  Oligonucleotide for detection of SNP TSC0025406
ttacaacaacaca

SEQ ID NO: 101999 - DNA, 13 bp, Artificial Sequence
  Oligonucleotide for detection of SNP TSC0025406
tgtgtttttgtaa

SEQ ID NO: 102000 - DNA, 13 bp, Artificial Sequence
  Oligonucleotide for detection of SNP TSC0025406
ttacaaaaacaca

SEQ ID NO: 102001 - DNA, 13 bp, Artificial Sequence
  Oligonucleotide for detection of SNP TSC0025406
tgcgttgttgtaa

SEQ ID NO: 102002 - DNA, 13 bp, Artificial Sequence
  Oligonucleotide for detection of SNP TSC0025406
ttacaacaacgca

SEQ ID NO: 102003 - DNA, 13 bp, Artificial Sequence
  Oligonucleotide for detection of SNP TSC0025406
tgcgtttttgtaa

SEQ ID NO: 102004 - DNA, 13 bp, Artificial Sequence
  Oligonucleotide for detection of SNP TSC0025406
ttacaaaaacgca

SEQ ID NO: 102005 - DNA, 13 bp, Artificial Sequence
  Oligonucleotide for detection of SNP TSC0025409
ttaagtaagaata

SEQ ID NO: 102006 - DNA, 13 bp, Artificial Sequence
  Oligonucleotide for detection of SNP TSC0025409
tattcttacttaa

SEQ ID NO: 102007 - DNA, 13 bp, Artificial Sequence
  Oligonucleotide for detection of SNP TSC0025409
ttaagttagaata

SEQ ID NO: 102008 - DNA, 13 bp, Artificial Sequence
  Oligonucleotide for detection of SNP TSC0025409
tattctaacttaa

SEQ ID NO: 102009 - DNA, 13 bp, Artificial Sequence
  Oligonucleotide for detection of SNP TSC0025409
tgtttttatttaa

SEQ ID NO: 102010 - DNA, 13 bp, Artificial Sequence
  Oligonucleotide for detection of SNP TSC0025409
ttaaataaaaaca

SEQ ID NO: 102011 - DNA, 13 bp, Artificial Sequence
  Oligonucleotide for detection of SNP TSC0025409
tgttttgatttaa

SEQ ID NO: 102012 - DNA, 13 bp, Artificial Sequence
  Oligonucleotide for detection of SNP TSC0025409
ttaaatcaaaaca

SEQ ID NO: 102013 - DNA, 13 bp, Artificial Sequence
  Oligonucleotide for detection of SNP TSC0025413
tttagtattaatg

SEQ ID NO: 102014 - DNA, 13 bp, Artificial Sequence
  Oligonucleotide for detection of SNP TSC0025413
cattaatactaaa

SEQ ID NO: 102015 - DNA, 13 bp, Artificial Sequence
  Oligonucleotide for detection of SNP TSC0025413
tttagtgttaatg

SEQ ID NO: 102016 - DNA, 13 bp, Artificial Sequence
  Oligonucleotide for detection of SNP TSC0025413
cattaacactaaa

SEQ ID NO: 102017 - DNA, 13 bp, Artificial Sequence
  Oligonucleotide for detection of SNP TSC0025413
tttagcgttaatg

SEQ ID NO: 102018 - DNA, 13 bp, Artificial Sequence
  Oligonucleotide for detection of SNP TSC0025413
cattaacgctaaa

SEQ ID NO: 102019 - DNA, 13 bp, Artificial Sequence
  Oligonucleotide for detection of SNP TSC0025413
tattaatgttgaa

SEQ ID NO: 102020 - DNA, 13 bp, Artificial Sequence
  Oligonucleotide for detection of SNP TSC0025413
ttcaacattaata

SEQ ID NO: 102021 - DNA, 13 bp, Artificial Sequence
  Oligonucleotide for detection of SNP TSC0025413
tattaacgttgaa

SEQ ID NO: 102022 - DNA, 13 bp, Artificial Sequence
  Oligonucleotide for detection of SNP TSC0025413
ttcaacgttaata

SEQ ID NO: 102023 - DNA, 13 bp, Artificial Sequence
  Oligonucleotide for detection of SNP TSC0025414
gtaataaattgaa

SEQ ID NO: 102024 - DNA, 13 bp, Artificial Sequence
  Oligonucleotide for detection of SNP TSC0025414
ttcaatttattac

SEQ ID NO: 102025 - DNA, 13 bp, Artificial Sequence
  Oligonucleotide for detection of SNP TSC0025414
gtaatagattgaa

SEQ ID NO: 102026 - DNA, 13 bp, Artificial Sequence
  Oligonucleotide for detection of SNP TSC0025414
ttcaatctattac

SEQ ID NO: 102027 - DNA, 13 bp, Artificial Sequence
  Oligonucleotide for detection of SNP TSC0025417
aatagataggagy

SEQ ID NO: 102028 - DNA, 13 bp, Artificial Sequence
  Oligonucleotide for detection of SNP TSC0025417
rctcctatctatt

SEQ ID NO: 102029 - DNA, 13 bp, Artificial Sequence
  Oligonucleotide for detection of SNP TSC0025417
aatagagaggagy

SEQ ID NO: 102030 - DNA, 13 bp, Artificial Sequence
  Oligonucleotide for detection of SNP TSC0025417
rctcctctctatt

SEQ ID NO: 102031 - DNA, 13 bp, Artificial Sequence
  Oligonucleotide for detection of SNP TSC0025417
gtttttttttatt

SEQ ID NO: 102032 - DNA, 13 bp, Artificial Sequence
  Oligonucleotide for detection of SNP TSC0025417
aataaaaaaaaac

SEQ ID NO: 102033 - DNA, 13 bp, Artificial Sequence
  Oligonucleotide for detection of SNP TSC0025418
attattaagatta

SEQ ID NO: 102034 - DNA, 13 bp, Artificial Sequence
  Oligonucleotide for detection of SNP TSC0025418
taatcttaataat

SEQ ID NO: 102035 - DNA, 13 bp, Artificial Sequence
  Oligonucleotide for detection of SNP TSC0025418
attattgagatta

SEQ ID NO: 102036 - DNA, 13 bp, Artificial Sequence
  Oligonucleotide for detection of SNP TSC0025418
taatctcaataat

SEQ ID NO: 102037 - DNA, 13 bp, Artificial Sequence
  Oligonucleotide for detection of SNP TSC0025418
attatcgagatta

SEQ ID NO: 102038 - DNA, 13 bp, Artificial Sequence
  Oligonucleotide for detection of SNP TSC0025418
taatctcgataat

SEQ ID NO: 102039 - DNA, 13 bp, Artificial Sequence
  Oligonucleotide for detection of SNP TSC0025418
tgattttgatagt

SEQ ID NO: 102040 - DNA, 13 bp, Artificial Sequence
  Oligonucleotide for detection of SNP TSC0025418
actatcaaaatca

SEQ ID NO: 102041 - DNA, 13 bp, Artificial Sequence
  Oligonucleotide for detection of SNP TSC0025418
tgatttcgatagt

SEQ ID NO: 102042 - DNA, 13 bp, Artificial Sequence
  Oligonucleotide for detection of SNP TSC0025418
actatcgaaatca

SEQ ID NO: 102043 - DNA, 13 bp, Artificial Sequence
  Oligonucleotide for detection of SNP TSC0025421
tttgagaagtttt

SEQ ID NO: 102044 - DNA, 13 bp, Artificial Sequence
  Oligonucleotide for detection of SNP TSC0025421
aaaacttctcaaa

SEQ ID NO: 102045 - DNA, 13 bp, Artificial Sequence
  Oligonucleotide for detection of SNP TSC0025421
tttgaggagtttt

SEQ ID NO: 102046 - DNA, 13 bp, Artificial Sequence
  Oligonucleotide for detection of SNP TSC0025421
aaaactcctcaaa

SEQ ID NO: 102047 - DNA, 13 bp, Artificial Sequence
  Oligonucleotide for detection of SNP TSC0025421
ttcgagaagtttt

SEQ ID NO: 102048 - DNA, 13 bp, Artificial Sequence
  Oligonucleotide for detection of SNP TSC0025421
aaaacttctcgaa

SEQ ID NO: 102049 - DNA, 13 bp, Artificial Sequence
  Oligonucleotide for detection of SNP TSC0025421
ttcgaggagtttt

SEQ ID NO: 102050 - DNA, 13 bp, Artificial Sequence
  Oligonucleotide for detection of SNP TSC0025421
aaaactcctcgaa

SEQ ID NO: 102051 - DNA, 13 bp, Artificial Sequence
  Oligonucleotide for detection of SNP TSC0025424
attttatgttatg

SEQ ID NO: 102052 - DNA, 13 bp, Artificial Sequence
  Oligonucleotide for detection of SNP TSC0025424
cataacataaaat

SEQ ID NO: 102053 - DNA, 13 bp, Artificial Sequence
  Oligonucleotide for detection of SNP TSC0025424
attttacgttatg

SEQ ID NO: 102054 - DNA, 13 bp, Artificial Sequence
  Oligonucleotide for detection of SNP TSC0025424
cataacgtaaaat

SEQ ID NO: 102055 - DNA, 13 bp, Artificial Sequence
  Oligonucleotide for detection of SNP TSC0025424
tatagtgtaaaat

SEQ ID NO: 102056 - DNA, 13 bp, Artificial Sequence
  Oligonucleotide for detection of SNP TSC0025424
attttacactata

SEQ ID NO: 102057 - DNA, 13 bp, Artificial Sequence
  Oligonucleotide for detection of SNP TSC0025424
tatagtataaaat

SEQ ID NO: 102058 - DNA, 13 bp, Artificial Sequence
  Oligonucleotide for detection of SNP TSC0025424
attttatactata

SEQ ID NO: 102059 - DNA, 13 bp, Artificial Sequence
  Oligonucleotide for detection of SNP TSC0025424
tatagcgtaaaat

SEQ ID NO: 102060 - DNA, 13 bp, Artificial Sequence
  Oligonucleotide for detection of SNP TSC0025424
attttacgctata

SEQ ID NO: 102061 - DNA, 13 bp, Artificial Sequence
  Oligonucleotide for detection of SNP TSC0025425
tgggggaaggata

SEQ ID NO: 102062 - DNA, 13 bp, Artificial Sequence
  Oligonucleotide for detection of SNP TSC0025425
tatccttccccca

SEQ ID NO: 102063 - DNA, 13 bp, Artificial Sequence
  Oligonucleotide for detection of SNP TSC0025425
tggggggaggata

SEQ ID NO: 102064 - DNA, 13 bp, Artificial Sequence
  Oligonucleotide for detection of SNP TSC0025425
tatcctcccccca

SEQ ID NO: 102065 - DNA, 13 bp, Artificial Sequence
  Oligonucleotide for detection of SNP TSC0025426
gtaaataaggaag

SEQ ID NO: 102066 - DNA, 13 bp, Artificial Sequence
  Oligonucleotide for detection of SNP TSC0025426
cttccttatttac

SEQ ID NO: 102067 - DNA, 13 bp, Artificial Sequence
  Oligonucleotide for detection of SNP TSC0025426
gtaaatgaggaag

SEQ ID NO: 102068 - DNA, 13 bp, Artificial Sequence
  Oligonucleotide for detection of SNP TSC0025426
cttcctcatttac

SEQ ID NO: 102069 - DNA, 13 bp, Artificial Sequence
  Oligonucleotide for detection of SNP TSC0025427
atattgattaggy

SEQ ID NO: 102070 - DNA, 13 bp, Artificial Sequence
  Oligonucleotide for detection of SNP TSC0025427
rcctaatcaatat

SEQ ID NO: 102071 - DNA, 13 bp, Artificial Sequence
  Oligonucleotide for detection of SNP TSC0025427
atattggttaggy

SEQ ID NO: 102072 - DNA, 13 bp, Artificial Sequence
  Oligonucleotide for detection of SNP TSC0025427
rcctaaccaatat

SEQ ID NO: 102073 - DNA, 13 bp, Artificial Sequence
  Oligonucleotide for detection of SNP TSC0025431
gtagggaatgaaa

SEQ ID NO: 102074 - DNA, 13 bp, Artificial Sequence
  Oligonucleotide for detection of SNP TSC0025431
tttcattccctac

SEQ ID NO: 102075 - DNA, 13 bp, Artificial Sequence
  Oligonucleotide for detection of SNP TSC0025431
gtaggggatgaaa

SEQ ID NO: 102076 - DNA, 13 bp, Artificial Sequence
  Oligonucleotide for detection of SNP TSC0025431
tttcatcccctac

SEQ ID NO: 102077 - DNA, 13 bp, Artificial Sequence
  Oligonucleotide for detection of SNP TSC0025432
aaagtggtttgga

SEQ ID NO: 102078 - DNA, 13 bp, Artificial Sequence
  Oligonucleotide for detection of SNP TSC0025432
tccaaaccacttt

SEQ ID NO: 102079 - DNA, 13 bp, Artificial Sequence
  Oligonucleotide for detection of SNP TSC0025432
aaagtgttttgga

SEQ ID NO: 102080 - DNA, 13 bp, Artificial Sequence
  Oligonucleotide for detection of SNP TSC0025432
tccaaaacacttt

SEQ ID NO: 102081 - DNA, 13 bp, Artificial Sequence
  Oligonucleotide for detection of SNP TSC0025433
gatttggtgattt

SEQ ID NO: 102082 - DNA, 13 bp, Artificial Sequence
  Oligonucleotide for detection of SNP TSC0025433
aaatcaccaaatc

SEQ ID NO: 102083 - DNA, 13 bp, Artificial Sequence
  Oligonucleotide for detection of SNP TSC0025433
gatttgatgattt

SEQ ID NO: 102084 - DNA, 13 bp, Artificial Sequence
  Oligonucleotide for detection of SNP TSC0025433
aaatcatcaaatc

SEQ ID NO: 102085 - DNA, 13 bp, Artificial Sequence
  Oligonucleotide for detection of SNP TSC0025434
tagagatgttgga

SEQ ID NO: 102086 - DNA, 13 bp, Artificial Sequence
  Oligonucleotide for detection of SNP TSC0025434
tccaacatctcta

SEQ ID NO: 102087 - DNA, 13 bp, Artificial Sequence
  Oligonucleotide for detection of SNP TSC0025434
tagagaagttgga

SEQ ID NO: 102088 - DNA, 13 bp, Artificial Sequence
  Oligonucleotide for detection of SNP TSC0025434
tccaacttctcta

SEQ ID NO: 102089 - DNA, 13 bp, Artificial Sequence
  Oligonucleotide for detection of SNP TSC0025434
tagagacgttgga

SEQ ID NO: 102090 - DNA, 13 bp, Artificial Sequence
  Oligonucleotide for detection of SNP TSC0025434
tccaacgtctcta

SEQ ID NO: 102091 - DNA, 13 bp, Artificial Sequence
  Oligonucleotide for detection of SNP TSC0025435
tttaggggtgttt

SEQ ID NO: 102092 - DNA, 13 bp, Artificial Sequence
  Oligonucleotide for detection of SNP TSC0025435
aaacacccctaaa

SEQ ID NO: 102093 - DNA, 13 bp, Artificial Sequence
  Oligonucleotide for detection of SNP TSC0025435
tttaggtgtgttt

SEQ ID NO: 102094 - DNA, 13 bp, Artificial Sequence
  Oligonucleotide for detection of SNP TSC0025435
aaacacacctaaa

SEQ ID NO: 102095 - DNA, 13 bp, Artificial Sequence
  Oligonucleotide for detection of SNP TSC0025435
tttaggggcgttt

SEQ ID NO: 102096 - DNA, 13 bp, Artificial Sequence
  Oligonucleotide for detection of SNP TSC0025435
aaacgcccctaaa

SEQ ID NO: 102097 - DNA, 13 bp, Artificial Sequence
  Oligonucleotide for detection of SNP TSC0025435
tttaggtgcgttt

SEQ ID NO: 102098 - DNA, 13 bp, Artificial Sequence
  Oligonucleotide for detection of SNP TSC0025435
aaacgcacctaaa

SEQ ID NO: 102099 - DNA, 13 bp, Artificial Sequence
  Oligonucleotide for detection of SNP TSC0025435
agatgtttttggg

SEQ ID NO: 102100 - DNA, 13 bp, Artificial Sequence
  Oligonucleotide for detection of SNP TSC0025435
cccaaaaacatct

SEQ ID NO: 102101 - DNA, 13 bp, Artificial Sequence
  Oligonucleotide for detection of SNP TSC0025435
agatgtatttggg

SEQ ID NO: 102102 - DNA, 13 bp, Artificial Sequence
  Oligonucleotide for detection of SNP TSC0025435
cccaaatacatct

SEQ ID NO: 102103 - DNA, 13 bp, Artificial Sequence
  Oligonucleotide for detection of SNP TSC0025435
agacgtttttggg

SEQ ID NO: 102104 - DNA, 13 bp, Artificial Sequence
  Oligonucleotide for detection of SNP TSC0025435
cccaaaaacgtct

SEQ ID NO: 102105 - DNA, 13 bp, Artificial Sequence
  Oligonucleotide for detection of SNP TSC0025435
agacgtatttggg

SEQ ID NO: 102106 - DNA, 13 bp, Artificial Sequence
  Oligonucleotide for detection of SNP TSC0025435
cccaaatacgtct

SEQ ID NO: 102107 - DNA, 13 bp, Artificial Sequence
  Oligonucleotide for detection of SNP TSC0025436
gagtggtgggggg

SEQ ID NO: 102108 - DNA, 13 bp, Artificial Sequence
  Oligonucleotide for detection of SNP TSC0025436
ccccccaccactc

SEQ ID NO: 102109 - DNA, 13 bp, Artificial Sequence
  Oligonucleotide for detection of SNP TSC0025436
gagtggggggggg

SEQ ID NO: 102110 - DNA, 13 bp, Artificial Sequence
  Oligonucleotide for detection of SNP TSC0025436
cccccccccactc

SEQ ID NO: 102111 - DNA, 13 bp, Artificial Sequence
  Oligonucleotide for detection of SNP TSC0025436
gagtggcgggggg

SEQ ID NO: 102112 - DNA, 13 bp, Artificial Sequence
  Oligonucleotide for detection of SNP TSC0025436
ccccccgccactc

SEQ ID NO: 102113 - DNA, 13 bp, Artificial Sequence
  Oligonucleotide for detection of SNP TSC0025437
tattatatttaat

SEQ ID NO: 102114 - DNA, 13 bp, Artificial Sequence
  Oligonucleotide for detection of SNP TSC0025437
attaaatataata

SEQ ID NO: 102115 - DNA, 13 bp, Artificial Sequence
  Oligonucleotide for detection of SNP TSC0025437
tattatttttaat

SEQ ID NO: 102116 - DNA, 13 bp, Artificial Sequence
  Oligonucleotide for detection of SNP TSC0025437
attaaaaataata

SEQ ID NO: 102117 - DNA, 13 bp, Artificial Sequence
  Oligonucleotide for detection of SNP TSC0025437
attgagtatggtg

SEQ ID NO: 102118 - DNA, 13 bp, Artificial Sequence
  Oligonucleotide for detection of SNP TSC0025437
caccatactcaat

SEQ ID NO: 102119 - DNA, 13 bp, Artificial Sequence
  Oligonucleotide for detection of SNP TSC0025437
attgaggatggtg

SEQ ID NO: 102120 - DNA, 13 bp, Artificial Sequence
  Oligonucleotide for detection of SNP TSC0025437
caccatcctcaat

SEQ ID NO: 102121 - DNA, 13 bp, Artificial Sequence
  Oligonucleotide for detection of SNP TSC0025438
tatgagattgggt

SEQ ID NO: 102122 - DNA, 13 bp, Artificial Sequence
  Oligonucleotide for detection of SNP TSC0025438
acccaatctcata

SEQ ID NO: 102123 - DNA, 13 bp, Artificial Sequence
  Oligonucleotide for detection of SNP TSC0025438
tatgaggttgggt

SEQ ID NO: 102124 - DNA, 13 bp, Artificial Sequence
  Oligonucleotide for detection of SNP TSC0025438
acccaacctcata

SEQ ID NO: 102125 - DNA, 13 bp, Artificial Sequence
  Oligonucleotide for detection of SNP TSC0025441
taagggtggggta

SEQ ID NO: 102126 - DNA, 13 bp, Artificial Sequence
  Oligonucleotide for detection of SNP TSC0025441
taccccaccctta

SEQ ID NO: 102127 - DNA, 13 bp, Artificial Sequence
  Oligonucleotide for detection of SNP TSC0025441
taagggcggggta

SEQ ID NO: 102128 - DNA, 13 bp, Artificial Sequence
  Oligonucleotide for detection of SNP TSC0025441
taccccgccctta

SEQ ID NO: 102129 - DNA, 13 bp, Artificial Sequence
  Oligonucleotide for detection of SNP TSC0025442
gttataatagtgt

SEQ ID NO: 102130 - DNA, 13 bp, Artificial Sequence
  Oligonucleotide for detection of SNP TSC0025442
acactattataac

SEQ ID NO: 102131 - DNA, 13 bp, Artificial Sequence
  Oligonucleotide for detection of SNP TSC0025442
gttatagtagtgt

SEQ ID NO: 102132 - DNA, 13 bp, Artificial Sequence
  Oligonucleotide for detection of SNP TSC0025442
acactactataac

SEQ ID NO: 102133 - DNA, 13 bp, Artificial Sequence
  Oligonucleotide for detection of SNP TSC0025443
aggtatattgaty

SEQ ID NO: 102134 - DNA, 13 bp, Artificial Sequence
  Oligonucleotide for detection of SNP TSC0025443
ratcaatatacct

SEQ ID NO: 102135 - DNA, 13 bp, Artificial Sequence
  Oligonucleotide for detection of SNP TSC0025443
aggtattttgaty

SEQ ID NO: 102136 - DNA, 13 bp, Artificial Sequence
  Oligonucleotide for detection of SNP TSC0025443
ratcaaaatacct

SEQ ID NO: 102137 - DNA, 13 bp, Artificial Sequence
  Oligonucleotide for detection of SNP TSC0025443
ggttagtgtattt

SEQ ID NO: 102138 - DNA, 13 bp, Artificial Sequence
  Oligonucleotide for detection of SNP TSC0025443
aaatacactaacc

SEQ ID NO: 102139 - DNA, 13 bp, Artificial Sequence
  Oligonucleotide for detection of SNP TSC0025443
ggttagggtattt

SEQ ID NO: 102140 - DNA, 13 bp, Artificial Sequence
  Oligonucleotide for detection of SNP TSC0025443
aaataccctaacc

SEQ ID NO: 102141 - DNA, 13 bp, Artificial Sequence
  Oligonucleotide for detection of SNP TSC0025445
ggtattggttatg

SEQ ID NO: 102142 - DNA, 13 bp, Artificial Sequence
  Oligonucleotide for detection of SNP TSC0025445
cataaccaatacc

SEQ ID NO: 102143 - DNA, 13 bp, Artificial Sequence
  Oligonucleotide for detection of SNP TSC0025445
ggtattagttatg

SEQ ID NO: 102144 - DNA, 13 bp, Artificial Sequence
  Oligonucleotide for detection of SNP TSC0025445
cataactaatacc

SEQ ID NO: 102145 - DNA, 13 bp, Artificial Sequence
  Oligonucleotide for detection of SNP TSC0025446
ggatagggatttt

SEQ ID NO: 102146 - DNA, 13 bp, Artificial Sequence
  Oligonucleotide for detection of SNP TSC0025446
aaaatccctatcc

SEQ ID NO: 102147 - DNA, 13 bp, Artificial Sequence
  Oligonucleotide for detection of SNP TSC0025446
ggatagagatttt

SEQ ID NO: 102148 - DNA, 13 bp, Artificial Sequence
  Oligonucleotide for detection of SNP TSC0025446
aaaatctctatcc

SEQ ID NO: 102149 - DNA, 13 bp, Artificial Sequence
  Oligonucleotide for detection of SNP TSC0025449
ggtttaaatgata

SEQ ID NO: 102150 - DNA, 13 bp, Artificial Sequence
  Oligonucleotide for detection of SNP TSC0025449
tatcatttaaacc

SEQ ID NO: 102151 - DNA, 13 bp, Artificial Sequence
  Oligonucleotide for detection of SNP TSC0025449
ggtttagatgata

SEQ ID NO: 102152 - DNA, 13 bp, Artificial Sequence
  Oligonucleotide for detection of SNP TSC0025449
tatcatctaaacc

SEQ ID NO: 102153 - DNA, 13 bp, Artificial Sequence
  Oligonucleotide for detection of SNP TSC0025450
aggtgaaatgtgg

SEQ ID NO: 102154 - DNA, 13 bp, Artificial Sequence
  Oligonucleotide for detection of SNP TSC0025450
ccacatttcacct

SEQ ID NO: 102155 - DNA, 13 bp, Artificial Sequence
  Oligonucleotide for detection of SNP TSC0025450
aggtgagatgtgg

SEQ ID NO: 102156 - DNA, 13 bp, Artificial Sequence
  Oligonucleotide for detection of SNP TSC0025450
ccacatctcacct

SEQ ID NO: 102157 - DNA, 13 bp, Artificial Sequence
  Oligonucleotide for detection of SNP TSC0025451
gtttattgtatta

SEQ ID NO: 102158 - DNA, 13 bp, Artificial Sequence
  Oligonucleotide for detection of SNP TSC0025451
taatacaataaac

SEQ ID NO: 102159 - DNA, 13 bp, Artificial Sequence
  Oligonucleotide for detection of SNP TSC0025451
gtttatcgtatta

SEQ ID NO: 102160 - DNA, 13 bp, Artificial Sequence
  Oligonucleotide for detection of SNP TSC0025451
taatacgataaac

SEQ ID NO: 102161 - DNA, 13 bp, Artificial Sequence
  Oligonucleotide for detection of SNP TSC0025451
tggtgtgatggay

SEQ ID NO: 102162 - DNA, 13 bp, Artificial Sequence
  Oligonucleotide for detection of SNP TSC0025451
rtccatcacacca

SEQ ID NO: 102163 - DNA, 13 bp, Artificial Sequence
  Oligonucleotide for detection of SNP TSC0025451
tggtgtaatggay

SEQ ID NO: 102164 - DNA, 13 bp, Artificial Sequence
  Oligonucleotide for detection of SNP TSC0025451
rtccattacacca

SEQ ID NO: 102165 - DNA, 13 bp, Artificial Sequence
  Oligonucleotide for detection of SNP TSC0025451
tggtgcgatggay

SEQ ID NO: 102166 - DNA, 13 bp, Artificial Sequence
  Oligonucleotide for detection of SNP TSC0025451
rtccatcgcacca

SEQ ID NO: 102167 - DNA, 13 bp, Artificial Sequence
  Oligonucleotide for detection of SNP TSC0025452
aatggtgttttty

SEQ ID NO: 102168 - DNA, 13 bp, Artificial Sequence
  Oligonucleotide for detection of SNP TSC0025452
raaaaacaccatt

SEQ ID NO: 102169 - DNA, 13 bp, Artificial Sequence
  Oligonucleotide for detection of SNP TSC0025452
aatggttttttty

SEQ ID NO: 102170 - DNA, 13 bp, Artificial Sequence
  Oligonucleotide for detection of SNP TSC0025452
raaaaaaaccatt

SEQ ID NO: 102171 - DNA, 13 bp, Artificial Sequence
  Oligonucleotide for detection of SNP TSC0025452
gagagatattatt

SEQ ID NO: 102172 - DNA, 13 bp, Artificial Sequence
  Oligonucleotide for detection of SNP TSC0025452
aataatatctctc

SEQ ID NO: 102173 - DNA, 13 bp, Artificial Sequence
  Oligonucleotide for detection of SNP TSC0025452
gagagaaattatt

SEQ ID NO: 102174 - DNA, 13 bp, Artificial Sequence
  Oligonucleotide for detection of SNP TSC0025452
aataatttctctc

SEQ ID NO: 102175 - DNA, 13 bp, Artificial Sequence
  Oligonucleotide for detection of SNP TSC0025456
attagaataggat

SEQ ID NO: 102176 - DNA, 13 bp, Artificial Sequence
  Oligonucleotide for detection of SNP TSC0025456
atcctattctaat

SEQ ID NO: 102177 - DNA, 13 bp, Artificial Sequence
  Oligonucleotide for detection of SNP TSC0025456
attagattaggat

SEQ ID NO: 102178 - DNA, 13 bp, Artificial Sequence
  Oligonucleotide for detection of SNP TSC0025456
atcctaatctaat

SEQ ID NO: 102179 - DNA, 13 bp, Artificial Sequence
  Oligonucleotide for detection of SNP TSC0025456
attttattttagt

SEQ ID NO: 102180 - DNA, 13 bp, Artificial Sequence
  Oligonucleotide for detection of SNP TSC0025456
actaaaataaaat

SEQ ID NO: 102181 - DNA, 13 bp, Artificial Sequence
  Oligonucleotide for detection of SNP TSC0025456
attttagtttagt

SEQ ID NO: 102182 - DNA, 13 bp, Artificial Sequence
  Oligonucleotide for detection of SNP TSC0025456
actaaactaaaat

SEQ ID NO: 102183 - DNA, 13 bp, Artificial Sequence
  Oligonucleotide for detection of SNP TSC0025458
tggtgtagttagt

SEQ ID NO: 102184 - DNA, 13 bp, Artificial Sequence
  Oligonucleotide for detection of SNP TSC0025458
actaactacacca

SEQ ID NO: 102185 - DNA, 13 bp, Artificial Sequence
  Oligonucleotide for detection of SNP TSC0025458
tggtgtggttagt

SEQ ID NO: 102186 - DNA, 13 bp, Artificial Sequence
  Oligonucleotide for detection of SNP TSC0025458
actaaccacacca

SEQ ID NO: 102187 - DNA, 13 bp, Artificial Sequence
  Oligonucleotide for detection of SNP TSC0025459
ttattgtttatat

SEQ ID NO: 102188 - DNA, 13 bp, Artificial Sequence
  Oligonucleotide for detection of SNP TSC0025459
atataaacaataa

SEQ ID NO: 102189 - DNA, 13 bp, Artificial Sequence
  Oligonucleotide for detection of SNP TSC0025459
ttattggttatat

SEQ ID NO: 102190 - DNA, 13 bp, Artificial Sequence
  Oligonucleotide for detection of SNP TSC0025459
atataaccaataa

SEQ ID NO: 102191 - DNA, 13 bp, Artificial Sequence
  Oligonucleotide for detection of SNP TSC0025459
atatgagtaataa

SEQ ID NO: 102192 - DNA, 13 bp, Artificial Sequence
  Oligonucleotide for detection of SNP TSC0025459
ttattactcatat

SEQ ID NO: 102193 - DNA, 13 bp, Artificial Sequence
  Oligonucleotide for detection of SNP TSC0025459
atatgattaataa

SEQ ID NO: 102194 - DNA, 13 bp, Artificial Sequence
  Oligonucleotide for detection of SNP TSC0025459
ttattaatcatat

SEQ ID NO: 102195 - DNA, 13 bp, Artificial Sequence
  Oligonucleotide for detection of SNP TSC0025460
agaagtagaggta

SEQ ID NO: 102196 - DNA, 13 bp, Artificial Sequence
  Oligonucleotide for detection of SNP TSC0025460
tacctctacttct

SEQ ID NO: 102197 - DNA, 13 bp, Artificial Sequence
  Oligonucleotide for detection of SNP TSC0025460
agaagtggaggta

SEQ ID NO: 102198 - DNA, 13 bp, Artificial Sequence
  Oligonucleotide for detection of SNP TSC0025460
tacctccacttct

SEQ ID NO: 102199 - DNA, 13 bp, Artificial Sequence
  Oligonucleotide for detection of SNP TSC0025461
atatgagggattt

SEQ ID NO: 102200 - DNA, 13 bp, Artificial Sequence
  Oligonucleotide for detection of SNP TSC0025461
aaatccctcatat

SEQ ID NO: 102201 - DNA, 13 bp, Artificial Sequence
  Oligonucleotide for detection of SNP TSC0025461
atatgaaggattt

SEQ ID NO: 102202 - DNA, 13 bp, Artificial Sequence
  Oligonucleotide for detection of SNP TSC0025461
aaatccttcatat

SEQ ID NO: 102203 - DNA, 13 bp, Artificial Sequence
  Oligonucleotide for detection of SNP TSC0025463
agattgagtttaa

SEQ ID NO: 102204 - DNA, 13 bp, Artificial Sequence
  Oligonucleotide for detection of SNP TSC0025463
ttaaactcaatct

SEQ ID NO: 102205 - DNA, 13 bp, Artificial Sequence
  Oligonucleotide for detection of SNP TSC0025463
agattgggtttaa

SEQ ID NO: 102206 - DNA, 13 bp, Artificial Sequence
  Oligonucleotide for detection of SNP TSC0025463
ttaaacccaatct

SEQ ID NO: 102207 - DNA, 13 bp, Artificial Sequence
  Oligonucleotide for detection of SNP TSC0025472
gttttggtaaatg

SEQ ID NO: 102208 - DNA, 13 bp, Artificial Sequence
  Oligonucleotide for detection of SNP TSC0025472
catttaccaaaac

SEQ ID NO: 102209 - DNA, 13 bp, Artificial Sequence
  Oligonucleotide for detection of SNP TSC0025472
gttttgataaatg

SEQ ID NO: 102210 - DNA, 13 bp, Artificial Sequence
  Oligonucleotide for detection of SNP TSC0025472
catttatcaaaac

SEQ ID NO: 102211 - DNA, 13 bp, Artificial Sequence
  Oligonucleotide for detection of SNP TSC0025474
gtattttgtttty

SEQ ID NO: 102212 - DNA, 13 bp, Artificial Sequence
  Oligonucleotide for detection of SNP TSC0025474
raaaacaaaatac

SEQ ID NO: 102213 - DNA, 13 bp, Artificial Sequence
  Oligonucleotide for detection of SNP TSC0025474
gtatttcgtttty

SEQ ID NO: 102214 - DNA, 13 bp, Artificial Sequence
  Oligonucleotide for detection of SNP TSC0025474
raaaacgaaatac

SEQ ID NO: 102215 - DNA, 13 bp, Artificial Sequence
  Oligonucleotide for detection of SNP TSC0025474
ggaggtggggtgy

SEQ ID NO: 102216 - DNA, 13 bp, Artificial Sequence
  Oligonucleotide for detection of SNP TSC0025474
rcaccccacctcc

SEQ ID NO: 102217 - DNA, 13 bp, Artificial Sequence
  Oligonucleotide for detection of SNP TSC0025474
ggaggtagggtgy

SEQ ID NO: 102218 - DNA, 13 bp, Artificial Sequence
  Oligonucleotide for detection of SNP TSC0025474
rcaccctacctcc

SEQ ID NO: 102219 - DNA, 13 bp, Artificial Sequence
  Oligonucleotide for detection of SNP TSC0025474
ggaggcggggtgy

SEQ ID NO: 102220 - DNA, 13 bp, Artificial Sequence
  Oligonucleotide for detection of SNP TSC0025474
rcaccccgcctcc

SEQ ID NO: 102221 - DNA, 13 bp, Artificial Sequence
  Oligonucleotide for detection of SNP TSC0025477
tgagatgaggtag

SEQ ID NO: 102222 - DNA, 13 bp, Artificial Sequence
  Oligonucleotide for detection of SNP TSC0025477
ctacctcatctca

SEQ ID NO: 102223 - DNA, 13 bp, Artificial Sequence
  Oligonucleotide for detection of SNP TSC0025477
tgagattaggtag

SEQ ID NO: 102224 - DNA, 13 bp, Artificial Sequence
  Oligonucleotide for detection of SNP TSC0025477
ctacctaatctca

SEQ ID NO: 102225 - DNA, 13 bp, Artificial Sequence
  Oligonucleotide for detection of SNP TSC0025477
ttgttttatttta

SEQ ID NO: 102226 - DNA, 13 bp, Artificial Sequence
  Oligonucleotide for detection of SNP TSC0025477
taaaataaaacaa

SEQ ID NO: 102227 - DNA, 13 bp, Artificial Sequence
  Oligonucleotide for detection of SNP TSC0025477
ttgtttaatttta

SEQ ID NO: 102228 - DNA, 13 bp, Artificial Sequence
  Oligonucleotide for detection of SNP TSC0025477
taaaattaaacaa

SEQ ID NO: 102229 - DNA, 13 bp, Artificial Sequence
  Oligonucleotide for detection of SNP TSC0025480
tgggaaattatat

SEQ ID NO: 102230 - DNA, 13 bp, Artificial Sequence
  Oligonucleotide for detection of SNP TSC0025480
atataatttccca

SEQ ID NO: 102231 - DNA, 13 bp, Artificial Sequence
  Oligonucleotide for detection of SNP TSC0025480
tgggaagttatat

SEQ ID NO: 102232 - DNA, 13 bp, Artificial Sequence
  Oligonucleotide for detection of SNP TSC0025480
atataacttccca

SEQ ID NO: 102233 - DNA, 13 bp, Artificial Sequence
  Oligonucleotide for detection of SNP TSC0025480
cgggaaattatat

SEQ ID NO: 102234 - DNA, 13 bp, Artificial Sequence
  Oligonucleotide for detection of SNP TSC0025480
atataatttcccg

SEQ ID NO: 102235 - DNA, 13 bp, Artificial Sequence
  Oligonucleotide for detection of SNP TSC0025480
cgggaagttatat

SEQ ID NO: 102236 - DNA, 13 bp, Artificial Sequence
  Oligonucleotide for detection of SNP TSC0025480
atataacttcccg

SEQ ID NO: 102237 - DNA, 13 bp, Artificial Sequence
  Oligonucleotide for detection of SNP TSC0025481
aaaaaaggtttta

SEQ ID NO: 102238 - DNA, 13 bp, Artificial Sequence
  Oligonucleotide for detection of SNP TSC0025481
taaaacctttttt

SEQ ID NO: 102239 - DNA, 13 bp, Artificial Sequence
  Oligonucleotide for detection of SNP TSC0025481
aaaaaaagtttta

SEQ ID NO: 102240 - DNA, 13 bp, Artificial Sequence
  Oligonucleotide for detection of SNP TSC0025481
taaaacttttttt

SEQ ID NO: 102241 - DNA, 13 bp, Artificial Sequence
  Oligonucleotide for detection of SNP TSC0025482
agttaggggatty

SEQ ID NO: 102242 - DNA, 13 bp, Artificial Sequence
  Oligonucleotide for detection of SNP TSC0025482
raatcccctaact

SEQ ID NO: 102243 - DNA, 13 bp, Artificial Sequence
  Oligonucleotide for detection of SNP TSC0025482
agttagtggatty

SEQ ID NO: 102244 - DNA, 13 bp, Artificial Sequence
  Oligonucleotide for detection of SNP TSC0025482
raatccactaact

SEQ ID NO: 102245 - DNA, 13 bp, Artificial Sequence
  Oligonucleotide for detection of SNP TSC0025482
ggatttattagtt

SEQ ID NO: 102246 - DNA, 13 bp, Artificial Sequence
  Oligonucleotide for detection of SNP TSC0025482
aactaataaatcc

SEQ ID NO: 102247 - DNA, 13 bp, Artificial Sequence
  Oligonucleotide for detection of SNP TSC0025485
tttaagaggggag

SEQ ID NO: 102248 - DNA, 13 bp, Artificial Sequence
  Oligonucleotide for detection of SNP TSC0025485
ctcccctcttaaa

SEQ ID NO: 102249 - DNA, 13 bp, Artificial Sequence
  Oligonucleotide for detection of SNP TSC0025485
tttaaggggggag

SEQ ID NO: 102250 - DNA, 13 bp, Artificial Sequence
  Oligonucleotide for detection of SNP TSC0025485
ctccccccttaaa

SEQ ID NO: 102251 - DNA, 13 bp, Artificial Sequence
  Oligonucleotide for detection of SNP TSC0025490
ttaagtatttgat

SEQ ID NO: 102252 - DNA, 13 bp, Artificial Sequence
  Oligonucleotide for detection of SNP TSC0025490
atcaaatacttaa

SEQ ID NO: 102253 - DNA, 13 bp, Artificial Sequence
  Oligonucleotide for detection of SNP TSC0025490
ttaagtgtttgat

SEQ ID NO: 102254 - DNA, 13 bp, Artificial Sequence
  Oligonucleotide for detection of SNP TSC0025490
atcaaacacttaa

SEQ ID NO: 102255 - DNA, 13 bp, Artificial Sequence
  Oligonucleotide for detection of SNP TSC0025491
atgtttgtttatt

SEQ ID NO: 102256 - DNA, 13 bp, Artificial Sequence
  Oligonucleotide for detection of SNP TSC0025491
aataaacaaacat

SEQ ID NO: 102257 - DNA, 13 bp, Artificial Sequence
  Oligonucleotide for detection of SNP TSC0025491
atgtttatttatt

SEQ ID NO: 102258 - DNA, 13 bp, Artificial Sequence
  Oligonucleotide for detection of SNP TSC0025491
aataaataaacat

SEQ ID NO: 102259 - DNA, 13 bp, Artificial Sequence
  Oligonucleotide for detection of SNP TSC0025497
taagttaaggagy

SEQ ID NO: 102260 - DNA, 13 bp, Artificial Sequence
  Oligonucleotide for detection of SNP TSC0025497
rctccttaactta

SEQ ID NO: 102261 - DNA, 13 bp, Artificial Sequence
  Oligonucleotide for detection of SNP TSC0025497
taagttgaggagy

SEQ ID NO: 102262 - DNA, 13 bp, Artificial Sequence
  Oligonucleotide for detection of SNP TSC0025497
rctcctcaactta

SEQ ID NO: 102263 - DNA, 13 bp, Artificial Sequence
  Oligonucleotide for detection of SNP TSC0025498
gtttttgttattt

SEQ ID NO: 102264 - DNA, 13 bp, Artificial Sequence
  Oligonucleotide for detection of SNP TSC0025498
aaataacaaaaac

SEQ ID NO: 102265 - DNA, 13 bp, Artificial Sequence
  Oligonucleotide for detection of SNP TSC0025498
gtttttattattt

SEQ ID NO: 102266 - DNA, 13 bp, Artificial Sequence
  Oligonucleotide for detection of SNP TSC0025498
aaataataaaaac

SEQ ID NO: 102267 - DNA, 13 bp, Artificial Sequence
  Oligonucleotide for detection of SNP TSC0025499
attagaattttty

SEQ ID NO: 102268 - DNA, 13 bp, Artificial Sequence
  Oligonucleotide for detection of SNP TSC0025499
raaaaattctaat

SEQ ID NO: 102269 - DNA, 13 bp, Artificial Sequence
  Oligonucleotide for detection of SNP TSC0025499
attagatttttty

SEQ ID NO: 102270 - DNA, 13 bp, Artificial Sequence
  Oligonucleotide for detection of SNP TSC0025499
raaaaaatctaat

SEQ ID NO: 102271 - DNA, 13 bp, Artificial Sequence
  Oligonucleotide for detection of SNP TSC0025499
gaagaattttaat

SEQ ID NO: 102272 - DNA, 13 bp, Artificial Sequence
  Oligonucleotide for detection of SNP TSC0025499
attaaaattcttc

SEQ ID NO: 102273 - DNA, 13 bp, Artificial Sequence
  Oligonucleotide for detection of SNP TSC0025499
gaagaagtttaat

SEQ ID NO: 102274 - DNA, 13 bp, Artificial Sequence
  Oligonucleotide for detection of SNP TSC0025499
attaaacttcttc

SEQ ID NO: 102275 - DNA, 13 bp, Artificial Sequence
  Oligonucleotide for detection of SNP TSC0025501
gattatttttaag

SEQ ID NO: 102276 - DNA, 13 bp, Artificial Sequence
  Oligonucleotide for detection of SNP TSC0025501
cttaaaaataatc

SEQ ID NO: 102277 - DNA, 13 bp, Artificial Sequence
  Oligonucleotide for detection of SNP TSC0025501
tttggatgtgaty

SEQ ID NO: 102278 - DNA, 13 bp, Artificial Sequence
  Oligonucleotide for detection of SNP TSC0025501
ratcacatccaaa

SEQ ID NO: 102279 - DNA, 13 bp, Artificial Sequence
  Oligonucleotide for detection of SNP TSC0025501
tttggaagtgaty

SEQ ID NO: 102280 - DNA, 13 bp, Artificial Sequence
  Oligonucleotide for detection of SNP TSC0025501
ratcacttccaaa

SEQ ID NO: 102281 - DNA, 13 bp, Artificial Sequence
  Oligonucleotide for detection of SNP TSC0025501
tttggacgtgaty

SEQ ID NO: 102282 - DNA, 13 bp, Artificial Sequence
  Oligonucleotide for detection of SNP TSC0025501
ratcacgtccaaa

SEQ ID NO: 102283 - DNA, 13 bp, Artificial Sequence
  Oligonucleotide for detection of SNP TSC0025502
ggtggggttatta

SEQ ID NO: 102284 - DNA, 13 bp, Artificial Sequence
  Oligonucleotide for detection of SNP TSC0025502
taataaccccacc

SEQ ID NO: 102285 - DNA, 13 bp, Artificial Sequence
  Oligonucleotide for detection of SNP TSC0025502
ggtgggattatta

SEQ ID NO: 102286 - DNA, 13 bp, Artificial Sequence
  Oligonucleotide for detection of SNP TSC0025502
taataatcccacc

SEQ ID NO: 102287 - DNA, 13 bp, Artificial Sequence
  Oligonucleotide for detection of SNP TSC0025504
ttagaaggtagga

SEQ ID NO: 102288 - DNA, 13 bp, Artificial Sequence
  Oligonucleotide for detection of SNP TSC0025504
tcctaccttctaa

SEQ ID NO: 102289 - DNA, 13 bp, Artificial Sequence
  Oligonucleotide for detection of SNP TSC0025504
ttagaaagtagga

SEQ ID NO: 102290 - DNA, 13 bp, Artificial Sequence
  Oligonucleotide for detection of SNP TSC0025504
tcctactttctaa

SEQ ID NO: 102291 - DNA, 13 bp, Artificial Sequence
  Oligonucleotide for detection of SNP TSC0025510
ttttttttaaaty

SEQ ID NO: 102292 - DNA, 13 bp, Artificial Sequence
  Oligonucleotide for detection of SNP TSC0025510
ratttaaaaaaaa

SEQ ID NO: 102293 - DNA, 13 bp, Artificial Sequence
  Oligonucleotide for detection of SNP TSC0025510
tttttcgtaaaty

SEQ ID NO: 102294 - DNA, 13 bp, Artificial Sequence
  Oligonucleotide for detection of SNP TSC0025510
ratttacgaaaaa

SEQ ID NO: 102295 - DNA, 13 bp, Artificial Sequence
  Oligonucleotide for detection of SNP TSC0025510
ggtttgtgggagg

SEQ ID NO: 102296 - DNA, 13 bp, Artificial Sequence
  Oligonucleotide for detection of SNP TSC0025510
cctcccacaaacc

SEQ ID NO: 102297 - DNA, 13 bp, Artificial Sequence
  Oligonucleotide for detection of SNP TSC0025510
ggtttgagggagg

SEQ ID NO: 102298 - DNA, 13 bp, Artificial Sequence
  Oligonucleotide for detection of SNP TSC0025510
cctccctcaaacc

SEQ ID NO: 102299 - DNA, 13 bp, Artificial Sequence
  Oligonucleotide for detection of SNP TSC0025510
ggtttgcgggagg

SEQ ID NO: 102300 - DNA, 13 bp, Artificial Sequence
  Oligonucleotide for detection of SNP TSC0025510
cctcccgcaaacc

SEQ ID NO: 102301 - DNA, 13 bp, Artificial Sequence
  Oligonucleotide for detection of SNP TSC0025515
gattgttgggatt

SEQ ID NO: 102302 - DNA, 13 bp, Artificial Sequence
  Oligonucleotide for detection of SNP TSC0025515
aatcccaacaatc

SEQ ID NO: 102303 - DNA, 13 bp, Artificial Sequence
  Oligonucleotide for detection of SNP TSC0025515
gattgtcgggatt

SEQ ID NO: 102304 - DNA, 13 bp, Artificial Sequence
  Oligonucleotide for detection of SNP TSC0025515
aatcccgacaatc

SEQ ID NO: 102305 - DNA, 13 bp, Artificial Sequence
  Oligonucleotide for detection of SNP TSC0025515
aattttggtagty

SEQ ID NO: 102306 - DNA, 13 bp, Artificial Sequence
  Oligonucleotide for detection of SNP TSC0025515
ractaccaaaatt

SEQ ID NO: 102307 - DNA, 13 bp, Artificial Sequence
  Oligonucleotide for detection of SNP TSC0025515
aattttagtagty

SEQ ID NO: 102308 - DNA, 13 bp, Artificial Sequence
  Oligonucleotide for detection of SNP TSC0025515
ractactaaaatt

SEQ ID NO: 102309 - DNA, 13 bp, Artificial Sequence
  Oligonucleotide for detection of SNP TSC0025515
aatttcggtagty

SEQ ID NO: 102310 - DNA, 13 bp, Artificial Sequence
  Oligonucleotide for detection of SNP TSC0025515
ractaccgaaatt

SEQ ID NO: 102311 - DNA, 13 bp, Artificial Sequence
  Oligonucleotide for detection of SNP TSC0025516
tttgatttgtatt

SEQ ID NO: 102312 - DNA, 13 bp, Artificial Sequence
  Oligonucleotide for detection of SNP TSC0025516
aatacaaatcaaa

SEQ ID NO: 102313 - DNA, 13 bp, Artificial Sequence
  Oligonucleotide for detection of SNP TSC0025516
aatgtatattaaa

SEQ ID NO: 102314 - DNA, 13 bp, Artificial Sequence
  Oligonucleotide for detection of SNP TSC0025516
tttaatatacatt

SEQ ID NO: 102315 - DNA, 13 bp, Artificial Sequence
  Oligonucleotide for detection of SNP TSC0025516
aatgtaaattaaa

SEQ ID NO: 102316 - DNA, 13 bp, Artificial Sequence
  Oligonucleotide for detection of SNP TSC0025516
tttaatttacatt

SEQ ID NO: 102317 - DNA, 13 bp, Artificial Sequence
  Oligonucleotide for detection of SNP TSC0025517
tgttagaagtttt

SEQ ID NO: 102318 - DNA, 13 bp, Artificial Sequence
  Oligonucleotide for detection of SNP TSC0025517
aaaacttctaaca

SEQ ID NO: 102319 - DNA, 13 bp, Artificial Sequence
  Oligonucleotide for detection of SNP TSC0025517
tgttaggagtttt

SEQ ID NO: 102320 - DNA, 13 bp, Artificial Sequence
  Oligonucleotide for detection of SNP TSC0025517
aaaactcctaaca

SEQ ID NO: 102321 - DNA, 13 bp, Artificial Sequence
  Oligonucleotide for detection of SNP TSC0025518
aggttaatgtggg

SEQ ID NO: 102322 - DNA, 13 bp, Artificial Sequence
  Oligonucleotide for detection of SNP TSC0025518
cccacattaacct

SEQ ID NO: 102323 - DNA, 13 bp, Artificial Sequence
  Oligonucleotide for detection of SNP TSC0025518
aggttagtgtggg

SEQ ID NO: 102324 - DNA, 13 bp, Artificial Sequence
  Oligonucleotide for detection of SNP TSC0025518
cccacactaacct

SEQ ID NO: 102325 - DNA, 13 bp, Artificial Sequence
  Oligonucleotide for detection of SNP TSC0025520
tgttatatggtag

SEQ ID NO: 102326 - DNA, 13 bp, Artificial Sequence
  Oligonucleotide for detection of SNP TSC0025520
ctaccatataaca

SEQ ID NO: 102327 - DNA, 13 bp, Artificial Sequence
  Oligonucleotide for detection of SNP TSC0025520
tgttatgtggtag

SEQ ID NO: 102328 - DNA, 13 bp, Artificial Sequence
  Oligonucleotide for detection of SNP TSC0025520
ctaccacataaca

SEQ ID NO: 102329 - DNA, 13 bp, Artificial Sequence
  Oligonucleotide for detection of SNP TSC0025520
tgttacgtggtag

SEQ ID NO: 102330 - DNA, 13 bp, Artificial Sequence
  Oligonucleotide for detection of SNP TSC0025520
ctaccacgtaaca

SEQ ID NO: 102331 - DNA, 13 bp, Artificial Sequence
  Oligonucleotide for detection of SNP TSC0025520
ttgttatgtgata

SEQ ID NO: 102332 - DNA, 13 bp, Artificial Sequence
  Oligonucleotide for detection of SNP TSC0025520
tatcacataacaa

SEQ ID NO: 102333 - DNA, 13 bp, Artificial Sequence
  Oligonucleotide for detection of SNP TSC0025520
ttgttacgtgata

SEQ ID NO: 102334 - DNA, 13 bp, Artificial Sequence
  Oligonucleotide for detection of SNP TSC0025520
tatcacgtaacaa

SEQ ID NO: 102335 - DNA, 13 bp, Artificial Sequence
  Oligonucleotide for detection of SNP TSC0025523
tttatgtgattty

SEQ ID NO: 102336 - DNA, 13 bp, Artificial Sequence
  Oligonucleotide for detection of SNP TSC0025523
raaatcacataaa

SEQ ID NO: 102337 - DNA, 13 bp, Artificial Sequence
  Oligonucleotide for detection of SNP TSC0025523
tttatgcgattty

SEQ ID NO: 102338 - DNA, 13 bp, Artificial Sequence
  Oligonucleotide for detection of SNP TSC0025523
raaatcgcataaa

SEQ ID NO: 102339 - DNA, 13 bp, Artificial Sequence
  Oligonucleotide for detection of SNP TSC0025523
gaggttgtataga

SEQ ID NO: 102340 - DNA, 13 bp, Artificial Sequence
  Oligonucleotide for detection of SNP TSC0025523
tctatacaacctc

SEQ ID NO: 102341 - DNA, 13 bp, Artificial Sequence
  Oligonucleotide for detection of SNP TSC0025523
gaggttatataga

SEQ ID NO: 102342 - DNA, 13 bp, Artificial Sequence
  Oligonucleotide for detection of SNP TSC0025523
tctatataacctc

SEQ ID NO: 102343 - DNA, 13 bp, Artificial Sequence
  Oligonucleotide for detection of SNP TSC0025523
gaggtcgtataga

SEQ ID NO: 102344 - DNA, 13 bp, Artificial Sequence
  Oligonucleotide for detection of SNP TSC0025523
tctatacgacctc

SEQ ID NO: 102345 - DNA, 13 bp, Artificial Sequence
  Oligonucleotide for detection of SNP TSC0025524
gaaagaaaataay

SEQ ID NO: 102346 - DNA, 13 bp, Artificial Sequence
  Oligonucleotide for detection of SNP TSC0025524
rttattttctttc

SEQ ID NO: 102347 - DNA, 13 bp, Artificial Sequence
  Oligonucleotide for detection of SNP TSC0025524
gaaagagaataay

SEQ ID NO: 102348 - DNA, 13 bp, Artificial Sequence
  Oligonucleotide for detection of SNP TSC0025524
rttattctctttc

SEQ ID NO: 102349 - DNA, 13 bp, Artificial Sequence
  Oligonucleotide for detection of SNP TSC0025526
tgtttaaggaaaa

SEQ ID NO: 102350 - DNA, 13 bp, Artificial Sequence
  Oligonucleotide for detection of SNP TSC0025526
ttttccttaaaca

SEQ ID NO: 102351 - DNA, 13 bp, Artificial Sequence
  Oligonucleotide for detection of SNP TSC0025526
tgtttagggaaaa

SEQ ID NO: 102352 - DNA, 13 bp, Artificial Sequence
  Oligonucleotide for detection of SNP TSC0025526
ttttccctaaaca

SEQ ID NO: 102353 - DNA, 13 bp, Artificial Sequence
  Oligonucleotide for detection of SNP TSC0025527
aggatgggtttat

SEQ ID NO: 102354 - DNA, 13 bp, Artificial Sequence
  Oligonucleotide for detection of SNP TSC0025527
ataaacccatcct

SEQ ID NO: 102355 - DNA, 13 bp, Artificial Sequence
  Oligonucleotide for detection of SNP TSC0025527
aggatgagtttat

SEQ ID NO: 102356 - DNA, 13 bp, Artificial Sequence
  Oligonucleotide for detection of SNP TSC0025527
ataaactcatcct

SEQ ID NO: 102357 - DNA, 13 bp, Artificial Sequence
  Oligonucleotide for detection of SNP TSC0025528
aggtttggtagga

SEQ ID NO: 102358 - DNA, 13 bp, Artificial Sequence
  Oligonucleotide for detection of SNP TSC0025528
tcctaccaaacct

SEQ ID NO: 102359 - DNA, 13 bp, Artificial Sequence
  Oligonucleotide for detection of SNP TSC0025528
aggtttagtagga

SEQ ID NO: 102360 - DNA, 13 bp, Artificial Sequence
  Oligonucleotide for detection of SNP TSC0025528
tcctactaaacct

SEQ ID NO: 102361 - DNA, 13 bp, Artificial Sequence
  Oligonucleotide for detection of SNP TSC0025529
tggtgaaggttgg

SEQ ID NO: 102362 - DNA, 13 bp, Artificial Sequence
  Oligonucleotide for detection of SNP TSC0025529
ccaaccttcacca

SEQ ID NO: 102363 - DNA, 13 bp, Artificial Sequence
  Oligonucleotide for detection of SNP TSC0025529
tggtgagggttgg

SEQ ID NO: 102364 - DNA, 13 bp, Artificial Sequence
  Oligonucleotide for detection of SNP TSC0025529
ccaaccctcacca

SEQ ID NO: 102365 - DNA, 13 bp, Artificial Sequence
  Oligonucleotide for detection of SNP TSC0025530
tgtttgatgttty

SEQ ID NO: 102366 - DNA, 13 bp, Artificial Sequence
  Oligonucleotide for detection of SNP TSC0025530
raaacatcaaaca

SEQ ID NO: 102367 - DNA, 13 bp, Artificial Sequence
  Oligonucleotide for detection of SNP TSC0025530
tgtttgttgttty

SEQ ID NO: 102368 - DNA, 13 bp, Artificial Sequence
  Oligonucleotide for detection of SNP TSC0025530
raaacaacaaaca

SEQ ID NO: 102369 - DNA, 13 bp, Artificial Sequence
  Oligonucleotide for detection of SNP TSC0025530
gggatattaaata

SEQ ID NO: 102370 - DNA, 13 bp, Artificial Sequence
  Oligonucleotide for detection of SNP TSC0025530
tatttaatatccc

SEQ ID NO: 102371 - DNA, 13 bp, Artificial Sequence
  Oligonucleotide for detection of SNP TSC0025530
gggatagtaaata

SEQ ID NO: 102372 - DNA, 13 bp, Artificial Sequence
  Oligonucleotide for detection of SNP TSC0025530
tatttactatccc

SEQ ID NO: 102373 - DNA, 13 bp, Artificial Sequence
  Oligonucleotide for detection of SNP TSC0025534
tttgttatatgag

SEQ ID NO: 102374 - DNA, 13 bp, Artificial Sequence
  Oligonucleotide for detection of SNP TSC0025534
ctcatataacaaa

SEQ ID NO: 102375 - DNA, 13 bp, Artificial Sequence
  Oligonucleotide for detection of SNP TSC0025534
tttgttgtatgag

SEQ ID NO: 102376 - DNA, 13 bp, Artificial Sequence
  Oligonucleotide for detection of SNP TSC0025534
ctcatacaacaaa

SEQ ID NO: 102377 - DNA, 13 bp, Artificial Sequence
  Oligonucleotide for detection of SNP TSC0025538
aaagagaaattty

SEQ ID NO: 102378 - DNA, 13 bp, Artificial Sequence
  Oligonucleotide for detection of SNP TSC0025538
raaatttctcttt

SEQ ID NO: 102379 - DNA, 13 bp, Artificial Sequence
  Oligonucleotide for detection of SNP TSC0025538
aaagagtaattty

SEQ ID NO: 102380 - DNA, 13 bp, Artificial Sequence
  Oligonucleotide for detection of SNP TSC0025538
raaattactcttt

SEQ ID NO: 102381 - DNA, 13 bp, Artificial Sequence
  Oligonucleotide for detection of SNP TSC0025538
gggattttttttt

SEQ ID NO: 102382 - DNA, 13 bp, Artificial Sequence
  Oligonucleotide for detection of SNP TSC0025538
aaaaaaaaatccc

SEQ ID NO: 102383 - DNA, 13 bp, Artificial Sequence
  Oligonucleotide for detection of SNP TSC0025538
gggattatttttt

SEQ ID NO: 102384 - DNA, 13 bp, Artificial Sequence
  Oligonucleotide for detection of SNP TSC0025538
aaaaaataatccc

SEQ ID NO: 102385 - DNA, 13 bp, Artificial Sequence
  Oligonucleotide for detection of SNP TSC0025545
gttgtgatgagty

SEQ ID NO: 102386 - DNA, 13 bp, Artificial Sequence
  Oligonucleotide for detection of SNP TSC0025545
ractcatcacaac

SEQ ID NO: 102387 - DNA, 13 bp, Artificial Sequence
  Oligonucleotide for detection of SNP TSC0025545
gttgtggtgagty

SEQ ID NO: 102388 - DNA, 13 bp, Artificial Sequence
  Oligonucleotide for detection of SNP TSC0025545
ractcaccacaac

SEQ ID NO: 102389 - DNA, 13 bp, Artificial Sequence
  Oligonucleotide for detection of SNP TSC0025546
ggaaggaatagtt

SEQ ID NO: 102390 - DNA, 13 bp, Artificial Sequence
  Oligonucleotide for detection of SNP TSC0025546
aactattccttcc

SEQ ID NO: 102391 - DNA, 13 bp, Artificial Sequence
  Oligonucleotide for detection of SNP TSC0025546
ggaagggatagtt

SEQ ID NO: 102392 - DNA, 13 bp, Artificial Sequence
  Oligonucleotide for detection of SNP TSC0025546
aactatcccttcc

SEQ ID NO: 102393 - DNA, 13 bp, Artificial Sequence
  Oligonucleotide for detection of SNP TSC0025547
gttttagtgaggt

SEQ ID NO: 102394 - DNA, 13 bp, Artificial Sequence
  Oligonucleotide for detection of SNP TSC0025547
acctcactaaaac

SEQ ID NO: 102395 - DNA, 13 bp, Artificial Sequence
  Oligonucleotide for detection of SNP TSC0025547
gttttattgaggt

SEQ ID NO: 102396 - DNA, 13 bp, Artificial Sequence
  Oligonucleotide for detection of SNP TSC0025547
acctcaataaaac

SEQ ID NO: 102397 - DNA, 13 bp, Artificial Sequence
  Oligonucleotide for detection of SNP TSC0025547
attttattgaagy

SEQ ID NO: 102398 - DNA, 13 bp, Artificial Sequence
  Oligonucleotide for detection of SNP TSC0025547
rcttcaataaaat

SEQ ID NO: 102399 - DNA, 13 bp, Artificial Sequence
  Oligonucleotide for detection of SNP TSC0025547
attttaatgaagy

SEQ ID NO: 102400 - DNA, 13 bp, Artificial Sequence
  Oligonucleotide for detection of SNP TSC0025547
rcttcattaaaat

SEQ ID NO: 102401 - DNA, 13 bp, Artificial Sequence
  Oligonucleotide for detection of SNP TSC0025548
tgattttttatag

SEQ ID NO: 102402 - DNA, 13 bp, Artificial Sequence
  Oligonucleotide for detection of SNP TSC0025548
ctataaaaaatca

SEQ ID NO: 102403 - DNA, 13 bp, Artificial Sequence
  Oligonucleotide for detection of SNP TSC0025548
tgatttgttatag

SEQ ID NO: 102404 - DNA, 13 bp, Artificial Sequence
  Oligonucleotide for detection of SNP TSC0025548
ctataacaaatca

SEQ ID NO: 102405 - DNA, 13 bp, Artificial Sequence
  Oligonucleotide for detection of SNP TSC0025548
ttataagaaatta

SEQ ID NO: 102406 - DNA, 13 bp, Artificial Sequence
  Oligonucleotide for detection of SNP TSC0025548
taatttcttataa

SEQ ID NO: 102407 - DNA, 13 bp, Artificial Sequence
  Oligonucleotide for detection of SNP TSC0025548
ttataataaatta

SEQ ID NO: 102408 - DNA, 13 bp, Artificial Sequence
  Oligonucleotide for detection of SNP TSC0025548
taatttattataa

SEQ ID NO: 102409 - DNA, 13 bp, Artificial Sequence
  Oligonucleotide for detection of SNP TSC0025549
ttgaggtgggcgg

SEQ ID NO: 102410 - DNA, 13 bp, Artificial Sequence
  Oligonucleotide for detection of SNP TSC0025549
ccgcccacctcaa

SEQ ID NO: 102411 - DNA, 13 bp, Artificial Sequence
  Oligonucleotide for detection of SNP TSC0025549
tcgaggtgggcgg

SEQ ID NO: 102412 - DNA, 13 bp, Artificial Sequence
  Oligonucleotide for detection of SNP TSC0025549
ccgcccacctcga

SEQ ID NO: 102413 - DNA, 13 bp, Artificial Sequence
  Oligonucleotide for detection of SNP TSC0025549
ttgaggcgggcgg

SEQ ID NO: 102414 - DNA, 13 bp, Artificial Sequence
  Oligonucleotide for detection of SNP TSC0025549
ccgcccgcctcaa

SEQ ID NO: 102415 - DNA, 13 bp, Artificial Sequence
  Oligonucleotide for detection of SNP TSC0025549
tcgaggcgggcgg

SEQ ID NO: 102416 - DNA, 13 bp, Artificial Sequence
  Oligonucleotide for detection of SNP TSC0025549
ccgcccgcctcga

SEQ ID NO: 102417 - DNA, 13 bp, Artificial Sequence
  Oligonucleotide for detection of SNP TSC0025556
ggtaatatggtag

SEQ ID NO: 102418 - DNA, 13 bp, Artificial Sequence
  Oligonucleotide for detection of SNP TSC0025556
ctaccatattacc

SEQ ID NO: 102419 - DNA, 13 bp, Artificial Sequence
  Oligonucleotide for detection of SNP TSC0025556
ggtaatgtggtag

SEQ ID NO: 102420 - DNA, 13 bp, Artificial Sequence
  Oligonucleotide for detection of SNP TSC0025556
ctaccacattacc

SEQ ID NO: 102421 - DNA, 13 bp, Artificial Sequence
  Oligonucleotide for detection of SNP TSC0025556
ggtaatacggtag

SEQ ID NO: 102422 - DNA, 13 bp, Artificial Sequence
  Oligonucleotide for detection of SNP TSC0025556
ctaccgtattacc

SEQ ID NO: 102423 - DNA, 13 bp, Artificial Sequence
  Oligonucleotide for detection of SNP TSC0025556
ggtaatgcggtag

SEQ ID NO: 102424 - DNA, 13 bp, Artificial Sequence
  Oligonucleotide for detection of SNP TSC0025556
ctaccgcattacc

SEQ ID NO: 102425 - DNA, 13 bp, Artificial Sequence
  Oligonucleotide for detection of SNP TSC0025557
atttttgatatay

SEQ ID NO: 102426 - DNA, 13 bp, Artificial Sequence
  Oligonucleotide for detection of SNP TSC0025557
rtatatcaaaaat

SEQ ID NO: 102427 - DNA, 13 bp, Artificial Sequence
  Oligonucleotide for detection of SNP TSC0025557
atttttaatatay

SEQ ID NO: 102428 - DNA, 13 bp, Artificial Sequence
  Oligonucleotide for detection of SNP TSC0025557
rtatattaaaaat

SEQ ID NO: 102429 - DNA, 13 bp, Artificial Sequence
  Oligonucleotide for detection of SNP TSC0025559
gtgatgaatgtta

SEQ ID NO: 102430 - DNA, 13 bp, Artificial Sequence
  Oligonucleotide for detection of SNP TSC0025559
taacattcatcac

SEQ ID NO: 102431 - DNA, 13 bp, Artificial Sequence
  Oligonucleotide for detection of SNP TSC0025559
gtgatgtatgtta

SEQ ID NO: 102432 - DNA, 13 bp, Artificial Sequence
  Oligonucleotide for detection of SNP TSC0025559
taacatacatcac

SEQ ID NO: 102433 - DNA, 13 bp, Artificial Sequence
  Oligonucleotide for detection of SNP TSC0025559
gcgatgaatgtta

SEQ ID NO: 102434 - DNA, 13 bp, Artificial Sequence
  Oligonucleotide for detection of SNP TSC0025559
taacattcatcgc

SEQ ID NO: 102435 - DNA, 13 bp, Artificial Sequence
  Oligonucleotide for detection of SNP TSC0025559
gcgatgtatgtta

SEQ ID NO: 102436 - DNA, 13 bp, Artificial Sequence
  Oligonucleotide for detection of SNP TSC0025559
taacatacatcgc

SEQ ID NO: 102437 - DNA, 13 bp, Artificial Sequence
  Oligonucleotide for detection of SNP TSC0025559
taatatttattgy

SEQ ID NO: 102438 - DNA, 13 bp, Artificial Sequence
  Oligonucleotide for detection of SNP TSC0025559
rcaataaatatta

SEQ ID NO: 102439 - DNA, 13 bp, Artificial Sequence
  Oligonucleotide for detection of SNP TSC0025559
taatatgtattgy

SEQ ID NO: 102440 - DNA, 13 bp, Artificial Sequence
  Oligonucleotide for detection of SNP TSC0025559
rcaatacatatta

SEQ ID NO: 102441 - DNA, 13 bp, Artificial Sequence
  Oligonucleotide for detection of SNP TSC0025559
taatatttatcgy

SEQ ID NO: 102442 - DNA, 13 bp, Artificial Sequence
  Oligonucleotide for detection of SNP TSC0025559
rcgataaatatta

SEQ ID NO: 102443 - DNA, 13 bp, Artificial Sequence
  Oligonucleotide for detection of SNP TSC0025559
taatatgtatcgy

SEQ ID NO: 102444 - DNA, 13 bp, Artificial Sequence
  Oligonucleotide for detection of SNP TSC0025559
rcgatacatatta

SEQ ID NO: 102445 - DNA, 13 bp, Artificial Sequence
  Oligonucleotide for detection of SNP TSC0025561
ttagtagagttay

SEQ ID NO: 102446 - DNA, 13 bp, Artificial Sequence
  Oligonucleotide for detection of SNP TSC0025561
rtaactctactaa

SEQ ID NO: 102447 - DNA, 13 bp, Artificial Sequence
  Oligonucleotide for detection of SNP TSC0025561
ttagtaaagttay

SEQ ID NO: 102448 - DNA, 13 bp, Artificial Sequence
  Oligonucleotide for detection of SNP TSC0025561
rtaactttactaa

SEQ ID NO: 102449 - DNA, 13 bp, Artificial Sequence
  Oligonucleotide for detection of SNP TSC0025562
tattttgattgtt

SEQ ID NO: 102450 - DNA, 13 bp, Artificial Sequence
  Oligonucleotide for detection of SNP TSC0025562
aacaatcaaaata

SEQ ID NO: 102451 - DNA, 13 bp, Artificial Sequence
  Oligonucleotide for detection of SNP TSC0025562
tatttttattgtt

SEQ ID NO: 102452 - DNA, 13 bp, Artificial Sequence
  Oligonucleotide for detection of SNP TSC0025562
aacaataaaaata

SEQ ID NO: 102453 - DNA, 13 bp, Artificial Sequence
  Oligonucleotide for detection of SNP TSC0025562
aataattaaagta

SEQ ID NO: 102454 - DNA, 13 bp, Artificial Sequence
  Oligonucleotide for detection of SNP TSC0025562
tactttaattatt

SEQ ID NO: 102455 - DNA, 13 bp, Artificial Sequence
  Oligonucleotide for detection of SNP TSC0025562
aataataaaagta

SEQ ID NO: 102456 - DNA, 13 bp, Artificial Sequence
  Oligonucleotide for detection of SNP TSC0025562
tacttttattatt

SEQ ID NO: 102457 - DNA, 13 bp, Artificial Sequence
  Oligonucleotide for detection of SNP TSC0025564
gtattgatggaat

SEQ ID NO: 102458 - DNA, 13 bp, Artificial Sequence
  Oligonucleotide for detection of SNP TSC0025564
attccatcaatac

SEQ ID NO: 102459 - DNA, 13 bp, Artificial Sequence
  Oligonucleotide for detection of SNP TSC0025564
gtattggtggaat

SEQ ID NO: 102460 - DNA, 13 bp, Artificial Sequence
  Oligonucleotide for detection of SNP TSC0025564
attccaccaatac

SEQ ID NO: 102461 - DNA, 13 bp, Artificial Sequence
  Oligonucleotide for detection of SNP TSC0025567
ttggttatagtag

SEQ ID NO: 102462 - DNA, 13 bp, Artificial Sequence
  Oligonucleotide for detection of SNP TSC0025567
ctactataaccaa

SEQ ID NO: 102463 - DNA, 13 bp, Artificial Sequence
  Oligonucleotide for detection of SNP TSC0025567
ttggttgtagtag

SEQ ID NO: 102464 - DNA, 13 bp, Artificial Sequence
  Oligonucleotide for detection of SNP TSC0025567
ctactacaaccaa

SEQ ID NO: 102465 - DNA, 13 bp, Artificial Sequence
  Oligonucleotide for detection of SNP TSC0025567
tcggttatagtag

SEQ ID NO: 102466 - DNA, 13 bp, Artificial Sequence
  Oligonucleotide for detection of SNP TSC0025567
ctactataaccga

SEQ ID NO: 102467 - DNA, 13 bp, Artificial Sequence
  Oligonucleotide for detection of SNP TSC0025567
tcggttgtagtag

SEQ ID NO: 102468 - DNA, 13 bp, Artificial Sequence
  Oligonucleotide for detection of SNP TSC0025567
ctactacaaccga

SEQ ID NO: 102469 - DNA, 13 bp, Artificial Sequence
  Oligonucleotide for detection of SNP TSC0025567
ttggtcgtagtag

SEQ ID NO: 102470 - DNA, 13 bp, Artificial Sequence
  Oligonucleotide for detection of SNP TSC0025567
ctactacgaccaa

SEQ ID NO: 102471 - DNA, 13 bp, Artificial Sequence
  Oligonucleotide for detection of SNP TSC0025567
tcggtcgtagtag

SEQ ID NO: 102472 - DNA, 13 bp, Artificial Sequence
  Oligonucleotide for detection of SNP TSC0025567
ctactacgaccga

SEQ ID NO: 102473 - DNA, 13 bp, Artificial Sequence
  Oligonucleotide for detection of SNP TSC0025567
ttattgtggttgg

SEQ ID NO: 102474 - DNA, 13 bp, Artificial Sequence
  Oligonucleotide for detection of SNP TSC0025567
ccaaccacaataa

SEQ ID NO: 102475 - DNA, 13 bp, Artificial Sequence
  Oligonucleotide for detection of SNP TSC0025567
ttattgtggtcgg

SEQ ID NO: 102476 - DNA, 13 bp, Artificial Sequence
  Oligonucleotide for detection of SNP TSC0025567
ccgaccacaataa

SEQ ID NO: 102477 - DNA, 13 bp, Artificial Sequence
  Oligonucleotide for detection of SNP TSC0025567
ttattgcggttgg

SEQ ID NO: 102478 - DNA, 13 bp, Artificial Sequence
  Oligonucleotide for detection of SNP TSC0025567
ccaaccgcaataa

SEQ ID NO: 102479 - DNA, 13 bp, Artificial Sequence
  Oligonucleotide for detection of SNP TSC0025567
ttattgcggtcgg

SEQ ID NO: 102480 - DNA, 13 bp, Artificial Sequence
  Oligonucleotide for detection of SNP TSC0025567
ccgaccgcaataa

SEQ ID NO: 102481 - DNA, 13 bp, Artificial Sequence
  Oligonucleotide for detection of SNP TSC0025568
tgtttgtgaatay

SEQ ID NO: 102482 - DNA, 13 bp, Artificial Sequence
  Oligonucleotide for detection of SNP TSC0025568
rtattcacaaaca

SEQ ID NO: 102483 - DNA, 13 bp, Artificial Sequence
  Oligonucleotide for detection of SNP TSC0025568
tgtttgggaatay

SEQ ID NO: 102484 - DNA, 13 bp, Artificial Sequence
  Oligonucleotide for detection of SNP TSC0025568
rtattcccaaaca

SEQ ID NO: 102485 - DNA, 13 bp, Artificial Sequence
  Oligonucleotide for detection of SNP TSC0025568
tgtttgcgaatay

SEQ ID NO: 102486 - DNA, 13 bp, Artificial Sequence
  Oligonucleotide for detection of SNP TSC0025568
rtattcgcaaaca

SEQ ID NO: 102487 - DNA, 13 bp, Artificial Sequence
  Oligonucleotide for detection of SNP TSC0025568
gtatttgtaaata

SEQ ID NO: 102488 - DNA, 13 bp, Artificial Sequence
  Oligonucleotide for detection of SNP TSC0025568
tatttacaaatac

SEQ ID NO: 102489 - DNA, 13 bp, Artificial Sequence
  Oligonucleotide for detection of SNP TSC0025568
gtatttttaaata

SEQ ID NO: 102490 - DNA, 13 bp, Artificial Sequence
  Oligonucleotide for detection of SNP TSC0025568
tatttaaaaatac

SEQ ID NO: 102491 - DNA, 13 bp, Artificial Sequence
  Oligonucleotide for detection of SNP TSC0025568
gtattcgtaaata

SEQ ID NO: 102492 - DNA, 13 bp, Artificial Sequence
  Oligonucleotide for detection of SNP TSC0025568
tatttacgaatac

SEQ ID NO: 102493 - DNA, 13 bp, Artificial Sequence
  Oligonucleotide for detection of SNP TSC0025571
gataaagaagtta

SEQ ID NO: 102494 - DNA, 13 bp, Artificial Sequence
  Oligonucleotide for detection of SNP TSC0025571
taacttctttatc

SEQ ID NO: 102495 - DNA, 13 bp, Artificial Sequence
  Oligonucleotide for detection of SNP TSC0025571
gataaaaaagtta

SEQ ID NO: 102496 - DNA, 13 bp, Artificial Sequence
  Oligonucleotide for detection of SNP TSC0025571
taacttttttatc

SEQ ID NO: 102497 - DNA, 13 bp, Artificial Sequence
  Oligonucleotide for detection of SNP TSC0025572
agggttaggtgtg

SEQ ID NO: 102498 - DNA, 13 bp, Artificial Sequence
  Oligonucleotide for detection of SNP TSC0025572
cacacctaaccct

SEQ ID NO: 102499 - DNA, 13 bp, Artificial Sequence
  Oligonucleotide for detection of SNP TSC0025572
agggtttggtgtg

SEQ ID NO: 102500 - DNA, 13 bp, Artificial Sequence
  Oligonucleotide for detection of SNP TSC0025572
cacaccaaaccct

SEQ ID NO: 102501 - DNA, 13 bp, Artificial Sequence
  Oligonucleotide for detection of SNP TSC0025572
agggttaggtgcg

SEQ ID NO: 102502 - DNA, 13 bp, Artificial Sequence
  Oligonucleotide for detection of SNP TSC0025572
cgcacctaaccct

SEQ ID NO: 102503 - DNA, 13 bp, Artificial Sequence
  Oligonucleotide for detection of SNP TSC0025572
agggttcggtgtg

SEQ ID NO: 102504 - DNA, 13 bp, Artificial Sequence
  Oligonucleotide for detection of SNP TSC0025572
cacaccgaaccct

SEQ ID NO: 102505 - DNA, 13 bp, Artificial Sequence
  Oligonucleotide for detection of SNP TSC0025572
agggtttggtgcg

SEQ ID NO: 102506 - DNA, 13 bp, Artificial Sequence
  Oligonucleotide for detection of SNP TSC0025572
cgcaccaaaccct

SEQ ID NO: 102507 - DNA, 13 bp, Artificial Sequence
  Oligonucleotide for detection of SNP TSC0025572
agggttcggtgcg

SEQ ID NO: 102508 - DNA, 13 bp, Artificial Sequence
  Oligonucleotide for detection of SNP TSC0025572
cgcaccgaaccct

SEQ ID NO: 102509 - DNA, 13 bp, Artificial Sequence
  Oligonucleotide for detection of SNP TSC0025572
cgtatttggtttt

SEQ ID NO: 102510 - DNA, 13 bp, Artificial Sequence
  Oligonucleotide for detection of SNP TSC0025572
aaaaccaaatacg

SEQ ID NO: 102511 - DNA, 13 bp, Artificial Sequence
  Oligonucleotide for detection of SNP TSC0025572
cgtattgggtttt

SEQ ID NO: 102512 - DNA, 13 bp, Artificial Sequence
  Oligonucleotide for detection of SNP TSC0025572
aaaacccaatacg

SEQ ID NO: 102513 - DNA, 13 bp, Artificial Sequence
  Oligonucleotide for detection of SNP TSC0025572
tgtatcgggtttt

SEQ ID NO: 102514 - DNA, 13 bp, Artificial Sequence
  Oligonucleotide for detection of SNP TSC0025572
aaaacccgataca

SEQ ID NO: 102515 - DNA, 13 bp, Artificial Sequence
  Oligonucleotide for detection of SNP TSC0025572
cgtatcgggtttt

SEQ ID NO: 102516 - DNA, 13 bp, Artificial Sequence
  Oligonucleotide for detection of SNP TSC0025572
aaaacccgatacg

SEQ ID NO: 102517 - DNA, 13 bp, Artificial Sequence
  Oligonucleotide for detection of SNP TSC0025574
ttattggttgatt

SEQ ID NO: 102518 - DNA, 13 bp, Artificial Sequence
  Oligonucleotide for detection of SNP TSC0025574
aatcaaccaataa

SEQ ID NO: 102519 - DNA, 13 bp, Artificial Sequence
  Oligonucleotide for detection of SNP TSC0025574
ttattgtttgatt

SEQ ID NO: 102520 - DNA, 13 bp, Artificial Sequence
  Oligonucleotide for detection of SNP TSC0025574
aatcaaacaataa

SEQ ID NO: 102521 - DNA, 13 bp, Artificial Sequence
  Oligonucleotide for detection of SNP TSC0025574
aattaattaatag

SEQ ID NO: 102522 - DNA, 13 bp, Artificial Sequence
  Oligonucleotide for detection of SNP TSC0025574
ctattaattaatt

SEQ ID NO: 102523 - DNA, 13 bp, Artificial Sequence
  Oligonucleotide for detection of SNP TSC0025574
aattaaataatag

SEQ ID NO: 102524 - DNA, 13 bp, Artificial Sequence
  Oligonucleotide for detection of SNP TSC0025574
ctattatttaatt

SEQ ID NO: 102525 - DNA, 13 bp, Artificial Sequence
  Oligonucleotide for detection of SNP TSC0025575
tttggaaaaaagg

SEQ ID NO: 102526 - DNA, 13 bp, Artificial Sequence
  Oligonucleotide for detection of SNP TSC0025575
ccttttttccaaa

SEQ ID NO: 102527 - DNA, 13 bp, Artificial Sequence
  Oligonucleotide for detection of SNP TSC0025575
tttggagaaaagg

SEQ ID NO: 102528 - DNA, 13 bp, Artificial Sequence
  Oligonucleotide for detection of SNP TSC0025575
ccttttctccaaa

SEQ ID NO: 102529 - DNA, 13 bp, Artificial Sequence
  Oligonucleotide for detection of SNP TSC0025576
tagttagttggaa

SEQ ID NO: 102530 - DNA, 13 bp, Artificial Sequence
  Oligonucleotide for detection of SNP TSC0025576
ttccaactaacta

SEQ ID NO: 102531 - DNA, 13 bp, Artificial Sequence
  Oligonucleotide for detection of SNP TSC0025576
tagttatttggaa

SEQ ID NO: 102532 - DNA, 13 bp, Artificial Sequence
  Oligonucleotide for detection of SNP TSC0025576
ttccaaataacta

SEQ ID NO: 102533 - DNA, 13 bp, Artificial Sequence
  Oligonucleotide for detection of SNP TSC0025576
ttttaattaatta

SEQ ID NO: 102534 - DNA, 13 bp, Artificial Sequence
  Oligonucleotide for detection of SNP TSC0025576
taattaattaaaa

SEQ ID NO: 102535 - DNA, 13 bp, Artificial Sequence
  Oligonucleotide for detection of SNP TSC0025576
ttttaaataatta

SEQ ID NO: 102536 - DNA, 13 bp, Artificial Sequence
  Oligonucleotide for detection of SNP TSC0025576
taattatttaaaa

SEQ ID NO: 102537 - DNA, 13 bp, Artificial Sequence
  Oligonucleotide for detection of SNP TSC0025578
gattttggtttty

SEQ ID NO: 102538 - DNA, 13 bp, Artificial Sequence
  Oligonucleotide for detection of SNP TSC0025578
raaaaccaaaatc

SEQ ID NO: 102539 - DNA, 13 bp, Artificial Sequence
  Oligonucleotide for detection of SNP TSC0025578
gattttagtttty

SEQ ID NO: 102540 - DNA, 13 bp, Artificial Sequence
  Oligonucleotide for detection of SNP TSC0025578
raaaactaaaatc

SEQ ID NO: 102541 - DNA, 13 bp, Artificial Sequence
  Oligonucleotide for detection of SNP TSC0025579
tttttcggtttag

SEQ ID NO: 102542 - DNA, 13 bp, Artificial Sequence
  Oligonucleotide for detection of SNP TSC0025579
ctaaaccgaaaaa

SEQ ID NO: 102543 - DNA, 13 bp, Artificial Sequence
  Oligonucleotide for detection of SNP TSC0025579
ttgggttgagggg

SEQ ID NO: 102544 - DNA, 13 bp, Artificial Sequence
  Oligonucleotide for detection of SNP TSC0025579
cccctcaacccaa

SEQ ID NO: 102545 - DNA, 13 bp, Artificial Sequence
  Oligonucleotide for detection of SNP TSC0025579
ttgggtcgagggg

SEQ ID NO: 102546 - DNA, 13 bp, Artificial Sequence
  Oligonucleotide for detection of SNP TSC0025579
cccctcgacccaa

SEQ ID NO: 102547 - DNA, 13 bp, Artificial Sequence
  Oligonucleotide for detection of SNP TSC0025580
ttaagaggtgttg

SEQ ID NO: 102548 - DNA, 13 bp, Artificial Sequence
  Oligonucleotide for detection of SNP TSC0025580
caacacctcttaa

SEQ ID NO: 102549 - DNA, 13 bp, Artificial Sequence
  Oligonucleotide for detection of SNP TSC0025580
ttaagaagtgttg

SEQ ID NO: 102550 - DNA, 13 bp, Artificial Sequence
  Oligonucleotide for detection of SNP TSC0025580
caacacttcttaa

SEQ ID NO: 102551 - DNA, 13 bp, Artificial Sequence
  Oligonucleotide for detection of SNP TSC0025588
tatttagtattay

SEQ ID NO: 102552 - DNA, 13 bp, Artificial Sequence
  Oligonucleotide for detection of SNP TSC0025588
rtaatactaaata

SEQ ID NO: 102553 - DNA, 13 bp, Artificial Sequence
  Oligonucleotide for detection of SNP TSC0025588
tatttattattay

SEQ ID NO: 102554 - DNA, 13 bp, Artificial Sequence
  Oligonucleotide for detection of SNP TSC0025588
rtaataataaata

SEQ ID NO: 102555 - DNA, 13 bp, Artificial Sequence
  Oligonucleotide for detection of SNP TSC0025588
gtggtattagata

SEQ ID NO: 102556 - DNA, 13 bp, Artificial Sequence
  Oligonucleotide for detection of SNP TSC0025588
tatctaataccac

SEQ ID NO: 102557 - DNA, 13 bp, Artificial Sequence
  Oligonucleotide for detection of SNP TSC0025588
gtggtaatagata

SEQ ID NO: 102558 - DNA, 13 bp, Artificial Sequence
  Oligonucleotide for detection of SNP TSC0025588
tatctattaccac

SEQ ID NO: 102559 - DNA, 13 bp, Artificial Sequence
  Oligonucleotide for detection of SNP TSC0025589
aaggagataatta

SEQ ID NO: 102560 - DNA, 13 bp, Artificial Sequence
  Oligonucleotide for detection of SNP TSC0025589
taattatctcctt

SEQ ID NO: 102561 - DNA, 13 bp, Artificial Sequence
  Oligonucleotide for detection of SNP TSC0025589
aaggaggtaatta

SEQ ID NO: 102562 - DNA, 13 bp, Artificial Sequence
  Oligonucleotide for detection of SNP TSC0025589
taattacctcctt

SEQ ID NO: 102563 - DNA, 13 bp, Artificial Sequence
  Oligonucleotide for detection of SNP TSC0025590
ggtttggttattt

SEQ ID NO: 102564 - DNA, 13 bp, Artificial Sequence
  Oligonucleotide for detection of SNP TSC0025590
aaataaccaaacc

SEQ ID NO: 102565 - DNA, 13 bp, Artificial Sequence
  Oligonucleotide for detection of SNP TSC0025590
ggtttgtttattt

SEQ ID NO: 102566 - DNA, 13 bp, Artificial Sequence
  Oligonucleotide for detection of SNP TSC0025590
aaataaacaaacc

SEQ ID NO: 102567 - DNA, 13 bp, Artificial Sequence
  Oligonucleotide for detection of SNP TSC0025590
aggtggttaggty

SEQ ID NO: 102568 - DNA, 13 bp, Artificial Sequence
  Oligonucleotide for detection of SNP TSC0025590
racctaaccacct

SEQ ID NO: 102569 - DNA, 13 bp, Artificial Sequence
  Oligonucleotide for detection of SNP TSC0025590
aggtggataggty

SEQ ID NO: 102570 - DNA, 13 bp, Artificial Sequence
  Oligonucleotide for detection of SNP TSC0025590
racctatccacct

SEQ ID NO: 102571 - DNA, 13 bp, Artificial Sequence
  Oligonucleotide for detection of SNP TSC0025591
taggtggttatty

SEQ ID NO: 102572 - DNA, 13 bp, Artificial Sequence
  Oligonucleotide for detection of SNP TSC0025591
raataaccaccta

SEQ ID NO: 102573 - DNA, 13 bp, Artificial Sequence
  Oligonucleotide for detection of SNP TSC0025591
taggtgattatty

SEQ ID NO: 102574 - DNA, 13 bp, Artificial Sequence
  Oligonucleotide for detection of SNP TSC0025591
raataatcaccta

SEQ ID NO: 102575 - DNA, 13 bp, Artificial Sequence
  Oligonucleotide for detection of SNP TSC0025593
tggatagtgggta

SEQ ID NO: 102576 - DNA, 13 bp, Artificial Sequence
  Oligonucleotide for detection of SNP TSC0025593
tacccactatcca

SEQ ID NO: 102577 - DNA, 13 bp, Artificial Sequence
  Oligonucleotide for detection of SNP TSC0025593
tggataatgggta

SEQ ID NO: 102578 - DNA, 13 bp, Artificial Sequence
  Oligonucleotide for detection of SNP TSC0025593
tacccattatcca

SEQ ID NO: 102579 - DNA, 13 bp, Artificial Sequence
  Oligonucleotide for detection of SNP TSC0025594
gtatttatgttay

SEQ ID NO: 102580 - DNA, 13 bp, Artificial Sequence
  Oligonucleotide for detection of SNP TSC0025594
rtaacataaatac

SEQ ID NO: 102581 - DNA, 13 bp, Artificial Sequence
  Oligonucleotide for detection of SNP TSC0025594
gtatttgtgttay

SEQ ID NO: 102582 - DNA, 13 bp, Artificial Sequence
  Oligonucleotide for detection of SNP TSC0025594
rtaacacaaatac

SEQ ID NO: 102583 - DNA, 13 bp, Artificial Sequence
  Oligonucleotide for detection of SNP TSC0025594
gtattcgtgttay

SEQ ID NO: 102584 - DNA, 13 bp, Artificial Sequence
  Oligonucleotide for detection of SNP TSC0025594
rtaacacgaatac

SEQ ID NO: 102585 - DNA, 13 bp, Artificial Sequence
  Oligonucleotide for detection of SNP TSC0025594
gtggtatgaatgy

SEQ ID NO: 102586 - DNA, 13 bp, Artificial Sequence
  Oligonucleotide for detection of SNP TSC0025594
rcattcataccac

SEQ ID NO: 102587 - DNA, 13 bp, Artificial Sequence
  Oligonucleotide for detection of SNP TSC0025594
gtggtacgaatgy

SEQ ID NO: 102588 - DNA, 13 bp, Artificial Sequence
  Oligonucleotide for detection of SNP TSC0025594
rcattcgtaccac

SEQ ID NO: 102589 - DNA, 13 bp, Artificial Sequence
  Oligonucleotide for detection of SNP TSC0025597
ggggatatggaga

SEQ ID NO: 102590 - DNA, 13 bp, Artificial Sequence
  Oligonucleotide for detection of SNP TSC0025597
tctccatatcccc

SEQ ID NO: 102591 - DNA, 13 bp, Artificial Sequence
  Oligonucleotide for detection of SNP TSC0025597
ggggatgtggaga

SEQ ID NO: 102592 - DNA, 13 bp, Artificial Sequence
  Oligonucleotide for detection of SNP TSC0025597
tctccacatcccc

SEQ ID NO: 102593 - DNA, 13 bp, Artificial Sequence
  Oligonucleotide for detection of SNP TSC0025597
ggggacgtggaga

SEQ ID NO: 102594 - DNA, 13 bp, Artificial Sequence
  Oligonucleotide for detection of SNP TSC0025597
tctccacgtcccc

SEQ ID NO: 102595 - DNA, 13 bp, Artificial Sequence
  Oligonucleotide for detection of SNP TSC0025597
tttttacgtttty

SEQ ID NO: 102596 - DNA, 13 bp, Artificial Sequence
  Oligonucleotide for detection of SNP TSC0025597
raaaacgtaaaaa

SEQ ID NO: 102597 - DNA, 13 bp, Artificial Sequence
  Oligonucleotide for detection of SNP TSC0025603
aagttttggagtg

SEQ ID NO: 102598 - DNA, 13 bp, Artificial Sequence
  Oligonucleotide for detection of SNP TSC0025603
cactccaaaactt

SEQ ID NO: 102599 - DNA, 13 bp, Artificial Sequence
  Oligonucleotide for detection of SNP TSC0025603
aagtttcggagtg

SEQ ID NO: 102600 - DNA, 13 bp, Artificial Sequence
  Oligonucleotide for detection of SNP TSC0025603
cactccgaaactt

SEQ ID NO: 102601 - DNA, 13 bp, Artificial Sequence
  Oligonucleotide for detection of SNP TSC0025603
tattttaagattt

SEQ ID NO: 102602 - DNA, 13 bp, Artificial Sequence
  Oligonucleotide for detection of SNP TSC0025603
aaatcttaaaata

SEQ ID NO: 102603 - DNA, 13 bp, Artificial Sequence
  Oligonucleotide for detection of SNP TSC0025603
tatttcgagattt

SEQ ID NO: 102604 - DNA, 13 bp, Artificial Sequence
  Oligonucleotide for detection of SNP TSC0025603
aaatctcgaaata

SEQ ID NO: 102605 - DNA, 13 bp, Artificial Sequence
  Oligonucleotide for detection of SNP TSC0025608
ttatatagtgagt

SEQ ID NO: 102606 - DNA, 13 bp, Artificial Sequence
  Oligonucleotide for detection of SNP TSC0025608
actcactatataa

SEQ ID NO: 102607 - DNA, 13 bp, Artificial Sequence
  Oligonucleotide for detection of SNP TSC0025608
ttatatggtgagt

SEQ ID NO: 102608 - DNA, 13 bp, Artificial Sequence
  Oligonucleotide for detection of SNP TSC0025608
actcaccatataa

SEQ ID NO: 102609 - DNA, 13 bp, Artificial Sequence
  Oligonucleotide for detection of SNP TSC0025608
ttatacggtgagt

SEQ ID NO: 102610 - DNA, 13 bp, Artificial Sequence
  Oligonucleotide for detection of SNP TSC0025608
actcaccgtataa

SEQ ID NO: 102611 - DNA, 13 bp, Artificial Sequence
  Oligonucleotide for detection of SNP TSC0025608
atttattgtgtga

SEQ ID NO: 102612 - DNA, 13 bp, Artificial Sequence
  Oligonucleotide for detection of SNP TSC0025608
tcacacaataaat

SEQ ID NO: 102613 - DNA, 13 bp, Artificial Sequence
  Oligonucleotide for detection of SNP TSC0025608
atttatcgtgtga

SEQ ID NO: 102614 - DNA, 13 bp, Artificial Sequence
  Oligonucleotide for detection of SNP TSC0025608
tcacacgataaat

SEQ ID NO: 102615 - DNA, 13 bp, Artificial Sequence
  Oligonucleotide for detection of SNP TSC0025609
agaataggagaaa

SEQ ID NO: 102616 - DNA, 13 bp, Artificial Sequence
  Oligonucleotide for detection of SNP TSC0025609
tttctcctattct

SEQ ID NO: 102617 - DNA, 13 bp, Artificial Sequence
  Oligonucleotide for detection of SNP TSC0025609
agaataagagaaa

SEQ ID NO: 102618 - DNA, 13 bp, Artificial Sequence
  Oligonucleotide for detection of SNP TSC0025609
tttctcttattct

SEQ ID NO: 102619 - DNA, 13 bp, Artificial Sequence
  Oligonucleotide for detection of SNP TSC0025610
tagtttgttttgy

SEQ ID NO: 102620 - DNA, 13 bp, Artificial Sequence
  Oligonucleotide for detection of SNP TSC0025610
rcaaaacaaacta

SEQ ID NO: 102621 - DNA, 13 bp, Artificial Sequence
  Oligonucleotide for detection of SNP TSC0025610
tagtttttttcgy

SEQ ID NO: 102622 - DNA, 13 bp, Artificial Sequence
  Oligonucleotide for detection of SNP TSC0025610
rcgaaaaaaacta

SEQ ID NO: 102623 - DNA, 13 bp, Artificial Sequence
  Oligonucleotide for detection of SNP TSC0025610
tagtttgtttcgy

SEQ ID NO: 102624 - DNA, 13 bp, Artificial Sequence
  Oligonucleotide for detection of SNP TSC0025610
rcgaaacaaacta

SEQ ID NO: 102625 - DNA, 13 bp, Artificial Sequence
  Oligonucleotide for detection of SNP TSC0025610
gtgagggaaatta

SEQ ID NO: 102626 - DNA, 13 bp, Artificial Sequence
  Oligonucleotide for detection of SNP TSC0025610
taatttccctcac

SEQ ID NO: 102627 - DNA, 13 bp, Artificial Sequence
  Oligonucleotide for detection of SNP TSC0025610
gtgaggtaaatta

SEQ ID NO: 102628 - DNA, 13 bp, Artificial Sequence
  Oligonucleotide for detection of SNP TSC0025610
taatttacctcac

SEQ ID NO: 102629 - DNA, 13 bp, Artificial Sequence
  Oligonucleotide for detection of SNP TSC0025610
gcgagggaaatta

SEQ ID NO: 102630 - DNA, 13 bp, Artificial Sequence
  Oligonucleotide for detection of SNP TSC0025610
taatttccctcgc

SEQ ID NO: 102631 - DNA, 13 bp, Artificial Sequence
  Oligonucleotide for detection of SNP TSC0025610
gcgaggtaaatta

SEQ ID NO: 102632 - DNA, 13 bp, Artificial Sequence
  Oligonucleotide for detection of SNP TSC0025610
taatttacctcgc

SEQ ID NO: 102633 - DNA, 13 bp, Artificial Sequence
  Oligonucleotide for detection of SNP TSC0025615
atggaaaagaata

SEQ ID NO: 102634 - DNA, 13 bp, Artificial Sequence
  Oligonucleotide for detection of SNP TSC0025615
tattcttttccat

SEQ ID NO: 102635 - DNA, 13 bp, Artificial Sequence
  Oligonucleotide for detection of SNP TSC0025615
atggaagagaata

SEQ ID NO: 102636 - DNA, 13 bp, Artificial Sequence
  Oligonucleotide for detection of SNP TSC0025615
tattctcttccat

SEQ ID NO: 102637 - DNA, 13 bp, Artificial Sequence
  Oligonucleotide for detection of SNP TSC0025620
agatttgtttaty

SEQ ID NO: 102638 - DNA, 13 bp, Artificial Sequence
  Oligonucleotide for detection of SNP TSC0025620
rataaacaaatct

SEQ ID NO: 102639 - DNA, 13 bp, Artificial Sequence
  Oligonucleotide for detection of SNP TSC0025620
agatttatttaty

SEQ ID NO: 102640 - DNA, 13 bp, Artificial Sequence
  Oligonucleotide for detection of SNP TSC0025620
rataaataaatct

SEQ ID NO: 102641 - DNA, 13 bp, Artificial Sequence
  Oligonucleotide for detection of SNP TSC0025624
tgattgtaatatg

SEQ ID NO: 102642 - DNA, 13 bp, Artificial Sequence
  Oligonucleotide for detection of SNP TSC0025624
catattacaatca

SEQ ID NO: 102643 - DNA, 13 bp, Artificial Sequence
  Oligonucleotide for detection of SNP TSC0025624
tgattggaatatg

SEQ ID NO: 102644 - DNA, 13 bp, Artificial Sequence
  Oligonucleotide for detection of SNP TSC0025624
catattccaatca

SEQ ID NO: 102645 - DNA, 13 bp, Artificial Sequence
  Oligonucleotide for detection of SNP TSC0025624
tatattgtagtta

SEQ ID NO: 102646 - DNA, 13 bp, Artificial Sequence
  Oligonucleotide for detection of SNP TSC0025624
taactacaatata

SEQ ID NO: 102647 - DNA, 13 bp, Artificial Sequence
  Oligonucleotide for detection of SNP TSC0025624
tatattttagtta

SEQ ID NO: 102648 - DNA, 13 bp, Artificial Sequence
  Oligonucleotide for detection of SNP TSC0025624
taactaaaatata

SEQ ID NO: 102649 - DNA, 13 bp, Artificial Sequence
  Oligonucleotide for detection of SNP TSC0025640
tggagttggaggy

SEQ ID NO: 102650 - DNA, 13 bp, Artificial Sequence
  Oligonucleotide for detection of SNP TSC0025640
rcctccaactcca

SEQ ID NO: 102651 - DNA, 13 bp, Artificial Sequence
  Oligonucleotide for detection of SNP TSC0025640
tggagtcggaggy

SEQ ID NO: 102652 - DNA, 13 bp, Artificial Sequence
  Oligonucleotide for detection of SNP TSC0025640
rcctccgactcca

SEQ ID NO: 102653 - DNA, 13 bp, Artificial Sequence
  Oligonucleotide for detection of SNP TSC0025641
atggtgagtttta

SEQ ID NO: 102654 - DNA, 13 bp, Artificial Sequence
  Oligonucleotide for detection of SNP TSC0025641
taaaactcaccat

SEQ ID NO: 102655 - DNA, 13 bp, Artificial Sequence
  Oligonucleotide for detection of SNP TSC0025642
tttgtgatttagt

SEQ ID NO: 102656 - DNA, 13 bp, Artificial Sequence
  Oligonucleotide for detection of SNP TSC0025642
actaaatcacaaa

SEQ ID NO: 102657 - DNA, 13 bp, Artificial Sequence
  Oligonucleotide for detection of SNP TSC0025642
tttgtgttttagt

SEQ ID NO: 102658 - DNA, 13 bp, Artificial Sequence
  Oligonucleotide for detection of SNP TSC0025642
actaaaacacaaa

SEQ ID NO: 102659 - DNA, 13 bp, Artificial Sequence
  Oligonucleotide for detection of SNP TSC0025642
attaaattataaa

SEQ ID NO: 102660 - DNA, 13 bp, Artificial Sequence
  Oligonucleotide for detection of SNP TSC0025642
tttataatttaat

SEQ ID NO: 102661 - DNA, 13 bp, Artificial Sequence
  Oligonucleotide for detection of SNP TSC0025643
ttgtttgtaattt

SEQ ID NO: 102662 - DNA, 13 bp, Artificial Sequence
  Oligonucleotide for detection of SNP TSC0025643
aaattacaaacaa

SEQ ID NO: 102663 - DNA, 13 bp, Artificial Sequence
  Oligonucleotide for detection of SNP TSC0025643
ttgtttataattt

SEQ ID NO: 102664 - DNA, 13 bp, Artificial Sequence
  Oligonucleotide for detection of SNP TSC0025643
aaattataaacaa

SEQ ID NO: 102665 - DNA, 13 bp, Artificial Sequence
  Oligonucleotide for detection of SNP TSC0025643
tcgtttgtaattt

SEQ ID NO: 102666 - DNA, 13 bp, Artificial Sequence
  Oligonucleotide for detection of SNP TSC0025643
aaattacaaacga

SEQ ID NO: 102667 - DNA, 13 bp, Artificial Sequence
  Oligonucleotide for detection of SNP TSC0025643
tcgtttataattt

SEQ ID NO: 102668 - DNA, 13 bp, Artificial Sequence
  Oligonucleotide for detection of SNP TSC0025643
aaattataaacga

SEQ ID NO: 102669 - DNA, 13 bp, Artificial Sequence
  Oligonucleotide for detection of SNP TSC0025644
gttttatgtagat

SEQ ID NO: 102670 - DNA, 13 bp, Artificial Sequence
  Oligonucleotide for detection of SNP TSC0025644
atctacataaaac

SEQ ID NO: 102671 - DNA, 13 bp, Artificial Sequence
  Oligonucleotide for detection of SNP TSC0025644
gttttacgtagat

SEQ ID NO: 102672 - DNA, 13 bp, Artificial Sequence
  Oligonucleotide for detection of SNP TSC0025644
atctacgtaaaac

SEQ ID NO: 102673 - DNA, 13 bp, Artificial Sequence
  Oligonucleotide for detection of SNP TSC0025644
atttgtgtagagy

SEQ ID NO: 102674 - DNA, 13 bp, Artificial Sequence
  Oligonucleotide for detection of SNP TSC0025644
rctctacacaaat

SEQ ID NO: 102675 - DNA, 13 bp, Artificial Sequence
  Oligonucleotide for detection of SNP TSC0025644
atttgtatagagy

SEQ ID NO: 102676 - DNA, 13 bp, Artificial Sequence
  Oligonucleotide for detection of SNP TSC0025644
rctctatacaaat

SEQ ID NO: 102677 - DNA, 13 bp, Artificial Sequence
  Oligonucleotide for detection of SNP TSC0025644
atttgcgtagagy

SEQ ID NO: 102678 - DNA, 13 bp, Artificial Sequence
  Oligonucleotide for detection of SNP TSC0025644
rctctacgcaaat

SEQ ID NO: 102679 - DNA, 13 bp, Artificial Sequence
  Oligonucleotide for detection of SNP TSC0025645
tttttgaatttta

SEQ ID NO: 102680 - DNA, 13 bp, Artificial Sequence
  Oligonucleotide for detection of SNP TSC0025645
taaaattcaaaaa

SEQ ID NO: 102681 - DNA, 13 bp, Artificial Sequence
  Oligonucleotide for detection of SNP TSC0025645
tgaaatttaaggg

SEQ ID NO: 102682 - DNA, 13 bp, Artificial Sequence
  Oligonucleotide for detection of SNP TSC0025645
cccttaaatttca

SEQ ID NO: 102683 - DNA, 13 bp, Artificial Sequence
  Oligonucleotide for detection of SNP TSC0025645
tgaaatgtaaggg

SEQ ID NO: 102684 - DNA, 13 bp, Artificial Sequence
  Oligonucleotide for detection of SNP TSC0025645
cccttacatttca

SEQ ID NO: 102685 - DNA, 13 bp, Artificial Sequence
  Oligonucleotide for detection of SNP TSC0025646
gaattttattgtt

SEQ ID NO: 102686 - DNA, 13 bp, Artificial Sequence
  Oligonucleotide for detection of SNP TSC0025646
aacaataaaattc

SEQ ID NO: 102687 - DNA, 13 bp, Artificial Sequence
  Oligonucleotide for detection of SNP TSC0025646
gaatttgattgtt

SEQ ID NO: 102688 - DNA, 13 bp, Artificial Sequence
  Oligonucleotide for detection of SNP TSC0025646
aacaatcaaattc

SEQ ID NO: 102689 - DNA, 13 bp, Artificial Sequence
  Oligonucleotide for detection of SNP TSC0025646
agtagtgaaatty

SEQ ID NO: 102690 - DNA, 13 bp, Artificial Sequence
  Oligonucleotide for detection of SNP TSC0025646
raatttcactact

SEQ ID NO: 102691 - DNA, 13 bp, Artificial Sequence
  Oligonucleotide for detection of SNP TSC0025646
agtagttaaatty

SEQ ID NO: 102692 - DNA, 13 bp, Artificial Sequence
  Oligonucleotide for detection of SNP TSC0025646
raatttaactact

SEQ ID NO: 102693 - DNA, 13 bp, Artificial Sequence
  Oligonucleotide for detection of SNP TSC0025647
atatatgtattag

SEQ ID NO: 102694 - DNA, 13 bp, Artificial Sequence
  Oligonucleotide for detection of SNP TSC0025647
ctaatacatatat

SEQ ID NO: 102695 - DNA, 13 bp, Artificial Sequence
  Oligonucleotide for detection of SNP TSC0025647
atatatatattag

SEQ ID NO: 102696 - DNA, 13 bp, Artificial Sequence
  Oligonucleotide for detection of SNP TSC0025647
ctaatatatatat

SEQ ID NO: 102697 - DNA, 13 bp, Artificial Sequence
  Oligonucleotide for detection of SNP TSC0025649
tataaaatatata

SEQ ID NO: 102698 - DNA, 13 bp, Artificial Sequence
  Oligonucleotide for detection of SNP TSC0025649
tatatattttata

SEQ ID NO: 102699 - DNA, 13 bp, Artificial Sequence
  Oligonucleotide for detection of SNP TSC0025649
tataaattatata

SEQ ID NO: 102700 - DNA, 13 bp, Artificial Sequence
  Oligonucleotide for detection of SNP TSC0025649
tatataatttata

SEQ ID NO: 102701 - DNA, 13 bp, Artificial Sequence
  Oligonucleotide for detection of SNP TSC0025652
ttaaggggggaaa

SEQ ID NO: 102702 - DNA, 13 bp, Artificial Sequence
  Oligonucleotide for detection of SNP TSC0025652
tttccccccttaa

SEQ ID NO: 102703 - DNA, 13 bp, Artificial Sequence
  Oligonucleotide for detection of SNP TSC0025652
ttaaggtgggaaa

SEQ ID NO: 102704 - DNA, 13 bp, Artificial Sequence
  Oligonucleotide for detection of SNP TSC0025652
tttcccaccttaa

SEQ ID NO: 102705 - DNA, 13 bp, Artificial Sequence
  Oligonucleotide for detection of SNP TSC0025653
gatataaaataat

SEQ ID NO: 102706 - DNA, 13 bp, Artificial Sequence
  Oligonucleotide for detection of SNP TSC0025653
attattttatatc

SEQ ID NO: 102707 - DNA, 13 bp, Artificial Sequence
  Oligonucleotide for detection of SNP TSC0025653
gatatataataat

SEQ ID NO: 102708 - DNA, 13 bp, Artificial Sequence
  Oligonucleotide for detection of SNP TSC0025653
attattatatatc

SEQ ID NO: 102709 - DNA, 13 bp, Artificial Sequence
  Oligonucleotide for detection of SNP TSC0025653
attattttatgty

SEQ ID NO: 102710 - DNA, 13 bp, Artificial Sequence
  Oligonucleotide for detection of SNP TSC0025653
racataaaataat

SEQ ID NO: 102711 - DNA, 13 bp, Artificial Sequence
  Oligonucleotide for detection of SNP TSC0025653
attattatatgty

SEQ ID NO: 102712 - DNA, 13 bp, Artificial Sequence
  Oligonucleotide for detection of SNP TSC0025653
racatataataat

SEQ ID NO: 102713 - DNA, 13 bp, Artificial Sequence
  Oligonucleotide for detection of SNP TSC0025655
aggtttgggggag

SEQ ID NO: 102714 - DNA, 13 bp, Artificial Sequence
  Oligonucleotide for detection of SNP TSC0025655
ctcccccaaacct

SEQ ID NO: 102715 - DNA, 13 bp, Artificial Sequence
  Oligonucleotide for detection of SNP TSC0025655
aggttttggggag

SEQ ID NO: 102716 - DNA, 13 bp, Artificial Sequence
  Oligonucleotide for detection of SNP TSC0025655
ctccccaaaacct

SEQ ID NO: 102717 - DNA, 13 bp, Artificial Sequence
  Oligonucleotide for detection of SNP TSC0025655
tttttttaggttt

SEQ ID NO: 102718 - DNA, 13 bp, Artificial Sequence
  Oligonucleotide for detection of SNP TSC0025655
aaacctaaaaaaa

SEQ ID NO: 102719 - DNA, 13 bp, Artificial Sequence
  Oligonucleotide for detection of SNP TSC0025655
ttttttaaggttt

SEQ ID NO: 102720 - DNA, 13 bp, Artificial Sequence
  Oligonucleotide for detection of SNP TSC0025655
aaaccttaaaaaa

SEQ ID NO: 102721 - DNA, 13 bp, Artificial Sequence
  Oligonucleotide for detection of SNP TSC0025656
ggatttgtttaat

SEQ ID NO: 102722 - DNA, 13 bp, Artificial Sequence
  Oligonucleotide for detection of SNP TSC0025656
attaaacaaatcc

SEQ ID NO: 102723 - DNA, 13 bp, Artificial Sequence
  Oligonucleotide for detection of SNP TSC0025656
ggatttatttaat

SEQ ID NO: 102724 - DNA, 13 bp, Artificial Sequence
  Oligonucleotide for detection of SNP TSC0025656
attaaataaatcc

SEQ ID NO: 102725 - DNA, 13 bp, Artificial Sequence
  Oligonucleotide for detection of SNP TSC0025663
aggtttgttttag

SEQ ID NO: 102726 - DNA, 13 bp, Artificial Sequence
  Oligonucleotide for detection of SNP TSC0025663
ctaaaacaaacct

SEQ ID NO: 102727 - DNA, 13 bp, Artificial Sequence
  Oligonucleotide for detection of SNP TSC0025663
aggtttattttag

SEQ ID NO: 102728 - DNA, 13 bp, Artificial Sequence
  Oligonucleotide for detection of SNP TSC0025663
ctaaaataaacct

SEQ ID NO: 102729 - DNA, 13 bp, Artificial Sequence
  Oligonucleotide for detection of SNP TSC0025666
tataaatgttgtt

SEQ ID NO: 102730 - DNA, 13 bp, Artificial Sequence
  Oligonucleotide for detection of SNP TSC0025666
aacaacatttata

SEQ ID NO: 102731 - DNA, 13 bp, Artificial Sequence
  Oligonucleotide for detection of SNP TSC0025666
tataaacgttgtt

SEQ ID NO: 102732 - DNA, 13 bp, Artificial Sequence
  Oligonucleotide for detection of SNP TSC0025666
aacaacgtttata

SEQ ID NO: 102733 - DNA, 13 bp, Artificial Sequence
  Oligonucleotide for detection of SNP TSC0025666
agtagtgtttata

SEQ ID NO: 102734 - DNA, 13 bp, Artificial Sequence
  Oligonucleotide for detection of SNP TSC0025666
tataaacactact

SEQ ID NO: 102735 - DNA, 13 bp, Artificial Sequence
  Oligonucleotide for detection of SNP TSC0025666
agtagtatttata

SEQ ID NO: 102736 - DNA, 13 bp, Artificial Sequence
  Oligonucleotide for detection of SNP TSC0025666
tataaatactact

SEQ ID NO: 102737 - DNA, 13 bp, Artificial Sequence
  Oligonucleotide for detection of SNP TSC0025666
agtagcgtttata

SEQ ID NO: 102738 - DNA, 13 bp, Artificial Sequence
  Oligonucleotide for detection of SNP TSC0025666
tataaacgctact

SEQ ID NO: 102739 - DNA, 13 bp, Artificial Sequence
  Oligonucleotide for detection of SNP TSC0025667
tttgtaatgttty

SEQ ID NO: 102740 - DNA, 13 bp, Artificial Sequence
  Oligonucleotide for detection of SNP TSC0025667
raaacattacaaa

SEQ ID NO: 102741 - DNA, 13 bp, Artificial Sequence
  Oligonucleotide for detection of SNP TSC0025667
tttgtagtgttty

SEQ ID NO: 102742 - DNA, 13 bp, Artificial Sequence
  Oligonucleotide for detection of SNP TSC0025667
raaacactacaaa

SEQ ID NO: 102743 - DNA, 13 bp, Artificial Sequence
  Oligonucleotide for detection of SNP TSC0025668
ttgagatggttty

SEQ ID NO: 102744 - DNA, 13 bp, Artificial Sequence
  Oligonucleotide for detection of SNP TSC0025668
raaaccatctcaa

SEQ ID NO: 102745 - DNA, 13 bp, Artificial Sequence
  Oligonucleotide for detection of SNP TSC0025668
ttgagacggttty

SEQ ID NO: 102746 - DNA, 13 bp, Artificial Sequence
  Oligonucleotide for detection of SNP TSC0025668
raaaccgtctcaa

SEQ ID NO: 102747 - DNA, 13 bp, Artificial Sequence
  Oligonucleotide for detection of SNP TSC0025668
gagattgttttaa

SEQ ID NO: 102748 - DNA, 13 bp, Artificial Sequence
  Oligonucleotide for detection of SNP TSC0025668
ttaaaacaatctc

SEQ ID NO: 102749 - DNA, 13 bp, Artificial Sequence
  Oligonucleotide for detection of SNP TSC0025668
gagattattttaa

SEQ ID NO: 102750 - DNA, 13 bp, Artificial Sequence
  Oligonucleotide for detection of SNP TSC0025668
ttaaaataatctc

SEQ ID NO: 102751 - DNA, 13 bp, Artificial Sequence
  Oligonucleotide for detection of SNP TSC0025668
gagatcgttttaa

SEQ ID NO: 102752 - DNA, 13 bp, Artificial Sequence
  Oligonucleotide for detection of SNP TSC0025668
ttaaaacgatctc

SEQ ID NO: 102753 - DNA, 13 bp, Artificial Sequence
  Oligonucleotide for detection of SNP TSC0025669
tgaagatggggtt

SEQ ID NO: 102754 - DNA, 13 bp, Artificial Sequence
  Oligonucleotide for detection of SNP TSC0025669
aaccccatcttca

SEQ ID NO: 102755 - DNA, 13 bp, Artificial Sequence
  Oligonucleotide for detection of SNP TSC0025669
tgaagacggggtt

SEQ ID NO: 102756 - DNA, 13 bp, Artificial Sequence
  Oligonucleotide for detection of SNP TSC0025669
aaccccgtcttca

SEQ ID NO: 102757 - DNA, 13 bp, Artificial Sequence
  Oligonucleotide for detection of SNP TSC0025670
tgttgtattggtg

SEQ ID NO: 102758 - DNA, 13 bp, Artificial Sequence
  Oligonucleotide for detection of SNP TSC0025670
caccaatacaaca

SEQ ID NO: 102759 - DNA, 13 bp, Artificial Sequence
  Oligonucleotide for detection of SNP TSC0025670
tgttgtgttggtg

SEQ ID NO: 102760 - DNA, 13 bp, Artificial Sequence
  Oligonucleotide for detection of SNP TSC0025670
caccaacacaaca

SEQ ID NO: 102761 - DNA, 13 bp, Artificial Sequence
  Oligonucleotide for detection of SNP TSC0025670
tgttgcgttggtg

SEQ ID NO: 102762 - DNA, 13 bp, Artificial Sequence
  Oligonucleotide for detection of SNP TSC0025670
caccaacgcaaca

SEQ ID NO: 102763 - DNA, 13 bp, Artificial Sequence
  Oligonucleotide for detection of SNP TSC0025670
tattagtgtaata

SEQ ID NO: 102764 - DNA, 13 bp, Artificial Sequence
  Oligonucleotide for detection of SNP TSC0025670
tattacactaata

SEQ ID NO: 102765 - DNA, 13 bp, Artificial Sequence
  Oligonucleotide for detection of SNP TSC0025670
tattagcgtaata

SEQ ID NO: 102766 - DNA, 13 bp, Artificial Sequence
  Oligonucleotide for detection of SNP TSC0025670
tattacgctaata

SEQ ID NO: 102767 - DNA, 13 bp, Artificial Sequence
  Oligonucleotide for detection of SNP TSC0025673
ttttaggttgtta

SEQ ID NO: 102768 - DNA, 13 bp, Artificial Sequence
  Oligonucleotide for detection of SNP TSC0025673
taacaacctaaaa

SEQ ID NO: 102769 - DNA, 13 bp, Artificial Sequence
  Oligonucleotide for detection of SNP TSC0025673
tggtaagttaaag

SEQ ID NO: 102770 - DNA, 13 bp, Artificial Sequence
  Oligonucleotide for detection of SNP TSC0025673
ctttaacttacca

SEQ ID NO: 102771 - DNA, 13 bp, Artificial Sequence
  Oligonucleotide for detection of SNP TSC0025673
tggtaatttaaag

SEQ ID NO: 102772 - DNA, 13 bp, Artificial Sequence
  Oligonucleotide for detection of SNP TSC0025673
ctttaaattacca

SEQ ID NO: 102773 - DNA, 13 bp, Artificial Sequence
  Oligonucleotide for detection of SNP TSC0025674
agttatggtttta

SEQ ID NO: 102774 - DNA, 13 bp, Artificial Sequence
  Oligonucleotide for detection of SNP TSC0025674
taaaaccataact

SEQ ID NO: 102775 - DNA, 13 bp, Artificial Sequence
  Oligonucleotide for detection of SNP TSC0025674
agttatagtttta

SEQ ID NO: 102776 - DNA, 13 bp, Artificial Sequence
  Oligonucleotide for detection of SNP TSC0025674
taaaactataact

SEQ ID NO: 102777 - DNA, 13 bp, Artificial Sequence
  Oligonucleotide for detection of SNP TSC0025677
aatagatgaagga

SEQ ID NO: 102778 - DNA, 13 bp, Artificial Sequence
  Oligonucleotide for detection of SNP TSC0025677
tccttcatctatt

SEQ ID NO: 102779 - DNA, 13 bp, Artificial Sequence
  Oligonucleotide for detection of SNP TSC0025677
aatagacgaagga

SEQ ID NO: 102780 - DNA, 13 bp, Artificial Sequence
  Oligonucleotide for detection of SNP TSC0025677
tccttcgtctatt

SEQ ID NO: 102781 - DNA, 13 bp, Artificial Sequence
  Oligonucleotide for detection of SNP TSC0025678
ttaaatgtaaata

SEQ ID NO: 102782 - DNA, 13 bp, Artificial Sequence
  Oligonucleotide for detection of SNP TSC0025678
tatttacatttaa

SEQ ID NO: 102783 - DNA, 13 bp, Artificial Sequence
  Oligonucleotide for detection of SNP TSC0025678
ttaaatttaaata

SEQ ID NO: 102784 - DNA, 13 bp, Artificial Sequence
  Oligonucleotide for detection of SNP TSC0025678
tatttaaatttaa

SEQ ID NO: 102785 - DNA, 13 bp, Artificial Sequence
  Oligonucleotide for detection of SNP TSC0025678
tgtttgtatttaa

SEQ ID NO: 102786 - DNA, 13 bp, Artificial Sequence
  Oligonucleotide for detection of SNP TSC0025678
ttaaatacaaaca

SEQ ID NO: 102787 - DNA, 13 bp, Artificial Sequence
  Oligonucleotide for detection of SNP TSC0025678
tgtttgaatttaa

SEQ ID NO: 102788 - DNA, 13 bp, Artificial Sequence
  Oligonucleotide for detection of SNP TSC0025678
ttaaattcaaaca

SEQ ID NO: 102789 - DNA, 13 bp, Artificial Sequence
  Oligonucleotide for detection of SNP TSC0025683
atggttgttaata

SEQ ID NO: 102790 - DNA, 13 bp, Artificial Sequence
  Oligonucleotide for detection of SNP TSC0025683
tattaacaaccat

SEQ ID NO: 102791 - DNA, 13 bp, Artificial Sequence
  Oligonucleotide for detection of SNP TSC0025683
atggttattaata

SEQ ID NO: 102792 - DNA, 13 bp, Artificial Sequence
  Oligonucleotide for detection of SNP TSC0025683
tattaataaccat

SEQ ID NO: 102793 - DNA, 13 bp, Artificial Sequence
  Oligonucleotide for detection of SNP TSC0025686
tttaaggatgtag

SEQ ID NO: 102794 - DNA, 13 bp, Artificial Sequence
  Oligonucleotide for detection of SNP TSC0025686
ctacatccttaaa

SEQ ID NO: 102795 - DNA, 13 bp, Artificial Sequence
  Oligonucleotide for detection of SNP TSC0025686
tttaagaatgtag

SEQ ID NO: 102796 - DNA, 13 bp, Artificial Sequence
  Oligonucleotide for detection of SNP TSC0025686
ctacattcttaaa

SEQ ID NO: 102797 - DNA, 13 bp, Artificial Sequence
  Oligonucleotide for detection of SNP TSC0025688
gttaggattagtt

SEQ ID NO: 102798 - DNA, 13 bp, Artificial Sequence
  Oligonucleotide for detection of SNP TSC0025688
aactaatcctaac

SEQ ID NO: 102799 - DNA, 13 bp, Artificial Sequence
  Oligonucleotide for detection of SNP TSC0025688
gttagggttagtt

SEQ ID NO: 102800 - DNA, 13 bp, Artificial Sequence
  Oligonucleotide for detection of SNP TSC0025688
aactaaccctaac

SEQ ID NO: 102801 - DNA, 13 bp, Artificial Sequence
  Oligonucleotide for detection of SNP TSC0025690
tttggaagtttgg

SEQ ID NO: 102802 - DNA, 13 bp, Artificial Sequence
  Oligonucleotide for detection of SNP TSC0025690
ccaaacttccaaa

SEQ ID NO: 102803 - DNA, 13 bp, Artificial Sequence
  Oligonucleotide for detection of SNP TSC0025690
tttggaggtttgg

SEQ ID NO: 102804 - DNA, 13 bp, Artificial Sequence
  Oligonucleotide for detection of SNP TSC0025690
ccaaacctccaaa

SEQ ID NO: 102805 - DNA, 13 bp, Artificial Sequence
  Oligonucleotide for detection of SNP TSC0025691
gaaaaagaaaaaa

SEQ ID NO: 102806 - DNA, 13 bp, Artificial Sequence
  Oligonucleotide for detection of SNP TSC0025691
ttttttctttttc

SEQ ID NO: 102807 - DNA, 13 bp, Artificial Sequence
  Oligonucleotide for detection of SNP TSC0025691
gaaaaaaaaaaaa

SEQ ID NO: 102808 - DNA, 13 bp, Artificial Sequence
  Oligonucleotide for detection of SNP TSC0025691
ttttttttttttc

SEQ ID NO: 102809 - DNA, 13 bp, Artificial Sequence
  Oligonucleotide for detection of SNP TSC0025693
tagtgattggaay

SEQ ID NO: 102810 - DNA, 13 bp, Artificial Sequence
  Oligonucleotide for detection of SNP TSC0025693
rttccaatcacta

SEQ ID NO: 102811 - DNA, 13 bp, Artificial Sequence
  Oligonucleotide for detection of SNP TSC0025693
tagtgagtggaay

SEQ ID NO: 102812 - DNA, 13 bp, Artificial Sequence
  Oligonucleotide for detection of SNP TSC0025693
rttccactcacta

SEQ ID NO: 102813 - DNA, 13 bp, Artificial Sequence
  Oligonucleotide for detection of SNP TSC0025693
gttttagttattg

SEQ ID NO: 102814 - DNA, 13 bp, Artificial Sequence
  Oligonucleotide for detection of SNP TSC0025693
caataactaaaac

SEQ ID NO: 102815 - DNA, 13 bp, Artificial Sequence
  Oligonucleotide for detection of SNP TSC0025693
gttttatttattg

SEQ ID NO: 102816 - DNA, 13 bp, Artificial Sequence
  Oligonucleotide for detection of SNP TSC0025693
caataaataaaac

SEQ ID NO: 102817 - DNA, 13 bp, Artificial Sequence
  Oligonucleotide for detection of SNP TSC0025698
tagtgaagaagta

SEQ ID NO: 102818 - DNA, 13 bp, Artificial Sequence
  Oligonucleotide for detection of SNP TSC0025698
tacttcttcacta

SEQ ID NO: 102819 - DNA, 13 bp, Artificial Sequence
  Oligonucleotide for detection of SNP TSC0025698
tagtgaggaagta

SEQ ID NO: 102820 - DNA, 13 bp, Artificial Sequence
  Oligonucleotide for detection of SNP TSC0025698
tacttcctcacta

SEQ ID NO: 102821 - DNA, 13 bp, Artificial Sequence
  Oligonucleotide for detection of SNP TSC0025701
gttttgggtgttg

SEQ ID NO: 102822 - DNA, 13 bp, Artificial Sequence
  Oligonucleotide for detection of SNP TSC0025701
caacacccaaaac

SEQ ID NO: 102823 - DNA, 13 bp, Artificial Sequence
  Oligonucleotide for detection of SNP TSC0025701
gttttgtgtgttg

SEQ ID NO: 102824 - DNA, 13 bp, Artificial Sequence
  Oligonucleotide for detection of SNP TSC0025701
caacacacaaaac

SEQ ID NO: 102825 - DNA, 13 bp, Artificial Sequence
  Oligonucleotide for detection of SNP TSC0025701
tagtatttaaaay

SEQ ID NO: 102826 - DNA, 13 bp, Artificial Sequence
  Oligonucleotide for detection of SNP TSC0025701
rttttaaatacta

SEQ ID NO: 102827 - DNA, 13 bp, Artificial Sequence
  Oligonucleotide for detection of SNP TSC0025701
tagtatataaaay

SEQ ID NO: 102828 - DNA, 13 bp, Artificial Sequence
  Oligonucleotide for detection of SNP TSC0025701
rttttatatacta

SEQ ID NO: 102829 - DNA, 13 bp, Artificial Sequence
  Oligonucleotide for detection of SNP TSC0025702
tttgtgagggtgt

SEQ ID NO: 102830 - DNA, 13 bp, Artificial Sequence
  Oligonucleotide for detection of SNP TSC0025702
acaccctcacaaa

SEQ ID NO: 102831 - DNA, 13 bp, Artificial Sequence
  Oligonucleotide for detection of SNP TSC0025702
tttgtgtgggtgt

SEQ ID NO: 102832 - DNA, 13 bp, Artificial Sequence
  Oligonucleotide for detection of SNP TSC0025702
acacccacacaaa

SEQ ID NO: 102833 - DNA, 13 bp, Artificial Sequence
  Oligonucleotide for detection of SNP TSC0025702
tttgtgcgggtgt

SEQ ID NO: 102834 - DNA, 13 bp, Artificial Sequence
  Oligonucleotide for detection of SNP TSC0025702
acacccgcacaaa

SEQ ID NO: 102835 - DNA, 13 bp, Artificial Sequence
  Oligonucleotide for detection of SNP TSC0025702
atatttttataga

SEQ ID NO: 102836 - DNA, 13 bp, Artificial Sequence
  Oligonucleotide for detection of SNP TSC0025702
tctataaaaatat

SEQ ID NO: 102837 - DNA, 13 bp, Artificial Sequence
  Oligonucleotide for detection of SNP TSC0025702
atatttgtataga

SEQ ID NO: 102838 - DNA, 13 bp, Artificial Sequence
  Oligonucleotide for detection of SNP TSC0025702
tctatacaaatat

SEQ ID NO: 102839 - DNA, 13 bp, Artificial Sequence
  Oligonucleotide for detection of SNP TSC0025702
atattcgtataga

SEQ ID NO: 102840 - DNA, 13 bp, Artificial Sequence
  Oligonucleotide for detection of SNP TSC0025702
tctatacgaatat

SEQ ID NO: 102841 - DNA, 13 bp, Artificial Sequence
  Oligonucleotide for detection of SNP TSC0025703
agggtgtgatagg

SEQ ID NO: 102842 - DNA, 13 bp, Artificial Sequence
  Oligonucleotide for detection of SNP TSC0025703
cctatcacaccct

SEQ ID NO: 102843 - DNA, 13 bp, Artificial Sequence
  Oligonucleotide for detection of SNP TSC0025703
agggtgggatagg

SEQ ID NO: 102844 - DNA, 13 bp, Artificial Sequence
  Oligonucleotide for detection of SNP TSC0025703
cctatcccaccct

SEQ ID NO: 102845 - DNA, 13 bp, Artificial Sequence
  Oligonucleotide for detection of SNP TSC0025703
agggtgcgatagg

SEQ ID NO: 102846 - DNA, 13 bp, Artificial Sequence
  Oligonucleotide for detection of SNP TSC0025703
cctatcgcaccct

SEQ ID NO: 102847 - DNA, 13 bp, Artificial Sequence
  Oligonucleotide for detection of SNP TSC0025703
tttgttgtatttt

SEQ ID NO: 102848 - DNA, 13 bp, Artificial Sequence
  Oligonucleotide for detection of SNP TSC0025703
aaaatacaacaaa

SEQ ID NO: 102849 - DNA, 13 bp, Artificial Sequence
  Oligonucleotide for detection of SNP TSC0025703
tttgttttatttt

SEQ ID NO: 102850 - DNA, 13 bp, Artificial Sequence
  Oligonucleotide for detection of SNP TSC0025703
aaaataaaacaaa

SEQ ID NO: 102851 - DNA, 13 bp, Artificial Sequence
  Oligonucleotide for detection of SNP TSC0025703
tttgtcgtatttt

SEQ ID NO: 102852 - DNA, 13 bp, Artificial Sequence
  Oligonucleotide for detection of SNP TSC0025703
aaaatacgacaaa

SEQ ID NO: 102853 - DNA, 13 bp, Artificial Sequence
  Oligonucleotide for detection of SNP TSC0025704
gaagtttttgtay

SEQ ID NO: 102854 - DNA, 13 bp, Artificial Sequence
  Oligonucleotide for detection of SNP TSC0025704
rtacaaaaacttc

SEQ ID NO: 102855 - DNA, 13 bp, Artificial Sequence
  Oligonucleotide for detection of SNP TSC0025704
gaagttgttgtay

SEQ ID NO: 102856 - DNA, 13 bp, Artificial Sequence
  Oligonucleotide for detection of SNP TSC0025704
rtacaacaacttc

SEQ ID NO: 102857 - DNA, 13 bp, Artificial Sequence
  Oligonucleotide for detection of SNP TSC0025704
gaagtcgttgtay

SEQ ID NO: 102858 - DNA, 13 bp, Artificial Sequence
  Oligonucleotide for detection of SNP TSC0025704
rtacaacgacttc

SEQ ID NO: 102859 - DNA, 13 bp, Artificial Sequence
  Oligonucleotide for detection of SNP TSC0025704
gtgtaaggattty

SEQ ID NO: 102860 - DNA, 13 bp, Artificial Sequence
  Oligonucleotide for detection of SNP TSC0025704
raaatccttacac

SEQ ID NO: 102861 - DNA, 13 bp, Artificial Sequence
  Oligonucleotide for detection of SNP TSC0025704
gtgtaatgattty

SEQ ID NO: 102862 - DNA, 13 bp, Artificial Sequence
  Oligonucleotide for detection of SNP TSC0025704
raaatcattacac

SEQ ID NO: 102863 - DNA, 13 bp, Artificial Sequence
  Oligonucleotide for detection of SNP TSC0025704
gtgtaacgattty

SEQ ID NO: 102864 - DNA, 13 bp, Artificial Sequence
  Oligonucleotide for detection of SNP TSC0025704
raaatcgttacac

SEQ ID NO: 102865 - DNA, 13 bp, Artificial Sequence
  Oligonucleotide for detection of SNP TSC0025706
atggttaggtggg

SEQ ID NO: 102866 - DNA, 13 bp, Artificial Sequence
  Oligonucleotide for detection of SNP TSC0025706
cccacctaaccat

SEQ ID NO: 102867 - DNA, 13 bp, Artificial Sequence
  Oligonucleotide for detection of SNP TSC0025706
atggttgggtggg

SEQ ID NO: 102868 - DNA, 13 bp, Artificial Sequence
  Oligonucleotide for detection of SNP TSC0025706
cccacccaaccat

SEQ ID NO: 102869 - DNA, 13 bp, Artificial Sequence
  Oligonucleotide for detection of SNP TSC0025706
atggtcgggtggg

SEQ ID NO: 102870 - DNA, 13 bp, Artificial Sequence
  Oligonucleotide for detection of SNP TSC0025706
cccacccgaccat

SEQ ID NO: 102871 - DNA, 13 bp, Artificial Sequence
  Oligonucleotide for detection of SNP TSC0025706
tttatttggttat

SEQ ID NO: 102872 - DNA, 13 bp, Artificial Sequence
  Oligonucleotide for detection of SNP TSC0025706
ataaccaaataaa

SEQ ID NO: 102873 - DNA, 13 bp, Artificial Sequence
  Oligonucleotide for detection of SNP TSC0025706
tttattcggttat

SEQ ID NO: 102874 - DNA, 13 bp, Artificial Sequence
  Oligonucleotide for detection of SNP TSC0025706
ataaccgaataaa

SEQ ID NO: 102875 - DNA, 13 bp, Artificial Sequence
  Oligonucleotide for detection of SNP TSC0025707
ggtgggtgtggag

SEQ ID NO: 102876 - DNA, 13 bp, Artificial Sequence
  Oligonucleotide for detection of SNP TSC0025707
ctccacacccacc

SEQ ID NO: 102877 - DNA, 13 bp, Artificial Sequence
  Oligonucleotide for detection of SNP TSC0025707
ggtgggcgtggag

SEQ ID NO: 102878 - DNA, 13 bp, Artificial Sequence
  Oligonucleotide for detection of SNP TSC0025707
ctccacgcccacc

SEQ ID NO: 102879 - DNA, 13 bp, Artificial Sequence
  Oligonucleotide for detection of SNP TSC0025707
ttttacgtttaty

SEQ ID NO: 102880 - DNA, 13 bp, Artificial Sequence
  Oligonucleotide for detection of SNP TSC0025707
rataaacgtaaaa

SEQ ID NO: 102881 - DNA, 13 bp, Artificial Sequence
  Oligonucleotide for detection of SNP TSC0025710
tgtagtgttttaa

SEQ ID NO: 102882 - DNA, 13 bp, Artificial Sequence
  Oligonucleotide for detection of SNP TSC0025710
ttaaaacactaca

SEQ ID NO: 102883 - DNA, 13 bp, Artificial Sequence
  Oligonucleotide for detection of SNP TSC0025710
tgtagttttttaa

SEQ ID NO: 102884 - DNA, 13 bp, Artificial Sequence
  Oligonucleotide for detection of SNP TSC0025710
ttaaaaaactaca

SEQ ID NO: 102885 - DNA, 13 bp, Artificial Sequence
  Oligonucleotide for detection of SNP TSC0025710
ttggaatattata

SEQ ID NO: 102886 - DNA, 13 bp, Artificial Sequence
  Oligonucleotide for detection of SNP TSC0025710
tataatattccaa

SEQ ID NO: 102887 - DNA, 13 bp, Artificial Sequence
  Oligonucleotide for detection of SNP TSC0025710
ttggaaaattata

SEQ ID NO: 102888 - DNA, 13 bp, Artificial Sequence
  Oligonucleotide for detection of SNP TSC0025710
tataattttccaa

SEQ ID NO: 102889 - DNA, 13 bp, Artificial Sequence
  Oligonucleotide for detection of SNP TSC0025713
ttttatatatgta

SEQ ID NO: 102890 - DNA, 13 bp, Artificial Sequence
  Oligonucleotide for detection of SNP TSC0025713
tacatatataaaa

SEQ ID NO: 102891 - DNA, 13 bp, Artificial Sequence
  Oligonucleotide for detection of SNP TSC0025713
ttttatgtatgta

SEQ ID NO: 102892 - DNA, 13 bp, Artificial Sequence
  Oligonucleotide for detection of SNP TSC0025713
tacatacataaaa

SEQ ID NO: 102893 - DNA, 13 bp, Artificial Sequence
  Oligonucleotide for detection of SNP TSC0025713
ttttatatacgta

SEQ ID NO: 102894 - DNA, 13 bp, Artificial Sequence
  Oligonucleotide for detection of SNP TSC0025713
tacgtatataaaa

SEQ ID NO: 102895 - DNA, 13 bp, Artificial Sequence
  Oligonucleotide for detection of SNP TSC0025713
ttttatgtacgta

SEQ ID NO: 102896 - DNA, 13 bp, Artificial Sequence
  Oligonucleotide for detection of SNP TSC0025713
tacgtacataaaa

SEQ ID NO: 102897 - DNA, 13 bp, Artificial Sequence
  Oligonucleotide for detection of SNP TSC0025714
ataaggaaggtta

SEQ ID NO: 102898 - DNA, 13 bp, Artificial Sequence
  Oligonucleotide for detection of SNP TSC0025714
taaccttccttat

SEQ ID NO: 102899 - DNA, 13 bp, Artificial Sequence
  Oligonucleotide for detection of SNP TSC0025714
ataagggaggtta

SEQ ID NO: 102900 - DNA, 13 bp, Artificial Sequence
  Oligonucleotide for detection of SNP TSC0025714
taacctcccttat

SEQ ID NO: 102901 - DNA, 13 bp, Artificial Sequence
  Oligonucleotide for detection of SNP TSC0025715
ttaaagtgggtag

SEQ ID NO: 102902 - DNA, 13 bp, Artificial Sequence
  Oligonucleotide for detection of SNP TSC0025715
ctacccactttaa

SEQ ID NO: 102903 - DNA, 13 bp, Artificial Sequence
  Oligonucleotide for detection of SNP TSC0025715
ttaaagcgggtag

SEQ ID NO: 102904 - DNA, 13 bp, Artificial Sequence
  Oligonucleotide for detection of SNP TSC0025715
ctacccgctttaa

SEQ ID NO: 102905 - DNA, 13 bp, Artificial Sequence
  Oligonucleotide for detection of SNP TSC0025716
taaatggaggtgg

SEQ ID NO: 102906 - DNA, 13 bp, Artificial Sequence
  Oligonucleotide for detection of SNP TSC0025716
ccacctccattta

SEQ ID NO: 102907 - DNA, 13 bp, Artificial Sequence
  Oligonucleotide for detection of SNP TSC0025716
taaatgaaggtgg

SEQ ID NO: 102908 - DNA, 13 bp, Artificial Sequence
  Oligonucleotide for detection of SNP TSC0025716
ccaccttcattta

SEQ ID NO: 102909 - DNA, 13 bp, Artificial Sequence
  Oligonucleotide for detection of SNP TSC0025717
gattgttttattg

SEQ ID NO: 102910 - DNA, 13 bp, Artificial Sequence
  Oligonucleotide for detection of SNP TSC0025717
caataaaacaatc

SEQ ID NO: 102911 - DNA, 13 bp, Artificial Sequence
  Oligonucleotide for detection of SNP TSC0025717
gatcgttttattg

SEQ ID NO: 102912 - DNA, 13 bp, Artificial Sequence
  Oligonucleotide for detection of SNP TSC0025717
caataaaacgatc

SEQ ID NO: 102913 - DNA, 13 bp, Artificial Sequence
  Oligonucleotide for detection of SNP TSC0025717
taatgggatgaty

SEQ ID NO: 102914 - DNA, 13 bp, Artificial Sequence
  Oligonucleotide for detection of SNP TSC0025717
ratcatcccatta

SEQ ID NO: 102915 - DNA, 13 bp, Artificial Sequence
  Oligonucleotide for detection of SNP TSC0025717
taatggtatgaty

SEQ ID NO: 102916 - DNA, 13 bp, Artificial Sequence
  Oligonucleotide for detection of SNP TSC0025717
ratcataccatta

SEQ ID NO: 102917 - DNA, 13 bp, Artificial Sequence
  Oligonucleotide for detection of SNP TSC0025717
taatgggacgaty

SEQ ID NO: 102918 - DNA, 13 bp, Artificial Sequence
  Oligonucleotide for detection of SNP TSC0025717
ratcgtcccatta

SEQ ID NO: 102919 - DNA, 13 bp, Artificial Sequence
  Oligonucleotide for detection of SNP TSC0025717
taatggtacgaty

SEQ ID NO: 102920 - DNA, 13 bp, Artificial Sequence
  Oligonucleotide for detection of SNP TSC0025717
ratcgtaccatta

SEQ ID NO: 102921 - DNA, 13 bp, Artificial Sequence
  Oligonucleotide for detection of SNP TSC0025718
tattatatatgat

SEQ ID NO: 102922 - DNA, 13 bp, Artificial Sequence
  Oligonucleotide for detection of SNP TSC0025718
atcatatataata

SEQ ID NO: 102923 - DNA, 13 bp, Artificial Sequence
  Oligonucleotide for detection of SNP TSC0025718
tattatttatgat

SEQ ID NO: 102924 - DNA, 13 bp, Artificial Sequence
  Oligonucleotide for detection of SNP TSC0025718
atcataaataata

SEQ ID NO: 102925 - DNA, 13 bp, Artificial Sequence
  Oligonucleotide for detection of SNP TSC0025718
attatatgtaata

SEQ ID NO: 102926 - DNA, 13 bp, Artificial Sequence
  Oligonucleotide for detection of SNP TSC0025718
tattacatataat

SEQ ID NO: 102927 - DNA, 13 bp, Artificial Sequence
  Oligonucleotide for detection of SNP TSC0025718
attataggtaata

SEQ ID NO: 102928 - DNA, 13 bp, Artificial Sequence
  Oligonucleotide for detection of SNP TSC0025718
tattacctataat

SEQ ID NO: 102929 - DNA, 13 bp, Artificial Sequence
  Oligonucleotide for detection of SNP TSC0025719
ttagggggtaggg

SEQ ID NO: 102930 - DNA, 13 bp, Artificial Sequence
  Oligonucleotide for detection of SNP TSC0025719
ccctaccccctaa

SEQ ID NO: 102931 - DNA, 13 bp, Artificial Sequence
  Oligonucleotide for detection of SNP TSC0025719
ttagggagtaggg

SEQ ID NO: 102932 - DNA, 13 bp, Artificial Sequence
  Oligonucleotide for detection of SNP TSC0025719
ccctactccctaa

SEQ ID NO: 102933 - DNA, 13 bp, Artificial Sequence
  Oligonucleotide for detection of SNP TSC0025722
atattgtgtaatt

SEQ ID NO: 102934 - DNA, 13 bp, Artificial Sequence
  Oligonucleotide for detection of SNP TSC0025722
aattacacaatat

SEQ ID NO: 102935 - DNA, 13 bp, Artificial Sequence
  Oligonucleotide for detection of SNP TSC0025722
atatcgtgtaatt

SEQ ID NO: 102936 - DNA, 13 bp, Artificial Sequence
  Oligonucleotide for detection of SNP TSC0025722
aattacacgatat

SEQ ID NO: 102937 - DNA, 13 bp, Artificial Sequence
  Oligonucleotide for detection of SNP TSC0025722
atattgcgtaatt

SEQ ID NO: 102938 - DNA, 13 bp, Artificial Sequence
  Oligonucleotide for detection of SNP TSC0025722
aattacgcaatat

SEQ ID NO: 102939 - DNA, 13 bp, Artificial Sequence
  Oligonucleotide for detection of SNP TSC0025722
atatcgcgtaatt

SEQ ID NO: 102940 - DNA, 13 bp, Artificial Sequence
  Oligonucleotide for detection of SNP TSC0025722
aattacgcgatat

SEQ ID NO: 102941 - DNA, 13 bp, Artificial Sequence
  Oligonucleotide for detection of SNP TSC0025722
aattatgtgatat

SEQ ID NO: 102942 - DNA, 13 bp, Artificial Sequence
  Oligonucleotide for detection of SNP TSC0025722
atatcacataatt

SEQ ID NO: 102943 - DNA, 13 bp, Artificial Sequence
  Oligonucleotide for detection of SNP TSC0025722
aattatatgatat

SEQ ID NO: 102944 - DNA, 13 bp, Artificial Sequence
  Oligonucleotide for detection of SNP TSC0025722
atatcatataatt

SEQ ID NO: 102945 - DNA, 13 bp, Artificial Sequence
  Oligonucleotide for detection of SNP TSC0025722
aattacgtgatat

SEQ ID NO: 102946 - DNA, 13 bp, Artificial Sequence
  Oligonucleotide for detection of SNP TSC0025722
atatcacgtaatt

SEQ ID NO: 102947 - DNA, 13 bp, Artificial Sequence
  Oligonucleotide for detection of SNP TSC0025722
aattatacgatat

SEQ ID NO: 102948 - DNA, 13 bp, Artificial Sequence
  Oligonucleotide for detection of SNP TSC0025722
atatcgtataatt

SEQ ID NO: 102949 - DNA, 13 bp, Artificial Sequence
  Oligonucleotide for detection of SNP TSC0025722
aattatgcgatat

SEQ ID NO: 102950 - DNA, 13 bp, Artificial Sequence
  Oligonucleotide for detection of SNP TSC0025722
atatcgcataatt

SEQ ID NO: 102951 - DNA, 13 bp, Artificial Sequence
  Oligonucleotide for detection of SNP TSC0025723
agattaggtttta

SEQ ID NO: 102952 - DNA, 13 bp, Artificial Sequence
  Oligonucleotide for detection of SNP TSC0025723
taaaacctaatct

SEQ ID NO: 102953 - DNA, 13 bp, Artificial Sequence
  Oligonucleotide for detection of SNP TSC0025723
agattaagtttta

SEQ ID NO: 102954 - DNA, 13 bp, Artificial Sequence
  Oligonucleotide for detection of SNP TSC0025723
taaaacttaatct

SEQ ID NO: 102955 - DNA, 13 bp, Artificial Sequence
  Oligonucleotide for detection of SNP TSC0025724
attagtatttttg

SEQ ID NO: 102956 - DNA, 13 bp, Artificial Sequence
  Oligonucleotide for detection of SNP TSC0025724
caaaaatactaat

SEQ ID NO: 102957 - DNA, 13 bp, Artificial Sequence
  Oligonucleotide for detection of SNP TSC0025724
attagtgtttttg

SEQ ID NO: 102958 - DNA, 13 bp, Artificial Sequence
  Oligonucleotide for detection of SNP TSC0025724
caaaaacactaat

SEQ ID NO: 102959 - DNA, 13 bp, Artificial Sequence
  Oligonucleotide for detection of SNP TSC0025724
attagcgtttttg

SEQ ID NO: 102960 - DNA, 13 bp, Artificial Sequence
  Oligonucleotide for detection of SNP TSC0025724
caaaaacgctaat

SEQ ID NO: 102961 - DNA, 13 bp, Artificial Sequence
  Oligonucleotide for detection of SNP TSC0025724
taagaatgttgat

SEQ ID NO: 102962 - DNA, 13 bp, Artificial Sequence
  Oligonucleotide for detection of SNP TSC0025724
atcaacattctta

SEQ ID NO: 102963 - DNA, 13 bp, Artificial Sequence
  Oligonucleotide for detection of SNP TSC0025724
taagaacgttgat

SEQ ID NO: 102964 - DNA, 13 bp, Artificial Sequence
  Oligonucleotide for detection of SNP TSC0025724
atcaacgttctta

SEQ ID NO: 102965 - DNA, 13 bp, Artificial Sequence
  Oligonucleotide for detection of SNP TSC0025732
gtgataaaagata

SEQ ID NO: 102966 - DNA, 13 bp, Artificial Sequence
  Oligonucleotide for detection of SNP TSC0025732
tatcttttatcac

SEQ ID NO: 102967 - DNA, 13 bp, Artificial Sequence
  Oligonucleotide for detection of SNP TSC0025732
gtgatagaagata

SEQ ID NO: 102968 - DNA, 13 bp, Artificial Sequence
  Oligonucleotide for detection of SNP TSC0025732
tatcttctatcac

SEQ ID NO: 102969 - DNA, 13 bp, Artificial Sequence
  Oligonucleotide for detection of SNP TSC0025736
ttataaggggatt

SEQ ID NO: 102970 - DNA, 13 bp, Artificial Sequence
  Oligonucleotide for detection of SNP TSC0025736
aatccccttataa

SEQ ID NO: 102971 - DNA, 13 bp, Artificial Sequence
  Oligonucleotide for detection of SNP TSC0025736
ttataaagggatt

SEQ ID NO: 102972 - DNA, 13 bp, Artificial Sequence
  Oligonucleotide for detection of SNP TSC0025736
aatccctttataa

SEQ ID NO: 102973 - DNA, 13 bp, Artificial Sequence
  Oligonucleotide for detection of SNP TSC0025737
tgaaaattaggta

SEQ ID NO: 102974 - DNA, 13 bp, Artificial Sequence
  Oligonucleotide for detection of SNP TSC0025737
tacctaattttca

SEQ ID NO: 102975 - DNA, 13 bp, Artificial Sequence
  Oligonucleotide for detection of SNP TSC0025737
tgaaaagtaggta

SEQ ID NO: 102976 - DNA, 13 bp, Artificial Sequence
  Oligonucleotide for detection of SNP TSC0025737
tacctacttttca

SEQ ID NO: 102977 - DNA, 13 bp, Artificial Sequence
  Oligonucleotide for detection of SNP TSC0025738
tgaaataaattag

SEQ ID NO: 102978 - DNA, 13 bp, Artificial Sequence
  Oligonucleotide for detection of SNP TSC0025738
ctaatttatttca

SEQ ID NO: 102979 - DNA, 13 bp, Artificial Sequence
  Oligonucleotide for detection of SNP TSC0025738
tgaaatgaattag

SEQ ID NO: 102980 - DNA, 13 bp, Artificial Sequence
  Oligonucleotide for detection of SNP TSC0025738
ctaattcatttca

SEQ ID NO: 102981 - DNA, 13 bp, Artificial Sequence
  Oligonucleotide for detection of SNP TSC0025739
atatattaataga

SEQ ID NO: 102982 - DNA, 13 bp, Artificial Sequence
  Oligonucleotide for detection of SNP TSC0025739
tctattaatatat

SEQ ID NO: 102983 - DNA, 13 bp, Artificial Sequence
  Oligonucleotide for detection of SNP TSC0025739
tttatttatgtat

SEQ ID NO: 102984 - DNA, 13 bp, Artificial Sequence
  Oligonucleotide for detection of SNP TSC0025739
atacataaataaa

SEQ ID NO: 102985 - DNA, 13 bp, Artificial Sequence
  Oligonucleotide for detection of SNP TSC0025739
tttattaatgtat

SEQ ID NO: 102986 - DNA, 13 bp, Artificial Sequence
  Oligonucleotide for detection of SNP TSC0025739
atacattaataaa

SEQ ID NO: 102987 - DNA, 13 bp, Artificial Sequence
  Oligonucleotide for detection of SNP TSC0025740
gtttgtgtattta

SEQ ID NO: 102988 - DNA, 13 bp, Artificial Sequence
  Oligonucleotide for detection of SNP TSC0025740
taaatacacaaac

SEQ ID NO: 102989 - DNA, 13 bp, Artificial Sequence
  Oligonucleotide for detection of SNP TSC0025740
gtttgtatattta

SEQ ID NO: 102990 - DNA, 13 bp, Artificial Sequence
  Oligonucleotide for detection of SNP TSC0025740
taaatatacaaac

SEQ ID NO: 102991 - DNA, 13 bp, Artificial Sequence
  Oligonucleotide for detection of SNP TSC0025751
tggtatgggaggy

SEQ ID NO: 102992 - DNA, 13 bp, Artificial Sequence
  Oligonucleotide for detection of SNP TSC0025751
rcctcccatacca

SEQ ID NO: 102993 - DNA, 13 bp, Artificial Sequence
  Oligonucleotide for detection of SNP TSC0025751
tggtataggaggy

SEQ ID NO: 102994 - DNA, 13 bp, Artificial Sequence
  Oligonucleotide for detection of SNP TSC0025751
rcctcctatacca

SEQ ID NO: 102995 - DNA, 13 bp, Artificial Sequence
  Oligonucleotide for detection of SNP TSC0025752
ttttttatgttay

SEQ ID NO: 102996 - DNA, 13 bp, Artificial Sequence
  Oligonucleotide for detection of SNP TSC0025752
rtaacataaaaaa

SEQ ID NO: 102997 - DNA, 13 bp, Artificial Sequence
  Oligonucleotide for detection of SNP TSC0025752
ttttttgtgttay

SEQ ID NO: 102998 - DNA, 13 bp, Artificial Sequence
  Oligonucleotide for detection of SNP TSC0025752
rtaacacaaaaaa

SEQ ID NO: 102999 - DNA, 13 bp, Artificial Sequence
  Oligonucleotide for detection of SNP TSC0025752
tttttcgtgttay

SEQ ID NO: 103000 - DNA, 13 bp, Artificial Sequence
  Oligonucleotide for detection of SNP TSC0025752
rtaacacgaaaaa

SEQ ID NO: 103001 - DNA, 13 bp, Artificial Sequence
  Oligonucleotide for detection of SNP TSC0025752
gtggtatgggagg

SEQ ID NO: 103002 - DNA, 13 bp, Artificial Sequence
  Oligonucleotide for detection of SNP TSC0025752
cctcccataccac

SEQ ID NO: 103003 - DNA, 13 bp, Artificial Sequence
  Oligonucleotide for detection of SNP TSC0025752
gtggtacgggagg

SEQ ID NO: 103004 - DNA, 13 bp, Artificial Sequence
  Oligonucleotide for detection of SNP TSC0025752
cctcccgtaccac

SEQ ID NO: 103005 - DNA, 13 bp, Artificial Sequence
  Oligonucleotide for detection of SNP TSC0025753
tatttagtttatt

SEQ ID NO: 103006 - DNA, 13 bp, Artificial Sequence
  Oligonucleotide for detection of SNP TSC0025753
aataaactaaata

SEQ ID NO: 103007 - DNA, 13 bp, Artificial Sequence
  Oligonucleotide for detection of SNP TSC0025753
tatttaatttatt

SEQ ID NO: 103008 - DNA, 13 bp, Artificial Sequence
  Oligonucleotide for detection of SNP TSC0025753
aataaattaaata

SEQ ID NO: 103009 - DNA, 13 bp, Artificial Sequence
  Oligonucleotide for detection of SNP TSC0025754
gtgttaagagtta

SEQ ID NO: 103010 - DNA, 13 bp, Artificial Sequence
  Oligonucleotide for detection of SNP TSC0025754
taactcttaacac

SEQ ID NO: 103011 - DNA, 13 bp, Artificial Sequence
  Oligonucleotide for detection of SNP TSC0025754
gtgttaggagtta

SEQ ID NO: 103012 - DNA, 13 bp, Artificial Sequence
  Oligonucleotide for detection of SNP TSC0025754
taactcctaacac

SEQ ID NO: 103013 - DNA, 13 bp, Artificial Sequence
  Oligonucleotide for detection of SNP TSC0025755
tatatagatatay

SEQ ID NO: 103014 - DNA, 13 bp, Artificial Sequence
  Oligonucleotide for detection of SNP TSC0025755
rtatatctatata

SEQ ID NO: 103015 - DNA, 13 bp, Artificial Sequence
  Oligonucleotide for detection of SNP TSC0025756
gatgaagttttty

SEQ ID NO: 103016 - DNA, 13 bp, Artificial Sequence
  Oligonucleotide for detection of SNP TSC0025756
raaaaacttcatc

SEQ ID NO: 103017 - DNA, 13 bp, Artificial Sequence
  Oligonucleotide for detection of SNP TSC0025756
gatgaaattttty

SEQ ID NO: 103018 - DNA, 13 bp, Artificial Sequence
  Oligonucleotide for detection of SNP TSC0025756
raaaaatttcatc

SEQ ID NO: 103019 - DNA, 13 bp, Artificial Sequence
  Oligonucleotide for detection of SNP TSC0025757
gtttataaaaaaa

SEQ ID NO: 103020 - DNA, 13 bp, Artificial Sequence
  Oligonucleotide for detection of SNP TSC0025757
tttttttataaac

SEQ ID NO: 103021 - DNA, 13 bp, Artificial Sequence
  Oligonucleotide for detection of SNP TSC0025757
gtttattaaaaaa

SEQ ID NO: 103022 - DNA, 13 bp, Artificial Sequence
  Oligonucleotide for detection of SNP TSC0025757
ttttttaataaac

SEQ ID NO: 103023 - DNA, 13 bp, Artificial Sequence
  Oligonucleotide for detection of SNP TSC0025757
tttttttataaay

SEQ ID NO: 103024 - DNA, 13 bp, Artificial Sequence
  Oligonucleotide for detection of SNP TSC0025757
rtttataaaaaaa

SEQ ID NO: 103025 - DNA, 13 bp, Artificial Sequence
  Oligonucleotide for detection of SNP TSC0025757
ttttttaataaay

SEQ ID NO: 103026 - DNA, 13 bp, Artificial Sequence
  Oligonucleotide for detection of SNP TSC0025757
rtttattaaaaaa

SEQ ID NO: 103027 - DNA, 13 bp, Artificial Sequence
  Oligonucleotide for detection of SNP TSC0025758
atggggatttggg

SEQ ID NO: 103028 - DNA, 13 bp, Artificial Sequence
  Oligonucleotide for detection of SNP TSC0025758
cccaaatccccat

SEQ ID NO: 103029 - DNA, 13 bp, Artificial Sequence
  Oligonucleotide for detection of SNP TSC0025758
atgggggtttggg

SEQ ID NO: 103030 - DNA, 13 bp, Artificial Sequence
  Oligonucleotide for detection of SNP TSC0025758
cccaaacccccat

SEQ ID NO: 103031 - DNA, 13 bp, Artificial Sequence
  Oligonucleotide for detection of SNP TSC0025760
ttgttagaatgty

SEQ ID NO: 103032 - DNA, 13 bp, Artificial Sequence
  Oligonucleotide for detection of SNP TSC0025760
racattctaacaa

SEQ ID NO: 103033 - DNA, 13 bp, Artificial Sequence
  Oligonucleotide for detection of SNP TSC0025760
ttgttaaaatgty

SEQ ID NO: 103034 - DNA, 13 bp, Artificial Sequence
  Oligonucleotide for detection of SNP TSC0025760
racattttaacaa

SEQ ID NO: 103035 - DNA, 13 bp, Artificial Sequence
  Oligonucleotide for detection of SNP TSC0025761
aggttgttgtggg

SEQ ID NO: 103036 - DNA, 13 bp, Artificial Sequence
  Oligonucleotide for detection of SNP TSC0025761
cccacaacaacct

SEQ ID NO: 103037 - DNA, 13 bp, Artificial Sequence
  Oligonucleotide for detection of SNP TSC0025761
aggttggtgtggg

SEQ ID NO: 103038 - DNA, 13 bp, Artificial Sequence
  Oligonucleotide for detection of SNP TSC0025761
cccacaccaacct

SEQ ID NO: 103039 - DNA, 13 bp, Artificial Sequence
  Oligonucleotide for detection of SNP TSC0025761
aggttgtcgtggg

SEQ ID NO: 103040 - DNA, 13 bp, Artificial Sequence
  Oligonucleotide for detection of SNP TSC0025761
cccacgacaacct

SEQ ID NO: 103041 - DNA, 13 bp, Artificial Sequence
  Oligonucleotide for detection of SNP TSC0025761
aggttggcgtggg

SEQ ID NO: 103042 - DNA, 13 bp, Artificial Sequence
  Oligonucleotide for detection of SNP TSC0025761
cccacgccaacct

SEQ ID NO: 103043 - DNA, 13 bp, Artificial Sequence
  Oligonucleotide for detection of SNP TSC0025761
tttatggtagttt

SEQ ID NO: 103044 - DNA, 13 bp, Artificial Sequence
  Oligonucleotide for detection of SNP TSC0025761
aaactaccataaa

SEQ ID NO: 103045 - DNA, 13 bp, Artificial Sequence
  Oligonucleotide for detection of SNP TSC0025761
tttatgttagttt

SEQ ID NO: 103046 - DNA, 13 bp, Artificial Sequence
  Oligonucleotide for detection of SNP TSC0025761
aaactaacataaa

SEQ ID NO: 103047 - DNA, 13 bp, Artificial Sequence
  Oligonucleotide for detection of SNP TSC0025761
tttacggtagttt

SEQ ID NO: 103048 - DNA, 13 bp, Artificial Sequence
  Oligonucleotide for detection of SNP TSC0025761
aaactaccgtaaa

SEQ ID NO: 103049 - DNA, 13 bp, Artificial Sequence
  Oligonucleotide for detection of SNP TSC0025761
tttacgttagttt

SEQ ID NO: 103050 - DNA, 13 bp, Artificial Sequence
  Oligonucleotide for detection of SNP TSC0025761
aaactaacgtaaa

SEQ ID NO: 103051 - DNA, 13 bp, Artificial Sequence
  Oligonucleotide for detection of SNP TSC0025768
ggggtgaaagata

SEQ ID NO: 103052 - DNA, 13 bp, Artificial Sequence
  Oligonucleotide for detection of SNP TSC0025768
tatctttcacccc

SEQ ID NO: 103053 - DNA, 13 bp, Artificial Sequence
  Oligonucleotide for detection of SNP TSC0025768
ggggtggaagata

SEQ ID NO: 103054 - DNA, 13 bp, Artificial Sequence
  Oligonucleotide for detection of SNP TSC0025768
tatcttccacccc

SEQ ID NO: 103055 - DNA, 13 bp, Artificial Sequence
  Oligonucleotide for detection of SNP TSC0025771
atttttagttttg

SEQ ID NO: 103056 - DNA, 13 bp, Artificial Sequence
  Oligonucleotide for detection of SNP TSC0025771
caaaactaaaaat

SEQ ID NO: 103057 - DNA, 13 bp, Artificial Sequence
  Oligonucleotide for detection of SNP TSC0025771
atttttggttttg

SEQ ID NO: 103058 - DNA, 13 bp, Artificial Sequence
  Oligonucleotide for detection of SNP TSC0025771
caaaaccaaaaat

SEQ ID NO: 103059 - DNA, 13 bp, Artificial Sequence
  Oligonucleotide for detection of SNP TSC0025771
atttttagtttcg

SEQ ID NO: 103060 - DNA, 13 bp, Artificial Sequence
  Oligonucleotide for detection of SNP TSC0025771
cgaaactaaaaat

SEQ ID NO: 103061 - DNA, 13 bp, Artificial Sequence
  Oligonucleotide for detection of SNP TSC0025771
attttcggttttg

SEQ ID NO: 103062 - DNA, 13 bp, Artificial Sequence
  Oligonucleotide for detection of SNP TSC0025771
caaaaccgaaaat

SEQ ID NO: 103063 - DNA, 13 bp, Artificial Sequence
  Oligonucleotide for detection of SNP TSC0025771
atttttggtttcg

SEQ ID NO: 103064 - DNA, 13 bp, Artificial Sequence
  Oligonucleotide for detection of SNP TSC0025771
cgaaaccaaaaat

SEQ ID NO: 103065 - DNA, 13 bp, Artificial Sequence
  Oligonucleotide for detection of SNP TSC0025771
attttcggtttcg

SEQ ID NO: 103066 - DNA, 13 bp, Artificial Sequence
  Oligonucleotide for detection of SNP TSC0025771
cgaaaccgaaaat

SEQ ID NO: 103067 - DNA, 13 bp, Artificial Sequence
  Oligonucleotide for detection of SNP TSC0025771
tgaggttggaaat

SEQ ID NO: 103068 - DNA, 13 bp, Artificial Sequence
  Oligonucleotide for detection of SNP TSC0025771
atttccaacctca

SEQ ID NO: 103069 - DNA, 13 bp, Artificial Sequence
  Oligonucleotide for detection of SNP TSC0025771
cgaggttggaaat

SEQ ID NO: 103070 - DNA, 13 bp, Artificial Sequence
  Oligonucleotide for detection of SNP TSC0025771
atttccaacctcg

SEQ ID NO: 103071 - DNA, 13 bp, Artificial Sequence
  Oligonucleotide for detection of SNP TSC0025771
tgaggtcggaaat

SEQ ID NO: 103072 - DNA, 13 bp, Artificial Sequence
  Oligonucleotide for detection of SNP TSC0025771
atttccgacctca

SEQ ID NO: 103073 - DNA, 13 bp, Artificial Sequence
  Oligonucleotide for detection of SNP TSC0025771
cgaggtcggaaat

SEQ ID NO: 103074 - DNA, 13 bp, Artificial Sequence
  Oligonucleotide for detection of SNP TSC0025771
atttccgacctcg

SEQ ID NO: 103075 - DNA, 13 bp, Artificial Sequence
  Oligonucleotide for detection of SNP TSC0025772
gtggagattaaaa

SEQ ID NO: 103076 - DNA, 13 bp, Artificial Sequence
  Oligonucleotide for detection of SNP TSC0025772
ttttaatctccac

SEQ ID NO: 103077 - DNA, 13 bp, Artificial Sequence
  Oligonucleotide for detection of SNP TSC0025772
gtggagtttaaaa

SEQ ID NO: 103078 - DNA, 13 bp, Artificial Sequence
  Oligonucleotide for detection of SNP TSC0025772
ttttaaactccac

SEQ ID NO: 103079 - DNA, 13 bp, Artificial Sequence
  Oligonucleotide for detection of SNP TSC0025772
ttttgatttttay

SEQ ID NO: 103080 - DNA, 13 bp, Artificial Sequence
  Oligonucleotide for detection of SNP TSC0025772
rtaaaaatcaaaa

SEQ ID NO: 103081 - DNA, 13 bp, Artificial Sequence
  Oligonucleotide for detection of SNP TSC0025772
ttttgaattttay

SEQ ID NO: 103082 - DNA, 13 bp, Artificial Sequence
  Oligonucleotide for detection of SNP TSC0025772
rtaaaattcaaaa

SEQ ID NO: 103083 - DNA, 13 bp, Artificial Sequence
  Oligonucleotide for detection of SNP TSC0025776
atgagggtttata

SEQ ID NO: 103084 - DNA, 13 bp, Artificial Sequence
  Oligonucleotide for detection of SNP TSC0025776
tataaaccctcat

SEQ ID NO: 103085 - DNA, 13 bp, Artificial Sequence
  Oligonucleotide for detection of SNP TSC0025776
atgaggttttata

SEQ ID NO: 103086 - DNA, 13 bp, Artificial Sequence
  Oligonucleotide for detection of SNP TSC0025776
tataaaacctcat

SEQ ID NO: 103087 - DNA, 13 bp, Artificial Sequence
  Oligonucleotide for detection of SNP TSC0025777
atttttgtaaaty

SEQ ID NO: 103088 - DNA, 13 bp, Artificial Sequence
  Oligonucleotide for detection of SNP TSC0025777
ratttacaaaaat

SEQ ID NO: 103089 - DNA, 13 bp, Artificial Sequence
  Oligonucleotide for detection of SNP TSC0025777
atttttataaaty

SEQ ID NO: 103090 - DNA, 13 bp, Artificial Sequence
  Oligonucleotide for detection of SNP TSC0025777
ratttataaaaat

SEQ ID NO: 103091 - DNA, 13 bp, Artificial Sequence
  Oligonucleotide for detection of SNP TSC0025778
gataaatggaaty

SEQ ID NO: 103092 - DNA, 13 bp, Artificial Sequence
  Oligonucleotide for detection of SNP TSC0025778
rattccatttatc

SEQ ID NO: 103093 - DNA, 13 bp, Artificial Sequence
  Oligonucleotide for detection of SNP TSC0025778
gataaacggaaty

SEQ ID NO: 103094 - DNA, 13 bp, Artificial Sequence
  Oligonucleotide for detection of SNP TSC0025778
rattccgtttatc

SEQ ID NO: 103095 - DNA, 13 bp, Artificial Sequence
  Oligonucleotide for detection of SNP TSC0025778
gattttgtttgty

SEQ ID NO: 103096 - DNA, 13 bp, Artificial Sequence
  Oligonucleotide for detection of SNP TSC0025778
racaaacaaaatc

SEQ ID NO: 103097 - DNA, 13 bp, Artificial Sequence
  Oligonucleotide for detection of SNP TSC0025778
gattttatttgty

SEQ ID NO: 103098 - DNA, 13 bp, Artificial Sequence
  Oligonucleotide for detection of SNP TSC0025778
racaaataaaatc

SEQ ID NO: 103099 - DNA, 13 bp, Artificial Sequence
  Oligonucleotide for detection of SNP TSC0025778
gatttcgtttgty

SEQ ID NO: 103100 - DNA, 13 bp, Artificial Sequence
  Oligonucleotide for detection of SNP TSC0025778
racaaacgaaatc

SEQ ID NO: 103101 - DNA, 13 bp, Artificial Sequence
  Oligonucleotide for detection of SNP TSC0025784
ggatggggggatg

SEQ ID NO: 103102 - DNA, 13 bp, Artificial Sequence
  Oligonucleotide for detection of SNP TSC0025784
catccccccatcc

SEQ ID NO: 103103 - DNA, 13 bp, Artificial Sequence
  Oligonucleotide for detection of SNP TSC0025784
ggatggtgggatg

SEQ ID NO: 103104 - DNA, 13 bp, Artificial Sequence
  Oligonucleotide for detection of SNP TSC0025784
catcccaccatcc

SEQ ID NO: 103105 - DNA, 13 bp, Artificial Sequence
  Oligonucleotide for detection of SNP TSC0025785
atggataggatty

SEQ ID NO: 103106 - DNA, 13 bp, Artificial Sequence
  Oligonucleotide for detection of SNP TSC0025785
raatcctatccat

SEQ ID NO: 103107 - DNA, 13 bp, Artificial Sequence
  Oligonucleotide for detection of SNP TSC0025785
atggatgggatty

SEQ ID NO: 103108 - DNA, 13 bp, Artificial Sequence
  Oligonucleotide for detection of SNP TSC0025785
raatcccatccat

SEQ ID NO: 103109 - DNA, 13 bp, Artificial Sequence
  Oligonucleotide for detection of SNP TSC0025785
atggacgggatty

SEQ ID NO: 103110 - DNA, 13 bp, Artificial Sequence
  Oligonucleotide for detection of SNP TSC0025785
raatcccgtccat

SEQ ID NO: 103111 - DNA, 13 bp, Artificial Sequence
  Oligonucleotide for detection of SNP TSC0025785
gggttttgtttat

SEQ ID NO: 103112 - DNA, 13 bp, Artificial Sequence
  Oligonucleotide for detection of SNP TSC0025785
ataaacaaaaccc

SEQ ID NO: 103113 - DNA, 13 bp, Artificial Sequence
  Oligonucleotide for detection of SNP TSC0025785
gggtttcgtttat

SEQ ID NO: 103114 - DNA, 13 bp, Artificial Sequence
  Oligonucleotide for detection of SNP TSC0025785
ataaacgaaaccc

SEQ ID NO: 103115 - DNA, 13 bp, Artificial Sequence
  Oligonucleotide for detection of SNP TSC0025791
ataagatattggg

SEQ ID NO: 103116 - DNA, 13 bp, Artificial Sequence
  Oligonucleotide for detection of SNP TSC0025791
cccaatatcttat

SEQ ID NO: 103117 - DNA, 13 bp, Artificial Sequence
  Oligonucleotide for detection of SNP TSC0025791
ataagagattggg

SEQ ID NO: 103118 - DNA, 13 bp, Artificial Sequence
  Oligonucleotide for detection of SNP TSC0025791
cccaatctcttat

SEQ ID NO: 103119 - DNA, 13 bp, Artificial Sequence
  Oligonucleotide for detection of SNP TSC0025791
tttagtgttttat

SEQ ID NO: 103120 - DNA, 13 bp, Artificial Sequence
  Oligonucleotide for detection of SNP TSC0025791
ataaaacactaaa

SEQ ID NO: 103121 - DNA, 13 bp, Artificial Sequence
  Oligonucleotide for detection of SNP TSC0025791
tttagttttttat

SEQ ID NO: 103122 - DNA, 13 bp, Artificial Sequence
  Oligonucleotide for detection of SNP TSC0025791
ataaaaaactaaa

SEQ ID NO: 103123 - DNA, 13 bp, Artificial Sequence
  Oligonucleotide for detection of SNP TSC0025792
taatgaatagaaa

SEQ ID NO: 103124 - DNA, 13 bp, Artificial Sequence
  Oligonucleotide for detection of SNP TSC0025792
tttctattcatta

SEQ ID NO: 103125 - DNA, 13 bp, Artificial Sequence
  Oligonucleotide for detection of SNP TSC0025792
taatgagtagaaa

SEQ ID NO: 103126 - DNA, 13 bp, Artificial Sequence
  Oligonucleotide for detection of SNP TSC0025792
tttctactcatta

SEQ ID NO: 103127 - DNA, 13 bp, Artificial Sequence
  Oligonucleotide for detection of SNP TSC0025793
attgataagtata

SEQ ID NO: 103128 - DNA, 13 bp, Artificial Sequence
  Oligonucleotide for detection of SNP TSC0025793
tatacttatcaat

SEQ ID NO: 103129 - DNA, 13 bp, Artificial Sequence
  Oligonucleotide for detection of SNP TSC0025793
attgatgagtata

SEQ ID NO: 103130 - DNA, 13 bp, Artificial Sequence
  Oligonucleotide for detection of SNP TSC0025793
tatactcatcaat

SEQ ID NO: 103131 - DNA, 13 bp, Artificial Sequence
  Oligonucleotide for detection of SNP TSC0025793
attgacgagtata

SEQ ID NO: 103132 - DNA, 13 bp, Artificial Sequence
  Oligonucleotide for detection of SNP TSC0025793
tatactcgtcaat

SEQ ID NO: 103133 - DNA, 13 bp, Artificial Sequence
  Oligonucleotide for detection of SNP TSC0025793
tatatttgttaat

SEQ ID NO: 103134 - DNA, 13 bp, Artificial Sequence
  Oligonucleotide for detection of SNP TSC0025793
attaacaaatata

SEQ ID NO: 103135 - DNA, 13 bp, Artificial Sequence
  Oligonucleotide for detection of SNP TSC0025793
tatattcgttaat

SEQ ID NO: 103136 - DNA, 13 bp, Artificial Sequence
  Oligonucleotide for detection of SNP TSC0025793
attaacgaatata

SEQ ID NO: 103137 - DNA, 13 bp, Artificial Sequence
  Oligonucleotide for detection of SNP TSC0025794
ttagatggttgty

SEQ ID NO: 103138 - DNA, 13 bp, Artificial Sequence
  Oligonucleotide for detection of SNP TSC0025794
racaaccatctaa

SEQ ID NO: 103139 - DNA, 13 bp, Artificial Sequence
  Oligonucleotide for detection of SNP TSC0025794
ttagatagttgty

SEQ ID NO: 103140 - DNA, 13 bp, Artificial Sequence
  Oligonucleotide for detection of SNP TSC0025794
racaactatctaa

SEQ ID NO: 103141 - DNA, 13 bp, Artificial Sequence
  Oligonucleotide for detection of SNP TSC0025795
tataatattttta

SEQ ID NO: 103142 - DNA, 13 bp, Artificial Sequence
  Oligonucleotide for detection of SNP TSC0025795
taaaaatattata

SEQ ID NO: 103143 - DNA, 13 bp, Artificial Sequence
  Oligonucleotide for detection of SNP TSC0025795
tataacgttttta

SEQ ID NO: 103144 - DNA, 13 bp, Artificial Sequence
  Oligonucleotide for detection of SNP TSC0025795
taaaaacgttata

SEQ ID NO: 103145 - DNA, 13 bp, Artificial Sequence
  Oligonucleotide for detection of SNP TSC0025795
tgaaaatgttatg

SEQ ID NO: 103146 - DNA, 13 bp, Artificial Sequence
  Oligonucleotide for detection of SNP TSC0025795
cataacattttca

SEQ ID NO: 103147 - DNA, 13 bp, Artificial Sequence
  Oligonucleotide for detection of SNP TSC0025795
tgaaaacgttatg

SEQ ID NO: 103148 - DNA, 13 bp, Artificial Sequence
  Oligonucleotide for detection of SNP TSC0025795
cataacgttttca

SEQ ID NO: 103149 - DNA, 13 bp, Artificial Sequence
  Oligonucleotide for detection of SNP TSC0025796
taggaagtaggay

SEQ ID NO: 103150 - DNA, 13 bp, Artificial Sequence
  Oligonucleotide for detection of SNP TSC0025796
rtcctacttccta

SEQ ID NO: 103151 - DNA, 13 bp, Artificial Sequence
  Oligonucleotide for detection of SNP TSC0025796
taggaaataggay

SEQ ID NO: 103152 - DNA, 13 bp, Artificial Sequence
  Oligonucleotide for detection of SNP TSC0025796
rtcctatttccta

SEQ ID NO: 103153 - DNA, 13 bp, Artificial Sequence
  Oligonucleotide for detection of SNP TSC0025797
gatttataagata

SEQ ID NO: 103154 - DNA, 13 bp, Artificial Sequence
  Oligonucleotide for detection of SNP TSC0025797
tatcttataaatc

SEQ ID NO: 103155 - DNA, 13 bp, Artificial Sequence
  Oligonucleotide for detection of SNP TSC0025797
gatttagaagata

SEQ ID NO: 103156 - DNA, 13 bp, Artificial Sequence
  Oligonucleotide for detection of SNP TSC0025797
tatcttctaaatc

SEQ ID NO: 103157 - DNA, 13 bp, Artificial Sequence
  Oligonucleotide for detection of SNP TSC0025797
tgttttgtgaaty

SEQ ID NO: 103158 - DNA, 13 bp, Artificial Sequence
  Oligonucleotide for detection of SNP TSC0025797
rattcacaaaaca

SEQ ID NO: 103159 - DNA, 13 bp, Artificial Sequence
  Oligonucleotide for detection of SNP TSC0025797
tgttttttgaaty

SEQ ID NO: 103160 - DNA, 13 bp, Artificial Sequence
  Oligonucleotide for detection of SNP TSC0025797
rattcaaaaaaca

SEQ ID NO: 103161 - DNA, 13 bp, Artificial Sequence
  Oligonucleotide for detection of SNP TSC0025804
gtttttatggttt

SEQ ID NO: 103162 - DNA, 13 bp, Artificial Sequence
  Oligonucleotide for detection of SNP TSC0025804
aaaccataaaaac

SEQ ID NO: 103163 - DNA, 13 bp, Artificial Sequence
  Oligonucleotide for detection of SNP TSC0025804
gtttttgtggttt

SEQ ID NO: 103164 - DNA, 13 bp, Artificial Sequence
  Oligonucleotide for detection of SNP TSC0025804
aaaccacaaaaac

SEQ ID NO: 103165 - DNA, 13 bp, Artificial Sequence
  Oligonucleotide for detection of SNP TSC0025805
tttataatttatg

SEQ ID NO: 103166 - DNA, 13 bp, Artificial Sequence
  Oligonucleotide for detection of SNP TSC0025805
cataaattataaa

SEQ ID NO: 103167 - DNA, 13 bp, Artificial Sequence
  Oligonucleotide for detection of SNP TSC0025805
tttatagtttatg

SEQ ID NO: 103168 - DNA, 13 bp, Artificial Sequence
  Oligonucleotide for detection of SNP TSC0025805
cataaactataaa

SEQ ID NO: 103169 - DNA, 13 bp, Artificial Sequence
  Oligonucleotide for detection of SNP TSC0025806
ttgattaatgata

SEQ ID NO: 103170 - DNA, 13 bp, Artificial Sequence
  Oligonucleotide for detection of SNP TSC0025806
tatcattaatcaa

SEQ ID NO: 103171 - DNA, 13 bp, Artificial Sequence
  Oligonucleotide for detection of SNP TSC0025806
ttgattgatgata

SEQ ID NO: 103172 - DNA, 13 bp, Artificial Sequence
  Oligonucleotide for detection of SNP TSC0025806
tatcatcaatcaa

SEQ ID NO: 103173 - DNA, 13 bp, Artificial Sequence
  Oligonucleotide for detection of SNP TSC0025806
ttgatcgatgata

SEQ ID NO: 103174 - DNA, 13 bp, Artificial Sequence
  Oligonucleotide for detection of SNP TSC0025806
tatcatcgatcaa

SEQ ID NO: 103175 - DNA, 13 bp, Artificial Sequence
  Oligonucleotide for detection of SNP TSC0025806
tgttattggttag

SEQ ID NO: 103176 - DNA, 13 bp, Artificial Sequence
  Oligonucleotide for detection of SNP TSC0025806
ctaaccaataaca

SEQ ID NO: 103177 - DNA, 13 bp, Artificial Sequence
  Oligonucleotide for detection of SNP TSC0025806
tgttatcggttag

SEQ ID NO: 103178 - DNA, 13 bp, Artificial Sequence
  Oligonucleotide for detection of SNP TSC0025806
ctaaccgataaca

SEQ ID NO: 103179 - DNA, 13 bp, Artificial Sequence
  Oligonucleotide for detection of SNP TSC0025808
gggaggttgaggy

SEQ ID NO: 103180 - DNA, 13 bp, Artificial Sequence
  Oligonucleotide for detection of SNP TSC0025808
rcctcaacctccc

SEQ ID NO: 103181 - DNA, 13 bp, Artificial Sequence
  Oligonucleotide for detection of SNP TSC0025808
gggagggtgaggy

SEQ ID NO: 103182 - DNA, 13 bp, Artificial Sequence
  Oligonucleotide for detection of SNP TSC0025808
rcctcaccctccc

SEQ ID NO: 103183 - DNA, 13 bp, Artificial Sequence
  Oligonucleotide for detection of SNP TSC0025808
gttttatttttty

SEQ ID NO: 103184 - DNA, 13 bp, Artificial Sequence
  Oligonucleotide for detection of SNP TSC0025808
raaaaaataaaac

SEQ ID NO: 103185 - DNA, 13 bp, Artificial Sequence
  Oligonucleotide for detection of SNP TSC0025809
tttagtgtgggta

SEQ ID NO: 103186 - DNA, 13 bp, Artificial Sequence
  Oligonucleotide for detection of SNP TSC0025809
tacccacactaaa

SEQ ID NO: 103187 - DNA, 13 bp, Artificial Sequence
  Oligonucleotide for detection of SNP TSC0025809
tttagcgtgggta

SEQ ID NO: 103188 - DNA, 13 bp, Artificial Sequence
  Oligonucleotide for detection of SNP TSC0025809
tacccacgctaaa

SEQ ID NO: 103189 - DNA, 13 bp, Artificial Sequence
  Oligonucleotide for detection of SNP TSC0025809
tgtttacgttgga

SEQ ID NO: 103190 - DNA, 13 bp, Artificial Sequence
  Oligonucleotide for detection of SNP TSC0025809
tccaacgtaaaca

SEQ ID NO: 103191 - DNA, 13 bp, Artificial Sequence
  Oligonucleotide for detection of SNP TSC0025813
agtggttggtaga

SEQ ID NO: 103192 - DNA, 13 bp, Artificial Sequence
  Oligonucleotide for detection of SNP TSC0025813
tctaccaaccact

SEQ ID NO: 103193 - DNA, 13 bp, Artificial Sequence
  Oligonucleotide for detection of SNP TSC0025813
agtggtcggtaga

SEQ ID NO: 103194 - DNA, 13 bp, Artificial Sequence
  Oligonucleotide for detection of SNP TSC0025813
tctaccgaccact

SEQ ID NO: 103195 - DNA, 13 bp, Artificial Sequence
  Oligonucleotide for detection of SNP TSC0025815
gaatagaatgttt

SEQ ID NO: 103196 - DNA, 13 bp, Artificial Sequence
  Oligonucleotide for detection of SNP TSC0025815
aaacattctattc

SEQ ID NO: 103197 - DNA, 13 bp, Artificial Sequence
  Oligonucleotide for detection of SNP TSC0025815
gaatagtatgttt

SEQ ID NO: 103198 - DNA, 13 bp, Artificial Sequence
  Oligonucleotide for detection of SNP TSC0025815
aaacatactattc

SEQ ID NO: 103199 - DNA, 13 bp, Artificial Sequence
  Oligonucleotide for detection of SNP TSC0025815
aggtattttatty

SEQ ID NO: 103200 - DNA, 13 bp, Artificial Sequence
  Oligonucleotide for detection of SNP TSC0025815
raataaaatacct

SEQ ID NO: 103201 - DNA, 13 bp, Artificial Sequence
  Oligonucleotide for detection of SNP TSC0025815
aggtatgttatty

SEQ ID NO: 103202 - DNA, 13 bp, Artificial Sequence
  Oligonucleotide for detection of SNP TSC0025815
raataacatacct

SEQ ID NO: 103203 - DNA, 13 bp, Artificial Sequence
  Oligonucleotide for detection of SNP TSC0025816
gtttttgtgtttt

SEQ ID NO: 103204 - DNA, 13 bp, Artificial Sequence
  Oligonucleotide for detection of SNP TSC0025816
aaaacacaaaaac

SEQ ID NO: 103205 - DNA, 13 bp, Artificial Sequence
  Oligonucleotide for detection of SNP TSC0025816
gtttttatgtttt

SEQ ID NO: 103206 - DNA, 13 bp, Artificial Sequence
  Oligonucleotide for detection of SNP TSC0025816
aaaacataaaaac

SEQ ID NO: 103207 - DNA, 13 bp, Artificial Sequence
  Oligonucleotide for detection of SNP TSC0025817
aggttgattaagy

SEQ ID NO: 103208 - DNA, 13 bp, Artificial Sequence
  Oligonucleotide for detection of SNP TSC0025817
rcttaatcaacct

SEQ ID NO: 103209 - DNA, 13 bp, Artificial Sequence
  Oligonucleotide for detection of SNP TSC0025817
aggttggttaagy

SEQ ID NO: 103210 - DNA, 13 bp, Artificial Sequence
  Oligonucleotide for detection of SNP TSC0025817
rcttaaccaacct

SEQ ID NO: 103211 - DNA, 13 bp, Artificial Sequence
  Oligonucleotide for detection of SNP TSC0025822
gtgttaaaaaaag

SEQ ID NO: 103212 - DNA, 13 bp, Artificial Sequence
  Oligonucleotide for detection of SNP TSC0025822
ctttttttaacac

SEQ ID NO: 103213 - DNA, 13 bp, Artificial Sequence
  Oligonucleotide for detection of SNP TSC0025822
gtgttagaaaaag

SEQ ID NO: 103214 - DNA, 13 bp, Artificial Sequence
  Oligonucleotide for detection of SNP TSC0025822
ctttttctaacac

SEQ ID NO: 103215 - DNA, 13 bp, Artificial Sequence
  Oligonucleotide for detection of SNP TSC0025826
ttttgaatgaagg

SEQ ID NO: 103216 - DNA, 13 bp, Artificial Sequence
  Oligonucleotide for detection of SNP TSC0025826
ccttcattcaaaa

SEQ ID NO: 103217 - DNA, 13 bp, Artificial Sequence
  Oligonucleotide for detection of SNP TSC0025826
ttttgattgaagg

SEQ ID NO: 103218 - DNA, 13 bp, Artificial Sequence
  Oligonucleotide for detection of SNP TSC0025826
ccttcaatcaaaa

SEQ ID NO: 103219 - DNA, 13 bp, Artificial Sequence
  Oligonucleotide for detection of SNP TSC0025826
tttttatttaaag

SEQ ID NO: 103220 - DNA, 13 bp, Artificial Sequence
  Oligonucleotide for detection of SNP TSC0025826
ctttaaataaaaa

SEQ ID NO: 103221 - DNA, 13 bp, Artificial Sequence
  Oligonucleotide for detection of SNP TSC0025828
agaagagagaatt

SEQ ID NO: 103222 - DNA, 13 bp, Artificial Sequence
  Oligonucleotide for detection of SNP TSC0025828
aattctctcttct

SEQ ID NO: 103223 - DNA, 13 bp, Artificial Sequence
  Oligonucleotide for detection of SNP TSC0025828
agaagatagaatt

SEQ ID NO: 103224 - DNA, 13 bp, Artificial Sequence
  Oligonucleotide for detection of SNP TSC0025828
aattctatcttct

SEQ ID NO: 103225 - DNA, 13 bp, Artificial Sequence
  Oligonucleotide for detection of SNP TSC0025830
ttttaggatggtt

SEQ ID NO: 103226 - DNA, 13 bp, Artificial Sequence
  Oligonucleotide for detection of SNP TSC0025830
aaccatcctaaaa

SEQ ID NO: 103227 - DNA, 13 bp, Artificial Sequence
  Oligonucleotide for detection of SNP TSC0025830
ttttagaatggtt

SEQ ID NO: 103228 - DNA, 13 bp, Artificial Sequence
  Oligonucleotide for detection of SNP TSC0025830
aaccattctaaaa

SEQ ID NO: 103229 - DNA, 13 bp, Artificial Sequence
  Oligonucleotide for detection of SNP TSC0025831
tgtttgatttttg

SEQ ID NO: 103230 - DNA, 13 bp, Artificial Sequence
  Oligonucleotide for detection of SNP TSC0025831
caaaaatcaaaca

SEQ ID NO: 103231 - DNA, 13 bp, Artificial Sequence
  Oligonucleotide for detection of SNP TSC0025831
cgtttgatttttg

SEQ ID NO: 103232 - DNA, 13 bp, Artificial Sequence
  Oligonucleotide for detection of SNP TSC0025831
caaaaatcaaacg

SEQ ID NO: 103233 - DNA, 13 bp, Artificial Sequence
  Oligonucleotide for detection of SNP TSC0025831
cgtttgttttttg

SEQ ID NO: 103234 - DNA, 13 bp, Artificial Sequence
  Oligonucleotide for detection of SNP TSC0025831
caaaaaacaaacg

SEQ ID NO: 103235 - DNA, 13 bp, Artificial Sequence
  Oligonucleotide for detection of SNP TSC0025831
tgttcgatttttg

SEQ ID NO: 103236 - DNA, 13 bp, Artificial Sequence
  Oligonucleotide for detection of SNP TSC0025831
caaaaatcgaaca

SEQ ID NO: 103237 - DNA, 13 bp, Artificial Sequence
  Oligonucleotide for detection of SNP TSC0025831
tgttcgttttttg

SEQ ID NO: 103238 - DNA, 13 bp, Artificial Sequence
  Oligonucleotide for detection of SNP TSC0025831
caaaaaacgaaca

SEQ ID NO: 103239 - DNA, 13 bp, Artificial Sequence
  Oligonucleotide for detection of SNP TSC0025831
cgttcgatttttg

SEQ ID NO: 103240 - DNA, 13 bp, Artificial Sequence
  Oligonucleotide for detection of SNP TSC0025831
caaaaatcgaacg

SEQ ID NO: 103241 - DNA, 13 bp, Artificial Sequence
  Oligonucleotide for detection of SNP TSC0025831
cgttcgttttttg

SEQ ID NO: 103242 - DNA, 13 bp, Artificial Sequence
  Oligonucleotide for detection of SNP TSC0025831
caaaaaacgaacg

SEQ ID NO: 103243 - DNA, 13 bp, Artificial Sequence
  Oligonucleotide for detection of SNP TSC0025831
taagagttgggtg

SEQ ID NO: 103244 - DNA, 13 bp, Artificial Sequence
  Oligonucleotide for detection of SNP TSC0025831
cacccaactctta

SEQ ID NO: 103245 - DNA, 13 bp, Artificial Sequence
  Oligonucleotide for detection of SNP TSC0025831
taagaggtgggtg

SEQ ID NO: 103246 - DNA, 13 bp, Artificial Sequence
  Oligonucleotide for detection of SNP TSC0025831
cacccacctctta

SEQ ID NO: 103247 - DNA, 13 bp, Artificial Sequence
  Oligonucleotide for detection of SNP TSC0025831
taagagtcgggtg

SEQ ID NO: 103248 - DNA, 13 bp, Artificial Sequence
  Oligonucleotide for detection of SNP TSC0025831
cacccgactctta

SEQ ID NO: 103249 - DNA, 13 bp, Artificial Sequence
  Oligonucleotide for detection of SNP TSC0025831
taagaggcgggtg

SEQ ID NO: 103250 - DNA, 13 bp, Artificial Sequence
  Oligonucleotide for detection of SNP TSC0025831
cacccgcctctta

SEQ ID NO: 103251 - DNA, 13 bp, Artificial Sequence
  Oligonucleotide for detection of SNP TSC0025831
taagagttgggcg

SEQ ID NO: 103252 - DNA, 13 bp, Artificial Sequence
  Oligonucleotide for detection of SNP TSC0025831
cgcccaactctta

SEQ ID NO: 103253 - DNA, 13 bp, Artificial Sequence
  Oligonucleotide for detection of SNP TSC0025831
taagaggtgggcg

SEQ ID NO: 103254 - DNA, 13 bp, Artificial Sequence
  Oligonucleotide for detection of SNP TSC0025831
cgcccacctctta

SEQ ID NO: 103255 - DNA, 13 bp, Artificial Sequence
  Oligonucleotide for detection of SNP TSC0025831
taagagtcgggcg

SEQ ID NO: 103256 - DNA, 13 bp, Artificial Sequence
  Oligonucleotide for detection of SNP TSC0025831
cgcccgactctta

SEQ ID NO: 103257 - DNA, 13 bp, Artificial Sequence
  Oligonucleotide for detection of SNP TSC0025831
taagaggcgggcg

SEQ ID NO: 103258 - DNA, 13 bp, Artificial Sequence
  Oligonucleotide for detection of SNP TSC0025831
cgcccgcctctta

SEQ ID NO: 103259 - DNA, 13 bp, Artificial Sequence
  Oligonucleotide for detection of SNP TSC0025832
ttagtagtgattt

SEQ ID NO: 103260 - DNA, 13 bp, Artificial Sequence
  Oligonucleotide for detection of SNP TSC0025832
aaatcactactaa

SEQ ID NO: 103261 - DNA, 13 bp, Artificial Sequence
  Oligonucleotide for detection of SNP TSC0025832
ttagtattgattt

SEQ ID NO: 103262 - DNA, 13 bp, Artificial Sequence
  Oligonucleotide for detection of SNP TSC0025832
aaatcaatactaa

SEQ ID NO: 103263 - DNA, 13 bp, Artificial Sequence
  Oligonucleotide for detection of SNP TSC0025832
aggttattgttgg

SEQ ID NO: 103264 - DNA, 13 bp, Artificial Sequence
  Oligonucleotide for detection of SNP TSC0025832
ccaacaataacct

SEQ ID NO: 103265 - DNA, 13 bp, Artificial Sequence
  Oligonucleotide for detection of SNP TSC0025832
aggttaatgttgg

SEQ ID NO: 103266 - DNA, 13 bp, Artificial Sequence
  Oligonucleotide for detection of SNP TSC0025832
ccaacattaacct

SEQ ID NO: 103267 - DNA, 13 bp, Artificial Sequence
  Oligonucleotide for detection of SNP TSC0025833
ttatgggtttgta

SEQ ID NO: 103268 - DNA, 13 bp, Artificial Sequence
  Oligonucleotide for detection of SNP TSC0025833
tacaaacccataa

SEQ ID NO: 103269 - DNA, 13 bp, Artificial Sequence
  Oligonucleotide for detection of SNP TSC0025833
ttacggatttgta

SEQ ID NO: 103270 - DNA, 13 bp, Artificial Sequence
  Oligonucleotide for detection of SNP TSC0025833
tacaaatccgtaa

SEQ ID NO: 103271 - DNA, 13 bp, Artificial Sequence
  Oligonucleotide for detection of SNP TSC0025833
ttacgggtttgta

SEQ ID NO: 103272 - DNA, 13 bp, Artificial Sequence
  Oligonucleotide for detection of SNP TSC0025833
tacaaacccgtaa

SEQ ID NO: 103273 - DNA, 13 bp, Artificial Sequence
  Oligonucleotide for detection of SNP TSC0025833
ttatggattcgta

SEQ ID NO: 103274 - DNA, 13 bp, Artificial Sequence
  Oligonucleotide for detection of SNP TSC0025833
tacgaatccataa

SEQ ID NO: 103275 - DNA, 13 bp, Artificial Sequence
  Oligonucleotide for detection of SNP TSC0025833
ttatgggttcgta

SEQ ID NO: 103276 - DNA, 13 bp, Artificial Sequence
  Oligonucleotide for detection of SNP TSC0025833
tacgaacccataa

SEQ ID NO: 103277 - DNA, 13 bp, Artificial Sequence
  Oligonucleotide for detection of SNP TSC0025833
ttacggattcgta

SEQ ID NO: 103278 - DNA, 13 bp, Artificial Sequence
  Oligonucleotide for detection of SNP TSC0025833
tacgaatccgtaa

SEQ ID NO: 103279 - DNA, 13 bp, Artificial Sequence
  Oligonucleotide for detection of SNP TSC0025833
ttacgggttcgta

SEQ ID NO: 103280 - DNA, 13 bp, Artificial Sequence
  Oligonucleotide for detection of SNP TSC0025833
tacgaacccgtaa

SEQ ID NO: 103281 - DNA, 13 bp, Artificial Sequence
  Oligonucleotide for detection of SNP TSC0025835
gaagtaatttaty

SEQ ID NO: 103282 - DNA, 13 bp, Artificial Sequence
  Oligonucleotide for detection of SNP TSC0025835
rataaattacttc

SEQ ID NO: 103283 - DNA, 13 bp, Artificial Sequence
  Oligonucleotide for detection of SNP TSC0025835
gaagtattttaty

SEQ ID NO: 103284 - DNA, 13 bp, Artificial Sequence
  Oligonucleotide for detection of SNP TSC0025835
rataaaatacttc

SEQ ID NO: 103285 - DNA, 13 bp, Artificial Sequence
  Oligonucleotide for detection of SNP TSC0025835
ggtgggttgttty

SEQ ID NO: 103286 - DNA, 13 bp, Artificial Sequence
  Oligonucleotide for detection of SNP TSC0025835
raaacaacccacc

SEQ ID NO: 103287 - DNA, 13 bp, Artificial Sequence
  Oligonucleotide for detection of SNP TSC0025835
ggtggggtgttty

SEQ ID NO: 103288 - DNA, 13 bp, Artificial Sequence
  Oligonucleotide for detection of SNP TSC0025835
raaacaccccacc

SEQ ID NO: 103289 - DNA, 13 bp, Artificial Sequence
  Oligonucleotide for detection of SNP TSC0025837
atttttgtagtaa

SEQ ID NO: 103290 - DNA, 13 bp, Artificial Sequence
  Oligonucleotide for detection of SNP TSC0025837
ttactacaaaaat

SEQ ID NO: 103291 - DNA, 13 bp, Artificial Sequence
  Oligonucleotide for detection of SNP TSC0025837
atttttttagtaa

SEQ ID NO: 103292 - DNA, 13 bp, Artificial Sequence
  Oligonucleotide for detection of SNP TSC0025837
ttactaaaaaaat

SEQ ID NO: 103293 - DNA, 13 bp, Artificial Sequence
  Oligonucleotide for detection of SNP TSC0025837
ttattgtagaaat

SEQ ID NO: 103294 - DNA, 13 bp, Artificial Sequence
  Oligonucleotide for detection of SNP TSC0025837
atttctacaataa

SEQ ID NO: 103295 - DNA, 13 bp, Artificial Sequence
  Oligonucleotide for detection of SNP TSC0025847
tgtgaggttgtgg

SEQ ID NO: 103296 - DNA, 13 bp, Artificial Sequence
  Oligonucleotide for detection of SNP TSC0025847
ccacaacctcaca

SEQ ID NO: 103297 - DNA, 13 bp, Artificial Sequence
  Oligonucleotide for detection of SNP TSC0025847
tgtgagattgtgg

SEQ ID NO: 103298 - DNA, 13 bp, Artificial Sequence
  Oligonucleotide for detection of SNP TSC0025847
ccacaatctcaca

SEQ ID NO: 103299 - DNA, 13 bp, Artificial Sequence
  Oligonucleotide for detection of SNP TSC0025847
cgtgaggttgtgg

SEQ ID NO: 103300 - DNA, 13 bp, Artificial Sequence
  Oligonucleotide for detection of SNP TSC0025847
ccacaacctcacg

SEQ ID NO: 103301 - DNA, 13 bp, Artificial Sequence
  Oligonucleotide for detection of SNP TSC0025847
cgtgagattgtgg

SEQ ID NO: 103302 - DNA, 13 bp, Artificial Sequence
  Oligonucleotide for detection of SNP TSC0025847
ccacaatctcacg

SEQ ID NO: 103303 - DNA, 13 bp, Artificial Sequence
  Oligonucleotide for detection of SNP TSC0025847
tgcgaggttgtgg

SEQ ID NO: 103304 - DNA, 13 bp, Artificial Sequence
  Oligonucleotide for detection of SNP TSC0025847
ccacaacctcgca

SEQ ID NO: 103305 - DNA, 13 bp, Artificial Sequence
  Oligonucleotide for detection of SNP TSC0025847
tgcgagattgtgg

SEQ ID NO: 103306 - DNA, 13 bp, Artificial Sequence
  Oligonucleotide for detection of SNP TSC0025847
ccacaatctcgca

SEQ ID NO: 103307 - DNA, 13 bp, Artificial Sequence
  Oligonucleotide for detection of SNP TSC0025847
cgcgaggttgtgg

SEQ ID NO: 103308 - DNA, 13 bp, Artificial Sequence
  Oligonucleotide for detection of SNP TSC0025847
ccacaacctcgcg

SEQ ID NO: 103309 - DNA, 13 bp, Artificial Sequence
  Oligonucleotide for detection of SNP TSC0025847
cgcgagattgtgg

SEQ ID NO: 103310 - DNA, 13 bp, Artificial Sequence
  Oligonucleotide for detection of SNP TSC0025847
ccacaatctcgcg

SEQ ID NO: 103311 - DNA, 13 bp, Artificial Sequence
  Oligonucleotide for detection of SNP TSC0025848
gtttttaagaaat

SEQ ID NO: 103312 - DNA, 13 bp, Artificial Sequence
  Oligonucleotide for detection of SNP TSC0025848
atttcttaaaaac

SEQ ID NO: 103313 - DNA, 13 bp, Artificial Sequence
  Oligonucleotide for detection of SNP TSC0025848
gttttttagaaat

SEQ ID NO: 103314 - DNA, 13 bp, Artificial Sequence
  Oligonucleotide for detection of SNP TSC0025848
atttctaaaaaac

SEQ ID NO: 103315 - DNA, 13 bp, Artificial Sequence
  Oligonucleotide for detection of SNP TSC0025848
attttttagggay

SEQ ID NO: 103316 - DNA, 13 bp, Artificial Sequence
  Oligonucleotide for detection of SNP TSC0025848
rtccctaaaaaat

SEQ ID NO: 103317 - DNA, 13 bp, Artificial Sequence
  Oligonucleotide for detection of SNP TSC0025848
atttttgagggay

SEQ ID NO: 103318 - DNA, 13 bp, Artificial Sequence
  Oligonucleotide for detection of SNP TSC0025848
rtccctcaaaaat

SEQ ID NO: 103319 - DNA, 13 bp, Artificial Sequence
  Oligonucleotide for detection of SNP TSC0025851
aaaattagttgag

SEQ ID NO: 103320 - DNA, 13 bp, Artificial Sequence
  Oligonucleotide for detection of SNP TSC0025851
ctcaactaatttt

SEQ ID NO: 103321 - DNA, 13 bp, Artificial Sequence
  Oligonucleotide for detection of SNP TSC0025851
aaaatttgttgag

SEQ ID NO: 103322 - DNA, 13 bp, Artificial Sequence
  Oligonucleotide for detection of SNP TSC0025851
ctcaacaaatttt

SEQ ID NO: 103323 - DNA, 13 bp, Artificial Sequence
  Oligonucleotide for detection of SNP TSC0025851
tttagttaatttt

SEQ ID NO: 103324 - DNA, 13 bp, Artificial Sequence
  Oligonucleotide for detection of SNP TSC0025851
aaaattaactaaa

SEQ ID NO: 103325 - DNA, 13 bp, Artificial Sequence
  Oligonucleotide for detection of SNP TSC0025851
tttagtaaatttt

SEQ ID NO: 103326 - DNA, 13 bp, Artificial Sequence
  Oligonucleotide for detection of SNP TSC0025851
aaaatttactaaa

SEQ ID NO: 103327 - DNA, 13 bp, Artificial Sequence
  Oligonucleotide for detection of SNP TSC0025852
gttttaatgtttt

SEQ ID NO: 103328 - DNA, 13 bp, Artificial Sequence
  Oligonucleotide for detection of SNP TSC0025852
aaaacattaaaac

SEQ ID NO: 103329 - DNA, 13 bp, Artificial Sequence
  Oligonucleotide for detection of SNP TSC0025852
gttttagtgtttt

SEQ ID NO: 103330 - DNA, 13 bp, Artificial Sequence
  Oligonucleotide for detection of SNP TSC0025852
aaaacactaaaac

SEQ ID NO: 103331 - DNA, 13 bp, Artificial Sequence
  Oligonucleotide for detection of SNP TSC0025853
tttaaggaggtaa

SEQ ID NO: 103332 - DNA, 13 bp, Artificial Sequence
  Oligonucleotide for detection of SNP TSC0025853
ttacctccttaaa

SEQ ID NO: 103333 - DNA, 13 bp, Artificial Sequence
  Oligonucleotide for detection of SNP TSC0025853
tttaagtaggtaa

SEQ ID NO: 103334 - DNA, 13 bp, Artificial Sequence
  Oligonucleotide for detection of SNP TSC0025853
ttacctacttaaa

SEQ ID NO: 103335 - DNA, 13 bp, Artificial Sequence
  Oligonucleotide for detection of SNP TSC0025853
ttgtttttttgag

SEQ ID NO: 103336 - DNA, 13 bp, Artificial Sequence
  Oligonucleotide for detection of SNP TSC0025853
ctcaaaaaaacaa

SEQ ID NO: 103337 - DNA, 13 bp, Artificial Sequence
  Oligonucleotide for detection of SNP TSC0025853
ttgtttatttgag

SEQ ID NO: 103338 - DNA, 13 bp, Artificial Sequence
  Oligonucleotide for detection of SNP TSC0025853
ctcaaataaacaa

SEQ ID NO: 103339 - DNA, 13 bp, Artificial Sequence
  Oligonucleotide for detection of SNP TSC0025856
aataatgtaaaaa

SEQ ID NO: 103340 - DNA, 13 bp, Artificial Sequence
  Oligonucleotide for detection of SNP TSC0025856
tttttacattatt

SEQ ID NO: 103341 - DNA, 13 bp, Artificial Sequence
  Oligonucleotide for detection of SNP TSC0025857
ttttatttattta

SEQ ID NO: 103342 - DNA, 13 bp, Artificial Sequence
  Oligonucleotide for detection of SNP TSC0025857
taaataaataaaa

SEQ ID NO: 103343 - DNA, 13 bp, Artificial Sequence
  Oligonucleotide for detection of SNP TSC0025857
taaatatgtagaa

SEQ ID NO: 103344 - DNA, 13 bp, Artificial Sequence
  Oligonucleotide for detection of SNP TSC0025857
ttctacatattta

SEQ ID NO: 103345 - DNA, 13 bp, Artificial Sequence
  Oligonucleotide for detection of SNP TSC0025857
taaataggtagaa

SEQ ID NO: 103346 - DNA, 13 bp, Artificial Sequence
  Oligonucleotide for detection of SNP TSC0025857
ttctacctattta

SEQ ID NO: 103347 - DNA, 13 bp, Artificial Sequence
  Oligonucleotide for detection of SNP TSC0025857
taaataagtagaa

SEQ ID NO: 103348 - DNA, 13 bp, Artificial Sequence
  Oligonucleotide for detection of SNP TSC0025857
ttctacttattta

SEQ ID NO: 103349 - DNA, 13 bp, Artificial Sequence
  Oligonucleotide for detection of SNP TSC0025859
tttttgaggtatt

SEQ ID NO: 103350 - DNA, 13 bp, Artificial Sequence
  Oligonucleotide for detection of SNP TSC0025859
aatacctcaaaaa

SEQ ID NO: 103351 - DNA, 13 bp, Artificial Sequence
  Oligonucleotide for detection of SNP TSC0025859
tttttggggtatt

SEQ ID NO: 103352 - DNA, 13 bp, Artificial Sequence
  Oligonucleotide for detection of SNP TSC0025859
aataccccaaaaa

SEQ ID NO: 103353 - DNA, 13 bp, Artificial Sequence
  Oligonucleotide for detection of SNP TSC0025860
aaatatgatagag

SEQ ID NO: 103354 - DNA, 13 bp, Artificial Sequence
  Oligonucleotide for detection of SNP TSC0025860
ctctatcatattt

SEQ ID NO: 103355 - DNA, 13 bp, Artificial Sequence
  Oligonucleotide for detection of SNP TSC0025860
aaatataatagag

SEQ ID NO: 103356 - DNA, 13 bp, Artificial Sequence
  Oligonucleotide for detection of SNP TSC0025860
ctctattatattt

SEQ ID NO: 103357 - DNA, 13 bp, Artificial Sequence
  Oligonucleotide for detection of SNP TSC0025860
aaatacgatagag

SEQ ID NO: 103358 - DNA, 13 bp, Artificial Sequence
  Oligonucleotide for detection of SNP TSC0025860
ctctatcgtattt

SEQ ID NO: 103359 - DNA, 13 bp, Artificial Sequence
  Oligonucleotide for detection of SNP TSC0025861
ttttttatgatty

SEQ ID NO: 103360 - DNA, 13 bp, Artificial Sequence
  Oligonucleotide for detection of SNP TSC0025861
raatcataaaaaa

SEQ ID NO: 103361 - DNA, 13 bp, Artificial Sequence
  Oligonucleotide for detection of SNP TSC0025861
gagttatgagaaa

SEQ ID NO: 103362 - DNA, 13 bp, Artificial Sequence
  Oligonucleotide for detection of SNP TSC0025861
tttctcataactc

SEQ ID NO: 103363 - DNA, 13 bp, Artificial Sequence
  Oligonucleotide for detection of SNP TSC0025861
gagttacgagaaa

SEQ ID NO: 103364 - DNA, 13 bp, Artificial Sequence
  Oligonucleotide for detection of SNP TSC0025861
tttctcgtaactc

SEQ ID NO: 103365 - DNA, 13 bp, Artificial Sequence
  Oligonucleotide for detection of SNP TSC0025862
atagtgttttata

SEQ ID NO: 103366 - DNA, 13 bp, Artificial Sequence
  Oligonucleotide for detection of SNP TSC0025862
tataaaacactat

SEQ ID NO: 103367 - DNA, 13 bp, Artificial Sequence
  Oligonucleotide for detection of SNP TSC0025862
atagtggtttata

SEQ ID NO: 103368 - DNA, 13 bp, Artificial Sequence
  Oligonucleotide for detection of SNP TSC0025862
tataaaccactat

SEQ ID NO: 103369 - DNA, 13 bp, Artificial Sequence
  Oligonucleotide for detection of SNP TSC0025862
tgtgaggtattgt

SEQ ID NO: 103370 - DNA, 13 bp, Artificial Sequence
  Oligonucleotide for detection of SNP TSC0025862
acaatacctcaca

SEQ ID NO: 103371 - DNA, 13 bp, Artificial Sequence
  Oligonucleotide for detection of SNP TSC0025862
tgtgagttattgt

SEQ ID NO: 103372 - DNA, 13 bp, Artificial Sequence
  Oligonucleotide for detection of SNP TSC0025862
acaataactcaca

SEQ ID NO: 103373 - DNA, 13 bp, Artificial Sequence
  Oligonucleotide for detection of SNP TSC0025863
tagtatatgtgtg

SEQ ID NO: 103374 - DNA, 13 bp, Artificial Sequence
  Oligonucleotide for detection of SNP TSC0025863
cacacatatacta

SEQ ID NO: 103375 - DNA, 13 bp, Artificial Sequence
  Oligonucleotide for detection of SNP TSC0025863
tagtatgtgtgtg

SEQ ID NO: 103376 - DNA, 13 bp, Artificial Sequence
  Oligonucleotide for detection of SNP TSC0025863
cacacacatacta

SEQ ID NO: 103377 - DNA, 13 bp, Artificial Sequence
  Oligonucleotide for detection of SNP TSC0025863
tagtacgtgtgtg

SEQ ID NO: 103378 - DNA, 13 bp, Artificial Sequence
  Oligonucleotide for detection of SNP TSC0025863
cacacacgtacta

SEQ ID NO: 103379 - DNA, 13 bp, Artificial Sequence
  Oligonucleotide for detection of SNP TSC0025863
tatatatgtgttg

SEQ ID NO: 103380 - DNA, 13 bp, Artificial Sequence
  Oligonucleotide for detection of SNP TSC0025863
caacacatatata

SEQ ID NO: 103381 - DNA, 13 bp, Artificial Sequence
  Oligonucleotide for detection of SNP TSC0025863
tatatacgtgttg

SEQ ID NO: 103382 - DNA, 13 bp, Artificial Sequence
  Oligonucleotide for detection of SNP TSC0025863
caacacgtatata

SEQ ID NO: 103383 - DNA, 13 bp, Artificial Sequence
  Oligonucleotide for detection of SNP TSC0025865
tagtaaatagaaa

SEQ ID NO: 103384 - DNA, 13 bp, Artificial Sequence
  Oligonucleotide for detection of SNP TSC0025865
tttctatttacta

SEQ ID NO: 103385 - DNA, 13 bp, Artificial Sequence
  Oligonucleotide for detection of SNP TSC0025865
tagtaagtagaaa

SEQ ID NO: 103386 - DNA, 13 bp, Artificial Sequence
  Oligonucleotide for detection of SNP TSC0025865
tttctacttacta

SEQ ID NO: 103387 - DNA, 13 bp, Artificial Sequence
  Oligonucleotide for detection of SNP TSC0025866
tgtttaattttay

SEQ ID NO: 103388 - DNA, 13 bp, Artificial Sequence
  Oligonucleotide for detection of SNP TSC0025866
rtaaaattaaaca

SEQ ID NO: 103389 - DNA, 13 bp, Artificial Sequence
  Oligonucleotide for detection of SNP TSC0025866
tgtttagttttay

SEQ ID NO: 103390 - DNA, 13 bp, Artificial Sequence
  Oligonucleotide for detection of SNP TSC0025866
rtaaaactaaaca

SEQ ID NO: 103391 - DNA, 13 bp, Artificial Sequence
  Oligonucleotide for detection of SNP TSC0025871
gtttagtgggtga

SEQ ID NO: 103392 - DNA, 13 bp, Artificial Sequence
  Oligonucleotide for detection of SNP TSC0025871
tcacccactaaac

SEQ ID NO: 103393 - DNA, 13 bp, Artificial Sequence
  Oligonucleotide for detection of SNP TSC0025871
gtttagggggtga

SEQ ID NO: 103394 - DNA, 13 bp, Artificial Sequence
  Oligonucleotide for detection of SNP TSC0025871
tcaccccctaaac

SEQ ID NO: 103395 - DNA, 13 bp, Artificial Sequence
  Oligonucleotide for detection of SNP TSC0025871
gtttagcgggtga

SEQ ID NO: 103396 - DNA, 13 bp, Artificial Sequence
  Oligonucleotide for detection of SNP TSC0025871
tcacccgctaaac

SEQ ID NO: 103397 - DNA, 13 bp, Artificial Sequence
  Oligonucleotide for detection of SNP TSC0025871
ttatttgttaggy

SEQ ID NO: 103398 - DNA, 13 bp, Artificial Sequence
  Oligonucleotide for detection of SNP TSC0025871
rcctaacaaataa

SEQ ID NO: 103399 - DNA, 13 bp, Artificial Sequence
  Oligonucleotide for detection of SNP TSC0025871
ttattttttaggy

SEQ ID NO: 103400 - DNA, 13 bp, Artificial Sequence
  Oligonucleotide for detection of SNP TSC0025871
rcctaaaaaataa

SEQ ID NO: 103401 - DNA, 13 bp, Artificial Sequence
  Oligonucleotide for detection of SNP TSC0025871
ttattcgttaggy

SEQ ID NO: 103402 - DNA, 13 bp, Artificial Sequence
  Oligonucleotide for detection of SNP TSC0025871
rcctaacgaataa

SEQ ID NO: 103403 - DNA, 13 bp, Artificial Sequence
  Oligonucleotide for detection of SNP TSC0025872
tgtatgtgatttt

SEQ ID NO: 103404 - DNA, 13 bp, Artificial Sequence
  Oligonucleotide for detection of SNP TSC0025872
aaaatcacataca

SEQ ID NO: 103405 - DNA, 13 bp, Artificial Sequence
  Oligonucleotide for detection of SNP TSC0025872
cgtatgtgatttt

SEQ ID NO: 103406 - DNA, 13 bp, Artificial Sequence
  Oligonucleotide for detection of SNP TSC0025872
aaaatcacatacg

SEQ ID NO: 103407 - DNA, 13 bp, Artificial Sequence
  Oligonucleotide for detection of SNP TSC0025872
tgtatgcgatttt

SEQ ID NO: 103408 - DNA, 13 bp, Artificial Sequence
  Oligonucleotide for detection of SNP TSC0025872
aaaatcgcataca

SEQ ID NO: 103409 - DNA, 13 bp, Artificial Sequence
  Oligonucleotide for detection of SNP TSC0025872
cgtatgcgatttt

SEQ ID NO: 103410 - DNA, 13 bp, Artificial Sequence
  Oligonucleotide for detection of SNP TSC0025872
aaaatcgcatacg

SEQ ID NO: 103411 - DNA, 13 bp, Artificial Sequence
  Oligonucleotide for detection of SNP TSC0025872
aaaattgtatatg

SEQ ID NO: 103412 - DNA, 13 bp, Artificial Sequence
  Oligonucleotide for detection of SNP TSC0025872
catatacaatttt

SEQ ID NO: 103413 - DNA, 13 bp, Artificial Sequence
  Oligonucleotide for detection of SNP TSC0025872
aaaattatatatg

SEQ ID NO: 103414 - DNA, 13 bp, Artificial Sequence
  Oligonucleotide for detection of SNP TSC0025872
catatataatttt

SEQ ID NO: 103415 - DNA, 13 bp, Artificial Sequence
  Oligonucleotide for detection of SNP TSC0025872
aaaatcgtatatg

SEQ ID NO: 103416 - DNA, 13 bp, Artificial Sequence
  Oligonucleotide for detection of SNP TSC0025872
catatacgatttt

SEQ ID NO: 103417 - DNA, 13 bp, Artificial Sequence
  Oligonucleotide for detection of SNP TSC0025872
aaaattatatacg

SEQ ID NO: 103418 - DNA, 13 bp, Artificial Sequence
  Oligonucleotide for detection of SNP TSC0025872
cgtatataatttt

SEQ ID NO: 103419 - DNA, 13 bp, Artificial Sequence
  Oligonucleotide for detection of SNP TSC0025872
aaaattgtatacg

SEQ ID NO: 103420 - DNA, 13 bp, Artificial Sequence
  Oligonucleotide for detection of SNP TSC0025872
cgtatacaatttt

SEQ ID NO: 103421 - DNA, 13 bp, Artificial Sequence
  Oligonucleotide for detection of SNP TSC0025872
aaaatcgtatacg

SEQ ID NO: 103422 - DNA, 13 bp, Artificial Sequence
  Oligonucleotide for detection of SNP TSC0025872
cgtatacgatttt

SEQ ID NO: 103423 - DNA, 13 bp, Artificial Sequence
  Oligonucleotide for detection of SNP TSC0025873
tttatgatatttg

SEQ ID NO: 103424 - DNA, 13 bp, Artificial Sequence
  Oligonucleotide for detection of SNP TSC0025873
caaatatcataaa

SEQ ID NO: 103425 - DNA, 13 bp, Artificial Sequence
  Oligonucleotide for detection of SNP TSC0025873
tttatggtatttg

SEQ ID NO: 103426 - DNA, 13 bp, Artificial Sequence
  Oligonucleotide for detection of SNP TSC0025873
caaataccataaa

SEQ ID NO: 103427 - DNA, 13 bp, Artificial Sequence
  Oligonucleotide for detection of SNP TSC0025876
aaaattaatatay

SEQ ID NO: 103428 - DNA, 13 bp, Artificial Sequence
  Oligonucleotide for detection of SNP TSC0025876
rtatattaatttt

SEQ ID NO: 103429 - DNA, 13 bp, Artificial Sequence
  Oligonucleotide for detection of SNP TSC0025876
aaaattgatatay

SEQ ID NO: 103430 - DNA, 13 bp, Artificial Sequence
  Oligonucleotide for detection of SNP TSC0025876
rtatatcaatttt

SEQ ID NO: 103431 - DNA, 13 bp, Artificial Sequence
  Oligonucleotide for detection of SNP TSC0025876
aaaatcgatatay

SEQ ID NO: 103432 - DNA, 13 bp, Artificial Sequence
  Oligonucleotide for detection of SNP TSC0025876
rtatatcgatttt

SEQ ID NO: 103433 - DNA, 13 bp, Artificial Sequence
  Oligonucleotide for detection of SNP TSC0025876
gtgtgttgatttt

SEQ ID NO: 103434 - DNA, 13 bp, Artificial Sequence
  Oligonucleotide for detection of SNP TSC0025876
aaaatcaacacac

SEQ ID NO: 103435 - DNA, 13 bp, Artificial Sequence
  Oligonucleotide for detection of SNP TSC0025876
gtgtgtcgatttt

SEQ ID NO: 103436 - DNA, 13 bp, Artificial Sequence
  Oligonucleotide for detection of SNP TSC0025876
aaaatcgacacac

SEQ ID NO: 103437 - DNA, 13 bp, Artificial Sequence
  Oligonucleotide for detection of SNP TSC0025877
taatatattatag

SEQ ID NO: 103438 - DNA, 13 bp, Artificial Sequence
  Oligonucleotide for detection of SNP TSC0025877
ctataatatatta

SEQ ID NO: 103439 - DNA, 13 bp, Artificial Sequence
  Oligonucleotide for detection of SNP TSC0025877
taatatgttatag

SEQ ID NO: 103440 - DNA, 13 bp, Artificial Sequence
  Oligonucleotide for detection of SNP TSC0025877
ctataacatatta

SEQ ID NO: 103441 - DNA, 13 bp, Artificial Sequence
  Oligonucleotide for detection of SNP TSC0025877
taatacgttatag

SEQ ID NO: 103442 - DNA, 13 bp, Artificial Sequence
  Oligonucleotide for detection of SNP TSC0025877
ctataacgtatta

SEQ ID NO: 103443 - DNA, 13 bp, Artificial Sequence
  Oligonucleotide for detection of SNP TSC0025877
ttgtggtgtgttg

SEQ ID NO: 103444 - DNA, 13 bp, Artificial Sequence
  Oligonucleotide for detection of SNP TSC0025877
caacacaccacaa

SEQ ID NO: 103445 - DNA, 13 bp, Artificial Sequence
  Oligonucleotide for detection of SNP TSC0025877
ttgtggcgtgttg

SEQ ID NO: 103446 - DNA, 13 bp, Artificial Sequence
  Oligonucleotide for detection of SNP TSC0025877
caacacgccacaa

SEQ ID NO: 103447 - DNA, 13 bp, Artificial Sequence
  Oligonucleotide for detection of SNP TSC0025879
aaggttatagtta

SEQ ID NO: 103448 - DNA, 13 bp, Artificial Sequence
  Oligonucleotide for detection of SNP TSC0025879
taactataacctt

SEQ ID NO: 103449 - DNA, 13 bp, Artificial Sequence
  Oligonucleotide for detection of SNP TSC0025879
aaggttgtagtta

SEQ ID NO: 103450 - DNA, 13 bp, Artificial Sequence
  Oligonucleotide for detection of SNP TSC0025879
taactacaacctt

SEQ ID NO: 103451 - DNA, 13 bp, Artificial Sequence
  Oligonucleotide for detection of SNP TSC0025880
attattatttatt

SEQ ID NO: 103452 - DNA, 13 bp, Artificial Sequence
  Oligonucleotide for detection of SNP TSC0025880
aataaataataat

SEQ ID NO: 103453 - DNA, 13 bp, Artificial Sequence
  Oligonucleotide for detection of SNP TSC0025880
attattgtttatt

SEQ ID NO: 103454 - DNA, 13 bp, Artificial Sequence
  Oligonucleotide for detection of SNP TSC0025880
aataaacaataat

SEQ ID NO: 103455 - DNA, 13 bp, Artificial Sequence
  Oligonucleotide for detection of SNP TSC0025880
attatcgtttatt

SEQ ID NO: 103456 - DNA, 13 bp, Artificial Sequence
  Oligonucleotide for detection of SNP TSC0025880
aataaacgataat

SEQ ID NO: 103457 - DNA, 13 bp, Artificial Sequence
  Oligonucleotide for detection of SNP TSC0025880
agtgagtgatgat

SEQ ID NO: 103458 - DNA, 13 bp, Artificial Sequence
  Oligonucleotide for detection of SNP TSC0025880
atcatcactcact

SEQ ID NO: 103459 - DNA, 13 bp, Artificial Sequence
  Oligonucleotide for detection of SNP TSC0025880
agtgagcgatgat

SEQ ID NO: 103460 - DNA, 13 bp, Artificial Sequence
  Oligonucleotide for detection of SNP TSC0025880
atcatcgctcact

SEQ ID NO: 103461 - DNA, 13 bp, Artificial Sequence
  Oligonucleotide for detection of SNP TSC0025886
atttatatgtaat

SEQ ID NO: 103462 - DNA, 13 bp, Artificial Sequence
  Oligonucleotide for detection of SNP TSC0025886
attacatataaat

SEQ ID NO: 103463 - DNA, 13 bp, Artificial Sequence
  Oligonucleotide for detection of SNP TSC0025886
atttatgtgtaat

SEQ ID NO: 103464 - DNA, 13 bp, Artificial Sequence
  Oligonucleotide for detection of SNP TSC0025886
attacacataaat

SEQ ID NO: 103465 - DNA, 13 bp, Artificial Sequence
  Oligonucleotide for detection of SNP TSC0025887
tggttttgtaggt

SEQ ID NO: 103466 - DNA, 13 bp, Artificial Sequence
  Oligonucleotide for detection of SNP TSC0025887
acctacaaaacca

SEQ ID NO: 103467 - DNA, 13 bp, Artificial Sequence
  Oligonucleotide for detection of SNP TSC0025887
tggtttcgtaggt

SEQ ID NO: 103468 - DNA, 13 bp, Artificial Sequence
  Oligonucleotide for detection of SNP TSC0025887
acctacgaaacca

SEQ ID NO: 103469 - DNA, 13 bp, Artificial Sequence
  Oligonucleotide for detection of SNP TSC0025887
atttgtgggatta

SEQ ID NO: 103470 - DNA, 13 bp, Artificial Sequence
  Oligonucleotide for detection of SNP TSC0025887
taatcccacaaat

SEQ ID NO: 103471 - DNA, 13 bp, Artificial Sequence
  Oligonucleotide for detection of SNP TSC0025887
atttgtaggatta

SEQ ID NO: 103472 - DNA, 13 bp, Artificial Sequence
  Oligonucleotide for detection of SNP TSC0025887
taatcctacaaat

SEQ ID NO: 103473 - DNA, 13 bp, Artificial Sequence
  Oligonucleotide for detection of SNP TSC0025887
atttgcgggatta

SEQ ID NO: 103474 - DNA, 13 bp, Artificial Sequence
  Oligonucleotide for detection of SNP TSC0025887
taatcccgcaaat

SEQ ID NO: 103475 - DNA, 13 bp, Artificial Sequence
  Oligonucleotide for detection of SNP TSC0025888
agggaaagagtta

SEQ ID NO: 103476 - DNA, 13 bp, Artificial Sequence
  Oligonucleotide for detection of SNP TSC0025888
taactctttccct

SEQ ID NO: 103477 - DNA, 13 bp, Artificial Sequence
  Oligonucleotide for detection of SNP TSC0025888
agggaaggagtta

SEQ ID NO: 103478 - DNA, 13 bp, Artificial Sequence
  Oligonucleotide for detection of SNP TSC0025888
taactccttccct

SEQ ID NO: 103479 - DNA, 13 bp, Artificial Sequence
  Oligonucleotide for detection of SNP TSC0025889
agtataaggttgg

SEQ ID NO: 103480 - DNA, 13 bp, Artificial Sequence
  Oligonucleotide for detection of SNP TSC0025889
ccaaccttatact

SEQ ID NO: 103481 - DNA, 13 bp, Artificial Sequence
  Oligonucleotide for detection of SNP TSC0025889
agtatagggttgg

SEQ ID NO: 103482 - DNA, 13 bp, Artificial Sequence
  Oligonucleotide for detection of SNP TSC0025889
ccaaccctatact

SEQ ID NO: 103483 - DNA, 13 bp, Artificial Sequence
  Oligonucleotide for detection of SNP TSC0025892
tgttattggtgtt

SEQ ID NO: 103484 - DNA, 13 bp, Artificial Sequence
  Oligonucleotide for detection of SNP TSC0025892
aacaccaataaca

SEQ ID NO: 103485 - DNA, 13 bp, Artificial Sequence
  Oligonucleotide for detection of SNP TSC0025892
tgttatcggtgtt

SEQ ID NO: 103486 - DNA, 13 bp, Artificial Sequence
  Oligonucleotide for detection of SNP TSC0025892
aacaccgataaca

SEQ ID NO: 103487 - DNA, 13 bp, Artificial Sequence
  Oligonucleotide for detection of SNP TSC0025892
tgttattggcgtt

SEQ ID NO: 103488 - DNA, 13 bp, Artificial Sequence
  Oligonucleotide for detection of SNP TSC0025892
aacgccaataaca

SEQ ID NO: 103489 - DNA, 13 bp, Artificial Sequence
  Oligonucleotide for detection of SNP TSC0025892
tgttatcggcgtt

SEQ ID NO: 103490 - DNA, 13 bp, Artificial Sequence
  Oligonucleotide for detection of SNP TSC0025892
aacgccgataaca

SEQ ID NO: 103491 - DNA, 13 bp, Artificial Sequence
  Oligonucleotide for detection of SNP TSC0025892
aatgttggtagta

SEQ ID NO: 103492 - DNA, 13 bp, Artificial Sequence
  Oligonucleotide for detection of SNP TSC0025892
tactaccaacatt

SEQ ID NO: 103493 - DNA, 13 bp, Artificial Sequence
  Oligonucleotide for detection of SNP TSC0025892
aatgttagtagta

SEQ ID NO: 103494 - DNA, 13 bp, Artificial Sequence
  Oligonucleotide for detection of SNP TSC0025892
tactactaacatt

SEQ ID NO: 103495 - DNA, 13 bp, Artificial Sequence
  Oligonucleotide for detection of SNP TSC0025892
aacgttggtagta

SEQ ID NO: 103496 - DNA, 13 bp, Artificial Sequence
  Oligonucleotide for detection of SNP TSC0025892
tactaccaacgtt

SEQ ID NO: 103497 - DNA, 13 bp, Artificial Sequence
  Oligonucleotide for detection of SNP TSC0025892
aacgttagtagta

SEQ ID NO: 103498 - DNA, 13 bp, Artificial Sequence
  Oligonucleotide for detection of SNP TSC0025892
tactactaacgtt

SEQ ID NO: 103499 - DNA, 13 bp, Artificial Sequence
  Oligonucleotide for detection of SNP TSC0025892
aatgtcggtagta

SEQ ID NO: 103500 - DNA, 13 bp, Artificial Sequence
  Oligonucleotide for detection of SNP TSC0025892
tactaccgacatt

SEQ ID NO: 103501 - DNA, 13 bp, Artificial Sequence
  Oligonucleotide for detection of SNP TSC0025892
aacgtcggtagta

SEQ ID NO: 103502 - DNA, 13 bp, Artificial Sequence
  Oligonucleotide for detection of SNP TSC0025892
tactaccgacgtt

SEQ ID NO: 103503 - DNA, 13 bp, Artificial Sequence
  Oligonucleotide for detection of SNP TSC0025893
gttaggatgttga

SEQ ID NO: 103504 - DNA, 13 bp, Artificial Sequence
  Oligonucleotide for detection of SNP TSC0025893
tcaacatcctaac

SEQ ID NO: 103505 - DNA, 13 bp, Artificial Sequence
  Oligonucleotide for detection of SNP TSC0025893
gttagggtgttga

SEQ ID NO: 103506 - DNA, 13 bp, Artificial Sequence
  Oligonucleotide for detection of SNP TSC0025893
tcaacaccctaac

SEQ ID NO: 103507 - DNA, 13 bp, Artificial Sequence
  Oligonucleotide for detection of SNP TSC0025896
tgaaagtggtgtt

SEQ ID NO: 103508 - DNA, 13 bp, Artificial Sequence
  Oligonucleotide for detection of SNP TSC0025896
aacaccactttca

SEQ ID NO: 103509 - DNA, 13 bp, Artificial Sequence
  Oligonucleotide for detection of SNP TSC0025896
tgaaaggggtgtt

SEQ ID NO: 103510 - DNA, 13 bp, Artificial Sequence
  Oligonucleotide for detection of SNP TSC0025896
aacacccctttca

SEQ ID NO: 103511 - DNA, 13 bp, Artificial Sequence
  Oligonucleotide for detection of SNP TSC0025896
tgaaagcggtgtt

SEQ ID NO: 103512 - DNA, 13 bp, Artificial Sequence
  Oligonucleotide for detection of SNP TSC0025896
aacaccgctttca

SEQ ID NO: 103513 - DNA, 13 bp, Artificial Sequence
  Oligonucleotide for detection of SNP TSC0025896
tgaaaggggcgtt

SEQ ID NO: 103514 - DNA, 13 bp, Artificial Sequence
  Oligonucleotide for detection of SNP TSC0025896
aacgcccctttca

SEQ ID NO: 103515 - DNA, 13 bp, Artificial Sequence
  Oligonucleotide for detection of SNP TSC0025896
tgaaagtggcgtt

SEQ ID NO: 103516 - DNA, 13 bp, Artificial Sequence
  Oligonucleotide for detection of SNP TSC0025896
aacgccactttca

SEQ ID NO: 103517 - DNA, 13 bp, Artificial Sequence
  Oligonucleotide for detection of SNP TSC0025896
tgaaagcggcgtt

SEQ ID NO: 103518 - DNA, 13 bp, Artificial Sequence
  Oligonucleotide for detection of SNP TSC0025896
aacgccgctttca

SEQ ID NO: 103519 - DNA, 13 bp, Artificial Sequence
  Oligonucleotide for detection of SNP TSC0025896
agtgttgttttta

SEQ ID NO: 103520 - DNA, 13 bp, Artificial Sequence
  Oligonucleotide for detection of SNP TSC0025896
taaaaacaacact

SEQ ID NO: 103521 - DNA, 13 bp, Artificial Sequence
  Oligonucleotide for detection of SNP TSC0025896
agtgtttttttta

SEQ ID NO: 103522 - DNA, 13 bp, Artificial Sequence
  Oligonucleotide for detection of SNP TSC0025896
taaaaaaaacact

SEQ ID NO: 103523 - DNA, 13 bp, Artificial Sequence
  Oligonucleotide for detection of SNP TSC0025896
agcgttgttttta

SEQ ID NO: 103524 - DNA, 13 bp, Artificial Sequence
  Oligonucleotide for detection of SNP TSC0025896
taaaaacaacgct

SEQ ID NO: 103525 - DNA, 13 bp, Artificial Sequence
  Oligonucleotide for detection of SNP TSC0025896
agcgtttttttta

SEQ ID NO: 103526 - DNA, 13 bp, Artificial Sequence
  Oligonucleotide for detection of SNP TSC0025896
taaaaaaaacgct

SEQ ID NO: 103527 - DNA, 13 bp, Artificial Sequence
  Oligonucleotide for detection of SNP TSC0025896
agtgtcgttttta

SEQ ID NO: 103528 - DNA, 13 bp, Artificial Sequence
  Oligonucleotide for detection of SNP TSC0025896
taaaaacgacact

SEQ ID NO: 103529 - DNA, 13 bp, Artificial Sequence
  Oligonucleotide for detection of SNP TSC0025896
agcgtcgttttta

SEQ ID NO: 103530 - DNA, 13 bp, Artificial Sequence
  Oligonucleotide for detection of SNP TSC0025896
taaaaacgacgct

SEQ ID NO: 103531 - DNA, 13 bp, Artificial Sequence
  Oligonucleotide for detection of SNP TSC0025897
tgtgatttggata

SEQ ID NO: 103532 - DNA, 13 bp, Artificial Sequence
  Oligonucleotide for detection of SNP TSC0025897
tatccaaatcaca

SEQ ID NO: 103533 - DNA, 13 bp, Artificial Sequence
  Oligonucleotide for detection of SNP TSC0025897
tgtgatgtggata

SEQ ID NO: 103534 - DNA, 13 bp, Artificial Sequence
  Oligonucleotide for detection of SNP TSC0025897
tatccacatcaca

SEQ ID NO: 103535 - DNA, 13 bp, Artificial Sequence
  Oligonucleotide for detection of SNP TSC0025897
tgtgacgtggata

SEQ ID NO: 103536 - DNA, 13 bp, Artificial Sequence
  Oligonucleotide for detection of SNP TSC0025897
tatccacgtcaca

SEQ ID NO: 103537 - DNA, 13 bp, Artificial Sequence
  Oligonucleotide for detection of SNP TSC0025897
tgtttaggttata

SEQ ID NO: 103538 - DNA, 13 bp, Artificial Sequence
  Oligonucleotide for detection of SNP TSC0025897
tataacctaaaca

SEQ ID NO: 103539 - DNA, 13 bp, Artificial Sequence
  Oligonucleotide for detection of SNP TSC0025897
tgtttatgttata

SEQ ID NO: 103540 - DNA, 13 bp, Artificial Sequence
  Oligonucleotide for detection of SNP TSC0025897
tataacataaaca

SEQ ID NO: 103541 - DNA, 13 bp, Artificial Sequence
  Oligonucleotide for detection of SNP TSC0025897
tgtttacgttata

SEQ ID NO: 103542 - DNA, 13 bp, Artificial Sequence
  Oligonucleotide for detection of SNP TSC0025897
tataacgtaaaca

SEQ ID NO: 103543 - DNA, 13 bp, Artificial Sequence
  Oligonucleotide for detection of SNP TSC0025899
tttatggttataa

SEQ ID NO: 103544 - DNA, 13 bp, Artificial Sequence
  Oligonucleotide for detection of SNP TSC0025899
ttataaccataaa

SEQ ID NO: 103545 - DNA, 13 bp, Artificial Sequence
  Oligonucleotide for detection of SNP TSC0025899
tttatgattataa

SEQ ID NO: 103546 - DNA, 13 bp, Artificial Sequence
  Oligonucleotide for detection of SNP TSC0025899
ttataatcataaa

SEQ ID NO: 103547 - DNA, 13 bp, Artificial Sequence
  Oligonucleotide for detection of SNP TSC0025900
gtgtttataggty

SEQ ID NO: 103548 - DNA, 13 bp, Artificial Sequence
  Oligonucleotide for detection of SNP TSC0025900
racctataaacac

SEQ ID NO: 103549 - DNA, 13 bp, Artificial Sequence
  Oligonucleotide for detection of SNP TSC0025900
gtgtttgtaggty

SEQ ID NO: 103550 - DNA, 13 bp, Artificial Sequence
  Oligonucleotide for detection of SNP TSC0025900
racctacaaacac

SEQ ID NO: 103551 - DNA, 13 bp, Artificial Sequence
  Oligonucleotide for detection of SNP TSC0025903
atgttttgagtgy

SEQ ID NO: 103552 - DNA, 13 bp, Artificial Sequence
  Oligonucleotide for detection of SNP TSC0025903
rcactcaaaacat

SEQ ID NO: 103553 - DNA, 13 bp, Artificial Sequence
  Oligonucleotide for detection of SNP TSC0025903
atgtttcgagtgy

SEQ ID NO: 103554 - DNA, 13 bp, Artificial Sequence
  Oligonucleotide for detection of SNP TSC0025903
rcactcgaaacat

SEQ ID NO: 103555 - DNA, 13 bp, Artificial Sequence
  Oligonucleotide for detection of SNP TSC0025903
gtatttggaatat

SEQ ID NO: 103556 - DNA, 13 bp, Artificial Sequence
  Oligonucleotide for detection of SNP TSC0025903
atattccaaatac

SEQ ID NO: 103557 - DNA, 13 bp, Artificial Sequence
  Oligonucleotide for detection of SNP TSC0025903
gtatttagaatat

SEQ ID NO: 103558 - DNA, 13 bp, Artificial Sequence
  Oligonucleotide for detection of SNP TSC0025903
atattctaaatac

SEQ ID NO: 103559 - DNA, 13 bp, Artificial Sequence
  Oligonucleotide for detection of SNP TSC0025903
gtattcggaatat

SEQ ID NO: 103560 - DNA, 13 bp, Artificial Sequence
  Oligonucleotide for detection of SNP TSC0025903
atattccgaatac

SEQ ID NO: 103561 - DNA, 13 bp, Artificial Sequence
  Oligonucleotide for detection of SNP TSC0025904
aagtttgagatta

SEQ ID NO: 103562 - DNA, 13 bp, Artificial Sequence
  Oligonucleotide for detection of SNP TSC0025904
taatctcaaactt

SEQ ID NO: 103563 - DNA, 13 bp, Artificial Sequence
  Oligonucleotide for detection of SNP TSC0025904
aagtttaagatta

SEQ ID NO: 103564 - DNA, 13 bp, Artificial Sequence
  Oligonucleotide for detection of SNP TSC0025904
taatcttaaactt

SEQ ID NO: 103565 - DNA, 13 bp, Artificial Sequence
  Oligonucleotide for detection of SNP TSC0025904
aagttcgagatta

SEQ ID NO: 103566 - DNA, 13 bp, Artificial Sequence
  Oligonucleotide for detection of SNP TSC0025904
taatctcgaactt

SEQ ID NO: 103567 - DNA, 13 bp, Artificial Sequence
  Oligonucleotide for detection of SNP TSC0025906
tttatgggtggag

SEQ ID NO: 103568 - DNA, 13 bp, Artificial Sequence
  Oligonucleotide for detection of SNP TSC0025906
ctccacccataaa

SEQ ID NO: 103569 - DNA, 13 bp, Artificial Sequence
  Oligonucleotide for detection of SNP TSC0025906
tttatgagtggag

SEQ ID NO: 103570 - DNA, 13 bp, Artificial Sequence
  Oligonucleotide for detection of SNP TSC0025906
ctccactcataaa

SEQ ID NO: 103571 - DNA, 13 bp, Artificial Sequence
  Oligonucleotide for detection of SNP TSC0025906
tttacgggtggag

SEQ ID NO: 103572 - DNA, 13 bp, Artificial Sequence
  Oligonucleotide for detection of SNP TSC0025906
ctccacccgtaaa

SEQ ID NO: 103573 - DNA, 13 bp, Artificial Sequence
  Oligonucleotide for detection of SNP TSC0025906
tttacgagtggag

SEQ ID NO: 103574 - DNA, 13 bp, Artificial Sequence
  Oligonucleotide for detection of SNP TSC0025906
ctccactcgtaaa

SEQ ID NO: 103575 - DNA, 13 bp, Artificial Sequence
  Oligonucleotide for detection of SNP TSC0025908
tttattatttttg

SEQ ID NO: 103576 - DNA, 13 bp, Artificial Sequence
  Oligonucleotide for detection of SNP TSC0025908
caaaaataataaa

SEQ ID NO: 103577 - DNA, 13 bp, Artificial Sequence
  Oligonucleotide for detection of SNP TSC0025908
tttattgtttttg

SEQ ID NO: 103578 - DNA, 13 bp, Artificial Sequence
  Oligonucleotide for detection of SNP TSC0025908
caaaaacaataaa

SEQ ID NO: 103579 - DNA, 13 bp, Artificial Sequence
  Oligonucleotide for detection of SNP TSC0025908
tttatcgtttttg

SEQ ID NO: 103580 - DNA, 13 bp, Artificial Sequence
  Oligonucleotide for detection of SNP TSC0025908
caaaaacgataaa

SEQ ID NO: 103581 - DNA, 13 bp, Artificial Sequence
  Oligonucleotide for detection of SNP TSC0025908
taaaagtgatgga

SEQ ID NO: 103582 - DNA, 13 bp, Artificial Sequence
  Oligonucleotide for detection of SNP TSC0025908
tccatcactttta

SEQ ID NO: 103583 - DNA, 13 bp, Artificial Sequence
  Oligonucleotide for detection of SNP TSC0025908
taaaagcgatgga

SEQ ID NO: 103584 - DNA, 13 bp, Artificial Sequence
  Oligonucleotide for detection of SNP TSC0025908
tccatcgctttta

SEQ ID NO: 103585 - DNA, 13 bp, Artificial Sequence
  Oligonucleotide for detection of SNP TSC0025909
tattagatagtta

SEQ ID NO: 103586 - DNA, 13 bp, Artificial Sequence
  Oligonucleotide for detection of SNP TSC0025909
taactatctaata

SEQ ID NO: 103587 - DNA, 13 bp, Artificial Sequence
  Oligonucleotide for detection of SNP TSC0025909
tattaggtagtta

SEQ ID NO: 103588 - DNA, 13 bp, Artificial Sequence
  Oligonucleotide for detection of SNP TSC0025909
taactacctaata

SEQ ID NO: 103589 - DNA, 13 bp, Artificial Sequence
  Oligonucleotide for detection of SNP TSC0025910
ggaaataaaagag

SEQ ID NO: 103590 - DNA, 13 bp, Artificial Sequence
  Oligonucleotide for detection of SNP TSC0025910
ctcttttatttcc

SEQ ID NO: 103591 - DNA, 13 bp, Artificial Sequence
  Oligonucleotide for detection of SNP TSC0025910
ggaaatgaaagag

SEQ ID NO: 103592 - DNA, 13 bp, Artificial Sequence
  Oligonucleotide for detection of SNP TSC0025910
ctctttcatttcc

SEQ ID NO: 103593 - DNA, 13 bp, Artificial Sequence
  Oligonucleotide for detection of SNP TSC0025910
ggaaacgaaagag

SEQ ID NO: 103594 - DNA, 13 bp, Artificial Sequence
  Oligonucleotide for detection of SNP TSC0025910
ctctttcgtttcc

SEQ ID NO: 103595 - DNA, 13 bp, Artificial Sequence
  Oligonucleotide for detection of SNP TSC0025911
ggtagtaggtatt

SEQ ID NO: 103596 - DNA, 13 bp, Artificial Sequence
  Oligonucleotide for detection of SNP TSC0025911
aatacctactacc

SEQ ID NO: 103597 - DNA, 13 bp, Artificial Sequence
  Oligonucleotide for detection of SNP TSC0025911
ggtagtgggtatt

SEQ ID NO: 103598 - DNA, 13 bp, Artificial Sequence
  Oligonucleotide for detection of SNP TSC0025911
aatacccactacc

SEQ ID NO: 103599 - DNA, 13 bp, Artificial Sequence
  Oligonucleotide for detection of SNP TSC0025911
ggtagcgggtatt

SEQ ID NO: 103600 - DNA, 13 bp, Artificial Sequence
  Oligonucleotide for detection of SNP TSC0025911
aatacccgctacc

SEQ ID NO: 103601 - DNA, 13 bp, Artificial Sequence
  Oligonucleotide for detection of SNP TSC0025911
agtgtttgttaty

SEQ ID NO: 103602 - DNA, 13 bp, Artificial Sequence
  Oligonucleotide for detection of SNP TSC0025911
rataacaaacact

SEQ ID NO: 103603 - DNA, 13 bp, Artificial Sequence
  Oligonucleotide for detection of SNP TSC0025911
agtgttcgttaty

SEQ ID NO: 103604 - DNA, 13 bp, Artificial Sequence
  Oligonucleotide for detection of SNP TSC0025911
rataacgaacact

SEQ ID NO: 103605 - DNA, 13 bp, Artificial Sequence
  Oligonucleotide for detection of SNP TSC0025914
tttatttggagta

SEQ ID NO: 103606 - DNA, 13 bp, Artificial Sequence
  Oligonucleotide for detection of SNP TSC0025914
tactccaaataaa

SEQ ID NO: 103607 - DNA, 13 bp, Artificial Sequence
  Oligonucleotide for detection of SNP TSC0025914
tttattcggagta

SEQ ID NO: 103608 - DNA, 13 bp, Artificial Sequence
  Oligonucleotide for detection of SNP TSC0025914
tactccgaataaa

SEQ ID NO: 103609 - DNA, 13 bp, Artificial Sequence
  Oligonucleotide for detection of SNP TSC0025915
aataaagtttata

SEQ ID NO: 103610 - DNA, 13 bp, Artificial Sequence
  Oligonucleotide for detection of SNP TSC0025915
tataaactttatt

SEQ ID NO: 103611 - DNA, 13 bp, Artificial Sequence
  Oligonucleotide for detection of SNP TSC0025915
aataaaatttata

SEQ ID NO: 103612 - DNA, 13 bp, Artificial Sequence
  Oligonucleotide for detection of SNP TSC0025915
tataaattttatt

SEQ ID NO: 103613 - DNA, 13 bp, Artificial Sequence
  Oligonucleotide for detection of SNP TSC0025924
aggaaatgttttg

SEQ ID NO: 103614 - DNA, 13 bp, Artificial Sequence
  Oligonucleotide for detection of SNP TSC0025924
caaaacatttcct

SEQ ID NO: 103615 - DNA, 13 bp, Artificial Sequence
  Oligonucleotide for detection of SNP TSC0025924
aggaaacgttttg

SEQ ID NO: 103616 - DNA, 13 bp, Artificial Sequence
  Oligonucleotide for detection of SNP TSC0025924
caaaacgtttcct

SEQ ID NO: 103617 - DNA, 13 bp, Artificial Sequence
  Oligonucleotide for detection of SNP TSC0025924
taaagtatttttt

SEQ ID NO: 103618 - DNA, 13 bp, Artificial Sequence
  Oligonucleotide for detection of SNP TSC0025924
aaaaaatacttta

SEQ ID NO: 103619 - DNA, 13 bp, Artificial Sequence
  Oligonucleotide for detection of SNP TSC0025926
ttatgtatataat

SEQ ID NO: 103620 - DNA, 13 bp, Artificial Sequence
  Oligonucleotide for detection of SNP TSC0025926
attatatacataa

SEQ ID NO: 103621 - DNA, 13 bp, Artificial Sequence
  Oligonucleotide for detection of SNP TSC0025926
ttatgtttataat

SEQ ID NO: 103622 - DNA, 13 bp, Artificial Sequence
  Oligonucleotide for detection of SNP TSC0025926
attataaacataa

SEQ ID NO: 103623 - DNA, 13 bp, Artificial Sequence
  Oligonucleotide for detection of SNP TSC0025926
attatgtgtatga

SEQ ID NO: 103624 - DNA, 13 bp, Artificial Sequence
  Oligonucleotide for detection of SNP TSC0025926
tcatacacataat

SEQ ID NO: 103625 - DNA, 13 bp, Artificial Sequence
  Oligonucleotide for detection of SNP TSC0025926
attatgagtatga

SEQ ID NO: 103626 - DNA, 13 bp, Artificial Sequence
  Oligonucleotide for detection of SNP TSC0025926
tcatactcataat

SEQ ID NO: 103627 - DNA, 13 bp, Artificial Sequence
  Oligonucleotide for detection of SNP TSC0025927
aaggtaatttgtt

SEQ ID NO: 103628 - DNA, 13 bp, Artificial Sequence
  Oligonucleotide for detection of SNP TSC0025927
aacaaattacctt

SEQ ID NO: 103629 - DNA, 13 bp, Artificial Sequence
  Oligonucleotide for detection of SNP TSC0025927
aaggtattttgtt

SEQ ID NO: 103630 - DNA, 13 bp, Artificial Sequence
  Oligonucleotide for detection of SNP TSC0025927
aacaaaatacctt

SEQ ID NO: 103631 - DNA, 13 bp, Artificial Sequence
  Oligonucleotide for detection of SNP TSC0025927
aataaattgtttt

SEQ ID NO: 103632 - DNA, 13 bp, Artificial Sequence
  Oligonucleotide for detection of SNP TSC0025927
aaaacaatttatt

SEQ ID NO: 103633 - DNA, 13 bp, Artificial Sequence
  Oligonucleotide for detection of SNP TSC0025927
aataaaatgtttt

SEQ ID NO: 103634 - DNA, 13 bp, Artificial Sequence
  Oligonucleotide for detection of SNP TSC0025927
aaaacattttatt

SEQ ID NO: 103635 - DNA, 13 bp, Artificial Sequence
  Oligonucleotide for detection of SNP TSC0025930
aattaaattgttt

SEQ ID NO: 103636 - DNA, 13 bp, Artificial Sequence
  Oligonucleotide for detection of SNP TSC0025930
aaacaatttaatt

SEQ ID NO: 103637 - DNA, 13 bp, Artificial Sequence
  Oligonucleotide for detection of SNP TSC0025930
aattaagttgttt

SEQ ID NO: 103638 - DNA, 13 bp, Artificial Sequence
  Oligonucleotide for detection of SNP TSC0025930
aaacaacttaatt

SEQ ID NO: 103639 - DNA, 13 bp, Artificial Sequence
  Oligonucleotide for detection of SNP TSC0025931
tttttaatgagga

SEQ ID NO: 103640 - DNA, 13 bp, Artificial Sequence
  Oligonucleotide for detection of SNP TSC0025931
tcctcattaaaaa

SEQ ID NO: 103641 - DNA, 13 bp, Artificial Sequence
  Oligonucleotide for detection of SNP TSC0025931
tttttagtgagga

SEQ ID NO: 103642 - DNA, 13 bp, Artificial Sequence
  Oligonucleotide for detection of SNP TSC0025931
tcctcactaaaaa

SEQ ID NO: 103643 - DNA, 13 bp, Artificial Sequence
  Oligonucleotide for detection of SNP TSC0025932
atattaggttttt

SEQ ID NO: 103644 - DNA, 13 bp, Artificial Sequence
  Oligonucleotide for detection of SNP TSC0025932
aaaaacctaatat

SEQ ID NO: 103645 - DNA, 13 bp, Artificial Sequence
  Oligonucleotide for detection of SNP TSC0025932
atattatgttttt

SEQ ID NO: 103646 - DNA, 13 bp, Artificial Sequence
  Oligonucleotide for detection of SNP TSC0025932
aaaaacataatat

SEQ ID NO: 103647 - DNA, 13 bp, Artificial Sequence
  Oligonucleotide for detection of SNP TSC0025932
aggaatttaatat

SEQ ID NO: 103648 - DNA, 13 bp, Artificial Sequence
  Oligonucleotide for detection of SNP TSC0025932
atattaaattcct

SEQ ID NO: 103649 - DNA, 13 bp, Artificial Sequence
  Oligonucleotide for detection of SNP TSC0025932
aggaatataatat

SEQ ID NO: 103650 - DNA, 13 bp, Artificial Sequence
  Oligonucleotide for detection of SNP TSC0025932
atattatattcct

SEQ ID NO: 103651 - DNA, 13 bp, Artificial Sequence
  Oligonucleotide for detection of SNP TSC0025933
gtgttttgtgtgt

SEQ ID NO: 103652 - DNA, 13 bp, Artificial Sequence
  Oligonucleotide for detection of SNP TSC0025933
acacacaaaacac

SEQ ID NO: 103653 - DNA, 13 bp, Artificial Sequence
  Oligonucleotide for detection of SNP TSC0025933
gtgtttcgtgtgt

SEQ ID NO: 103654 - DNA, 13 bp, Artificial Sequence
  Oligonucleotide for detection of SNP TSC0025933
acacacgaaacac

SEQ ID NO: 103655 - DNA, 13 bp, Artificial Sequence
  Oligonucleotide for detection of SNP TSC0025933
gtgttttgcgtgt

SEQ ID NO: 103656 - DNA, 13 bp, Artificial Sequence
  Oligonucleotide for detection of SNP TSC0025933
acacgcaaaacac

SEQ ID NO: 103657 - DNA, 13 bp, Artificial Sequence
  Oligonucleotide for detection of SNP TSC0025933
gtgtttcgcgtgt

SEQ ID NO: 103658 - DNA, 13 bp, Artificial Sequence
  Oligonucleotide for detection of SNP TSC0025933
acacgcgaaacac

SEQ ID NO: 103659 - DNA, 13 bp, Artificial Sequence
  Oligonucleotide for detection of SNP TSC0025933
atatgtggggtay

SEQ ID NO: 103660 - DNA, 13 bp, Artificial Sequence
  Oligonucleotide for detection of SNP TSC0025933
rtaccccacatat

SEQ ID NO: 103661 - DNA, 13 bp, Artificial Sequence
  Oligonucleotide for detection of SNP TSC0025933
atatgtagggtay

SEQ ID NO: 103662 - DNA, 13 bp, Artificial Sequence
  Oligonucleotide for detection of SNP TSC0025933
rtaccctacatat

SEQ ID NO: 103663 - DNA, 13 bp, Artificial Sequence
  Oligonucleotide for detection of SNP TSC0025933
atacgtggggtay

SEQ ID NO: 103664 - DNA, 13 bp, Artificial Sequence
  Oligonucleotide for detection of SNP TSC0025933
rtaccccacgtat

SEQ ID NO: 103665 - DNA, 13 bp, Artificial Sequence
  Oligonucleotide for detection of SNP TSC0025933
atacgtagggtay

SEQ ID NO: 103666 - DNA, 13 bp, Artificial Sequence
  Oligonucleotide for detection of SNP TSC0025933
rtaccctacgtat

SEQ ID NO: 103667 - DNA, 13 bp, Artificial Sequence
  Oligonucleotide for detection of SNP TSC0025933
atatgcggggtay

SEQ ID NO: 103668 - DNA, 13 bp, Artificial Sequence
  Oligonucleotide for detection of SNP TSC0025933
rtaccccgcatat

SEQ ID NO: 103669 - DNA, 13 bp, Artificial Sequence
  Oligonucleotide for detection of SNP TSC0025933
atacgcggggtay

SEQ ID NO: 103670 - DNA, 13 bp, Artificial Sequence
  Oligonucleotide for detection of SNP TSC0025933
rtaccccgcgtat

SEQ ID NO: 103671 - DNA, 13 bp, Artificial Sequence
  Oligonucleotide for detection of SNP TSC0025934
tagagatgggaga

SEQ ID NO: 103672 - DNA, 13 bp, Artificial Sequence
  Oligonucleotide for detection of SNP TSC0025934
tctcccatctcta

SEQ ID NO: 103673 - DNA, 13 bp, Artificial Sequence
  Oligonucleotide for detection of SNP TSC0025934
tagagacgggaga

SEQ ID NO: 103674 - DNA, 13 bp, Artificial Sequence
  Oligonucleotide for detection of SNP TSC0025934
tctcccgtctcta

SEQ ID NO: 103675 - DNA, 13 bp, Artificial Sequence
  Oligonucleotide for detection of SNP TSC0025935
gtatttggataaa

SEQ ID NO: 103676 - DNA, 13 bp, Artificial Sequence
  Oligonucleotide for detection of SNP TSC0025935
tttatccaaatac

SEQ ID NO: 103677 - DNA, 13 bp, Artificial Sequence
  Oligonucleotide for detection of SNP TSC0025935
gtattttgataaa

SEQ ID NO: 103678 - DNA, 13 bp, Artificial Sequence
  Oligonucleotide for detection of SNP TSC0025935
tttatcaaaatac

SEQ ID NO: 103679 - DNA, 13 bp, Artificial Sequence
  Oligonucleotide for detection of SNP TSC0025935
tttattaaaatgy

SEQ ID NO: 103680 - DNA, 13 bp, Artificial Sequence
  Oligonucleotide for detection of SNP TSC0025935
rcattttaataaa

SEQ ID NO: 103681 - DNA, 13 bp, Artificial Sequence
  Oligonucleotide for detection of SNP TSC0025936
gatagtgaagagy

SEQ ID NO: 103682 - DNA, 13 bp, Artificial Sequence
  Oligonucleotide for detection of SNP TSC0025936
rctcttcactatc

SEQ ID NO: 103683 - DNA, 13 bp, Artificial Sequence
  Oligonucleotide for detection of SNP TSC0025936
gatagtaaagagy

SEQ ID NO: 103684 - DNA, 13 bp, Artificial Sequence
  Oligonucleotide for detection of SNP TSC0025936
rctctttactatc

SEQ ID NO: 103685 - DNA, 13 bp, Artificial Sequence
  Oligonucleotide for detection of SNP TSC0025937
tgtattgtaattg

SEQ ID NO: 103686 - DNA, 13 bp, Artificial Sequence
  Oligonucleotide for detection of SNP TSC0025937
caattacaataca

SEQ ID NO: 103687 - DNA, 13 bp, Artificial Sequence
  Oligonucleotide for detection of SNP TSC0025937
tgtattataattg

SEQ ID NO: 103688 - DNA, 13 bp, Artificial Sequence
  Oligonucleotide for detection of SNP TSC0025937
caattataataca

SEQ ID NO: 103689 - DNA, 13 bp, Artificial Sequence
  Oligonucleotide for detection of SNP TSC0025937
cgtattgtaattg

SEQ ID NO: 103690 - DNA, 13 bp, Artificial Sequence
  Oligonucleotide for detection of SNP TSC0025937
caattacaatacg

SEQ ID NO: 103691 - DNA, 13 bp, Artificial Sequence
  Oligonucleotide for detection of SNP TSC0025937
cgtattataattg

SEQ ID NO: 103692 - DNA, 13 bp, Artificial Sequence
  Oligonucleotide for detection of SNP TSC0025937
caattataatacg

SEQ ID NO: 103693 - DNA, 13 bp, Artificial Sequence
  Oligonucleotide for detection of SNP TSC0025938
ataatatgtgtta

SEQ ID NO: 103694 - DNA, 13 bp, Artificial Sequence
  Oligonucleotide for detection of SNP TSC0025938
taacacatattat

SEQ ID NO: 103695 - DNA, 13 bp, Artificial Sequence
  Oligonucleotide for detection of SNP TSC0025938
ataatacgtgtta

SEQ ID NO: 103696 - DNA, 13 bp, Artificial Sequence
  Oligonucleotide for detection of SNP TSC0025938
taacacgtattat

SEQ ID NO: 103697 - DNA, 13 bp, Artificial Sequence
  Oligonucleotide for detection of SNP TSC0025938
tgatatgtattgt

SEQ ID NO: 103698 - DNA, 13 bp, Artificial Sequence
  Oligonucleotide for detection of SNP TSC0025938
acaatacatatca

SEQ ID NO: 103699 - DNA, 13 bp, Artificial Sequence
  Oligonucleotide for detection of SNP TSC0025938
tgatatatattgt

SEQ ID NO: 103700 - DNA, 13 bp, Artificial Sequence
  Oligonucleotide for detection of SNP TSC0025938
acaatatatatca

SEQ ID NO: 103701 - DNA, 13 bp, Artificial Sequence
  Oligonucleotide for detection of SNP TSC0025938
tgatacgtattgt

SEQ ID NO: 103702 - DNA, 13 bp, Artificial Sequence
  Oligonucleotide for detection of SNP TSC0025938
acaatacgtatca

SEQ ID NO: 103703 - DNA, 13 bp, Artificial Sequence
  Oligonucleotide for detection of SNP TSC0025939
ttaataatttatt

SEQ ID NO: 103704 - DNA, 13 bp, Artificial Sequence
  Oligonucleotide for detection of SNP TSC0025939
aataaattattaa

SEQ ID NO: 103705 - DNA, 13 bp, Artificial Sequence
  Oligonucleotide for detection of SNP TSC0025939
ttaatagtttatt

SEQ ID NO: 103706 - DNA, 13 bp, Artificial Sequence
  Oligonucleotide for detection of SNP TSC0025939
aataaactattaa

SEQ ID NO: 103707 - DNA, 13 bp, Artificial Sequence
  Oligonucleotide for detection of SNP TSC0025940
aggttagtgtgat

SEQ ID NO: 103708 - DNA, 13 bp, Artificial Sequence
  Oligonucleotide for detection of SNP TSC0025940
atcacactaacct

SEQ ID NO: 103709 - DNA, 13 bp, Artificial Sequence
  Oligonucleotide for detection of SNP TSC0025940
aggttaatgtgat

SEQ ID NO: 103710 - DNA, 13 bp, Artificial Sequence
  Oligonucleotide for detection of SNP TSC0025940
atcacattaacct

SEQ ID NO: 103711 - DNA, 13 bp, Artificial Sequence
  Oligonucleotide for detection of SNP TSC0025940
aggttagcgtgat

SEQ ID NO: 103712 - DNA, 13 bp, Artificial Sequence
  Oligonucleotide for detection of SNP TSC0025940
atcacgctaacct

SEQ ID NO: 103713 - DNA, 13 bp, Artificial Sequence
  Oligonucleotide for detection of SNP TSC0025940
aggttaacgtgat

SEQ ID NO: 103714 - DNA, 13 bp, Artificial Sequence
  Oligonucleotide for detection of SNP TSC0025940
atcacgttaacct

SEQ ID NO: 103715 - DNA, 13 bp, Artificial Sequence
  Oligonucleotide for detection of SNP TSC0025941
ttatgtattattt

SEQ ID NO: 103716 - DNA, 13 bp, Artificial Sequence
  Oligonucleotide for detection of SNP TSC0025941
aaataatacataa

SEQ ID NO: 103717 - DNA, 13 bp, Artificial Sequence
  Oligonucleotide for detection of SNP TSC0025941
ttatgtgttattt

SEQ ID NO: 103718 - DNA, 13 bp, Artificial Sequence
  Oligonucleotide for detection of SNP TSC0025941
aaataacacataa

SEQ ID NO: 103719 - DNA, 13 bp, Artificial Sequence
  Oligonucleotide for detection of SNP TSC0025942
tttaaagaataga

SEQ ID NO: 103720 - DNA, 13 bp, Artificial Sequence
  Oligonucleotide for detection of SNP TSC0025942
tctattctttaaa

SEQ ID NO: 103721 - DNA, 13 bp, Artificial Sequence
  Oligonucleotide for detection of SNP TSC0025942
tttaaaaaataga

SEQ ID NO: 103722 - DNA, 13 bp, Artificial Sequence
  Oligonucleotide for detection of SNP TSC0025942
tctattttttaaa

SEQ ID NO: 103723 - DNA, 13 bp, Artificial Sequence
  Oligonucleotide for detection of SNP TSC0025943
ttagattgggtga

SEQ ID NO: 103724 - DNA, 13 bp, Artificial Sequence
  Oligonucleotide for detection of SNP TSC0025943
tcacccaatctaa

SEQ ID NO: 103725 - DNA, 13 bp, Artificial Sequence
  Oligonucleotide for detection of SNP TSC0025943
ttagatcgggtga

SEQ ID NO: 103726 - DNA, 13 bp, Artificial Sequence
  Oligonucleotide for detection of SNP TSC0025943
tcacccgatctaa

SEQ ID NO: 103727 - DNA, 13 bp, Artificial Sequence
  Oligonucleotide for detection of SNP TSC0025943
ttagattgggcga

SEQ ID NO: 103728 - DNA, 13 bp, Artificial Sequence
  Oligonucleotide for detection of SNP TSC0025943
tcgcccaatctaa

SEQ ID NO: 103729 - DNA, 13 bp, Artificial Sequence
  Oligonucleotide for detection of SNP TSC0025943
ttagatcgggcga

SEQ ID NO: 103730 - DNA, 13 bp, Artificial Sequence
  Oligonucleotide for detection of SNP TSC0025943
tcgcccgatctaa

SEQ ID NO: 103731 - DNA, 13 bp, Artificial Sequence
  Oligonucleotide for detection of SNP TSC0025943
ttgtttgatttag

SEQ ID NO: 103732 - DNA, 13 bp, Artificial Sequence
  Oligonucleotide for detection of SNP TSC0025943
ctaaatcaaacaa

SEQ ID NO: 103733 - DNA, 13 bp, Artificial Sequence
  Oligonucleotide for detection of SNP TSC0025943
tcgtttgatttag

SEQ ID NO: 103734 - DNA, 13 bp, Artificial Sequence
  Oligonucleotide for detection of SNP TSC0025943
ctaaatcaaacga

SEQ ID NO: 103735 - DNA, 13 bp, Artificial Sequence
  Oligonucleotide for detection of SNP TSC0025943
tcgtttaatttag

SEQ ID NO: 103736 - DNA, 13 bp, Artificial Sequence
  Oligonucleotide for detection of SNP TSC0025943
ctaaattaaacga

SEQ ID NO: 103737 - DNA, 13 bp, Artificial Sequence
  Oligonucleotide for detection of SNP TSC0025943
ttgttcgatttag

SEQ ID NO: 103738 - DNA, 13 bp, Artificial Sequence
  Oligonucleotide for detection of SNP TSC0025943
ctaaatcgaacaa

SEQ ID NO: 103739 - DNA, 13 bp, Artificial Sequence
  Oligonucleotide for detection of SNP TSC0025943
tcgttcgatttag

SEQ ID NO: 103740 - DNA, 13 bp, Artificial Sequence
  Oligonucleotide for detection of SNP TSC0025943
ctaaatcgaacga

SEQ ID NO: 103741 - DNA, 13 bp, Artificial Sequence
  Oligonucleotide for detection of SNP TSC0025944
ttgtgtgtagtga

SEQ ID NO: 103742 - DNA, 13 bp, Artificial Sequence
  Oligonucleotide for detection of SNP TSC0025944
tcactacacacaa

SEQ ID NO: 103743 - DNA, 13 bp, Artificial Sequence
  Oligonucleotide for detection of SNP TSC0025944
ttgtgtatagtga

SEQ ID NO: 103744 - DNA, 13 bp, Artificial Sequence
  Oligonucleotide for detection of SNP TSC0025944
tcactatacacaa

SEQ ID NO: 103745 - DNA, 13 bp, Artificial Sequence
  Oligonucleotide for detection of SNP TSC0025945
ggaagatagagta

SEQ ID NO: 103746 - DNA, 13 bp, Artificial Sequence
  Oligonucleotide for detection of SNP TSC0025945
tactctatcttcc

SEQ ID NO: 103747 - DNA, 13 bp, Artificial Sequence
  Oligonucleotide for detection of SNP TSC0025945
ggaagagagagta

SEQ ID NO: 103748 - DNA, 13 bp, Artificial Sequence
  Oligonucleotide for detection of SNP TSC0025945
tactctctcttcc

SEQ ID NO: 103749 - DNA, 13 bp, Artificial Sequence
  Oligonucleotide for detection of SNP TSC0025946
ggtgatattttty

SEQ ID NO: 103750 - DNA, 13 bp, Artificial Sequence
  Oligonucleotide for detection of SNP TSC0025946
raaaaatatcacc

SEQ ID NO: 103751 - DNA, 13 bp, Artificial Sequence
  Oligonucleotide for detection of SNP TSC0025946
ggtgattttttty

SEQ ID NO: 103752 - DNA, 13 bp, Artificial Sequence
  Oligonucleotide for detection of SNP TSC0025946
raaaaaaatcacc

SEQ ID NO: 103753 - DNA, 13 bp, Artificial Sequence
  Oligonucleotide for detection of SNP TSC0025946
ggaaggtgttaty

SEQ ID NO: 103754 - DNA, 13 bp, Artificial Sequence
  Oligonucleotide for detection of SNP TSC0025946
rataacaccttcc

SEQ ID NO: 103755 - DNA, 13 bp, Artificial Sequence
  Oligonucleotide for detection of SNP TSC0025946
ggaaggggttaty

SEQ ID NO: 103756 - DNA, 13 bp, Artificial Sequence
  Oligonucleotide for detection of SNP TSC0025946
rataaccccttcc

SEQ ID NO: 103757 - DNA, 13 bp, Artificial Sequence
  Oligonucleotide for detection of SNP TSC0025947
taggaagggtaty

SEQ ID NO: 103758 - DNA, 13 bp, Artificial Sequence
  Oligonucleotide for detection of SNP TSC0025947
ratacccttccta

SEQ ID NO: 103759 - DNA, 13 bp, Artificial Sequence
  Oligonucleotide for detection of SNP TSC0025947
taggaaaggtaty

SEQ ID NO: 103760 - DNA, 13 bp, Artificial Sequence
  Oligonucleotide for detection of SNP TSC0025947
ratacctttccta

SEQ ID NO: 103761 - DNA, 13 bp, Artificial Sequence
  Oligonucleotide for detection of SNP TSC0025952
gttagtgttttga

SEQ ID NO: 103762 - DNA, 13 bp, Artificial Sequence
  Oligonucleotide for detection of SNP TSC0025952
tcaaaacactaac

SEQ ID NO: 103763 - DNA, 13 bp, Artificial Sequence
  Oligonucleotide for detection of SNP TSC0025952
gttagtattttga

SEQ ID NO: 103764 - DNA, 13 bp, Artificial Sequence
  Oligonucleotide for detection of SNP TSC0025952
tcaaaatactaac

SEQ ID NO: 103765 - DNA, 13 bp, Artificial Sequence
  Oligonucleotide for detection of SNP TSC0025952
gttagtgtttcga

SEQ ID NO: 103766 - DNA, 13 bp, Artificial Sequence
  Oligonucleotide for detection of SNP TSC0025952
tcgaaacactaac

SEQ ID NO: 103767 - DNA, 13 bp, Artificial Sequence
  Oligonucleotide for detection of SNP TSC0025952
gttagtatttcga

SEQ ID NO: 103768 - DNA, 13 bp, Artificial Sequence
  Oligonucleotide for detection of SNP TSC0025952
tcgaaatactaac

SEQ ID NO: 103769 - DNA, 13 bp, Artificial Sequence
  Oligonucleotide for detection of SNP TSC0025953
taagatatgaaay

SEQ ID NO: 103770 - DNA, 13 bp, Artificial Sequence
  Oligonucleotide for detection of SNP TSC0025953
rtttcatatctta

SEQ ID NO: 103771 - DNA, 13 bp, Artificial Sequence
  Oligonucleotide for detection of SNP TSC0025953
taagatgtgaaay

SEQ ID NO: 103772 - DNA, 13 bp, Artificial Sequence
  Oligonucleotide for detection of SNP TSC0025953
rtttcacatctta

SEQ ID NO: 103773 - DNA, 13 bp, Artificial Sequence
  Oligonucleotide for detection of SNP TSC0025956
tagaggggtttay

SEQ ID NO: 103774 - DNA, 13 bp, Artificial Sequence
  Oligonucleotide for detection of SNP TSC0025956
rtaaacccctcta

SEQ ID NO: 103775 - DNA, 13 bp, Artificial Sequence
  Oligonucleotide for detection of SNP TSC0025956
tagaggagtttay

SEQ ID NO: 103776 - DNA, 13 bp, Artificial Sequence
  Oligonucleotide for detection of SNP TSC0025956
rtaaactcctcta

SEQ ID NO: 103777 - DNA, 13 bp, Artificial Sequence
  Oligonucleotide for detection of SNP TSC0025957
tgtagaagggtty

SEQ ID NO: 103778 - DNA, 13 bp, Artificial Sequence
  Oligonucleotide for detection of SNP TSC0025957
raacccttctaca

SEQ ID NO: 103779 - DNA, 13 bp, Artificial Sequence
  Oligonucleotide for detection of SNP TSC0025963
gttaggattgaga

SEQ ID NO: 103780 - DNA, 13 bp, Artificial Sequence
  Oligonucleotide for detection of SNP TSC0025963
tctcaatcctaac

SEQ ID NO: 103781 - DNA, 13 bp, Artificial Sequence
  Oligonucleotide for detection of SNP TSC0025963
gttagggttgaga

SEQ ID NO: 103782 - DNA, 13 bp, Artificial Sequence
  Oligonucleotide for detection of SNP TSC0025963
tctcaaccctaac

SEQ ID NO: 103783 - DNA, 13 bp, Artificial Sequence
  Oligonucleotide for detection of SNP TSC0025963
gttaggatcgaga

SEQ ID NO: 103784 - DNA, 13 bp, Artificial Sequence
  Oligonucleotide for detection of SNP TSC0025963
tctcgatcctaac

SEQ ID NO: 103785 - DNA, 13 bp, Artificial Sequence
  Oligonucleotide for detection of SNP TSC0025963
gttagggtcgaga

SEQ ID NO: 103786 - DNA, 13 bp, Artificial Sequence
  Oligonucleotide for detection of SNP TSC0025963
tctcgaccctaac

SEQ ID NO: 103787 - DNA, 13 bp, Artificial Sequence
  Oligonucleotide for detection of SNP TSC0025964
ttttacgtgtaty

SEQ ID NO: 103788 - DNA, 13 bp, Artificial Sequence
  Oligonucleotide for detection of SNP TSC0025964
ratacacgtaaaa

SEQ ID NO: 103789 - DNA, 13 bp, Artificial Sequence
  Oligonucleotide for detection of SNP TSC0025964
gatatatgtaaag

SEQ ID NO: 103790 - DNA, 13 bp, Artificial Sequence
  Oligonucleotide for detection of SNP TSC0025964
ctttacatatatc

SEQ ID NO: 103791 - DNA, 13 bp, Artificial Sequence
  Oligonucleotide for detection of SNP TSC0025964
gatatacgtaaag

SEQ ID NO: 103792 - DNA, 13 bp, Artificial Sequence
  Oligonucleotide for detection of SNP TSC0025964
ctttacgtatatc

SEQ ID NO: 103793 - DNA, 13 bp, Artificial Sequence
  Oligonucleotide for detection of SNP TSC0025965
aggattagagatg

SEQ ID NO: 103794 - DNA, 13 bp, Artificial Sequence
  Oligonucleotide for detection of SNP TSC0025965
catctctaatcct

SEQ ID NO: 103795 - DNA, 13 bp, Artificial Sequence
  Oligonucleotide for detection of SNP TSC0025965
aggatttgagatg

SEQ ID NO: 103796 - DNA, 13 bp, Artificial Sequence
  Oligonucleotide for detection of SNP TSC0025965
catctcaaatcct

SEQ ID NO: 103797 - DNA, 13 bp, Artificial Sequence
  Oligonucleotide for detection of SNP TSC0025965
aggattcgagatg

SEQ ID NO: 103798 - DNA, 13 bp, Artificial Sequence
  Oligonucleotide for detection of SNP TSC0025965
catctcgaatcct

SEQ ID NO: 103799 - DNA, 13 bp, Artificial Sequence
  Oligonucleotide for detection of SNP TSC0025965
tatttttaatttt

SEQ ID NO: 103800 - DNA, 13 bp, Artificial Sequence
  Oligonucleotide for detection of SNP TSC0025965
aaaattaaaaata

SEQ ID NO: 103801 - DNA, 13 bp, Artificial Sequence
  Oligonucleotide for detection of SNP TSC0025966
ttaaatagtaaag

SEQ ID NO: 103802 - DNA, 13 bp, Artificial Sequence
  Oligonucleotide for detection of SNP TSC0025966
ctttactatttaa

SEQ ID NO: 103803 - DNA, 13 bp, Artificial Sequence
  Oligonucleotide for detection of SNP TSC0025966
ttaaatggtaaag

SEQ ID NO: 103804 - DNA, 13 bp, Artificial Sequence
  Oligonucleotide for detection of SNP TSC0025966
ctttaccatttaa

SEQ ID NO: 103805 - DNA, 13 bp, Artificial Sequence
  Oligonucleotide for detection of SNP TSC0025967
agattggataatt

SEQ ID NO: 103806 - DNA, 13 bp, Artificial Sequence
  Oligonucleotide for detection of SNP TSC0025967
aattatccaatct

SEQ ID NO: 103807 - DNA, 13 bp, Artificial Sequence
  Oligonucleotide for detection of SNP TSC0025967
agattgtataatt

SEQ ID NO: 103808 - DNA, 13 bp, Artificial Sequence
  Oligonucleotide for detection of SNP TSC0025967
aattatacaatct

SEQ ID NO: 103809 - DNA, 13 bp, Artificial Sequence
  Oligonucleotide for detection of SNP TSC0025967
aattatttagttt

SEQ ID NO: 103810 - DNA, 13 bp, Artificial Sequence
  Oligonucleotide for detection of SNP TSC0025967
aaactaaataatt

SEQ ID NO: 103811 - DNA, 13 bp, Artificial Sequence
  Oligonucleotide for detection of SNP TSC0025967
aattatatagttt

SEQ ID NO: 103812 - DNA, 13 bp, Artificial Sequence
  Oligonucleotide for detection of SNP TSC0025967
aaactatataatt

SEQ ID NO: 103813 - DNA, 13 bp, Artificial Sequence
  Oligonucleotide for detection of SNP TSC0025968
tttggtagtgtty

SEQ ID NO: 103814 - DNA, 13 bp, Artificial Sequence
  Oligonucleotide for detection of SNP TSC0025968
raacactaccaaa

SEQ ID NO: 103815 - DNA, 13 bp, Artificial Sequence
  Oligonucleotide for detection of SNP TSC0025968
tttggtggtgtty

SEQ ID NO: 103816 - DNA, 13 bp, Artificial Sequence
  Oligonucleotide for detection of SNP TSC0025968
raacaccaccaaa

SEQ ID NO: 103817 - DNA, 13 bp, Artificial Sequence
  Oligonucleotide for detection of SNP TSC0025969
ttattggtgtgtt

SEQ ID NO: 103818 - DNA, 13 bp, Artificial Sequence
  Oligonucleotide for detection of SNP TSC0025969
aacacaccaataa

SEQ ID NO: 103819 - DNA, 13 bp, Artificial Sequence
  Oligonucleotide for detection of SNP TSC0025969
ttattgatgtgtt

SEQ ID NO: 103820 - DNA, 13 bp, Artificial Sequence
  Oligonucleotide for detection of SNP TSC0025969
aacacatcaataa

SEQ ID NO: 103821 - DNA, 13 bp, Artificial Sequence
  Oligonucleotide for detection of SNP TSC0025971
ttttatggaagag

SEQ ID NO: 103822 - DNA, 13 bp, Artificial Sequence
  Oligonucleotide for detection of SNP TSC0025971
ctcttccataaaa

SEQ ID NO: 103823 - DNA, 13 bp, Artificial Sequence
  Oligonucleotide for detection of SNP TSC0025971
ttttatagaagag

SEQ ID NO: 103824 - DNA, 13 bp, Artificial Sequence
  Oligonucleotide for detection of SNP TSC0025971
ctcttctataaaa

SEQ ID NO: 103825 - DNA, 13 bp, Artificial Sequence
  Oligonucleotide for detection of SNP TSC0025971
ttttacggaagag

SEQ ID NO: 103826 - DNA, 13 bp, Artificial Sequence
  Oligonucleotide for detection of SNP TSC0025971
ctcttccgtaaaa

SEQ ID NO: 103827 - DNA, 13 bp, Artificial Sequence
  Oligonucleotide for detection of SNP TSC0025972
ttttttgggttgg

SEQ ID NO: 103828 - DNA, 13 bp, Artificial Sequence
  Oligonucleotide for detection of SNP TSC0025972
ccaacccaaaaaa

SEQ ID NO: 103829 - DNA, 13 bp, Artificial Sequence
  Oligonucleotide for detection of SNP TSC0025972
tttttcgggttgg

SEQ ID NO: 103830 - DNA, 13 bp, Artificial Sequence
  Oligonucleotide for detection of SNP TSC0025972
ccaacccgaaaaa

SEQ ID NO: 103831 - DNA, 13 bp, Artificial Sequence
  Oligonucleotide for detection of SNP TSC0025972
tttttttggtcgg

SEQ ID NO: 103832 - DNA, 13 bp, Artificial Sequence
  Oligonucleotide for detection of SNP TSC0025972
ccgaccaaaaaaa

SEQ ID NO: 103833 - DNA, 13 bp, Artificial Sequence
  Oligonucleotide for detection of SNP TSC0025972
ttttttgggtcgg

SEQ ID NO: 103834 - DNA, 13 bp, Artificial Sequence
  Oligonucleotide for detection of SNP TSC0025972
ccgacccaaaaaa

SEQ ID NO: 103835 - DNA, 13 bp, Artificial Sequence
  Oligonucleotide for detection of SNP TSC0025972
tttttcgggtcgg

SEQ ID NO: 103836 - DNA, 13 bp, Artificial Sequence
  Oligonucleotide for detection of SNP TSC0025972
ccgacccgaaaaa

SEQ ID NO: 103837 - DNA, 13 bp, Artificial Sequence
  Oligonucleotide for detection of SNP TSC0025972
ttgatttggggag

SEQ ID NO: 103838 - DNA, 13 bp, Artificial Sequence
  Oligonucleotide for detection of SNP TSC0025972
ctccccaaatcaa

SEQ ID NO: 103839 - DNA, 13 bp, Artificial Sequence
  Oligonucleotide for detection of SNP TSC0025972
ttgattaggggag

SEQ ID NO: 103840 - DNA, 13 bp, Artificial Sequence
  Oligonucleotide for detection of SNP TSC0025972
ctcccctaatcaa

SEQ ID NO: 103841 - DNA, 13 bp, Artificial Sequence
  Oligonucleotide for detection of SNP TSC0025972
tcgatttggggag

SEQ ID NO: 103842 - DNA, 13 bp, Artificial Sequence
  Oligonucleotide for detection of SNP TSC0025972
ctccccaaatcga

SEQ ID NO: 103843 - DNA, 13 bp, Artificial Sequence
  Oligonucleotide for detection of SNP TSC0025972
tcgattaggggag

SEQ ID NO: 103844 - DNA, 13 bp, Artificial Sequence
  Oligonucleotide for detection of SNP TSC0025972
ctcccctaatcga

SEQ ID NO: 103845 - DNA, 13 bp, Artificial Sequence
  Oligonucleotide for detection of SNP TSC0025972
ttgattcggggag

SEQ ID NO: 103846 - DNA, 13 bp, Artificial Sequence
  Oligonucleotide for detection of SNP TSC0025972
ctccccgaatcaa

SEQ ID NO: 103847 - DNA, 13 bp, Artificial Sequence
  Oligonucleotide for detection of SNP TSC0025972
tcgattcggggag

SEQ ID NO: 103848 - DNA, 13 bp, Artificial Sequence
  Oligonucleotide for detection of SNP TSC0025972
ctccccgaatcga

SEQ ID NO: 103849 - DNA, 13 bp, Artificial Sequence
  Oligonucleotide for detection of SNP TSC0025974
tttttcgaaatgt

SEQ ID NO: 103850 - DNA, 13 bp, Artificial Sequence
  Oligonucleotide for detection of SNP TSC0025974
acatttcgaaaaa

SEQ ID NO: 103851 - DNA, 13 bp, Artificial Sequence
  Oligonucleotide for detection of SNP TSC0025974
atattttggggaa

SEQ ID NO: 103852 - DNA, 13 bp, Artificial Sequence
  Oligonucleotide for detection of SNP TSC0025974
ttccccaaaatat

SEQ ID NO: 103853 - DNA, 13 bp, Artificial Sequence
  Oligonucleotide for detection of SNP TSC0025974
atatttcggggaa

SEQ ID NO: 103854 - DNA, 13 bp, Artificial Sequence
  Oligonucleotide for detection of SNP TSC0025974
ttccccgaaatat

SEQ ID NO: 103855 - DNA, 13 bp, Artificial Sequence
  Oligonucleotide for detection of SNP TSC0025975
gagatgagggaga

SEQ ID NO: 103856 - DNA, 13 bp, Artificial Sequence
  Oligonucleotide for detection of SNP TSC0025975
tctccctcatctc

SEQ ID NO: 103857 - DNA, 13 bp, Artificial Sequence
  Oligonucleotide for detection of SNP TSC0025975
gagatgggggaga

SEQ ID NO: 103858 - DNA, 13 bp, Artificial Sequence
  Oligonucleotide for detection of SNP TSC0025975
tctcccccatctc

SEQ ID NO: 103859 - DNA, 13 bp, Artificial Sequence
  Oligonucleotide for detection of SNP TSC0025976
taattgggaggaa

SEQ ID NO: 103860 - DNA, 13 bp, Artificial Sequence
  Oligonucleotide for detection of SNP TSC0025976
ttcctcccaatta

SEQ ID NO: 103861 - DNA, 13 bp, Artificial Sequence
  Oligonucleotide for detection of SNP TSC0025976
taattgagaggaa

SEQ ID NO: 103862 - DNA, 13 bp, Artificial Sequence
  Oligonucleotide for detection of SNP TSC0025976
ttcctctcaatta

SEQ ID NO: 103863 - DNA, 13 bp, Artificial Sequence
  Oligonucleotide for detection of SNP TSC0025979
aatttaatagaat

SEQ ID NO: 103864 - DNA, 13 bp, Artificial Sequence
  Oligonucleotide for detection of SNP TSC0025979
attctattaaatt

SEQ ID NO: 103865 - DNA, 13 bp, Artificial Sequence
  Oligonucleotide for detection of SNP TSC0025979
aatttagtagaat

SEQ ID NO: 103866 - DNA, 13 bp, Artificial Sequence
  Oligonucleotide for detection of SNP TSC0025979
attctactaaatt

SEQ ID NO: 103867 - DNA, 13 bp, Artificial Sequence
  Oligonucleotide for detection of SNP TSC0025981
ggtgtttggtagg

SEQ ID NO: 103868 - DNA, 13 bp, Artificial Sequence
  Oligonucleotide for detection of SNP TSC0025981
cctaccaaacacc

SEQ ID NO: 103869 - DNA, 13 bp, Artificial Sequence
  Oligonucleotide for detection of SNP TSC0025981
ggtgttcggtagg

SEQ ID NO: 103870 - DNA, 13 bp, Artificial Sequence
  Oligonucleotide for detection of SNP TSC0025981
cctaccgaacacc

SEQ ID NO: 103871 - DNA, 13 bp, Artificial Sequence
  Oligonucleotide for detection of SNP TSC0025981
tttgttgggtaty

SEQ ID NO: 103872 - DNA, 13 bp, Artificial Sequence
  Oligonucleotide for detection of SNP TSC0025981
ratacccaacaaa

SEQ ID NO: 103873 - DNA, 13 bp, Artificial Sequence
  Oligonucleotide for detection of SNP TSC0025981
tttgttaggtaty

SEQ ID NO: 103874 - DNA, 13 bp, Artificial Sequence
  Oligonucleotide for detection of SNP TSC0025981
ratacctaacaaa

SEQ ID NO: 103875 - DNA, 13 bp, Artificial Sequence
  Oligonucleotide for detection of SNP TSC0025981
tttgtcgggtaty

SEQ ID NO: 103876 - DNA, 13 bp, Artificial Sequence
  Oligonucleotide for detection of SNP TSC0025981
ratacccgacaaa

SEQ ID NO: 103877 - DNA, 13 bp, Artificial Sequence
  Oligonucleotide for detection of SNP TSC0025984
attagtatttttt

SEQ ID NO: 103878 - DNA, 13 bp, Artificial Sequence
  Oligonucleotide for detection of SNP TSC0025984
aaaaaatactaat

SEQ ID NO: 103879 - DNA, 13 bp, Artificial Sequence
  Oligonucleotide for detection of SNP TSC0025984
attagtgtttttt

SEQ ID NO: 103880 - DNA, 13 bp, Artificial Sequence
  Oligonucleotide for detection of SNP TSC0025984
aaaaaacactaat

SEQ ID NO: 103881 - DNA, 13 bp, Artificial Sequence
  Oligonucleotide for detection of SNP TSC0025984
attagcgtttttt

SEQ ID NO: 103882 - DNA, 13 bp, Artificial Sequence
  Oligonucleotide for detection of SNP TSC0025984
aaaaaacgctaat

SEQ ID NO: 103883 - DNA, 13 bp, Artificial Sequence
  Oligonucleotide for detection of SNP TSC0025984
agaaaatgttagt

SEQ ID NO: 103884 - DNA, 13 bp, Artificial Sequence
  Oligonucleotide for detection of SNP TSC0025984
actaacattttct

SEQ ID NO: 103885 - DNA, 13 bp, Artificial Sequence
  Oligonucleotide for detection of SNP TSC0025984
agaaaacgttagt

SEQ ID NO: 103886 - DNA, 13 bp, Artificial Sequence
  Oligonucleotide for detection of SNP TSC0025984
actaacgttttct

SEQ ID NO: 103887 - DNA, 13 bp, Artificial Sequence
  Oligonucleotide for detection of SNP TSC0025985
atagaggggggtt

SEQ ID NO: 103888 - DNA, 13 bp, Artificial Sequence
  Oligonucleotide for detection of SNP TSC0025985
aacccccctctat

SEQ ID NO: 103889 - DNA, 13 bp, Artificial Sequence
  Oligonucleotide for detection of SNP TSC0025986
atttgtgtttgty

SEQ ID NO: 103890 - DNA, 13 bp, Artificial Sequence
  Oligonucleotide for detection of SNP TSC0025986
racaaacacaaat

SEQ ID NO: 103891 - DNA, 13 bp, Artificial Sequence
  Oligonucleotide for detection of SNP TSC0025986
atttgtttttgty

SEQ ID NO: 103892 - DNA, 13 bp, Artificial Sequence
  Oligonucleotide for detection of SNP TSC0025986
racaaaaacaaat

SEQ ID NO: 103893 - DNA, 13 bp, Artificial Sequence
  Oligonucleotide for detection of SNP TSC0025986
attcgtgtttgty

SEQ ID NO: 103894 - DNA, 13 bp, Artificial Sequence
  Oligonucleotide for detection of SNP TSC0025986
racaaacacgaat

SEQ ID NO: 103895 - DNA, 13 bp, Artificial Sequence
  Oligonucleotide for detection of SNP TSC0025986
attcgtttttgty

SEQ ID NO: 103896 - DNA, 13 bp, Artificial Sequence
  Oligonucleotide for detection of SNP TSC0025986
racaaaaacgaat

SEQ ID NO: 103897 - DNA, 13 bp, Artificial Sequence
  Oligonucleotide for detection of SNP TSC0025986
ggtaaatacgagt

SEQ ID NO: 103898 - DNA, 13 bp, Artificial Sequence
  Oligonucleotide for detection of SNP TSC0025986
actcgtatttacc

SEQ ID NO: 103899 - DNA, 13 bp, Artificial Sequence
  Oligonucleotide for detection of SNP TSC0025986
ggtaaaaacgagt

SEQ ID NO: 103900 - DNA, 13 bp, Artificial Sequence
  Oligonucleotide for detection of SNP TSC0025986
actcgtttttacc

SEQ ID NO: 103901 - DNA, 13 bp, Artificial Sequence
  Oligonucleotide for detection of SNP TSC0025989
gtaagtaaggagg

SEQ ID NO: 103902 - DNA, 13 bp, Artificial Sequence
  Oligonucleotide for detection of SNP TSC0025989
cctccttacttac

SEQ ID NO: 103903 - DNA, 13 bp, Artificial Sequence
  Oligonucleotide for detection of SNP TSC0025989
gtaagtgaggagg

SEQ ID NO: 103904 - DNA, 13 bp, Artificial Sequence
  Oligonucleotide for detection of SNP TSC0025989
cctcctcacttac

SEQ ID NO: 103905 - DNA, 13 bp, Artificial Sequence
  Oligonucleotide for detection of SNP TSC0025996
gatttttgggaga

SEQ ID NO: 103906 - DNA, 13 bp, Artificial Sequence
  Oligonucleotide for detection of SNP TSC0025996
tctcccaaaaatc

SEQ ID NO: 103907 - DNA, 13 bp, Artificial Sequence
  Oligonucleotide for detection of SNP TSC0025996
gattttcgggaga

SEQ ID NO: 103908 - DNA, 13 bp, Artificial Sequence
  Oligonucleotide for detection of SNP TSC0025996
tctcccgaaaatc

SEQ ID NO: 103909 - DNA, 13 bp, Artificial Sequence
  Oligonucleotide for detection of SNP TSC0025996
ttttttgagagty

SEQ ID NO: 103910 - DNA, 13 bp, Artificial Sequence
  Oligonucleotide for detection of SNP TSC0025996
ractctcaaaaaa

SEQ ID NO: 103911 - DNA, 13 bp, Artificial Sequence
  Oligonucleotide for detection of SNP TSC0025996
ttttttaagagty

SEQ ID NO: 103912 - DNA, 13 bp, Artificial Sequence
  Oligonucleotide for detection of SNP TSC0025996
ractcttaaaaaa

SEQ ID NO: 103913 - DNA, 13 bp, Artificial Sequence
  Oligonucleotide for detection of SNP TSC0025996
tttttcgagagty

SEQ ID NO: 103914 - DNA, 13 bp, Artificial Sequence
  Oligonucleotide for detection of SNP TSC0025996
ractctcgaaaaa

SEQ ID NO: 103915 - DNA, 13 bp, Artificial Sequence
  Oligonucleotide for detection of SNP TSC0025997
agttagcggatty

SEQ ID NO: 103916 - DNA, 13 bp, Artificial Sequence
  Oligonucleotide for detection of SNP TSC0025997
raatccgctaact

SEQ ID NO: 103917 - DNA, 13 bp, Artificial Sequence
  Oligonucleotide for detection of SNP TSC0025997
gggtttgttgatt

SEQ ID NO: 103918 - DNA, 13 bp, Artificial Sequence
  Oligonucleotide for detection of SNP TSC0025997
aatcaacaaaccc

SEQ ID NO: 103919 - DNA, 13 bp, Artificial Sequence
  Oligonucleotide for detection of SNP TSC0025997
gggttttttgatt

SEQ ID NO: 103920 - DNA, 13 bp, Artificial Sequence
  Oligonucleotide for detection of SNP TSC0025997
aatcaaaaaaccc

SEQ ID NO: 103921 - DNA, 13 bp, Artificial Sequence
  Oligonucleotide for detection of SNP TSC0025997
gggttcgttgatt

SEQ ID NO: 103922 - DNA, 13 bp, Artificial Sequence
  Oligonucleotide for detection of SNP TSC0025997
aatcaacgaaccc

SEQ ID NO: 103923 - DNA, 13 bp, Artificial Sequence
  Oligonucleotide for detection of SNP TSC0025998
ggtggttgtgggy

SEQ ID NO: 103924 - DNA, 13 bp, Artificial Sequence
  Oligonucleotide for detection of SNP TSC0025998
rcccacaaccacc

SEQ ID NO: 103925 - DNA, 13 bp, Artificial Sequence
  Oligonucleotide for detection of SNP TSC0025998
ggtggtcgtgggy

SEQ ID NO: 103926 - DNA, 13 bp, Artificial Sequence
  Oligonucleotide for detection of SNP TSC0025998
rcccacgaccacc

SEQ ID NO: 103927 - DNA, 13 bp, Artificial Sequence
  Oligonucleotide for detection of SNP TSC0025998
ggtggttgcgggy

SEQ ID NO: 103928 - DNA, 13 bp, Artificial Sequence
  Oligonucleotide for detection of SNP TSC0025998
rcccgcaaccacc

SEQ ID NO: 103929 - DNA, 13 bp, Artificial Sequence
  Oligonucleotide for detection of SNP TSC0025998
ggtggtcgcgggy

SEQ ID NO: 103930 - DNA, 13 bp, Artificial Sequence
  Oligonucleotide for detection of SNP TSC0025998
rcccgcgaccacc

SEQ ID NO: 103931 - DNA, 13 bp, Artificial Sequence
  Oligonucleotide for detection of SNP TSC0025998
gtttgtgattaty

SEQ ID NO: 103932 - DNA, 13 bp, Artificial Sequence
  Oligonucleotide for detection of SNP TSC0025998
rataatcacaaac

SEQ ID NO: 103933 - DNA, 13 bp, Artificial Sequence
  Oligonucleotide for detection of SNP TSC0025998
gtttgtaattaty

SEQ ID NO: 103934 - DNA, 13 bp, Artificial Sequence
  Oligonucleotide for detection of SNP TSC0025998
rataattacaaac

SEQ ID NO: 103935 - DNA, 13 bp, Artificial Sequence
  Oligonucleotide for detection of SNP TSC0025998
gttcgtgattaty

SEQ ID NO: 103936 - DNA, 13 bp, Artificial Sequence
  Oligonucleotide for detection of SNP TSC0025998
rataatcacgaac

SEQ ID NO: 103937 - DNA, 13 bp, Artificial Sequence
  Oligonucleotide for detection of SNP TSC0025998
gttcgtaattaty

SEQ ID NO: 103938 - DNA, 13 bp, Artificial Sequence
  Oligonucleotide for detection of SNP TSC0025998
rataattacgaac

SEQ ID NO: 103939 - DNA, 13 bp, Artificial Sequence
  Oligonucleotide for detection of SNP TSC0025998
gtttgcgattaty

SEQ ID NO: 103940 - DNA, 13 bp, Artificial Sequence
  Oligonucleotide for detection of SNP TSC0025998
rataatcgcaaac

SEQ ID NO: 103941 - DNA, 13 bp, Artificial Sequence
  Oligonucleotide for detection of SNP TSC0025998
gttcgcgattaty

SEQ ID NO: 103942 - DNA, 13 bp, Artificial Sequence
  Oligonucleotide for detection of SNP TSC0025998
rataatcgcgaac

SEQ ID NO: 103943 - DNA, 13 bp, Artificial Sequence
  Oligonucleotide for detection of SNP TSC0025999
ggttgtgttgtty

SEQ ID NO: 103944 - DNA, 13 bp, Artificial Sequence
  Oligonucleotide for detection of SNP TSC0025999
raacaacacaacc

SEQ ID NO: 103945 - DNA, 13 bp, Artificial Sequence
  Oligonucleotide for detection of SNP TSC0025999
ggttgttttgtty

SEQ ID NO: 103946 - DNA, 13 bp, Artificial Sequence
  Oligonucleotide for detection of SNP TSC0025999
raacaaaacaacc

SEQ ID NO: 103947 - DNA, 13 bp, Artificial Sequence
  Oligonucleotide for detection of SNP TSC0025999
ggtcgtgttgtty

SEQ ID NO: 103948 - DNA, 13 bp, Artificial Sequence
  Oligonucleotide for detection of SNP TSC0025999
raacaacacgacc

SEQ ID NO: 103949 - DNA, 13 bp, Artificial Sequence
  Oligonucleotide for detection of SNP TSC0025999
ggtcgttttgtty

SEQ ID NO: 103950 - DNA, 13 bp, Artificial Sequence
  Oligonucleotide for detection of SNP TSC0025999
raacaaaacgacc

SEQ ID NO: 103951 - DNA, 13 bp, Artificial Sequence
  Oligonucleotide for detection of SNP TSC0025999
ggttgcgttgtty

SEQ ID NO: 103952 - DNA, 13 bp, Artificial Sequence
  Oligonucleotide for detection of SNP TSC0025999
raacaacgcaacc

SEQ ID NO: 103953 - DNA, 13 bp, Artificial Sequence
  Oligonucleotide for detection of SNP TSC0025999
ggttgtttcgtty

SEQ ID NO: 103954 - DNA, 13 bp, Artificial Sequence
  Oligonucleotide for detection of SNP TSC0025999
raacgaaacaacc

SEQ ID NO: 103955 - DNA, 13 bp, Artificial Sequence
  Oligonucleotide for detection of SNP TSC0025999
ggttgtgtcgtty

SEQ ID NO: 103956 - DNA, 13 bp, Artificial Sequence
  Oligonucleotide for detection of SNP TSC0025999
raacgacacaacc

SEQ ID NO: 103957 - DNA, 13 bp, Artificial Sequence
  Oligonucleotide for detection of SNP TSC0025999
ggtcgtttcgtty

SEQ ID NO: 103958 - DNA, 13 bp, Artificial Sequence
  Oligonucleotide for detection of SNP TSC0025999
raacgaaacgacc

SEQ ID NO: 103959 - DNA, 13 bp, Artificial Sequence
  Oligonucleotide for detection of SNP TSC0025999
ggtcgcgttgtty

SEQ ID NO: 103960 - DNA, 13 bp, Artificial Sequence
  Oligonucleotide for detection of SNP TSC0025999
raacaacgcgacc

SEQ ID NO: 103961 - DNA, 13 bp, Artificial Sequence
  Oligonucleotide for detection of SNP TSC0025999
ggtcgtgtcgtty

SEQ ID NO: 103962 - DNA, 13 bp, Artificial Sequence
  Oligonucleotide for detection of SNP TSC0025999
raacgacacgacc

SEQ ID NO: 103963 - DNA, 13 bp, Artificial Sequence
  Oligonucleotide for detection of SNP TSC0025999
ggttgcgtcgtty

SEQ ID NO: 103964 - DNA, 13 bp, Artificial Sequence
  Oligonucleotide for detection of SNP TSC0025999
raacgacgcaacc

SEQ ID NO: 103965 - DNA, 13 bp, Artificial Sequence
  Oligonucleotide for detection of SNP TSC0025999
ggtcgcgtcgtty

SEQ ID NO: 103966 - DNA, 13 bp, Artificial Sequence
  Oligonucleotide for detection of SNP TSC0025999
raacgacgcgacc

SEQ ID NO: 103967 - DNA, 13 bp, Artificial Sequence
  Oligonucleotide for detection of SNP TSC0025999
gggtgatgtgaty

SEQ ID NO: 103968 - DNA, 13 bp, Artificial Sequence
  Oligonucleotide for detection of SNP TSC0025999
ratcacatcaccc

SEQ ID NO: 103969 - DNA, 13 bp, Artificial Sequence
  Oligonucleotide for detection of SNP TSC0025999
gggtgaagtgaty

SEQ ID NO: 103970 - DNA, 13 bp, Artificial Sequence
  Oligonucleotide for detection of SNP TSC0025999
ratcacttcaccc

SEQ ID NO: 103971 - DNA, 13 bp, Artificial Sequence
  Oligonucleotide for detection of SNP TSC0025999
gggcgatgtgaty

SEQ ID NO: 103972 - DNA, 13 bp, Artificial Sequence
  Oligonucleotide for detection of SNP TSC0025999
ratcacatcgccc

SEQ ID NO: 103973 - DNA, 13 bp, Artificial Sequence
  Oligonucleotide for detection of SNP TSC0025999
gggcgaagtgaty

SEQ ID NO: 103974 - DNA, 13 bp, Artificial Sequence
  Oligonucleotide for detection of SNP TSC0025999
ratcacttcgccc

SEQ ID NO: 103975 - DNA, 13 bp, Artificial Sequence
  Oligonucleotide for detection of SNP TSC0025999
gggtgacgtgaty

SEQ ID NO: 103976 - DNA, 13 bp, Artificial Sequence
  Oligonucleotide for detection of SNP TSC0025999
ratcacgtcaccc

SEQ ID NO: 103977 - DNA, 13 bp, Artificial Sequence
  Oligonucleotide for detection of SNP TSC0025999
gggtgaagcgaty

SEQ ID NO: 103978 - DNA, 13 bp, Artificial Sequence
  Oligonucleotide for detection of SNP TSC0025999
ratcgcttcaccc

SEQ ID NO: 103979 - DNA, 13 bp, Artificial Sequence
  Oligonucleotide for detection of SNP TSC0025999
gggtgatgcgaty

SEQ ID NO: 103980 - DNA, 13 bp, Artificial Sequence
  Oligonucleotide for detection of SNP TSC0025999
ratcgcatcaccc

SEQ ID NO: 103981 - DNA, 13 bp, Artificial Sequence
  Oligonucleotide for detection of SNP TSC0025999
gggcgaagcgaty

SEQ ID NO: 103982 - DNA, 13 bp, Artificial Sequence
  Oligonucleotide for detection of SNP TSC0025999
ratcgcttcgccc

SEQ ID NO: 103983 - DNA, 13 bp, Artificial Sequence
  Oligonucleotide for detection of SNP TSC0025999
gggcgacgtgaty

SEQ ID NO: 103984 - DNA, 13 bp, Artificial Sequence
  Oligonucleotide for detection of SNP TSC0025999
ratcacgtcgccc

SEQ ID NO: 103985 - DNA, 13 bp, Artificial Sequence
  Oligonucleotide for detection of SNP TSC0025999
gggcgatgcgaty

SEQ ID NO: 103986 - DNA, 13 bp, Artificial Sequence
  Oligonucleotide for detection of SNP TSC0025999
ratcgcatcgccc

SEQ ID NO: 103987 - DNA, 13 bp, Artificial Sequence
  Oligonucleotide for detection of SNP TSC0025999
gggtgacgcgaty

SEQ ID NO: 103988 - DNA, 13 bp, Artificial Sequence
  Oligonucleotide for detection of SNP TSC0025999
ratcgcgtcaccc

SEQ ID NO: 103989 - DNA, 13 bp, Artificial Sequence
  Oligonucleotide for detection of SNP TSC0025999
gggcgacgcgaty

SEQ ID NO: 103990 - DNA, 13 bp, Artificial Sequence
  Oligonucleotide for detection of SNP TSC0025999
ratcgcgtcgccc

SEQ ID NO: 103991 - DNA, 13 bp, Artificial Sequence
  Oligonucleotide for detection of SNP TSC0026002
attttagatttty

SEQ ID NO: 103992 - DNA, 13 bp, Artificial Sequence
  Oligonucleotide for detection of SNP TSC0026002
raaaatctaaaat

SEQ ID NO: 103993 - DNA, 13 bp, Artificial Sequence
  Oligonucleotide for detection of SNP TSC0026002
attttatatttty

SEQ ID NO: 103994 - DNA, 13 bp, Artificial Sequence
  Oligonucleotide for detection of SNP TSC0026002
raaaatataaaat

SEQ ID NO: 103995 - DNA, 13 bp, Artificial Sequence
  Oligonucleotide for detection of SNP TSC0026002
gaaagtttgaaat

SEQ ID NO: 103996 - DNA, 13 bp, Artificial Sequence
  Oligonucleotide for detection of SNP TSC0026002
atttcaaactttc

SEQ ID NO: 103997 - DNA, 13 bp, Artificial Sequence
  Oligonucleotide for detection of SNP TSC0026002
gaaagtatgaaat

SEQ ID NO: 103998 - DNA, 13 bp, Artificial Sequence
  Oligonucleotide for detection of SNP TSC0026002
atttcatactttc

SEQ ID NO: 103999 - DNA, 13 bp, Artificial Sequence
  Oligonucleotide for detection of SNP TSC0026004
ggaggttgtggta

SEQ ID NO: 104000 - DNA, 13 bp, Artificial Sequence
  Oligonucleotide for detection of SNP TSC0026004
taccacaacctcc

SEQ ID NO: 104001 - DNA, 13 bp, Artificial Sequence
  Oligonucleotide for detection of SNP TSC0026004
ggaggtggtggta

SEQ ID NO: 104002 - DNA, 13 bp, Artificial Sequence
  Oligonucleotide for detection of SNP TSC0026004
taccaccacctcc

SEQ ID NO: 104003 - DNA, 13 bp, Artificial Sequence
  Oligonucleotide for detection of SNP TSC0026004
ggaggtcgtggta

SEQ ID NO: 104004 - DNA, 13 bp, Artificial Sequence
  Oligonucleotide for detection of SNP TSC0026004
taccacgacctcc

SEQ ID NO: 104005 - DNA, 13 bp, Artificial Sequence
  Oligonucleotide for detection of SNP TSC0026004
tgttattatttty

SEQ ID NO: 104006 - DNA, 13 bp, Artificial Sequence
  Oligonucleotide for detection of SNP TSC0026004
raaaataataaca

SEQ ID NO: 104007 - DNA, 13 bp, Artificial Sequence
  Oligonucleotide for detection of SNP TSC0026004
tgttacgatttty

SEQ ID NO: 104008 - DNA, 13 bp, Artificial Sequence
  Oligonucleotide for detection of SNP TSC0026004
raaaatcgtaaca

SEQ ID NO: 104009 - DNA, 13 bp, Artificial Sequence
  Oligonucleotide for detection of SNP TSC0026005
tggtagagtttty

SEQ ID NO: 104010 - DNA, 13 bp, Artificial Sequence
  Oligonucleotide for detection of SNP TSC0026005
raaaactctacca

SEQ ID NO: 104011 - DNA, 13 bp, Artificial Sequence
  Oligonucleotide for detection of SNP TSC0026005
tggtagggtttty

SEQ ID NO: 104012 - DNA, 13 bp, Artificial Sequence
  Oligonucleotide for detection of SNP TSC0026005
raaaaccctacca

SEQ ID NO: 104013 - DNA, 13 bp, Artificial Sequence
  Oligonucleotide for detection of SNP TSC0026006
gggataagagttg

SEQ ID NO: 104014 - DNA, 13 bp, Artificial Sequence
  Oligonucleotide for detection of SNP TSC0026006
caactcttatccc

SEQ ID NO: 104015 - DNA, 13 bp, Artificial Sequence
  Oligonucleotide for detection of SNP TSC0026006
gggataggagttg

SEQ ID NO: 104016 - DNA, 13 bp, Artificial Sequence
  Oligonucleotide for detection of SNP TSC0026006
caactcctatccc

SEQ ID NO: 104017 - DNA, 13 bp, Artificial Sequence
  Oligonucleotide for detection of SNP TSC0026007
gtatttaattagg

SEQ ID NO: 104018 - DNA, 13 bp, Artificial Sequence
  Oligonucleotide for detection of SNP TSC0026007
cctaattaaatac

SEQ ID NO: 104019 - DNA, 13 bp, Artificial Sequence
  Oligonucleotide for detection of SNP TSC0026007
gtatttgattagg

SEQ ID NO: 104020 - DNA, 13 bp, Artificial Sequence
  Oligonucleotide for detection of SNP TSC0026007
cctaatcaaatac

SEQ ID NO: 104021 - DNA, 13 bp, Artificial Sequence
  Oligonucleotide for detection of SNP TSC0026007
gtattcgattagg

SEQ ID NO: 104022 - DNA, 13 bp, Artificial Sequence
  Oligonucleotide for detection of SNP TSC0026007
cctaatcgaatac

SEQ ID NO: 104023 - DNA, 13 bp, Artificial Sequence
  Oligonucleotide for detection of SNP TSC0026007
tttagttgggtay

SEQ ID NO: 104024 - DNA, 13 bp, Artificial Sequence
  Oligonucleotide for detection of SNP TSC0026007
rtacccaactaaa

SEQ ID NO: 104025 - DNA, 13 bp, Artificial Sequence
  Oligonucleotide for detection of SNP TSC0026007
tttagtcgggtay

SEQ ID NO: 104026 - DNA, 13 bp, Artificial Sequence
  Oligonucleotide for detection of SNP TSC0026007
rtacccgactaaa

SEQ ID NO: 104027 - DNA, 13 bp, Artificial Sequence
  Oligonucleotide for detection of SNP TSC0026008
tttgttatggggt

SEQ ID NO: 104028 - DNA, 13 bp, Artificial Sequence
  Oligonucleotide for detection of SNP TSC0026008
accccataacaaa

SEQ ID NO: 104029 - DNA, 13 bp, Artificial Sequence
  Oligonucleotide for detection of SNP TSC0026008
tttgttgtggggt

SEQ ID NO: 104030 - DNA, 13 bp, Artificial Sequence
  Oligonucleotide for detection of SNP TSC0026008
accccacaacaaa

SEQ ID NO: 104031 - DNA, 13 bp, Artificial Sequence
  Oligonucleotide for detection of SNP TSC0026008
tttgtcgtggggt

SEQ ID NO: 104032 - DNA, 13 bp, Artificial Sequence
  Oligonucleotide for detection of SNP TSC0026008
accccacgacaaa

SEQ ID NO: 104033 - DNA, 13 bp, Artificial Sequence
  Oligonucleotide for detection of SNP TSC0026008
attttatgatagg

SEQ ID NO: 104034 - DNA, 13 bp, Artificial Sequence
  Oligonucleotide for detection of SNP TSC0026008
cctatcataaaat

SEQ ID NO: 104035 - DNA, 13 bp, Artificial Sequence
  Oligonucleotide for detection of SNP TSC0026008
attttacgatagg

SEQ ID NO: 104036 - DNA, 13 bp, Artificial Sequence
  Oligonucleotide for detection of SNP TSC0026008
cctatcgtaaaat

SEQ ID NO: 104037 - DNA, 13 bp, Artificial Sequence
  Oligonucleotide for detection of SNP TSC0026009
atgatttggtgtt

SEQ ID NO: 104038 - DNA, 13 bp, Artificial Sequence
  Oligonucleotide for detection of SNP TSC0026009
aacaccaaatcat

SEQ ID NO: 104039 - DNA, 13 bp, Artificial Sequence
  Oligonucleotide for detection of SNP TSC0026009
atgattcggtgtt

SEQ ID NO: 104040 - DNA, 13 bp, Artificial Sequence
  Oligonucleotide for detection of SNP TSC0026009
aacaccgaatcat

SEQ ID NO: 104041 - DNA, 13 bp, Artificial Sequence
  Oligonucleotide for detection of SNP TSC0026009
aatattgggttat

SEQ ID NO: 104042 - DNA, 13 bp, Artificial Sequence
  Oligonucleotide for detection of SNP TSC0026009
ataacccaatatt

SEQ ID NO: 104043 - DNA, 13 bp, Artificial Sequence
  Oligonucleotide for detection of SNP TSC0026009
aatattaggttat

SEQ ID NO: 104044 - DNA, 13 bp, Artificial Sequence
  Oligonucleotide for detection of SNP TSC0026009
ataacctaatatt

SEQ ID NO: 104045 - DNA, 13 bp, Artificial Sequence
  Oligonucleotide for detection of SNP TSC0026009
aatatcgggttat

SEQ ID NO: 104046 - DNA, 13 bp, Artificial Sequence
  Oligonucleotide for detection of SNP TSC0026009
ataacccgatatt

SEQ ID NO: 104047 - DNA, 13 bp, Artificial Sequence
  Oligonucleotide for detection of SNP TSC0026010
ttgagaagattaa

SEQ ID NO: 104048 - DNA, 13 bp, Artificial Sequence
  Oligonucleotide for detection of SNP TSC0026010
ttaatcttctcaa

SEQ ID NO: 104049 - DNA, 13 bp, Artificial Sequence
  Oligonucleotide for detection of SNP TSC0026010
ttgagaggattaa

SEQ ID NO: 104050 - DNA, 13 bp, Artificial Sequence
  Oligonucleotide for detection of SNP TSC0026010
ttaatcctctcaa

SEQ ID NO: 104051 - DNA, 13 bp, Artificial Sequence
  Oligonucleotide for detection of SNP TSC0026011
tagaatataagty

SEQ ID NO: 104052 - DNA, 13 bp, Artificial Sequence
  Oligonucleotide for detection of SNP TSC0026011
racttatattcta

SEQ ID NO: 104053 - DNA, 13 bp, Artificial Sequence
  Oligonucleotide for detection of SNP TSC0026011
tagaatgtaagty

SEQ ID NO: 104054 - DNA, 13 bp, Artificial Sequence
  Oligonucleotide for detection of SNP TSC0026011
racttacattcta

SEQ ID NO: 104055 - DNA, 13 bp, Artificial Sequence
  Oligonucleotide for detection of SNP TSC0026011
tagaacgtaagty

SEQ ID NO: 104056 - DNA, 13 bp, Artificial Sequence
  Oligonucleotide for detection of SNP TSC0026011
racttacgttcta

SEQ ID NO: 104057 - DNA, 13 bp, Artificial Sequence
  Oligonucleotide for detection of SNP TSC0026011
gatttatgtttta

SEQ ID NO: 104058 - DNA, 13 bp, Artificial Sequence
  Oligonucleotide for detection of SNP TSC0026011
taaaacataaatc

SEQ ID NO: 104059 - DNA, 13 bp, Artificial Sequence
  Oligonucleotide for detection of SNP TSC0026011
gatttacgtttta

SEQ ID NO: 104060 - DNA, 13 bp, Artificial Sequence
  Oligonucleotide for detection of SNP TSC0026011
taaaacgtaaatc

SEQ ID NO: 104061 - DNA, 13 bp, Artificial Sequence
  Oligonucleotide for detection of SNP TSC0026014
attagagttaaat

SEQ ID NO: 104062 - DNA, 13 bp, Artificial Sequence
  Oligonucleotide for detection of SNP TSC0026014
atttaactctaat

SEQ ID NO: 104063 - DNA, 13 bp, Artificial Sequence
  Oligonucleotide for detection of SNP TSC0026014
attagaattaaat

SEQ ID NO: 104064 - DNA, 13 bp, Artificial Sequence
  Oligonucleotide for detection of SNP TSC0026014
atttaattctaat

SEQ ID NO: 104065 - DNA, 13 bp, Artificial Sequence
  Oligonucleotide for detection of SNP TSC0026017
agttttgtagttt

SEQ ID NO: 104066 - DNA, 13 bp, Artificial Sequence
  Oligonucleotide for detection of SNP TSC0026017
aaactacaaaact

SEQ ID NO: 104067 - DNA, 13 bp, Artificial Sequence
  Oligonucleotide for detection of SNP TSC0026017
agttttatagttt

SEQ ID NO: 104068 - DNA, 13 bp, Artificial Sequence
  Oligonucleotide for detection of SNP TSC0026017
aaactataaaact

SEQ ID NO: 104069 - DNA, 13 bp, Artificial Sequence
  Oligonucleotide for detection of SNP TSC0026018
ttaaaaagaaagy

SEQ ID NO: 104070 - DNA, 13 bp, Artificial Sequence
  Oligonucleotide for detection of SNP TSC0026018
rctttctttttaa

SEQ ID NO: 104071 - DNA, 13 bp, Artificial Sequence
  Oligonucleotide for detection of SNP TSC0026018
ttaaaaggaaagy

SEQ ID NO: 104072 - DNA, 13 bp, Artificial Sequence
  Oligonucleotide for detection of SNP TSC0026018
rctttccttttaa

SEQ ID NO: 104073 - DNA, 13 bp, Artificial Sequence
  Oligonucleotide for detection of SNP TSC0026019
gagggaaaggggt

SEQ ID NO: 104074 - DNA, 13 bp, Artificial Sequence
  Oligonucleotide for detection of SNP TSC0026019
acccctttccctc

SEQ ID NO: 104075 - DNA, 13 bp, Artificial Sequence
  Oligonucleotide for detection of SNP TSC0026019
gagggagaggggt

SEQ ID NO: 104076 - DNA, 13 bp, Artificial Sequence
  Oligonucleotide for detection of SNP TSC0026019
acccctctccctc

SEQ ID NO: 104077 - DNA, 13 bp, Artificial Sequence
  Oligonucleotide for detection of SNP TSC0026020
taaatatgatgga

SEQ ID NO: 104078 - DNA, 13 bp, Artificial Sequence
  Oligonucleotide for detection of SNP TSC0026020
tccatcatattta

SEQ ID NO: 104079 - DNA, 13 bp, Artificial Sequence
  Oligonucleotide for detection of SNP TSC0026020
taaatacgatgga

SEQ ID NO: 104080 - DNA, 13 bp, Artificial Sequence
  Oligonucleotide for detection of SNP TSC0026020
tccatcgtattta

SEQ ID NO: 104081 - DNA, 13 bp, Artificial Sequence
  Oligonucleotide for detection of SNP TSC0026021
tattttgtggagy

SEQ ID NO: 104082 - DNA, 13 bp, Artificial Sequence
  Oligonucleotide for detection of SNP TSC0026021
rctccacaaaata

SEQ ID NO: 104083 - DNA, 13 bp, Artificial Sequence
  Oligonucleotide for detection of SNP TSC0026021
tattttatggagy

SEQ ID NO: 104084 - DNA, 13 bp, Artificial Sequence
  Oligonucleotide for detection of SNP TSC0026021
rctccataaaata

SEQ ID NO: 104085 - DNA, 13 bp, Artificial Sequence
  Oligonucleotide for detection of SNP TSC0026022
ttgtttgagtaty

SEQ ID NO: 104086 - DNA, 13 bp, Artificial Sequence
  Oligonucleotide for detection of SNP TSC0026022
ratactcaaacaa

SEQ ID NO: 104087 - DNA, 13 bp, Artificial Sequence
  Oligonucleotide for detection of SNP TSC0026022
ttgttttagtaty

SEQ ID NO: 104088 - DNA, 13 bp, Artificial Sequence
  Oligonucleotide for detection of SNP TSC0026022
ratactaaaacaa

SEQ ID NO: 104089 - DNA, 13 bp, Artificial Sequence
  Oligonucleotide for detection of SNP TSC0026022
tcgtttgagtaty

SEQ ID NO: 104090 - DNA, 13 bp, Artificial Sequence
  Oligonucleotide for detection of SNP TSC0026022
ratactcaaacga

SEQ ID NO: 104091 - DNA, 13 bp, Artificial Sequence
  Oligonucleotide for detection of SNP TSC0026022
tcgttttagtaty

SEQ ID NO: 104092 - DNA, 13 bp, Artificial Sequence
  Oligonucleotide for detection of SNP TSC0026022
ratactaaaacga

SEQ ID NO: 104093 - DNA, 13 bp, Artificial Sequence
  Oligonucleotide for detection of SNP TSC0026022
gatgtttagatga

SEQ ID NO: 104094 - DNA, 13 bp, Artificial Sequence
  Oligonucleotide for detection of SNP TSC0026022
tcatctaaacatc

SEQ ID NO: 104095 - DNA, 13 bp, Artificial Sequence
  Oligonucleotide for detection of SNP TSC0026022
gatgttaagatga

SEQ ID NO: 104096 - DNA, 13 bp, Artificial Sequence
  Oligonucleotide for detection of SNP TSC0026022
tcatcttaacatc

SEQ ID NO: 104097 - DNA, 13 bp, Artificial Sequence
  Oligonucleotide for detection of SNP TSC0026022
gatgtttagacga

SEQ ID NO: 104098 - DNA, 13 bp, Artificial Sequence
  Oligonucleotide for detection of SNP TSC0026022
tcgtctaaacatc

SEQ ID NO: 104099 - DNA, 13 bp, Artificial Sequence
  Oligonucleotide for detection of SNP TSC0026022
gatgttaagacga

SEQ ID NO: 104100 - DNA, 13 bp, Artificial Sequence
  Oligonucleotide for detection of SNP TSC0026022
tcgtcttaacatc

SEQ ID NO: 104101 - DNA, 13 bp, Artificial Sequence
  Oligonucleotide for detection of SNP TSC0026028
gagtttgttaaty

SEQ ID NO: 104102 - DNA, 13 bp, Artificial Sequence
  Oligonucleotide for detection of SNP TSC0026028
rattaacaaactc

SEQ ID NO: 104103 - DNA, 13 bp, Artificial Sequence
  Oligonucleotide for detection of SNP TSC0026028
gagtttattaaty

SEQ ID NO: 104104 - DNA, 13 bp, Artificial Sequence
  Oligonucleotide for detection of SNP TSC0026028
rattaataaactc

SEQ ID NO: 104105 - DNA, 13 bp, Artificial Sequence
  Oligonucleotide for detection of SNP TSC0026029
atttatatagtag

SEQ ID NO: 104106 - DNA, 13 bp, Artificial Sequence
  Oligonucleotide for detection of SNP TSC0026029
ctactatataaat

SEQ ID NO: 104107 - DNA, 13 bp, Artificial Sequence
  Oligonucleotide for detection of SNP TSC0026029
atttatgtagtag

SEQ ID NO: 104108 - DNA, 13 bp, Artificial Sequence
  Oligonucleotide for detection of SNP TSC0026029
ctactacataaat

SEQ ID NO: 104109 - DNA, 13 bp, Artificial Sequence
  Oligonucleotide for detection of SNP TSC0026029
atttacgtagtag

SEQ ID NO: 104110 - DNA, 13 bp, Artificial Sequence
  Oligonucleotide for detection of SNP TSC0026029
ctactacgtaaat

SEQ ID NO: 104111 - DNA, 13 bp, Artificial Sequence
  Oligonucleotide for detection of SNP TSC0026029
ttgttgtgtgaat

SEQ ID NO: 104112 - DNA, 13 bp, Artificial Sequence
  Oligonucleotide for detection of SNP TSC0026029
attcacacaacaa

SEQ ID NO: 104113 - DNA, 13 bp, Artificial Sequence
  Oligonucleotide for detection of SNP TSC0026029
ttgttgcgtgaat

SEQ ID NO: 104114 - DNA, 13 bp, Artificial Sequence
  Oligonucleotide for detection of SNP TSC0026029
attcacgcaacaa

SEQ ID NO: 104115 - DNA, 13 bp, Artificial Sequence
  Oligonucleotide for detection of SNP TSC0026030
ttgttaatttaag

SEQ ID NO: 104116 - DNA, 13 bp, Artificial Sequence
  Oligonucleotide for detection of SNP TSC0026030
cttaaattaacaa

SEQ ID NO: 104117 - DNA, 13 bp, Artificial Sequence
  Oligonucleotide for detection of SNP TSC0026030
ttgttagtttaag

SEQ ID NO: 104118 - DNA, 13 bp, Artificial Sequence
  Oligonucleotide for detection of SNP TSC0026030
cttaaactaacaa

SEQ ID NO: 104119 - DNA, 13 bp, Artificial Sequence
  Oligonucleotide for detection of SNP TSC0026031
tgttgttgtattt

SEQ ID NO: 104120 - DNA, 13 bp, Artificial Sequence
  Oligonucleotide for detection of SNP TSC0026031
aaatacaacaaca

SEQ ID NO: 104121 - DNA, 13 bp, Artificial Sequence
  Oligonucleotide for detection of SNP TSC0026031
tgttgtcgtattt

SEQ ID NO: 104122 - DNA, 13 bp, Artificial Sequence
  Oligonucleotide for detection of SNP TSC0026031
aaatacgacaaca

SEQ ID NO: 104123 - DNA, 13 bp, Artificial Sequence
  Oligonucleotide for detection of SNP TSC0026031
agatgtggtaata

SEQ ID NO: 104124 - DNA, 13 bp, Artificial Sequence
  Oligonucleotide for detection of SNP TSC0026031
tattaccacatct

SEQ ID NO: 104125 - DNA, 13 bp, Artificial Sequence
  Oligonucleotide for detection of SNP TSC0026031
agatgtagtaata

SEQ ID NO: 104126 - DNA, 13 bp, Artificial Sequence
  Oligonucleotide for detection of SNP TSC0026031
tattactacatct

SEQ ID NO: 104127 - DNA, 13 bp, Artificial Sequence
  Oligonucleotide for detection of SNP TSC0026031
agatgcggtaata

SEQ ID NO: 104128 - DNA, 13 bp, Artificial Sequence
  Oligonucleotide for detection of SNP TSC0026031
tattaccgcatct

SEQ ID NO: 104129 - DNA, 13 bp, Artificial Sequence
  Oligonucleotide for detection of SNP TSC0026032
aattttagttatt

SEQ ID NO: 104130 - DNA, 13 bp, Artificial Sequence
  Oligonucleotide for detection of SNP TSC0026032
aataactaaaatt

SEQ ID NO: 104131 - DNA, 13 bp, Artificial Sequence
  Oligonucleotide for detection of SNP TSC0026032
aattttggttatt

SEQ ID NO: 104132 - DNA, 13 bp, Artificial Sequence
  Oligonucleotide for detection of SNP TSC0026032
aataaccaaaatt

SEQ ID NO: 104133 - DNA, 13 bp, Artificial Sequence
  Oligonucleotide for detection of SNP TSC0026032
aatttcggttatt

SEQ ID NO: 104134 - DNA, 13 bp, Artificial Sequence
  Oligonucleotide for detection of SNP TSC0026032
aataaccgaaatt

SEQ ID NO: 104135 - DNA, 13 bp, Artificial Sequence
  Oligonucleotide for detection of SNP TSC0026032
agtagttgggatt

SEQ ID NO: 104136 - DNA, 13 bp, Artificial Sequence
  Oligonucleotide for detection of SNP TSC0026032
aatcccaactact

SEQ ID NO: 104137 - DNA, 13 bp, Artificial Sequence
  Oligonucleotide for detection of SNP TSC0026032
agtagtcgggatt

SEQ ID NO: 104138 - DNA, 13 bp, Artificial Sequence
  Oligonucleotide for detection of SNP TSC0026032
aatcccgactact

SEQ ID NO: 104139 - DNA, 13 bp, Artificial Sequence
  Oligonucleotide for detection of SNP TSC0026034
tagtgggtttggg

SEQ ID NO: 104140 - DNA, 13 bp, Artificial Sequence
  Oligonucleotide for detection of SNP TSC0026034
cccaaacccacta

SEQ ID NO: 104141 - DNA, 13 bp, Artificial Sequence
  Oligonucleotide for detection of SNP TSC0026034
tagtggatttggg

SEQ ID NO: 104142 - DNA, 13 bp, Artificial Sequence
  Oligonucleotide for detection of SNP TSC0026034
cccaaatccacta

SEQ ID NO: 104143 - DNA, 13 bp, Artificial Sequence
  Oligonucleotide for detection of SNP TSC0026034
tagtgggttcggg

SEQ ID NO: 104144 - DNA, 13 bp, Artificial Sequence
  Oligonucleotide for detection of SNP TSC0026034
cccgaacccacta

SEQ ID NO: 104145 - DNA, 13 bp, Artificial Sequence
  Oligonucleotide for detection of SNP TSC0026034
tagtggattcggg

SEQ ID NO: 104146 - DNA, 13 bp, Artificial Sequence
  Oligonucleotide for detection of SNP TSC0026034
cccgaatccacta

SEQ ID NO: 104147 - DNA, 13 bp, Artificial Sequence
  Oligonucleotide for detection of SNP TSC0026035
ggtagggtttttg

SEQ ID NO: 104148 - DNA, 13 bp, Artificial Sequence
  Oligonucleotide for detection of SNP TSC0026035
caaaaaccctacc

SEQ ID NO: 104149 - DNA, 13 bp, Artificial Sequence
  Oligonucleotide for detection of SNP TSC0026035
ggtaggatttttg

SEQ ID NO: 104150 - DNA, 13 bp, Artificial Sequence
  Oligonucleotide for detection of SNP TSC0026035
caaaaatcctacc

SEQ ID NO: 104151 - DNA, 13 bp, Artificial Sequence
  Oligonucleotide for detection of SNP TSC0026037
attttaggtgtat

SEQ ID NO: 104152 - DNA, 13 bp, Artificial Sequence
  Oligonucleotide for detection of SNP TSC0026037
atacacctaaaat

SEQ ID NO: 104153 - DNA, 13 bp, Artificial Sequence
  Oligonucleotide for detection of SNP TSC0026037
attttaagtgtat

SEQ ID NO: 104154 - DNA, 13 bp, Artificial Sequence
  Oligonucleotide for detection of SNP TSC0026037
atacacttaaaat

SEQ ID NO: 104155 - DNA, 13 bp, Artificial Sequence
  Oligonucleotide for detection of SNP TSC0026041
taggtatgaaagy

SEQ ID NO: 104156 - DNA, 13 bp, Artificial Sequence
  Oligonucleotide for detection of SNP TSC0026041
rctttcataccta

SEQ ID NO: 104157 - DNA, 13 bp, Artificial Sequence
  Oligonucleotide for detection of SNP TSC0026041
taggtacgaaagy

SEQ ID NO: 104158 - DNA, 13 bp, Artificial Sequence
  Oligonucleotide for detection of SNP TSC0026041
rctttcgtaccta

SEQ ID NO: 104159 - DNA, 13 bp, Artificial Sequence
  Oligonucleotide for detection of SNP TSC0026041
gtttttgtgtttg

SEQ ID NO: 104160 - DNA, 13 bp, Artificial Sequence
  Oligonucleotide for detection of SNP TSC0026041
caaacacaaaaac

SEQ ID NO: 104161 - DNA, 13 bp, Artificial Sequence
  Oligonucleotide for detection of SNP TSC0026041
gtttttatgtttg

SEQ ID NO: 104162 - DNA, 13 bp, Artificial Sequence
  Oligonucleotide for detection of SNP TSC0026041
caaacataaaaac

SEQ ID NO: 104163 - DNA, 13 bp, Artificial Sequence
  Oligonucleotide for detection of SNP TSC0026041
gttttcgtgtttg

SEQ ID NO: 104164 - DNA, 13 bp, Artificial Sequence
  Oligonucleotide for detection of SNP TSC0026041
caaacacgaaaac

SEQ ID NO: 104165 - DNA, 13 bp, Artificial Sequence
  Oligonucleotide for detection of SNP TSC0026042
ttgttttttttag

SEQ ID NO: 104166 - DNA, 13 bp, Artificial Sequence
  Oligonucleotide for detection of SNP TSC0026042
ctaaaaaaaacaa

SEQ ID NO: 104167 - DNA, 13 bp, Artificial Sequence
  Oligonucleotide for detection of SNP TSC0026042
ttgtttgttttag

SEQ ID NO: 104168 - DNA, 13 bp, Artificial Sequence
  Oligonucleotide for detection of SNP TSC0026042
ctaaaacaaacaa

SEQ ID NO: 104169 - DNA, 13 bp, Artificial Sequence
  Oligonucleotide for detection of SNP TSC0026042
ttgggggaggtag

SEQ ID NO: 104170 - DNA, 13 bp, Artificial Sequence
  Oligonucleotide for detection of SNP TSC0026042
ctacctcccccaa

SEQ ID NO: 104171 - DNA, 13 bp, Artificial Sequence
  Oligonucleotide for detection of SNP TSC0026042
ttggggtaggtag

SEQ ID NO: 104172 - DNA, 13 bp, Artificial Sequence
  Oligonucleotide for detection of SNP TSC0026042
ctacctaccccaa

SEQ ID NO: 104173 - DNA, 13 bp, Artificial Sequence
  Oligonucleotide for detection of SNP TSC0026044
tttgttgatattg

SEQ ID NO: 104174 - DNA, 13 bp, Artificial Sequence
  Oligonucleotide for detection of SNP TSC0026044
caatatcaacaaa

SEQ ID NO: 104175 - DNA, 13 bp, Artificial Sequence
  Oligonucleotide for detection of SNP TSC0026044
taatattagtaaa

SEQ ID NO: 104176 - DNA, 13 bp, Artificial Sequence
  Oligonucleotide for detection of SNP TSC0026044
tttactaatatta

SEQ ID NO: 104177 - DNA, 13 bp, Artificial Sequence
  Oligonucleotide for detection of SNP TSC0026044
taatataagtaaa

SEQ ID NO: 104178 - DNA, 13 bp, Artificial Sequence
  Oligonucleotide for detection of SNP TSC0026044
tttacttatatta

SEQ ID NO: 104179 - DNA, 13 bp, Artificial Sequence
  Oligonucleotide for detection of SNP TSC0026047
aggttatgtttgy

SEQ ID NO: 104180 - DNA, 13 bp, Artificial Sequence
  Oligonucleotide for detection of SNP TSC0026047
rcaaacataacct

SEQ ID NO: 104181 - DNA, 13 bp, Artificial Sequence
  Oligonucleotide for detection of SNP TSC0026047
aggttaggtttgy

SEQ ID NO: 104182 - DNA, 13 bp, Artificial Sequence
  Oligonucleotide for detection of SNP TSC0026047
rcaaacctaacct

SEQ ID NO: 104183 - DNA, 13 bp, Artificial Sequence
  Oligonucleotide for detection of SNP TSC0026047
aggttacgtttgy

SEQ ID NO: 104184 - DNA, 13 bp, Artificial Sequence
  Oligonucleotide for detection of SNP TSC0026047
rcaaacgtaacct

SEQ ID NO: 104185 - DNA, 13 bp, Artificial Sequence
  Oligonucleotide for detection of SNP TSC0026047
gtaagtgtggttt

SEQ ID NO: 104186 - DNA, 13 bp, Artificial Sequence
  Oligonucleotide for detection of SNP TSC0026047
aaaccacacttac

SEQ ID NO: 104187 - DNA, 13 bp, Artificial Sequence
  Oligonucleotide for detection of SNP TSC0026047
gtaagtttggttt

SEQ ID NO: 104188 - DNA, 13 bp, Artificial Sequence
  Oligonucleotide for detection of SNP TSC0026047
aaaccaaacttac

SEQ ID NO: 104189 - DNA, 13 bp, Artificial Sequence
  Oligonucleotide for detection of SNP TSC0026047
gtaagcgtggttt

SEQ ID NO: 104190 - DNA, 13 bp, Artificial Sequence
  Oligonucleotide for detection of SNP TSC0026047
aaaccacgcttac

SEQ ID NO: 104191 - DNA, 13 bp, Artificial Sequence
  Oligonucleotide for detection of SNP TSC0026048
attggagtgggga

SEQ ID NO: 104192 - DNA, 13 bp, Artificial Sequence
  Oligonucleotide for detection of SNP TSC0026048
tccccactccaat

SEQ ID NO: 104193 - DNA, 13 bp, Artificial Sequence
  Oligonucleotide for detection of SNP TSC0026048
attggaatgggga

SEQ ID NO: 104194 - DNA, 13 bp, Artificial Sequence
  Oligonucleotide for detection of SNP TSC0026048
tccccattccaat

SEQ ID NO: 104195 - DNA, 13 bp, Artificial Sequence
  Oligonucleotide for detection of SNP TSC0026049
agttaggatgtaa

SEQ ID NO: 104196 - DNA, 13 bp, Artificial Sequence
  Oligonucleotide for detection of SNP TSC0026049
ttacatcctaact

SEQ ID NO: 104197 - DNA, 13 bp, Artificial Sequence
  Oligonucleotide for detection of SNP TSC0026049
agttagaatgtaa

SEQ ID NO: 104198 - DNA, 13 bp, Artificial Sequence
  Oligonucleotide for detection of SNP TSC0026049
ttacattctaact

SEQ ID NO: 104199 - DNA, 13 bp, Artificial Sequence
  Oligonucleotide for detection of SNP TSC0026050
gtatagagtttay

SEQ ID NO: 104200 - DNA, 13 bp, Artificial Sequence
  Oligonucleotide for detection of SNP TSC0026050
rtaaactctatac

SEQ ID NO: 104201 - DNA, 13 bp, Artificial Sequence
  Oligonucleotide for detection of SNP TSC0026050
gtatagtgtttay

SEQ ID NO: 104202 - DNA, 13 bp, Artificial Sequence
  Oligonucleotide for detection of SNP TSC0026050
rtaaacactatac

SEQ ID NO: 104203 - DNA, 13 bp, Artificial Sequence
  Oligonucleotide for detection of SNP TSC0026050
gtggattttgtgy

SEQ ID NO: 104204 - DNA, 13 bp, Artificial Sequence
  Oligonucleotide for detection of SNP TSC0026050
rcacaaaatccac

SEQ ID NO: 104205 - DNA, 13 bp, Artificial Sequence
  Oligonucleotide for detection of SNP TSC0026050
gtggatattgtgy

SEQ ID NO: 104206 - DNA, 13 bp, Artificial Sequence
  Oligonucleotide for detection of SNP TSC0026050
rcacaatatccac

SEQ ID NO: 104207 - DNA, 13 bp, Artificial Sequence
  Oligonucleotide for detection of SNP TSC0026051
tgttttatttaaa

SEQ ID NO: 104208 - DNA, 13 bp, Artificial Sequence
  Oligonucleotide for detection of SNP TSC0026051
tttaaataaaaca

SEQ ID NO: 104209 - DNA, 13 bp, Artificial Sequence
  Oligonucleotide for detection of SNP TSC0026051
tgttttgtttaaa

SEQ ID NO: 104210 - DNA, 13 bp, Artificial Sequence
  Oligonucleotide for detection of SNP TSC0026051
tttaaacaaaaca

SEQ ID NO: 104211 - DNA, 13 bp, Artificial Sequence
  Oligonucleotide for detection of SNP TSC0026054
gggaggcggaggt

SEQ ID NO: 104212 - DNA, 13 bp, Artificial Sequence
  Oligonucleotide for detection of SNP TSC0026054
acctccgcctccc

SEQ ID NO: 104213 - DNA, 13 bp, Artificial Sequence
  Oligonucleotide for detection of SNP TSC0026056
ttgggtgttatga

SEQ ID NO: 104214 - DNA, 13 bp, Artificial Sequence
  Oligonucleotide for detection of SNP TSC0026056
tcataacacccaa

SEQ ID NO: 104215 - DNA, 13 bp, Artificial Sequence
  Oligonucleotide for detection of SNP TSC0026056
ttgggtattatga

SEQ ID NO: 104216 - DNA, 13 bp, Artificial Sequence
  Oligonucleotide for detection of SNP TSC0026056
tcataatacccaa

SEQ ID NO: 104217 - DNA, 13 bp, Artificial Sequence
  Oligonucleotide for detection of SNP TSC0026057
taataggtagtgg

SEQ ID NO: 104218 - DNA, 13 bp, Artificial Sequence
  Oligonucleotide for detection of SNP TSC0026057
ccactacctatta

SEQ ID NO: 104219 - DNA, 13 bp, Artificial Sequence
  Oligonucleotide for detection of SNP TSC0026057
taatagttagtgg

SEQ ID NO: 104220 - DNA, 13 bp, Artificial Sequence
  Oligonucleotide for detection of SNP TSC0026057
ccactaactatta

SEQ ID NO: 104221 - DNA, 13 bp, Artificial Sequence
  Oligonucleotide for detection of SNP TSC0026057
ttattatttgtta

SEQ ID NO: 104222 - DNA, 13 bp, Artificial Sequence
  Oligonucleotide for detection of SNP TSC0026057
taacaaataataa

SEQ ID NO: 104223 - DNA, 13 bp, Artificial Sequence
  Oligonucleotide for detection of SNP TSC0026057
ttattaattgtta

SEQ ID NO: 104224 - DNA, 13 bp, Artificial Sequence
  Oligonucleotide for detection of SNP TSC0026057
taacaattaataa

SEQ ID NO: 104225 - DNA, 13 bp, Artificial Sequence
  Oligonucleotide for detection of SNP TSC0026058
atatttatggata

SEQ ID NO: 104226 - DNA, 13 bp, Artificial Sequence
  Oligonucleotide for detection of SNP TSC0026058
tatccataaatat

SEQ ID NO: 104227 - DNA, 13 bp, Artificial Sequence
  Oligonucleotide for detection of SNP TSC0026058
atatttttggata

SEQ ID NO: 104228 - DNA, 13 bp, Artificial Sequence
  Oligonucleotide for detection of SNP TSC0026058
tatccaaaaatat

SEQ ID NO: 104229 - DNA, 13 bp, Artificial Sequence
  Oligonucleotide for detection of SNP TSC0026058
tgtttatgagtat

SEQ ID NO: 104230 - DNA, 13 bp, Artificial Sequence
  Oligonucleotide for detection of SNP TSC0026058
atactcataaaca

SEQ ID NO: 104231 - DNA, 13 bp, Artificial Sequence
  Oligonucleotide for detection of SNP TSC0026058
tgtttaggagtat

SEQ ID NO: 104232 - DNA, 13 bp, Artificial Sequence
  Oligonucleotide for detection of SNP TSC0026058
atactcctaaaca

SEQ ID NO: 104233 - DNA, 13 bp, Artificial Sequence
  Oligonucleotide for detection of SNP TSC0026060
ttggttatgtgty

SEQ ID NO: 104234 - DNA, 13 bp, Artificial Sequence
  Oligonucleotide for detection of SNP TSC0026060
racacataaccaa

SEQ ID NO: 104235 - DNA, 13 bp, Artificial Sequence
  Oligonucleotide for detection of SNP TSC0026060
ttggttacgtgty

SEQ ID NO: 104236 - DNA, 13 bp, Artificial Sequence
  Oligonucleotide for detection of SNP TSC0026060
racacgtaaccaa

SEQ ID NO: 104237 - DNA, 13 bp, Artificial Sequence
  Oligonucleotide for detection of SNP TSC0026060
ttggttgcgtgty

SEQ ID NO: 104238 - DNA, 13 bp, Artificial Sequence
  Oligonucleotide for detection of SNP TSC0026060
racacgcaaccaa

SEQ ID NO: 104239 - DNA, 13 bp, Artificial Sequence
  Oligonucleotide for detection of SNP TSC0026060
ttggtcgcgtgty

SEQ ID NO: 104240 - DNA, 13 bp, Artificial Sequence
  Oligonucleotide for detection of SNP TSC0026060
racacgcgaccaa

SEQ ID NO: 104241 - DNA, 13 bp, Artificial Sequence
  Oligonucleotide for detection of SNP TSC0026060
ggtatgtggttag

SEQ ID NO: 104242 - DNA, 13 bp, Artificial Sequence
  Oligonucleotide for detection of SNP TSC0026060
ctaaccacatacc

SEQ ID NO: 104243 - DNA, 13 bp, Artificial Sequence
  Oligonucleotide for detection of SNP TSC0026060
ggtacgtggttag

SEQ ID NO: 104244 - DNA, 13 bp, Artificial Sequence
  Oligonucleotide for detection of SNP TSC0026060
ctaaccacgtacc

SEQ ID NO: 104245 - DNA, 13 bp, Artificial Sequence
  Oligonucleotide for detection of SNP TSC0026060
ggtatgcggttag

SEQ ID NO: 104246 - DNA, 13 bp, Artificial Sequence
  Oligonucleotide for detection of SNP TSC0026060
ctaaccgcatacc

SEQ ID NO: 104247 - DNA, 13 bp, Artificial Sequence
  Oligonucleotide for detection of SNP TSC0026060
ggtacgcggttag

SEQ ID NO: 104248 - DNA, 13 bp, Artificial Sequence
  Oligonucleotide for detection of SNP TSC0026060
ctaaccgcgtacc

SEQ ID NO: 104249 - DNA, 13 bp, Artificial Sequence
  Oligonucleotide for detection of SNP TSC0026061
taaagtaaagtta

SEQ ID NO: 104250 - DNA, 13 bp, Artificial Sequence
  Oligonucleotide for detection of SNP TSC0026061
taactttacttta

SEQ ID NO: 104251 - DNA, 13 bp, Artificial Sequence
  Oligonucleotide for detection of SNP TSC0026061
taaagtgaagtta

SEQ ID NO: 104252 - DNA, 13 bp, Artificial Sequence
  Oligonucleotide for detection of SNP TSC0026061
taacttcacttta

SEQ ID NO: 104253 - DNA, 13 bp, Artificial Sequence
  Oligonucleotide for detection of SNP TSC0026061
taaagcgaagtta

SEQ ID NO: 104254 - DNA, 13 bp, Artificial Sequence
  Oligonucleotide for detection of SNP TSC0026061
taacttcgcttta

SEQ ID NO: 104255 - DNA, 13 bp, Artificial Sequence
  Oligonucleotide for detection of SNP TSC0026061
tggttttgtttta

SEQ ID NO: 104256 - DNA, 13 bp, Artificial Sequence
  Oligonucleotide for detection of SNP TSC0026061
taaaacaaaacca

SEQ ID NO: 104257 - DNA, 13 bp, Artificial Sequence
  Oligonucleotide for detection of SNP TSC0026061
tggtttcgtttta

SEQ ID NO: 104258 - DNA, 13 bp, Artificial Sequence
  Oligonucleotide for detection of SNP TSC0026061
taaaacgaaacca

SEQ ID NO: 104259 - DNA, 13 bp, Artificial Sequence
  Oligonucleotide for detection of SNP TSC0026062
ggtttaaagttgg

SEQ ID NO: 104260 - DNA, 13 bp, Artificial Sequence
  Oligonucleotide for detection of SNP TSC0026062
ccaactttaaacc

SEQ ID NO: 104261 - DNA, 13 bp, Artificial Sequence
  Oligonucleotide for detection of SNP TSC0026064
tttatttggtaay

SEQ ID NO: 104262 - DNA, 13 bp, Artificial Sequence
  Oligonucleotide for detection of SNP TSC0026064
rttaccaaataaa

SEQ ID NO: 104263 - DNA, 13 bp, Artificial Sequence
  Oligonucleotide for detection of SNP TSC0026064
tttattcggtaay

SEQ ID NO: 104264 - DNA, 13 bp, Artificial Sequence
  Oligonucleotide for detection of SNP TSC0026064
rttaccgaataaa

SEQ ID NO: 104265 - DNA, 13 bp, Artificial Sequence
  Oligonucleotide for detection of SNP TSC0026064
gttattggatgga

SEQ ID NO: 104266 - DNA, 13 bp, Artificial Sequence
  Oligonucleotide for detection of SNP TSC0026064
tccatccaataac

SEQ ID NO: 104267 - DNA, 13 bp, Artificial Sequence
  Oligonucleotide for detection of SNP TSC0026064
gttattagatgga

SEQ ID NO: 104268 - DNA, 13 bp, Artificial Sequence
  Oligonucleotide for detection of SNP TSC0026064
tccatctaataac

SEQ ID NO: 104269 - DNA, 13 bp, Artificial Sequence
  Oligonucleotide for detection of SNP TSC0026064
gttatcggatgga

SEQ ID NO: 104270 - DNA, 13 bp, Artificial Sequence
  Oligonucleotide for detection of SNP TSC0026064
tccatccgataac

SEQ ID NO: 104271 - DNA, 13 bp, Artificial Sequence
  Oligonucleotide for detection of SNP TSC0026065
gtatttgtagttt

SEQ ID NO: 104272 - DNA, 13 bp, Artificial Sequence
  Oligonucleotide for detection of SNP TSC0026065
aaactacaaatac

SEQ ID NO: 104273 - DNA, 13 bp, Artificial Sequence
  Oligonucleotide for detection of SNP TSC0026065
gtatttatagttt

SEQ ID NO: 104274 - DNA, 13 bp, Artificial Sequence
  Oligonucleotide for detection of SNP TSC0026065
aaactataaatac

SEQ ID NO: 104275 - DNA, 13 bp, Artificial Sequence
  Oligonucleotide for detection of SNP TSC0026066
ataaatggtttta

SEQ ID NO: 104276 - DNA, 13 bp, Artificial Sequence
  Oligonucleotide for detection of SNP TSC0026066
taaaaccatttat

SEQ ID NO: 104277 - DNA, 13 bp, Artificial Sequence
  Oligonucleotide for detection of SNP TSC0026066
ataaattgtttta

SEQ ID NO: 104278 - DNA, 13 bp, Artificial Sequence
  Oligonucleotide for detection of SNP TSC0026066
taaaacaatttat

SEQ ID NO: 104279 - DNA, 13 bp, Artificial Sequence
  Oligonucleotide for detection of SNP TSC0026066
ataaacggtttta

SEQ ID NO: 104280 - DNA, 13 bp, Artificial Sequence
  Oligonucleotide for detection of SNP TSC0026066
taaaaccgtttat

SEQ ID NO: 104281 - DNA, 13 bp, Artificial Sequence
  Oligonucleotide for detection of SNP TSC0026066
taaagttgtttgt

SEQ ID NO: 104282 - DNA, 13 bp, Artificial Sequence
  Oligonucleotide for detection of SNP TSC0026066
acaaacaacttta

SEQ ID NO: 104283 - DNA, 13 bp, Artificial Sequence
  Oligonucleotide for detection of SNP TSC0026066
taaagtagtttgt

SEQ ID NO: 104284 - DNA, 13 bp, Artificial Sequence
  Oligonucleotide for detection of SNP TSC0026066
acaaactacttta

SEQ ID NO: 104285 - DNA, 13 bp, Artificial Sequence
  Oligonucleotide for detection of SNP TSC0026066
taaagtcgtttgt

SEQ ID NO: 104286 - DNA, 13 bp, Artificial Sequence
  Oligonucleotide for detection of SNP TSC0026066
acaaacgacttta

SEQ ID NO: 104287 - DNA, 13 bp, Artificial Sequence
  Oligonucleotide for detection of SNP TSC0026069
ttaagggttttty

SEQ ID NO: 104288 - DNA, 13 bp, Artificial Sequence
  Oligonucleotide for detection of SNP TSC0026069
raaaaacccttaa

SEQ ID NO: 104289 - DNA, 13 bp, Artificial Sequence
  Oligonucleotide for detection of SNP TSC0026069
ttaaggtttttty

SEQ ID NO: 104290 - DNA, 13 bp, Artificial Sequence
  Oligonucleotide for detection of SNP TSC0026069
raaaaaaccttaa

SEQ ID NO: 104291 - DNA, 13 bp, Artificial Sequence
  Oligonucleotide for detection of SNP TSC0026069
gaaaagtttttga

SEQ ID NO: 104292 - DNA, 13 bp, Artificial Sequence
  Oligonucleotide for detection of SNP TSC0026069
tcaaaaacttttc

SEQ ID NO: 104293 - DNA, 13 bp, Artificial Sequence
  Oligonucleotide for detection of SNP TSC0026069
gaaaagattttga

SEQ ID NO: 104294 - DNA, 13 bp, Artificial Sequence
  Oligonucleotide for detection of SNP TSC0026069
tcaaaatcttttc

SEQ ID NO: 104295 - DNA, 13 bp, Artificial Sequence
  Oligonucleotide for detection of SNP TSC0026070
gggggagtgggty

SEQ ID NO: 104296 - DNA, 13 bp, Artificial Sequence
  Oligonucleotide for detection of SNP TSC0026070
racccactccccc

SEQ ID NO: 104297 - DNA, 13 bp, Artificial Sequence
  Oligonucleotide for detection of SNP TSC0026070
gggggattgggty

SEQ ID NO: 104298 - DNA, 13 bp, Artificial Sequence
  Oligonucleotide for detection of SNP TSC0026070
racccaatccccc

SEQ ID NO: 104299 - DNA, 13 bp, Artificial Sequence
  Oligonucleotide for detection of SNP TSC0026072
tattttgtaatta

SEQ ID NO: 104300 - DNA, 13 bp, Artificial Sequence
  Oligonucleotide for detection of SNP TSC0026072
taattacaaaata

SEQ ID NO: 104301 - DNA, 13 bp, Artificial Sequence
  Oligonucleotide for detection of SNP TSC0026072
tattttataatta

SEQ ID NO: 104302 - DNA, 13 bp, Artificial Sequence
  Oligonucleotide for detection of SNP TSC0026072
taattataaaata

SEQ ID NO: 104303 - DNA, 13 bp, Artificial Sequence
  Oligonucleotide for detection of SNP TSC0026074
aggagtaggaggt

SEQ ID NO: 104304 - DNA, 13 bp, Artificial Sequence
  Oligonucleotide for detection of SNP TSC0026074
acctcctactcct

SEQ ID NO: 104305 - DNA, 13 bp, Artificial Sequence
  Oligonucleotide for detection of SNP TSC0026074
aggagtgggaggt

SEQ ID NO: 104306 - DNA, 13 bp, Artificial Sequence
  Oligonucleotide for detection of SNP TSC0026074
acctcccactcct

SEQ ID NO: 104307 - DNA, 13 bp, Artificial Sequence
  Oligonucleotide for detection of SNP TSC0026074
aggagcgggaggt

SEQ ID NO: 104308 - DNA, 13 bp, Artificial Sequence
  Oligonucleotide for detection of SNP TSC0026074
acctcccgctcct

SEQ ID NO: 104309 - DNA, 13 bp, Artificial Sequence
  Oligonucleotide for detection of SNP TSC0026074
attttttgttttt

SEQ ID NO: 104310 - DNA, 13 bp, Artificial Sequence
  Oligonucleotide for detection of SNP TSC0026074
aaaaacaaaaaat

SEQ ID NO: 104311 - DNA, 13 bp, Artificial Sequence
  Oligonucleotide for detection of SNP TSC0026074
atttttcgttttt

SEQ ID NO: 104312 - DNA, 13 bp, Artificial Sequence
  Oligonucleotide for detection of SNP TSC0026074
aaaaacgaaaaat

SEQ ID NO: 104313 - DNA, 13 bp, Artificial Sequence
  Oligonucleotide for detection of SNP TSC0026075
atattggtaataa

SEQ ID NO: 104314 - DNA, 13 bp, Artificial Sequence
  Oligonucleotide for detection of SNP TSC0026075
ttattaccaatat

SEQ ID NO: 104315 - DNA, 13 bp, Artificial Sequence
  Oligonucleotide for detection of SNP TSC0026075
atattgttaataa

SEQ ID NO: 104316 - DNA, 13 bp, Artificial Sequence
  Oligonucleotide for detection of SNP TSC0026075
ttattaacaatat

SEQ ID NO: 104317 - DNA, 13 bp, Artificial Sequence
  Oligonucleotide for detection of SNP TSC0026075
ttattattaatat

SEQ ID NO: 104318 - DNA, 13 bp, Artificial Sequence
  Oligonucleotide for detection of SNP TSC0026075
atattaataataa

SEQ ID NO: 104319 - DNA, 13 bp, Artificial Sequence
  Oligonucleotide for detection of SNP TSC0026075
ttattaataatat

SEQ ID NO: 104320 - DNA, 13 bp, Artificial Sequence
  Oligonucleotide for detection of SNP TSC0026075
atattattaataa

SEQ ID NO: 104321 - DNA, 13 bp, Artificial Sequence
  Oligonucleotide for detection of SNP TSC0026077
gagtaaggaatag

SEQ ID NO: 104322 - DNA, 13 bp, Artificial Sequence
  Oligonucleotide for detection of SNP TSC0026077
ctattccttactc

SEQ ID NO: 104323 - DNA, 13 bp, Artificial Sequence
  Oligonucleotide for detection of SNP TSC0026077
gagtaaagaatag

SEQ ID NO: 104324 - DNA, 13 bp, Artificial Sequence
  Oligonucleotide for detection of SNP TSC0026077
ctattctttactc

SEQ ID NO: 104325 - DNA, 13 bp, Artificial Sequence
  Oligonucleotide for detection of SNP TSC0026078
ttataggaaggtg

SEQ ID NO: 104326 - DNA, 13 bp, Artificial Sequence
  Oligonucleotide for detection of SNP TSC0026078
caccttcctataa

SEQ ID NO: 104327 - DNA, 13 bp, Artificial Sequence
  Oligonucleotide for detection of SNP TSC0026078
ttatagaaaggtg

SEQ ID NO: 104328 - DNA, 13 bp, Artificial Sequence
  Oligonucleotide for detection of SNP TSC0026078
cacctttctataa

SEQ ID NO: 104329 - DNA, 13 bp, Artificial Sequence
  Oligonucleotide for detection of SNP TSC0026080
atgtttatttggt

SEQ ID NO: 104330 - DNA, 13 bp, Artificial Sequence
  Oligonucleotide for detection of SNP TSC0026080
accaaataaacat

SEQ ID NO: 104331 - DNA, 13 bp, Artificial Sequence
  Oligonucleotide for detection of SNP TSC0026080
atgtttttttggt

SEQ ID NO: 104332 - DNA, 13 bp, Artificial Sequence
  Oligonucleotide for detection of SNP TSC0026080
accaaaaaaacat

SEQ ID NO: 104333 - DNA, 13 bp, Artificial Sequence
  Oligonucleotide for detection of SNP TSC0026080
acgtttatttggt

SEQ ID NO: 104334 - DNA, 13 bp, Artificial Sequence
  Oligonucleotide for detection of SNP TSC0026080
accaaataaacgt

SEQ ID NO: 104335 - DNA, 13 bp, Artificial Sequence
  Oligonucleotide for detection of SNP TSC0026080
acgtttttttggt

SEQ ID NO: 104336 - DNA, 13 bp, Artificial Sequence
  Oligonucleotide for detection of SNP TSC0026080
accaaaaaaacgt

SEQ ID NO: 104337 - DNA, 13 bp, Artificial Sequence
  Oligonucleotide for detection of SNP TSC0026080
attaggtggatgt

SEQ ID NO: 104338 - DNA, 13 bp, Artificial Sequence
  Oligonucleotide for detection of SNP TSC0026080
acatccacctaat

SEQ ID NO: 104339 - DNA, 13 bp, Artificial Sequence
  Oligonucleotide for detection of SNP TSC0026080
attagggggatgt

SEQ ID NO: 104340 - DNA, 13 bp, Artificial Sequence
  Oligonucleotide for detection of SNP TSC0026080
acatccccctaat

SEQ ID NO: 104341 - DNA, 13 bp, Artificial Sequence
  Oligonucleotide for detection of SNP TSC0026080
attaggtggacgt

SEQ ID NO: 104342 - DNA, 13 bp, Artificial Sequence
  Oligonucleotide for detection of SNP TSC0026080
acgtccacctaat

SEQ ID NO: 104343 - DNA, 13 bp, Artificial Sequence
  Oligonucleotide for detection of SNP TSC0026080
attagggggacgt

SEQ ID NO: 104344 - DNA, 13 bp, Artificial Sequence
  Oligonucleotide for detection of SNP TSC0026080
acgtccccctaat

SEQ ID NO: 104345 - DNA, 13 bp, Artificial Sequence
  Oligonucleotide for detection of SNP TSC0026081
gaattggggaaat

SEQ ID NO: 104346 - DNA, 13 bp, Artificial Sequence
  Oligonucleotide for detection of SNP TSC0026081
atttccccaattc

SEQ ID NO: 104347 - DNA, 13 bp, Artificial Sequence
  Oligonucleotide for detection of SNP TSC0026081
gaattgtggaaat

SEQ ID NO: 104348 - DNA, 13 bp, Artificial Sequence
  Oligonucleotide for detection of SNP TSC0026081
atttccacaattc

SEQ ID NO: 104349 - DNA, 13 bp, Artificial Sequence
  Oligonucleotide for detection of SNP TSC0026081
atttttataatty

SEQ ID NO: 104350 - DNA, 13 bp, Artificial Sequence
  Oligonucleotide for detection of SNP TSC0026081
raattataaaaat

SEQ ID NO: 104351 - DNA, 13 bp, Artificial Sequence
  Oligonucleotide for detection of SNP TSC0026082
tttgggtttttgg

SEQ ID NO: 104352 - DNA, 13 bp, Artificial Sequence
  Oligonucleotide for detection of SNP TSC0026082
ccaaaaacccaaa

SEQ ID NO: 104353 - DNA, 13 bp, Artificial Sequence
  Oligonucleotide for detection of SNP TSC0026082
ttagaattttaag

SEQ ID NO: 104354 - DNA, 13 bp, Artificial Sequence
  Oligonucleotide for detection of SNP TSC0026082
cttaaaattctaa

SEQ ID NO: 104355 - DNA, 13 bp, Artificial Sequence
  Oligonucleotide for detection of SNP TSC0026082
ttagaaatttaag

SEQ ID NO: 104356 - DNA, 13 bp, Artificial Sequence
  Oligonucleotide for detection of SNP TSC0026082
cttaaatttctaa

SEQ ID NO: 104357 - DNA, 13 bp, Artificial Sequence
  Oligonucleotide for detection of SNP TSC0026083
tggtgggatggtt

SEQ ID NO: 104358 - DNA, 13 bp, Artificial Sequence
  Oligonucleotide for detection of SNP TSC0026083
aaccatcccacca

SEQ ID NO: 104359 - DNA, 13 bp, Artificial Sequence
  Oligonucleotide for detection of SNP TSC0026083
tggtggaatggtt

SEQ ID NO: 104360 - DNA, 13 bp, Artificial Sequence
  Oligonucleotide for detection of SNP TSC0026083
aaccattccacca

SEQ ID NO: 104361 - DNA, 13 bp, Artificial Sequence
  Oligonucleotide for detection of SNP TSC0026084
ttttttaattggg

SEQ ID NO: 104362 - DNA, 13 bp, Artificial Sequence
  Oligonucleotide for detection of SNP TSC0026084
cccaattaaaaaa

SEQ ID NO: 104363 - DNA, 13 bp, Artificial Sequence
  Oligonucleotide for detection of SNP TSC0026084
ttttttgattggg

SEQ ID NO: 104364 - DNA, 13 bp, Artificial Sequence
  Oligonucleotide for detection of SNP TSC0026084
cccaatcaaaaaa

SEQ ID NO: 104365 - DNA, 13 bp, Artificial Sequence
  Oligonucleotide for detection of SNP TSC0026084
tttttcgattggg

SEQ ID NO: 104366 - DNA, 13 bp, Artificial Sequence
  Oligonucleotide for detection of SNP TSC0026084
cccaatcgaaaaa

SEQ ID NO: 104367 - DNA, 13 bp, Artificial Sequence
  Oligonucleotide for detection of SNP TSC0026084
tttagttgaggag

SEQ ID NO: 104368 - DNA, 13 bp, Artificial Sequence
  Oligonucleotide for detection of SNP TSC0026084
ctcctcaactaaa

SEQ ID NO: 104369 - DNA, 13 bp, Artificial Sequence
  Oligonucleotide for detection of SNP TSC0026084
tttagtcgaggag

SEQ ID NO: 104370 - DNA, 13 bp, Artificial Sequence
  Oligonucleotide for detection of SNP TSC0026084
ctcctcgactaaa

SEQ ID NO: 104371 - DNA, 13 bp, Artificial Sequence
  Oligonucleotide for detection of SNP TSC0026093
attttgatatgat

SEQ ID NO: 104372 - DNA, 13 bp, Artificial Sequence
  Oligonucleotide for detection of SNP TSC0026093
atcatatcaaaat

SEQ ID NO: 104373 - DNA, 13 bp, Artificial Sequence
  Oligonucleotide for detection of SNP TSC0026093
attttgttatgat

SEQ ID NO: 104374 - DNA, 13 bp, Artificial Sequence
  Oligonucleotide for detection of SNP TSC0026093
atcataacaaaat

SEQ ID NO: 104375 - DNA, 13 bp, Artificial Sequence
  Oligonucleotide for detection of SNP TSC0026093
attatattaaaat

SEQ ID NO: 104376 - DNA, 13 bp, Artificial Sequence
  Oligonucleotide for detection of SNP TSC0026093
attttaatataat

SEQ ID NO: 104377 - DNA, 13 bp, Artificial Sequence
  Oligonucleotide for detection of SNP TSC0026093
attatagtaaaat

SEQ ID NO: 104378 - DNA, 13 bp, Artificial Sequence
  Oligonucleotide for detection of SNP TSC0026093
attttactataat

SEQ ID NO: 104379 - DNA, 13 bp, Artificial Sequence
  Oligonucleotide for detection of SNP TSC0026094
agtattggtatat

SEQ ID NO: 104380 - DNA, 13 bp, Artificial Sequence
  Oligonucleotide for detection of SNP TSC0026094
atataccaatact

SEQ ID NO: 104381 - DNA, 13 bp, Artificial Sequence
  Oligonucleotide for detection of SNP TSC0026094
agtatttgtatat

SEQ ID NO: 104382 - DNA, 13 bp, Artificial Sequence
  Oligonucleotide for detection of SNP TSC0026094
atatacaaatact

SEQ ID NO: 104383 - DNA, 13 bp, Artificial Sequence
  Oligonucleotide for detection of SNP TSC0026094
atatattaatgtt

SEQ ID NO: 104384 - DNA, 13 bp, Artificial Sequence
  Oligonucleotide for detection of SNP TSC0026094
aacattaatatat

SEQ ID NO: 104385 - DNA, 13 bp, Artificial Sequence
  Oligonucleotide for detection of SNP TSC0026094
atatataaatgtt

SEQ ID NO: 104386 - DNA, 13 bp, Artificial Sequence
  Oligonucleotide for detection of SNP TSC0026094
aacatttatatat

SEQ ID NO: 104387 - DNA, 13 bp, Artificial Sequence
  Oligonucleotide for detection of SNP TSC0026095
tatggtgtttttt

SEQ ID NO: 104388 - DNA, 13 bp, Artificial Sequence
  Oligonucleotide for detection of SNP TSC0026095
aaaaaacaccata

SEQ ID NO: 104389 - DNA, 13 bp, Artificial Sequence
  Oligonucleotide for detection of SNP TSC0026095
tatggcgtttttt

SEQ ID NO: 104390 - DNA, 13 bp, Artificial Sequence
  Oligonucleotide for detection of SNP TSC0026095
aaaaaacgccata

SEQ ID NO: 104391 - DNA, 13 bp, Artificial Sequence
  Oligonucleotide for detection of SNP TSC0026095
agaaaatgttatg

SEQ ID NO: 104392 - DNA, 13 bp, Artificial Sequence
  Oligonucleotide for detection of SNP TSC0026095
cataacattttct

SEQ ID NO: 104393 - DNA, 13 bp, Artificial Sequence
  Oligonucleotide for detection of SNP TSC0026095
agaaaacgttatg

SEQ ID NO: 104394 - DNA, 13 bp, Artificial Sequence
  Oligonucleotide for detection of SNP TSC0026095
cataacgttttct

SEQ ID NO: 104395 - DNA, 13 bp, Artificial Sequence
  Oligonucleotide for detection of SNP TSC0026098
attattgttagag

SEQ ID NO: 104396 - DNA, 13 bp, Artificial Sequence
  Oligonucleotide for detection of SNP TSC0026098
ctctaacaataat

SEQ ID NO: 104397 - DNA, 13 bp, Artificial Sequence
  Oligonucleotide for detection of SNP TSC0026098
attattattagag

SEQ ID NO: 104398 - DNA, 13 bp, Artificial Sequence
  Oligonucleotide for detection of SNP TSC0026098
ctctaataataat

SEQ ID NO: 104399 - DNA, 13 bp, Artificial Sequence
  Oligonucleotide for detection of SNP TSC0026100
atagaagtgttta

SEQ ID NO: 104400 - DNA, 13 bp, Artificial Sequence
  Oligonucleotide for detection of SNP TSC0026100
taaacacttctat

SEQ ID NO: 104401 - DNA, 13 bp, Artificial Sequence
  Oligonucleotide for detection of SNP TSC0026100
atagaaatgttta

SEQ ID NO: 104402 - DNA, 13 bp, Artificial Sequence
  Oligonucleotide for detection of SNP TSC0026100
taaacatttctat

SEQ ID NO: 104403 - DNA, 13 bp, Artificial Sequence
  Oligonucleotide for detection of SNP TSC0026101
ttggtaaggtgtg

SEQ ID NO: 104404 - DNA, 13 bp, Artificial Sequence
  Oligonucleotide for detection of SNP TSC0026101
cacaccttaccaa

SEQ ID NO: 104405 - DNA, 13 bp, Artificial Sequence
  Oligonucleotide for detection of SNP TSC0026102
gttgattgaaaag

SEQ ID NO: 104406 - DNA, 13 bp, Artificial Sequence
  Oligonucleotide for detection of SNP TSC0026102
cttttcaatcaac

SEQ ID NO: 104407 - DNA, 13 bp, Artificial Sequence
  Oligonucleotide for detection of SNP TSC0026102
gttgatcgaaaag

SEQ ID NO: 104408 - DNA, 13 bp, Artificial Sequence
  Oligonucleotide for detection of SNP TSC0026102
cttttcgatcaac

SEQ ID NO: 104409 - DNA, 13 bp, Artificial Sequence
  Oligonucleotide for detection of SNP TSC0026102
ttttttggttaay

SEQ ID NO: 104410 - DNA, 13 bp, Artificial Sequence
  Oligonucleotide for detection of SNP TSC0026102
rttaaccaaaaaa

SEQ ID NO: 104411 - DNA, 13 bp, Artificial Sequence
  Oligonucleotide for detection of SNP TSC0026102
ttttttagttaay

SEQ ID NO: 104412 - DNA, 13 bp, Artificial Sequence
  Oligonucleotide for detection of SNP TSC0026102
rttaactaaaaaa

SEQ ID NO: 104413 - DNA, 13 bp, Artificial Sequence
  Oligonucleotide for detection of SNP TSC0026102
tttttcggttaay

SEQ ID NO: 104414 - DNA, 13 bp, Artificial Sequence
  Oligonucleotide for detection of SNP TSC0026102
rttaaccgaaaaa

SEQ ID NO: 104415 - DNA, 13 bp, Artificial Sequence
  Oligonucleotide for detection of SNP TSC0026103
ttggatgttgttt

SEQ ID NO: 104416 - DNA, 13 bp, Artificial Sequence
  Oligonucleotide for detection of SNP TSC0026103
aaacaacatccaa

SEQ ID NO: 104417 - DNA, 13 bp, Artificial Sequence
  Oligonucleotide for detection of SNP TSC0026103
ttggacgttgttt

SEQ ID NO: 104418 - DNA, 13 bp, Artificial Sequence
  Oligonucleotide for detection of SNP TSC0026103
aaacaacgtccaa

SEQ ID NO: 104419 - DNA, 13 bp, Artificial Sequence
  Oligonucleotide for detection of SNP TSC0026103
aagtagcgtttaa

SEQ ID NO: 104420 - DNA, 13 bp, Artificial Sequence
  Oligonucleotide for detection of SNP TSC0026103
ttaaacgctactt

SEQ ID NO: 104421 - DNA, 13 bp, Artificial Sequence
  Oligonucleotide for detection of SNP TSC0026105
tttttttagagtt

SEQ ID NO: 104422 - DNA, 13 bp, Artificial Sequence
  Oligonucleotide for detection of SNP TSC0026105
aactctaaaaaaa

SEQ ID NO: 104423 - DNA, 13 bp, Artificial Sequence
  Oligonucleotide for detection of SNP TSC0026105
aattttgaaggaa

SEQ ID NO: 104424 - DNA, 13 bp, Artificial Sequence
  Oligonucleotide for detection of SNP TSC0026105
ttccttcaaaatt

SEQ ID NO: 104425 - DNA, 13 bp, Artificial Sequence
  Oligonucleotide for detection of SNP TSC0026105
aatttttaaggaa

SEQ ID NO: 104426 - DNA, 13 bp, Artificial Sequence
  Oligonucleotide for detection of SNP TSC0026105
ttccttaaaaatt

SEQ ID NO: 104427 - DNA, 13 bp, Artificial Sequence
  Oligonucleotide for detection of SNP TSC0026106
atttgtttttttg

SEQ ID NO: 104428 - DNA, 13 bp, Artificial Sequence
  Oligonucleotide for detection of SNP TSC0026106
caaaaaaacaaat

SEQ ID NO: 104429 - DNA, 13 bp, Artificial Sequence
  Oligonucleotide for detection of SNP TSC0026106
taaaaatataaat

SEQ ID NO: 104430 - DNA, 13 bp, Artificial Sequence
  Oligonucleotide for detection of SNP TSC0026106
atttatattttta

SEQ ID NO: 104431 - DNA, 13 bp, Artificial Sequence
  Oligonucleotide for detection of SNP TSC0026106
taaaaaaataaat

SEQ ID NO: 104432 - DNA, 13 bp, Artificial Sequence
  Oligonucleotide for detection of SNP TSC0026106
atttattttttta

SEQ ID NO: 104433 - DNA, 13 bp, Artificial Sequence
  Oligonucleotide for detection of SNP TSC0026107
tattatgttgtga

SEQ ID NO: 104434 - DNA, 13 bp, Artificial Sequence
  Oligonucleotide for detection of SNP TSC0026107
tcacaacataata

SEQ ID NO: 104435 - DNA, 13 bp, Artificial Sequence
  Oligonucleotide for detection of SNP TSC0026107
tattatattgtga

SEQ ID NO: 104436 - DNA, 13 bp, Artificial Sequence
  Oligonucleotide for detection of SNP TSC0026107
tcacaatataata

SEQ ID NO: 104437 - DNA, 13 bp, Artificial Sequence
  Oligonucleotide for detection of SNP TSC0026109
ttatgtgagggta

SEQ ID NO: 104438 - DNA, 13 bp, Artificial Sequence
  Oligonucleotide for detection of SNP TSC0026109
taccctcacataa

SEQ ID NO: 104439 - DNA, 13 bp, Artificial Sequence
  Oligonucleotide for detection of SNP TSC0026109
ttatgtaagggta

SEQ ID NO: 104440 - DNA, 13 bp, Artificial Sequence
  Oligonucleotide for detection of SNP TSC0026109
tacccttacataa

SEQ ID NO: 104441 - DNA, 13 bp, Artificial Sequence
  Oligonucleotide for detection of SNP TSC0026110
aatatttgtttay

SEQ ID NO: 104442 - DNA, 13 bp, Artificial Sequence
  Oligonucleotide for detection of SNP TSC0026110
rtaaacaaatatt

SEQ ID NO: 104443 - DNA, 13 bp, Artificial Sequence
  Oligonucleotide for detection of SNP TSC0026110
aatattcgtttay

SEQ ID NO: 104444 - DNA, 13 bp, Artificial Sequence
  Oligonucleotide for detection of SNP TSC0026110
rtaaacgaatatt

SEQ ID NO: 104445 - DNA, 13 bp, Artificial Sequence
  Oligonucleotide for detection of SNP TSC0026110
gtgggtgagtgtt

SEQ ID NO: 104446 - DNA, 13 bp, Artificial Sequence
  Oligonucleotide for detection of SNP TSC0026110
aacactcacccac

SEQ ID NO: 104447 - DNA, 13 bp, Artificial Sequence
  Oligonucleotide for detection of SNP TSC0026110
gtgggtaagtgtt

SEQ ID NO: 104448 - DNA, 13 bp, Artificial Sequence
  Oligonucleotide for detection of SNP TSC0026110
aacacttacccac

SEQ ID NO: 104449 - DNA, 13 bp, Artificial Sequence
  Oligonucleotide for detection of SNP TSC0026110
gtgggcgagtgtt

SEQ ID NO: 104450 - DNA, 13 bp, Artificial Sequence
  Oligonucleotide for detection of SNP TSC0026110
aacactcgcccac

SEQ ID NO: 104451 - DNA, 13 bp, Artificial Sequence
  Oligonucleotide for detection of SNP TSC0026111
aggtaattggtty

SEQ ID NO: 104452 - DNA, 13 bp, Artificial Sequence
  Oligonucleotide for detection of SNP TSC0026111
raaccaattacct

SEQ ID NO: 104453 - DNA, 13 bp, Artificial Sequence
  Oligonucleotide for detection of SNP TSC0026111
aggtaagtggtty

SEQ ID NO: 104454 - DNA, 13 bp, Artificial Sequence
  Oligonucleotide for detection of SNP TSC0026111
raaccacttacct

SEQ ID NO: 104455 - DNA, 13 bp, Artificial Sequence
  Oligonucleotide for detection of SNP TSC0026111
gagttagttgttt

SEQ ID NO: 104456 - DNA, 13 bp, Artificial Sequence
  Oligonucleotide for detection of SNP TSC0026111
aaacaactaactc

SEQ ID NO: 104457 - DNA, 13 bp, Artificial Sequence
  Oligonucleotide for detection of SNP TSC0026111
gagttatttgttt

SEQ ID NO: 104458 - DNA, 13 bp, Artificial Sequence
  Oligonucleotide for detection of SNP TSC0026111
aaacaaataactc

SEQ ID NO: 104459 - DNA, 13 bp, Artificial Sequence
  Oligonucleotide for detection of SNP TSC0026119
ttaggttggggta

SEQ ID NO: 104460 - DNA, 13 bp, Artificial Sequence
  Oligonucleotide for detection of SNP TSC0026119
taccccaacctaa

SEQ ID NO: 104461 - DNA, 13 bp, Artificial Sequence
  Oligonucleotide for detection of SNP TSC0026119
ttaggtcggggta

SEQ ID NO: 104462 - DNA, 13 bp, Artificial Sequence
  Oligonucleotide for detection of SNP TSC0026119
taccccgacctaa

SEQ ID NO: 104463 - DNA, 13 bp, Artificial Sequence
  Oligonucleotide for detection of SNP TSC0026119
tgttttggtttgg

SEQ ID NO: 104464 - DNA, 13 bp, Artificial Sequence
  Oligonucleotide for detection of SNP TSC0026119
ccaaaccaaaaca

SEQ ID NO: 104465 - DNA, 13 bp, Artificial Sequence
  Oligonucleotide for detection of SNP TSC0026119
tgttttagtttgg

SEQ ID NO: 104466 - DNA, 13 bp, Artificial Sequence
  Oligonucleotide for detection of SNP TSC0026119
ccaaactaaaaca

SEQ ID NO: 104467 - DNA, 13 bp, Artificial Sequence
  Oligonucleotide for detection of SNP TSC0026119
tgtttcggtttgg

SEQ ID NO: 104468 - DNA, 13 bp, Artificial Sequence
  Oligonucleotide for detection of SNP TSC0026119
ccaaaccgaaaca

SEQ ID NO: 104469 - DNA, 13 bp, Artificial Sequence
  Oligonucleotide for detection of SNP TSC0026120
agttagggggttt

SEQ ID NO: 104470 - DNA, 13 bp, Artificial Sequence
  Oligonucleotide for detection of SNP TSC0026120
aaaccccctaact

SEQ ID NO: 104471 - DNA, 13 bp, Artificial Sequence
  Oligonucleotide for detection of SNP TSC0026120
agttagtgggttt

SEQ ID NO: 104472 - DNA, 13 bp, Artificial Sequence
  Oligonucleotide for detection of SNP TSC0026120
aaacccactaact

SEQ ID NO: 104473 - DNA, 13 bp, Artificial Sequence
  Oligonucleotide for detection of SNP TSC0026120
aaattttttggtt

SEQ ID NO: 104474 - DNA, 13 bp, Artificial Sequence
  Oligonucleotide for detection of SNP TSC0026120
aaccaaaaaattt

SEQ ID NO: 104475 - DNA, 13 bp, Artificial Sequence
  Oligonucleotide for detection of SNP TSC0026120
aaatttattggtt

SEQ ID NO: 104476 - DNA, 13 bp, Artificial Sequence
  Oligonucleotide for detection of SNP TSC0026120
aaccaataaattt

SEQ ID NO: 104477 - DNA, 13 bp, Artificial Sequence
  Oligonucleotide for detection of SNP TSC0026121
ttttgtatttgta

SEQ ID NO: 104478 - DNA, 13 bp, Artificial Sequence
  Oligonucleotide for detection of SNP TSC0026121
tacaaatacaaaa

SEQ ID NO: 104479 - DNA, 13 bp, Artificial Sequence
  Oligonucleotide for detection of SNP TSC0026121
ttttgtgtttgta

SEQ ID NO: 104480 - DNA, 13 bp, Artificial Sequence
  Oligonucleotide for detection of SNP TSC0026121
tacaaacacaaaa

SEQ ID NO: 104481 - DNA, 13 bp, Artificial Sequence
  Oligonucleotide for detection of SNP TSC0026121
ttttgcgtttgta

SEQ ID NO: 104482 - DNA, 13 bp, Artificial Sequence
  Oligonucleotide for detection of SNP TSC0026121
tacaaacgcaaaa

SEQ ID NO: 104483 - DNA, 13 bp, Artificial Sequence
  Oligonucleotide for detection of SNP TSC0026121
tgtaaatgtaagg

SEQ ID NO: 104484 - DNA, 13 bp, Artificial Sequence
  Oligonucleotide for detection of SNP TSC0026121
ccttacatttaca

SEQ ID NO: 104485 - DNA, 13 bp, Artificial Sequence
  Oligonucleotide for detection of SNP TSC0026121
tgtaaacgtaagg

SEQ ID NO: 104486 - DNA, 13 bp, Artificial Sequence
  Oligonucleotide for detection of SNP TSC0026121
ccttacgtttaca

SEQ ID NO: 104487 - DNA, 13 bp, Artificial Sequence
  Oligonucleotide for detection of SNP TSC0026122
taaattattttty

SEQ ID NO: 104488 - DNA, 13 bp, Artificial Sequence
  Oligonucleotide for detection of SNP TSC0026122
raaaaataattta

SEQ ID NO: 104489 - DNA, 13 bp, Artificial Sequence
  Oligonucleotide for detection of SNP TSC0026122
taaattgttttty

SEQ ID NO: 104490 - DNA, 13 bp, Artificial Sequence
  Oligonucleotide for detection of SNP TSC0026122
raaaaacaattta

SEQ ID NO: 104491 - DNA, 13 bp, Artificial Sequence
  Oligonucleotide for detection of SNP TSC0026123
gtaatagttttta

SEQ ID NO: 104492 - DNA, 13 bp, Artificial Sequence
  Oligonucleotide for detection of SNP TSC0026123
taaaaactattac

SEQ ID NO: 104493 - DNA, 13 bp, Artificial Sequence
  Oligonucleotide for detection of SNP TSC0026123
gtaataattttta

SEQ ID NO: 104494 - DNA, 13 bp, Artificial Sequence
  Oligonucleotide for detection of SNP TSC0026123
taaaaattattac

SEQ ID NO: 104495 - DNA, 13 bp, Artificial Sequence
  Oligonucleotide for detection of SNP TSC0026125
ggttagtgggaaa

SEQ ID NO: 104496 - DNA, 13 bp, Artificial Sequence
  Oligonucleotide for detection of SNP TSC0026125
tttcccactaacc

SEQ ID NO: 104497 - DNA, 13 bp, Artificial Sequence
  Oligonucleotide for detection of SNP TSC0026125
ggttagcgggaaa

SEQ ID NO: 104498 - DNA, 13 bp, Artificial Sequence
  Oligonucleotide for detection of SNP TSC0026125
tttcccgctaacc

SEQ ID NO: 104499 - DNA, 13 bp, Artificial Sequence
  Oligonucleotide for detection of SNP TSC0026125
ttttttattggty

SEQ ID NO: 104500 - DNA, 13 bp, Artificial Sequence
  Oligonucleotide for detection of SNP TSC0026125
raccaataaaaaa

SEQ ID NO: 104501 - DNA, 13 bp, Artificial Sequence
  Oligonucleotide for detection of SNP TSC0026125
tttttcgttggty

SEQ ID NO: 104502 - DNA, 13 bp, Artificial Sequence
  Oligonucleotide for detection of SNP TSC0026125
raccaacgaaaaa

SEQ ID NO: 104503 - DNA, 13 bp, Artificial Sequence
  Oligonucleotide for detection of SNP TSC0026126
taggaagtgttty

SEQ ID NO: 104504 - DNA, 13 bp, Artificial Sequence
  Oligonucleotide for detection of SNP TSC0026126
raaacacttccta

SEQ ID NO: 104505 - DNA, 13 bp, Artificial Sequence
  Oligonucleotide for detection of SNP TSC0026126
taggaaatgttty

SEQ ID NO: 104506 - DNA, 13 bp, Artificial Sequence
  Oligonucleotide for detection of SNP TSC0026126
raaacatttccta

SEQ ID NO: 104507 - DNA, 13 bp, Artificial Sequence
  Oligonucleotide for detection of SNP TSC0026127
aaattaaagtaay

SEQ ID NO: 104508 - DNA, 13 bp, Artificial Sequence
  Oligonucleotide for detection of SNP TSC0026127
rttactttaattt

SEQ ID NO: 104509 - DNA, 13 bp, Artificial Sequence
  Oligonucleotide for detection of SNP TSC0026127
aaattatagtaay

SEQ ID NO: 104510 - DNA, 13 bp, Artificial Sequence
  Oligonucleotide for detection of SNP TSC0026127
rttactataattt

SEQ ID NO: 104511 - DNA, 13 bp, Artificial Sequence
  Oligonucleotide for detection of SNP TSC0026127
gttgttttggttt

SEQ ID NO: 104512 - DNA, 13 bp, Artificial Sequence
  Oligonucleotide for detection of SNP TSC0026127
aaaccaaaacaac

SEQ ID NO: 104513 - DNA, 13 bp, Artificial Sequence
  Oligonucleotide for detection of SNP TSC0026127
gttgttgtggttt

SEQ ID NO: 104514 - DNA, 13 bp, Artificial Sequence
  Oligonucleotide for detection of SNP TSC0026127
aaaccacaacaac

SEQ ID NO: 104515 - DNA, 13 bp, Artificial Sequence
  Oligonucleotide for detection of SNP TSC0026131
tttagtattggaa

SEQ ID NO: 104516 - DNA, 13 bp, Artificial Sequence
  Oligonucleotide for detection of SNP TSC0026131
ttccaatactaaa

SEQ ID NO: 104517 - DNA, 13 bp, Artificial Sequence
  Oligonucleotide for detection of SNP TSC0026131
tttagttttggaa

SEQ ID NO: 104518 - DNA, 13 bp, Artificial Sequence
  Oligonucleotide for detection of SNP TSC0026131
ttccaaaactaaa

SEQ ID NO: 104519 - DNA, 13 bp, Artificial Sequence
  Oligonucleotide for detection of SNP TSC0026131
ttttagggttgga

SEQ ID NO: 104520 - DNA, 13 bp, Artificial Sequence
  Oligonucleotide for detection of SNP TSC0026131
tccaaccctaaaa

SEQ ID NO: 104521 - DNA, 13 bp, Artificial Sequence
  Oligonucleotide for detection of SNP TSC0026132
ggttttaggtttg

SEQ ID NO: 104522 - DNA, 13 bp, Artificial Sequence
  Oligonucleotide for detection of SNP TSC0026132
caaacctaaaacc

SEQ ID NO: 104523 - DNA, 13 bp, Artificial Sequence
  Oligonucleotide for detection of SNP TSC0026132
ggttttgggtttg

SEQ ID NO: 104524 - DNA, 13 bp, Artificial Sequence
  Oligonucleotide for detection of SNP TSC0026132
caaacccaaaacc

SEQ ID NO: 104525 - DNA, 13 bp, Artificial Sequence
  Oligonucleotide for detection of SNP TSC0026135
aatttattgtggg

SEQ ID NO: 104526 - DNA, 13 bp, Artificial Sequence
  Oligonucleotide for detection of SNP TSC0026135
cccacaataaatt

SEQ ID NO: 104527 - DNA, 13 bp, Artificial Sequence
  Oligonucleotide for detection of SNP TSC0026135
aatttagtgtggg

SEQ ID NO: 104528 - DNA, 13 bp, Artificial Sequence
  Oligonucleotide for detection of SNP TSC0026135
cccacactaaatt

SEQ ID NO: 104529 - DNA, 13 bp, Artificial Sequence
  Oligonucleotide for detection of SNP TSC0026135
tttatagtaggtt

SEQ ID NO: 104530 - DNA, 13 bp, Artificial Sequence
  Oligonucleotide for detection of SNP TSC0026135
aacctactataaa

SEQ ID NO: 104531 - DNA, 13 bp, Artificial Sequence
  Oligonucleotide for detection of SNP TSC0026135
tttatattaggtt

SEQ ID NO: 104532 - DNA, 13 bp, Artificial Sequence
  Oligonucleotide for detection of SNP TSC0026135
aacctaatataaa

SEQ ID NO: 104533 - DNA, 13 bp, Artificial Sequence
  Oligonucleotide for detection of SNP TSC0026138
gaagtgtgggagy

SEQ ID NO: 104534 - DNA, 13 bp, Artificial Sequence
  Oligonucleotide for detection of SNP TSC0026138
rctcccacacttc

SEQ ID NO: 104535 - DNA, 13 bp, Artificial Sequence
  Oligonucleotide for detection of SNP TSC0026138
gaagcgtgggagy

SEQ ID NO: 104536 - DNA, 13 bp, Artificial Sequence
  Oligonucleotide for detection of SNP TSC0026138
rctcccacgcttc

SEQ ID NO: 104537 - DNA, 13 bp, Artificial Sequence
  Oligonucleotide for detection of SNP TSC0026138
gaagtgcgggagy

SEQ ID NO: 104538 - DNA, 13 bp, Artificial Sequence
  Oligonucleotide for detection of SNP TSC0026138
rctcccgcacttc

SEQ ID NO: 104539 - DNA, 13 bp, Artificial Sequence
  Oligonucleotide for detection of SNP TSC0026138
gaagcgcgggagy

SEQ ID NO: 104540 - DNA, 13 bp, Artificial Sequence
  Oligonucleotide for detection of SNP TSC0026138
rctcccgcgcttc

SEQ ID NO: 104541 - DNA, 13 bp, Artificial Sequence
  Oligonucleotide for detection of SNP TSC0026138
gtttttgtgttty

SEQ ID NO: 104542 - DNA, 13 bp, Artificial Sequence
  Oligonucleotide for detection of SNP TSC0026138
raaacacaaaaac

SEQ ID NO: 104543 - DNA, 13 bp, Artificial Sequence
  Oligonucleotide for detection of SNP TSC0026138
gtttttatgttty

SEQ ID NO: 104544 - DNA, 13 bp, Artificial Sequence
  Oligonucleotide for detection of SNP TSC0026138
raaacataaaaac

SEQ ID NO: 104545 - DNA, 13 bp, Artificial Sequence
  Oligonucleotide for detection of SNP TSC0026138
gttttcgtgttty

SEQ ID NO: 104546 - DNA, 13 bp, Artificial Sequence
  Oligonucleotide for detection of SNP TSC0026138
raaacacgaaaac

SEQ ID NO: 104547 - DNA, 13 bp, Artificial Sequence
  Oligonucleotide for detection of SNP TSC0026138
gtttttacgttty

SEQ ID NO: 104548 - DNA, 13 bp, Artificial Sequence
  Oligonucleotide for detection of SNP TSC0026138
raaacgtaaaaac

SEQ ID NO: 104549 - DNA, 13 bp, Artificial Sequence
  Oligonucleotide for detection of SNP TSC0026138
gtttttgcgttty

SEQ ID NO: 104550 - DNA, 13 bp, Artificial Sequence
  Oligonucleotide for detection of SNP TSC0026138
raaacgcaaaaac

SEQ ID NO: 104551 - DNA, 13 bp, Artificial Sequence
  Oligonucleotide for detection of SNP TSC0026138
gttttcgcgttty

SEQ ID NO: 104552 - DNA, 13 bp, Artificial Sequence
  Oligonucleotide for detection of SNP TSC0026138
raaacgcgaaaac

SEQ ID NO: 104553 - DNA, 13 bp, Artificial Sequence
  Oligonucleotide for detection of SNP TSC0026139
ttaagtggtatag

SEQ ID NO: 104554 - DNA, 13 bp, Artificial Sequence
  Oligonucleotide for detection of SNP TSC0026139
ctataccacttaa

SEQ ID NO: 104555 - DNA, 13 bp, Artificial Sequence
  Oligonucleotide for detection of SNP TSC0026139
ttaagttgtatag

SEQ ID NO: 104556 - DNA, 13 bp, Artificial Sequence
  Oligonucleotide for detection of SNP TSC0026139
ctatacaacttaa

SEQ ID NO: 104557 - DNA, 13 bp, Artificial Sequence
  Oligonucleotide for detection of SNP TSC0026139
ttaagcggtatag

SEQ ID NO: 104558 - DNA, 13 bp, Artificial Sequence
  Oligonucleotide for detection of SNP TSC0026139
ctataccgcttaa

SEQ ID NO: 104559 - DNA, 13 bp, Artificial Sequence
  Oligonucleotide for detection of SNP TSC0026139
ttgtgttgtttgg

SEQ ID NO: 104560 - DNA, 13 bp, Artificial Sequence
  Oligonucleotide for detection of SNP TSC0026139
ccaaacaacacaa

SEQ ID NO: 104561 - DNA, 13 bp, Artificial Sequence
  Oligonucleotide for detection of SNP TSC0026139
ttgtgtagtttgg

SEQ ID NO: 104562 - DNA, 13 bp, Artificial Sequence
  Oligonucleotide for detection of SNP TSC0026139
ccaaactacacaa

SEQ ID NO: 104563 - DNA, 13 bp, Artificial Sequence
  Oligonucleotide for detection of SNP TSC0026139
ttgtgtcgtttgg

SEQ ID NO: 104564 - DNA, 13 bp, Artificial Sequence
  Oligonucleotide for detection of SNP TSC0026139
ccaaacgacacaa

SEQ ID NO: 104565 - DNA, 13 bp, Artificial Sequence
  Oligonucleotide for detection of SNP TSC0026140
tttggaattattg

SEQ ID NO: 104566 - DNA, 13 bp, Artificial Sequence
  Oligonucleotide for detection of SNP TSC0026140
caataattccaaa

SEQ ID NO: 104567 - DNA, 13 bp, Artificial Sequence
  Oligonucleotide for detection of SNP TSC0026140
tttggatttattg

SEQ ID NO: 104568 - DNA, 13 bp, Artificial Sequence
  Oligonucleotide for detection of SNP TSC0026140
caataaatccaaa

SEQ ID NO: 104569 - DNA, 13 bp, Artificial Sequence
  Oligonucleotide for detection of SNP TSC0026140
ttcggaattattg

SEQ ID NO: 104570 - DNA, 13 bp, Artificial Sequence
  Oligonucleotide for detection of SNP TSC0026140
caataattccgaa

SEQ ID NO: 104571 - DNA, 13 bp, Artificial Sequence
  Oligonucleotide for detection of SNP TSC0026140
ttcggatttattg

SEQ ID NO: 104572 - DNA, 13 bp, Artificial Sequence
  Oligonucleotide for detection of SNP TSC0026140
caataaatccgaa

SEQ ID NO: 104573 - DNA, 13 bp, Artificial Sequence
  Oligonucleotide for detection of SNP TSC0026140
tagtgattttgag

SEQ ID NO: 104574 - DNA, 13 bp, Artificial Sequence
  Oligonucleotide for detection of SNP TSC0026140
ctcaaaatcacta

SEQ ID NO: 104575 - DNA, 13 bp, Artificial Sequence
  Oligonucleotide for detection of SNP TSC0026140
tagtgagtttgag

SEQ ID NO: 104576 - DNA, 13 bp, Artificial Sequence
  Oligonucleotide for detection of SNP TSC0026140
ctcaaactcacta

SEQ ID NO: 104577 - DNA, 13 bp, Artificial Sequence
  Oligonucleotide for detection of SNP TSC0026140
tagtgatttcgag

SEQ ID NO: 104578 - DNA, 13 bp, Artificial Sequence
  Oligonucleotide for detection of SNP TSC0026140
ctcgaaatcacta

SEQ ID NO: 104579 - DNA, 13 bp, Artificial Sequence
  Oligonucleotide for detection of SNP TSC0026140
tagtgagttcgag

SEQ ID NO: 104580 - DNA, 13 bp, Artificial Sequence
  Oligonucleotide for detection of SNP TSC0026140
ctcgaactcacta

SEQ ID NO: 104581 - DNA, 13 bp, Artificial Sequence
  Oligonucleotide for detection of SNP TSC0026142
tatgtgtgtatgt

SEQ ID NO: 104582 - DNA, 13 bp, Artificial Sequence
  Oligonucleotide for detection of SNP TSC0026142
acatacacacata

SEQ ID NO: 104583 - DNA, 13 bp, Artificial Sequence
  Oligonucleotide for detection of SNP TSC0026142
tatgtgcgtatgt

SEQ ID NO: 104584 - DNA, 13 bp, Artificial Sequence
  Oligonucleotide for detection of SNP TSC0026142
acatacgcacata

SEQ ID NO: 104585 - DNA, 13 bp, Artificial Sequence
  Oligonucleotide for detection of SNP TSC0026143
ataaaaattagtt

SEQ ID NO: 104586 - DNA, 13 bp, Artificial Sequence
  Oligonucleotide for detection of SNP TSC0026143
aactaatttttat

SEQ ID NO: 104587 - DNA, 13 bp, Artificial Sequence
  Oligonucleotide for detection of SNP TSC0026143
ataaaatttagtt

SEQ ID NO: 104588 - DNA, 13 bp, Artificial Sequence
  Oligonucleotide for detection of SNP TSC0026143
aactaaattttat

SEQ ID NO: 104589 - DNA, 13 bp, Artificial Sequence
  Oligonucleotide for detection of SNP TSC0026143
agttaagttttgt

SEQ ID NO: 104590 - DNA, 13 bp, Artificial Sequence
  Oligonucleotide for detection of SNP TSC0026143
acaaaacttaact

SEQ ID NO: 104591 - DNA, 13 bp, Artificial Sequence
  Oligonucleotide for detection of SNP TSC0026151
gttgttgtagtta

SEQ ID NO: 104592 - DNA, 13 bp, Artificial Sequence
  Oligonucleotide for detection of SNP TSC0026151
taactacaacaac

SEQ ID NO: 104593 - DNA, 13 bp, Artificial Sequence
  Oligonucleotide for detection of SNP TSC0026151
gttgttatagtta

SEQ ID NO: 104594 - DNA, 13 bp, Artificial Sequence
  Oligonucleotide for detection of SNP TSC0026151
taactataacaac

SEQ ID NO: 104595 - DNA, 13 bp, Artificial Sequence
  Oligonucleotide for detection of SNP TSC0026151
gtcgttgtagtta

SEQ ID NO: 104596 - DNA, 13 bp, Artificial Sequence
  Oligonucleotide for detection of SNP TSC0026151
taactacaacgac

SEQ ID NO: 104597 - DNA, 13 bp, Artificial Sequence
  Oligonucleotide for detection of SNP TSC0026151
gtcgttatagtta

SEQ ID NO: 104598 - DNA, 13 bp, Artificial Sequence
  Oligonucleotide for detection of SNP TSC0026151
taactataacgac

SEQ ID NO: 104599 - DNA, 13 bp, Artificial Sequence
  Oligonucleotide for detection of SNP TSC0026152
ttatggtttttat

SEQ ID NO: 104600 - DNA, 13 bp, Artificial Sequence
  Oligonucleotide for detection of SNP TSC0026152
ataaaaaccataa

SEQ ID NO: 104601 - DNA, 13 bp, Artificial Sequence
  Oligonucleotide for detection of SNP TSC0026152
ttatgggttttat

SEQ ID NO: 104602 - DNA, 13 bp, Artificial Sequence
  Oligonucleotide for detection of SNP TSC0026152
ataaaacccataa

SEQ ID NO: 104603 - DNA, 13 bp, Artificial Sequence
  Oligonucleotide for detection of SNP TSC0026152
atggaagttatga

SEQ ID NO: 104604 - DNA, 13 bp, Artificial Sequence
  Oligonucleotide for detection of SNP TSC0026152
tcataacttccat

SEQ ID NO: 104605 - DNA, 13 bp, Artificial Sequence
  Oligonucleotide for detection of SNP TSC0026152
atggaatttatga

SEQ ID NO: 104606 - DNA, 13 bp, Artificial Sequence
  Oligonucleotide for detection of SNP TSC0026152
tcataaattccat

SEQ ID NO: 104607 - DNA, 13 bp, Artificial Sequence
  Oligonucleotide for detection of SNP TSC0026157
ggtattatagttg

SEQ ID NO: 104608 - DNA, 13 bp, Artificial Sequence
  Oligonucleotide for detection of SNP TSC0026157
caactataatacc

SEQ ID NO: 104609 - DNA, 13 bp, Artificial Sequence
  Oligonucleotide for detection of SNP TSC0026157
ggtattgtagttg

SEQ ID NO: 104610 - DNA, 13 bp, Artificial Sequence
  Oligonucleotide for detection of SNP TSC0026157
caactacaatacc

SEQ ID NO: 104611 - DNA, 13 bp, Artificial Sequence
  Oligonucleotide for detection of SNP TSC0026157
ggtattatagtcg

SEQ ID NO: 104612 - DNA, 13 bp, Artificial Sequence
  Oligonucleotide for detection of SNP TSC0026157
cgactataatacc

SEQ ID NO: 104613 - DNA, 13 bp, Artificial Sequence
  Oligonucleotide for detection of SNP TSC0026157
ggtatcgtagttg

SEQ ID NO: 104614 - DNA, 13 bp, Artificial Sequence
  Oligonucleotide for detection of SNP TSC0026157
caactacgatacc

SEQ ID NO: 104615 - DNA, 13 bp, Artificial Sequence
  Oligonucleotide for detection of SNP TSC0026157
ggtattgtagtcg

SEQ ID NO: 104616 - DNA, 13 bp, Artificial Sequence
  Oligonucleotide for detection of SNP TSC0026157
cgactacaatacc

SEQ ID NO: 104617 - DNA, 13 bp, Artificial Sequence
  Oligonucleotide for detection of SNP TSC0026157
ggtatcgtagtcg

SEQ ID NO: 104618 - DNA, 13 bp, Artificial Sequence
  Oligonucleotide for detection of SNP TSC0026157
cgactacgatacc

SEQ ID NO: 104619 - DNA, 13 bp, Artificial Sequence
  Oligonucleotide for detection of SNP TSC0026157
tggttatgataty

SEQ ID NO: 104620 - DNA, 13 bp, Artificial Sequence
  Oligonucleotide for detection of SNP TSC0026157
ratatcataacca

SEQ ID NO: 104621 - DNA, 13 bp, Artificial Sequence
  Oligonucleotide for detection of SNP TSC0026157
cggttatgataty

SEQ ID NO: 104622 - DNA, 13 bp, Artificial Sequence
  Oligonucleotide for detection of SNP TSC0026157
ratatcataaccg

SEQ ID NO: 104623 - DNA, 13 bp, Artificial Sequence
  Oligonucleotide for detection of SNP TSC0026157
tggttacgataty

SEQ ID NO: 104624 - DNA, 13 bp, Artificial Sequence
  Oligonucleotide for detection of SNP TSC0026157
ratatcgtaacca

SEQ ID NO: 104625 - DNA, 13 bp, Artificial Sequence
  Oligonucleotide for detection of SNP TSC0026157
cggttacgataty

SEQ ID NO: 104626 - DNA, 13 bp, Artificial Sequence
  Oligonucleotide for detection of SNP TSC0026157
ratatcgtaaccg

SEQ ID NO: 104627 - DNA, 13 bp, Artificial Sequence
  Oligonucleotide for detection of SNP TSC0026160
tttgaaatgaata

SEQ ID NO: 104628 - DNA, 13 bp, Artificial Sequence
  Oligonucleotide for detection of SNP TSC0026160
tattcatttcaaa

SEQ ID NO: 104629 - DNA, 13 bp, Artificial Sequence
  Oligonucleotide for detection of SNP TSC0026160
tttgaattgaata

SEQ ID NO: 104630 - DNA, 13 bp, Artificial Sequence
  Oligonucleotide for detection of SNP TSC0026160
tattcaattcaaa

SEQ ID NO: 104631 - DNA, 13 bp, Artificial Sequence
  Oligonucleotide for detection of SNP TSC0026160
tgtttattttaga

SEQ ID NO: 104632 - DNA, 13 bp, Artificial Sequence
  Oligonucleotide for detection of SNP TSC0026160
tctaaaataaaca

SEQ ID NO: 104633 - DNA, 13 bp, Artificial Sequence
  Oligonucleotide for detection of SNP TSC0026160
tgtttagtttaga

SEQ ID NO: 104634 - DNA, 13 bp, Artificial Sequence
  Oligonucleotide for detection of SNP TSC0026160
tctaaactaaaca

SEQ ID NO: 104635 - DNA, 13 bp, Artificial Sequence
  Oligonucleotide for detection of SNP TSC0026161
agattaagagtty

SEQ ID NO: 104636 - DNA, 13 bp, Artificial Sequence
  Oligonucleotide for detection of SNP TSC0026161
raactcttaatct

SEQ ID NO: 104637 - DNA, 13 bp, Artificial Sequence
  Oligonucleotide for detection of SNP TSC0026161
agattatgagtty

SEQ ID NO: 104638 - DNA, 13 bp, Artificial Sequence
  Oligonucleotide for detection of SNP TSC0026161
raactcataatct

SEQ ID NO: 104639 - DNA, 13 bp, Artificial Sequence
  Oligonucleotide for detection of SNP TSC0026161
agattacgagtty

SEQ ID NO: 104640 - DNA, 13 bp, Artificial Sequence
  Oligonucleotide for detection of SNP TSC0026161
raactcgtaatct

SEQ ID NO: 104641 - DNA, 13 bp, Artificial Sequence
  Oligonucleotide for detection of SNP TSC0026161
gggtttttggttt

SEQ ID NO: 104642 - DNA, 13 bp, Artificial Sequence
  Oligonucleotide for detection of SNP TSC0026161
aaaccaaaaaccc

SEQ ID NO: 104643 - DNA, 13 bp, Artificial Sequence
  Oligonucleotide for detection of SNP TSC0026161
gggtttgtggttt

SEQ ID NO: 104644 - DNA, 13 bp, Artificial Sequence
  Oligonucleotide for detection of SNP TSC0026161
aaaccacaaaccc

SEQ ID NO: 104645 - DNA, 13 bp, Artificial Sequence
  Oligonucleotide for detection of SNP TSC0026161
gggttcgtggttt

SEQ ID NO: 104646 - DNA, 13 bp, Artificial Sequence
  Oligonucleotide for detection of SNP TSC0026161
aaaccacgaaccc

SEQ ID NO: 104647 - DNA, 13 bp, Artificial Sequence
  Oligonucleotide for detection of SNP TSC0026162
ataggatgggaag

SEQ ID NO: 104648 - DNA, 13 bp, Artificial Sequence
  Oligonucleotide for detection of SNP TSC0026162
cttcccatcctat

SEQ ID NO: 104649 - DNA, 13 bp, Artificial Sequence
  Oligonucleotide for detection of SNP TSC0026162
ataggaagggaag

SEQ ID NO: 104650 - DNA, 13 bp, Artificial Sequence
  Oligonucleotide for detection of SNP TSC0026162
cttcccttcctat

SEQ ID NO: 104651 - DNA, 13 bp, Artificial Sequence
  Oligonucleotide for detection of SNP TSC0026162
ataggacgggaag

SEQ ID NO: 104652 - DNA, 13 bp, Artificial Sequence
  Oligonucleotide for detection of SNP TSC0026162
cttcccgtcctat

SEQ ID NO: 104653 - DNA, 13 bp, Artificial Sequence
  Oligonucleotide for detection of SNP TSC0026168
tggtttttgttty

SEQ ID NO: 104654 - DNA, 13 bp, Artificial Sequence
  Oligonucleotide for detection of SNP TSC0026168
raaacaaaaacca

SEQ ID NO: 104655 - DNA, 13 bp, Artificial Sequence
  Oligonucleotide for detection of SNP TSC0026168
gaaatatgagtta

SEQ ID NO: 104656 - DNA, 13 bp, Artificial Sequence
  Oligonucleotide for detection of SNP TSC0026168
taactcatatttc

SEQ ID NO: 104657 - DNA, 13 bp, Artificial Sequence
  Oligonucleotide for detection of SNP TSC0026168
gaaataagagtta

SEQ ID NO: 104658 - DNA, 13 bp, Artificial Sequence
  Oligonucleotide for detection of SNP TSC0026168
taactcttatttc

SEQ ID NO: 104659 - DNA, 13 bp, Artificial Sequence
  Oligonucleotide for detection of SNP TSC0026168
gaaatacgagtta

SEQ ID NO: 104660 - DNA, 13 bp, Artificial Sequence
  Oligonucleotide for detection of SNP TSC0026168
taactcgtatttc

SEQ ID NO: 104661 - DNA, 13 bp, Artificial Sequence
  Oligonucleotide for detection of SNP TSC0026170
aatttagggttty

SEQ ID NO: 104662 - DNA, 13 bp, Artificial Sequence
  Oligonucleotide for detection of SNP TSC0026170
raaaccctaaatt

SEQ ID NO: 104663 - DNA, 13 bp, Artificial Sequence
  Oligonucleotide for detection of SNP TSC0026170
aatttaaggttty

SEQ ID NO: 104664 - DNA, 13 bp, Artificial Sequence
  Oligonucleotide for detection of SNP TSC0026170
raaaccttaaatt

SEQ ID NO: 104665 - DNA, 13 bp, Artificial Sequence
  Oligonucleotide for detection of SNP TSC0026171
gatttatatatta

SEQ ID NO: 104666 - DNA, 13 bp, Artificial Sequence
  Oligonucleotide for detection of SNP TSC0026171
taatatataaatc

SEQ ID NO: 104667 - DNA, 13 bp, Artificial Sequence
  Oligonucleotide for detection of SNP TSC0026171
gatttagatatta

SEQ ID NO: 104668 - DNA, 13 bp, Artificial Sequence
  Oligonucleotide for detection of SNP TSC0026171
taatatctaaatc

SEQ ID NO: 104669 - DNA, 13 bp, Artificial Sequence
  Oligonucleotide for detection of SNP TSC0026171
taatatgtgaaty

SEQ ID NO: 104670 - DNA, 13 bp, Artificial Sequence
  Oligonucleotide for detection of SNP TSC0026171
rattcacatatta

SEQ ID NO: 104671 - DNA, 13 bp, Artificial Sequence
  Oligonucleotide for detection of SNP TSC0026171
taatatttgaaty

SEQ ID NO: 104672 - DNA, 13 bp, Artificial Sequence
  Oligonucleotide for detection of SNP TSC0026171
rattcaaatatta

SEQ ID NO: 104673 - DNA, 13 bp, Artificial Sequence
  Oligonucleotide for detection of SNP TSC0026175
tatttggtttttg

SEQ ID NO: 104674 - DNA, 13 bp, Artificial Sequence
  Oligonucleotide for detection of SNP TSC0026175
caaaaaccaaata

SEQ ID NO: 104675 - DNA, 13 bp, Artificial Sequence
  Oligonucleotide for detection of SNP TSC0026175
tatttgatttttg

SEQ ID NO: 104676 - DNA, 13 bp, Artificial Sequence
  Oligonucleotide for detection of SNP TSC0026175
caaaaatcaaata

SEQ ID NO: 104677 - DNA, 13 bp, Artificial Sequence
  Oligonucleotide for detection of SNP TSC0026182
tggaagggtgagt

SEQ ID NO: 104678 - DNA, 13 bp, Artificial Sequence
  Oligonucleotide for detection of SNP TSC0026182
actcacccttcca

SEQ ID NO: 104679 - DNA, 13 bp, Artificial Sequence
  Oligonucleotide for detection of SNP TSC0026182
tggaagtgtgagt

SEQ ID NO: 104680 - DNA, 13 bp, Artificial Sequence
  Oligonucleotide for detection of SNP TSC0026182
actcacacttcca

SEQ ID NO: 104681 - DNA, 13 bp, Artificial Sequence
  Oligonucleotide for detection of SNP TSC0026183
tgatataatttta

SEQ ID NO: 104682 - DNA, 13 bp, Artificial Sequence
  Oligonucleotide for detection of SNP TSC0026183
taaaattatatca

SEQ ID NO: 104683 - DNA, 13 bp, Artificial Sequence
  Oligonucleotide for detection of SNP TSC0026183
tagaattatgtta

SEQ ID NO: 104684 - DNA, 13 bp, Artificial Sequence
  Oligonucleotide for detection of SNP TSC0026183
taacataattcta

SEQ ID NO: 104685 - DNA, 13 bp, Artificial Sequence
  Oligonucleotide for detection of SNP TSC0026183
tagaatgatgtta

SEQ ID NO: 104686 - DNA, 13 bp, Artificial Sequence
  Oligonucleotide for detection of SNP TSC0026183
taacatcattcta

SEQ ID NO: 104687 - DNA, 13 bp, Artificial Sequence
  Oligonucleotide for detection of SNP TSC0026185
tttaaaaaaataa

SEQ ID NO: 104688 - DNA, 13 bp, Artificial Sequence
  Oligonucleotide for detection of SNP TSC0026185
ttatttttttaaa

SEQ ID NO: 104689 - DNA, 13 bp, Artificial Sequence
  Oligonucleotide for detection of SNP TSC0026185
tttaaataaataa

SEQ ID NO: 104690 - DNA, 13 bp, Artificial Sequence
  Oligonucleotide for detection of SNP TSC0026185
ttatttatttaaa

SEQ ID NO: 104691 - DNA, 13 bp, Artificial Sequence
  Oligonucleotide for detection of SNP TSC0026185
ttgtttttttaga

SEQ ID NO: 104692 - DNA, 13 bp, Artificial Sequence
  Oligonucleotide for detection of SNP TSC0026185
tctaaaaaaacaa

SEQ ID NO: 104693 - DNA, 13 bp, Artificial Sequence
  Oligonucleotide for detection of SNP TSC0026185
ttgtttgtttaga

SEQ ID NO: 104694 - DNA, 13 bp, Artificial Sequence
  Oligonucleotide for detection of SNP TSC0026185
tctaaacaaacaa

SEQ ID NO: 104695 - DNA, 13 bp, Artificial Sequence
  Oligonucleotide for detection of SNP TSC0026197
ttatagatacgta

SEQ ID NO: 104696 - DNA, 13 bp, Artificial Sequence
  Oligonucleotide for detection of SNP TSC0026197
tacgtatctataa

SEQ ID NO: 104697 - DNA, 13 bp, Artificial Sequence
  Oligonucleotide for detection of SNP TSC0026197
ttataggtacgta

SEQ ID NO: 104698 - DNA, 13 bp, Artificial Sequence
  Oligonucleotide for detection of SNP TSC0026197
tacgtacctataa

SEQ ID NO: 104699 - DNA, 13 bp, Artificial Sequence
  Oligonucleotide for detection of SNP TSC0026200
ggggataatattt

SEQ ID NO: 104700 - DNA, 13 bp, Artificial Sequence
  Oligonucleotide for detection of SNP TSC0026200
aaatattatcccc

SEQ ID NO: 104701 - DNA, 13 bp, Artificial Sequence
  Oligonucleotide for detection of SNP TSC0026200
ggggatgatattt

SEQ ID NO: 104702 - DNA, 13 bp, Artificial Sequence
  Oligonucleotide for detection of SNP TSC0026200
aaatatcatcccc

SEQ ID NO: 104703 - DNA, 13 bp, Artificial Sequence
  Oligonucleotide for detection of SNP TSC0026202
tattttatgattg

SEQ ID NO: 104704 - DNA, 13 bp, Artificial Sequence
  Oligonucleotide for detection of SNP TSC0026202
caatcataaaata

SEQ ID NO: 104705 - DNA, 13 bp, Artificial Sequence
  Oligonucleotide for detection of SNP TSC0026202
tattttgtgattg

SEQ ID NO: 104706 - DNA, 13 bp, Artificial Sequence
  Oligonucleotide for detection of SNP TSC0026202
caatcacaaaata

SEQ ID NO: 104707 - DNA, 13 bp, Artificial Sequence
  Oligonucleotide for detection of SNP TSC0026202
tatttcgtgattg

SEQ ID NO: 104708 - DNA, 13 bp, Artificial Sequence
  Oligonucleotide for detection of SNP TSC0026202
caatcacgaaata

SEQ ID NO: 104709 - DNA, 13 bp, Artificial Sequence
  Oligonucleotide for detection of SNP TSC0026202
taattatgaagtg

SEQ ID NO: 104710 - DNA, 13 bp, Artificial Sequence
  Oligonucleotide for detection of SNP TSC0026202
cacttcataatta

SEQ ID NO: 104711 - DNA, 13 bp, Artificial Sequence
  Oligonucleotide for detection of SNP TSC0026202
taattacgaagtg

SEQ ID NO: 104712 - DNA, 13 bp, Artificial Sequence
  Oligonucleotide for detection of SNP TSC0026202
cacttcgtaatta

SEQ ID NO: 104713 - DNA, 13 bp, Artificial Sequence
  Oligonucleotide for detection of SNP TSC0026203
taattagttagta

SEQ ID NO: 104714 - DNA, 13 bp, Artificial Sequence
  Oligonucleotide for detection of SNP TSC0026203
tactaactaatta

SEQ ID NO: 104715 - DNA, 13 bp, Artificial Sequence
  Oligonucleotide for detection of SNP TSC0026203
taattaattagta

SEQ ID NO: 104716 - DNA, 13 bp, Artificial Sequence
  Oligonucleotide for detection of SNP TSC0026203
tactaattaatta

SEQ ID NO: 104717 - DNA, 13 bp, Artificial Sequence
  Oligonucleotide for detection of SNP TSC0026205
ttttattaaagta

SEQ ID NO: 104718 - DNA, 13 bp, Artificial Sequence
  Oligonucleotide for detection of SNP TSC0026205
tactttaataaaa

SEQ ID NO: 104719 - DNA, 13 bp, Artificial Sequence
  Oligonucleotide for detection of SNP TSC0026205
ttttatgaaagta

SEQ ID NO: 104720 - DNA, 13 bp, Artificial Sequence
  Oligonucleotide for detection of SNP TSC0026205
tactttcataaaa

SEQ ID NO: 104721 - DNA, 13 bp, Artificial Sequence
  Oligonucleotide for detection of SNP TSC0026205
tgttttgatagag

SEQ ID NO: 104722 - DNA, 13 bp, Artificial Sequence
  Oligonucleotide for detection of SNP TSC0026205
ctctatcaaaaca

SEQ ID NO: 104723 - DNA, 13 bp, Artificial Sequence
  Oligonucleotide for detection of SNP TSC0026205
tgtttttatagag

SEQ ID NO: 104724 - DNA, 13 bp, Artificial Sequence
  Oligonucleotide for detection of SNP TSC0026205
ctctataaaaaca

SEQ ID NO: 104725 - DNA, 13 bp, Artificial Sequence
  Oligonucleotide for detection of SNP TSC0026206
tattattgaagag

SEQ ID NO: 104726 - DNA, 13 bp, Artificial Sequence
  Oligonucleotide for detection of SNP TSC0026206
ctcttcaataata

SEQ ID NO: 104727 - DNA, 13 bp, Artificial Sequence
  Oligonucleotide for detection of SNP TSC0026206
tattatcgaagag

SEQ ID NO: 104728 - DNA, 13 bp, Artificial Sequence
  Oligonucleotide for detection of SNP TSC0026206
ctcttcgataata

SEQ ID NO: 104729 - DNA, 13 bp, Artificial Sequence
  Oligonucleotide for detection of SNP TSC0026206
ttttttggtagtg

SEQ ID NO: 104730 - DNA, 13 bp, Artificial Sequence
  Oligonucleotide for detection of SNP TSC0026206
cactaccaaaaaa

SEQ ID NO: 104731 - DNA, 13 bp, Artificial Sequence
  Oligonucleotide for detection of SNP TSC0026206
ttttttagtagtg

SEQ ID NO: 104732 - DNA, 13 bp, Artificial Sequence
  Oligonucleotide for detection of SNP TSC0026206
cactactaaaaaa

SEQ ID NO: 104733 - DNA, 13 bp, Artificial Sequence
  Oligonucleotide for detection of SNP TSC0026206
tttttcggtagtg

SEQ ID NO: 104734 - DNA, 13 bp, Artificial Sequence
  Oligonucleotide for detection of SNP TSC0026206
cactaccgaaaaa

SEQ ID NO: 104735 - DNA, 13 bp, Artificial Sequence
  Oligonucleotide for detection of SNP TSC0026211
aaagttatgtttg

SEQ ID NO: 104736 - DNA, 13 bp, Artificial Sequence
  Oligonucleotide for detection of SNP TSC0026211
caaacataacttt

SEQ ID NO: 104737 - DNA, 13 bp, Artificial Sequence
  Oligonucleotide for detection of SNP TSC0026211
aaagttgtgtttg

SEQ ID NO: 104738 - DNA, 13 bp, Artificial Sequence
  Oligonucleotide for detection of SNP TSC0026211
caaacacaacttt

SEQ ID NO: 104739 - DNA, 13 bp, Artificial Sequence
  Oligonucleotide for detection of SNP TSC0026211
aaagtcgtgtttg

SEQ ID NO: 104740 - DNA, 13 bp, Artificial Sequence
  Oligonucleotide for detection of SNP TSC0026211
caaacacgacttt

SEQ ID NO: 104741 - DNA, 13 bp, Artificial Sequence
  Oligonucleotide for detection of SNP TSC0026211
taagtatgatttt

SEQ ID NO: 104742 - DNA, 13 bp, Artificial Sequence
  Oligonucleotide for detection of SNP TSC0026211
aaaatcatactta

SEQ ID NO: 104743 - DNA, 13 bp, Artificial Sequence
  Oligonucleotide for detection of SNP TSC0026211
taagtacgatttt

SEQ ID NO: 104744 - DNA, 13 bp, Artificial Sequence
  Oligonucleotide for detection of SNP TSC0026211
aaaatcgtactta

SEQ ID NO: 104745 - DNA, 13 bp, Artificial Sequence
  Oligonucleotide for detection of SNP TSC0026215
gaatattgaggga

SEQ ID NO: 104746 - DNA, 13 bp, Artificial Sequence
  Oligonucleotide for detection of SNP TSC0026215
tccctcaatattc

SEQ ID NO: 104747 - DNA, 13 bp, Artificial Sequence
  Oligonucleotide for detection of SNP TSC0026215
gaatatcgaggga

SEQ ID NO: 104748 - DNA, 13 bp, Artificial Sequence
  Oligonucleotide for detection of SNP TSC0026215
tccctcgatattc

SEQ ID NO: 104749 - DNA, 13 bp, Artificial Sequence
  Oligonucleotide for detection of SNP TSC0026217
ttgaaggtggtty

SEQ ID NO: 104750 - DNA, 13 bp, Artificial Sequence
  Oligonucleotide for detection of SNP TSC0026217
raaccaccttcaa

SEQ ID NO: 104751 - DNA, 13 bp, Artificial Sequence
  Oligonucleotide for detection of SNP TSC0026217
ttgaagttggtty

SEQ ID NO: 104752 - DNA, 13 bp, Artificial Sequence
  Oligonucleotide for detection of SNP TSC0026217
raaccaacttcaa

SEQ ID NO: 104753 - DNA, 13 bp, Artificial Sequence
  Oligonucleotide for detection of SNP TSC0026217
tcgaaggtggtty

SEQ ID NO: 104754 - DNA, 13 bp, Artificial Sequence
  Oligonucleotide for detection of SNP TSC0026217
raaccaccttcga

SEQ ID NO: 104755 - DNA, 13 bp, Artificial Sequence
  Oligonucleotide for detection of SNP TSC0026217
tcgaagttggtty

SEQ ID NO: 104756 - DNA, 13 bp, Artificial Sequence
  Oligonucleotide for detection of SNP TSC0026217
raaccaacttcga

SEQ ID NO: 104757 - DNA, 13 bp, Artificial Sequence
  Oligonucleotide for detection of SNP TSC0026217
gggttatttttgg

SEQ ID NO: 104758 - DNA, 13 bp, Artificial Sequence
  Oligonucleotide for detection of SNP TSC0026217
ccaaaaataaccc

SEQ ID NO: 104759 - DNA, 13 bp, Artificial Sequence
  Oligonucleotide for detection of SNP TSC0026217
gggttaattttgg

SEQ ID NO: 104760 - DNA, 13 bp, Artificial Sequence
  Oligonucleotide for detection of SNP TSC0026217
ccaaaattaaccc

SEQ ID NO: 104761 - DNA, 13 bp, Artificial Sequence
  Oligonucleotide for detection of SNP TSC0026217
gggttattttcgg

SEQ ID NO: 104762 - DNA, 13 bp, Artificial Sequence
  Oligonucleotide for detection of SNP TSC0026217
ccgaaaataaccc

SEQ ID NO: 104763 - DNA, 13 bp, Artificial Sequence
  Oligonucleotide for detection of SNP TSC0026217
gggttaatttcgg

SEQ ID NO: 104764 - DNA, 13 bp, Artificial Sequence
  Oligonucleotide for detection of SNP TSC0026217
ccgaaattaaccc

SEQ ID NO: 104765 - DNA, 13 bp, Artificial Sequence
  Oligonucleotide for detection of SNP TSC0026218
ttggggttatgta

SEQ ID NO: 104766 - DNA, 13 bp, Artificial Sequence
  Oligonucleotide for detection of SNP TSC0026218
tacataaccccaa

SEQ ID NO: 104767 - DNA, 13 bp, Artificial Sequence
  Oligonucleotide for detection of SNP TSC0026218
ttgggggtatgta

SEQ ID NO: 104768 - DNA, 13 bp, Artificial Sequence
  Oligonucleotide for detection of SNP TSC0026218
tacatacccccaa

SEQ ID NO: 104769 - DNA, 13 bp, Artificial Sequence
  Oligonucleotide for detection of SNP TSC0026218
tgtatagttttag

SEQ ID NO: 104770 - DNA, 13 bp, Artificial Sequence
  Oligonucleotide for detection of SNP TSC0026218
ctaaaactataca

SEQ ID NO: 104771 - DNA, 13 bp, Artificial Sequence
  Oligonucleotide for detection of SNP TSC0026218
tgtatatttttag

SEQ ID NO: 104772 - DNA, 13 bp, Artificial Sequence
  Oligonucleotide for detection of SNP TSC0026218
ctaaaaatataca

SEQ ID NO: 104773 - DNA, 13 bp, Artificial Sequence
  Oligonucleotide for detection of SNP TSC0026219
tgagttagaatga

SEQ ID NO: 104774 - DNA, 13 bp, Artificial Sequence
  Oligonucleotide for detection of SNP TSC0026219
tcattctaactca

SEQ ID NO: 104775 - DNA, 13 bp, Artificial Sequence
  Oligonucleotide for detection of SNP TSC0026219
tgagttggaatga

SEQ ID NO: 104776 - DNA, 13 bp, Artificial Sequence
  Oligonucleotide for detection of SNP TSC0026219
tcattccaactca

SEQ ID NO: 104777 - DNA, 13 bp, Artificial Sequence
  Oligonucleotide for detection of SNP TSC0026220
tataatattagaa

SEQ ID NO: 104778 - DNA, 13 bp, Artificial Sequence
  Oligonucleotide for detection of SNP TSC0026220
ttctaatattata

SEQ ID NO: 104779 - DNA, 13 bp, Artificial Sequence
  Oligonucleotide for detection of SNP TSC0026220
tataatgttagaa

SEQ ID NO: 104780 - DNA, 13 bp, Artificial Sequence
  Oligonucleotide for detection of SNP TSC0026220
ttctaacattata

SEQ ID NO: 104781 - DNA, 13 bp, Artificial Sequence
  Oligonucleotide for detection of SNP TSC0026220
tataacgttagaa

SEQ ID NO: 104782 - DNA, 13 bp, Artificial Sequence
  Oligonucleotide for detection of SNP TSC0026220
ttctaacgttata

SEQ ID NO: 104783 - DNA, 13 bp, Artificial Sequence
  Oligonucleotide for detection of SNP TSC0026220
ttttgatgttgta

SEQ ID NO: 104784 - DNA, 13 bp, Artificial Sequence
  Oligonucleotide for detection of SNP TSC0026220
tacaacatcaaaa

SEQ ID NO: 104785 - DNA, 13 bp, Artificial Sequence
  Oligonucleotide for detection of SNP TSC0026220
ttttgacgttgta

SEQ ID NO: 104786 - DNA, 13 bp, Artificial Sequence
  Oligonucleotide for detection of SNP TSC0026220
tacaacgtcaaaa

SEQ ID NO: 104787 - DNA, 13 bp, Artificial Sequence
  Oligonucleotide for detection of SNP TSC0026222
agtattatggtgt

SEQ ID NO: 104788 - DNA, 13 bp, Artificial Sequence
  Oligonucleotide for detection of SNP TSC0026222
acaccataatact

SEQ ID NO: 104789 - DNA, 13 bp, Artificial Sequence
  Oligonucleotide for detection of SNP TSC0026222
agtattgtggtgt

SEQ ID NO: 104790 - DNA, 13 bp, Artificial Sequence
  Oligonucleotide for detection of SNP TSC0026222
acaccacaatact

SEQ ID NO: 104791 - DNA, 13 bp, Artificial Sequence
  Oligonucleotide for detection of SNP TSC0026224
gtaggtgggggaa

SEQ ID NO: 104792 - DNA, 13 bp, Artificial Sequence
  Oligonucleotide for detection of SNP TSC0026224
ttcccccacctac

SEQ ID NO: 104793 - DNA, 13 bp, Artificial Sequence
  Oligonucleotide for detection of SNP TSC0026224
gtaggtaggggaa

SEQ ID NO: 104794 - DNA, 13 bp, Artificial Sequence
  Oligonucleotide for detection of SNP TSC0026224
ttcccctacctac

SEQ ID NO: 104795 - DNA, 13 bp, Artificial Sequence
  Oligonucleotide for detection of SNP TSC0026226
agtatgaaagtta

SEQ ID NO: 104796 - DNA, 13 bp, Artificial Sequence
  Oligonucleotide for detection of SNP TSC0026226
taactttcatact

SEQ ID NO: 104797 - DNA, 13 bp, Artificial Sequence
  Oligonucleotide for detection of SNP TSC0026226
agtatgtaagtta

SEQ ID NO: 104798 - DNA, 13 bp, Artificial Sequence
  Oligonucleotide for detection of SNP TSC0026226
taacttacatact

SEQ ID NO: 104799 - DNA, 13 bp, Artificial Sequence
  Oligonucleotide for detection of SNP TSC0026226
tgatttttatatt

SEQ ID NO: 104800 - DNA, 13 bp, Artificial Sequence
  Oligonucleotide for detection of SNP TSC0026226
aatataaaaatca

SEQ ID NO: 104801 - DNA, 13 bp, Artificial Sequence
  Oligonucleotide for detection of SNP TSC0026226
tgatttgtatatt

SEQ ID NO: 104802 - DNA, 13 bp, Artificial Sequence
  Oligonucleotide for detection of SNP TSC0026226
aatatacaaatca

SEQ ID NO: 104803 - DNA, 13 bp, Artificial Sequence
  Oligonucleotide for detection of SNP TSC0026227
tttttagaaaaga

SEQ ID NO: 104804 - DNA, 13 bp, Artificial Sequence
  Oligonucleotide for detection of SNP TSC0026227
tcttttctaaaaa

SEQ ID NO: 104805 - DNA, 13 bp, Artificial Sequence
  Oligonucleotide for detection of SNP TSC0026227
tttttaaaaaaga

SEQ ID NO: 104806 - DNA, 13 bp, Artificial Sequence
  Oligonucleotide for detection of SNP TSC0026227
tcttttttaaaaa

SEQ ID NO: 104807 - DNA, 13 bp, Artificial Sequence
  Oligonucleotide for detection of SNP TSC0026236
gatatgtagggag

SEQ ID NO: 104808 - DNA, 13 bp, Artificial Sequence
  Oligonucleotide for detection of SNP TSC0026236
ctccctacatatc

SEQ ID NO: 104809 - DNA, 13 bp, Artificial Sequence
  Oligonucleotide for detection of SNP TSC0026236
gatatggagggag

SEQ ID NO: 104810 - DNA, 13 bp, Artificial Sequence
  Oligonucleotide for detection of SNP TSC0026236
ctccctccatatc

SEQ ID NO: 104811 - DNA, 13 bp, Artificial Sequence
  Oligonucleotide for detection of SNP TSC0026236
ttttttgtatgty

SEQ ID NO: 104812 - DNA, 13 bp, Artificial Sequence
  Oligonucleotide for detection of SNP TSC0026236
racatacaaaaaa

SEQ ID NO: 104813 - DNA, 13 bp, Artificial Sequence
  Oligonucleotide for detection of SNP TSC0026236
ttttttttatgty

SEQ ID NO: 104814 - DNA, 13 bp, Artificial Sequence
  Oligonucleotide for detection of SNP TSC0026236
racataaaaaaaa

SEQ ID NO: 104815 - DNA, 13 bp, Artificial Sequence
  Oligonucleotide for detection of SNP TSC0026243
gtttttagggaty

SEQ ID NO: 104816 - DNA, 13 bp, Artificial Sequence
  Oligonucleotide for detection of SNP TSC0026243
ratccctaaaaac

SEQ ID NO: 104817 - DNA, 13 bp, Artificial Sequence
  Oligonucleotide for detection of SNP TSC0026243
gttttttgggaty

SEQ ID NO: 104818 - DNA, 13 bp, Artificial Sequence
  Oligonucleotide for detection of SNP TSC0026243
ratcccaaaaaac

SEQ ID NO: 104819 - DNA, 13 bp, Artificial Sequence
  Oligonucleotide for detection of SNP TSC0026243
gtttttcgggaty

SEQ ID NO: 104820 - DNA, 13 bp, Artificial Sequence
  Oligonucleotide for detection of SNP TSC0026243
ratcccgaaaaac

SEQ ID NO: 104821 - DNA, 13 bp, Artificial Sequence
  Oligonucleotide for detection of SNP TSC0026243
gatttttgaaagy

SEQ ID NO: 104822 - DNA, 13 bp, Artificial Sequence
  Oligonucleotide for detection of SNP TSC0026243
rctttcaaaaatc

SEQ ID NO: 104823 - DNA, 13 bp, Artificial Sequence
  Oligonucleotide for detection of SNP TSC0026243
gattttggaaagy

SEQ ID NO: 104824 - DNA, 13 bp, Artificial Sequence
  Oligonucleotide for detection of SNP TSC0026243
rctttccaaaatc

SEQ ID NO: 104825 - DNA, 13 bp, Artificial Sequence
  Oligonucleotide for detection of SNP TSC0026243
gatttcggaaagy

SEQ ID NO: 104826 - DNA, 13 bp, Artificial Sequence
  Oligonucleotide for detection of SNP TSC0026243
rctttccgaaatc

SEQ ID NO: 104827 - DNA, 13 bp, Artificial Sequence
  Oligonucleotide for detection of SNP TSC0026244
tggaaagtggatg

SEQ ID NO: 104828 - DNA, 13 bp, Artificial Sequence
  Oligonucleotide for detection of SNP TSC0026244
catccactttcca

SEQ ID NO: 104829 - DNA, 13 bp, Artificial Sequence
  Oligonucleotide for detection of SNP TSC0026244
tggaaattggatg

SEQ ID NO: 104830 - DNA, 13 bp, Artificial Sequence
  Oligonucleotide for detection of SNP TSC0026244
catccaatttcca

SEQ ID NO: 104831 - DNA, 13 bp, Artificial Sequence
  Oligonucleotide for detection of SNP TSC0026245
aattataaaatat

SEQ ID NO: 104832 - DNA, 13 bp, Artificial Sequence
  Oligonucleotide for detection of SNP TSC0026245
atattttataatt

SEQ ID NO: 104833 - DNA, 13 bp, Artificial Sequence
  Oligonucleotide for detection of SNP TSC0026245
aattatgaaatat

SEQ ID NO: 104834 - DNA, 13 bp, Artificial Sequence
  Oligonucleotide for detection of SNP TSC0026245
atatttcataatt

SEQ ID NO: 104835 - DNA, 13 bp, Artificial Sequence
  Oligonucleotide for detection of SNP TSC0026248
tgttagtttgttt

SEQ ID NO: 104836 - DNA, 13 bp, Artificial Sequence
  Oligonucleotide for detection of SNP TSC0026248
aaacaaactaaca

SEQ ID NO: 104837 - DNA, 13 bp, Artificial Sequence
  Oligonucleotide for detection of SNP TSC0026248
tgttaggttgttt

SEQ ID NO: 104838 - DNA, 13 bp, Artificial Sequence
  Oligonucleotide for detection of SNP TSC0026248
aaacaacctaaca

SEQ ID NO: 104839 - DNA, 13 bp, Artificial Sequence
  Oligonucleotide for detection of SNP TSC0026248
tgttagttcgttt

SEQ ID NO: 104840 - DNA, 13 bp, Artificial Sequence
  Oligonucleotide for detection of SNP TSC0026248
aaacgaactaaca

SEQ ID NO: 104841 - DNA, 13 bp, Artificial Sequence
  Oligonucleotide for detection of SNP TSC0026248
tgttaggtcgttt

SEQ ID NO: 104842 - DNA, 13 bp, Artificial Sequence
  Oligonucleotide for detection of SNP TSC0026248
aaacgacctaaca

SEQ ID NO: 104843 - DNA, 13 bp, Artificial Sequence
  Oligonucleotide for detection of SNP TSC0026248
aagtgggttggta

SEQ ID NO: 104844 - DNA, 13 bp, Artificial Sequence
  Oligonucleotide for detection of SNP TSC0026248
taccaacccactt

SEQ ID NO: 104845 - DNA, 13 bp, Artificial Sequence
  Oligonucleotide for detection of SNP TSC0026248
aagtggtttggta

SEQ ID NO: 104846 - DNA, 13 bp, Artificial Sequence
  Oligonucleotide for detection of SNP TSC0026248
taccaaaccactt

SEQ ID NO: 104847 - DNA, 13 bp, Artificial Sequence
  Oligonucleotide for detection of SNP TSC0026248
aagcgggttggta

SEQ ID NO: 104848 - DNA, 13 bp, Artificial Sequence
  Oligonucleotide for detection of SNP TSC0026248
taccaacccgctt

SEQ ID NO: 104849 - DNA, 13 bp, Artificial Sequence
  Oligonucleotide for detection of SNP TSC0026248
aagcggtttggta

SEQ ID NO: 104850 - DNA, 13 bp, Artificial Sequence
  Oligonucleotide for detection of SNP TSC0026248
taccaaaccgctt

SEQ ID NO: 104851 - DNA, 13 bp, Artificial Sequence
  Oligonucleotide for detection of SNP TSC0026249
gtaagtaggggtg

SEQ ID NO: 104852 - DNA, 13 bp, Artificial Sequence
  Oligonucleotide for detection of SNP TSC0026249
cacccctacttac

SEQ ID NO: 104853 - DNA, 13 bp, Artificial Sequence
  Oligonucleotide for detection of SNP TSC0026249
gtaagtgggggtg

SEQ ID NO: 104854 - DNA, 13 bp, Artificial Sequence
  Oligonucleotide for detection of SNP TSC0026249
cacccccacttac

SEQ ID NO: 104855 - DNA, 13 bp, Artificial Sequence
  Oligonucleotide for detection of SNP TSC0026249
gtaagcgggggtg

SEQ ID NO: 104856 - DNA, 13 bp, Artificial Sequence
  Oligonucleotide for detection of SNP TSC0026249
cacccccgcttac

SEQ ID NO: 104857 - DNA, 13 bp, Artificial Sequence
  Oligonucleotide for detection of SNP TSC0026249
tatttttgtttgy

SEQ ID NO: 104858 - DNA, 13 bp, Artificial Sequence
  Oligonucleotide for detection of SNP TSC0026249
rcaaacaaaaata

SEQ ID NO: 104859 - DNA, 13 bp, Artificial Sequence
  Oligonucleotide for detection of SNP TSC0026249
tattttcgtttgy

SEQ ID NO: 104860 - DNA, 13 bp, Artificial Sequence
  Oligonucleotide for detection of SNP TSC0026249
rcaaacgaaaata

SEQ ID NO: 104861 - DNA, 13 bp, Artificial Sequence
  Oligonucleotide for detection of SNP TSC0026251
gggattgtaggtg

SEQ ID NO: 104862 - DNA, 13 bp, Artificial Sequence
  Oligonucleotide for detection of SNP TSC0026251
cacctacaatccc

SEQ ID NO: 104863 - DNA, 13 bp, Artificial Sequence
  Oligonucleotide for detection of SNP TSC0026251
gggattataggtg

SEQ ID NO: 104864 - DNA, 13 bp, Artificial Sequence
  Oligonucleotide for detection of SNP TSC0026251
cacctataatccc

SEQ ID NO: 104865 - DNA, 13 bp, Artificial Sequence
  Oligonucleotide for detection of SNP TSC0026251
gggattgtaggcg

SEQ ID NO: 104866 - DNA, 13 bp, Artificial Sequence
  Oligonucleotide for detection of SNP TSC0026251
cgcctacaatccc

SEQ ID NO: 104867 - DNA, 13 bp, Artificial Sequence
  Oligonucleotide for detection of SNP TSC0026251
gggattataggcg

SEQ ID NO: 104868 - DNA, 13 bp, Artificial Sequence
  Oligonucleotide for detection of SNP TSC0026251
cgcctataatccc

SEQ ID NO: 104869 - DNA, 13 bp, Artificial Sequence
  Oligonucleotide for detection of SNP TSC0026257
aattttaagtaaa

SEQ ID NO: 104870 - DNA, 13 bp, Artificial Sequence
  Oligonucleotide for detection of SNP TSC0026257
tttacttaaaatt

SEQ ID NO: 104871 - DNA, 13 bp, Artificial Sequence
  Oligonucleotide for detection of SNP TSC0026257
aattttgagtaaa

SEQ ID NO: 104872 - DNA, 13 bp, Artificial Sequence
  Oligonucleotide for detection of SNP TSC0026257
tttactcaaaatt

SEQ ID NO: 104873 - DNA, 13 bp, Artificial Sequence
  Oligonucleotide for detection of SNP TSC0026258
atttggaaaattg

SEQ ID NO: 104874 - DNA, 13 bp, Artificial Sequence
  Oligonucleotide for detection of SNP TSC0026258
caattttccaaat

SEQ ID NO: 104875 - DNA, 13 bp, Artificial Sequence
  Oligonucleotide for detection of SNP TSC0026258
atttgggaaattg

SEQ ID NO: 104876 - DNA, 13 bp, Artificial Sequence
  Oligonucleotide for detection of SNP TSC0026258
caatttcccaaat

SEQ ID NO: 104877 - DNA, 13 bp, Artificial Sequence
  Oligonucleotide for detection of SNP TSC0026260
tgtttgtggaagy

SEQ ID NO: 104878 - DNA, 13 bp, Artificial Sequence
  Oligonucleotide for detection of SNP TSC0026260
rcttccacaaaca

SEQ ID NO: 104879 - DNA, 13 bp, Artificial Sequence
  Oligonucleotide for detection of SNP TSC0026260
tgtttgcggaagy

SEQ ID NO: 104880 - DNA, 13 bp, Artificial Sequence
  Oligonucleotide for detection of SNP TSC0026260
rcttccgcaaaca

SEQ ID NO: 104881 - DNA, 13 bp, Artificial Sequence
  Oligonucleotide for detection of SNP TSC0026260
gtttttgtaaata

SEQ ID NO: 104882 - DNA, 13 bp, Artificial Sequence
  Oligonucleotide for detection of SNP TSC0026260
tatttacaaaaac

SEQ ID NO: 104883 - DNA, 13 bp, Artificial Sequence
  Oligonucleotide for detection of SNP TSC0026260
gtttttataaata

SEQ ID NO: 104884 - DNA, 13 bp, Artificial Sequence
  Oligonucleotide for detection of SNP TSC0026260
tatttataaaaac

SEQ ID NO: 104885 - DNA, 13 bp, Artificial Sequence
  Oligonucleotide for detection of SNP TSC0026260
gttttcgtaaata

SEQ ID NO: 104886 - DNA, 13 bp, Artificial Sequence
  Oligonucleotide for detection of SNP TSC0026260
tatttacgaaaac

SEQ ID NO: 104887 - DNA, 13 bp, Artificial Sequence
  Oligonucleotide for detection of SNP TSC0026262
agggtaaatgtty

SEQ ID NO: 104888 - DNA, 13 bp, Artificial Sequence
  Oligonucleotide for detection of SNP TSC0026262
raacatttaccct

SEQ ID NO: 104889 - DNA, 13 bp, Artificial Sequence
  Oligonucleotide for detection of SNP TSC0026262
agggtagatgtty

SEQ ID NO: 104890 - DNA, 13 bp, Artificial Sequence
  Oligonucleotide for detection of SNP TSC0026262
raacatctaccct

SEQ ID NO: 104891 - DNA, 13 bp, Artificial Sequence
  Oligonucleotide for detection of SNP TSC0026263
attttaagaatag

SEQ ID NO: 104892 - DNA, 13 bp, Artificial Sequence
  Oligonucleotide for detection of SNP TSC0026263
ctattcttaaaat

SEQ ID NO: 104893 - DNA, 13 bp, Artificial Sequence
  Oligonucleotide for detection of SNP TSC0026263
attttaggaatag

SEQ ID NO: 104894 - DNA, 13 bp, Artificial Sequence
  Oligonucleotide for detection of SNP TSC0026263
ctattcctaaaat

SEQ ID NO: 104895 - DNA, 13 bp, Artificial Sequence
  Oligonucleotide for detection of SNP TSC0026264
tgtgtgtgtgata

SEQ ID NO: 104896 - DNA, 13 bp, Artificial Sequence
  Oligonucleotide for detection of SNP TSC0026264
tatcacacacaca

SEQ ID NO: 104897 - DNA, 13 bp, Artificial Sequence
  Oligonucleotide for detection of SNP TSC0026264
tgtgtgcgtgata

SEQ ID NO: 104898 - DNA, 13 bp, Artificial Sequence
  Oligonucleotide for detection of SNP TSC0026264
tatcacgcacaca

SEQ ID NO: 104899 - DNA, 13 bp, Artificial Sequence
  Oligonucleotide for detection of SNP TSC0026264
tgttatgtatata

SEQ ID NO: 104900 - DNA, 13 bp, Artificial Sequence
  Oligonucleotide for detection of SNP TSC0026264
tatatacataaca

SEQ ID NO: 104901 - DNA, 13 bp, Artificial Sequence
  Oligonucleotide for detection of SNP TSC0026264
tgttatatatata

SEQ ID NO: 104902 - DNA, 13 bp, Artificial Sequence
  Oligonucleotide for detection of SNP TSC0026264
tatatatataaca

SEQ ID NO: 104903 - DNA, 13 bp, Artificial Sequence
  Oligonucleotide for detection of SNP TSC0026264
tgttacgtatata

SEQ ID NO: 104904 - DNA, 13 bp, Artificial Sequence
  Oligonucleotide for detection of SNP TSC0026264
tatatacgtaaca

SEQ ID NO: 104905 - DNA, 13 bp, Artificial Sequence
  Oligonucleotide for detection of SNP TSC0026265
agagtaggtgagg

SEQ ID NO: 104906 - DNA, 13 bp, Artificial Sequence
  Oligonucleotide for detection of SNP TSC0026265
cctcacctactct

SEQ ID NO: 104907 - DNA, 13 bp, Artificial Sequence
  Oligonucleotide for detection of SNP TSC0026265
agagtaagtgagg

SEQ ID NO: 104908 - DNA, 13 bp, Artificial Sequence
  Oligonucleotide for detection of SNP TSC0026265
cctcacttactct

SEQ ID NO: 104909 - DNA, 13 bp, Artificial Sequence
  Oligonucleotide for detection of SNP TSC0026269
aatattattttat

SEQ ID NO: 104910 - DNA, 13 bp, Artificial Sequence
  Oligonucleotide for detection of SNP TSC0026269
ataaaataatatt

SEQ ID NO: 104911 - DNA, 13 bp, Artificial Sequence
  Oligonucleotide for detection of SNP TSC0026269
aatattgttttat

SEQ ID NO: 104912 - DNA, 13 bp, Artificial Sequence
  Oligonucleotide for detection of SNP TSC0026269
ataaaacaatatt

SEQ ID NO: 104913 - DNA, 13 bp, Artificial Sequence
  Oligonucleotide for detection of SNP TSC0026269
aatatcgttttat

SEQ ID NO: 104914 - DNA, 13 bp, Artificial Sequence
  Oligonucleotide for detection of SNP TSC0026269
ataaaacgatatt

SEQ ID NO: 104915 - DNA, 13 bp, Artificial Sequence
  Oligonucleotide for detection of SNP TSC0026269
atgggatggtgtt

SEQ ID NO: 104916 - DNA, 13 bp, Artificial Sequence
  Oligonucleotide for detection of SNP TSC0026269
aacaccatcccat

SEQ ID NO: 104917 - DNA, 13 bp, Artificial Sequence
  Oligonucleotide for detection of SNP TSC0026269
atgggacggtgtt

SEQ ID NO: 104918 - DNA, 13 bp, Artificial Sequence
  Oligonucleotide for detection of SNP TSC0026269
aacaccgtcccat

SEQ ID NO: 104919 - DNA, 13 bp, Artificial Sequence
  Oligonucleotide for detection of SNP TSC0026272
ggggtagggttgg

SEQ ID NO: 104920 - DNA, 13 bp, Artificial Sequence
  Oligonucleotide for detection of SNP TSC0026272
ccaaccctacccc

SEQ ID NO: 104921 - DNA, 13 bp, Artificial Sequence
  Oligonucleotide for detection of SNP TSC0026272
ggggtaaggttgg

SEQ ID NO: 104922 - DNA, 13 bp, Artificial Sequence
  Oligonucleotide for detection of SNP TSC0026272
ccaaccttacccc

SEQ ID NO: 104923 - DNA, 13 bp, Artificial Sequence
  Oligonucleotide for detection of SNP TSC0026273
ggttaggagggag

SEQ ID NO: 104924 - DNA, 13 bp, Artificial Sequence
  Oligonucleotide for detection of SNP TSC0026273
ctccctcctaacc

SEQ ID NO: 104925 - DNA, 13 bp, Artificial Sequence
  Oligonucleotide for detection of SNP TSC0026273
ggttagaagggag

SEQ ID NO: 104926 - DNA, 13 bp, Artificial Sequence
  Oligonucleotide for detection of SNP TSC0026273
ctcccttctaacc

SEQ ID NO: 104927 - DNA, 13 bp, Artificial Sequence
  Oligonucleotide for detection of SNP TSC0026274
taatttaagtatt

SEQ ID NO: 104928 - DNA, 13 bp, Artificial Sequence
  Oligonucleotide for detection of SNP TSC0026274
aatacttaaatta

SEQ ID NO: 104929 - DNA, 13 bp, Artificial Sequence
  Oligonucleotide for detection of SNP TSC0026275
ttgatatggtaty

SEQ ID NO: 104930 - DNA, 13 bp, Artificial Sequence
  Oligonucleotide for detection of SNP TSC0026275
rataccatatcaa

SEQ ID NO: 104931 - DNA, 13 bp, Artificial Sequence
  Oligonucleotide for detection of SNP TSC0026275
ttgatacggtaty

SEQ ID NO: 104932 - DNA, 13 bp, Artificial Sequence
  Oligonucleotide for detection of SNP TSC0026275
rataccgtatcaa

SEQ ID NO: 104933 - DNA, 13 bp, Artificial Sequence
  Oligonucleotide for detection of SNP TSC0026275
ggtattgtgttag

SEQ ID NO: 104934 - DNA, 13 bp, Artificial Sequence
  Oligonucleotide for detection of SNP TSC0026275
ctaacacaatacc

SEQ ID NO: 104935 - DNA, 13 bp, Artificial Sequence
  Oligonucleotide for detection of SNP TSC0026275
ggtattatgttag

SEQ ID NO: 104936 - DNA, 13 bp, Artificial Sequence
  Oligonucleotide for detection of SNP TSC0026275
ctaacataatacc

SEQ ID NO: 104937 - DNA, 13 bp, Artificial Sequence
  Oligonucleotide for detection of SNP TSC0026275
ggtatcgtgttag

SEQ ID NO: 104938 - DNA, 13 bp, Artificial Sequence
  Oligonucleotide for detection of SNP TSC0026275
ctaacacgatacc

SEQ ID NO: 104939 - DNA, 13 bp, Artificial Sequence
  Oligonucleotide for detection of SNP TSC0026276
gttttagaaattt

SEQ ID NO: 104940 - DNA, 13 bp, Artificial Sequence
  Oligonucleotide for detection of SNP TSC0026276
aaatttctaaaac

SEQ ID NO: 104941 - DNA, 13 bp, Artificial Sequence
  Oligonucleotide for detection of SNP TSC0026276
gttttaaaaattt

SEQ ID NO: 104942 - DNA, 13 bp, Artificial Sequence
  Oligonucleotide for detection of SNP TSC0026276
aaatttttaaaac

SEQ ID NO: 104943 - DNA, 13 bp, Artificial Sequence
  Oligonucleotide for detection of SNP TSC0026277
attatgataaaat

SEQ ID NO: 104944 - DNA, 13 bp, Artificial Sequence
  Oligonucleotide for detection of SNP TSC0026277
attttatcataat

SEQ ID NO: 104945 - DNA, 13 bp, Artificial Sequence
  Oligonucleotide for detection of SNP TSC0026277
attatggtaaaat

SEQ ID NO: 104946 - DNA, 13 bp, Artificial Sequence
  Oligonucleotide for detection of SNP TSC0026277
attttaccataat

SEQ ID NO: 104947 - DNA, 13 bp, Artificial Sequence
  Oligonucleotide for detection of SNP TSC0026278
aagttttgattga

SEQ ID NO: 104948 - DNA, 13 bp, Artificial Sequence
  Oligonucleotide for detection of SNP TSC0026278
tcaatcaaaactt

SEQ ID NO: 104949 - DNA, 13 bp, Artificial Sequence
  Oligonucleotide for detection of SNP TSC0026278
aagtttcgattga

SEQ ID NO: 104950 - DNA, 13 bp, Artificial Sequence
  Oligonucleotide for detection of SNP TSC0026278
tcaatcgaaactt

SEQ ID NO: 104951 - DNA, 13 bp, Artificial Sequence
  Oligonucleotide for detection of SNP TSC0026278
ttaattgagattt

SEQ ID NO: 104952 - DNA, 13 bp, Artificial Sequence
  Oligonucleotide for detection of SNP TSC0026278
aaatctcaattaa

SEQ ID NO: 104953 - DNA, 13 bp, Artificial Sequence
  Oligonucleotide for detection of SNP TSC0026278
ttaattaagattt

SEQ ID NO: 104954 - DNA, 13 bp, Artificial Sequence
  Oligonucleotide for detection of SNP TSC0026278
aaatcttaattaa

SEQ ID NO: 104955 - DNA, 13 bp, Artificial Sequence
  Oligonucleotide for detection of SNP TSC0026278
ttaatcgagattt

SEQ ID NO: 104956 - DNA, 13 bp, Artificial Sequence
  Oligonucleotide for detection of SNP TSC0026278
aaatctcgattaa

SEQ ID NO: 104957 - DNA, 13 bp, Artificial Sequence
  Oligonucleotide for detection of SNP TSC0026279
aatagagggtgaa

SEQ ID NO: 104958 - DNA, 13 bp, Artificial Sequence
  Oligonucleotide for detection of SNP TSC0026279
ttcaccctctatt

SEQ ID NO: 104959 - DNA, 13 bp, Artificial Sequence
  Oligonucleotide for detection of SNP TSC0026279
aatagaaggtgaa

SEQ ID NO: 104960 - DNA, 13 bp, Artificial Sequence
  Oligonucleotide for detection of SNP TSC0026279
ttcaccttctatt

SEQ ID NO: 104961 - DNA, 13 bp, Artificial Sequence
  Oligonucleotide for detection of SNP TSC0026280
gtgttgggattay

SEQ ID NO: 104962 - DNA, 13 bp, Artificial Sequence
  Oligonucleotide for detection of SNP TSC0026280
rtaatcccaacac

SEQ ID NO: 104963 - DNA, 13 bp, Artificial Sequence
  Oligonucleotide for detection of SNP TSC0026280
gtgttgagattay

SEQ ID NO: 104964 - DNA, 13 bp, Artificial Sequence
  Oligonucleotide for detection of SNP TSC0026280
rtaatctcaacac

SEQ ID NO: 104965 - DNA, 13 bp, Artificial Sequence
  Oligonucleotide for detection of SNP TSC0026283
tggagaatagaty

SEQ ID NO: 104966 - DNA, 13 bp, Artificial Sequence
  Oligonucleotide for detection of SNP TSC0026283
ratctattctcca

SEQ ID NO: 104967 - DNA, 13 bp, Artificial Sequence
  Oligonucleotide for detection of SNP TSC0026283
tggagagtagaty

SEQ ID NO: 104968 - DNA, 13 bp, Artificial Sequence
  Oligonucleotide for detection of SNP TSC0026283
ratctactctcca

SEQ ID NO: 104969 - DNA, 13 bp, Artificial Sequence
  Oligonucleotide for detection of SNP TSC0026284
tgtggaaaaggag

SEQ ID NO: 104970 - DNA, 13 bp, Artificial Sequence
  Oligonucleotide for detection of SNP TSC0026284
ctccttttccaca

SEQ ID NO: 104971 - DNA, 13 bp, Artificial Sequence
  Oligonucleotide for detection of SNP TSC0026284
tgtggagaaggag

SEQ ID NO: 104972 - DNA, 13 bp, Artificial Sequence
  Oligonucleotide for detection of SNP TSC0026284
ctccttctccaca

SEQ ID NO: 104973 - DNA, 13 bp, Artificial Sequence
  Oligonucleotide for detection of SNP TSC0026284
cgtggaaaaggag

SEQ ID NO: 104974 - DNA, 13 bp, Artificial Sequence
  Oligonucleotide for detection of SNP TSC0026284
ctccttttccacg

SEQ ID NO: 104975 - DNA, 13 bp, Artificial Sequence
  Oligonucleotide for detection of SNP TSC0026284
cgtggagaaggag

SEQ ID NO: 104976 - DNA, 13 bp, Artificial Sequence
  Oligonucleotide for detection of SNP TSC0026284
ctccttctccacg

SEQ ID NO: 104977 - DNA, 13 bp, Artificial Sequence
  Oligonucleotide for detection of SNP TSC0026285
atttatggggtty

SEQ ID NO: 104978 - DNA, 13 bp, Artificial Sequence
  Oligonucleotide for detection of SNP TSC0026285
raaccccataaat

SEQ ID NO: 104979 - DNA, 13 bp, Artificial Sequence
  Oligonucleotide for detection of SNP TSC0026285
atttattgggtty

SEQ ID NO: 104980 - DNA, 13 bp, Artificial Sequence
  Oligonucleotide for detection of SNP TSC0026285
raacccaataaat

SEQ ID NO: 104981 - DNA, 13 bp, Artificial Sequence
  Oligonucleotide for detection of SNP TSC0026285
atttacggggtty

SEQ ID NO: 104982 - DNA, 13 bp, Artificial Sequence
  Oligonucleotide for detection of SNP TSC0026285
raaccccgtaaat

SEQ ID NO: 104983 - DNA, 13 bp, Artificial Sequence
  Oligonucleotide for detection of SNP TSC0026285
gagttttgtggat

SEQ ID NO: 104984 - DNA, 13 bp, Artificial Sequence
  Oligonucleotide for detection of SNP TSC0026285
atccacaaaactc

SEQ ID NO: 104985 - DNA, 13 bp, Artificial Sequence
  Oligonucleotide for detection of SNP TSC0026285
gagtttagtggat

SEQ ID NO: 104986 - DNA, 13 bp, Artificial Sequence
  Oligonucleotide for detection of SNP TSC0026285
atccactaaactc

SEQ ID NO: 104987 - DNA, 13 bp, Artificial Sequence
  Oligonucleotide for detection of SNP TSC0026285
gagtttcgtggat

SEQ ID NO: 104988 - DNA, 13 bp, Artificial Sequence
  Oligonucleotide for detection of SNP TSC0026285
atccacgaaactc

SEQ ID NO: 104989 - DNA, 13 bp, Artificial Sequence
  Oligonucleotide for detection of SNP TSC0026287
aagtttagagtat

SEQ ID NO: 104990 - DNA, 13 bp, Artificial Sequence
  Oligonucleotide for detection of SNP TSC0026287
atactctaaactt

SEQ ID NO: 104991 - DNA, 13 bp, Artificial Sequence
  Oligonucleotide for detection of SNP TSC0026287
aagttttgagtat

SEQ ID NO: 104992 - DNA, 13 bp, Artificial Sequence
  Oligonucleotide for detection of SNP TSC0026287
atactcaaaactt

SEQ ID NO: 104993 - DNA, 13 bp, Artificial Sequence
  Oligonucleotide for detection of SNP TSC0026289
gtaggtgttgtty

SEQ ID NO: 104994 - DNA, 13 bp, Artificial Sequence
  Oligonucleotide for detection of SNP TSC0026289
raacaacacctac

SEQ ID NO: 104995 - DNA, 13 bp, Artificial Sequence
  Oligonucleotide for detection of SNP TSC0026289
gtaggcgttgtty

SEQ ID NO: 104996 - DNA, 13 bp, Artificial Sequence
  Oligonucleotide for detection of SNP TSC0026289
raacaacgcctac

SEQ ID NO: 104997 - DNA, 13 bp, Artificial Sequence
  Oligonucleotide for detection of SNP TSC0026289
gagtagtgtttgy

SEQ ID NO: 104998 - DNA, 13 bp, Artificial Sequence
  Oligonucleotide for detection of SNP TSC0026289
rcaaacactactc

SEQ ID NO: 104999 - DNA, 13 bp, Artificial Sequence
  Oligonucleotide for detection of SNP TSC0026289
gagtagcgtttgy

SEQ ID NO: 105000 - DNA, 13 bp, Artificial Sequence
  Oligonucleotide for detection of SNP TSC0026289
rcaaacgctactc

SEQ ID NO: 105001 - DNA, 13 bp, Artificial Sequence
  Oligonucleotide for detection of SNP TSC0026293
ttattttgtaatt

SEQ ID NO: 105002 - DNA, 13 bp, Artificial Sequence
  Oligonucleotide for detection of SNP TSC0026293
aattacaaaataa

SEQ ID NO: 105003 - DNA, 13 bp, Artificial Sequence
  Oligonucleotide for detection of SNP TSC0026293
ttatttcgtaatt

SEQ ID NO: 105004 - DNA, 13 bp, Artificial Sequence
  Oligonucleotide for detection of SNP TSC0026293
aattacgaaataa

SEQ ID NO: 105005 - DNA, 13 bp, Artificial Sequence
  Oligonucleotide for detection of SNP TSC0026293
agttgtgaggtgg

SEQ ID NO: 105006 - DNA, 13 bp, Artificial Sequence
  Oligonucleotide for detection of SNP TSC0026293
ccacctcacaact

SEQ ID NO: 105007 - DNA, 13 bp, Artificial Sequence
  Oligonucleotide for detection of SNP TSC0026293
agttgtaaggtgg

SEQ ID NO: 105008 - DNA, 13 bp, Artificial Sequence
  Oligonucleotide for detection of SNP TSC0026293
ccaccttacaact

SEQ ID NO: 105009 - DNA, 13 bp, Artificial Sequence
  Oligonucleotide for detection of SNP TSC0026293
agttgcgaggtgg

SEQ ID NO: 105010 - DNA, 13 bp, Artificial Sequence
  Oligonucleotide for detection of SNP TSC0026293
ccacctcgcaact

SEQ ID NO: 105011 - DNA, 13 bp, Artificial Sequence
  Oligonucleotide for detection of SNP TSC0026294
gttgttatttttt

SEQ ID NO: 105012 - DNA, 13 bp, Artificial Sequence
  Oligonucleotide for detection of SNP TSC0026294
aaaaaataacaac

SEQ ID NO: 105013 - DNA, 13 bp, Artificial Sequence
  Oligonucleotide for detection of SNP TSC0026297
ttaagtatttggg

SEQ ID NO: 105014 - DNA, 13 bp, Artificial Sequence
  Oligonucleotide for detection of SNP TSC0026297
cccaaatacttaa

SEQ ID NO: 105015 - DNA, 13 bp, Artificial Sequence
  Oligonucleotide for detection of SNP TSC0026297
ttaagtttttggg

SEQ ID NO: 105016 - DNA, 13 bp, Artificial Sequence
  Oligonucleotide for detection of SNP TSC0026297
cccaaaaacttaa

SEQ ID NO: 105017 - DNA, 13 bp, Artificial Sequence
  Oligonucleotide for detection of SNP TSC0026297
tttaaatgtttgg

SEQ ID NO: 105018 - DNA, 13 bp, Artificial Sequence
  Oligonucleotide for detection of SNP TSC0026297
ccaaacatttaaa

SEQ ID NO: 105019 - DNA, 13 bp, Artificial Sequence
  Oligonucleotide for detection of SNP TSC0026297
tttaaaggtttgg

SEQ ID NO: 105020 - DNA, 13 bp, Artificial Sequence
  Oligonucleotide for detection of SNP TSC0026297
ccaaacctttaaa

SEQ ID NO: 105021 - DNA, 13 bp, Artificial Sequence
  Oligonucleotide for detection of SNP TSC0026298
gatatatgtgtty

SEQ ID NO: 105022 - DNA, 13 bp, Artificial Sequence
  Oligonucleotide for detection of SNP TSC0026298
raacacatatatc

SEQ ID NO: 105023 - DNA, 13 bp, Artificial Sequence
  Oligonucleotide for detection of SNP TSC0026298
gatatacgtgtty

SEQ ID NO: 105024 - DNA, 13 bp, Artificial Sequence
  Oligonucleotide for detection of SNP TSC0026298
raacacgtatatc

SEQ ID NO: 105025 - DNA, 13 bp, Artificial Sequence
  Oligonucleotide for detection of SNP TSC0026298
gggtatgtgtaty

SEQ ID NO: 105026 - DNA, 13 bp, Artificial Sequence
  Oligonucleotide for detection of SNP TSC0026298
ratacacataccc

SEQ ID NO: 105027 - DNA, 13 bp, Artificial Sequence
  Oligonucleotide for detection of SNP TSC0026298
gggtatatgtaty

SEQ ID NO: 105028 - DNA, 13 bp, Artificial Sequence
  Oligonucleotide for detection of SNP TSC0026298
ratacatataccc

SEQ ID NO: 105029 - DNA, 13 bp, Artificial Sequence
  Oligonucleotide for detection of SNP TSC0026298
gggtacgtgtaty

SEQ ID NO: 105030 - DNA, 13 bp, Artificial Sequence
  Oligonucleotide for detection of SNP TSC0026298
ratacacgtaccc

SEQ ID NO: 105031 - DNA, 13 bp, Artificial Sequence
  Oligonucleotide for detection of SNP TSC0026301
aagattttttgtg

SEQ ID NO: 105032 - DNA, 13 bp, Artificial Sequence
  Oligonucleotide for detection of SNP TSC0026301
cacaaaaaatctt

SEQ ID NO: 105033 - DNA, 13 bp, Artificial Sequence
  Oligonucleotide for detection of SNP TSC0026301
aagattgtttgtg

SEQ ID NO: 105034 - DNA, 13 bp, Artificial Sequence
  Oligonucleotide for detection of SNP TSC0026301
cacaaacaatctt

SEQ ID NO: 105035 - DNA, 13 bp, Artificial Sequence
  Oligonucleotide for detection of SNP TSC0026301
tatagggaatttt

SEQ ID NO: 105036 - DNA, 13 bp, Artificial Sequence
  Oligonucleotide for detection of SNP TSC0026301
aaaattccctata

SEQ ID NO: 105037 - DNA, 13 bp, Artificial Sequence
  Oligonucleotide for detection of SNP TSC0026301
tataggtaatttt

SEQ ID NO: 105038 - DNA, 13 bp, Artificial Sequence
  Oligonucleotide for detection of SNP TSC0026301
aaaattacctata

SEQ ID NO: 105039 - DNA, 13 bp, Artificial Sequence
  Oligonucleotide for detection of SNP TSC0026305
ttgtttgtaaaaa

SEQ ID NO: 105040 - DNA, 13 bp, Artificial Sequence
  Oligonucleotide for detection of SNP TSC0026305
tttttacaaacaa

SEQ ID NO: 105041 - DNA, 13 bp, Artificial Sequence
  Oligonucleotide for detection of SNP TSC0026305
ttgtttttaaaaa

SEQ ID NO: 105042 - DNA, 13 bp, Artificial Sequence
  Oligonucleotide for detection of SNP TSC0026305
tttttaaaaacaa

SEQ ID NO: 105043 - DNA, 13 bp, Artificial Sequence
  Oligonucleotide for detection of SNP TSC0026305
tttttataggtaa

SEQ ID NO: 105044 - DNA, 13 bp, Artificial Sequence
  Oligonucleotide for detection of SNP TSC0026305
ttacctataaaaa

SEQ ID NO: 105045 - DNA, 13 bp, Artificial Sequence
  Oligonucleotide for detection of SNP TSC0026305
tttttaaaggtaa

SEQ ID NO: 105046 - DNA, 13 bp, Artificial Sequence
  Oligonucleotide for detection of SNP TSC0026305
ttacctttaaaaa

SEQ ID NO: 105047 - DNA, 13 bp, Artificial Sequence
  Oligonucleotide for detection of SNP TSC0026306
aatttaaaataaa

SEQ ID NO: 105048 - DNA, 13 bp, Artificial Sequence
  Oligonucleotide for detection of SNP TSC0026306
tttattttaaatt

SEQ ID NO: 105049 - DNA, 13 bp, Artificial Sequence
  Oligonucleotide for detection of SNP TSC0026306
aatttataataaa

SEQ ID NO: 105050 - DNA, 13 bp, Artificial Sequence
  Oligonucleotide for detection of SNP TSC0026306
tttattataaatt

SEQ ID NO: 105051 - DNA, 13 bp, Artificial Sequence
  Oligonucleotide for detection of SNP TSC0026306
tttattgtgagtt

SEQ ID NO: 105052 - DNA, 13 bp, Artificial Sequence
  Oligonucleotide for detection of SNP TSC0026306
aactcacaataaa

SEQ ID NO: 105053 - DNA, 13 bp, Artificial Sequence
  Oligonucleotide for detection of SNP TSC0026309
aatattgaattty

SEQ ID NO: 105054 - DNA, 13 bp, Artificial Sequence
  Oligonucleotide for detection of SNP TSC0026309
raaattcaatatt

SEQ ID NO: 105055 - DNA, 13 bp, Artificial Sequence
  Oligonucleotide for detection of SNP TSC0026309
aatattaaattty

SEQ ID NO: 105056 - DNA, 13 bp, Artificial Sequence
  Oligonucleotide for detection of SNP TSC0026309
raaatttaatatt

SEQ ID NO: 105057 - DNA, 13 bp, Artificial Sequence
  Oligonucleotide for detection of SNP TSC0026310
agtgggattgaaa

SEQ ID NO: 105058 - DNA, 13 bp, Artificial Sequence
  Oligonucleotide for detection of SNP TSC0026310
tttcaatcccact

SEQ ID NO: 105059 - DNA, 13 bp, Artificial Sequence
  Oligonucleotide for detection of SNP TSC0026310
agtggggttgaaa

SEQ ID NO: 105060 - DNA, 13 bp, Artificial Sequence
  Oligonucleotide for detection of SNP TSC0026310
tttcaaccccact

SEQ ID NO: 105061 - DNA, 13 bp, Artificial Sequence
  Oligonucleotide for detection of SNP TSC0026314
aatttagtaggag

SEQ ID NO: 105062 - DNA, 13 bp, Artificial Sequence
  Oligonucleotide for detection of SNP TSC0026314
ctcctactaaatt

SEQ ID NO: 105063 - DNA, 13 bp, Artificial Sequence
  Oligonucleotide for detection of SNP TSC0026314
aatttaataggag

SEQ ID NO: 105064 - DNA, 13 bp, Artificial Sequence
  Oligonucleotide for detection of SNP TSC0026314
ctcctattaaatt

SEQ ID NO: 105065 - DNA, 13 bp, Artificial Sequence
  Oligonucleotide for detection of SNP TSC0026315
tatataggatagg

SEQ ID NO: 105066 - DNA, 13 bp, Artificial Sequence
  Oligonucleotide for detection of SNP TSC0026315
cctatcctatata

SEQ ID NO: 105067 - DNA, 13 bp, Artificial Sequence
  Oligonucleotide for detection of SNP TSC0026315
tatataagatagg

SEQ ID NO: 105068 - DNA, 13 bp, Artificial Sequence
  Oligonucleotide for detection of SNP TSC0026315
cctatcttatata

SEQ ID NO: 105069 - DNA, 13 bp, Artificial Sequence
  Oligonucleotide for detection of SNP TSC0026316
aaattaattgggy

SEQ ID NO: 105070 - DNA, 13 bp, Artificial Sequence
  Oligonucleotide for detection of SNP TSC0026316
rcccaattaattt

SEQ ID NO: 105071 - DNA, 13 bp, Artificial Sequence
  Oligonucleotide for detection of SNP TSC0026316
aaattagtcgggy

SEQ ID NO: 105072 - DNA, 13 bp, Artificial Sequence
  Oligonucleotide for detection of SNP TSC0026316
rcccgactaattt

SEQ ID NO: 105073 - DNA, 13 bp, Artificial Sequence
  Oligonucleotide for detection of SNP TSC0026316
aaattaatcgggy

SEQ ID NO: 105074 - DNA, 13 bp, Artificial Sequence
  Oligonucleotide for detection of SNP TSC0026316
rcccgattaattt

SEQ ID NO: 105075 - DNA, 13 bp, Artificial Sequence
  Oligonucleotide for detection of SNP TSC0026320
ttggaaggggttt

SEQ ID NO: 105076 - DNA, 13 bp, Artificial Sequence
  Oligonucleotide for detection of SNP TSC0026320
aaaccccttccaa

SEQ ID NO: 105077 - DNA, 13 bp, Artificial Sequence
  Oligonucleotide for detection of SNP TSC0026320
ttggaaagggttt

SEQ ID NO: 105078 - DNA, 13 bp, Artificial Sequence
  Oligonucleotide for detection of SNP TSC0026320
aaaccctttccaa

SEQ ID NO: 105079 - DNA, 13 bp, Artificial Sequence
  Oligonucleotide for detection of SNP TSC0026323
ttttttggatagg

SEQ ID NO: 105080 - DNA, 13 bp, Artificial Sequence
  Oligonucleotide for detection of SNP TSC0026323
cctatccaaaaaa

SEQ ID NO: 105081 - DNA, 13 bp, Artificial Sequence
  Oligonucleotide for detection of SNP TSC0026323
ttttttagatagg

SEQ ID NO: 105082 - DNA, 13 bp, Artificial Sequence
  Oligonucleotide for detection of SNP TSC0026323
cctatctaaaaaa

SEQ ID NO: 105083 - DNA, 13 bp, Artificial Sequence
  Oligonucleotide for detection of SNP TSC0026329
agaatttgtgtga

SEQ ID NO: 105084 - DNA, 13 bp, Artificial Sequence
  Oligonucleotide for detection of SNP TSC0026329
tcacacaaattct

SEQ ID NO: 105085 - DNA, 13 bp, Artificial Sequence
  Oligonucleotide for detection of SNP TSC0026329
agaattcgtgtga

SEQ ID NO: 105086 - DNA, 13 bp, Artificial Sequence
  Oligonucleotide for detection of SNP TSC0026329
tcacacgaattct

SEQ ID NO: 105087 - DNA, 13 bp, Artificial Sequence
  Oligonucleotide for detection of SNP TSC0026329
ttatatggatttt

SEQ ID NO: 105088 - DNA, 13 bp, Artificial Sequence
  Oligonucleotide for detection of SNP TSC0026329
aaaatccatataa

SEQ ID NO: 105089 - DNA, 13 bp, Artificial Sequence
  Oligonucleotide for detection of SNP TSC0026329
ttatatagatttt

SEQ ID NO: 105090 - DNA, 13 bp, Artificial Sequence
  Oligonucleotide for detection of SNP TSC0026329
aaaatctatataa

SEQ ID NO: 105091 - DNA, 13 bp, Artificial Sequence
  Oligonucleotide for detection of SNP TSC0026329
ttatacggatttt

SEQ ID NO: 105092 - DNA, 13 bp, Artificial Sequence
  Oligonucleotide for detection of SNP TSC0026329
aaaatccgtataa

SEQ ID NO: 105093 - DNA, 13 bp, Artificial Sequence
  Oligonucleotide for detection of SNP TSC0026331
aaggttattttgg

SEQ ID NO: 105094 - DNA, 13 bp, Artificial Sequence
  Oligonucleotide for detection of SNP TSC0026331
ccaaaataacctt

SEQ ID NO: 105095 - DNA, 13 bp, Artificial Sequence
  Oligonucleotide for detection of SNP TSC0026331
aaggttgttttgg

SEQ ID NO: 105096 - DNA, 13 bp, Artificial Sequence
  Oligonucleotide for detection of SNP TSC0026331
ccaaaacaacctt

SEQ ID NO: 105097 - DNA, 13 bp, Artificial Sequence
  Oligonucleotide for detection of SNP TSC0026331
aaggtcgttttgg

SEQ ID NO: 105098 - DNA, 13 bp, Artificial Sequence
  Oligonucleotide for detection of SNP TSC0026331
ccaaaacgacctt

SEQ ID NO: 105099 - DNA, 13 bp, Artificial Sequence
  Oligonucleotide for detection of SNP TSC0026331
ttaaagtgatttt

SEQ ID NO: 105100 - DNA, 13 bp, Artificial Sequence
  Oligonucleotide for detection of SNP TSC0026331
aaaatcactttaa

SEQ ID NO: 105101 - DNA, 13 bp, Artificial Sequence
  Oligonucleotide for detection of SNP TSC0026331
ttaaagcgatttt

SEQ ID NO: 105102 - DNA, 13 bp, Artificial Sequence
  Oligonucleotide for detection of SNP TSC0026331
aaaatcgctttaa

SEQ ID NO: 105103 - DNA, 13 bp, Artificial Sequence
  Oligonucleotide for detection of SNP TSC0026332
gttataggagttt

SEQ ID NO: 105104 - DNA, 13 bp, Artificial Sequence
  Oligonucleotide for detection of SNP TSC0026332
aaactcctataac

SEQ ID NO: 105105 - DNA, 13 bp, Artificial Sequence
  Oligonucleotide for detection of SNP TSC0026332
gttatatgagttt

SEQ ID NO: 105106 - DNA, 13 bp, Artificial Sequence
  Oligonucleotide for detection of SNP TSC0026332
aaactcatataac

SEQ ID NO: 105107 - DNA, 13 bp, Artificial Sequence
  Oligonucleotide for detection of SNP TSC0026332
agatttttgtagy

SEQ ID NO: 105108 - DNA, 13 bp, Artificial Sequence
  Oligonucleotide for detection of SNP TSC0026332
rctacaaaaatct

SEQ ID NO: 105109 - DNA, 13 bp, Artificial Sequence
  Oligonucleotide for detection of SNP TSC0026333
agttttagtgata

SEQ ID NO: 105110 - DNA, 13 bp, Artificial Sequence
  Oligonucleotide for detection of SNP TSC0026333
tatcactaaaact

SEQ ID NO: 105111 - DNA, 13 bp, Artificial Sequence
  Oligonucleotide for detection of SNP TSC0026333
agttttggtgata

SEQ ID NO: 105112 - DNA, 13 bp, Artificial Sequence
  Oligonucleotide for detection of SNP TSC0026333
tatcaccaaaact

SEQ ID NO: 105113 - DNA, 13 bp, Artificial Sequence
  Oligonucleotide for detection of SNP TSC0026333
agtttcggtgata

SEQ ID NO: 105114 - DNA, 13 bp, Artificial Sequence
  Oligonucleotide for detection of SNP TSC0026333
tatcaccgaaact

SEQ ID NO: 105115 - DNA, 13 bp, Artificial Sequence
  Oligonucleotide for detection of SNP TSC0026333
tgttattgaggtt

SEQ ID NO: 105116 - DNA, 13 bp, Artificial Sequence
  Oligonucleotide for detection of SNP TSC0026333
aacctcaataaca

SEQ ID NO: 105117 - DNA, 13 bp, Artificial Sequence
  Oligonucleotide for detection of SNP TSC0026333
tgttatcgaggtt

SEQ ID NO: 105118 - DNA, 13 bp, Artificial Sequence
  Oligonucleotide for detection of SNP TSC0026333
aacctcgataaca

SEQ ID NO: 105119 - DNA, 13 bp, Artificial Sequence
  Oligonucleotide for detection of SNP TSC0026334
ttttatgtttgty

SEQ ID NO: 105120 - DNA, 13 bp, Artificial Sequence
  Oligonucleotide for detection of SNP TSC0026334
racaaacataaaa

SEQ ID NO: 105121 - DNA, 13 bp, Artificial Sequence
  Oligonucleotide for detection of SNP TSC0026334
ttttatatttgty

SEQ ID NO: 105122 - DNA, 13 bp, Artificial Sequence
  Oligonucleotide for detection of SNP TSC0026334
racaaatataaaa

SEQ ID NO: 105123 - DNA, 13 bp, Artificial Sequence
  Oligonucleotide for detection of SNP TSC0026335
aattatagtgaat

SEQ ID NO: 105124 - DNA, 13 bp, Artificial Sequence
  Oligonucleotide for detection of SNP TSC0026335
attcactataatt

SEQ ID NO: 105125 - DNA, 13 bp, Artificial Sequence
  Oligonucleotide for detection of SNP TSC0026335
aattattgtgaat

SEQ ID NO: 105126 - DNA, 13 bp, Artificial Sequence
  Oligonucleotide for detection of SNP TSC0026335
attcacaataatt

SEQ ID NO: 105127 - DNA, 13 bp, Artificial Sequence
  Oligonucleotide for detection of SNP TSC0026335
atttattataatt

SEQ ID NO: 105128 - DNA, 13 bp, Artificial Sequence
  Oligonucleotide for detection of SNP TSC0026335
aattataataaat

SEQ ID NO: 105129 - DNA, 13 bp, Artificial Sequence
  Oligonucleotide for detection of SNP TSC0026335
atttataataatt

SEQ ID NO: 105130 - DNA, 13 bp, Artificial Sequence
  Oligonucleotide for detection of SNP TSC0026335
aattattataaat

SEQ ID NO: 105131 - DNA, 13 bp, Artificial Sequence
  Oligonucleotide for detection of SNP TSC0026337
tttataaaggttt

SEQ ID NO: 105132 - DNA, 13 bp, Artificial Sequence
  Oligonucleotide for detection of SNP TSC0026337
aaacctttataaa

SEQ ID NO: 105133 - DNA, 13 bp, Artificial Sequence
  Oligonucleotide for detection of SNP TSC0026337
tttatagaggttt

SEQ ID NO: 105134 - DNA, 13 bp, Artificial Sequence
  Oligonucleotide for detection of SNP TSC0026337
aaacctctataaa

SEQ ID NO: 105135 - DNA, 13 bp, Artificial Sequence
  Oligonucleotide for detection of SNP TSC0026338
aaggaaattgtga

SEQ ID NO: 105136 - DNA, 13 bp, Artificial Sequence
  Oligonucleotide for detection of SNP TSC0026338
tcacaatttcctt

SEQ ID NO: 105137 - DNA, 13 bp, Artificial Sequence
  Oligonucleotide for detection of SNP TSC0026338
aaggaatttgtga

SEQ ID NO: 105138 - DNA, 13 bp, Artificial Sequence
  Oligonucleotide for detection of SNP TSC0026338
tcacaaattcctt

SEQ ID NO: 105139 - DNA, 13 bp, Artificial Sequence
  Oligonucleotide for detection of SNP TSC0026338
aaggaaatcgtga

SEQ ID NO: 105140 - DNA, 13 bp, Artificial Sequence
  Oligonucleotide for detection of SNP TSC0026338
tcacgatttcctt

SEQ ID NO: 105141 - DNA, 13 bp, Artificial Sequence
  Oligonucleotide for detection of SNP TSC0026338
aaggaattcgtga

SEQ ID NO: 105142 - DNA, 13 bp, Artificial Sequence
  Oligonucleotide for detection of SNP TSC0026338
tcacgaattcctt

SEQ ID NO: 105143 - DNA, 13 bp, Artificial Sequence
  Oligonucleotide for detection of SNP TSC0026338
ttatggttttttt

SEQ ID NO: 105144 - DNA, 13 bp, Artificial Sequence
  Oligonucleotide for detection of SNP TSC0026338
aaaaaaaccataa

SEQ ID NO: 105145 - DNA, 13 bp, Artificial Sequence
  Oligonucleotide for detection of SNP TSC0026338
ttatggatttttt

SEQ ID NO: 105146 - DNA, 13 bp, Artificial Sequence
  Oligonucleotide for detection of SNP TSC0026338
aaaaaatccataa

SEQ ID NO: 105147 - DNA, 13 bp, Artificial Sequence
  Oligonucleotide for detection of SNP TSC0026338
ttacggttttttt

SEQ ID NO: 105148 - DNA, 13 bp, Artificial Sequence
  Oligonucleotide for detection of SNP TSC0026338
aaaaaaaccgtaa

SEQ ID NO: 105149 - DNA, 13 bp, Artificial Sequence
  Oligonucleotide for detection of SNP TSC0026338
ttacggatttttt

SEQ ID NO: 105150 - DNA, 13 bp, Artificial Sequence
  Oligonucleotide for detection of SNP TSC0026338
aaaaaatccgtaa

SEQ ID NO: 105151 - DNA, 13 bp, Artificial Sequence
  Oligonucleotide for detection of SNP TSC0026341
gtatttagtagta

SEQ ID NO: 105152 - DNA, 13 bp, Artificial Sequence
  Oligonucleotide for detection of SNP TSC0026341
tactactaaatac

SEQ ID NO: 105153 - DNA, 13 bp, Artificial Sequence
  Oligonucleotide for detection of SNP TSC0026341
gtatttggtagta

SEQ ID NO: 105154 - DNA, 13 bp, Artificial Sequence
  Oligonucleotide for detection of SNP TSC0026341
tactaccaaatac

SEQ ID NO: 105155 - DNA, 13 bp, Artificial Sequence
  Oligonucleotide for detection of SNP TSC0026342
tttaggtggggtg

SEQ ID NO: 105156 - DNA, 13 bp, Artificial Sequence
  Oligonucleotide for detection of SNP TSC0026342
caccccacctaaa

SEQ ID NO: 105157 - DNA, 13 bp, Artificial Sequence
  Oligonucleotide for detection of SNP TSC0026342
tttaggcggggtg

SEQ ID NO: 105158 - DNA, 13 bp, Artificial Sequence
  Oligonucleotide for detection of SNP TSC0026342
caccccgcctaaa

SEQ ID NO: 105159 - DNA, 13 bp, Artificial Sequence
  Oligonucleotide for detection of SNP TSC0026342
tattttatttggg

SEQ ID NO: 105160 - DNA, 13 bp, Artificial Sequence
  Oligonucleotide for detection of SNP TSC0026342
cccaaataaaata

SEQ ID NO: 105161 - DNA, 13 bp, Artificial Sequence
  Oligonucleotide for detection of SNP TSC0026343
gaaaatagagtta

SEQ ID NO: 105162 - DNA, 13 bp, Artificial Sequence
  Oligonucleotide for detection of SNP TSC0026343
taactctattttc

SEQ ID NO: 105163 - DNA, 13 bp, Artificial Sequence
  Oligonucleotide for detection of SNP TSC0026343
gaaaatggagtta

SEQ ID NO: 105164 - DNA, 13 bp, Artificial Sequence
  Oligonucleotide for detection of SNP TSC0026343
taactccattttc

SEQ ID NO: 105165 - DNA, 13 bp, Artificial Sequence
  Oligonucleotide for detection of SNP TSC0026343
gaaaacggagtta

SEQ ID NO: 105166 - DNA, 13 bp, Artificial Sequence
  Oligonucleotide for detection of SNP TSC0026343
taactccgttttc

SEQ ID NO: 105167 - DNA, 13 bp, Artificial Sequence
  Oligonucleotide for detection of SNP TSC0026346
gaatttatatttt

SEQ ID NO: 105168 - DNA, 13 bp, Artificial Sequence
  Oligonucleotide for detection of SNP TSC0026346
aaaatataaattc

SEQ ID NO: 105169 - DNA, 13 bp, Artificial Sequence
  Oligonucleotide for detection of SNP TSC0026346
gaattcgtatttt

SEQ ID NO: 105170 - DNA, 13 bp, Artificial Sequence
  Oligonucleotide for detection of SNP TSC0026346
aaaatacgaattc

SEQ ID NO: 105171 - DNA, 13 bp, Artificial Sequence
  Oligonucleotide for detection of SNP TSC0026346
aaaatatggatty

SEQ ID NO: 105172 - DNA, 13 bp, Artificial Sequence
  Oligonucleotide for detection of SNP TSC0026346
raatccatatttt

SEQ ID NO: 105173 - DNA, 13 bp, Artificial Sequence
  Oligonucleotide for detection of SNP TSC0026346
aaaatacggatty

SEQ ID NO: 105174 - DNA, 13 bp, Artificial Sequence
  Oligonucleotide for detection of SNP TSC0026346
raatccgtatttt

SEQ ID NO: 105175 - DNA, 13 bp, Artificial Sequence
  Oligonucleotide for detection of SNP TSC0026347
gttttgattgtta

SEQ ID NO: 105176 - DNA, 13 bp, Artificial Sequence
  Oligonucleotide for detection of SNP TSC0026347
taacaatcaaaac

SEQ ID NO: 105177 - DNA, 13 bp, Artificial Sequence
  Oligonucleotide for detection of SNP TSC0026347
gttttgtttgtta

SEQ ID NO: 105178 - DNA, 13 bp, Artificial Sequence
  Oligonucleotide for detection of SNP TSC0026347
taacaaacaaaac

SEQ ID NO: 105179 - DNA, 13 bp, Artificial Sequence
  Oligonucleotide for detection of SNP TSC0026347
tggtagttagggy

SEQ ID NO: 105180 - DNA, 13 bp, Artificial Sequence
  Oligonucleotide for detection of SNP TSC0026347
rccctaactacca

SEQ ID NO: 105181 - DNA, 13 bp, Artificial Sequence
  Oligonucleotide for detection of SNP TSC0026347
tggtagatagggy

SEQ ID NO: 105182 - DNA, 13 bp, Artificial Sequence
  Oligonucleotide for detection of SNP TSC0026347
rccctatctacca

SEQ ID NO: 105183 - DNA, 13 bp, Artificial Sequence
  Oligonucleotide for detection of SNP TSC0026350
gtttgtatggtaa

SEQ ID NO: 105184 - DNA, 13 bp, Artificial Sequence
  Oligonucleotide for detection of SNP TSC0026350
ttaccatacaaac

SEQ ID NO: 105185 - DNA, 13 bp, Artificial Sequence
  Oligonucleotide for detection of SNP TSC0026350
gtttgtgtggtaa

SEQ ID NO: 105186 - DNA, 13 bp, Artificial Sequence
  Oligonucleotide for detection of SNP TSC0026350
ttaccacacaaac

SEQ ID NO: 105187 - DNA, 13 bp, Artificial Sequence
  Oligonucleotide for detection of SNP TSC0026350
gtttgcgtggtaa

SEQ ID NO: 105188 - DNA, 13 bp, Artificial Sequence
  Oligonucleotide for detection of SNP TSC0026350
ttaccacgcaaac

SEQ ID NO: 105189 - DNA, 13 bp, Artificial Sequence
  Oligonucleotide for detection of SNP TSC0026350
ttgttatgtaggy

SEQ ID NO: 105190 - DNA, 13 bp, Artificial Sequence
  Oligonucleotide for detection of SNP TSC0026350
rcctacataacaa

SEQ ID NO: 105191 - DNA, 13 bp, Artificial Sequence
  Oligonucleotide for detection of SNP TSC0026350
ttgttacgtaggy

SEQ ID NO: 105192 - DNA, 13 bp, Artificial Sequence
  Oligonucleotide for detection of SNP TSC0026350
rcctacgtaacaa

SEQ ID NO: 105193 - DNA, 13 bp, Artificial Sequence
  Oligonucleotide for detection of SNP TSC0026351
atggtgaagtggy

SEQ ID NO: 105194 - DNA, 13 bp, Artificial Sequence
  Oligonucleotide for detection of SNP TSC0026351
rccacttcaccat

SEQ ID NO: 105195 - DNA, 13 bp, Artificial Sequence
  Oligonucleotide for detection of SNP TSC0026351
atggtggagtggy

SEQ ID NO: 105196 - DNA, 13 bp, Artificial Sequence
  Oligonucleotide for detection of SNP TSC0026351
rccactccaccat

SEQ ID NO: 105197 - DNA, 13 bp, Artificial Sequence
  Oligonucleotide for detection of SNP TSC0026351
acggtgaagtggy

SEQ ID NO: 105198 - DNA, 13 bp, Artificial Sequence
  Oligonucleotide for detection of SNP TSC0026351
rccacttcaccgt

SEQ ID NO: 105199 - DNA, 13 bp, Artificial Sequence
  Oligonucleotide for detection of SNP TSC0026351
acggtggagtggy

SEQ ID NO: 105200 - DNA, 13 bp, Artificial Sequence
  Oligonucleotide for detection of SNP TSC0026351
rccactccaccgt

SEQ ID NO: 105201 - DNA, 13 bp, Artificial Sequence
  Oligonucleotide for detection of SNP TSC0026351
atggcgaagtggy

SEQ ID NO: 105202 - DNA, 13 bp, Artificial Sequence
  Oligonucleotide for detection of SNP TSC0026351
rccacttcgccat

SEQ ID NO: 105203 - DNA, 13 bp, Artificial Sequence
  Oligonucleotide for detection of SNP TSC0026351
atggcggagtggy

SEQ ID NO: 105204 - DNA, 13 bp, Artificial Sequence
  Oligonucleotide for detection of SNP TSC0026351
rccactccgccat

SEQ ID NO: 105205 - DNA, 13 bp, Artificial Sequence
  Oligonucleotide for detection of SNP TSC0026351
acggcgaagtggy

SEQ ID NO: 105206 - DNA, 13 bp, Artificial Sequence
  Oligonucleotide for detection of SNP TSC0026351
rccacttcgccgt

SEQ ID NO: 105207 - DNA, 13 bp, Artificial Sequence
  Oligonucleotide for detection of SNP TSC0026351
acggcggagtggy

SEQ ID NO: 105208 - DNA, 13 bp, Artificial Sequence
  Oligonucleotide for detection of SNP TSC0026351
rccactccgccgt

SEQ ID NO: 105209 - DNA, 13 bp, Artificial Sequence
  Oligonucleotide for detection of SNP TSC0026352
gggatgtgataag

SEQ ID NO: 105210 - DNA, 13 bp, Artificial Sequence
  Oligonucleotide for detection of SNP TSC0026352
cttatcacatccc

SEQ ID NO: 105211 - DNA, 13 bp, Artificial Sequence
  Oligonucleotide for detection of SNP TSC0026352
gggatgcgataag

SEQ ID NO: 105212 - DNA, 13 bp, Artificial Sequence
  Oligonucleotide for detection of SNP TSC0026352
cttatcgcatccc

SEQ ID NO: 105213 - DNA, 13 bp, Artificial Sequence
  Oligonucleotide for detection of SNP TSC0026353
taagttttgtgag

SEQ ID NO: 105214 - DNA, 13 bp, Artificial Sequence
  Oligonucleotide for detection of SNP TSC0026353
ctcacaaaactta

SEQ ID NO: 105215 - DNA, 13 bp, Artificial Sequence
  Oligonucleotide for detection of SNP TSC0026353
taagttgtgtgag

SEQ ID NO: 105216 - DNA, 13 bp, Artificial Sequence
  Oligonucleotide for detection of SNP TSC0026353
ctcacacaactta

SEQ ID NO: 105217 - DNA, 13 bp, Artificial Sequence
  Oligonucleotide for detection of SNP TSC0026353
taagtttcgtgag

SEQ ID NO: 105218 - DNA, 13 bp, Artificial Sequence
  Oligonucleotide for detection of SNP TSC0026353
ctcacgaaactta

SEQ ID NO: 105219 - DNA, 13 bp, Artificial Sequence
  Oligonucleotide for detection of SNP TSC0026353
taagtcgtgtgag

SEQ ID NO: 105220 - DNA, 13 bp, Artificial Sequence
  Oligonucleotide for detection of SNP TSC0026353
ctcacacgactta

SEQ ID NO: 105221 - DNA, 13 bp, Artificial Sequence
  Oligonucleotide for detection of SNP TSC0026353
taagttgcgtgag

SEQ ID NO: 105222 - DNA, 13 bp, Artificial Sequence
  Oligonucleotide for detection of SNP TSC0026353
ctcacgcaactta

SEQ ID NO: 105223 - DNA, 13 bp, Artificial Sequence
  Oligonucleotide for detection of SNP TSC0026353
taagtcgcgtgag

SEQ ID NO: 105224 - DNA, 13 bp, Artificial Sequence
  Oligonucleotide for detection of SNP TSC0026353
ctcacgcgactta

SEQ ID NO: 105225 - DNA, 13 bp, Artificial Sequence
  Oligonucleotide for detection of SNP TSC0026353
tttatggggttta

SEQ ID NO: 105226 - DNA, 13 bp, Artificial Sequence
  Oligonucleotide for detection of SNP TSC0026353
taaaccccataaa

SEQ ID NO: 105227 - DNA, 13 bp, Artificial Sequence
  Oligonucleotide for detection of SNP TSC0026353
tttatgtggttta

SEQ ID NO: 105228 - DNA, 13 bp, Artificial Sequence
  Oligonucleotide for detection of SNP TSC0026353
taaaccacataaa

SEQ ID NO: 105229 - DNA, 13 bp, Artificial Sequence
  Oligonucleotide for detection of SNP TSC0026353
tttacggggttta

SEQ ID NO: 105230 - DNA, 13 bp, Artificial Sequence
  Oligonucleotide for detection of SNP TSC0026353
taaaccccgtaaa

SEQ ID NO: 105231 - DNA, 13 bp, Artificial Sequence
  Oligonucleotide for detection of SNP TSC0026353
tttacgtggttta

SEQ ID NO: 105232 - DNA, 13 bp, Artificial Sequence
  Oligonucleotide for detection of SNP TSC0026353
taaaccacgtaaa

SEQ ID NO: 105233 - DNA, 13 bp, Artificial Sequence
  Oligonucleotide for detection of SNP TSC0026353
tttatgcggttta

SEQ ID NO: 105234 - DNA, 13 bp, Artificial Sequence
  Oligonucleotide for detection of SNP TSC0026353
taaaccgcataaa

SEQ ID NO: 105235 - DNA, 13 bp, Artificial Sequence
  Oligonucleotide for detection of SNP TSC0026353
tttacgcggttta

SEQ ID NO: 105236 - DNA, 13 bp, Artificial Sequence
  Oligonucleotide for detection of SNP TSC0026353
taaaccgcgtaaa

SEQ ID NO: 105237 - DNA, 13 bp, Artificial Sequence
  Oligonucleotide for detection of SNP TSC0026356
ttgtgatgagtgy

SEQ ID NO: 105238 - DNA, 13 bp, Artificial Sequence
  Oligonucleotide for detection of SNP TSC0026356
rcactcatcacaa

SEQ ID NO: 105239 - DNA, 13 bp, Artificial Sequence
  Oligonucleotide for detection of SNP TSC0026356
ttgtgacgagtgy

SEQ ID NO: 105240 - DNA, 13 bp, Artificial Sequence
  Oligonucleotide for detection of SNP TSC0026356
rcactcgtcacaa

SEQ ID NO: 105241 - DNA, 13 bp, Artificial Sequence
  Oligonucleotide for detection of SNP TSC0026356
gtatttgttatag

SEQ ID NO: 105242 - DNA, 13 bp, Artificial Sequence
  Oligonucleotide for detection of SNP TSC0026356
ctataacaaatac

SEQ ID NO: 105243 - DNA, 13 bp, Artificial Sequence
  Oligonucleotide for detection of SNP TSC0026356
gtatttattatag

SEQ ID NO: 105244 - DNA, 13 bp, Artificial Sequence
  Oligonucleotide for detection of SNP TSC0026356
ctataataaatac

SEQ ID NO: 105245 - DNA, 13 bp, Artificial Sequence
  Oligonucleotide for detection of SNP TSC0026356
gtattcgttatag

SEQ ID NO: 105246 - DNA, 13 bp, Artificial Sequence
  Oligonucleotide for detection of SNP TSC0026356
ctataacgaatac

SEQ ID NO: 105247 - DNA, 13 bp, Artificial Sequence
  Oligonucleotide for detection of SNP TSC0026360
gagaggaagtgtg

SEQ ID NO: 105248 - DNA, 13 bp, Artificial Sequence
  Oligonucleotide for detection of SNP TSC0026360
cacacttcctctc

SEQ ID NO: 105249 - DNA, 13 bp, Artificial Sequence
  Oligonucleotide for detection of SNP TSC0026360
gagaggtagtgtg

SEQ ID NO: 105250 - DNA, 13 bp, Artificial Sequence
  Oligonucleotide for detection of SNP TSC0026360
cacactacctctc

SEQ ID NO: 105251 - DNA, 13 bp, Artificial Sequence
  Oligonucleotide for detection of SNP TSC0026360
tatatttttttty

SEQ ID NO: 105252 - DNA, 13 bp, Artificial Sequence
  Oligonucleotide for detection of SNP TSC0026360
raaaaaaaatata

SEQ ID NO: 105253 - DNA, 13 bp, Artificial Sequence
  Oligonucleotide for detection of SNP TSC0026363
tatttgattttty

SEQ ID NO: 105254 - DNA, 13 bp, Artificial Sequence
  Oligonucleotide for detection of SNP TSC0026363
raaaaatcaaata

SEQ ID NO: 105255 - DNA, 13 bp, Artificial Sequence
  Oligonucleotide for detection of SNP TSC0026363
gaaaaattagatg

SEQ ID NO: 105256 - DNA, 13 bp, Artificial Sequence
  Oligonucleotide for detection of SNP TSC0026363
catctaatttttc

SEQ ID NO: 105257 - DNA, 13 bp, Artificial Sequence
  Oligonucleotide for detection of SNP TSC0026363
gaaaaagtagatg

SEQ ID NO: 105258 - DNA, 13 bp, Artificial Sequence
  Oligonucleotide for detection of SNP TSC0026363
catctactttttc

SEQ ID NO: 105259 - DNA, 13 bp, Artificial Sequence
  Oligonucleotide for detection of SNP TSC0026369
tttagtatttagy

SEQ ID NO: 105260 - DNA, 13 bp, Artificial Sequence
  Oligonucleotide for detection of SNP TSC0026369
rctaaatactaaa

SEQ ID NO: 105261 - DNA, 13 bp, Artificial Sequence
  Oligonucleotide for detection of SNP TSC0026369
tttagtgtttagy

SEQ ID NO: 105262 - DNA, 13 bp, Artificial Sequence
  Oligonucleotide for detection of SNP TSC0026369
rctaaacactaaa

SEQ ID NO: 105263 - DNA, 13 bp, Artificial Sequence
  Oligonucleotide for detection of SNP TSC0026369
tttagcgtttagy

SEQ ID NO: 105264 - DNA, 13 bp, Artificial Sequence
  Oligonucleotide for detection of SNP TSC0026369
rctaaacgctaaa

SEQ ID NO: 105265 - DNA, 13 bp, Artificial Sequence
  Oligonucleotide for detection of SNP TSC0026369
gttgggtgttggg

SEQ ID NO: 105266 - DNA, 13 bp, Artificial Sequence
  Oligonucleotide for detection of SNP TSC0026369
cccaacacccaac

SEQ ID NO: 105267 - DNA, 13 bp, Artificial Sequence
  Oligonucleotide for detection of SNP TSC0026369
gttgggcgttggg

SEQ ID NO: 105268 - DNA, 13 bp, Artificial Sequence
  Oligonucleotide for detection of SNP TSC0026369
cccaacgcccaac

SEQ ID NO: 105269 - DNA, 13 bp, Artificial Sequence
  Oligonucleotide for detection of SNP TSC0026372
ttagatgtgaatg

SEQ ID NO: 105270 - DNA, 13 bp, Artificial Sequence
  Oligonucleotide for detection of SNP TSC0026372
cattcacatctaa

SEQ ID NO: 105271 - DNA, 13 bp, Artificial Sequence
  Oligonucleotide for detection of SNP TSC0026372
ttagatttgaatg

SEQ ID NO: 105272 - DNA, 13 bp, Artificial Sequence
  Oligonucleotide for detection of SNP TSC0026372
cattcaaatctaa

SEQ ID NO: 105273 - DNA, 13 bp, Artificial Sequence
  Oligonucleotide for detection of SNP TSC0026372
tatttatatttgg

SEQ ID NO: 105274 - DNA, 13 bp, Artificial Sequence
  Oligonucleotide for detection of SNP TSC0026372
ccaaatataaata

SEQ ID NO: 105275 - DNA, 13 bp, Artificial Sequence
  Oligonucleotide for detection of SNP TSC0026372
tatttaaatttgg

SEQ ID NO: 105276 - DNA, 13 bp, Artificial Sequence
  Oligonucleotide for detection of SNP TSC0026372
ccaaatttaaata

SEQ ID NO: 105277 - DNA, 13 bp, Artificial Sequence
  Oligonucleotide for detection of SNP TSC0026374
tgttaggggagay

SEQ ID NO: 105278 - DNA, 13 bp, Artificial Sequence
  Oligonucleotide for detection of SNP TSC0026374
rtctcccctaaca

SEQ ID NO: 105279 - DNA, 13 bp, Artificial Sequence
  Oligonucleotide for detection of SNP TSC0026374
tgttagaggagay

SEQ ID NO: 105280 - DNA, 13 bp, Artificial Sequence
  Oligonucleotide for detection of SNP TSC0026374
rtctcctctaaca

SEQ ID NO: 105281 - DNA, 13 bp, Artificial Sequence
  Oligonucleotide for detection of SNP TSC0026375
gagggaagatgat

SEQ ID NO: 105282 - DNA, 13 bp, Artificial Sequence
  Oligonucleotide for detection of SNP TSC0026375
atcatcttccctc

SEQ ID NO: 105283 - DNA, 13 bp, Artificial Sequence
  Oligonucleotide for detection of SNP TSC0026375
gagggaggatgat

SEQ ID NO: 105284 - DNA, 13 bp, Artificial Sequence
  Oligonucleotide for detection of SNP TSC0026375
atcatcctccctc

SEQ ID NO: 105285 - DNA, 13 bp, Artificial Sequence
  Oligonucleotide for detection of SNP TSC0026380
tgaatatgagtty

SEQ ID NO: 105286 - DNA, 13 bp, Artificial Sequence
  Oligonucleotide for detection of SNP TSC0026380
raactcatattca

SEQ ID NO: 105287 - DNA, 13 bp, Artificial Sequence
  Oligonucleotide for detection of SNP TSC0026380
tgaataggagtty

SEQ ID NO: 105288 - DNA, 13 bp, Artificial Sequence
  Oligonucleotide for detection of SNP TSC0026380
raactcctattca

SEQ ID NO: 105289 - DNA, 13 bp, Artificial Sequence
  Oligonucleotide for detection of SNP TSC0026380
tgaatacgagtty

SEQ ID NO: 105290 - DNA, 13 bp, Artificial Sequence
  Oligonucleotide for detection of SNP TSC0026380
raactcgtattca

SEQ ID NO: 105291 - DNA, 13 bp, Artificial Sequence
  Oligonucleotide for detection of SNP TSC0026380
gaatttgtattta

SEQ ID NO: 105292 - DNA, 13 bp, Artificial Sequence
  Oligonucleotide for detection of SNP TSC0026380
taaatacaaattc

SEQ ID NO: 105293 - DNA, 13 bp, Artificial Sequence
  Oligonucleotide for detection of SNP TSC0026380
gaatttttattta

SEQ ID NO: 105294 - DNA, 13 bp, Artificial Sequence
  Oligonucleotide for detection of SNP TSC0026380
taaataaaaattc

SEQ ID NO: 105295 - DNA, 13 bp, Artificial Sequence
  Oligonucleotide for detection of SNP TSC0026380
gaattcgtattta

SEQ ID NO: 105296 - DNA, 13 bp, Artificial Sequence
  Oligonucleotide for detection of SNP TSC0026380
taaatacgaattc

SEQ ID NO: 105297 - DNA, 13 bp, Artificial Sequence
  Oligonucleotide for detection of SNP TSC0026382
tgtaaaaaaattg

SEQ ID NO: 105298 - DNA, 13 bp, Artificial Sequence
  Oligonucleotide for detection of SNP TSC0026382
caatttttttaca

SEQ ID NO: 105299 - DNA, 13 bp, Artificial Sequence
  Oligonucleotide for detection of SNP TSC0026382
tgtaaataaattg

SEQ ID NO: 105300 - DNA, 13 bp, Artificial Sequence
  Oligonucleotide for detection of SNP TSC0026382
caatttatttaca

SEQ ID NO: 105301 - DNA, 13 bp, Artificial Sequence
  Oligonucleotide for detection of SNP TSC0026382
taatttttttata

SEQ ID NO: 105302 - DNA, 13 bp, Artificial Sequence
  Oligonucleotide for detection of SNP TSC0026382
tataaaaaaatta

SEQ ID NO: 105303 - DNA, 13 bp, Artificial Sequence
  Oligonucleotide for detection of SNP TSC0026382
taatttgtttata

SEQ ID NO: 105304 - DNA, 13 bp, Artificial Sequence
  Oligonucleotide for detection of SNP TSC0026382
tataaacaaatta

SEQ ID NO: 105305 - DNA, 13 bp, Artificial Sequence
  Oligonucleotide for detection of SNP TSC0026383
tttaaggggttty

SEQ ID NO: 105306 - DNA, 13 bp, Artificial Sequence
  Oligonucleotide for detection of SNP TSC0026383
raaaccccttaaa

SEQ ID NO: 105307 - DNA, 13 bp, Artificial Sequence
  Oligonucleotide for detection of SNP TSC0026383
tttaagtggttty

SEQ ID NO: 105308 - DNA, 13 bp, Artificial Sequence
  Oligonucleotide for detection of SNP TSC0026383
raaaccacttaaa

SEQ ID NO: 105309 - DNA, 13 bp, Artificial Sequence
  Oligonucleotide for detection of SNP TSC0026383
gaggttttttagg

SEQ ID NO: 105310 - DNA, 13 bp, Artificial Sequence
  Oligonucleotide for detection of SNP TSC0026383
cctaaaaaacctc

SEQ ID NO: 105311 - DNA, 13 bp, Artificial Sequence
  Oligonucleotide for detection of SNP TSC0026383
gaggttatttagg

SEQ ID NO: 105312 - DNA, 13 bp, Artificial Sequence
  Oligonucleotide for detection of SNP TSC0026383
cctaaataacctc

SEQ ID NO: 105313 - DNA, 13 bp, Artificial Sequence
  Oligonucleotide for detection of SNP TSC0026384
aatggtaagttty

SEQ ID NO: 105314 - DNA, 13 bp, Artificial Sequence
  Oligonucleotide for detection of SNP TSC0026384
raaacttaccatt

SEQ ID NO: 105315 - DNA, 13 bp, Artificial Sequence
  Oligonucleotide for detection of SNP TSC0026384
aatggtgagttty

SEQ ID NO: 105316 - DNA, 13 bp, Artificial Sequence
  Oligonucleotide for detection of SNP TSC0026384
raaactcaccatt

SEQ ID NO: 105317 - DNA, 13 bp, Artificial Sequence
  Oligonucleotide for detection of SNP TSC0026386
ttggttggattgg

SEQ ID NO: 105318 - DNA, 13 bp, Artificial Sequence
  Oligonucleotide for detection of SNP TSC0026386
ccaatccaaccaa

SEQ ID NO: 105319 - DNA, 13 bp, Artificial Sequence
  Oligonucleotide for detection of SNP TSC0026386
ttggttagattgg

SEQ ID NO: 105320 - DNA, 13 bp, Artificial Sequence
  Oligonucleotide for detection of SNP TSC0026386
ccaatctaaccaa

SEQ ID NO: 105321 - DNA, 13 bp, Artificial Sequence
  Oligonucleotide for detection of SNP TSC0026386
ttggtcggattgg

SEQ ID NO: 105322 - DNA, 13 bp, Artificial Sequence
  Oligonucleotide for detection of SNP TSC0026386
ccaatccgaccaa

SEQ ID NO: 105323 - DNA, 13 bp, Artificial Sequence
  Oligonucleotide for detection of SNP TSC0026389
aaaaaattggagy

SEQ ID NO: 105324 - DNA, 13 bp, Artificial Sequence
  Oligonucleotide for detection of SNP TSC0026389
rctccaatttttt

SEQ ID NO: 105325 - DNA, 13 bp, Artificial Sequence
  Oligonucleotide for detection of SNP TSC0026389
aaaaaagtggagy

SEQ ID NO: 105326 - DNA, 13 bp, Artificial Sequence
  Oligonucleotide for detection of SNP TSC0026389
rctccactttttt

SEQ ID NO: 105327 - DNA, 13 bp, Artificial Sequence
  Oligonucleotide for detection of SNP TSC0026390
atatgaaaaaaat

SEQ ID NO: 105328 - DNA, 13 bp, Artificial Sequence
  Oligonucleotide for detection of SNP TSC0026390
atttttttcatat

SEQ ID NO: 105329 - DNA, 13 bp, Artificial Sequence
  Oligonucleotide for detection of SNP TSC0026390
atatgagaaaaat

SEQ ID NO: 105330 - DNA, 13 bp, Artificial Sequence
  Oligonucleotide for detection of SNP TSC0026390
atttttctcatat

SEQ ID NO: 105331 - DNA, 13 bp, Artificial Sequence
  Oligonucleotide for detection of SNP TSC0026390
atacgaaaaaaat

SEQ ID NO: 105332 - DNA, 13 bp, Artificial Sequence
  Oligonucleotide for detection of SNP TSC0026390
atttttttcgtat

SEQ ID NO: 105333 - DNA, 13 bp, Artificial Sequence
  Oligonucleotide for detection of SNP TSC0026390
atacgagaaaaat

SEQ ID NO: 105334 - DNA, 13 bp, Artificial Sequence
  Oligonucleotide for detection of SNP TSC0026390
atttttctcgtat

SEQ ID NO: 105335 - DNA, 13 bp, Artificial Sequence
  Oligonucleotide for detection of SNP TSC0026392
agaatttggggat

SEQ ID NO: 105336 - DNA, 13 bp, Artificial Sequence
  Oligonucleotide for detection of SNP TSC0026392
atccccaaattct

SEQ ID NO: 105337 - DNA, 13 bp, Artificial Sequence
  Oligonucleotide for detection of SNP TSC0026392
agaattgggggat

SEQ ID NO: 105338 - DNA, 13 bp, Artificial Sequence
  Oligonucleotide for detection of SNP TSC0026392
atcccccaattct

SEQ ID NO: 105339 - DNA, 13 bp, Artificial Sequence
  Oligonucleotide for detection of SNP TSC0026393
tattgttgggatg

SEQ ID NO: 105340 - DNA, 13 bp, Artificial Sequence
  Oligonucleotide for detection of SNP TSC0026393
catcccaacaata

SEQ ID NO: 105341 - DNA, 13 bp, Artificial Sequence
  Oligonucleotide for detection of SNP TSC0026393
tattgtcgggatg

SEQ ID NO: 105342 - DNA, 13 bp, Artificial Sequence
  Oligonucleotide for detection of SNP TSC0026393
catcccgacaata

SEQ ID NO: 105343 - DNA, 13 bp, Artificial Sequence
  Oligonucleotide for detection of SNP TSC0026393
tattttggtagtg

SEQ ID NO: 105344 - DNA, 13 bp, Artificial Sequence
  Oligonucleotide for detection of SNP TSC0026393
cactaccaaaata

SEQ ID NO: 105345 - DNA, 13 bp, Artificial Sequence
  Oligonucleotide for detection of SNP TSC0026393
tattttagtagtg

SEQ ID NO: 105346 - DNA, 13 bp, Artificial Sequence
  Oligonucleotide for detection of SNP TSC0026393
cactactaaaata

SEQ ID NO: 105347 - DNA, 13 bp, Artificial Sequence
  Oligonucleotide for detection of SNP TSC0026393
tatttcggtagtg

SEQ ID NO: 105348 - DNA, 13 bp, Artificial Sequence
  Oligonucleotide for detection of SNP TSC0026393
cactaccgaaata

SEQ ID NO: 105349 - DNA, 13 bp, Artificial Sequence
  Oligonucleotide for detection of SNP TSC0026398
ggagtgaattgta

SEQ ID NO: 105350 - DNA, 13 bp, Artificial Sequence
  Oligonucleotide for detection of SNP TSC0026398
tacaattcactcc

SEQ ID NO: 105351 - DNA, 13 bp, Artificial Sequence
  Oligonucleotide for detection of SNP TSC0026398
ggagtggattgta

SEQ ID NO: 105352 - DNA, 13 bp, Artificial Sequence
  Oligonucleotide for detection of SNP TSC0026398
tacaatccactcc

SEQ ID NO: 105353 - DNA, 13 bp, Artificial Sequence
  Oligonucleotide for detection of SNP TSC0026399
attggtatatatt

SEQ ID NO: 105354 - DNA, 13 bp, Artificial Sequence
  Oligonucleotide for detection of SNP TSC0026399
aatatataccaat

SEQ ID NO: 105355 - DNA, 13 bp, Artificial Sequence
  Oligonucleotide for detection of SNP TSC0026399
attggtgtatatt

SEQ ID NO: 105356 - DNA, 13 bp, Artificial Sequence
  Oligonucleotide for detection of SNP TSC0026399
aatatacaccaat

SEQ ID NO: 105357 - DNA, 13 bp, Artificial Sequence
  Oligonucleotide for detection of SNP TSC0026399
attggcgtatatt

SEQ ID NO: 105358 - DNA, 13 bp, Artificial Sequence
  Oligonucleotide for detection of SNP TSC0026399
aatatacgccaat

SEQ ID NO: 105359 - DNA, 13 bp, Artificial Sequence
  Oligonucleotide for detection of SNP TSC0026399
aatatatgttagt

SEQ ID NO: 105360 - DNA, 13 bp, Artificial Sequence
  Oligonucleotide for detection of SNP TSC0026399
actaacatatatt

SEQ ID NO: 105361 - DNA, 13 bp, Artificial Sequence
  Oligonucleotide for detection of SNP TSC0026399
aatatacgttagt

SEQ ID NO: 105362 - DNA, 13 bp, Artificial Sequence
  Oligonucleotide for detection of SNP TSC0026399
actaacgtatatt

SEQ ID NO: 105363 - DNA, 13 bp, Artificial Sequence
  Oligonucleotide for detection of SNP TSC0026400
ttaggatgaggtt

SEQ ID NO: 105364 - DNA, 13 bp, Artificial Sequence
  Oligonucleotide for detection of SNP TSC0026400
aacctcatcctaa

SEQ ID NO: 105365 - DNA, 13 bp, Artificial Sequence
  Oligonucleotide for detection of SNP TSC0026400
ttaggacgaggtt

SEQ ID NO: 105366 - DNA, 13 bp, Artificial Sequence
  Oligonucleotide for detection of SNP TSC0026400
aacctcgtcctaa

SEQ ID NO: 105367 - DNA, 13 bp, Artificial Sequence
  Oligonucleotide for detection of SNP TSC0026401
tttgttatttaaa

SEQ ID NO: 105368 - DNA, 13 bp, Artificial Sequence
  Oligonucleotide for detection of SNP TSC0026401
tttaaataacaaa

SEQ ID NO: 105369 - DNA, 13 bp, Artificial Sequence
  Oligonucleotide for detection of SNP TSC0026401
tttgggtaataag

SEQ ID NO: 105370 - DNA, 13 bp, Artificial Sequence
  Oligonucleotide for detection of SNP TSC0026401
cttattacccaaa

SEQ ID NO: 105371 - DNA, 13 bp, Artificial Sequence
  Oligonucleotide for detection of SNP TSC0026401
tttgggaaataag

SEQ ID NO: 105372 - DNA, 13 bp, Artificial Sequence
  Oligonucleotide for detection of SNP TSC0026401
cttatttcccaaa

SEQ ID NO: 105373 - DNA, 13 bp, Artificial Sequence
  Oligonucleotide for detection of SNP TSC0026406
gtagaagttattt

SEQ ID NO: 105374 - DNA, 13 bp, Artificial Sequence
  Oligonucleotide for detection of SNP TSC0026406
aaataacttctac

SEQ ID NO: 105375 - DNA, 13 bp, Artificial Sequence
  Oligonucleotide for detection of SNP TSC0026406
gtagaatttattt

SEQ ID NO: 105376 - DNA, 13 bp, Artificial Sequence
  Oligonucleotide for detection of SNP TSC0026406
aaataaattctac

SEQ ID NO: 105377 - DNA, 13 bp, Artificial Sequence
  Oligonucleotide for detection of SNP TSC0026406
agataatttttgy

SEQ ID NO: 105378 - DNA, 13 bp, Artificial Sequence
  Oligonucleotide for detection of SNP TSC0026406
rcaaaaattatct

SEQ ID NO: 105379 - DNA, 13 bp, Artificial Sequence
  Oligonucleotide for detection of SNP TSC0026406
agataaattttgy

SEQ ID NO: 105380 - DNA, 13 bp, Artificial Sequence
  Oligonucleotide for detection of SNP TSC0026406
rcaaaatttatct

SEQ ID NO: 105381 - DNA, 13 bp, Artificial Sequence
  Oligonucleotide for detection of SNP TSC0026409
aattggattttgt

SEQ ID NO: 105382 - DNA, 13 bp, Artificial Sequence
  Oligonucleotide for detection of SNP TSC0026409
acaaaatccaatt

SEQ ID NO: 105383 - DNA, 13 bp, Artificial Sequence
  Oligonucleotide for detection of SNP TSC0026409
aattgggttttgt

SEQ ID NO: 105384 - DNA, 13 bp, Artificial Sequence
  Oligonucleotide for detection of SNP TSC0026409
acaaaacccaatt

SEQ ID NO: 105385 - DNA, 13 bp, Artificial Sequence
  Oligonucleotide for detection of SNP TSC0026410
tgttagggtttaa

SEQ ID NO: 105386 - DNA, 13 bp, Artificial Sequence
  Oligonucleotide for detection of SNP TSC0026410
ttaaaccctaaca

SEQ ID NO: 105387 - DNA, 13 bp, Artificial Sequence
  Oligonucleotide for detection of SNP TSC0026410
tgttagagtttaa

SEQ ID NO: 105388 - DNA, 13 bp, Artificial Sequence
  Oligonucleotide for detection of SNP TSC0026410
ttaaactctaaca

SEQ ID NO: 105389 - DNA, 13 bp, Artificial Sequence
  Oligonucleotide for detection of SNP TSC0026412
ggtagatgatgga

SEQ ID NO: 105390 - DNA, 13 bp, Artificial Sequence
  Oligonucleotide for detection of SNP TSC0026412
tccatcatctacc

SEQ ID NO: 105391 - DNA, 13 bp, Artificial Sequence
  Oligonucleotide for detection of SNP TSC0026412
ggtagacgatgga

SEQ ID NO: 105392 - DNA, 13 bp, Artificial Sequence
  Oligonucleotide for detection of SNP TSC0026412
tccatcgtctacc

SEQ ID NO: 105393 - DNA, 13 bp, Artificial Sequence
  Oligonucleotide for detection of SNP TSC0026415
tggagtatttagy

SEQ ID NO: 105394 - DNA, 13 bp, Artificial Sequence
  Oligonucleotide for detection of SNP TSC0026415
rctaaatactcca

SEQ ID NO: 105395 - DNA, 13 bp, Artificial Sequence
  Oligonucleotide for detection of SNP TSC0026415
tggagtgtttagy

SEQ ID NO: 105396 - DNA, 13 bp, Artificial Sequence
  Oligonucleotide for detection of SNP TSC0026415
rctaaacactcca

SEQ ID NO: 105397 - DNA, 13 bp, Artificial Sequence
  Oligonucleotide for detection of SNP TSC0026415
tggagcgtttagy

SEQ ID NO: 105398 - DNA, 13 bp, Artificial Sequence
  Oligonucleotide for detection of SNP TSC0026415
rctaaacgctcca

SEQ ID NO: 105399 - DNA, 13 bp, Artificial Sequence
  Oligonucleotide for detection of SNP TSC0026415
gttgagtgtttta

SEQ ID NO: 105400 - DNA, 13 bp, Artificial Sequence
  Oligonucleotide for detection of SNP TSC0026415
taaaacactcaac

SEQ ID NO: 105401 - DNA, 13 bp, Artificial Sequence
  Oligonucleotide for detection of SNP TSC0026415
gttgagcgtttta

SEQ ID NO: 105402 - DNA, 13 bp, Artificial Sequence
  Oligonucleotide for detection of SNP TSC0026415
taaaacgctcaac

SEQ ID NO: 105403 - DNA, 13 bp, Artificial Sequence
  Oligonucleotide for detection of SNP TSC0026417
gaggggtggttaa

SEQ ID NO: 105404 - DNA, 13 bp, Artificial Sequence
  Oligonucleotide for detection of SNP TSC0026417
ttaaccacccctc

SEQ ID NO: 105405 - DNA, 13 bp, Artificial Sequence
  Oligonucleotide for detection of SNP TSC0026417
gaggggaggttaa

SEQ ID NO: 105406 - DNA, 13 bp, Artificial Sequence
  Oligonucleotide for detection of SNP TSC0026417
ttaacctcccctc

SEQ ID NO: 105407 - DNA, 13 bp, Artificial Sequence
  Oligonucleotide for detection of SNP TSC0026421
agaggggttggat

SEQ ID NO: 105408 - DNA, 13 bp, Artificial Sequence
  Oligonucleotide for detection of SNP TSC0026421
atccaacccctct

SEQ ID NO: 105409 - DNA, 13 bp, Artificial Sequence
  Oligonucleotide for detection of SNP TSC0026421
agagggattggat

SEQ ID NO: 105410 - DNA, 13 bp, Artificial Sequence
  Oligonucleotide for detection of SNP TSC0026421
atccaatccctct

SEQ ID NO: 105411 - DNA, 13 bp, Artificial Sequence
  Oligonucleotide for detection of SNP TSC0026422
attttaattttty

SEQ ID NO: 105412 - DNA, 13 bp, Artificial Sequence
  Oligonucleotide for detection of SNP TSC0026422
raaaaattaaaat

SEQ ID NO: 105413 - DNA, 13 bp, Artificial Sequence
  Oligonucleotide for detection of SNP TSC0026422
attttagttttty

SEQ ID NO: 105414 - DNA, 13 bp, Artificial Sequence
  Oligonucleotide for detection of SNP TSC0026422
raaaaactaaaat

SEQ ID NO: 105415 - DNA, 13 bp, Artificial Sequence
  Oligonucleotide for detection of SNP TSC0026423
aagttgaggattt

SEQ ID NO: 105416 - DNA, 13 bp, Artificial Sequence
  Oligonucleotide for detection of SNP TSC0026423
aaatcctcaactt

SEQ ID NO: 105417 - DNA, 13 bp, Artificial Sequence
  Oligonucleotide for detection of SNP TSC0026423
aagttgtggattt

SEQ ID NO: 105418 - DNA, 13 bp, Artificial Sequence
  Oligonucleotide for detection of SNP TSC0026423
aaatccacaactt

SEQ ID NO: 105419 - DNA, 13 bp, Artificial Sequence
  Oligonucleotide for detection of SNP TSC0026423
aagttgcggattt

SEQ ID NO: 105420 - DNA, 13 bp, Artificial Sequence
  Oligonucleotide for detection of SNP TSC0026423
aaatccgcaactt

SEQ ID NO: 105421 - DNA, 13 bp, Artificial Sequence
  Oligonucleotide for detection of SNP TSC0026423
aaatttttaattt

SEQ ID NO: 105422 - DNA, 13 bp, Artificial Sequence
  Oligonucleotide for detection of SNP TSC0026423
aaattaaaaattt

SEQ ID NO: 105423 - DNA, 13 bp, Artificial Sequence
  Oligonucleotide for detection of SNP TSC0026424
ataatgatttgtg

SEQ ID NO: 105424 - DNA, 13 bp, Artificial Sequence
  Oligonucleotide for detection of SNP TSC0026424
cacaaatcattat

SEQ ID NO: 105425 - DNA, 13 bp, Artificial Sequence
  Oligonucleotide for detection of SNP TSC0026424
ataatgttttgtg

SEQ ID NO: 105426 - DNA, 13 bp, Artificial Sequence
  Oligonucleotide for detection of SNP TSC0026424
cacaaaacattat

SEQ ID NO: 105427 - DNA, 13 bp, Artificial Sequence
  Oligonucleotide for detection of SNP TSC0026424
tataagttattat

SEQ ID NO: 105428 - DNA, 13 bp, Artificial Sequence
  Oligonucleotide for detection of SNP TSC0026424
ataataacttata

SEQ ID NO: 105429 - DNA, 13 bp, Artificial Sequence
  Oligonucleotide for detection of SNP TSC0026424
tataaggtattat

SEQ ID NO: 105430 - DNA, 13 bp, Artificial Sequence
  Oligonucleotide for detection of SNP TSC0026424
ataataccttata

SEQ ID NO: 105431 - DNA, 13 bp, Artificial Sequence
  Oligonucleotide for detection of SNP TSC0026428
tatagaagtttgy

SEQ ID NO: 105432 - DNA, 13 bp, Artificial Sequence
  Oligonucleotide for detection of SNP TSC0026428
rcaaacttctata

SEQ ID NO: 105433 - DNA, 13 bp, Artificial Sequence
  Oligonucleotide for detection of SNP TSC0026428
tatagatgtttgy

SEQ ID NO: 105434 - DNA, 13 bp, Artificial Sequence
  Oligonucleotide for detection of SNP TSC0026428
rcaaacatctata

SEQ ID NO: 105435 - DNA, 13 bp, Artificial Sequence
  Oligonucleotide for detection of SNP TSC0026428
gtaggtttttatg

SEQ ID NO: 105436 - DNA, 13 bp, Artificial Sequence
  Oligonucleotide for detection of SNP TSC0026428
cataaaaacctac

SEQ ID NO: 105437 - DNA, 13 bp, Artificial Sequence
  Oligonucleotide for detection of SNP TSC0026428
gtaggtatttatg

SEQ ID NO: 105438 - DNA, 13 bp, Artificial Sequence
  Oligonucleotide for detection of SNP TSC0026428
cataaatacctac

SEQ ID NO: 105439 - DNA, 13 bp, Artificial Sequence
  Oligonucleotide for detection of SNP TSC0026429
gtgtttattggty

SEQ ID NO: 105440 - DNA, 13 bp, Artificial Sequence
  Oligonucleotide for detection of SNP TSC0026429
raccaataaacac

SEQ ID NO: 105441 - DNA, 13 bp, Artificial Sequence
  Oligonucleotide for detection of SNP TSC0026429
gtgtttgttggty

SEQ ID NO: 105442 - DNA, 13 bp, Artificial Sequence
  Oligonucleotide for detection of SNP TSC0026429
raccaacaaacac

SEQ ID NO: 105443 - DNA, 13 bp, Artificial Sequence
  Oligonucleotide for detection of SNP TSC0026429
gcgtttattggty

SEQ ID NO: 105444 - DNA, 13 bp, Artificial Sequence
  Oligonucleotide for detection of SNP TSC0026429
raccaataaacgc

SEQ ID NO: 105445 - DNA, 13 bp, Artificial Sequence
  Oligonucleotide for detection of SNP TSC0026429
gcgtttgttggty

SEQ ID NO: 105446 - DNA, 13 bp, Artificial Sequence
  Oligonucleotide for detection of SNP TSC0026429
raccaacaaacgc

SEQ ID NO: 105447 - DNA, 13 bp, Artificial Sequence
  Oligonucleotide for detection of SNP TSC0026429
gtgttcgttggty

SEQ ID NO: 105448 - DNA, 13 bp, Artificial Sequence
  Oligonucleotide for detection of SNP TSC0026429
raccaacgaacac

SEQ ID NO: 105449 - DNA, 13 bp, Artificial Sequence
  Oligonucleotide for detection of SNP TSC0026429
gcgttcgttggty

SEQ ID NO: 105450 - DNA, 13 bp, Artificial Sequence
  Oligonucleotide for detection of SNP TSC0026429
raccaacgaacgc

SEQ ID NO: 105451 - DNA, 13 bp, Artificial Sequence
  Oligonucleotide for detection of SNP TSC0026429
ggttagtgggtgy

SEQ ID NO: 105452 - DNA, 13 bp, Artificial Sequence
  Oligonucleotide for detection of SNP TSC0026429
rcacccactaacc

SEQ ID NO: 105453 - DNA, 13 bp, Artificial Sequence
  Oligonucleotide for detection of SNP TSC0026429
ggttagtgggcgy

SEQ ID NO: 105454 - DNA, 13 bp, Artificial Sequence
  Oligonucleotide for detection of SNP TSC0026429
rcgcccactaacc

SEQ ID NO: 105455 - DNA, 13 bp, Artificial Sequence
  Oligonucleotide for detection of SNP TSC0026429
ggttagcgggtgy

SEQ ID NO: 105456 - DNA, 13 bp, Artificial Sequence
  Oligonucleotide for detection of SNP TSC0026429
rcacccgctaacc

SEQ ID NO: 105457 - DNA, 13 bp, Artificial Sequence
  Oligonucleotide for detection of SNP TSC0026429
ggttagcgggcgy

SEQ ID NO: 105458 - DNA, 13 bp, Artificial Sequence
  Oligonucleotide for detection of SNP TSC0026429
rcgcccgctaacc

SEQ ID NO: 105459 - DNA, 13 bp, Artificial Sequence
  Oligonucleotide for detection of SNP TSC0026431
tgtgtaagtttgg

SEQ ID NO: 105460 - DNA, 13 bp, Artificial Sequence
  Oligonucleotide for detection of SNP TSC0026431
ccaaacttacaca

SEQ ID NO: 105461 - DNA, 13 bp, Artificial Sequence
  Oligonucleotide for detection of SNP TSC0026431
tgtgtatgtttgg

SEQ ID NO: 105462 - DNA, 13 bp, Artificial Sequence
  Oligonucleotide for detection of SNP TSC0026431
ccaaacatacaca

SEQ ID NO: 105463 - DNA, 13 bp, Artificial Sequence
  Oligonucleotide for detection of SNP TSC0026431
tgtgtacgtttgg

SEQ ID NO: 105464 - DNA, 13 bp, Artificial Sequence
  Oligonucleotide for detection of SNP TSC0026431
ccaaacgtacaca

SEQ ID NO: 105465 - DNA, 13 bp, Artificial Sequence
  Oligonucleotide for detection of SNP TSC0026431
ttaagtttgtata

SEQ ID NO: 105466 - DNA, 13 bp, Artificial Sequence
  Oligonucleotide for detection of SNP TSC0026431
tatacaaacttaa

SEQ ID NO: 105467 - DNA, 13 bp, Artificial Sequence
  Oligonucleotide for detection of SNP TSC0026431
ttaagcgtgtata

SEQ ID NO: 105468 - DNA, 13 bp, Artificial Sequence
  Oligonucleotide for detection of SNP TSC0026431
tatacacgcttaa

SEQ ID NO: 105469 - DNA, 13 bp, Artificial Sequence
  Oligonucleotide for detection of SNP TSC0026432
atgggtatatggt

SEQ ID NO: 105470 - DNA, 13 bp, Artificial Sequence
  Oligonucleotide for detection of SNP TSC0026432
accatatacccat

SEQ ID NO: 105471 - DNA, 13 bp, Artificial Sequence
  Oligonucleotide for detection of SNP TSC0026432
atgggtgtatggt

SEQ ID NO: 105472 - DNA, 13 bp, Artificial Sequence
  Oligonucleotide for detection of SNP TSC0026432
accatacacccat

SEQ ID NO: 105473 - DNA, 13 bp, Artificial Sequence
  Oligonucleotide for detection of SNP TSC0026435
aagaatttaaagy

SEQ ID NO: 105474 - DNA, 13 bp, Artificial Sequence
  Oligonucleotide for detection of SNP TSC0026435
rctttaaattctt

SEQ ID NO: 105475 - DNA, 13 bp, Artificial Sequence
  Oligonucleotide for detection of SNP TSC0026435
aagaatgtaaagy

SEQ ID NO: 105476 - DNA, 13 bp, Artificial Sequence
  Oligonucleotide for detection of SNP TSC0026435
rctttacattctt

SEQ ID NO: 105477 - DNA, 13 bp, Artificial Sequence
  Oligonucleotide for detection of SNP TSC0026435
gttttatattttt

SEQ ID NO: 105478 - DNA, 13 bp, Artificial Sequence
  Oligonucleotide for detection of SNP TSC0026435
aaaaatataaaac

SEQ ID NO: 105479 - DNA, 13 bp, Artificial Sequence
  Oligonucleotide for detection of SNP TSC0026436
aatgatgatgttg

SEQ ID NO: 105480 - DNA, 13 bp, Artificial Sequence
  Oligonucleotide for detection of SNP TSC0026436
caacatcatcatt

SEQ ID NO: 105481 - DNA, 13 bp, Artificial Sequence
  Oligonucleotide for detection of SNP TSC0026436
aatgataatgttg

SEQ ID NO: 105482 - DNA, 13 bp, Artificial Sequence
  Oligonucleotide for detection of SNP TSC0026436
caacattatcatt

SEQ ID NO: 105483 - DNA, 13 bp, Artificial Sequence
  Oligonucleotide for detection of SNP TSC0026437
tttttgaatattg

SEQ ID NO: 105484 - DNA, 13 bp, Artificial Sequence
  Oligonucleotide for detection of SNP TSC0026437
caatattcaaaaa

SEQ ID NO: 105485 - DNA, 13 bp, Artificial Sequence
  Oligonucleotide for detection of SNP TSC0026437
tttttggatattg

SEQ ID NO: 105486 - DNA, 13 bp, Artificial Sequence
  Oligonucleotide for detection of SNP TSC0026437
caatatccaaaaa

SEQ ID NO: 105487 - DNA, 13 bp, Artificial Sequence
  Oligonucleotide for detection of SNP TSC0026440
gattttattgtgt

SEQ ID NO: 105488 - DNA, 13 bp, Artificial Sequence
  Oligonucleotide for detection of SNP TSC0026440
acacaataaaatc

SEQ ID NO: 105489 - DNA, 13 bp, Artificial Sequence
  Oligonucleotide for detection of SNP TSC0026440
gattttgttgtgt

SEQ ID NO: 105490 - DNA, 13 bp, Artificial Sequence
  Oligonucleotide for detection of SNP TSC0026440
acacaacaaaatc

SEQ ID NO: 105491 - DNA, 13 bp, Artificial Sequence
  Oligonucleotide for detection of SNP TSC0026440
gatttcgttgtgt

SEQ ID NO: 105492 - DNA, 13 bp, Artificial Sequence
  Oligonucleotide for detection of SNP TSC0026440
acacaacgaaatc

SEQ ID NO: 105493 - DNA, 13 bp, Artificial Sequence
  Oligonucleotide for detection of SNP TSC0026440
atataatgaaaty

SEQ ID NO: 105494 - DNA, 13 bp, Artificial Sequence
  Oligonucleotide for detection of SNP TSC0026440
ratttcattatat

SEQ ID NO: 105495 - DNA, 13 bp, Artificial Sequence
  Oligonucleotide for detection of SNP TSC0026440
atataacgaaaty

SEQ ID NO: 105496 - DNA, 13 bp, Artificial Sequence
  Oligonucleotide for detection of SNP TSC0026440
ratttcgttatat

SEQ ID NO: 105497 - DNA, 13 bp, Artificial Sequence
  Oligonucleotide for detection of SNP TSC0026441
ttgtgaagtggty

SEQ ID NO: 105498 - DNA, 13 bp, Artificial Sequence
  Oligonucleotide for detection of SNP TSC0026441
raccacttcacaa

SEQ ID NO: 105499 - DNA, 13 bp, Artificial Sequence
  Oligonucleotide for detection of SNP TSC0026441
ttgtgatgtggty

SEQ ID NO: 105500 - DNA, 13 bp, Artificial Sequence
  Oligonucleotide for detection of SNP TSC0026441
raccacatcacaa

SEQ ID NO: 105501 - DNA, 13 bp, Artificial Sequence
  Oligonucleotide for detection of SNP TSC0026441
ttgcgaagtggty

SEQ ID NO: 105502 - DNA, 13 bp, Artificial Sequence
  Oligonucleotide for detection of SNP TSC0026441
raccacttcgcaa

SEQ ID NO: 105503 - DNA, 13 bp, Artificial Sequence
  Oligonucleotide for detection of SNP TSC0026441
ttgcgatgtggty

SEQ ID NO: 105504 - DNA, 13 bp, Artificial Sequence
  Oligonucleotide for detection of SNP TSC0026441
raccacatcgcaa

SEQ ID NO: 105505 - DNA, 13 bp, Artificial Sequence
  Oligonucleotide for detection of SNP TSC0026441
ggttattttgtag

SEQ ID NO: 105506 - DNA, 13 bp, Artificial Sequence
  Oligonucleotide for detection of SNP TSC0026441
ctacaaaataacc

SEQ ID NO: 105507 - DNA, 13 bp, Artificial Sequence
  Oligonucleotide for detection of SNP TSC0026441
ggttatattgtag

SEQ ID NO: 105508 - DNA, 13 bp, Artificial Sequence
  Oligonucleotide for detection of SNP TSC0026441
ctacaatataacc

SEQ ID NO: 105509 - DNA, 13 bp, Artificial Sequence
  Oligonucleotide for detection of SNP TSC0026441
ggttatttcgtag

SEQ ID NO: 105510 - DNA, 13 bp, Artificial Sequence
  Oligonucleotide for detection of SNP TSC0026441
ctacgaaataacc

SEQ ID NO: 105511 - DNA, 13 bp, Artificial Sequence
  Oligonucleotide for detection of SNP TSC0026441
ggttatatcgtag

SEQ ID NO: 105512 - DNA, 13 bp, Artificial Sequence
  Oligonucleotide for detection of SNP TSC0026441
ctacgatataacc

SEQ ID NO: 105513 - DNA, 13 bp, Artificial Sequence
  Oligonucleotide for detection of SNP TSC0026442
tggttaaattgaa

SEQ ID NO: 105514 - DNA, 13 bp, Artificial Sequence
  Oligonucleotide for detection of SNP TSC0026442
ttcaatttaacca

SEQ ID NO: 105515 - DNA, 13 bp, Artificial Sequence
  Oligonucleotide for detection of SNP TSC0026442
tggttagattgaa

SEQ ID NO: 105516 - DNA, 13 bp, Artificial Sequence
  Oligonucleotide for detection of SNP TSC0026442
ttcaatctaacca

SEQ ID NO: 105517 - DNA, 13 bp, Artificial Sequence
  Oligonucleotide for detection of SNP TSC0026444
gagagataaggag

SEQ ID NO: 105518 - DNA, 13 bp, Artificial Sequence
  Oligonucleotide for detection of SNP TSC0026444
ctccttatctctc

SEQ ID NO: 105519 - DNA, 13 bp, Artificial Sequence
  Oligonucleotide for detection of SNP TSC0026444
gagagagaaggag

SEQ ID NO: 105520 - DNA, 13 bp, Artificial Sequence
  Oligonucleotide for detection of SNP TSC0026444
ctccttctctctc

SEQ ID NO: 105521 - DNA, 13 bp, Artificial Sequence
  Oligonucleotide for detection of SNP TSC0026445
gtttataggaggg

SEQ ID NO: 105522 - DNA, 13 bp, Artificial Sequence
  Oligonucleotide for detection of SNP TSC0026445
ccctcctataaac

SEQ ID NO: 105523 - DNA, 13 bp, Artificial Sequence
  Oligonucleotide for detection of SNP TSC0026445
gtttatgggaggg

SEQ ID NO: 105524 - DNA, 13 bp, Artificial Sequence
  Oligonucleotide for detection of SNP TSC0026445
ccctcccataaac

SEQ ID NO: 105525 - DNA, 13 bp, Artificial Sequence
  Oligonucleotide for detection of SNP TSC0026445
gtttacgggaggg

SEQ ID NO: 105526 - DNA, 13 bp, Artificial Sequence
  Oligonucleotide for detection of SNP TSC0026445
ccctcccgtaaac

SEQ ID NO: 105527 - DNA, 13 bp, Artificial Sequence
  Oligonucleotide for detection of SNP TSC0026445
tttttttgtgggy

SEQ ID NO: 105528 - DNA, 13 bp, Artificial Sequence
  Oligonucleotide for detection of SNP TSC0026445
rcccacaaaaaaa

SEQ ID NO: 105529 - DNA, 13 bp, Artificial Sequence
  Oligonucleotide for detection of SNP TSC0026445
ttttttcgtgggy

SEQ ID NO: 105530 - DNA, 13 bp, Artificial Sequence
  Oligonucleotide for detection of SNP TSC0026445
rcccacgaaaaaa

SEQ ID NO: 105531 - DNA, 13 bp, Artificial Sequence
  Oligonucleotide for detection of SNP TSC0026448
tttattattataa

SEQ ID NO: 105532 - DNA, 13 bp, Artificial Sequence
  Oligonucleotide for detection of SNP TSC0026448
ttataataataaa

SEQ ID NO: 105533 - DNA, 13 bp, Artificial Sequence
  Oligonucleotide for detection of SNP TSC0026448
ttataatggtgag

SEQ ID NO: 105534 - DNA, 13 bp, Artificial Sequence
  Oligonucleotide for detection of SNP TSC0026448
ctcaccattataa

SEQ ID NO: 105535 - DNA, 13 bp, Artificial Sequence
  Oligonucleotide for detection of SNP TSC0026448
ttataacggtgag

SEQ ID NO: 105536 - DNA, 13 bp, Artificial Sequence
  Oligonucleotide for detection of SNP TSC0026448
ctcaccgttataa

SEQ ID NO: 105537 - DNA, 13 bp, Artificial Sequence
  Oligonucleotide for detection of SNP TSC0026449
agttggagtgttt

SEQ ID NO: 105538 - DNA, 13 bp, Artificial Sequence
  Oligonucleotide for detection of SNP TSC0026449
aaacactccaact

SEQ ID NO: 105539 - DNA, 13 bp, Artificial Sequence
  Oligonucleotide for detection of SNP TSC0026449
agttggtgtgttt

SEQ ID NO: 105540 - DNA, 13 bp, Artificial Sequence
  Oligonucleotide for detection of SNP TSC0026449
aaacacaccaact

SEQ ID NO: 105541 - DNA, 13 bp, Artificial Sequence
  Oligonucleotide for detection of SNP TSC0026449
aagtattttaatt

SEQ ID NO: 105542 - DNA, 13 bp, Artificial Sequence
  Oligonucleotide for detection of SNP TSC0026449
aattaaaatactt

SEQ ID NO: 105543 - DNA, 13 bp, Artificial Sequence
  Oligonucleotide for detection of SNP TSC0026449
aagtatattaatt

SEQ ID NO: 105544 - DNA, 13 bp, Artificial Sequence
  Oligonucleotide for detection of SNP TSC0026449
aattaatatactt

SEQ ID NO: 105545 - DNA, 13 bp, Artificial Sequence
  Oligonucleotide for detection of SNP TSC0026451
gtttttagatagy

SEQ ID NO: 105546 - DNA, 13 bp, Artificial Sequence
  Oligonucleotide for detection of SNP TSC0026451
rctatctaaaaac

SEQ ID NO: 105547 - DNA, 13 bp, Artificial Sequence
  Oligonucleotide for detection of SNP TSC0026451
gtttttggatagy

SEQ ID NO: 105548 - DNA, 13 bp, Artificial Sequence
  Oligonucleotide for detection of SNP TSC0026451
rctatccaaaaac

SEQ ID NO: 105549 - DNA, 13 bp, Artificial Sequence
  Oligonucleotide for detection of SNP TSC0026451
gttttcggatagy

SEQ ID NO: 105550 - DNA, 13 bp, Artificial Sequence
  Oligonucleotide for detection of SNP TSC0026451
rctatccgaaaac

SEQ ID NO: 105551 - DNA, 13 bp, Artificial Sequence
  Oligonucleotide for detection of SNP TSC0026451
gttgtttgagagy

SEQ ID NO: 105552 - DNA, 13 bp, Artificial Sequence
  Oligonucleotide for detection of SNP TSC0026451
rctctcaaacaac

SEQ ID NO: 105553 - DNA, 13 bp, Artificial Sequence
  Oligonucleotide for detection of SNP TSC0026451
gttgttcgagagy

SEQ ID NO: 105554 - DNA, 13 bp, Artificial Sequence
  Oligonucleotide for detection of SNP TSC0026451
rctctcgaacaac

SEQ ID NO: 105555 - DNA, 13 bp, Artificial Sequence
  Oligonucleotide for detection of SNP TSC0026452
tttttagtgaaay

SEQ ID NO: 105556 - DNA, 13 bp, Artificial Sequence
  Oligonucleotide for detection of SNP TSC0026452
rtttcactaaaaa

SEQ ID NO: 105557 - DNA, 13 bp, Artificial Sequence
  Oligonucleotide for detection of SNP TSC0026452
tttttaatgaaay

SEQ ID NO: 105558 - DNA, 13 bp, Artificial Sequence
  Oligonucleotide for detection of SNP TSC0026452
rtttcattaaaaa

SEQ ID NO: 105559 - DNA, 13 bp, Artificial Sequence
  Oligonucleotide for detection of SNP TSC0026453
ttgaatataatty

SEQ ID NO: 105560 - DNA, 13 bp, Artificial Sequence
  Oligonucleotide for detection of SNP TSC0026453
raattatattcaa

SEQ ID NO: 105561 - DNA, 13 bp, Artificial Sequence
  Oligonucleotide for detection of SNP TSC0026453
ttgaatttaatty

SEQ ID NO: 105562 - DNA, 13 bp, Artificial Sequence
  Oligonucleotide for detection of SNP TSC0026453
raattaaattcaa

SEQ ID NO: 105563 - DNA, 13 bp, Artificial Sequence
  Oligonucleotide for detection of SNP TSC0026453
gggttatatttag

SEQ ID NO: 105564 - DNA, 13 bp, Artificial Sequence
  Oligonucleotide for detection of SNP TSC0026453
ctaaatataaccc

SEQ ID NO: 105565 - DNA, 13 bp, Artificial Sequence
  Oligonucleotide for detection of SNP TSC0026453
gggttagatttag

SEQ ID NO: 105566 - DNA, 13 bp, Artificial Sequence
  Oligonucleotide for detection of SNP TSC0026453
ctaaatctaaccc

SEQ ID NO: 105567 - DNA, 13 bp, Artificial Sequence
  Oligonucleotide for detection of SNP TSC0026456
gtttgtattttty

SEQ ID NO: 105568 - DNA, 13 bp, Artificial Sequence
  Oligonucleotide for detection of SNP TSC0026456
raaaaatacaaac

SEQ ID NO: 105569 - DNA, 13 bp, Artificial Sequence
  Oligonucleotide for detection of SNP TSC0026459
gttgatgtttaga

SEQ ID NO: 105570 - DNA, 13 bp, Artificial Sequence
  Oligonucleotide for detection of SNP TSC0026459
tctaaacatcaac

SEQ ID NO: 105571 - DNA, 13 bp, Artificial Sequence
  Oligonucleotide for detection of SNP TSC0026459
gttgatatttaga

SEQ ID NO: 105572 - DNA, 13 bp, Artificial Sequence
  Oligonucleotide for detection of SNP TSC0026459
tctaaatatcaac

SEQ ID NO: 105573 - DNA, 13 bp, Artificial Sequence
  Oligonucleotide for detection of SNP TSC0026465
ttttatagaatag

SEQ ID NO: 105574 - DNA, 13 bp, Artificial Sequence
  Oligonucleotide for detection of SNP TSC0026465
ctattctataaaa

SEQ ID NO: 105575 - DNA, 13 bp, Artificial Sequence
  Oligonucleotide for detection of SNP TSC0026465
ttttattgaatag

SEQ ID NO: 105576 - DNA, 13 bp, Artificial Sequence
  Oligonucleotide for detection of SNP TSC0026465
ctattcaataaaa

SEQ ID NO: 105577 - DNA, 13 bp, Artificial Sequence
  Oligonucleotide for detection of SNP TSC0026465
ttattttgtaaaa

SEQ ID NO: 105578 - DNA, 13 bp, Artificial Sequence
  Oligonucleotide for detection of SNP TSC0026465
ttttacaaaataa

SEQ ID NO: 105579 - DNA, 13 bp, Artificial Sequence
  Oligonucleotide for detection of SNP TSC0026465
ttatttagtaaaa

SEQ ID NO: 105580 - DNA, 13 bp, Artificial Sequence
  Oligonucleotide for detection of SNP TSC0026465
ttttactaaataa

SEQ ID NO: 105581 - DNA, 13 bp, Artificial Sequence
  Oligonucleotide for detection of SNP TSC0026466
aatggtgtaatga

SEQ ID NO: 105582 - DNA, 13 bp, Artificial Sequence
  Oligonucleotide for detection of SNP TSC0026466
tcattacaccatt

SEQ ID NO: 105583 - DNA, 13 bp, Artificial Sequence
  Oligonucleotide for detection of SNP TSC0026466
aatggtataatga

SEQ ID NO: 105584 - DNA, 13 bp, Artificial Sequence
  Oligonucleotide for detection of SNP TSC0026466
tcattataccatt

SEQ ID NO: 105585 - DNA, 13 bp, Artificial Sequence
  Oligonucleotide for detection of SNP TSC0026466
aatggcgtaatga

SEQ ID NO: 105586 - DNA, 13 bp, Artificial Sequence
  Oligonucleotide for detection of SNP TSC0026466
tcattacgccatt

SEQ ID NO: 105587 - DNA, 13 bp, Artificial Sequence
  Oligonucleotide for detection of SNP TSC0026468
ggatgatgaaagy

SEQ ID NO: 105588 - DNA, 13 bp, Artificial Sequence
  Oligonucleotide for detection of SNP TSC0026468
rctttcatcatcc

SEQ ID NO: 105589 - DNA, 13 bp, Artificial Sequence
  Oligonucleotide for detection of SNP TSC0026468
ggatgacgaaagy

SEQ ID NO: 105590 - DNA, 13 bp, Artificial Sequence
  Oligonucleotide for detection of SNP TSC0026468
rctttcgtcatcc

SEQ ID NO: 105591 - DNA, 13 bp, Artificial Sequence
  Oligonucleotide for detection of SNP TSC0026469
agttttaaattty

SEQ ID NO: 105592 - DNA, 13 bp, Artificial Sequence
  Oligonucleotide for detection of SNP TSC0026469
raaatttaaaact

SEQ ID NO: 105593 - DNA, 13 bp, Artificial Sequence
  Oligonucleotide for detection of SNP TSC0026469
agttttgaattty

SEQ ID NO: 105594 - DNA, 13 bp, Artificial Sequence
  Oligonucleotide for detection of SNP TSC0026469
raaattcaaaact

SEQ ID NO: 105595 - DNA, 13 bp, Artificial Sequence
  Oligonucleotide for detection of SNP TSC0026469
agtttcgaattty

SEQ ID NO: 105596 - DNA, 13 bp, Artificial Sequence
  Oligonucleotide for detection of SNP TSC0026469
raaattcgaaact

SEQ ID NO: 105597 - DNA, 13 bp, Artificial Sequence
  Oligonucleotide for detection of SNP TSC0026469
ggagtttgaggtt

SEQ ID NO: 105598 - DNA, 13 bp, Artificial Sequence
  Oligonucleotide for detection of SNP TSC0026469
aacctcaaactcc

SEQ ID NO: 105599 - DNA, 13 bp, Artificial Sequence
  Oligonucleotide for detection of SNP TSC0026469
ggagttcgaggtt

SEQ ID NO: 105600 - DNA, 13 bp, Artificial Sequence
  Oligonucleotide for detection of SNP TSC0026469
aacctcgaactcc

SEQ ID NO: 105601 - DNA, 13 bp, Artificial Sequence
  Oligonucleotide for detection of SNP TSC0026470
gttttatggtggt

SEQ ID NO: 105602 - DNA, 13 bp, Artificial Sequence
  Oligonucleotide for detection of SNP TSC0026470
accaccataaaac

SEQ ID NO: 105603 - DNA, 13 bp, Artificial Sequence
  Oligonucleotide for detection of SNP TSC0026470
gttttagggtggt

SEQ ID NO: 105604 - DNA, 13 bp, Artificial Sequence
  Oligonucleotide for detection of SNP TSC0026470
accaccctaaaac

SEQ ID NO: 105605 - DNA, 13 bp, Artificial Sequence
  Oligonucleotide for detection of SNP TSC0026470
gttttacggtggt

SEQ ID NO: 105606 - DNA, 13 bp, Artificial Sequence
  Oligonucleotide for detection of SNP TSC0026470
accaccgtaaaac

SEQ ID NO: 105607 - DNA, 13 bp, Artificial Sequence
  Oligonucleotide for detection of SNP TSC0026470
attattgtaaggy

SEQ ID NO: 105608 - DNA, 13 bp, Artificial Sequence
  Oligonucleotide for detection of SNP TSC0026470
rccttacaataat

SEQ ID NO: 105609 - DNA, 13 bp, Artificial Sequence
  Oligonucleotide for detection of SNP TSC0026470
attattttaaggy

SEQ ID NO: 105610 - DNA, 13 bp, Artificial Sequence
  Oligonucleotide for detection of SNP TSC0026470
rccttaaaataat

SEQ ID NO: 105611 - DNA, 13 bp, Artificial Sequence
  Oligonucleotide for detection of SNP TSC0026470
attatcgtaaggy

SEQ ID NO: 105612 - DNA, 13 bp, Artificial Sequence
  Oligonucleotide for detection of SNP TSC0026470
rccttacgataat

SEQ ID NO: 105613 - DNA, 13 bp, Artificial Sequence
  Oligonucleotide for detection of SNP TSC0026473
tgagattttggtt

SEQ ID NO: 105614 - DNA, 13 bp, Artificial Sequence
  Oligonucleotide for detection of SNP TSC0026473
aaccaaaatctca

SEQ ID NO: 105615 - DNA, 13 bp, Artificial Sequence
  Oligonucleotide for detection of SNP TSC0026473
tgagatattggtt

SEQ ID NO: 105616 - DNA, 13 bp, Artificial Sequence
  Oligonucleotide for detection of SNP TSC0026473
aaccaatatctca

SEQ ID NO: 105617 - DNA, 13 bp, Artificial Sequence
  Oligonucleotide for detection of SNP TSC0026474
tatttcggattat

SEQ ID NO: 105618 - DNA, 13 bp, Artificial Sequence
  Oligonucleotide for detection of SNP TSC0026474
ataatccgaaata

SEQ ID NO: 105619 - DNA, 13 bp, Artificial Sequence
  Oligonucleotide for detection of SNP TSC0026474
atagtttggggta

SEQ ID NO: 105620 - DNA, 13 bp, Artificial Sequence
  Oligonucleotide for detection of SNP TSC0026474
taccccaaactat

SEQ ID NO: 105621 - DNA, 13 bp, Artificial Sequence
  Oligonucleotide for detection of SNP TSC0026474
atagttcggggta

SEQ ID NO: 105622 - DNA, 13 bp, Artificial Sequence
  Oligonucleotide for detection of SNP TSC0026474
taccccgaactat

SEQ ID NO: 105623 - DNA, 13 bp, Artificial Sequence
  Oligonucleotide for detection of SNP TSC0026475
agagaggtagttt

SEQ ID NO: 105624 - DNA, 13 bp, Artificial Sequence
  Oligonucleotide for detection of SNP TSC0026475
aaactacctctct

SEQ ID NO: 105625 - DNA, 13 bp, Artificial Sequence
  Oligonucleotide for detection of SNP TSC0026475
agagagatagttt

SEQ ID NO: 105626 - DNA, 13 bp, Artificial Sequence
  Oligonucleotide for detection of SNP TSC0026475
aaactatctctct

SEQ ID NO: 105627 - DNA, 13 bp, Artificial Sequence
  Oligonucleotide for detection of SNP TSC0026476
atgggggttaaag

SEQ ID NO: 105628 - DNA, 13 bp, Artificial Sequence
  Oligonucleotide for detection of SNP TSC0026476
ctttaacccccat

SEQ ID NO: 105629 - DNA, 13 bp, Artificial Sequence
  Oligonucleotide for detection of SNP TSC0026476
atggggattaaag

SEQ ID NO: 105630 - DNA, 13 bp, Artificial Sequence
  Oligonucleotide for detection of SNP TSC0026476
ctttaatccccat

SEQ ID NO: 105631 - DNA, 13 bp, Artificial Sequence
  Oligonucleotide for detection of SNP TSC0026478
aggaattaagtat

SEQ ID NO: 105632 - DNA, 13 bp, Artificial Sequence
  Oligonucleotide for detection of SNP TSC0026478
atacttaattcct

SEQ ID NO: 105633 - DNA, 13 bp, Artificial Sequence
  Oligonucleotide for detection of SNP TSC0026478
aggaatgaagtat

SEQ ID NO: 105634 - DNA, 13 bp, Artificial Sequence
  Oligonucleotide for detection of SNP TSC0026478
atacttcattcct

SEQ ID NO: 105635 - DNA, 13 bp, Artificial Sequence
  Oligonucleotide for detection of SNP TSC0026478
aggaacgaagtat

SEQ ID NO: 105636 - DNA, 13 bp, Artificial Sequence
  Oligonucleotide for detection of SNP TSC0026478
atacttcgttcct

SEQ ID NO: 105637 - DNA, 13 bp, Artificial Sequence
  Oligonucleotide for detection of SNP TSC0026478
atgtttggttttt

SEQ ID NO: 105638 - DNA, 13 bp, Artificial Sequence
  Oligonucleotide for detection of SNP TSC0026478
aaaaaccaaacat

SEQ ID NO: 105639 - DNA, 13 bp, Artificial Sequence
  Oligonucleotide for detection of SNP TSC0026483
taatttagtttaa

SEQ ID NO: 105640 - DNA, 13 bp, Artificial Sequence
  Oligonucleotide for detection of SNP TSC0026483
ttaaactaaatta

SEQ ID NO: 105641 - DNA, 13 bp, Artificial Sequence
  Oligonucleotide for detection of SNP TSC0026483
taattttgtttaa

SEQ ID NO: 105642 - DNA, 13 bp, Artificial Sequence
  Oligonucleotide for detection of SNP TSC0026483
ttaaacaaaatta

SEQ ID NO: 105643 - DNA, 13 bp, Artificial Sequence
  Oligonucleotide for detection of SNP TSC0026483
ttaagttagattg

SEQ ID NO: 105644 - DNA, 13 bp, Artificial Sequence
  Oligonucleotide for detection of SNP TSC0026483
caatctaacttaa

SEQ ID NO: 105645 - DNA, 13 bp, Artificial Sequence
  Oligonucleotide for detection of SNP TSC0026483
ttaagtaagattg

SEQ ID NO: 105646 - DNA, 13 bp, Artificial Sequence
  Oligonucleotide for detection of SNP TSC0026483
caatcttacttaa

SEQ ID NO: 105647 - DNA, 13 bp, Artificial Sequence
  Oligonucleotide for detection of SNP TSC0026484
attttgagttgga

SEQ ID NO: 105648 - DNA, 13 bp, Artificial Sequence
  Oligonucleotide for detection of SNP TSC0026484
tccaactcaaaat

SEQ ID NO: 105649 - DNA, 13 bp, Artificial Sequence
  Oligonucleotide for detection of SNP TSC0026484
attttgtgttgga

SEQ ID NO: 105650 - DNA, 13 bp, Artificial Sequence
  Oligonucleotide for detection of SNP TSC0026484
tccaacacaaaat

SEQ ID NO: 105651 - DNA, 13 bp, Artificial Sequence
  Oligonucleotide for detection of SNP TSC0026484
attttgcgttgga

SEQ ID NO: 105652 - DNA, 13 bp, Artificial Sequence
  Oligonucleotide for detection of SNP TSC0026484
tccaacgcaaaat

SEQ ID NO: 105653 - DNA, 13 bp, Artificial Sequence
  Oligonucleotide for detection of SNP TSC0026484
tttagtttagagt

SEQ ID NO: 105654 - DNA, 13 bp, Artificial Sequence
  Oligonucleotide for detection of SNP TSC0026484
actctaaactaaa

SEQ ID NO: 105655 - DNA, 13 bp, Artificial Sequence
  Oligonucleotide for detection of SNP TSC0026484
tttagtgtagagt

SEQ ID NO: 105656 - DNA, 13 bp, Artificial Sequence
  Oligonucleotide for detection of SNP TSC0026484
actctacactaaa

SEQ ID NO: 105657 - DNA, 13 bp, Artificial Sequence
  Oligonucleotide for detection of SNP TSC0026484
tttagcgtagagt

SEQ ID NO: 105658 - DNA, 13 bp, Artificial Sequence
  Oligonucleotide for detection of SNP TSC0026484
actctacgctaaa

SEQ ID NO: 105659 - DNA, 13 bp, Artificial Sequence
  Oligonucleotide for detection of SNP TSC0026485
tgaggtttattga

SEQ ID NO: 105660 - DNA, 13 bp, Artificial Sequence
  Oligonucleotide for detection of SNP TSC0026485
tcaataaacctca

SEQ ID NO: 105661 - DNA, 13 bp, Artificial Sequence
  Oligonucleotide for detection of SNP TSC0026485
tgaggtgtattga

SEQ ID NO: 105662 - DNA, 13 bp, Artificial Sequence
  Oligonucleotide for detection of SNP TSC0026485
tcaatacacctca

SEQ ID NO: 105663 - DNA, 13 bp, Artificial Sequence
  Oligonucleotide for detection of SNP TSC0026485
tgaggcgtattga

SEQ ID NO: 105664 - DNA, 13 bp, Artificial Sequence
  Oligonucleotide for detection of SNP TSC0026485
tcaatacgcctca

SEQ ID NO: 105665 - DNA, 13 bp, Artificial Sequence
  Oligonucleotide for detection of SNP TSC0026485
ttagtgggtttta

SEQ ID NO: 105666 - DNA, 13 bp, Artificial Sequence
  Oligonucleotide for detection of SNP TSC0026485
taaaacccactaa

SEQ ID NO: 105667 - DNA, 13 bp, Artificial Sequence
  Oligonucleotide for detection of SNP TSC0026485
ttagtgtgtttta

SEQ ID NO: 105668 - DNA, 13 bp, Artificial Sequence
  Oligonucleotide for detection of SNP TSC0026485
taaaacacactaa

SEQ ID NO: 105669 - DNA, 13 bp, Artificial Sequence
  Oligonucleotide for detection of SNP TSC0026485
ttagtgcgtttta

SEQ ID NO: 105670 - DNA, 13 bp, Artificial Sequence
  Oligonucleotide for detection of SNP TSC0026485
taaaacgcactaa

SEQ ID NO: 105671 - DNA, 13 bp, Artificial Sequence
  Oligonucleotide for detection of SNP TSC0026486
ggataggaagttg

SEQ ID NO: 105672 - DNA, 13 bp, Artificial Sequence
  Oligonucleotide for detection of SNP TSC0026486
caacttcctatcc

SEQ ID NO: 105673 - DNA, 13 bp, Artificial Sequence
  Oligonucleotide for detection of SNP TSC0026486
ggatagaaagttg

SEQ ID NO: 105674 - DNA, 13 bp, Artificial Sequence
  Oligonucleotide for detection of SNP TSC0026486
caactttctatcc

SEQ ID NO: 105675 - DNA, 13 bp, Artificial Sequence
  Oligonucleotide for detection of SNP TSC0026488
ttgggttgtgttt

SEQ ID NO: 105676 - DNA, 13 bp, Artificial Sequence
  Oligonucleotide for detection of SNP TSC0026488
aaacacaacccaa

SEQ ID NO: 105677 - DNA, 13 bp, Artificial Sequence
  Oligonucleotide for detection of SNP TSC0026488
ttgggtcgtgttt

SEQ ID NO: 105678 - DNA, 13 bp, Artificial Sequence
  Oligonucleotide for detection of SNP TSC0026488
aaacacgacccaa

SEQ ID NO: 105679 - DNA, 13 bp, Artificial Sequence
  Oligonucleotide for detection of SNP TSC0026488
aggtatgatttaa

SEQ ID NO: 105680 - DNA, 13 bp, Artificial Sequence
  Oligonucleotide for detection of SNP TSC0026488
ttaaatcatacct

SEQ ID NO: 105681 - DNA, 13 bp, Artificial Sequence
  Oligonucleotide for detection of SNP TSC0026488
aggtataatttaa

SEQ ID NO: 105682 - DNA, 13 bp, Artificial Sequence
  Oligonucleotide for detection of SNP TSC0026488
ttaaattatacct

SEQ ID NO: 105683 - DNA, 13 bp, Artificial Sequence
  Oligonucleotide for detection of SNP TSC0026488
aggtacgatttaa

SEQ ID NO: 105684 - DNA, 13 bp, Artificial Sequence
  Oligonucleotide for detection of SNP TSC0026488
ttaaatcgtacct

SEQ ID NO: 105685 - DNA, 13 bp, Artificial Sequence
  Oligonucleotide for detection of SNP TSC0026489
ttaagaggtatag

SEQ ID NO: 105686 - DNA, 13 bp, Artificial Sequence
  Oligonucleotide for detection of SNP TSC0026489
ctatacctcttaa

SEQ ID NO: 105687 - DNA, 13 bp, Artificial Sequence
  Oligonucleotide for detection of SNP TSC0026489
ttaagaagtatag

SEQ ID NO: 105688 - DNA, 13 bp, Artificial Sequence
  Oligonucleotide for detection of SNP TSC0026489
ctatacttcttaa

SEQ ID NO: 105689 - DNA, 13 bp, Artificial Sequence
  Oligonucleotide for detection of SNP TSC0026493
aagtaagtaagtt

SEQ ID NO: 105690 - DNA, 13 bp, Artificial Sequence
  Oligonucleotide for detection of SNP TSC0026493
aacttacttactt

SEQ ID NO: 105691 - DNA, 13 bp, Artificial Sequence
  Oligonucleotide for detection of SNP TSC0026493
aagtaaataagtt

SEQ ID NO: 105692 - DNA, 13 bp, Artificial Sequence
  Oligonucleotide for detection of SNP TSC0026493
aacttatttactt

SEQ ID NO: 105693 - DNA, 13 bp, Artificial Sequence
  Oligonucleotide for detection of SNP TSC0026496
agtaatggtttaa

SEQ ID NO: 105694 - DNA, 13 bp, Artificial Sequence
  Oligonucleotide for detection of SNP TSC0026496
ttaaaccattact

SEQ ID NO: 105695 - DNA, 13 bp, Artificial Sequence
  Oligonucleotide for detection of SNP TSC0026496
agtaattgtttaa

SEQ ID NO: 105696 - DNA, 13 bp, Artificial Sequence
  Oligonucleotide for detection of SNP TSC0026496
ttaaacaattact

SEQ ID NO: 105697 - DNA, 13 bp, Artificial Sequence
  Oligonucleotide for detection of SNP TSC0026496
ttgagttattgtt

SEQ ID NO: 105698 - DNA, 13 bp, Artificial Sequence
  Oligonucleotide for detection of SNP TSC0026496
aacaataactcaa

SEQ ID NO: 105699 - DNA, 13 bp, Artificial Sequence
  Oligonucleotide for detection of SNP TSC0026496
ttgagtaattgtt

SEQ ID NO: 105700 - DNA, 13 bp, Artificial Sequence
  Oligonucleotide for detection of SNP TSC0026496
aacaattactcaa

SEQ ID NO: 105701 - DNA, 13 bp, Artificial Sequence
  Oligonucleotide for detection of SNP TSC0026497
tagtaagtgttta

SEQ ID NO: 105702 - DNA, 13 bp, Artificial Sequence
  Oligonucleotide for detection of SNP TSC0026497
taaacacttacta

SEQ ID NO: 105703 - DNA, 13 bp, Artificial Sequence
  Oligonucleotide for detection of SNP TSC0026497
tagtaaatgttta

SEQ ID NO: 105704 - DNA, 13 bp, Artificial Sequence
  Oligonucleotide for detection of SNP TSC0026497
taaacatttacta

SEQ ID NO: 105705 - DNA, 13 bp, Artificial Sequence
  Oligonucleotide for detection of SNP TSC0026498
ttagtttgtaagg

SEQ ID NO: 105706 - DNA, 13 bp, Artificial Sequence
  Oligonucleotide for detection of SNP TSC0026498
ccttacaaactaa

SEQ ID NO: 105707 - DNA, 13 bp, Artificial Sequence
  Oligonucleotide for detection of SNP TSC0026498
ttagttcgtaagg

SEQ ID NO: 105708 - DNA, 13 bp, Artificial Sequence
  Oligonucleotide for detection of SNP TSC0026498
ccttacgaactaa

SEQ ID NO: 105709 - DNA, 13 bp, Artificial Sequence
  Oligonucleotide for detection of SNP TSC0026498
ttttgtgggttga

SEQ ID NO: 105710 - DNA, 13 bp, Artificial Sequence
  Oligonucleotide for detection of SNP TSC0026498
tcaacccacaaaa

SEQ ID NO: 105711 - DNA, 13 bp, Artificial Sequence
  Oligonucleotide for detection of SNP TSC0026498
ttttgtaggttga

SEQ ID NO: 105712 - DNA, 13 bp, Artificial Sequence
  Oligonucleotide for detection of SNP TSC0026498
tcaacctacaaaa

SEQ ID NO: 105713 - DNA, 13 bp, Artificial Sequence
  Oligonucleotide for detection of SNP TSC0026498
ttttgcgggttga

SEQ ID NO: 105714 - DNA, 13 bp, Artificial Sequence
  Oligonucleotide for detection of SNP TSC0026498
tcaacccgcaaaa

SEQ ID NO: 105715 - DNA, 13 bp, Artificial Sequence
  Oligonucleotide for detection of SNP TSC0026499
atttaggggaagg

SEQ ID NO: 105716 - DNA, 13 bp, Artificial Sequence
  Oligonucleotide for detection of SNP TSC0026499
ccttcccctaaat

SEQ ID NO: 105717 - DNA, 13 bp, Artificial Sequence
  Oligonucleotide for detection of SNP TSC0026499
atttagtggaagg

SEQ ID NO: 105718 - DNA, 13 bp, Artificial Sequence
  Oligonucleotide for detection of SNP TSC0026499
ccttccactaaat

SEQ ID NO: 105719 - DNA, 13 bp, Artificial Sequence
  Oligonucleotide for detection of SNP TSC0026505
tatttatgggttg

SEQ ID NO: 105720 - DNA, 13 bp, Artificial Sequence
  Oligonucleotide for detection of SNP TSC0026505
caacccataaata

SEQ ID NO: 105721 - DNA, 13 bp, Artificial Sequence
  Oligonucleotide for detection of SNP TSC0026505
tatttacgggttg

SEQ ID NO: 105722 - DNA, 13 bp, Artificial Sequence
  Oligonucleotide for detection of SNP TSC0026505
caacccgtaaata

SEQ ID NO: 105723 - DNA, 13 bp, Artificial Sequence
  Oligonucleotide for detection of SNP TSC0026505
tagtttgtaggta

SEQ ID NO: 105724 - DNA, 13 bp, Artificial Sequence
  Oligonucleotide for detection of SNP TSC0026505
tacctacaaacta

SEQ ID NO: 105725 - DNA, 13 bp, Artificial Sequence
  Oligonucleotide for detection of SNP TSC0026505
tagtttataggta

SEQ ID NO: 105726 - DNA, 13 bp, Artificial Sequence
  Oligonucleotide for detection of SNP TSC0026505
tacctataaacta

SEQ ID NO: 105727 - DNA, 13 bp, Artificial Sequence
  Oligonucleotide for detection of SNP TSC0026505
tagttcgtaggta

SEQ ID NO: 105728 - DNA, 13 bp, Artificial Sequence
  Oligonucleotide for detection of SNP TSC0026505
tacctacgaacta

SEQ ID NO: 105729 - DNA, 13 bp, Artificial Sequence
  Oligonucleotide for detection of SNP TSC0026509
attagaatagttt

SEQ ID NO: 105730 - DNA, 13 bp, Artificial Sequence
  Oligonucleotide for detection of SNP TSC0026509
aaactattctaat

SEQ ID NO: 105731 - DNA, 13 bp, Artificial Sequence
  Oligonucleotide for detection of SNP TSC0026509
attagagtagttt

SEQ ID NO: 105732 - DNA, 13 bp, Artificial Sequence
  Oligonucleotide for detection of SNP TSC0026509
aaactactctaat

SEQ ID NO: 105733 - DNA, 13 bp, Artificial Sequence
  Oligonucleotide for detection of SNP TSC0026510
tttttcgttttgy

SEQ ID NO: 105734 - DNA, 13 bp, Artificial Sequence
  Oligonucleotide for detection of SNP TSC0026510
rcaaaacgaaaaa

SEQ ID NO: 105735 - DNA, 13 bp, Artificial Sequence
  Oligonucleotide for detection of SNP TSC0026510
gtaggatggaaga

SEQ ID NO: 105736 - DNA, 13 bp, Artificial Sequence
  Oligonucleotide for detection of SNP TSC0026510
tcttccatcctac

SEQ ID NO: 105737 - DNA, 13 bp, Artificial Sequence
  Oligonucleotide for detection of SNP TSC0026510
gtaggacggaaga

SEQ ID NO: 105738 - DNA, 13 bp, Artificial Sequence
  Oligonucleotide for detection of SNP TSC0026510
tcttccgtcctac

SEQ ID NO: 105739 - DNA, 13 bp, Artificial Sequence
  Oligonucleotide for detection of SNP TSC0026512
tttttattttttg

SEQ ID NO: 105740 - DNA, 13 bp, Artificial Sequence
  Oligonucleotide for detection of SNP TSC0026512
caaaaaataaaaa

SEQ ID NO: 105741 - DNA, 13 bp, Artificial Sequence
  Oligonucleotide for detection of SNP TSC0026513
atatatagtgaga

SEQ ID NO: 105742 - DNA, 13 bp, Artificial Sequence
  Oligonucleotide for detection of SNP TSC0026513
tctcactatatat

SEQ ID NO: 105743 - DNA, 13 bp, Artificial Sequence
  Oligonucleotide for detection of SNP TSC0026513
atatatggtgaga

SEQ ID NO: 105744 - DNA, 13 bp, Artificial Sequence
  Oligonucleotide for detection of SNP TSC0026513
tctcaccatatat

SEQ ID NO: 105745 - DNA, 13 bp, Artificial Sequence
  Oligonucleotide for detection of SNP TSC0026513
atatacggtgaga

SEQ ID NO: 105746 - DNA, 13 bp, Artificial Sequence
  Oligonucleotide for detection of SNP TSC0026513
tctcaccgtatat

SEQ ID NO: 105747 - DNA, 13 bp, Artificial Sequence
  Oligonucleotide for detection of SNP TSC0026513
ttttattgtgtgt

SEQ ID NO: 105748 - DNA, 13 bp, Artificial Sequence
  Oligonucleotide for detection of SNP TSC0026513
acacacaataaaa

SEQ ID NO: 105749 - DNA, 13 bp, Artificial Sequence
  Oligonucleotide for detection of SNP TSC0026513
ttttatcgtgtgt

SEQ ID NO: 105750 - DNA, 13 bp, Artificial Sequence
  Oligonucleotide for detection of SNP TSC0026513
acacacgataaaa

SEQ ID NO: 105751 - DNA, 13 bp, Artificial Sequence
  Oligonucleotide for detection of SNP TSC0026514
tttagataggtag

SEQ ID NO: 105752 - DNA, 13 bp, Artificial Sequence
  Oligonucleotide for detection of SNP TSC0026514
ctacctatctaaa

SEQ ID NO: 105753 - DNA, 13 bp, Artificial Sequence
  Oligonucleotide for detection of SNP TSC0026514
tttagagaggtag

SEQ ID NO: 105754 - DNA, 13 bp, Artificial Sequence
  Oligonucleotide for detection of SNP TSC0026514
ctacctctctaaa

SEQ ID NO: 105755 - DNA, 13 bp, Artificial Sequence
  Oligonucleotide for detection of SNP TSC0026514
ttatttgtttgaa

SEQ ID NO: 105756 - DNA, 13 bp, Artificial Sequence
  Oligonucleotide for detection of SNP TSC0026514
ttcaaacaaataa

SEQ ID NO: 105757 - DNA, 13 bp, Artificial Sequence
  Oligonucleotide for detection of SNP TSC0026517
ttgattattagta

SEQ ID NO: 105758 - DNA, 13 bp, Artificial Sequence
  Oligonucleotide for detection of SNP TSC0026517
tactaataatcaa

SEQ ID NO: 105759 - DNA, 13 bp, Artificial Sequence
  Oligonucleotide for detection of SNP TSC0026517
ttgattgttagta

SEQ ID NO: 105760 - DNA, 13 bp, Artificial Sequence
  Oligonucleotide for detection of SNP TSC0026517
tactaacaatcaa

SEQ ID NO: 105761 - DNA, 13 bp, Artificial Sequence
  Oligonucleotide for detection of SNP TSC0026517
ttgatcgttagta

SEQ ID NO: 105762 - DNA, 13 bp, Artificial Sequence
  Oligonucleotide for detection of SNP TSC0026517
tactaacgatcaa

SEQ ID NO: 105763 - DNA, 13 bp, Artificial Sequence
  Oligonucleotide for detection of SNP TSC0026517
tgttgatggttag

SEQ ID NO: 105764 - DNA, 13 bp, Artificial Sequence
  Oligonucleotide for detection of SNP TSC0026517
ctaaccatcaaca

SEQ ID NO: 105765 - DNA, 13 bp, Artificial Sequence
  Oligonucleotide for detection of SNP TSC0026517
tgttgacggttag

SEQ ID NO: 105766 - DNA, 13 bp, Artificial Sequence
  Oligonucleotide for detection of SNP TSC0026517
ctaaccgtcaaca

SEQ ID NO: 105767 - DNA, 13 bp, Artificial Sequence
  Oligonucleotide for detection of SNP TSC0026521
gggtggtgtgggt

SEQ ID NO: 105768 - DNA, 13 bp, Artificial Sequence
  Oligonucleotide for detection of SNP TSC0026521
acccacaccaccc

SEQ ID NO: 105769 - DNA, 13 bp, Artificial Sequence
  Oligonucleotide for detection of SNP TSC0026521
gggtggcgtgggt

SEQ ID NO: 105770 - DNA, 13 bp, Artificial Sequence
  Oligonucleotide for detection of SNP TSC0026521
acccacgccaccc

SEQ ID NO: 105771 - DNA, 13 bp, Artificial Sequence
  Oligonucleotide for detection of SNP TSC0026521
gggtggtgcgggt

SEQ ID NO: 105772 - DNA, 13 bp, Artificial Sequence
  Oligonucleotide for detection of SNP TSC0026521
acccgcaccaccc

SEQ ID NO: 105773 - DNA, 13 bp, Artificial Sequence
  Oligonucleotide for detection of SNP TSC0026521
gggtggcgcgggt

SEQ ID NO: 105774 - DNA, 13 bp, Artificial Sequence
  Oligonucleotide for detection of SNP TSC0026521
acccgcgccaccc

SEQ ID NO: 105775 - DNA, 13 bp, Artificial Sequence
  Oligonucleotide for detection of SNP TSC0026521
atttgtgttatty

SEQ ID NO: 105776 - DNA, 13 bp, Artificial Sequence
  Oligonucleotide for detection of SNP TSC0026521
raataacacaaat

SEQ ID NO: 105777 - DNA, 13 bp, Artificial Sequence
  Oligonucleotide for detection of SNP TSC0026521
atttgtattatty

SEQ ID NO: 105778 - DNA, 13 bp, Artificial Sequence
  Oligonucleotide for detection of SNP TSC0026521
raataatacaaat

SEQ ID NO: 105779 - DNA, 13 bp, Artificial Sequence
  Oligonucleotide for detection of SNP TSC0026521
attcgtgttatty

SEQ ID NO: 105780 - DNA, 13 bp, Artificial Sequence
  Oligonucleotide for detection of SNP TSC0026521
raataacacgaat

SEQ ID NO: 105781 - DNA, 13 bp, Artificial Sequence
  Oligonucleotide for detection of SNP TSC0026521
attcgtattatty

SEQ ID NO: 105782 - DNA, 13 bp, Artificial Sequence
  Oligonucleotide for detection of SNP TSC0026521
raataatacgaat

SEQ ID NO: 105783 - DNA, 13 bp, Artificial Sequence
  Oligonucleotide for detection of SNP TSC0026521
atttgcgttatty

SEQ ID NO: 105784 - DNA, 13 bp, Artificial Sequence
  Oligonucleotide for detection of SNP TSC0026521
raataacgcaaat

SEQ ID NO: 105785 - DNA, 13 bp, Artificial Sequence
  Oligonucleotide for detection of SNP TSC0026521
attcgcgttatty

SEQ ID NO: 105786 - DNA, 13 bp, Artificial Sequence
  Oligonucleotide for detection of SNP TSC0026521
raataacgcgaat

SEQ ID NO: 105787 - DNA, 13 bp, Artificial Sequence
  Oligonucleotide for detection of SNP TSC0026522
ggtgttaggagtg

SEQ ID NO: 105788 - DNA, 13 bp, Artificial Sequence
  Oligonucleotide for detection of SNP TSC0026522
cactcctaacacc

SEQ ID NO: 105789 - DNA, 13 bp, Artificial Sequence
  Oligonucleotide for detection of SNP TSC0026522
ggtgttgggagtg

SEQ ID NO: 105790 - DNA, 13 bp, Artificial Sequence
  Oligonucleotide for detection of SNP TSC0026522
cactcccaacacc

SEQ ID NO: 105791 - DNA, 13 bp, Artificial Sequence
  Oligonucleotide for detection of SNP TSC0026522
ggtgttaggagcg

SEQ ID NO: 105792 - DNA, 13 bp, Artificial Sequence
  Oligonucleotide for detection of SNP TSC0026522
cgctcctaacacc

SEQ ID NO: 105793 - DNA, 13 bp, Artificial Sequence
  Oligonucleotide for detection of SNP TSC0026522
ggtgttgggagcg

SEQ ID NO: 105794 - DNA, 13 bp, Artificial Sequence
  Oligonucleotide for detection of SNP TSC0026522
cgctcccaacacc

SEQ ID NO: 105795 - DNA, 13 bp, Artificial Sequence
  Oligonucleotide for detection of SNP TSC0026526
atttaaaaaagga

SEQ ID NO: 105796 - DNA, 13 bp, Artificial Sequence
  Oligonucleotide for detection of SNP TSC0026526
tccttttttaaat

SEQ ID NO: 105797 - DNA, 13 bp, Artificial Sequence
  Oligonucleotide for detection of SNP TSC0026526
atttaagaaagga

SEQ ID NO: 105798 - DNA, 13 bp, Artificial Sequence
  Oligonucleotide for detection of SNP TSC0026526
tcctttcttaaat

SEQ ID NO: 105799 - DNA, 13 bp, Artificial Sequence
  Oligonucleotide for detection of SNP TSC0026527
attgaaaggagaa

SEQ ID NO: 105800 - DNA, 13 bp, Artificial Sequence
  Oligonucleotide for detection of SNP TSC0026527
ttctcctttcaat

SEQ ID NO: 105801 - DNA, 13 bp, Artificial Sequence
  Oligonucleotide for detection of SNP TSC0026527
attgaagggagaa

SEQ ID NO: 105802 - DNA, 13 bp, Artificial Sequence
  Oligonucleotide for detection of SNP TSC0026527
ttctcccttcaat

SEQ ID NO: 105803 - DNA, 13 bp, Artificial Sequence
  Oligonucleotide for detection of SNP TSC0026530
ggtaggtgggttg

SEQ ID NO: 105804 - DNA, 13 bp, Artificial Sequence
  Oligonucleotide for detection of SNP TSC0026530
caacccacctacc

SEQ ID NO: 105805 - DNA, 13 bp, Artificial Sequence
  Oligonucleotide for detection of SNP TSC0026530
ggtaggcgggttg

SEQ ID NO: 105806 - DNA, 13 bp, Artificial Sequence
  Oligonucleotide for detection of SNP TSC0026530
caacccgcctacc

SEQ ID NO: 105807 - DNA, 13 bp, Artificial Sequence
  Oligonucleotide for detection of SNP TSC0026532
atttttttagtta

SEQ ID NO: 105808 - DNA, 13 bp, Artificial Sequence
  Oligonucleotide for detection of SNP TSC0026532
taactaaaaaaat

SEQ ID NO: 105809 - DNA, 13 bp, Artificial Sequence
  Oligonucleotide for detection of SNP TSC0026532
atttttgtagtta

SEQ ID NO: 105810 - DNA, 13 bp, Artificial Sequence
  Oligonucleotide for detection of SNP TSC0026532
taactacaaaaat

SEQ ID NO: 105811 - DNA, 13 bp, Artificial Sequence
  Oligonucleotide for detection of SNP TSC0026532
tgattggaagagt

SEQ ID NO: 105812 - DNA, 13 bp, Artificial Sequence
  Oligonucleotide for detection of SNP TSC0026532
actcttccaatca

SEQ ID NO: 105813 - DNA, 13 bp, Artificial Sequence
  Oligonucleotide for detection of SNP TSC0026532
tgattgtaagagt

SEQ ID NO: 105814 - DNA, 13 bp, Artificial Sequence
  Oligonucleotide for detection of SNP TSC0026532
actcttacaatca

SEQ ID NO: 105815 - DNA, 13 bp, Artificial Sequence
  Oligonucleotide for detection of SNP TSC0026533
ttatgttgggtat

SEQ ID NO: 105816 - DNA, 13 bp, Artificial Sequence
  Oligonucleotide for detection of SNP TSC0026533
atacccaacataa

SEQ ID NO: 105817 - DNA, 13 bp, Artificial Sequence
  Oligonucleotide for detection of SNP TSC0026533
ttatgtcgggtat

SEQ ID NO: 105818 - DNA, 13 bp, Artificial Sequence
  Oligonucleotide for detection of SNP TSC0026533
atacccgacataa

SEQ ID NO: 105819 - DNA, 13 bp, Artificial Sequence
  Oligonucleotide for detection of SNP TSC0026533
atgtttggtatag

SEQ ID NO: 105820 - DNA, 13 bp, Artificial Sequence
  Oligonucleotide for detection of SNP TSC0026533
ctataccaaacat

SEQ ID NO: 105821 - DNA, 13 bp, Artificial Sequence
  Oligonucleotide for detection of SNP TSC0026533
atgtttagtatag

SEQ ID NO: 105822 - DNA, 13 bp, Artificial Sequence
  Oligonucleotide for detection of SNP TSC0026533
ctatactaaacat

SEQ ID NO: 105823 - DNA, 13 bp, Artificial Sequence
  Oligonucleotide for detection of SNP TSC0026533
atgttcggtatag

SEQ ID NO: 105824 - DNA, 13 bp, Artificial Sequence
  Oligonucleotide for detection of SNP TSC0026533
ctataccgaacat

SEQ ID NO: 105825 - DNA, 13 bp, Artificial Sequence
  Oligonucleotide for detection of SNP TSC0026534
atattggtagata

SEQ ID NO: 105826 - DNA, 13 bp, Artificial Sequence
  Oligonucleotide for detection of SNP TSC0026534
tatctaccaatat

SEQ ID NO: 105827 - DNA, 13 bp, Artificial Sequence
  Oligonucleotide for detection of SNP TSC0026534
atattgatagata

SEQ ID NO: 105828 - DNA, 13 bp, Artificial Sequence
  Oligonucleotide for detection of SNP TSC0026534
tatctatcaatat

SEQ ID NO: 105829 - DNA, 13 bp, Artificial Sequence
  Oligonucleotide for detection of SNP TSC0026540
aaaagggttaaaa

SEQ ID NO: 105830 - DNA, 13 bp, Artificial Sequence
  Oligonucleotide for detection of SNP TSC0026540
ttttaaccctttt

SEQ ID NO: 105831 - DNA, 13 bp, Artificial Sequence
  Oligonucleotide for detection of SNP TSC0026540
aaaaggattaaaa

SEQ ID NO: 105832 - DNA, 13 bp, Artificial Sequence
  Oligonucleotide for detection of SNP TSC0026540
ttttaatcctttt

SEQ ID NO: 105833 - DNA, 13 bp, Artificial Sequence
  Oligonucleotide for detection of SNP TSC0026541
tgattatgttggt

SEQ ID NO: 105834 - DNA, 13 bp, Artificial Sequence
  Oligonucleotide for detection of SNP TSC0026541
accaacataatca

SEQ ID NO: 105835 - DNA, 13 bp, Artificial Sequence
  Oligonucleotide for detection of SNP TSC0026541
tgattaggttggt

SEQ ID NO: 105836 - DNA, 13 bp, Artificial Sequence
  Oligonucleotide for detection of SNP TSC0026541
accaacctaatca

SEQ ID NO: 105837 - DNA, 13 bp, Artificial Sequence
  Oligonucleotide for detection of SNP TSC0026542
agtattatatatt

SEQ ID NO: 105838 - DNA, 13 bp, Artificial Sequence
  Oligonucleotide for detection of SNP TSC0026542
aatatataatact

SEQ ID NO: 105839 - DNA, 13 bp, Artificial Sequence
  Oligonucleotide for detection of SNP TSC0026542
agtattgtatatt

SEQ ID NO: 105840 - DNA, 13 bp, Artificial Sequence
  Oligonucleotide for detection of SNP TSC0026542
aatatacaatact

SEQ ID NO: 105841 - DNA, 13 bp, Artificial Sequence
  Oligonucleotide for detection of SNP TSC0026542
agtatcgtatatt

SEQ ID NO: 105842 - DNA, 13 bp, Artificial Sequence
  Oligonucleotide for detection of SNP TSC0026542
aatatacgatact

SEQ ID NO: 105843 - DNA, 13 bp, Artificial Sequence
  Oligonucleotide for detection of SNP TSC0026542
agtgtatggtatt

SEQ ID NO: 105844 - DNA, 13 bp, Artificial Sequence
  Oligonucleotide for detection of SNP TSC0026542
aataccatacact

SEQ ID NO: 105845 - DNA, 13 bp, Artificial Sequence
  Oligonucleotide for detection of SNP TSC0026542
agtgtacggtatt

SEQ ID NO: 105846 - DNA, 13 bp, Artificial Sequence
  Oligonucleotide for detection of SNP TSC0026542
aataccgtacact

SEQ ID NO: 105847 - DNA, 13 bp, Artificial Sequence
  Oligonucleotide for detection of SNP TSC0026543
tttaaatagatga

SEQ ID NO: 105848 - DNA, 13 bp, Artificial Sequence
  Oligonucleotide for detection of SNP TSC0026543
tcatctatttaaa

SEQ ID NO: 105849 - DNA, 13 bp, Artificial Sequence
  Oligonucleotide for detection of SNP TSC0026543
tttaaagagatga

SEQ ID NO: 105850 - DNA, 13 bp, Artificial Sequence
  Oligonucleotide for detection of SNP TSC0026543
tcatctctttaaa

SEQ ID NO: 105851 - DNA, 13 bp, Artificial Sequence
  Oligonucleotide for detection of SNP TSC0026545
attttaatggtat

SEQ ID NO: 105852 - DNA, 13 bp, Artificial Sequence
  Oligonucleotide for detection of SNP TSC0026545
ataccattaaaat

SEQ ID NO: 105853 - DNA, 13 bp, Artificial Sequence
  Oligonucleotide for detection of SNP TSC0026545
attttattggtat

SEQ ID NO: 105854 - DNA, 13 bp, Artificial Sequence
  Oligonucleotide for detection of SNP TSC0026545
ataccaataaaat

SEQ ID NO: 105855 - DNA, 13 bp, Artificial Sequence
  Oligonucleotide for detection of SNP TSC0026545
atgttattgaaat

SEQ ID NO: 105856 - DNA, 13 bp, Artificial Sequence
  Oligonucleotide for detection of SNP TSC0026545
atttcaataacat

SEQ ID NO: 105857 - DNA, 13 bp, Artificial Sequence
  Oligonucleotide for detection of SNP TSC0026545
atgttaatgaaat

SEQ ID NO: 105858 - DNA, 13 bp, Artificial Sequence
  Oligonucleotide for detection of SNP TSC0026545
atttcattaacat

SEQ ID NO: 105859 - DNA, 13 bp, Artificial Sequence
  Oligonucleotide for detection of SNP TSC0026546
taagttgtgatta

SEQ ID NO: 105860 - DNA, 13 bp, Artificial Sequence
  Oligonucleotide for detection of SNP TSC0026546
taatcacaactta

SEQ ID NO: 105861 - DNA, 13 bp, Artificial Sequence
  Oligonucleotide for detection of SNP TSC0026546
taagttatgatta

SEQ ID NO: 105862 - DNA, 13 bp, Artificial Sequence
  Oligonucleotide for detection of SNP TSC0026546
taatcataactta

SEQ ID NO: 105863 - DNA, 13 bp, Artificial Sequence
  Oligonucleotide for detection of SNP TSC0026546
taagtcgtgatta

SEQ ID NO: 105864 - DNA, 13 bp, Artificial Sequence
  Oligonucleotide for detection of SNP TSC0026546
taatcacgactta

SEQ ID NO: 105865 - DNA, 13 bp, Artificial Sequence
  Oligonucleotide for detection of SNP TSC0026548
ggtgggtgtgtga

SEQ ID NO: 105866 - DNA, 13 bp, Artificial Sequence
  Oligonucleotide for detection of SNP TSC0026548
tcacacacccacc

SEQ ID NO: 105867 - DNA, 13 bp, Artificial Sequence
  Oligonucleotide for detection of SNP TSC0026548
ggcgggtgtgtga

SEQ ID NO: 105868 - DNA, 13 bp, Artificial Sequence
  Oligonucleotide for detection of SNP TSC0026548
tcacacacccgcc

SEQ ID NO: 105869 - DNA, 13 bp, Artificial Sequence
  Oligonucleotide for detection of SNP TSC0026548
ggcgggggtgtga

SEQ ID NO: 105870 - DNA, 13 bp, Artificial Sequence
  Oligonucleotide for detection of SNP TSC0026548
tcacacccccgcc

SEQ ID NO: 105871 - DNA, 13 bp, Artificial Sequence
  Oligonucleotide for detection of SNP TSC0026548
ggtgggcgtgtga

SEQ ID NO: 105872 - DNA, 13 bp, Artificial Sequence
  Oligonucleotide for detection of SNP TSC0026548
tcacacgcccacc

SEQ ID NO: 105873 - DNA, 13 bp, Artificial Sequence
  Oligonucleotide for detection of SNP TSC0026548
ggtgggggcgtga

SEQ ID NO: 105874 - DNA, 13 bp, Artificial Sequence
  Oligonucleotide for detection of SNP TSC0026548
tcacgcccccacc

SEQ ID NO: 105875 - DNA, 13 bp, Artificial Sequence
  Oligonucleotide for detection of SNP TSC0026548
ggtgggtgcgtga

SEQ ID NO: 105876 - DNA, 13 bp, Artificial Sequence
  Oligonucleotide for detection of SNP TSC0026548
tcacgcacccacc

SEQ ID NO: 105877 - DNA, 13 bp, Artificial Sequence
  Oligonucleotide for detection of SNP TSC0026548
ggtgggggtgcga

SEQ ID NO: 105878 - DNA, 13 bp, Artificial Sequence
  Oligonucleotide for detection of SNP TSC0026548
tcgcacccccacc

SEQ ID NO: 105879 - DNA, 13 bp, Artificial Sequence
  Oligonucleotide for detection of SNP TSC0026548
ggtgggtgtgcga

SEQ ID NO: 105880 - DNA, 13 bp, Artificial Sequence
  Oligonucleotide for detection of SNP TSC0026548
tcgcacacccacc

SEQ ID NO: 105881 - DNA, 13 bp, Artificial Sequence
  Oligonucleotide for detection of SNP TSC0026548
ggcgggggcgtga

SEQ ID NO: 105882 - DNA, 13 bp, Artificial Sequence
  Oligonucleotide for detection of SNP TSC0026548
tcacgcccccgcc

SEQ ID NO: 105883 - DNA, 13 bp, Artificial Sequence
  Oligonucleotide for detection of SNP TSC0026548
ggcgggcgtgtga

SEQ ID NO: 105884 - DNA, 13 bp, Artificial Sequence
  Oligonucleotide for detection of SNP TSC0026548
tcacacgcccgcc

SEQ ID NO: 105885 - DNA, 13 bp, Artificial Sequence
  Oligonucleotide for detection of SNP TSC0026548
ggcgggggtgcga

SEQ ID NO: 105886 - DNA, 13 bp, Artificial Sequence
  Oligonucleotide for detection of SNP TSC0026548
tcgcacccccgcc

SEQ ID NO: 105887 - DNA, 13 bp, Artificial Sequence
  Oligonucleotide for detection of SNP TSC0026548
ggcgggtgcgtga

SEQ ID NO: 105888 - DNA, 13 bp, Artificial Sequence
  Oligonucleotide for detection of SNP TSC0026548
tcacgcacccgcc

SEQ ID NO: 105889 - DNA, 13 bp, Artificial Sequence
  Oligonucleotide for detection of SNP TSC0026548
ggtgggggcgcga

SEQ ID NO: 105890 - DNA, 13 bp, Artificial Sequence
  Oligonucleotide for detection of SNP TSC0026548
tcgcgcccccacc

SEQ ID NO: 105891 - DNA, 13 bp, Artificial Sequence
  Oligonucleotide for detection of SNP TSC0026548
ggcgggtgtgcga

SEQ ID NO: 105892 - DNA, 13 bp, Artificial Sequence
  Oligonucleotide for detection of SNP TSC0026548
tcgcacacccgcc

SEQ ID NO: 105893 - DNA, 13 bp, Artificial Sequence
  Oligonucleotide for detection of SNP TSC0026548
ggcgggggcgcga

SEQ ID NO: 105894 - DNA, 13 bp, Artificial Sequence
  Oligonucleotide for detection of SNP TSC0026548
tcgcgcccccgcc

SEQ ID NO: 105895 - DNA, 13 bp, Artificial Sequence
  Oligonucleotide for detection of SNP TSC0026548
ggtgggcgcgtga

SEQ ID NO: 105896 - DNA, 13 bp, Artificial Sequence
  Oligonucleotide for detection of SNP TSC0026548
tcacgcgcccacc

SEQ ID NO: 105897 - DNA, 13 bp, Artificial Sequence
  Oligonucleotide for detection of SNP TSC0026548
ggtgggcgtgcga

SEQ ID NO: 105898 - DNA, 13 bp, Artificial Sequence
  Oligonucleotide for detection of SNP TSC0026548
tcgcacgcccacc

SEQ ID NO: 105899 - DNA, 13 bp, Artificial Sequence
  Oligonucleotide for detection of SNP TSC0026548
ggtgggtgcgcga

SEQ ID NO: 105900 - DNA, 13 bp, Artificial Sequence
  Oligonucleotide for detection of SNP TSC0026548
tcgcgcacccacc

SEQ ID NO: 105901 - DNA, 13 bp, Artificial Sequence
  Oligonucleotide for detection of SNP TSC0026548
ggcgggcgcgtga

SEQ ID NO: 105902 - DNA, 13 bp, Artificial Sequence
  Oligonucleotide for detection of SNP TSC0026548
tcacgcgcccgcc

SEQ ID NO: 105903 - DNA, 13 bp, Artificial Sequence
  Oligonucleotide for detection of SNP TSC0026548
ggcgggcgtgcga

SEQ ID NO: 105904 - DNA, 13 bp, Artificial Sequence
  Oligonucleotide for detection of SNP TSC0026548
tcgcacgcccgcc

SEQ ID NO: 105905 - DNA, 13 bp, Artificial Sequence
  Oligonucleotide for detection of SNP TSC0026548
ggcgggtgcgcga

SEQ ID NO: 105906 - DNA, 13 bp, Artificial Sequence
  Oligonucleotide for detection of SNP TSC0026548
tcgcgcacccgcc

SEQ ID NO: 105907 - DNA, 13 bp, Artificial Sequence
  Oligonucleotide for detection of SNP TSC0026548
ggtgggcgcgcga

SEQ ID NO: 105908 - DNA, 13 bp, Artificial Sequence
  Oligonucleotide for detection of SNP TSC0026548
tcgcgcgcccacc

SEQ ID NO: 105909 - DNA, 13 bp, Artificial Sequence
  Oligonucleotide for detection of SNP TSC0026548
ggcgggcgcgcga

SEQ ID NO: 105910 - DNA, 13 bp, Artificial Sequence
  Oligonucleotide for detection of SNP TSC0026548
tcgcgcgcccgcc

SEQ ID NO: 105911 - DNA, 13 bp, Artificial Sequence
  Oligonucleotide for detection of SNP TSC0026548
ttgtgtgtttgty

SEQ ID NO: 105912 - DNA, 13 bp, Artificial Sequence
  Oligonucleotide for detection of SNP TSC0026548
racaaacacacaa

SEQ ID NO: 105913 - DNA, 13 bp, Artificial Sequence
  Oligonucleotide for detection of SNP TSC0026548
ttgtgtttttgty

SEQ ID NO: 105914 - DNA, 13 bp, Artificial Sequence
  Oligonucleotide for detection of SNP TSC0026548
racaaaaacacaa

SEQ ID NO: 105915 - DNA, 13 bp, Artificial Sequence
  Oligonucleotide for detection of SNP TSC0026548
tcgtgtgtttgty

SEQ ID NO: 105916 - DNA, 13 bp, Artificial Sequence
  Oligonucleotide for detection of SNP TSC0026548
racaaacacacga

SEQ ID NO: 105917 - DNA, 13 bp, Artificial Sequence
  Oligonucleotide for detection of SNP TSC0026548
tcgtgtttttgty

SEQ ID NO: 105918 - DNA, 13 bp, Artificial Sequence
  Oligonucleotide for detection of SNP TSC0026548
racaaaaacacga

SEQ ID NO: 105919 - DNA, 13 bp, Artificial Sequence
  Oligonucleotide for detection of SNP TSC0026548
ttgcgtgtttgty

SEQ ID NO: 105920 - DNA, 13 bp, Artificial Sequence
  Oligonucleotide for detection of SNP TSC0026548
racaaacacgcaa

SEQ ID NO: 105921 - DNA, 13 bp, Artificial Sequence
  Oligonucleotide for detection of SNP TSC0026548
ttgcgtttttgty

SEQ ID NO: 105922 - DNA, 13 bp, Artificial Sequence
  Oligonucleotide for detection of SNP TSC0026548
racaaaaacgcaa

SEQ ID NO: 105923 - DNA, 13 bp, Artificial Sequence
  Oligonucleotide for detection of SNP TSC0026548
ttgtgcgtttgty

SEQ ID NO: 105924 - DNA, 13 bp, Artificial Sequence
  Oligonucleotide for detection of SNP TSC0026548
racaaacgcacaa

SEQ ID NO: 105925 - DNA, 13 bp, Artificial Sequence
  Oligonucleotide for detection of SNP TSC0026548
ttgtgttttcgty

SEQ ID NO: 105926 - DNA, 13 bp, Artificial Sequence
  Oligonucleotide for detection of SNP TSC0026548
racgaaaacacaa

SEQ ID NO: 105927 - DNA, 13 bp, Artificial Sequence
  Oligonucleotide for detection of SNP TSC0026548
ttgtgtgttcgty

SEQ ID NO: 105928 - DNA, 13 bp, Artificial Sequence
  Oligonucleotide for detection of SNP TSC0026548
racgaacacacaa

SEQ ID NO: 105929 - DNA, 13 bp, Artificial Sequence
  Oligonucleotide for detection of SNP TSC0026548
tcgcgtttttgty

SEQ ID NO: 105930 - DNA, 13 bp, Artificial Sequence
  Oligonucleotide for detection of SNP TSC0026548
racaaaaacgcga

SEQ ID NO: 105931 - DNA, 13 bp, Artificial Sequence
  Oligonucleotide for detection of SNP TSC0026548
tcgcgtgtttgty

SEQ ID NO: 105932 - DNA, 13 bp, Artificial Sequence
  Oligonucleotide for detection of SNP TSC0026548
racaaacacgcga

SEQ ID NO: 105933 - DNA, 13 bp, Artificial Sequence
  Oligonucleotide for detection of SNP TSC0026548
tcgtgttttcgty

SEQ ID NO: 105934 - DNA, 13 bp, Artificial Sequence
  Oligonucleotide for detection of SNP TSC0026548
racgaaaacacga

SEQ ID NO: 105935 - DNA, 13 bp, Artificial Sequence
  Oligonucleotide for detection of SNP TSC0026548
tcgtgcgtttgty

SEQ ID NO: 105936 - DNA, 13 bp, Artificial Sequence
  Oligonucleotide for detection of SNP TSC0026548
racaaacgcacga

SEQ ID NO: 105937 - DNA, 13 bp, Artificial Sequence
  Oligonucleotide for detection of SNP TSC0026548
ttgcgttttcgty

SEQ ID NO: 105938 - DNA, 13 bp, Artificial Sequence
  Oligonucleotide for detection of SNP TSC0026548
racgaaaacgcaa

SEQ ID NO: 105939 - DNA, 13 bp, Artificial Sequence
  Oligonucleotide for detection of SNP TSC0026548
tcgtgtgttcgty

SEQ ID NO: 105940 - DNA, 13 bp, Artificial Sequence
  Oligonucleotide for detection of SNP TSC0026548
racgaacacacga

SEQ ID NO: 105941 - DNA, 13 bp, Artificial Sequence
  Oligonucleotide for detection of SNP TSC0026548
tcgcgttttcgty

SEQ ID NO: 105942 - DNA, 13 bp, Artificial Sequence
  Oligonucleotide for detection of SNP TSC0026548
racgaaaacgcga

SEQ ID NO: 105943 - DNA, 13 bp, Artificial Sequence
  Oligonucleotide for detection of SNP TSC0026548
ttgcgcgtttgty

SEQ ID NO: 105944 - DNA, 13 bp, Artificial Sequence
  Oligonucleotide for detection of SNP TSC0026548
racaaacgcgcaa

SEQ ID NO: 105945 - DNA, 13 bp, Artificial Sequence
  Oligonucleotide for detection of SNP TSC0026548
ttgcgtgttcgty

SEQ ID NO: 105946 - DNA, 13 bp, Artificial Sequence
  Oligonucleotide for detection of SNP TSC0026548
racgaacacgcaa

SEQ ID NO: 105947 - DNA, 13 bp, Artificial Sequence
  Oligonucleotide for detection of SNP TSC0026548
ttgtgcgttcgty

SEQ ID NO: 105948 - DNA, 13 bp, Artificial Sequence
  Oligonucleotide for detection of SNP TSC0026548
racgaacgcacaa

SEQ ID NO: 105949 - DNA, 13 bp, Artificial Sequence
  Oligonucleotide for detection of SNP TSC0026548
tcgcgcgtttgty

SEQ ID NO: 105950 - DNA, 13 bp, Artificial Sequence
  Oligonucleotide for detection of SNP TSC0026548
racaaacgcgcga

SEQ ID NO: 105951 - DNA, 13 bp, Artificial Sequence
  Oligonucleotide for detection of SNP TSC0026548
tcgcgtgttcgty

SEQ ID NO: 105952 - DNA, 13 bp, Artificial Sequence
  Oligonucleotide for detection of SNP TSC0026548
racgaacacgcga

SEQ ID NO: 105953 - DNA, 13 bp, Artificial Sequence
  Oligonucleotide for detection of SNP TSC0026548
tcgtgcgttcgty

SEQ ID NO: 105954 - DNA, 13 bp, Artificial Sequence
  Oligonucleotide for detection of SNP TSC0026548
racgaacgcacga

SEQ ID NO: 105955 - DNA, 13 bp, Artificial Sequence
  Oligonucleotide for detection of SNP TSC0026548
ttgcgcgttcgty

SEQ ID NO: 105956 - DNA, 13 bp, Artificial Sequence
  Oligonucleotide for detection of SNP TSC0026548
racgaacgcgcaa

SEQ ID NO: 105957 - DNA, 13 bp, Artificial Sequence
  Oligonucleotide for detection of SNP TSC0026548
tcgcgcgttcgty

SEQ ID NO: 105958 - DNA, 13 bp, Artificial Sequence
  Oligonucleotide for detection of SNP TSC0026548
racgaacgcgcga

SEQ ID NO: 105959 - DNA, 13 bp, Artificial Sequence
  Oligonucleotide for detection of SNP TSC0026549
atttttaagttay

SEQ ID NO: 105960 - DNA, 13 bp, Artificial Sequence
  Oligonucleotide for detection of SNP TSC0026549
rtaacttaaaaat

SEQ ID NO: 105961 - DNA, 13 bp, Artificial Sequence
  Oligonucleotide for detection of SNP TSC0026549
attttttagttay

SEQ ID NO: 105962 - DNA, 13 bp, Artificial Sequence
  Oligonucleotide for detection of SNP TSC0026549
rtaactaaaaaat

SEQ ID NO: 105963 - DNA, 13 bp, Artificial Sequence
  Oligonucleotide for detection of SNP TSC0026549
gtgatttgggagt

SEQ ID NO: 105964 - DNA, 13 bp, Artificial Sequence
  Oligonucleotide for detection of SNP TSC0026549
actcccaaatcac

SEQ ID NO: 105965 - DNA, 13 bp, Artificial Sequence
  Oligonucleotide for detection of SNP TSC0026549
gtgattagggagt

SEQ ID NO: 105966 - DNA, 13 bp, Artificial Sequence
  Oligonucleotide for detection of SNP TSC0026549
actccctaatcac

SEQ ID NO: 105967 - DNA, 13 bp, Artificial Sequence
  Oligonucleotide for detection of SNP TSC0026552
atattgattgggt

SEQ ID NO: 105968 - DNA, 13 bp, Artificial Sequence
  Oligonucleotide for detection of SNP TSC0026552
acccaatcaatat

SEQ ID NO: 105969 - DNA, 13 bp, Artificial Sequence
  Oligonucleotide for detection of SNP TSC0026552
atattggttgggt

SEQ ID NO: 105970 - DNA, 13 bp, Artificial Sequence
  Oligonucleotide for detection of SNP TSC0026552
acccaaccaatat

SEQ ID NO: 105971 - DNA, 13 bp, Artificial Sequence
  Oligonucleotide for detection of SNP TSC0026552
atatcgattgggt

SEQ ID NO: 105972 - DNA, 13 bp, Artificial Sequence
  Oligonucleotide for detection of SNP TSC0026552
acccaatcgatat

SEQ ID NO: 105973 - DNA, 13 bp, Artificial Sequence
  Oligonucleotide for detection of SNP TSC0026552
atatcggttgggt

SEQ ID NO: 105974 - DNA, 13 bp, Artificial Sequence
  Oligonucleotide for detection of SNP TSC0026552
acccaaccgatat

SEQ ID NO: 105975 - DNA, 13 bp, Artificial Sequence
  Oligonucleotide for detection of SNP TSC0026556
ttattttttattt

SEQ ID NO: 105976 - DNA, 13 bp, Artificial Sequence
  Oligonucleotide for detection of SNP TSC0026556
aaataaaaaataa

SEQ ID NO: 105977 - DNA, 13 bp, Artificial Sequence
  Oligonucleotide for detection of SNP TSC0026556
agataagaggtag

SEQ ID NO: 105978 - DNA, 13 bp, Artificial Sequence
  Oligonucleotide for detection of SNP TSC0026556
ctacctcttatct

SEQ ID NO: 105979 - DNA, 13 bp, Artificial Sequence
  Oligonucleotide for detection of SNP TSC0026556
agataataggtag

SEQ ID NO: 105980 - DNA, 13 bp, Artificial Sequence
  Oligonucleotide for detection of SNP TSC0026556
ctacctattatct

SEQ ID NO: 105981 - DNA, 13 bp, Artificial Sequence
  Oligonucleotide for detection of SNP TSC0026556
agataaaaggtag

SEQ ID NO: 105982 - DNA, 13 bp, Artificial Sequence
  Oligonucleotide for detection of SNP TSC0026556
ctaccttttatct

SEQ ID NO: 105983 - DNA, 13 bp, Artificial Sequence
  Oligonucleotide for detection of SNP TSC0026557
gatttagatttty

SEQ ID NO: 105984 - DNA, 13 bp, Artificial Sequence
  Oligonucleotide for detection of SNP TSC0026557
raaaatctaaatc

SEQ ID NO: 105985 - DNA, 13 bp, Artificial Sequence
  Oligonucleotide for detection of SNP TSC0026557
gatttaaatttty

SEQ ID NO: 105986 - DNA, 13 bp, Artificial Sequence
  Oligonucleotide for detection of SNP TSC0026557
raaaatttaaatc

SEQ ID NO: 105987 - DNA, 13 bp, Artificial Sequence
  Oligonucleotide for detection of SNP TSC0026558
tagtttaagaaay

SEQ ID NO: 105988 - DNA, 13 bp, Artificial Sequence
  Oligonucleotide for detection of SNP TSC0026558
rtttcttaaacta

SEQ ID NO: 105989 - DNA, 13 bp, Artificial Sequence
  Oligonucleotide for detection of SNP TSC0026558
tagtttgagaaay

SEQ ID NO: 105990 - DNA, 13 bp, Artificial Sequence
  Oligonucleotide for detection of SNP TSC0026558
rtttctcaaacta

SEQ ID NO: 105991 - DNA, 13 bp, Artificial Sequence
  Oligonucleotide for detection of SNP TSC0026558
tagttcgagaaay

SEQ ID NO: 105992 - DNA, 13 bp, Artificial Sequence
  Oligonucleotide for detection of SNP TSC0026558
rtttctcgaacta

SEQ ID NO: 105993 - DNA, 13 bp, Artificial Sequence
  Oligonucleotide for detection of SNP TSC0026558
gttttttgagtta

SEQ ID NO: 105994 - DNA, 13 bp, Artificial Sequence
  Oligonucleotide for detection of SNP TSC0026558
taactcaaaaaac

SEQ ID NO: 105995 - DNA, 13 bp, Artificial Sequence
  Oligonucleotide for detection of SNP TSC0026558
gtttttcgagtta

SEQ ID NO: 105996 - DNA, 13 bp, Artificial Sequence
  Oligonucleotide for detection of SNP TSC0026558
taactcgaaaaac

SEQ ID NO: 105997 - DNA, 13 bp, Artificial Sequence
  Oligonucleotide for detection of SNP TSC0026560
ttgtttgtttata

SEQ ID NO: 105998 - DNA, 13 bp, Artificial Sequence
  Oligonucleotide for detection of SNP TSC0026560
tataaacaaacaa

SEQ ID NO: 105999 - DNA, 13 bp, Artificial Sequence
  Oligonucleotide for detection of SNP TSC0026560
ttgtttatttata

SEQ ID NO: 106000 - DNA, 13 bp, Artificial Sequence
  Oligonucleotide for detection of SNP TSC0026560
tataaataaacaa

SEQ ID NO: 106001 - DNA, 13 bp, Artificial Sequence
  Oligonucleotide for detection of SNP TSC0026562
attttttatttgy

SEQ ID NO: 106002 - DNA, 13 bp, Artificial Sequence
  Oligonucleotide for detection of SNP TSC0026562
rcaaataaaaaat

SEQ ID NO: 106003 - DNA, 13 bp, Artificial Sequence
  Oligonucleotide for detection of SNP TSC0026562
atttttgatttgy

SEQ ID NO: 106004 - DNA, 13 bp, Artificial Sequence
  Oligonucleotide for detection of SNP TSC0026562
rcaaatcaaaaat

SEQ ID NO: 106005 - DNA, 13 bp, Artificial Sequence
  Oligonucleotide for detection of SNP TSC0026562
attttcgatttgy

SEQ ID NO: 106006 - DNA, 13 bp, Artificial Sequence
  Oligonucleotide for detection of SNP TSC0026562
rcaaatcgaaaat

SEQ ID NO: 106007 - DNA, 13 bp, Artificial Sequence
  Oligonucleotide for detection of SNP TSC0026562
gtaggtggggggt

SEQ ID NO: 106008 - DNA, 13 bp, Artificial Sequence
  Oligonucleotide for detection of SNP TSC0026562
accccccacctac

SEQ ID NO: 106009 - DNA, 13 bp, Artificial Sequence
  Oligonucleotide for detection of SNP TSC0026562
gtaggttgggggt

SEQ ID NO: 106010 - DNA, 13 bp, Artificial Sequence
  Oligonucleotide for detection of SNP TSC0026562
acccccaacctac

SEQ ID NO: 106011 - DNA, 13 bp, Artificial Sequence
  Oligonucleotide for detection of SNP TSC0026562
gtaggtcgggggt

SEQ ID NO: 106012 - DNA, 13 bp, Artificial Sequence
  Oligonucleotide for detection of SNP TSC0026562
acccccgacctac

SEQ ID NO: 106013 - DNA, 13 bp, Artificial Sequence
  Oligonucleotide for detection of SNP TSC0026563
tgaggtagtgttt

SEQ ID NO: 106014 - DNA, 13 bp, Artificial Sequence
  Oligonucleotide for detection of SNP TSC0026563
aaacactacctca

SEQ ID NO: 106015 - DNA, 13 bp, Artificial Sequence
  Oligonucleotide for detection of SNP TSC0026563
tgaggtggtgttt

SEQ ID NO: 106016 - DNA, 13 bp, Artificial Sequence
  Oligonucleotide for detection of SNP TSC0026563
aaacaccacctca

SEQ ID NO: 106017 - DNA, 13 bp, Artificial Sequence
  Oligonucleotide for detection of SNP TSC0026563
tgaggcggtgttt

SEQ ID NO: 106018 - DNA, 13 bp, Artificial Sequence
  Oligonucleotide for detection of SNP TSC0026563
aaacaccgcctca

SEQ ID NO: 106019 - DNA, 13 bp, Artificial Sequence
  Oligonucleotide for detection of SNP TSC0026563
aggtattgtttta

SEQ ID NO: 106020 - DNA, 13 bp, Artificial Sequence
  Oligonucleotide for detection of SNP TSC0026563
taaaacaatacct

SEQ ID NO: 106021 - DNA, 13 bp, Artificial Sequence
  Oligonucleotide for detection of SNP TSC0026563
aggtatcgtttta

SEQ ID NO: 106022 - DNA, 13 bp, Artificial Sequence
  Oligonucleotide for detection of SNP TSC0026563
taaaacgatacct

SEQ ID NO: 106023 - DNA, 13 bp, Artificial Sequence
  Oligonucleotide for detection of SNP TSC0026564
ttaatttgttaat

SEQ ID NO: 106024 - DNA, 13 bp, Artificial Sequence
  Oligonucleotide for detection of SNP TSC0026564
attaacaaattaa

SEQ ID NO: 106025 - DNA, 13 bp, Artificial Sequence
  Oligonucleotide for detection of SNP TSC0026564
ttaattcgttaat

SEQ ID NO: 106026 - DNA, 13 bp, Artificial Sequence
  Oligonucleotide for detection of SNP TSC0026564
attaacgaattaa

SEQ ID NO: 106027 - DNA, 13 bp, Artificial Sequence
  Oligonucleotide for detection of SNP TSC0026564
attaatgaattgg

SEQ ID NO: 106028 - DNA, 13 bp, Artificial Sequence
  Oligonucleotide for detection of SNP TSC0026564
ccaattcattaat

SEQ ID NO: 106029 - DNA, 13 bp, Artificial Sequence
  Oligonucleotide for detection of SNP TSC0026564
attaataaattgg

SEQ ID NO: 106030 - DNA, 13 bp, Artificial Sequence
  Oligonucleotide for detection of SNP TSC0026564
ccaatttattaat

SEQ ID NO: 106031 - DNA, 13 bp, Artificial Sequence
  Oligonucleotide for detection of SNP TSC0026564
attaacgaattgg

SEQ ID NO: 106032 - DNA, 13 bp, Artificial Sequence
  Oligonucleotide for detection of SNP TSC0026564
ccaattcgttaat

SEQ ID NO: 106033 - DNA, 13 bp, Artificial Sequence
  Oligonucleotide for detection of SNP TSC0026565
tggtttatgggga

SEQ ID NO: 106034 - DNA, 13 bp, Artificial Sequence
  Oligonucleotide for detection of SNP TSC0026565
tccccataaacca

SEQ ID NO: 106035 - DNA, 13 bp, Artificial Sequence
  Oligonucleotide for detection of SNP TSC0026565
tggtttgtgggga

SEQ ID NO: 106036 - DNA, 13 bp, Artificial Sequence
  Oligonucleotide for detection of SNP TSC0026565
tccccacaaacca

SEQ ID NO: 106037 - DNA, 13 bp, Artificial Sequence
  Oligonucleotide for detection of SNP TSC0026569
ggattttggagay

SEQ ID NO: 106038 - DNA, 13 bp, Artificial Sequence
  Oligonucleotide for detection of SNP TSC0026569
rtctccaaaatcc

SEQ ID NO: 106039 - DNA, 13 bp, Artificial Sequence
  Oligonucleotide for detection of SNP TSC0026569
ggatttcggagay

SEQ ID NO: 106040 - DNA, 13 bp, Artificial Sequence
  Oligonucleotide for detection of SNP TSC0026569
rtctccgaaatcc

SEQ ID NO: 106041 - DNA, 13 bp, Artificial Sequence
  Oligonucleotide for detection of SNP TSC0026569
gttttcggagtty

SEQ ID NO: 106042 - DNA, 13 bp, Artificial Sequence
  Oligonucleotide for detection of SNP TSC0026569
raactccgaaaac

SEQ ID NO: 106043 - DNA, 13 bp, Artificial Sequence
  Oligonucleotide for detection of SNP TSC0026570
ttattgtttttat

SEQ ID NO: 106044 - DNA, 13 bp, Artificial Sequence
  Oligonucleotide for detection of SNP TSC0026570
ataaaaacaataa

SEQ ID NO: 106045 - DNA, 13 bp, Artificial Sequence
  Oligonucleotide for detection of SNP TSC0026570
ataaagttaatag

SEQ ID NO: 106046 - DNA, 13 bp, Artificial Sequence
  Oligonucleotide for detection of SNP TSC0026570
ctattaactttat

SEQ ID NO: 106047 - DNA, 13 bp, Artificial Sequence
  Oligonucleotide for detection of SNP TSC0026570
ataaaggtaatag

SEQ ID NO: 106048 - DNA, 13 bp, Artificial Sequence
  Oligonucleotide for detection of SNP TSC0026570
ctattacctttat

SEQ ID NO: 106049 - DNA, 13 bp, Artificial Sequence
  Oligonucleotide for detection of SNP TSC0026571
tatatgaaggata

SEQ ID NO: 106050 - DNA, 13 bp, Artificial Sequence
  Oligonucleotide for detection of SNP TSC0026571
tatccttcatata

SEQ ID NO: 106051 - DNA, 13 bp, Artificial Sequence
  Oligonucleotide for detection of SNP TSC0026571
tatatggaggata

SEQ ID NO: 106052 - DNA, 13 bp, Artificial Sequence
  Oligonucleotide for detection of SNP TSC0026571
tatcctccatata

SEQ ID NO: 106053 - DNA, 13 bp, Artificial Sequence
  Oligonucleotide for detection of SNP TSC0026572
ttttttatgtagt

SEQ ID NO: 106054 - DNA, 13 bp, Artificial Sequence
  Oligonucleotide for detection of SNP TSC0026572
actacataaaaaa

SEQ ID NO: 106055 - DNA, 13 bp, Artificial Sequence
  Oligonucleotide for detection of SNP TSC0026572
ttttttttgtagt

SEQ ID NO: 106056 - DNA, 13 bp, Artificial Sequence
  Oligonucleotide for detection of SNP TSC0026572
actacaaaaaaaa

SEQ ID NO: 106057 - DNA, 13 bp, Artificial Sequence
  Oligonucleotide for detection of SNP TSC0026572
attgtataagagg

SEQ ID NO: 106058 - DNA, 13 bp, Artificial Sequence
  Oligonucleotide for detection of SNP TSC0026572
cctcttatacaat

SEQ ID NO: 106059 - DNA, 13 bp, Artificial Sequence
  Oligonucleotide for detection of SNP TSC0026572
attgtaaaagagg

SEQ ID NO: 106060 - DNA, 13 bp, Artificial Sequence
  Oligonucleotide for detection of SNP TSC0026572
cctcttttacaat

SEQ ID NO: 106061 - DNA, 13 bp, Artificial Sequence
  Oligonucleotide for detection of SNP TSC0026573
agtggatggttga

SEQ ID NO: 106062 - DNA, 13 bp, Artificial Sequence
  Oligonucleotide for detection of SNP TSC0026573
tcaaccatccact

SEQ ID NO: 106063 - DNA, 13 bp, Artificial Sequence
  Oligonucleotide for detection of SNP TSC0026573
agtggacggttga

SEQ ID NO: 106064 - DNA, 13 bp, Artificial Sequence
  Oligonucleotide for detection of SNP TSC0026573
tcaaccgtccact

SEQ ID NO: 106065 - DNA, 13 bp, Artificial Sequence
  Oligonucleotide for detection of SNP TSC0026573
ttagttgtttatt

SEQ ID NO: 106066 - DNA, 13 bp, Artificial Sequence
  Oligonucleotide for detection of SNP TSC0026573
aataaacaactaa

SEQ ID NO: 106067 - DNA, 13 bp, Artificial Sequence
  Oligonucleotide for detection of SNP TSC0026573
ttagttatttatt

SEQ ID NO: 106068 - DNA, 13 bp, Artificial Sequence
  Oligonucleotide for detection of SNP TSC0026573
aataaataactaa

SEQ ID NO: 106069 - DNA, 13 bp, Artificial Sequence
  Oligonucleotide for detection of SNP TSC0026573
ttagtcgtttatt

SEQ ID NO: 106070 - DNA, 13 bp, Artificial Sequence
  Oligonucleotide for detection of SNP TSC0026573
aataaacgactaa

SEQ ID NO: 106071 - DNA, 13 bp, Artificial Sequence
  Oligonucleotide for detection of SNP TSC0026576
tatgtgttttttt

SEQ ID NO: 106072 - DNA, 13 bp, Artificial Sequence
  Oligonucleotide for detection of SNP TSC0026576
aaaaaaacacata

SEQ ID NO: 106073 - DNA, 13 bp, Artificial Sequence
  Oligonucleotide for detection of SNP TSC0026577
gttagtattatty

SEQ ID NO: 106074 - DNA, 13 bp, Artificial Sequence
  Oligonucleotide for detection of SNP TSC0026577
raataatactaac

SEQ ID NO: 106075 - DNA, 13 bp, Artificial Sequence
  Oligonucleotide for detection of SNP TSC0026577
gttagtgttatty

SEQ ID NO: 106076 - DNA, 13 bp, Artificial Sequence
  Oligonucleotide for detection of SNP TSC0026577
raataacactaac

SEQ ID NO: 106077 - DNA, 13 bp, Artificial Sequence
  Oligonucleotide for detection of SNP TSC0026577
gttagcgttatty

SEQ ID NO: 106078 - DNA, 13 bp, Artificial Sequence
  Oligonucleotide for detection of SNP TSC0026577
raataacgctaac

SEQ ID NO: 106079 - DNA, 13 bp, Artificial Sequence
  Oligonucleotide for detection of SNP TSC0026577
gggtgatgttggy

SEQ ID NO: 106080 - DNA, 13 bp, Artificial Sequence
  Oligonucleotide for detection of SNP TSC0026577
rccaacatcaccc

SEQ ID NO: 106081 - DNA, 13 bp, Artificial Sequence
  Oligonucleotide for detection of SNP TSC0026577
gggtgacgttggy

SEQ ID NO: 106082 - DNA, 13 bp, Artificial Sequence
  Oligonucleotide for detection of SNP TSC0026577
rccaacgtcaccc

SEQ ID NO: 106083 - DNA, 13 bp, Artificial Sequence
  Oligonucleotide for detection of SNP TSC0026579
gtataaataatty

SEQ ID NO: 106084 - DNA, 13 bp, Artificial Sequence
  Oligonucleotide for detection of SNP TSC0026579
raattatttatac

SEQ ID NO: 106085 - DNA, 13 bp, Artificial Sequence
  Oligonucleotide for detection of SNP TSC0026579
gtataagtaatty

SEQ ID NO: 106086 - DNA, 13 bp, Artificial Sequence
  Oligonucleotide for detection of SNP TSC0026579
raattacttatac

SEQ ID NO: 106087 - DNA, 13 bp, Artificial Sequence
  Oligonucleotide for detection of SNP TSC0026580
atataaattttat

SEQ ID NO: 106088 - DNA, 13 bp, Artificial Sequence
  Oligonucleotide for detection of SNP TSC0026580
ataaaatttatat

SEQ ID NO: 106089 - DNA, 13 bp, Artificial Sequence
  Oligonucleotide for detection of SNP TSC0026580
atataagttttat

SEQ ID NO: 106090 - DNA, 13 bp, Artificial Sequence
  Oligonucleotide for detection of SNP TSC0026580
ataaaacttatat

SEQ ID NO: 106091 - DNA, 13 bp, Artificial Sequence
  Oligonucleotide for detection of SNP TSC0026582
ttaatgggggagg

SEQ ID NO: 106092 - DNA, 13 bp, Artificial Sequence
  Oligonucleotide for detection of SNP TSC0026582
cctcccccattaa

SEQ ID NO: 106093 - DNA, 13 bp, Artificial Sequence
  Oligonucleotide for detection of SNP TSC0026582
ttaatgtgggagg

SEQ ID NO: 106094 - DNA, 13 bp, Artificial Sequence
  Oligonucleotide for detection of SNP TSC0026582
cctcccacattaa

SEQ ID NO: 106095 - DNA, 13 bp, Artificial Sequence
  Oligonucleotide for detection of SNP TSC0026582
ttaacgggggagg

SEQ ID NO: 106096 - DNA, 13 bp, Artificial Sequence
  Oligonucleotide for detection of SNP TSC0026582
cctcccccgttaa

SEQ ID NO: 106097 - DNA, 13 bp, Artificial Sequence
  Oligonucleotide for detection of SNP TSC0026582
ttaacgtgggagg

SEQ ID NO: 106098 - DNA, 13 bp, Artificial Sequence
  Oligonucleotide for detection of SNP TSC0026582
cctcccacgttaa

SEQ ID NO: 106099 - DNA, 13 bp, Artificial Sequence
  Oligonucleotide for detection of SNP TSC0026582
ttttttttgttgg

SEQ ID NO: 106100 - DNA, 13 bp, Artificial Sequence
  Oligonucleotide for detection of SNP TSC0026582
ccaacaaaaaaaa

SEQ ID NO: 106101 - DNA, 13 bp, Artificial Sequence
  Oligonucleotide for detection of SNP TSC0026582
ttttttatgttgg

SEQ ID NO: 106102 - DNA, 13 bp, Artificial Sequence
  Oligonucleotide for detection of SNP TSC0026582
ccaacataaaaaa

SEQ ID NO: 106103 - DNA, 13 bp, Artificial Sequence
  Oligonucleotide for detection of SNP TSC0026582
tttttttcgttgg

SEQ ID NO: 106104 - DNA, 13 bp, Artificial Sequence
  Oligonucleotide for detection of SNP TSC0026582
ccaacgaaaaaaa

SEQ ID NO: 106105 - DNA, 13 bp, Artificial Sequence
  Oligonucleotide for detection of SNP TSC0026582
ttttttacgttgg

SEQ ID NO: 106106 - DNA, 13 bp, Artificial Sequence
  Oligonucleotide for detection of SNP TSC0026582
ccaacgtaaaaaa

SEQ ID NO: 106107 - DNA, 13 bp, Artificial Sequence
  Oligonucleotide for detection of SNP TSC0026584
tagaagattgtgt

SEQ ID NO: 106108 - DNA, 13 bp, Artificial Sequence
  Oligonucleotide for detection of SNP TSC0026584
acacaatcttcta

SEQ ID NO: 106109 - DNA, 13 bp, Artificial Sequence
  Oligonucleotide for detection of SNP TSC0026584
tagaagtttgtgt

SEQ ID NO: 106110 - DNA, 13 bp, Artificial Sequence
  Oligonucleotide for detection of SNP TSC0026584
acacaaacttcta

SEQ ID NO: 106111 - DNA, 13 bp, Artificial Sequence
  Oligonucleotide for detection of SNP TSC0026584
atatagtttttta

SEQ ID NO: 106112 - DNA, 13 bp, Artificial Sequence
  Oligonucleotide for detection of SNP TSC0026584
taaaaaactatat

SEQ ID NO: 106113 - DNA, 13 bp, Artificial Sequence
  Oligonucleotide for detection of SNP TSC0026584
atataggttttta

SEQ ID NO: 106114 - DNA, 13 bp, Artificial Sequence
  Oligonucleotide for detection of SNP TSC0026584
taaaaacctatat

SEQ ID NO: 106115 - DNA, 13 bp, Artificial Sequence
  Oligonucleotide for detection of SNP TSC0026585
atgggagtttggy

SEQ ID NO: 106116 - DNA, 13 bp, Artificial Sequence
  Oligonucleotide for detection of SNP TSC0026585
rccaaactcccat

SEQ ID NO: 106117 - DNA, 13 bp, Artificial Sequence
  Oligonucleotide for detection of SNP TSC0026585
atgggaatttggy

SEQ ID NO: 106118 - DNA, 13 bp, Artificial Sequence
  Oligonucleotide for detection of SNP TSC0026585
rccaaattcccat

SEQ ID NO: 106119 - DNA, 13 bp, Artificial Sequence
  Oligonucleotide for detection of SNP TSC0026586
ttggtagttaagt

SEQ ID NO: 106120 - DNA, 13 bp, Artificial Sequence
  Oligonucleotide for detection of SNP TSC0026586
acttaactaccaa

SEQ ID NO: 106121 - DNA, 13 bp, Artificial Sequence
  Oligonucleotide for detection of SNP TSC0026586
ttggtaattaagt

SEQ ID NO: 106122 - DNA, 13 bp, Artificial Sequence
  Oligonucleotide for detection of SNP TSC0026586
acttaattaccaa

SEQ ID NO: 106123 - DNA, 13 bp, Artificial Sequence
  Oligonucleotide for detection of SNP TSC0026587
agtttaagaaaaa

SEQ ID NO: 106124 - DNA, 13 bp, Artificial Sequence
  Oligonucleotide for detection of SNP TSC0026587
tttttcttaaact

SEQ ID NO: 106125 - DNA, 13 bp, Artificial Sequence
  Oligonucleotide for detection of SNP TSC0026587
agtttaggaaaaa

SEQ ID NO: 106126 - DNA, 13 bp, Artificial Sequence
  Oligonucleotide for detection of SNP TSC0026587
tttttcctaaact

SEQ ID NO: 106127 - DNA, 13 bp, Artificial Sequence
  Oligonucleotide for detection of SNP TSC0026588
tttttaggattta

SEQ ID NO: 106128 - DNA, 13 bp, Artificial Sequence
  Oligonucleotide for detection of SNP TSC0026588
taaatcctaaaaa

SEQ ID NO: 106129 - DNA, 13 bp, Artificial Sequence
  Oligonucleotide for detection of SNP TSC0026588
tttttaagattta

SEQ ID NO: 106130 - DNA, 13 bp, Artificial Sequence
  Oligonucleotide for detection of SNP TSC0026588
taaatcttaaaaa

SEQ ID NO: 106131 - DNA, 13 bp, Artificial Sequence
  Oligonucleotide for detection of SNP TSC0026589
tagtagtgaaatg

SEQ ID NO: 106132 - DNA, 13 bp, Artificial Sequence
  Oligonucleotide for detection of SNP TSC0026589
catttcactacta

SEQ ID NO: 106133 - DNA, 13 bp, Artificial Sequence
  Oligonucleotide for detection of SNP TSC0026589
tagtagcgaaatg

SEQ ID NO: 106134 - DNA, 13 bp, Artificial Sequence
  Oligonucleotide for detection of SNP TSC0026589
catttcgctacta

SEQ ID NO: 106135 - DNA, 13 bp, Artificial Sequence
  Oligonucleotide for detection of SNP TSC0026589
tattttgttattg

SEQ ID NO: 106136 - DNA, 13 bp, Artificial Sequence
  Oligonucleotide for detection of SNP TSC0026589
caataacaaaata

SEQ ID NO: 106137 - DNA, 13 bp, Artificial Sequence
  Oligonucleotide for detection of SNP TSC0026589
tattttattattg

SEQ ID NO: 106138 - DNA, 13 bp, Artificial Sequence
  Oligonucleotide for detection of SNP TSC0026589
caataataaaata

SEQ ID NO: 106139 - DNA, 13 bp, Artificial Sequence
  Oligonucleotide for detection of SNP TSC0026589
tatttcgttattg

SEQ ID NO: 106140 - DNA, 13 bp, Artificial Sequence
  Oligonucleotide for detection of SNP TSC0026589
caataacgaaata

SEQ ID NO: 106141 - DNA, 13 bp, Artificial Sequence
  Oligonucleotide for detection of SNP TSC0026591
gtgaagattagty

SEQ ID NO: 106142 - DNA, 13 bp, Artificial Sequence
  Oligonucleotide for detection of SNP TSC0026591
ractaatcttcac

SEQ ID NO: 106143 - DNA, 13 bp, Artificial Sequence
  Oligonucleotide for detection of SNP TSC0026591
gtgaagtttagty

SEQ ID NO: 106144 - DNA, 13 bp, Artificial Sequence
  Oligonucleotide for detection of SNP TSC0026591
ractaaacttcac

SEQ ID NO: 106145 - DNA, 13 bp, Artificial Sequence
  Oligonucleotide for detection of SNP TSC0026591
ggttggtttttay

SEQ ID NO: 106146 - DNA, 13 bp, Artificial Sequence
  Oligonucleotide for detection of SNP TSC0026591
rtaaaaaccaacc

SEQ ID NO: 106147 - DNA, 13 bp, Artificial Sequence
  Oligonucleotide for detection of SNP TSC0026591
ggttgggttttay

SEQ ID NO: 106148 - DNA, 13 bp, Artificial Sequence
  Oligonucleotide for detection of SNP TSC0026591
rtaaaacccaacc

SEQ ID NO: 106149 - DNA, 13 bp, Artificial Sequence
  Oligonucleotide for detection of SNP TSC0026596
ggtgatattagat

SEQ ID NO: 106150 - DNA, 13 bp, Artificial Sequence
  Oligonucleotide for detection of SNP TSC0026596
atctaatatcacc

SEQ ID NO: 106151 - DNA, 13 bp, Artificial Sequence
  Oligonucleotide for detection of SNP TSC0026596
ggtgatgttagat

SEQ ID NO: 106152 - DNA, 13 bp, Artificial Sequence
  Oligonucleotide for detection of SNP TSC0026596
atctaacatcacc

SEQ ID NO: 106153 - DNA, 13 bp, Artificial Sequence
  Oligonucleotide for detection of SNP TSC0026596
ggtgacgttagat

SEQ ID NO: 106154 - DNA, 13 bp, Artificial Sequence
  Oligonucleotide for detection of SNP TSC0026596
atctaacgtcacc

SEQ ID NO: 106155 - DNA, 13 bp, Artificial Sequence
  Oligonucleotide for detection of SNP TSC0026596
atttgatgttaty

SEQ ID NO: 106156 - DNA, 13 bp, Artificial Sequence
  Oligonucleotide for detection of SNP TSC0026596
rataacatcaaat

SEQ ID NO: 106157 - DNA, 13 bp, Artificial Sequence
  Oligonucleotide for detection of SNP TSC0026596
atttgacgttaty

SEQ ID NO: 106158 - DNA, 13 bp, Artificial Sequence
  Oligonucleotide for detection of SNP TSC0026596
rataacgtcaaat

SEQ ID NO: 106159 - DNA, 13 bp, Artificial Sequence
  Oligonucleotide for detection of SNP TSC0026599
gtttttgggaggy

SEQ ID NO: 106160 - DNA, 13 bp, Artificial Sequence
  Oligonucleotide for detection of SNP TSC0026599
rcctcccaaaaac

SEQ ID NO: 106161 - DNA, 13 bp, Artificial Sequence
  Oligonucleotide for detection of SNP TSC0026599
gttttcgggaggy

SEQ ID NO: 106162 - DNA, 13 bp, Artificial Sequence
  Oligonucleotide for detection of SNP TSC0026599
rcctcccgaaaac

SEQ ID NO: 106163 - DNA, 13 bp, Artificial Sequence
  Oligonucleotide for detection of SNP TSC0026599
gttttttgggggy

SEQ ID NO: 106164 - DNA, 13 bp, Artificial Sequence
  Oligonucleotide for detection of SNP TSC0026599
rcccccaaaaaac

SEQ ID NO: 106165 - DNA, 13 bp, Artificial Sequence
  Oligonucleotide for detection of SNP TSC0026599
gtttttcgggggy

SEQ ID NO: 106166 - DNA, 13 bp, Artificial Sequence
  Oligonucleotide for detection of SNP TSC0026599
rcccccgaaaaac

SEQ ID NO: 106167 - DNA, 13 bp, Artificial Sequence
  Oligonucleotide for detection of SNP TSC0026600
aaggaatgtagat

SEQ ID NO: 106168 - DNA, 13 bp, Artificial Sequence
  Oligonucleotide for detection of SNP TSC0026600
atctacattcctt

SEQ ID NO: 106169 - DNA, 13 bp, Artificial Sequence
  Oligonucleotide for detection of SNP TSC0026600
aaggaacgtagat

SEQ ID NO: 106170 - DNA, 13 bp, Artificial Sequence
  Oligonucleotide for detection of SNP TSC0026600
atctacgttcctt

SEQ ID NO: 106171 - DNA, 13 bp, Artificial Sequence
  Oligonucleotide for detection of SNP TSC0026601
aatagaatttaaa

SEQ ID NO: 106172 - DNA, 13 bp, Artificial Sequence
  Oligonucleotide for detection of SNP TSC0026601
tttaaattctatt

SEQ ID NO: 106173 - DNA, 13 bp, Artificial Sequence
  Oligonucleotide for detection of SNP TSC0026601
aatagagtttaaa

SEQ ID NO: 106174 - DNA, 13 bp, Artificial Sequence
  Oligonucleotide for detection of SNP TSC0026601
tttaaactctatt

SEQ ID NO: 106175 - DNA, 13 bp, Artificial Sequence
  Oligonucleotide for detection of SNP TSC0026602
tagtggttttaty

SEQ ID NO: 106176 - DNA, 13 bp, Artificial Sequence
  Oligonucleotide for detection of SNP TSC0026602
rataaaaccacta

SEQ ID NO: 106177 - DNA, 13 bp, Artificial Sequence
  Oligonucleotide for detection of SNP TSC0026602
tagtgggtttaty

SEQ ID NO: 106178 - DNA, 13 bp, Artificial Sequence
  Oligonucleotide for detection of SNP TSC0026602
rataaacccacta

SEQ ID NO: 106179 - DNA, 13 bp, Artificial Sequence
  Oligonucleotide for detection of SNP TSC0026602
ggtggggttattg

SEQ ID NO: 106180 - DNA, 13 bp, Artificial Sequence
  Oligonucleotide for detection of SNP TSC0026602
caataaccccacc

SEQ ID NO: 106181 - DNA, 13 bp, Artificial Sequence
  Oligonucleotide for detection of SNP TSC0026602
ggtgggtttattg

SEQ ID NO: 106182 - DNA, 13 bp, Artificial Sequence
  Oligonucleotide for detection of SNP TSC0026602
caataaacccacc

SEQ ID NO: 106183 - DNA, 13 bp, Artificial Sequence
  Oligonucleotide for detection of SNP TSC0026607
taagaaagtgaag

SEQ ID NO: 106184 - DNA, 13 bp, Artificial Sequence
  Oligonucleotide for detection of SNP TSC0026607
cttcactttctta

SEQ ID NO: 106185 - DNA, 13 bp, Artificial Sequence
  Oligonucleotide for detection of SNP TSC0026607
taagaaggtgaag

SEQ ID NO: 106186 - DNA, 13 bp, Artificial Sequence
  Oligonucleotide for detection of SNP TSC0026607
cttcaccttctta

SEQ ID NO: 106187 - DNA, 13 bp, Artificial Sequence
  Oligonucleotide for detection of SNP TSC0026608
gtgtttgtttgty

SEQ ID NO: 106188 - DNA, 13 bp, Artificial Sequence
  Oligonucleotide for detection of SNP TSC0026608
racaaacaaacac

SEQ ID NO: 106189 - DNA, 13 bp, Artificial Sequence
  Oligonucleotide for detection of SNP TSC0026608
gtgtttatttgty

SEQ ID NO: 106190 - DNA, 13 bp, Artificial Sequence
  Oligonucleotide for detection of SNP TSC0026608
racaaataaacac

SEQ ID NO: 106191 - DNA, 13 bp, Artificial Sequence
  Oligonucleotide for detection of SNP TSC0026612
tgttttgttgatt

SEQ ID NO: 106192 - DNA, 13 bp, Artificial Sequence
  Oligonucleotide for detection of SNP TSC0026612
aatcaacaaaaca

SEQ ID NO: 106193 - DNA, 13 bp, Artificial Sequence
  Oligonucleotide for detection of SNP TSC0026615
gtgataaatatay

SEQ ID NO: 106194 - DNA, 13 bp, Artificial Sequence
  Oligonucleotide for detection of SNP TSC0026615
rtatatttatcac

SEQ ID NO: 106195 - DNA, 13 bp, Artificial Sequence
  Oligonucleotide for detection of SNP TSC0026615
gtgatatatatay

SEQ ID NO: 106196 - DNA, 13 bp, Artificial Sequence
  Oligonucleotide for detection of SNP TSC0026615
rtatatatatcac

SEQ ID NO: 106197 - DNA, 13 bp, Artificial Sequence
  Oligonucleotide for detection of SNP TSC0026615
gtgtgtttgttay

SEQ ID NO: 106198 - DNA, 13 bp, Artificial Sequence
  Oligonucleotide for detection of SNP TSC0026615
rtaacaaacacac

SEQ ID NO: 106199 - DNA, 13 bp, Artificial Sequence
  Oligonucleotide for detection of SNP TSC0026615
gtgtgtgtgttay

SEQ ID NO: 106200 - DNA, 13 bp, Artificial Sequence
  Oligonucleotide for detection of SNP TSC0026615
rtaacacacacac

SEQ ID NO: 106201 - DNA, 13 bp, Artificial Sequence
  Oligonucleotide for detection of SNP TSC0026618
tattttggtggta

SEQ ID NO: 106202 - DNA, 13 bp, Artificial Sequence
  Oligonucleotide for detection of SNP TSC0026618
taccaccaaaata

SEQ ID NO: 106203 - DNA, 13 bp, Artificial Sequence
  Oligonucleotide for detection of SNP TSC0026618
tattttagtggta

SEQ ID NO: 106204 - DNA, 13 bp, Artificial Sequence
  Oligonucleotide for detection of SNP TSC0026618
taccactaaaata

SEQ ID NO: 106205 - DNA, 13 bp, Artificial Sequence
  Oligonucleotide for detection of SNP TSC0026619
tattattgttagy

SEQ ID NO: 106206 - DNA, 13 bp, Artificial Sequence
  Oligonucleotide for detection of SNP TSC0026619
rctaacaataata

SEQ ID NO: 106207 - DNA, 13 bp, Artificial Sequence
  Oligonucleotide for detection of SNP TSC0026619
tattatcgttagy

SEQ ID NO: 106208 - DNA, 13 bp, Artificial Sequence
  Oligonucleotide for detection of SNP TSC0026619
rctaacgataata

SEQ ID NO: 106209 - DNA, 13 bp, Artificial Sequence
  Oligonucleotide for detection of SNP TSC0026619
gttgatggtggtg

SEQ ID NO: 106210 - DNA, 13 bp, Artificial Sequence
  Oligonucleotide for detection of SNP TSC0026619
caccaccatcaac

SEQ ID NO: 106211 - DNA, 13 bp, Artificial Sequence
  Oligonucleotide for detection of SNP TSC0026619
gttgatagtggtg

SEQ ID NO: 106212 - DNA, 13 bp, Artificial Sequence
  Oligonucleotide for detection of SNP TSC0026619
caccactatcaac

SEQ ID NO: 106213 - DNA, 13 bp, Artificial Sequence
  Oligonucleotide for detection of SNP TSC0026619
gttgacggtggtg

SEQ ID NO: 106214 - DNA, 13 bp, Artificial Sequence
  Oligonucleotide for detection of SNP TSC0026619
caccaccgtcaac

SEQ ID NO: 106215 - DNA, 13 bp, Artificial Sequence
  Oligonucleotide for detection of SNP TSC0026620
ggtttttttaatt

SEQ ID NO: 106216 - DNA, 13 bp, Artificial Sequence
  Oligonucleotide for detection of SNP TSC0026620
aattaaaaaaacc

SEQ ID NO: 106217 - DNA, 13 bp, Artificial Sequence
  Oligonucleotide for detection of SNP TSC0026620
ggttttgttaatt

SEQ ID NO: 106218 - DNA, 13 bp, Artificial Sequence
  Oligonucleotide for detection of SNP TSC0026620
aattaacaaaacc

SEQ ID NO: 106219 - DNA, 13 bp, Artificial Sequence
  Oligonucleotide for detection of SNP TSC0026620
ggtttcgttaatt

SEQ ID NO: 106220 - DNA, 13 bp, Artificial Sequence
  Oligonucleotide for detection of SNP TSC0026620
aattaacgaaacc

SEQ ID NO: 106221 - DNA, 13 bp, Artificial Sequence
  Oligonucleotide for detection of SNP TSC0026620
aattgagggggty

SEQ ID NO: 106222 - DNA, 13 bp, Artificial Sequence
  Oligonucleotide for detection of SNP TSC0026620
raccccctcaatt

SEQ ID NO: 106223 - DNA, 13 bp, Artificial Sequence
  Oligonucleotide for detection of SNP TSC0026620
aattgatggggty

SEQ ID NO: 106224 - DNA, 13 bp, Artificial Sequence
  Oligonucleotide for detection of SNP TSC0026620
raccccatcaatt

SEQ ID NO: 106225 - DNA, 13 bp, Artificial Sequence
  Oligonucleotide for detection of SNP TSC0026620
aattgacggggty

SEQ ID NO: 106226 - DNA, 13 bp, Artificial Sequence
  Oligonucleotide for detection of SNP TSC0026620
raccccgtcaatt

SEQ ID NO: 106227 - DNA, 13 bp, Artificial Sequence
  Oligonucleotide for detection of SNP TSC0026624
tattgtgttaaaa

SEQ ID NO: 106228 - DNA, 13 bp, Artificial Sequence
  Oligonucleotide for detection of SNP TSC0026624
ttttaacacaata

SEQ ID NO: 106229 - DNA, 13 bp, Artificial Sequence
  Oligonucleotide for detection of SNP TSC0026624
tattgttttaaaa

SEQ ID NO: 106230 - DNA, 13 bp, Artificial Sequence
  Oligonucleotide for detection of SNP TSC0026624
ttttaaaacaata

SEQ ID NO: 106231 - DNA, 13 bp, Artificial Sequence
  Oligonucleotide for detection of SNP TSC0026624
tatcgtgttaaaa

SEQ ID NO: 106232 - DNA, 13 bp, Artificial Sequence
  Oligonucleotide for detection of SNP TSC0026624
ttttaacacgata

SEQ ID NO: 106233 - DNA, 13 bp, Artificial Sequence
  Oligonucleotide for detection of SNP TSC0026624
tatcgttttaaaa

SEQ ID NO: 106234 - DNA, 13 bp, Artificial Sequence
  Oligonucleotide for detection of SNP TSC0026624
ttttaaaacgata

SEQ ID NO: 106235 - DNA, 13 bp, Artificial Sequence
  Oligonucleotide for detection of SNP TSC0026624
ttttgatatggta

SEQ ID NO: 106236 - DNA, 13 bp, Artificial Sequence
  Oligonucleotide for detection of SNP TSC0026624
taccatatcaaaa

SEQ ID NO: 106237 - DNA, 13 bp, Artificial Sequence
  Oligonucleotide for detection of SNP TSC0026624
ttttgaaatggta

SEQ ID NO: 106238 - DNA, 13 bp, Artificial Sequence
  Oligonucleotide for detection of SNP TSC0026624
taccatttcaaaa

SEQ ID NO: 106239 - DNA, 13 bp, Artificial Sequence
  Oligonucleotide for detection of SNP TSC0026624
ttttgatacggta

SEQ ID NO: 106240 - DNA, 13 bp, Artificial Sequence
  Oligonucleotide for detection of SNP TSC0026624
taccgtatcaaaa

SEQ ID NO: 106241 - DNA, 13 bp, Artificial Sequence
  Oligonucleotide for detection of SNP TSC0026624
ttttgaaacggta

SEQ ID NO: 106242 - DNA, 13 bp, Artificial Sequence
  Oligonucleotide for detection of SNP TSC0026624
taccgtttcaaaa

SEQ ID NO: 106243 - DNA, 13 bp, Artificial Sequence
  Oligonucleotide for detection of SNP TSC0026627
tggagaataataa

SEQ ID NO: 106244 - DNA, 13 bp, Artificial Sequence
  Oligonucleotide for detection of SNP TSC0026627
ttattattctcca

SEQ ID NO: 106245 - DNA, 13 bp, Artificial Sequence
  Oligonucleotide for detection of SNP TSC0026627
tggagagtaataa

SEQ ID NO: 106246 - DNA, 13 bp, Artificial Sequence
  Oligonucleotide for detection of SNP TSC0026627
ttattactctcca

SEQ ID NO: 106247 - DNA, 13 bp, Artificial Sequence
  Oligonucleotide for detection of SNP TSC0026628
attattgaattgt

SEQ ID NO: 106248 - DNA, 13 bp, Artificial Sequence
  Oligonucleotide for detection of SNP TSC0026628
acaattcaataat

SEQ ID NO: 106249 - DNA, 13 bp, Artificial Sequence
  Oligonucleotide for detection of SNP TSC0026628
attattaaattgt

SEQ ID NO: 106250 - DNA, 13 bp, Artificial Sequence
  Oligonucleotide for detection of SNP TSC0026628
acaatttaataat

SEQ ID NO: 106251 - DNA, 13 bp, Artificial Sequence
  Oligonucleotide for detection of SNP TSC0026629
ttatgaatatttg

SEQ ID NO: 106252 - DNA, 13 bp, Artificial Sequence
  Oligonucleotide for detection of SNP TSC0026629
caaatattcataa

SEQ ID NO: 106253 - DNA, 13 bp, Artificial Sequence
  Oligonucleotide for detection of SNP TSC0026629
ttatgagtatttg

SEQ ID NO: 106254 - DNA, 13 bp, Artificial Sequence
  Oligonucleotide for detection of SNP TSC0026629
caaatactcataa

SEQ ID NO: 106255 - DNA, 13 bp, Artificial Sequence
  Oligonucleotide for detection of SNP TSC0026630
tttatgtgaatta

SEQ ID NO: 106256 - DNA, 13 bp, Artificial Sequence
  Oligonucleotide for detection of SNP TSC0026630
taattcacataaa

SEQ ID NO: 106257 - DNA, 13 bp, Artificial Sequence
  Oligonucleotide for detection of SNP TSC0026630
tttatgcgaatta

SEQ ID NO: 106258 - DNA, 13 bp, Artificial Sequence
  Oligonucleotide for detection of SNP TSC0026630
taattcgcataaa

SEQ ID NO: 106259 - DNA, 13 bp, Artificial Sequence
  Oligonucleotide for detection of SNP TSC0026630
taatttgtataga

SEQ ID NO: 106260 - DNA, 13 bp, Artificial Sequence
  Oligonucleotide for detection of SNP TSC0026630
tctatacaaatta

SEQ ID NO: 106261 - DNA, 13 bp, Artificial Sequence
  Oligonucleotide for detection of SNP TSC0026630
taatttatataga

SEQ ID NO: 106262 - DNA, 13 bp, Artificial Sequence
  Oligonucleotide for detection of SNP TSC0026630
tctatataaatta

SEQ ID NO: 106263 - DNA, 13 bp, Artificial Sequence
  Oligonucleotide for detection of SNP TSC0026630
taattcgtataga

SEQ ID NO: 106264 - DNA, 13 bp, Artificial Sequence
  Oligonucleotide for detection of SNP TSC0026630
tctatacgaatta

SEQ ID NO: 106265 - DNA, 13 bp, Artificial Sequence
  Oligonucleotide for detection of SNP TSC0026632
tgtttttggagat

SEQ ID NO: 106266 - DNA, 13 bp, Artificial Sequence
  Oligonucleotide for detection of SNP TSC0026632
atctccaaaaaca

SEQ ID NO: 106267 - DNA, 13 bp, Artificial Sequence
  Oligonucleotide for detection of SNP TSC0026632
cgtttttggagat

SEQ ID NO: 106268 - DNA, 13 bp, Artificial Sequence
  Oligonucleotide for detection of SNP TSC0026632
atctccaaaaacg

SEQ ID NO: 106269 - DNA, 13 bp, Artificial Sequence
  Oligonucleotide for detection of SNP TSC0026632
tgttttcggagat

SEQ ID NO: 106270 - DNA, 13 bp, Artificial Sequence
  Oligonucleotide for detection of SNP TSC0026632
atctccgaaaaca

SEQ ID NO: 106271 - DNA, 13 bp, Artificial Sequence
  Oligonucleotide for detection of SNP TSC0026632
cgttttcggagat

SEQ ID NO: 106272 - DNA, 13 bp, Artificial Sequence
  Oligonucleotide for detection of SNP TSC0026632
atctccgaaaacg

SEQ ID NO: 106273 - DNA, 13 bp, Artificial Sequence
  Oligonucleotide for detection of SNP TSC0026632
atttttgggggtg

SEQ ID NO: 106274 - DNA, 13 bp, Artificial Sequence
  Oligonucleotide for detection of SNP TSC0026632
cacccccaaaaat

SEQ ID NO: 106275 - DNA, 13 bp, Artificial Sequence
  Oligonucleotide for detection of SNP TSC0026632
atttttaggggtg

SEQ ID NO: 106276 - DNA, 13 bp, Artificial Sequence
  Oligonucleotide for detection of SNP TSC0026632
cacccctaaaaat

SEQ ID NO: 106277 - DNA, 13 bp, Artificial Sequence
  Oligonucleotide for detection of SNP TSC0026632
attttcgggggtg

SEQ ID NO: 106278 - DNA, 13 bp, Artificial Sequence
  Oligonucleotide for detection of SNP TSC0026632
cacccccgaaaat

SEQ ID NO: 106279 - DNA, 13 bp, Artificial Sequence
  Oligonucleotide for detection of SNP TSC0026632
atttttaggggcg

SEQ ID NO: 106280 - DNA, 13 bp, Artificial Sequence
  Oligonucleotide for detection of SNP TSC0026632
cgcccctaaaaat

SEQ ID NO: 106281 - DNA, 13 bp, Artificial Sequence
  Oligonucleotide for detection of SNP TSC0026632
atttttgggggcg

SEQ ID NO: 106282 - DNA, 13 bp, Artificial Sequence
  Oligonucleotide for detection of SNP TSC0026632
cgcccccaaaaat

SEQ ID NO: 106283 - DNA, 13 bp, Artificial Sequence
  Oligonucleotide for detection of SNP TSC0026632
attttcgggggcg

SEQ ID NO: 106284 - DNA, 13 bp, Artificial Sequence
  Oligonucleotide for detection of SNP TSC0026632
cgcccccgaaaat

SEQ ID NO: 106285 - DNA, 13 bp, Artificial Sequence
  Oligonucleotide for detection of SNP TSC0026635
gaaattgaatgty

SEQ ID NO: 106286 - DNA, 13 bp, Artificial Sequence
  Oligonucleotide for detection of SNP TSC0026635
racattcaatttc

SEQ ID NO: 106287 - DNA, 13 bp, Artificial Sequence
  Oligonucleotide for detection of SNP TSC0026635
gaaattaaatgty

SEQ ID NO: 106288 - DNA, 13 bp, Artificial Sequence
  Oligonucleotide for detection of SNP TSC0026635
racatttaatttc

SEQ ID NO: 106289 - DNA, 13 bp, Artificial Sequence
  Oligonucleotide for detection of SNP TSC0026640
ttagtaagaggtt

SEQ ID NO: 106290 - DNA, 13 bp, Artificial Sequence
  Oligonucleotide for detection of SNP TSC0026640
aacctcttactaa

SEQ ID NO: 106291 - DNA, 13 bp, Artificial Sequence
  Oligonucleotide for detection of SNP TSC0026640
ttagtatgaggtt

SEQ ID NO: 106292 - DNA, 13 bp, Artificial Sequence
  Oligonucleotide for detection of SNP TSC0026640
aacctcatactaa

SEQ ID NO: 106293 - DNA, 13 bp, Artificial Sequence
  Oligonucleotide for detection of SNP TSC0026640
ttagtacgaggtt

SEQ ID NO: 106294 - DNA, 13 bp, Artificial Sequence
  Oligonucleotide for detection of SNP TSC0026640
aacctcgtactaa

SEQ ID NO: 106295 - DNA, 13 bp, Artificial Sequence
  Oligonucleotide for detection of SNP TSC0026640
agttttttgttgg

SEQ ID NO: 106296 - DNA, 13 bp, Artificial Sequence
  Oligonucleotide for detection of SNP TSC0026640
ccaacaaaaaact

SEQ ID NO: 106297 - DNA, 13 bp, Artificial Sequence
  Oligonucleotide for detection of SNP TSC0026640
agttttgtgttgg

SEQ ID NO: 106298 - DNA, 13 bp, Artificial Sequence
  Oligonucleotide for detection of SNP TSC0026640
ccaacacaaaact

SEQ ID NO: 106299 - DNA, 13 bp, Artificial Sequence
  Oligonucleotide for detection of SNP TSC0026640
agtttcgtgttgg

SEQ ID NO: 106300 - DNA, 13 bp, Artificial Sequence
  Oligonucleotide for detection of SNP TSC0026640
ccaacacgaaact

SEQ ID NO: 106301 - DNA, 13 bp, Artificial Sequence
  Oligonucleotide for detection of SNP TSC0026643
attgggtgtttty

SEQ ID NO: 106302 - DNA, 13 bp, Artificial Sequence
  Oligonucleotide for detection of SNP TSC0026643
raaaacacccaat

SEQ ID NO: 106303 - DNA, 13 bp, Artificial Sequence
  Oligonucleotide for detection of SNP TSC0026643
attgggcgtttty

SEQ ID NO: 106304 - DNA, 13 bp, Artificial Sequence
  Oligonucleotide for detection of SNP TSC0026643
raaaacgcccaat

SEQ ID NO: 106305 - DNA, 13 bp, Artificial Sequence
  Oligonucleotide for detection of SNP TSC0026643
gggagtgtttagt

SEQ ID NO: 106306 - DNA, 13 bp, Artificial Sequence
  Oligonucleotide for detection of SNP TSC0026643
actaaacactccc

SEQ ID NO: 106307 - DNA, 13 bp, Artificial Sequence
  Oligonucleotide for detection of SNP TSC0026643
gggagtatttagt

SEQ ID NO: 106308 - DNA, 13 bp, Artificial Sequence
  Oligonucleotide for detection of SNP TSC0026643
actaaatactccc

SEQ ID NO: 106309 - DNA, 13 bp, Artificial Sequence
  Oligonucleotide for detection of SNP TSC0026643
gggagcgtttagt

SEQ ID NO: 106310 - DNA, 13 bp, Artificial Sequence
  Oligonucleotide for detection of SNP TSC0026643
actaaacgctccc

SEQ ID NO: 106311 - DNA, 13 bp, Artificial Sequence
  Oligonucleotide for detection of SNP TSC0026644
tgaagggggagty

SEQ ID NO: 106312 - DNA, 13 bp, Artificial Sequence
  Oligonucleotide for detection of SNP TSC0026644
ractcccccttca

SEQ ID NO: 106313 - DNA, 13 bp, Artificial Sequence
  Oligonucleotide for detection of SNP TSC0026644
tgaaggaggagty

SEQ ID NO: 106314 - DNA, 13 bp, Artificial Sequence
  Oligonucleotide for detection of SNP TSC0026644
ractcctccttca

SEQ ID NO: 106315 - DNA, 13 bp, Artificial Sequence
  Oligonucleotide for detection of SNP TSC0026646
tggttaggtgggg

SEQ ID NO: 106316 - DNA, 13 bp, Artificial Sequence
  Oligonucleotide for detection of SNP TSC0026646
ccccacctaacca

SEQ ID NO: 106317 - DNA, 13 bp, Artificial Sequence
  Oligonucleotide for detection of SNP TSC0026646
tggttatgtgggg

SEQ ID NO: 106318 - DNA, 13 bp, Artificial Sequence
  Oligonucleotide for detection of SNP TSC0026646
ccccacataacca

SEQ ID NO: 106319 - DNA, 13 bp, Artificial Sequence
  Oligonucleotide for detection of SNP TSC0026646
ttttatttggtta

SEQ ID NO: 106320 - DNA, 13 bp, Artificial Sequence
  Oligonucleotide for detection of SNP TSC0026646
taaccaaataaaa

SEQ ID NO: 106321 - DNA, 13 bp, Artificial Sequence
  Oligonucleotide for detection of SNP TSC0026646
ttttatatggtta

SEQ ID NO: 106322 - DNA, 13 bp, Artificial Sequence
  Oligonucleotide for detection of SNP TSC0026646
taaccatataaaa

SEQ ID NO: 106323 - DNA, 13 bp, Artificial Sequence
  Oligonucleotide for detection of SNP TSC0026647
gatgtatatttgg

SEQ ID NO: 106324 - DNA, 13 bp, Artificial Sequence
  Oligonucleotide for detection of SNP TSC0026647
ccaaatatacatc

SEQ ID NO: 106325 - DNA, 13 bp, Artificial Sequence
  Oligonucleotide for detection of SNP TSC0026647
gatgtagatttgg

SEQ ID NO: 106326 - DNA, 13 bp, Artificial Sequence
  Oligonucleotide for detection of SNP TSC0026647
ccaaatctacatc

SEQ ID NO: 106327 - DNA, 13 bp, Artificial Sequence
  Oligonucleotide for detection of SNP TSC0026647
ttagatgtataty

SEQ ID NO: 106328 - DNA, 13 bp, Artificial Sequence
  Oligonucleotide for detection of SNP TSC0026647
ratatacatctaa

SEQ ID NO: 106329 - DNA, 13 bp, Artificial Sequence
  Oligonucleotide for detection of SNP TSC0026647
ttagatttataty

SEQ ID NO: 106330 - DNA, 13 bp, Artificial Sequence
  Oligonucleotide for detection of SNP TSC0026647
ratataaatctaa

SEQ ID NO: 106331 - DNA, 13 bp, Artificial Sequence
  Oligonucleotide for detection of SNP TSC0026649
gtttttggaatty

SEQ ID NO: 106332 - DNA, 13 bp, Artificial Sequence
  Oligonucleotide for detection of SNP TSC0026649
raattccaaaaac

SEQ ID NO: 106333 - DNA, 13 bp, Artificial Sequence
  Oligonucleotide for detection of SNP TSC0026649
gttttttgaatty

SEQ ID NO: 106334 - DNA, 13 bp, Artificial Sequence
  Oligonucleotide for detection of SNP TSC0026649
raattcaaaaaac

SEQ ID NO: 106335 - DNA, 13 bp, Artificial Sequence
  Oligonucleotide for detection of SNP TSC0026649
gaattttaggggy

SEQ ID NO: 106336 - DNA, 13 bp, Artificial Sequence
  Oligonucleotide for detection of SNP TSC0026649
rcccctaaaattc

SEQ ID NO: 106337 - DNA, 13 bp, Artificial Sequence
  Oligonucleotide for detection of SNP TSC0026649
gaatttaaggggy

SEQ ID NO: 106338 - DNA, 13 bp, Artificial Sequence
  Oligonucleotide for detection of SNP TSC0026649
rccccttaaattc

SEQ ID NO: 106339 - DNA, 13 bp, Artificial Sequence
  Oligonucleotide for detection of SNP TSC0026652
gttaattttttgg

SEQ ID NO: 106340 - DNA, 13 bp, Artificial Sequence
  Oligonucleotide for detection of SNP TSC0026652
ccaaaaaattaac

SEQ ID NO: 106341 - DNA, 13 bp, Artificial Sequence
  Oligonucleotide for detection of SNP TSC0026652
gttaatgttttgg

SEQ ID NO: 106342 - DNA, 13 bp, Artificial Sequence
  Oligonucleotide for detection of SNP TSC0026652
ccaaaacattaac

SEQ ID NO: 106343 - DNA, 13 bp, Artificial Sequence
  Oligonucleotide for detection of SNP TSC0026652
gttaacgttttgg

SEQ ID NO: 106344 - DNA, 13 bp, Artificial Sequence
  Oligonucleotide for detection of SNP TSC0026652
ccaaaacgttaac

SEQ ID NO: 106345 - DNA, 13 bp, Artificial Sequence
  Oligonucleotide for detection of SNP TSC0026652
ttagagggttagy

SEQ ID NO: 106346 - DNA, 13 bp, Artificial Sequence
  Oligonucleotide for detection of SNP TSC0026652
rctaaccctctaa

SEQ ID NO: 106347 - DNA, 13 bp, Artificial Sequence
  Oligonucleotide for detection of SNP TSC0026652
ttagagtgttagy

SEQ ID NO: 106348 - DNA, 13 bp, Artificial Sequence
  Oligonucleotide for detection of SNP TSC0026652
rctaacactctaa

SEQ ID NO: 106349 - DNA, 13 bp, Artificial Sequence
  Oligonucleotide for detection of SNP TSC0026652
ttagagcgttagy

SEQ ID NO: 106350 - DNA, 13 bp, Artificial Sequence
  Oligonucleotide for detection of SNP TSC0026652
rctaacgctctaa

SEQ ID NO: 106351 - DNA, 13 bp, Artificial Sequence
  Oligonucleotide for detection of SNP TSC0026653
tgtattgtaatay

SEQ ID NO: 106352 - DNA, 13 bp, Artificial Sequence
  Oligonucleotide for detection of SNP TSC0026653
rtattacaataca

SEQ ID NO: 106353 - DNA, 13 bp, Artificial Sequence
  Oligonucleotide for detection of SNP TSC0026653
tgtattttaatay

SEQ ID NO: 106354 - DNA, 13 bp, Artificial Sequence
  Oligonucleotide for detection of SNP TSC0026653
rtattaaaataca

SEQ ID NO: 106355 - DNA, 13 bp, Artificial Sequence
  Oligonucleotide for detection of SNP TSC0026653
gtgttataatgta

SEQ ID NO: 106356 - DNA, 13 bp, Artificial Sequence
  Oligonucleotide for detection of SNP TSC0026653
tacattataacac

SEQ ID NO: 106357 - DNA, 13 bp, Artificial Sequence
  Oligonucleotide for detection of SNP TSC0026653
gtgttaaaatgta

SEQ ID NO: 106358 - DNA, 13 bp, Artificial Sequence
  Oligonucleotide for detection of SNP TSC0026653
tacattttaacac

SEQ ID NO: 106359 - DNA, 13 bp, Artificial Sequence
  Oligonucleotide for detection of SNP TSC0026654
gttttaatttgay

SEQ ID NO: 106360 - DNA, 13 bp, Artificial Sequence
  Oligonucleotide for detection of SNP TSC0026654
rtcaaattaaaac

SEQ ID NO: 106361 - DNA, 13 bp, Artificial Sequence
  Oligonucleotide for detection of SNP TSC0026654
gttttattttgay

SEQ ID NO: 106362 - DNA, 13 bp, Artificial Sequence
  Oligonucleotide for detection of SNP TSC0026654
rtcaaaataaaac

SEQ ID NO: 106363 - DNA, 13 bp, Artificial Sequence
  Oligonucleotide for detection of SNP TSC0026654
gttaggttgaggy

SEQ ID NO: 106364 - DNA, 13 bp, Artificial Sequence
  Oligonucleotide for detection of SNP TSC0026654
rcctcaacctaac

SEQ ID NO: 106365 - DNA, 13 bp, Artificial Sequence
  Oligonucleotide for detection of SNP TSC0026654
gttagggtgaggy

SEQ ID NO: 106366 - DNA, 13 bp, Artificial Sequence
  Oligonucleotide for detection of SNP TSC0026654
rcctcaccctaac

SEQ ID NO: 106367 - DNA, 13 bp, Artificial Sequence
  Oligonucleotide for detection of SNP TSC0026656
attttagtgatgy

SEQ ID NO: 106368 - DNA, 13 bp, Artificial Sequence
  Oligonucleotide for detection of SNP TSC0026656
rcatcactaaaat

SEQ ID NO: 106369 - DNA, 13 bp, Artificial Sequence
  Oligonucleotide for detection of SNP TSC0026656
attttaatgatgy

SEQ ID NO: 106370 - DNA, 13 bp, Artificial Sequence
  Oligonucleotide for detection of SNP TSC0026656
rcatcattaaaat

SEQ ID NO: 106371 - DNA, 13 bp, Artificial Sequence
  Oligonucleotide for detection of SNP TSC0026658
aaaataatgatty

SEQ ID NO: 106372 - DNA, 13 bp, Artificial Sequence
  Oligonucleotide for detection of SNP TSC0026658
raatcattatttt

SEQ ID NO: 106373 - DNA, 13 bp, Artificial Sequence
  Oligonucleotide for detection of SNP TSC0026658
aaaatagtgatty

SEQ ID NO: 106374 - DNA, 13 bp, Artificial Sequence
  Oligonucleotide for detection of SNP TSC0026658
raatcactatttt

SEQ ID NO: 106375 - DNA, 13 bp, Artificial Sequence
  Oligonucleotide for detection of SNP TSC0026660
agagagggagaga

SEQ ID NO: 106376 - DNA, 13 bp, Artificial Sequence
  Oligonucleotide for detection of SNP TSC0026660
tctctccctctct

SEQ ID NO: 106377 - DNA, 13 bp, Artificial Sequence
  Oligonucleotide for detection of SNP TSC0026660
agagagagagaga

SEQ ID NO: 106378 - DNA, 13 bp, Artificial Sequence
  Oligonucleotide for detection of SNP TSC0026660
tctctctctctct

SEQ ID NO: 106379 - DNA, 13 bp, Artificial Sequence
  Oligonucleotide for detection of SNP TSC0026666
gggtgtattttty

SEQ ID NO: 106380 - DNA, 13 bp, Artificial Sequence
  Oligonucleotide for detection of SNP TSC0026666
raaaaatacaccc

SEQ ID NO: 106381 - DNA, 13 bp, Artificial Sequence
  Oligonucleotide for detection of SNP TSC0026666
gggtgtgttttty

SEQ ID NO: 106382 - DNA, 13 bp, Artificial Sequence
  Oligonucleotide for detection of SNP TSC0026666
raaaaacacaccc

SEQ ID NO: 106383 - DNA, 13 bp, Artificial Sequence
  Oligonucleotide for detection of SNP TSC0026666
gggtgcgttttty

SEQ ID NO: 106384 - DNA, 13 bp, Artificial Sequence
  Oligonucleotide for detection of SNP TSC0026666
raaaaacgcaccc

SEQ ID NO: 106385 - DNA, 13 bp, Artificial Sequence
  Oligonucleotide for detection of SNP TSC0026666
gaagaatgtatty

SEQ ID NO: 106386 - DNA, 13 bp, Artificial Sequence
  Oligonucleotide for detection of SNP TSC0026666
raatacattcttc

SEQ ID NO: 106387 - DNA, 13 bp, Artificial Sequence
  Oligonucleotide for detection of SNP TSC0026666
gaagaacgtatty

SEQ ID NO: 106388 - DNA, 13 bp, Artificial Sequence
  Oligonucleotide for detection of SNP TSC0026666
raatacgttcttc

SEQ ID NO: 106389 - DNA, 13 bp, Artificial Sequence
  Oligonucleotide for detection of SNP TSC0026668
tgtgggagtggga

SEQ ID NO: 106390 - DNA, 13 bp, Artificial Sequence
  Oligonucleotide for detection of SNP TSC0026668
tcccactcccaca

SEQ ID NO: 106391 - DNA, 13 bp, Artificial Sequence
  Oligonucleotide for detection of SNP TSC0026668
tgtgggggtggga

SEQ ID NO: 106392 - DNA, 13 bp, Artificial Sequence
  Oligonucleotide for detection of SNP TSC0026668
tcccacccccaca

SEQ ID NO: 106393 - DNA, 13 bp, Artificial Sequence
  Oligonucleotide for detection of SNP TSC0026669
tagttaggtttgg

SEQ ID NO: 106394 - DNA, 13 bp, Artificial Sequence
  Oligonucleotide for detection of SNP TSC0026669
ccaaacctaacta

SEQ ID NO: 106395 - DNA, 13 bp, Artificial Sequence
  Oligonucleotide for detection of SNP TSC0026669
tagttaagtttgg

SEQ ID NO: 106396 - DNA, 13 bp, Artificial Sequence
  Oligonucleotide for detection of SNP TSC0026669
ccaaacttaacta

SEQ ID NO: 106397 - DNA, 13 bp, Artificial Sequence
  Oligonucleotide for detection of SNP TSC0026670
tatttaaaagaat

SEQ ID NO: 106398 - DNA, 13 bp, Artificial Sequence
  Oligonucleotide for detection of SNP TSC0026670
attcttttaaata

SEQ ID NO: 106399 - DNA, 13 bp, Artificial Sequence
  Oligonucleotide for detection of SNP TSC0026670
tatttagaagaat

SEQ ID NO: 106400 - DNA, 13 bp, Artificial Sequence
  Oligonucleotide for detection of SNP TSC0026670
attcttctaaata

SEQ ID NO: 106401 - DNA, 13 bp, Artificial Sequence
  Oligonucleotide for detection of SNP TSC0026672
aatattgtattat

SEQ ID NO: 106402 - DNA, 13 bp, Artificial Sequence
  Oligonucleotide for detection of SNP TSC0026672
ataatacaatatt

SEQ ID NO: 106403 - DNA, 13 bp, Artificial Sequence
  Oligonucleotide for detection of SNP TSC0026672
aatattatattat

SEQ ID NO: 106404 - DNA, 13 bp, Artificial Sequence
  Oligonucleotide for detection of SNP TSC0026672
ataatataatatt

SEQ ID NO: 106405 - DNA, 13 bp, Artificial Sequence
  Oligonucleotide for detection of SNP TSC0026673
tttttaggtatgy

SEQ ID NO: 106406 - DNA, 13 bp, Artificial Sequence
  Oligonucleotide for detection of SNP TSC0026673
rcatacctaaaaa

SEQ ID NO: 106407 - DNA, 13 bp, Artificial Sequence
  Oligonucleotide for detection of SNP TSC0026673
tttttaagtatgy

SEQ ID NO: 106408 - DNA, 13 bp, Artificial Sequence
  Oligonucleotide for detection of SNP TSC0026673
rcatacttaaaaa

SEQ ID NO: 106409 - DNA, 13 bp, Artificial Sequence
  Oligonucleotide for detection of SNP TSC0026673
tttttaggtacgy

SEQ ID NO: 106410 - DNA, 13 bp, Artificial Sequence
  Oligonucleotide for detection of SNP TSC0026673
rcgtacctaaaaa

SEQ ID NO: 106411 - DNA, 13 bp, Artificial Sequence
  Oligonucleotide for detection of SNP TSC0026673
tttttaagtacgy

SEQ ID NO: 106412 - DNA, 13 bp, Artificial Sequence
  Oligonucleotide for detection of SNP TSC0026673
rcgtacttaaaaa

SEQ ID NO: 106413 - DNA, 13 bp, Artificial Sequence
  Oligonucleotide for detection of SNP TSC0026674
tttataaatgaaa

SEQ ID NO: 106414 - DNA, 13 bp, Artificial Sequence
  Oligonucleotide for detection of SNP TSC0026674
tttcatttataaa

SEQ ID NO: 106415 - DNA, 13 bp, Artificial Sequence
  Oligonucleotide for detection of SNP TSC0026674
tttatatatgaaa

SEQ ID NO: 106416 - DNA, 13 bp, Artificial Sequence
  Oligonucleotide for detection of SNP TSC0026674
tttcatatataaa

SEQ ID NO: 106417 - DNA, 13 bp, Artificial Sequence
  Oligonucleotide for detection of SNP TSC0026674
ttttatttatgag

SEQ ID NO: 106418 - DNA, 13 bp, Artificial Sequence
  Oligonucleotide for detection of SNP TSC0026674
ctcataaataaaa

SEQ ID NO: 106419 - DNA, 13 bp, Artificial Sequence
  Oligonucleotide for detection of SNP TSC0026674
ttttatgtatgag

SEQ ID NO: 106420 - DNA, 13 bp, Artificial Sequence
  Oligonucleotide for detection of SNP TSC0026674
ctcatacataaaa

SEQ ID NO: 106421 - DNA, 13 bp, Artificial Sequence
  Oligonucleotide for detection of SNP TSC0026679
tttagtaaatggy

SEQ ID NO: 106422 - DNA, 13 bp, Artificial Sequence
  Oligonucleotide for detection of SNP TSC0026679
rccatttactaaa

SEQ ID NO: 106423 - DNA, 13 bp, Artificial Sequence
  Oligonucleotide for detection of SNP TSC0026679
tttagtgaatggy

SEQ ID NO: 106424 - DNA, 13 bp, Artificial Sequence
  Oligonucleotide for detection of SNP TSC0026679
rccattcactaaa

SEQ ID NO: 106425 - DNA, 13 bp, Artificial Sequence
  Oligonucleotide for detection of SNP TSC0026680
taagaaattgtgg

SEQ ID NO: 106426 - DNA, 13 bp, Artificial Sequence
  Oligonucleotide for detection of SNP TSC0026680
ccacaatttctta

SEQ ID NO: 106427 - DNA, 13 bp, Artificial Sequence
  Oligonucleotide for detection of SNP TSC0026680
taagaagttgtgg

SEQ ID NO: 106428 - DNA, 13 bp, Artificial Sequence
  Oligonucleotide for detection of SNP TSC0026680
ccacaacttctta

SEQ ID NO: 106429 - DNA, 13 bp, Artificial Sequence
  Oligonucleotide for detection of SNP TSC0026681
ttaggtaattatt

SEQ ID NO: 106430 - DNA, 13 bp, Artificial Sequence
  Oligonucleotide for detection of SNP TSC0026681
aataattacctaa

SEQ ID NO: 106431 - DNA, 13 bp, Artificial Sequence
  Oligonucleotide for detection of SNP TSC0026681
ttaggtgattatt

SEQ ID NO: 106432 - DNA, 13 bp, Artificial Sequence
  Oligonucleotide for detection of SNP TSC0026681
aataatcacctaa

SEQ ID NO: 106433 - DNA, 13 bp, Artificial Sequence
  Oligonucleotide for detection of SNP TSC0026681
ttaggcgattatt

SEQ ID NO: 106434 - DNA, 13 bp, Artificial Sequence
  Oligonucleotide for detection of SNP TSC0026681
aataatcgcctaa

SEQ ID NO: 106435 - DNA, 13 bp, Artificial Sequence
  Oligonucleotide for detection of SNP TSC0026681
agtggttgtttga

SEQ ID NO: 106436 - DNA, 13 bp, Artificial Sequence
  Oligonucleotide for detection of SNP TSC0026681
tcaaacaaccact

SEQ ID NO: 106437 - DNA, 13 bp, Artificial Sequence
  Oligonucleotide for detection of SNP TSC0026681
agtggtcgtttga

SEQ ID NO: 106438 - DNA, 13 bp, Artificial Sequence
  Oligonucleotide for detection of SNP TSC0026681
tcaaacgaccact

SEQ ID NO: 106439 - DNA, 13 bp, Artificial Sequence
  Oligonucleotide for detection of SNP TSC0026682
tttgtttttgttt

SEQ ID NO: 106440 - DNA, 13 bp, Artificial Sequence
  Oligonucleotide for detection of SNP TSC0026682
aaacaaaaacaaa

SEQ ID NO: 106441 - DNA, 13 bp, Artificial Sequence
  Oligonucleotide for detection of SNP TSC0026682
ttcgtttttgttt

SEQ ID NO: 106442 - DNA, 13 bp, Artificial Sequence
  Oligonucleotide for detection of SNP TSC0026682
aaacaaaaacgaa

SEQ ID NO: 106443 - DNA, 13 bp, Artificial Sequence
  Oligonucleotide for detection of SNP TSC0026682
ttcgttgttgttt

SEQ ID NO: 106444 - DNA, 13 bp, Artificial Sequence
  Oligonucleotide for detection of SNP TSC0026682
aaacaacaacgaa

SEQ ID NO: 106445 - DNA, 13 bp, Artificial Sequence
  Oligonucleotide for detection of SNP TSC0026682
agataggagtggg

SEQ ID NO: 106446 - DNA, 13 bp, Artificial Sequence
  Oligonucleotide for detection of SNP TSC0026682
cccactcctatct

SEQ ID NO: 106447 - DNA, 13 bp, Artificial Sequence
  Oligonucleotide for detection of SNP TSC0026682
agatagtagtggg

SEQ ID NO: 106448 - DNA, 13 bp, Artificial Sequence
  Oligonucleotide for detection of SNP TSC0026682
cccactactatct

SEQ ID NO: 106449 - DNA, 13 bp, Artificial Sequence
  Oligonucleotide for detection of SNP TSC0026682
agataggagcggg

SEQ ID NO: 106450 - DNA, 13 bp, Artificial Sequence
  Oligonucleotide for detection of SNP TSC0026682
cccgctcctatct

SEQ ID NO: 106451 - DNA, 13 bp, Artificial Sequence
  Oligonucleotide for detection of SNP TSC0026682
agatagtagcggg

SEQ ID NO: 106452 - DNA, 13 bp, Artificial Sequence
  Oligonucleotide for detection of SNP TSC0026682
cccgctactatct

SEQ ID NO: 106453 - DNA, 13 bp, Artificial Sequence
  Oligonucleotide for detection of SNP TSC0026683
gtaaaagtaattg

SEQ ID NO: 106454 - DNA, 13 bp, Artificial Sequence
  Oligonucleotide for detection of SNP TSC0026683
caattacttttac

SEQ ID NO: 106455 - DNA, 13 bp, Artificial Sequence
  Oligonucleotide for detection of SNP TSC0026683
gtaaaaataattg

SEQ ID NO: 106456 - DNA, 13 bp, Artificial Sequence
  Oligonucleotide for detection of SNP TSC0026683
caattatttttac

SEQ ID NO: 106457 - DNA, 13 bp, Artificial Sequence
  Oligonucleotide for detection of SNP TSC0026684
atttagataaggg

SEQ ID NO: 106458 - DNA, 13 bp, Artificial Sequence
  Oligonucleotide for detection of SNP TSC0026684
cccttatctaaat

SEQ ID NO: 106459 - DNA, 13 bp, Artificial Sequence
  Oligonucleotide for detection of SNP TSC0026684
atttagttaaggg

SEQ ID NO: 106460 - DNA, 13 bp, Artificial Sequence
  Oligonucleotide for detection of SNP TSC0026684
cccttaactaaat

SEQ ID NO: 106461 - DNA, 13 bp, Artificial Sequence
  Oligonucleotide for detection of SNP TSC0026684
tttttgtttgagt

SEQ ID NO: 106462 - DNA, 13 bp, Artificial Sequence
  Oligonucleotide for detection of SNP TSC0026684
actcaaacaaaaa

SEQ ID NO: 106463 - DNA, 13 bp, Artificial Sequence
  Oligonucleotide for detection of SNP TSC0026684
tttttggttgagt

SEQ ID NO: 106464 - DNA, 13 bp, Artificial Sequence
  Oligonucleotide for detection of SNP TSC0026684
actcaaccaaaaa

SEQ ID NO: 106465 - DNA, 13 bp, Artificial Sequence
  Oligonucleotide for detection of SNP TSC0026686
atgtttaatttaa

SEQ ID NO: 106466 - DNA, 13 bp, Artificial Sequence
  Oligonucleotide for detection of SNP TSC0026686
ttaaattaaacat

SEQ ID NO: 106467 - DNA, 13 bp, Artificial Sequence
  Oligonucleotide for detection of SNP TSC0026686
atgttttatttaa

SEQ ID NO: 106468 - DNA, 13 bp, Artificial Sequence
  Oligonucleotide for detection of SNP TSC0026686
ttaaataaaacat

SEQ ID NO: 106469 - DNA, 13 bp, Artificial Sequence
  Oligonucleotide for detection of SNP TSC0026686
ttagattaggtat

SEQ ID NO: 106470 - DNA, 13 bp, Artificial Sequence
  Oligonucleotide for detection of SNP TSC0026686
atacctaatctaa

SEQ ID NO: 106471 - DNA, 13 bp, Artificial Sequence
  Oligonucleotide for detection of SNP TSC0026686
ttagataaggtat

SEQ ID NO: 106472 - DNA, 13 bp, Artificial Sequence
  Oligonucleotide for detection of SNP TSC0026686
ataccttatctaa

SEQ ID NO: 106473 - DNA, 13 bp, Artificial Sequence
  Oligonucleotide for detection of SNP TSC0026687
ttatggttggtta

SEQ ID NO: 106474 - DNA, 13 bp, Artificial Sequence
  Oligonucleotide for detection of SNP TSC0026687
taaccaaccataa

SEQ ID NO: 106475 - DNA, 13 bp, Artificial Sequence
  Oligonucleotide for detection of SNP TSC0026687
ttatgggtggtta

SEQ ID NO: 106476 - DNA, 13 bp, Artificial Sequence
  Oligonucleotide for detection of SNP TSC0026687
taaccacccataa

SEQ ID NO: 106477 - DNA, 13 bp, Artificial Sequence
  Oligonucleotide for detection of SNP TSC0026687
ttacggttggtta

SEQ ID NO: 106478 - DNA, 13 bp, Artificial Sequence
  Oligonucleotide for detection of SNP TSC0026687
taaccaaccgtaa

SEQ ID NO: 106479 - DNA, 13 bp, Artificial Sequence
  Oligonucleotide for detection of SNP TSC0026687
ttacgggtggtta

SEQ ID NO: 106480 - DNA, 13 bp, Artificial Sequence
  Oligonucleotide for detection of SNP TSC0026687
taaccacccgtaa

SEQ ID NO: 106481 - DNA, 13 bp, Artificial Sequence
  Oligonucleotide for detection of SNP TSC0026687
tagttagttgtaa

SEQ ID NO: 106482 - DNA, 13 bp, Artificial Sequence
  Oligonucleotide for detection of SNP TSC0026687
ttacaactaacta

SEQ ID NO: 106483 - DNA, 13 bp, Artificial Sequence
  Oligonucleotide for detection of SNP TSC0026687
tagttatttgtaa

SEQ ID NO: 106484 - DNA, 13 bp, Artificial Sequence
  Oligonucleotide for detection of SNP TSC0026687
ttacaaataacta

SEQ ID NO: 106485 - DNA, 13 bp, Artificial Sequence
  Oligonucleotide for detection of SNP TSC0026687
tagttagtcgtaa

SEQ ID NO: 106486 - DNA, 13 bp, Artificial Sequence
  Oligonucleotide for detection of SNP TSC0026687
ttacgactaacta

SEQ ID NO: 106487 - DNA, 13 bp, Artificial Sequence
  Oligonucleotide for detection of SNP TSC0026687
tagttattcgtaa

SEQ ID NO: 106488 - DNA, 13 bp, Artificial Sequence
  Oligonucleotide for detection of SNP TSC0026687
ttacgaataacta

SEQ ID NO: 106489 - DNA, 13 bp, Artificial Sequence
  Oligonucleotide for detection of SNP TSC0026688
ttggtgatgatty

SEQ ID NO: 106490 - DNA, 13 bp, Artificial Sequence
  Oligonucleotide for detection of SNP TSC0026688
raatcatcaccaa

SEQ ID NO: 106491 - DNA, 13 bp, Artificial Sequence
  Oligonucleotide for detection of SNP TSC0026688
ttggtggtgatty

SEQ ID NO: 106492 - DNA, 13 bp, Artificial Sequence
  Oligonucleotide for detection of SNP TSC0026688
raatcaccaccaa

SEQ ID NO: 106493 - DNA, 13 bp, Artificial Sequence
  Oligonucleotide for detection of SNP TSC0026688
tcggtgatgatty

SEQ ID NO: 106494 - DNA, 13 bp, Artificial Sequence
  Oligonucleotide for detection of SNP TSC0026688
raatcatcaccga

SEQ ID NO: 106495 - DNA, 13 bp, Artificial Sequence
  Oligonucleotide for detection of SNP TSC0026688
tcggtggtgatty

SEQ ID NO: 106496 - DNA, 13 bp, Artificial Sequence
  Oligonucleotide for detection of SNP TSC0026688
raatcaccaccga

SEQ ID NO: 106497 - DNA, 13 bp, Artificial Sequence
  Oligonucleotide for detection of SNP TSC0026688
ttggtgacgatty

SEQ ID NO: 106498 - DNA, 13 bp, Artificial Sequence
  Oligonucleotide for detection of SNP TSC0026688
raatcgtcaccaa

SEQ ID NO: 106499 - DNA, 13 bp, Artificial Sequence
  Oligonucleotide for detection of SNP TSC0026688
ttggtggcgatty

SEQ ID NO: 106500 - DNA, 13 bp, Artificial Sequence
  Oligonucleotide for detection of SNP TSC0026688
raatcgccaccaa

SEQ ID NO: 106501 - DNA, 13 bp, Artificial Sequence
  Oligonucleotide for detection of SNP TSC0026688
tcggtgacgatty

SEQ ID NO: 106502 - DNA, 13 bp, Artificial Sequence
  Oligonucleotide for detection of SNP TSC0026688
raatcgtcaccga

SEQ ID NO: 106503 - DNA, 13 bp, Artificial Sequence
  Oligonucleotide for detection of SNP TSC0026688
tcggtggcgatty

SEQ ID NO: 106504 - DNA, 13 bp, Artificial Sequence
  Oligonucleotide for detection of SNP TSC0026688
raatcgccaccga

SEQ ID NO: 106505 - DNA, 13 bp, Artificial Sequence
  Oligonucleotide for detection of SNP TSC0026690
tttaaaggtgaty

SEQ ID NO: 106506 - DNA, 13 bp, Artificial Sequence
  Oligonucleotide for detection of SNP TSC0026690
ratcacctttaaa

SEQ ID NO: 106507 - DNA, 13 bp, Artificial Sequence
  Oligonucleotide for detection of SNP TSC0026690
tttaaatgtgaty

SEQ ID NO: 106508 - DNA, 13 bp, Artificial Sequence
  Oligonucleotide for detection of SNP TSC0026690
ratcacatttaaa

SEQ ID NO: 106509 - DNA, 13 bp, Artificial Sequence
  Oligonucleotide for detection of SNP TSC0026690
gattatttttaga

SEQ ID NO: 106510 - DNA, 13 bp, Artificial Sequence
  Oligonucleotide for detection of SNP TSC0026690
tctaaaaataatc

SEQ ID NO: 106511 - DNA, 13 bp, Artificial Sequence
  Oligonucleotide for detection of SNP TSC0026690
gattatatttaga

SEQ ID NO: 106512 - DNA, 13 bp, Artificial Sequence
  Oligonucleotide for detection of SNP TSC0026690
tctaaatataatc

SEQ ID NO: 106513 - DNA, 13 bp, Artificial Sequence
  Oligonucleotide for detection of SNP TSC0026691
tttaaagtagttt

SEQ ID NO: 106514 - DNA, 13 bp, Artificial Sequence
  Oligonucleotide for detection of SNP TSC0026691
aaactactttaaa

SEQ ID NO: 106515 - DNA, 13 bp, Artificial Sequence
  Oligonucleotide for detection of SNP TSC0026691
tttaaaatagttt

SEQ ID NO: 106516 - DNA, 13 bp, Artificial Sequence
  Oligonucleotide for detection of SNP TSC0026691
aaactattttaaa

SEQ ID NO: 106517 - DNA, 13 bp, Artificial Sequence
  Oligonucleotide for detection of SNP TSC0026692
tattagttatatt

SEQ ID NO: 106518 - DNA, 13 bp, Artificial Sequence
  Oligonucleotide for detection of SNP TSC0026692
aatataactaata

SEQ ID NO: 106519 - DNA, 13 bp, Artificial Sequence
  Oligonucleotide for detection of SNP TSC0026692
tattaggtatatt

SEQ ID NO: 106520 - DNA, 13 bp, Artificial Sequence
  Oligonucleotide for detection of SNP TSC0026692
aatatacctaata

SEQ ID NO: 106521 - DNA, 13 bp, Artificial Sequence
  Oligonucleotide for detection of SNP TSC0026692
agtatggttgata

SEQ ID NO: 106522 - DNA, 13 bp, Artificial Sequence
  Oligonucleotide for detection of SNP TSC0026692
tatcaaccatact

SEQ ID NO: 106523 - DNA, 13 bp, Artificial Sequence
  Oligonucleotide for detection of SNP TSC0026692
agtatgtttgata

SEQ ID NO: 106524 - DNA, 13 bp, Artificial Sequence
  Oligonucleotide for detection of SNP TSC0026692
tatcaaacatact

SEQ ID NO: 106525 - DNA, 13 bp, Artificial Sequence
  Oligonucleotide for detection of SNP TSC0026694
agttttgaataty

SEQ ID NO: 106526 - DNA, 13 bp, Artificial Sequence
  Oligonucleotide for detection of SNP TSC0026694
ratattcaaaact

SEQ ID NO: 106527 - DNA, 13 bp, Artificial Sequence
  Oligonucleotide for detection of SNP TSC0026694
agttttaaataty

SEQ ID NO: 106528 - DNA, 13 bp, Artificial Sequence
  Oligonucleotide for detection of SNP TSC0026694
ratatttaaaact

SEQ ID NO: 106529 - DNA, 13 bp, Artificial Sequence
  Oligonucleotide for detection of SNP TSC0026695
ttttttgttatgy

SEQ ID NO: 106530 - DNA, 13 bp, Artificial Sequence
  Oligonucleotide for detection of SNP TSC0026695
rcataacaaaaaa

SEQ ID NO: 106531 - DNA, 13 bp, Artificial Sequence
  Oligonucleotide for detection of SNP TSC0026695
tttttcgttatgy

SEQ ID NO: 106532 - DNA, 13 bp, Artificial Sequence
  Oligonucleotide for detection of SNP TSC0026695
rcataacgaaaaa

SEQ ID NO: 106533 - DNA, 13 bp, Artificial Sequence
  Oligonucleotide for detection of SNP TSC0026695
gtataatgagagg

SEQ ID NO: 106534 - DNA, 13 bp, Artificial Sequence
  Oligonucleotide for detection of SNP TSC0026695
cctctcattatac

SEQ ID NO: 106535 - DNA, 13 bp, Artificial Sequence
  Oligonucleotide for detection of SNP TSC0026695
gtataaagagagg

SEQ ID NO: 106536 - DNA, 13 bp, Artificial Sequence
  Oligonucleotide for detection of SNP TSC0026695
cctctctttatac

SEQ ID NO: 106537 - DNA, 13 bp, Artificial Sequence
  Oligonucleotide for detection of SNP TSC0026695
gtataacgagagg

SEQ ID NO: 106538 - DNA, 13 bp, Artificial Sequence
  Oligonucleotide for detection of SNP TSC0026695
cctctcgttatac

SEQ ID NO: 106539 - DNA, 13 bp, Artificial Sequence
  Oligonucleotide for detection of SNP TSC0026696
gttggatgttttg

SEQ ID NO: 106540 - DNA, 13 bp, Artificial Sequence
  Oligonucleotide for detection of SNP TSC0026696
caaaacatccaac

SEQ ID NO: 106541 - DNA, 13 bp, Artificial Sequence
  Oligonucleotide for detection of SNP TSC0026696
gttggacgttttg

SEQ ID NO: 106542 - DNA, 13 bp, Artificial Sequence
  Oligonucleotide for detection of SNP TSC0026696
caaaacgtccaac

SEQ ID NO: 106543 - DNA, 13 bp, Artificial Sequence
  Oligonucleotide for detection of SNP TSC0026696
tagggtgtttagy

SEQ ID NO: 106544 - DNA, 13 bp, Artificial Sequence
  Oligonucleotide for detection of SNP TSC0026696
rctaaacacccta

SEQ ID NO: 106545 - DNA, 13 bp, Artificial Sequence
  Oligonucleotide for detection of SNP TSC0026696
tagggtatttagy

SEQ ID NO: 106546 - DNA, 13 bp, Artificial Sequence
  Oligonucleotide for detection of SNP TSC0026696
rctaaatacccta

SEQ ID NO: 106547 - DNA, 13 bp, Artificial Sequence
  Oligonucleotide for detection of SNP TSC0026696
tagggcgtttagy

SEQ ID NO: 106548 - DNA, 13 bp, Artificial Sequence
  Oligonucleotide for detection of SNP TSC0026696
rctaaacgcccta

SEQ ID NO: 106549 - DNA, 13 bp, Artificial Sequence
  Oligonucleotide for detection of SNP TSC0026697
tgtgttagttgty

SEQ ID NO: 106550 - DNA, 13 bp, Artificial Sequence
  Oligonucleotide for detection of SNP TSC0026697
racaactaacaca

SEQ ID NO: 106551 - DNA, 13 bp, Artificial Sequence
  Oligonucleotide for detection of SNP TSC0026697
tgtgttggttgty

SEQ ID NO: 106552 - DNA, 13 bp, Artificial Sequence
  Oligonucleotide for detection of SNP TSC0026697
racaaccaacaca

SEQ ID NO: 106553 - DNA, 13 bp, Artificial Sequence
  Oligonucleotide for detection of SNP TSC0026697
cgtgttagttgty

SEQ ID NO: 106554 - DNA, 13 bp, Artificial Sequence
  Oligonucleotide for detection of SNP TSC0026697
racaactaacacg

SEQ ID NO: 106555 - DNA, 13 bp, Artificial Sequence
  Oligonucleotide for detection of SNP TSC0026697
cgtgttggttgty

SEQ ID NO: 106556 - DNA, 13 bp, Artificial Sequence
  Oligonucleotide for detection of SNP TSC0026697
racaaccaacacg

SEQ ID NO: 106557 - DNA, 13 bp, Artificial Sequence
  Oligonucleotide for detection of SNP TSC0026697
tgtgttagtcgty

SEQ ID NO: 106558 - DNA, 13 bp, Artificial Sequence
  Oligonucleotide for detection of SNP TSC0026697
racgactaacaca

SEQ ID NO: 106559 - DNA, 13 bp, Artificial Sequence
  Oligonucleotide for detection of SNP TSC0026697
tgtgtcggttgty

SEQ ID NO: 106560 - DNA, 13 bp, Artificial Sequence
  Oligonucleotide for detection of SNP TSC0026697
racaaccgacaca

SEQ ID NO: 106561 - DNA, 13 bp, Artificial Sequence
  Oligonucleotide for detection of SNP TSC0026697
cgtgttagtcgty

SEQ ID NO: 106562 - DNA, 13 bp, Artificial Sequence
  Oligonucleotide for detection of SNP TSC0026697
racgactaacacg

SEQ ID NO: 106563 - DNA, 13 bp, Artificial Sequence
  Oligonucleotide for detection of SNP TSC0026697
tgtgttggtcgty

SEQ ID NO: 106564 - DNA, 13 bp, Artificial Sequence
  Oligonucleotide for detection of SNP TSC0026697
racgaccaacaca

SEQ ID NO: 106565 - DNA, 13 bp, Artificial Sequence
  Oligonucleotide for detection of SNP TSC0026697
cgtgtcggttgty

SEQ ID NO: 106566 - DNA, 13 bp, Artificial Sequence
  Oligonucleotide for detection of SNP TSC0026697
racaaccgacacg

SEQ ID NO: 106567 - DNA, 13 bp, Artificial Sequence
  Oligonucleotide for detection of SNP TSC0026697
cgtgttggtcgty

SEQ ID NO: 106568 - DNA, 13 bp, Artificial Sequence
  Oligonucleotide for detection of SNP TSC0026697
racgaccaacacg

SEQ ID NO: 106569 - DNA, 13 bp, Artificial Sequence
  Oligonucleotide for detection of SNP TSC0026697
tgtgtcggtcgty

SEQ ID NO: 106570 - DNA, 13 bp, Artificial Sequence
  Oligonucleotide for detection of SNP TSC0026697
racgaccgacaca

SEQ ID NO: 106571 - DNA, 13 bp, Artificial Sequence
  Oligonucleotide for detection of SNP TSC0026697
cgtgtcggtcgty

SEQ ID NO: 106572 - DNA, 13 bp, Artificial Sequence
  Oligonucleotide for detection of SNP TSC0026697
racgaccgacacg

SEQ ID NO: 106573 - DNA, 13 bp, Artificial Sequence
  Oligonucleotide for detection of SNP TSC0026697
gatggttgatatg

SEQ ID NO: 106574 - DNA, 13 bp, Artificial Sequence
  Oligonucleotide for detection of SNP TSC0026697
catatcaaccatc

SEQ ID NO: 106575 - DNA, 13 bp, Artificial Sequence
  Oligonucleotide for detection of SNP TSC0026697
gacggttgatatg

SEQ ID NO: 106576 - DNA, 13 bp, Artificial Sequence
  Oligonucleotide for detection of SNP TSC0026697
catatcaaccgtc

SEQ ID NO: 106577 - DNA, 13 bp, Artificial Sequence
  Oligonucleotide for detection of SNP TSC0026697
gatggttgatacg

SEQ ID NO: 106578 - DNA, 13 bp, Artificial Sequence
  Oligonucleotide for detection of SNP TSC0026697
cgtatcaaccatc

SEQ ID NO: 106579 - DNA, 13 bp, Artificial Sequence
  Oligonucleotide for detection of SNP TSC0026697
gatggtcgatatg

SEQ ID NO: 106580 - DNA, 13 bp, Artificial Sequence
  Oligonucleotide for detection of SNP TSC0026697
catatcgaccatc

SEQ ID NO: 106581 - DNA, 13 bp, Artificial Sequence
  Oligonucleotide for detection of SNP TSC0026697
gacggttgatacg

SEQ ID NO: 106582 - DNA, 13 bp, Artificial Sequence
  Oligonucleotide for detection of SNP TSC0026697
cgtatcaaccgtc

SEQ ID NO: 106583 - DNA, 13 bp, Artificial Sequence
  Oligonucleotide for detection of SNP TSC0026697
gacggtcgatatg

SEQ ID NO: 106584 - DNA, 13 bp, Artificial Sequence
  Oligonucleotide for detection of SNP TSC0026697
catatcgaccgtc

SEQ ID NO: 106585 - DNA, 13 bp, Artificial Sequence
  Oligonucleotide for detection of SNP TSC0026697
gatggtcgatacg

SEQ ID NO: 106586 - DNA, 13 bp, Artificial Sequence
  Oligonucleotide for detection of SNP TSC0026697
cgtatcgaccatc

SEQ ID NO: 106587 - DNA, 13 bp, Artificial Sequence
  Oligonucleotide for detection of SNP TSC0026697
gacggtcgatacg

SEQ ID NO: 106588 - DNA, 13 bp, Artificial Sequence
  Oligonucleotide for detection of SNP TSC0026697
cgtatcgaccgtc

SEQ ID NO: 106589 - DNA, 13 bp, Artificial Sequence
  Oligonucleotide for detection of SNP TSC0026698
tgtaaagttaggy

SEQ ID NO: 106590 - DNA, 13 bp, Artificial Sequence
  Oligonucleotide for detection of SNP TSC0026698
rcctaactttaca

SEQ ID NO: 106591 - DNA, 13 bp, Artificial Sequence
  Oligonucleotide for detection of SNP TSC0026698
tgtaaaattaggy

SEQ ID NO: 106592 - DNA, 13 bp, Artificial Sequence
  Oligonucleotide for detection of SNP TSC0026698
rcctaattttaca

SEQ ID NO: 106593 - DNA, 13 bp, Artificial Sequence
  Oligonucleotide for detection of SNP TSC0026699
ggggttgtttaga

SEQ ID NO: 106594 - DNA, 13 bp, Artificial Sequence
  Oligonucleotide for detection of SNP TSC0026699
tctaaacaacccc

SEQ ID NO: 106595 - DNA, 13 bp, Artificial Sequence
  Oligonucleotide for detection of SNP TSC0026699
ggggttatttaga

SEQ ID NO: 106596 - DNA, 13 bp, Artificial Sequence
  Oligonucleotide for detection of SNP TSC0026699
tctaaataacccc

SEQ ID NO: 106597 - DNA, 13 bp, Artificial Sequence
  Oligonucleotide for detection of SNP TSC0026700
tggtagggataaa

SEQ ID NO: 106598 - DNA, 13 bp, Artificial Sequence
  Oligonucleotide for detection of SNP TSC0026700
tttatccctacca

SEQ ID NO: 106599 - DNA, 13 bp, Artificial Sequence
  Oligonucleotide for detection of SNP TSC0026700
tggtagagataaa

SEQ ID NO: 106600 - DNA, 13 bp, Artificial Sequence
  Oligonucleotide for detection of SNP TSC0026700
tttatctctacca

SEQ ID NO: 106601 - DNA, 13 bp, Artificial Sequence
  Oligonucleotide for detection of SNP TSC0026701
ttatgatgtttty

SEQ ID NO: 106602 - DNA, 13 bp, Artificial Sequence
  Oligonucleotide for detection of SNP TSC0026701
raaaacatcataa

SEQ ID NO: 106603 - DNA, 13 bp, Artificial Sequence
  Oligonucleotide for detection of SNP TSC0026701
ttatgacgtttty

SEQ ID NO: 106604 - DNA, 13 bp, Artificial Sequence
  Oligonucleotide for detection of SNP TSC0026701
raaaacgtcataa

SEQ ID NO: 106605 - DNA, 13 bp, Artificial Sequence
  Oligonucleotide for detection of SNP TSC0026701
gagggtgttatga

SEQ ID NO: 106606 - DNA, 13 bp, Artificial Sequence
  Oligonucleotide for detection of SNP TSC0026701
tcataacaccctc

SEQ ID NO: 106607 - DNA, 13 bp, Artificial Sequence
  Oligonucleotide for detection of SNP TSC0026701
gagggtattatga

SEQ ID NO: 106608 - DNA, 13 bp, Artificial Sequence
  Oligonucleotide for detection of SNP TSC0026701
tcataataccctc

SEQ ID NO: 106609 - DNA, 13 bp, Artificial Sequence
  Oligonucleotide for detection of SNP TSC0026701
gagggcgttatga

SEQ ID NO: 106610 - DNA, 13 bp, Artificial Sequence
  Oligonucleotide for detection of SNP TSC0026701
tcataacgccctc

SEQ ID NO: 106611 - DNA, 13 bp, Artificial Sequence
  Oligonucleotide for detection of SNP TSC0026702
gggtagagtttgy

SEQ ID NO: 106612 - DNA, 13 bp, Artificial Sequence
  Oligonucleotide for detection of SNP TSC0026702
rcaaactctaccc

SEQ ID NO: 106613 - DNA, 13 bp, Artificial Sequence
  Oligonucleotide for detection of SNP TSC0026703
atggttgtataty

SEQ ID NO: 106614 - DNA, 13 bp, Artificial Sequence
  Oligonucleotide for detection of SNP TSC0026703
ratatacaaccat

SEQ ID NO: 106615 - DNA, 13 bp, Artificial Sequence
  Oligonucleotide for detection of SNP TSC0026703
atggttatataty

SEQ ID NO: 106616 - DNA, 13 bp, Artificial Sequence
  Oligonucleotide for detection of SNP TSC0026703
ratatataaccat

SEQ ID NO: 106617 - DNA, 13 bp, Artificial Sequence
  Oligonucleotide for detection of SNP TSC0026704
attgtaattttty

SEQ ID NO: 106618 - DNA, 13 bp, Artificial Sequence
  Oligonucleotide for detection of SNP TSC0026704
raaaaattacaat

SEQ ID NO: 106619 - DNA, 13 bp, Artificial Sequence
  Oligonucleotide for detection of SNP TSC0026704
attgtatttttty

SEQ ID NO: 106620 - DNA, 13 bp, Artificial Sequence
  Oligonucleotide for detection of SNP TSC0026704
raaaaaatacaat

SEQ ID NO: 106621 - DNA, 13 bp, Artificial Sequence
  Oligonucleotide for detection of SNP TSC0026704
ggggggttgtagt

SEQ ID NO: 106622 - DNA, 13 bp, Artificial Sequence
  Oligonucleotide for detection of SNP TSC0026704
actacaacccccc

SEQ ID NO: 106623 - DNA, 13 bp, Artificial Sequence
  Oligonucleotide for detection of SNP TSC0026704
gggggggtgtagt

SEQ ID NO: 106624 - DNA, 13 bp, Artificial Sequence
  Oligonucleotide for detection of SNP TSC0026704
actacaccccccc

SEQ ID NO: 106625 - DNA, 13 bp, Artificial Sequence
  Oligonucleotide for detection of SNP TSC0026705
taggaagttaaga

SEQ ID NO: 106626 - DNA, 13 bp, Artificial Sequence
  Oligonucleotide for detection of SNP TSC0026705
tcttaacttccta

SEQ ID NO: 106627 - DNA, 13 bp, Artificial Sequence
  Oligonucleotide for detection of SNP TSC0026705
taggaatttaaga

SEQ ID NO: 106628 - DNA, 13 bp, Artificial Sequence
  Oligonucleotide for detection of SNP TSC0026705
tcttaaattccta

SEQ ID NO: 106629 - DNA, 13 bp, Artificial Sequence
  Oligonucleotide for detection of SNP TSC0026706
tttttttggattt

SEQ ID NO: 106630 - DNA, 13 bp, Artificial Sequence
  Oligonucleotide for detection of SNP TSC0026706
aaatccaaaaaaa

SEQ ID NO: 106631 - DNA, 13 bp, Artificial Sequence
  Oligonucleotide for detection of SNP TSC0026706
ttttttcggattt

SEQ ID NO: 106632 - DNA, 13 bp, Artificial Sequence
  Oligonucleotide for detection of SNP TSC0026706
aaatccgaaaaaa

SEQ ID NO: 106633 - DNA, 13 bp, Artificial Sequence
  Oligonucleotide for detection of SNP TSC0026706
aaatttgaaggga

SEQ ID NO: 106634 - DNA, 13 bp, Artificial Sequence
  Oligonucleotide for detection of SNP TSC0026706
tcccttcaaattt

SEQ ID NO: 106635 - DNA, 13 bp, Artificial Sequence
  Oligonucleotide for detection of SNP TSC0026706
aaatttaaaggga

SEQ ID NO: 106636 - DNA, 13 bp, Artificial Sequence
  Oligonucleotide for detection of SNP TSC0026706
tccctttaaattt

SEQ ID NO: 106637 - DNA, 13 bp, Artificial Sequence
  Oligonucleotide for detection of SNP TSC0026706
aaattcgaaggga

SEQ ID NO: 106638 - DNA, 13 bp, Artificial Sequence
  Oligonucleotide for detection of SNP TSC0026706
tcccttcgaattt

SEQ ID NO: 106639 - DNA, 13 bp, Artificial Sequence
  Oligonucleotide for detection of SNP TSC0026707
aaaggatgatttg

SEQ ID NO: 106640 - DNA, 13 bp, Artificial Sequence
  Oligonucleotide for detection of SNP TSC0026707
caaatcatccttt

SEQ ID NO: 106641 - DNA, 13 bp, Artificial Sequence
  Oligonucleotide for detection of SNP TSC0026707
aaaggacgatttg

SEQ ID NO: 106642 - DNA, 13 bp, Artificial Sequence
  Oligonucleotide for detection of SNP TSC0026707
caaatcgtccttt

SEQ ID NO: 106643 - DNA, 13 bp, Artificial Sequence
  Oligonucleotide for detection of SNP TSC0026708
gatatggttgagt

SEQ ID NO: 106644 - DNA, 13 bp, Artificial Sequence
  Oligonucleotide for detection of SNP TSC0026708
actcaaccatatc

SEQ ID NO: 106645 - DNA, 13 bp, Artificial Sequence
  Oligonucleotide for detection of SNP TSC0026708
gatatgattgagt

SEQ ID NO: 106646 - DNA, 13 bp, Artificial Sequence
  Oligonucleotide for detection of SNP TSC0026708
actcaatcatatc

SEQ ID NO: 106647 - DNA, 13 bp, Artificial Sequence
  Oligonucleotide for detection of SNP TSC0026709
gttagagtgataa

SEQ ID NO: 106648 - DNA, 13 bp, Artificial Sequence
  Oligonucleotide for detection of SNP TSC0026709
ttatcactctaac

SEQ ID NO: 106649 - DNA, 13 bp, Artificial Sequence
  Oligonucleotide for detection of SNP TSC0026709
gttagaatgataa

SEQ ID NO: 106650 - DNA, 13 bp, Artificial Sequence
  Oligonucleotide for detection of SNP TSC0026709
ttatcattctaac

SEQ ID NO: 106651 - DNA, 13 bp, Artificial Sequence
  Oligonucleotide for detection of SNP TSC0026710
gggaataggttta

SEQ ID NO: 106652 - DNA, 13 bp, Artificial Sequence
  Oligonucleotide for detection of SNP TSC0026710
taaacctattccc

SEQ ID NO: 106653 - DNA, 13 bp, Artificial Sequence
  Oligonucleotide for detection of SNP TSC0026710
gggaatgggttta

SEQ ID NO: 106654 - DNA, 13 bp, Artificial Sequence
  Oligonucleotide for detection of SNP TSC0026710
taaacccattccc

SEQ ID NO: 106655 - DNA, 13 bp, Artificial Sequence
  Oligonucleotide for detection of SNP TSC0026710
gggaacgggttta

SEQ ID NO: 106656 - DNA, 13 bp, Artificial Sequence
  Oligonucleotide for detection of SNP TSC0026710
taaacccgttccc

SEQ ID NO: 106657 - DNA, 13 bp, Artificial Sequence
  Oligonucleotide for detection of SNP TSC0026713
agtgagaggggag

SEQ ID NO: 106658 - DNA, 13 bp, Artificial Sequence
  Oligonucleotide for detection of SNP TSC0026713
ctcccctctcact

SEQ ID NO: 106659 - DNA, 13 bp, Artificial Sequence
  Oligonucleotide for detection of SNP TSC0026713
agtgagtggggag

SEQ ID NO: 106660 - DNA, 13 bp, Artificial Sequence
  Oligonucleotide for detection of SNP TSC0026713
ctccccactcact

SEQ ID NO: 106661 - DNA, 13 bp, Artificial Sequence
  Oligonucleotide for detection of SNP TSC0026713
agcgagaggggag

SEQ ID NO: 106662 - DNA, 13 bp, Artificial Sequence
  Oligonucleotide for detection of SNP TSC0026713
ctcccctctcgct

SEQ ID NO: 106663 - DNA, 13 bp, Artificial Sequence
  Oligonucleotide for detection of SNP TSC0026713
agcgagtggggag

SEQ ID NO: 106664 - DNA, 13 bp, Artificial Sequence
  Oligonucleotide for detection of SNP TSC0026713
ctccccactcgct

SEQ ID NO: 106665 - DNA, 13 bp, Artificial Sequence
  Oligonucleotide for detection of SNP TSC0026713
agtgagcggggag

SEQ ID NO: 106666 - DNA, 13 bp, Artificial Sequence
  Oligonucleotide for detection of SNP TSC0026713
ctccccgctcact

SEQ ID NO: 106667 - DNA, 13 bp, Artificial Sequence
  Oligonucleotide for detection of SNP TSC0026713
agcgagcggggag

SEQ ID NO: 106668 - DNA, 13 bp, Artificial Sequence
  Oligonucleotide for detection of SNP TSC0026713
ctccccgctcgct

SEQ ID NO: 106669 - DNA, 13 bp, Artificial Sequence
  Oligonucleotide for detection of SNP TSC0026713
tttttcgttcgtt

SEQ ID NO: 106670 - DNA, 13 bp, Artificial Sequence
  Oligonucleotide for detection of SNP TSC0026713
aacgaacgaaaaa

SEQ ID NO: 106671 - DNA, 13 bp, Artificial Sequence
  Oligonucleotide for detection of SNP TSC0026714
tgtatatttagty

SEQ ID NO: 106672 - DNA, 13 bp, Artificial Sequence
  Oligonucleotide for detection of SNP TSC0026714
ractaaatataca

SEQ ID NO: 106673 - DNA, 13 bp, Artificial Sequence
  Oligonucleotide for detection of SNP TSC0026714
tgtatagttagty

SEQ ID NO: 106674 - DNA, 13 bp, Artificial Sequence
  Oligonucleotide for detection of SNP TSC0026714
ractaactataca

SEQ ID NO: 106675 - DNA, 13 bp, Artificial Sequence
  Oligonucleotide for detection of SNP TSC0026714
ggttgggtgtata

SEQ ID NO: 106676 - DNA, 13 bp, Artificial Sequence
  Oligonucleotide for detection of SNP TSC0026714
tatacacccaacc

SEQ ID NO: 106677 - DNA, 13 bp, Artificial Sequence
  Oligonucleotide for detection of SNP TSC0026714
ggttggttgtata

SEQ ID NO: 106678 - DNA, 13 bp, Artificial Sequence
  Oligonucleotide for detection of SNP TSC0026714
tatacaaccaacc

SEQ ID NO: 106679 - DNA, 13 bp, Artificial Sequence
  Oligonucleotide for detection of SNP TSC0026715
ggaagtagtaaat

SEQ ID NO: 106680 - DNA, 13 bp, Artificial Sequence
  Oligonucleotide for detection of SNP TSC0026715
atttactacttcc

SEQ ID NO: 106681 - DNA, 13 bp, Artificial Sequence
  Oligonucleotide for detection of SNP TSC0026715
ggaagtggtaaat

SEQ ID NO: 106682 - DNA, 13 bp, Artificial Sequence
  Oligonucleotide for detection of SNP TSC0026715
atttaccacttcc

SEQ ID NO: 106683 - DNA, 13 bp, Artificial Sequence
  Oligonucleotide for detection of SNP TSC0026715
ggaagcggtaaat

SEQ ID NO: 106684 - DNA, 13 bp, Artificial Sequence
  Oligonucleotide for detection of SNP TSC0026715
atttaccgcttcc

SEQ ID NO: 106685 - DNA, 13 bp, Artificial Sequence
  Oligonucleotide for detection of SNP TSC0026716
ttatttttggttg

SEQ ID NO: 106686 - DNA, 13 bp, Artificial Sequence
  Oligonucleotide for detection of SNP TSC0026716
caaccaaaaataa

SEQ ID NO: 106687 - DNA, 13 bp, Artificial Sequence
  Oligonucleotide for detection of SNP TSC0026716
ttatttgtggttg

SEQ ID NO: 106688 - DNA, 13 bp, Artificial Sequence
  Oligonucleotide for detection of SNP TSC0026716
caaccacaaataa

SEQ ID NO: 106689 - DNA, 13 bp, Artificial Sequence
  Oligonucleotide for detection of SNP TSC0026716
ttattcgtggttg

SEQ ID NO: 106690 - DNA, 13 bp, Artificial Sequence
  Oligonucleotide for detection of SNP TSC0026716
caaccacgaataa

SEQ ID NO: 106691 - DNA, 13 bp, Artificial Sequence
  Oligonucleotide for detection of SNP TSC0026716
tagttaggagtgg

SEQ ID NO: 106692 - DNA, 13 bp, Artificial Sequence
  Oligonucleotide for detection of SNP TSC0026716
ccactcctaacta

SEQ ID NO: 106693 - DNA, 13 bp, Artificial Sequence
  Oligonucleotide for detection of SNP TSC0026716
tagttatgagtgg

SEQ ID NO: 106694 - DNA, 13 bp, Artificial Sequence
  Oligonucleotide for detection of SNP TSC0026716
ccactcataacta

SEQ ID NO: 106695 - DNA, 13 bp, Artificial Sequence
  Oligonucleotide for detection of SNP TSC0026716
tagttacgagtgg

SEQ ID NO: 106696 - DNA, 13 bp, Artificial Sequence
  Oligonucleotide for detection of SNP TSC0026716
ccactcgtaacta

SEQ ID NO: 106697 - DNA, 13 bp, Artificial Sequence
  Oligonucleotide for detection of SNP TSC0026717
gtggatagggtty

SEQ ID NO: 106698 - DNA, 13 bp, Artificial Sequence
  Oligonucleotide for detection of SNP TSC0026717
raaccctatccac

SEQ ID NO: 106699 - DNA, 13 bp, Artificial Sequence
  Oligonucleotide for detection of SNP TSC0026717
gtggatggggtty

SEQ ID NO: 106700 - DNA, 13 bp, Artificial Sequence
  Oligonucleotide for detection of SNP TSC0026717
raaccccatccac

SEQ ID NO: 106701 - DNA, 13 bp, Artificial Sequence
  Oligonucleotide for detection of SNP TSC0026717
gtggacggggtty

SEQ ID NO: 106702 - DNA, 13 bp, Artificial Sequence
  Oligonucleotide for detection of SNP TSC0026717
raaccccgtccac

SEQ ID NO: 106703 - DNA, 13 bp, Artificial Sequence
  Oligonucleotide for detection of SNP TSC0026717
gggttttgtttay

SEQ ID NO: 106704 - DNA, 13 bp, Artificial Sequence
  Oligonucleotide for detection of SNP TSC0026717
rtaaacaaaaccc

SEQ ID NO: 106705 - DNA, 13 bp, Artificial Sequence
  Oligonucleotide for detection of SNP TSC0026717
gggtttcgtttay

SEQ ID NO: 106706 - DNA, 13 bp, Artificial Sequence
  Oligonucleotide for detection of SNP TSC0026717
rtaaacgaaaccc

SEQ ID NO: 106707 - DNA, 13 bp, Artificial Sequence
  Oligonucleotide for detection of SNP TSC0026718
ttgggttgggatg

SEQ ID NO: 106708 - DNA, 13 bp, Artificial Sequence
  Oligonucleotide for detection of SNP TSC0026718
catcccaacccaa

SEQ ID NO: 106709 - DNA, 13 bp, Artificial Sequence
  Oligonucleotide for detection of SNP TSC0026718
ttgggtcgggatg

SEQ ID NO: 106710 - DNA, 13 bp, Artificial Sequence
  Oligonucleotide for detection of SNP TSC0026718
catcccgacccaa

SEQ ID NO: 106711 - DNA, 13 bp, Artificial Sequence
  Oligonucleotide for detection of SNP TSC0026718
tattttggtttag

SEQ ID NO: 106712 - DNA, 13 bp, Artificial Sequence
  Oligonucleotide for detection of SNP TSC0026718
ctaaaccaaaata

SEQ ID NO: 106713 - DNA, 13 bp, Artificial Sequence
  Oligonucleotide for detection of SNP TSC0026718
tattttagtttag

SEQ ID NO: 106714 - DNA, 13 bp, Artificial Sequence
  Oligonucleotide for detection of SNP TSC0026718
ctaaactaaaata

SEQ ID NO: 106715 - DNA, 13 bp, Artificial Sequence
  Oligonucleotide for detection of SNP TSC0026718
tatttcggtttag

SEQ ID NO: 106716 - DNA, 13 bp, Artificial Sequence
  Oligonucleotide for detection of SNP TSC0026718
ctaaaccgaaata

SEQ ID NO: 106717 - DNA, 13 bp, Artificial Sequence
  Oligonucleotide for detection of SNP TSC0026719
gtttttagggtta

SEQ ID NO: 106718 - DNA, 13 bp, Artificial Sequence
  Oligonucleotide for detection of SNP TSC0026719
taaccctaaaaac

SEQ ID NO: 106719 - DNA, 13 bp, Artificial Sequence
  Oligonucleotide for detection of SNP TSC0026719
gtttttggggtta

SEQ ID NO: 106720 - DNA, 13 bp, Artificial Sequence
  Oligonucleotide for detection of SNP TSC0026719
taaccccaaaaac

SEQ ID NO: 106721 - DNA, 13 bp, Artificial Sequence
  Oligonucleotide for detection of SNP TSC0026719
gttttcggggtta

SEQ ID NO: 106722 - DNA, 13 bp, Artificial Sequence
  Oligonucleotide for detection of SNP TSC0026719
taaccccgaaaac

SEQ ID NO: 106723 - DNA, 13 bp, Artificial Sequence
  Oligonucleotide for detection of SNP TSC0026719
tggttttgggggy

SEQ ID NO: 106724 - DNA, 13 bp, Artificial Sequence
  Oligonucleotide for detection of SNP TSC0026719
rcccccaaaacca

SEQ ID NO: 106725 - DNA, 13 bp, Artificial Sequence
  Oligonucleotide for detection of SNP TSC0026719
tggtttcgggggy

SEQ ID NO: 106726 - DNA, 13 bp, Artificial Sequence
  Oligonucleotide for detection of SNP TSC0026719
rcccccgaaacca

SEQ ID NO: 106727 - DNA, 13 bp, Artificial Sequence
  Oligonucleotide for detection of SNP TSC0026723
gttgggtgttgtg

SEQ ID NO: 106728 - DNA, 13 bp, Artificial Sequence
  Oligonucleotide for detection of SNP TSC0026723
cacaacacccaac

SEQ ID NO: 106729 - DNA, 13 bp, Artificial Sequence
  Oligonucleotide for detection of SNP TSC0026723
gttgggcgttgtg

SEQ ID NO: 106730 - DNA, 13 bp, Artificial Sequence
  Oligonucleotide for detection of SNP TSC0026723
cacaacgcccaac

SEQ ID NO: 106731 - DNA, 13 bp, Artificial Sequence
  Oligonucleotide for detection of SNP TSC0026723
gttgggtgtcgtg

SEQ ID NO: 106732 - DNA, 13 bp, Artificial Sequence
  Oligonucleotide for detection of SNP TSC0026723
cacgacacccaac

SEQ ID NO: 106733 - DNA, 13 bp, Artificial Sequence
  Oligonucleotide for detection of SNP TSC0026723
gttgggcgtcgtg

SEQ ID NO: 106734 - DNA, 13 bp, Artificial Sequence
  Oligonucleotide for detection of SNP TSC0026723
cacgacgcccaac

SEQ ID NO: 106735 - DNA, 13 bp, Artificial Sequence
  Oligonucleotide for detection of SNP TSC0026723
tatgatgtttagy

SEQ ID NO: 106736 - DNA, 13 bp, Artificial Sequence
  Oligonucleotide for detection of SNP TSC0026723
rctaaacatcata

SEQ ID NO: 106737 - DNA, 13 bp, Artificial Sequence
  Oligonucleotide for detection of SNP TSC0026723
tatgatatttagy

SEQ ID NO: 106738 - DNA, 13 bp, Artificial Sequence
  Oligonucleotide for detection of SNP TSC0026723
rctaaatatcata

SEQ ID NO: 106739 - DNA, 13 bp, Artificial Sequence
  Oligonucleotide for detection of SNP TSC0026723
tacgatgtttagy

SEQ ID NO: 106740 - DNA, 13 bp, Artificial Sequence
  Oligonucleotide for detection of SNP TSC0026723
rctaaacatcgta

SEQ ID NO: 106741 - DNA, 13 bp, Artificial Sequence
  Oligonucleotide for detection of SNP TSC0026723
tacgatatttagy

SEQ ID NO: 106742 - DNA, 13 bp, Artificial Sequence
  Oligonucleotide for detection of SNP TSC0026723
rctaaatatcgta

SEQ ID NO: 106743 - DNA, 13 bp, Artificial Sequence
  Oligonucleotide for detection of SNP TSC0026723
tatgacgtttagy

SEQ ID NO: 106744 - DNA, 13 bp, Artificial Sequence
  Oligonucleotide for detection of SNP TSC0026723
rctaaacgtcata

SEQ ID NO: 106745 - DNA, 13 bp, Artificial Sequence
  Oligonucleotide for detection of SNP TSC0026723
tacgacgtttagy

SEQ ID NO: 106746 - DNA, 13 bp, Artificial Sequence
  Oligonucleotide for detection of SNP TSC0026723
rctaaacgtcgta

SEQ ID NO: 106747 - DNA, 13 bp, Artificial Sequence
  Oligonucleotide for detection of SNP TSC0026725
gaagtttgtgtty

SEQ ID NO: 106748 - DNA, 13 bp, Artificial Sequence
  Oligonucleotide for detection of SNP TSC0026725
raacacaaacttc

SEQ ID NO: 106749 - DNA, 13 bp, Artificial Sequence
  Oligonucleotide for detection of SNP TSC0026725
gaagttggtgtty

SEQ ID NO: 106750 - DNA, 13 bp, Artificial Sequence
  Oligonucleotide for detection of SNP TSC0026725
raacaccaacttc

SEQ ID NO: 106751 - DNA, 13 bp, Artificial Sequence
  Oligonucleotide for detection of SNP TSC0026725
gaagttcgtgtty

SEQ ID NO: 106752 - DNA, 13 bp, Artificial Sequence
  Oligonucleotide for detection of SNP TSC0026725
raacacgaacttc

SEQ ID NO: 106753 - DNA, 13 bp, Artificial Sequence
  Oligonucleotide for detection of SNP TSC0026725
gaagtcggtgtty

SEQ ID NO: 106754 - DNA, 13 bp, Artificial Sequence
  Oligonucleotide for detection of SNP TSC0026725
raacaccgacttc

SEQ ID NO: 106755 - DNA, 13 bp, Artificial Sequence
  Oligonucleotide for detection of SNP TSC0026725
ggatatgggttty

SEQ ID NO: 106756 - DNA, 13 bp, Artificial Sequence
  Oligonucleotide for detection of SNP TSC0026725
raaacccatatcc

SEQ ID NO: 106757 - DNA, 13 bp, Artificial Sequence
  Oligonucleotide for detection of SNP TSC0026725
ggatattggttty

SEQ ID NO: 106758 - DNA, 13 bp, Artificial Sequence
  Oligonucleotide for detection of SNP TSC0026725
raaaccaatatcc

SEQ ID NO: 106759 - DNA, 13 bp, Artificial Sequence
  Oligonucleotide for detection of SNP TSC0026725
ggatacgggttty

SEQ ID NO: 106760 - DNA, 13 bp, Artificial Sequence
  Oligonucleotide for detection of SNP TSC0026725
raaacccgtatcc

SEQ ID NO: 106761 - DNA, 13 bp, Artificial Sequence
  Oligonucleotide for detection of SNP TSC0026725
ggatatcggttty

SEQ ID NO: 106762 - DNA, 13 bp, Artificial Sequence
  Oligonucleotide for detection of SNP TSC0026725
raaaccgatatcc

SEQ ID NO: 106763 - DNA, 13 bp, Artificial Sequence
  Oligonucleotide for detection of SNP TSC0026726
ttttgtatttggy

SEQ ID NO: 106764 - DNA, 13 bp, Artificial Sequence
  Oligonucleotide for detection of SNP TSC0026726
rccaaatacaaaa

SEQ ID NO: 106765 - DNA, 13 bp, Artificial Sequence
  Oligonucleotide for detection of SNP TSC0026726
ttttgtttttggy

SEQ ID NO: 106766 - DNA, 13 bp, Artificial Sequence
  Oligonucleotide for detection of SNP TSC0026726
rccaaaaacaaaa

SEQ ID NO: 106767 - DNA, 13 bp, Artificial Sequence
  Oligonucleotide for detection of SNP TSC0026726
gttaagtgtaaag

SEQ ID NO: 106768 - DNA, 13 bp, Artificial Sequence
  Oligonucleotide for detection of SNP TSC0026726
ctttacacttaac

SEQ ID NO: 106769 - DNA, 13 bp, Artificial Sequence
  Oligonucleotide for detection of SNP TSC0026726
gttaagagtaaag

SEQ ID NO: 106770 - DNA, 13 bp, Artificial Sequence
  Oligonucleotide for detection of SNP TSC0026726
ctttactcttaac

SEQ ID NO: 106771 - DNA, 13 bp, Artificial Sequence
  Oligonucleotide for detection of SNP TSC0026727
tggtttaatttty

SEQ ID NO: 106772 - DNA, 13 bp, Artificial Sequence
  Oligonucleotide for detection of SNP TSC0026727
raaaattaaacca

SEQ ID NO: 106773 - DNA, 13 bp, Artificial Sequence
  Oligonucleotide for detection of SNP TSC0026728
atgggtggtggat

SEQ ID NO: 106774 - DNA, 13 bp, Artificial Sequence
  Oligonucleotide for detection of SNP TSC0026728
atccaccacccat

SEQ ID NO: 106775 - DNA, 13 bp, Artificial Sequence
  Oligonucleotide for detection of SNP TSC0026728
atgggtagtggat

SEQ ID NO: 106776 - DNA, 13 bp, Artificial Sequence
  Oligonucleotide for detection of SNP TSC0026728
atccactacccat

SEQ ID NO: 106777 - DNA, 13 bp, Artificial Sequence
  Oligonucleotide for detection of SNP TSC0026730
atgtttttattta

SEQ ID NO: 106778 - DNA, 13 bp, Artificial Sequence
  Oligonucleotide for detection of SNP TSC0026730
taaataaaaacat

SEQ ID NO: 106779 - DNA, 13 bp, Artificial Sequence
  Oligonucleotide for detection of SNP TSC0026730
acgtttttattta

SEQ ID NO: 106780 - DNA, 13 bp, Artificial Sequence
  Oligonucleotide for detection of SNP TSC0026730
taaataaaaacgt

SEQ ID NO: 106781 - DNA, 13 bp, Artificial Sequence
  Oligonucleotide for detection of SNP TSC0026730
acgtttgtattta

SEQ ID NO: 106782 - DNA, 13 bp, Artificial Sequence
  Oligonucleotide for detection of SNP TSC0026730
taaatacaaacgt

SEQ ID NO: 106783 - DNA, 13 bp, Artificial Sequence
  Oligonucleotide for detection of SNP TSC0026730
taaatagaaatgt

SEQ ID NO: 106784 - DNA, 13 bp, Artificial Sequence
  Oligonucleotide for detection of SNP TSC0026730
acatttctattta

SEQ ID NO: 106785 - DNA, 13 bp, Artificial Sequence
  Oligonucleotide for detection of SNP TSC0026730
taaatataaatgt

SEQ ID NO: 106786 - DNA, 13 bp, Artificial Sequence
  Oligonucleotide for detection of SNP TSC0026730
acatttatattta

SEQ ID NO: 106787 - DNA, 13 bp, Artificial Sequence
  Oligonucleotide for detection of SNP TSC0026730
taaatagaaacgt

SEQ ID NO: 106788 - DNA, 13 bp, Artificial Sequence
  Oligonucleotide for detection of SNP TSC0026730
acgtttctattta

SEQ ID NO: 106789 - DNA, 13 bp, Artificial Sequence
  Oligonucleotide for detection of SNP TSC0026730
taaatataaacgt

SEQ ID NO: 106790 - DNA, 13 bp, Artificial Sequence
  Oligonucleotide for detection of SNP TSC0026730
acgtttatattta

SEQ ID NO: 106791 - DNA, 13 bp, Artificial Sequence
  Oligonucleotide for detection of SNP TSC0026731
tttgtaggtaggy

SEQ ID NO: 106792 - DNA, 13 bp, Artificial Sequence
  Oligonucleotide for detection of SNP TSC0026731
rcctacctacaaa

SEQ ID NO: 106793 - DNA, 13 bp, Artificial Sequence
  Oligonucleotide for detection of SNP TSC0026731
tttgtaagtaggy

SEQ ID NO: 106794 - DNA, 13 bp, Artificial Sequence
  Oligonucleotide for detection of SNP TSC0026731
rcctacttacaaa

SEQ ID NO: 106795 - DNA, 13 bp, Artificial Sequence
  Oligonucleotide for detection of SNP TSC0026733
gtggttgtagttt

SEQ ID NO: 106796 - DNA, 13 bp, Artificial Sequence
  Oligonucleotide for detection of SNP TSC0026733
aaactacaaccac

SEQ ID NO: 106797 - DNA, 13 bp, Artificial Sequence
  Oligonucleotide for detection of SNP TSC0026733
gtggttatagttt

SEQ ID NO: 106798 - DNA, 13 bp, Artificial Sequence
  Oligonucleotide for detection of SNP TSC0026733
aaactataaccac

SEQ ID NO: 106799 - DNA, 13 bp, Artificial Sequence
  Oligonucleotide for detection of SNP TSC0026737
ggggatagtttat

SEQ ID NO: 106800 - DNA, 13 bp, Artificial Sequence
  Oligonucleotide for detection of SNP TSC0026737
ataaactatcccc

SEQ ID NO: 106801 - DNA, 13 bp, Artificial Sequence
  Oligonucleotide for detection of SNP TSC0026737
ggggatggtttat

SEQ ID NO: 106802 - DNA, 13 bp, Artificial Sequence
  Oligonucleotide for detection of SNP TSC0026737
ataaaccatcccc

SEQ ID NO: 106803 - DNA, 13 bp, Artificial Sequence
  Oligonucleotide for detection of SNP TSC0026737
ggggacggtttat

SEQ ID NO: 106804 - DNA, 13 bp, Artificial Sequence
  Oligonucleotide for detection of SNP TSC0026737
ataaaccgtcccc

SEQ ID NO: 106805 - DNA, 13 bp, Artificial Sequence
  Oligonucleotide for detection of SNP TSC0026737
atggattgtttty

SEQ ID NO: 106806 - DNA, 13 bp, Artificial Sequence
  Oligonucleotide for detection of SNP TSC0026737
raaaacaatccat

SEQ ID NO: 106807 - DNA, 13 bp, Artificial Sequence
  Oligonucleotide for detection of SNP TSC0026737
atggatcgtttty

SEQ ID NO: 106808 - DNA, 13 bp, Artificial Sequence
  Oligonucleotide for detection of SNP TSC0026737
raaaacgatccat

SEQ ID NO: 106809 - DNA, 13 bp, Artificial Sequence
  Oligonucleotide for detection of SNP TSC0026738
ggatagtaggaga

SEQ ID NO: 106810 - DNA, 13 bp, Artificial Sequence
  Oligonucleotide for detection of SNP TSC0026738
tctcctactatcc

SEQ ID NO: 106811 - DNA, 13 bp, Artificial Sequence
  Oligonucleotide for detection of SNP TSC0026738
ggataggaggaga

SEQ ID NO: 106812 - DNA, 13 bp, Artificial Sequence
  Oligonucleotide for detection of SNP TSC0026738
tctcctcctatcc

SEQ ID NO: 106813 - DNA, 13 bp, Artificial Sequence
  Oligonucleotide for detection of SNP TSC0026739
gttataagtaata

SEQ ID NO: 106814 - DNA, 13 bp, Artificial Sequence
  Oligonucleotide for detection of SNP TSC0026739
tattacttataac

SEQ ID NO: 106815 - DNA, 13 bp, Artificial Sequence
  Oligonucleotide for detection of SNP TSC0026739
gttataggtaata

SEQ ID NO: 106816 - DNA, 13 bp, Artificial Sequence
  Oligonucleotide for detection of SNP TSC0026739
tattacctataac

SEQ ID NO: 106817 - DNA, 13 bp, Artificial Sequence
  Oligonucleotide for detection of SNP TSC0026740
taatttatagaaa

SEQ ID NO: 106818 - DNA, 13 bp, Artificial Sequence
  Oligonucleotide for detection of SNP TSC0026740
tttctataaatta

SEQ ID NO: 106819 - DNA, 13 bp, Artificial Sequence
  Oligonucleotide for detection of SNP TSC0026740
taatttttagaaa

SEQ ID NO: 106820 - DNA, 13 bp, Artificial Sequence
  Oligonucleotide for detection of SNP TSC0026740
tttctaaaaatta

SEQ ID NO: 106821 - DNA, 13 bp, Artificial Sequence
  Oligonucleotide for detection of SNP TSC0026740
tttttataaatta

SEQ ID NO: 106822 - DNA, 13 bp, Artificial Sequence
  Oligonucleotide for detection of SNP TSC0026740
taatttataaaaa

SEQ ID NO: 106823 - DNA, 13 bp, Artificial Sequence
  Oligonucleotide for detection of SNP TSC0026740
tttttagaaatta

SEQ ID NO: 106824 - DNA, 13 bp, Artificial Sequence
  Oligonucleotide for detection of SNP TSC0026740
taatttctaaaaa

SEQ ID NO: 106825 - DNA, 13 bp, Artificial Sequence
  Oligonucleotide for detection of SNP TSC0026741
tatagaaattata

SEQ ID NO: 106826 - DNA, 13 bp, Artificial Sequence
  Oligonucleotide for detection of SNP TSC0026741
tataatttctata

SEQ ID NO: 106827 - DNA, 13 bp, Artificial Sequence
  Oligonucleotide for detection of SNP TSC0026741
tatagatattata

SEQ ID NO: 106828 - DNA, 13 bp, Artificial Sequence
  Oligonucleotide for detection of SNP TSC0026741
tataatatctata

SEQ ID NO: 106829 - DNA, 13 bp, Artificial Sequence
  Oligonucleotide for detection of SNP TSC0026741
tataatttttata

SEQ ID NO: 106830 - DNA, 13 bp, Artificial Sequence
  Oligonucleotide for detection of SNP TSC0026741
tataaaaattata

SEQ ID NO: 106831 - DNA, 13 bp, Artificial Sequence
  Oligonucleotide for detection of SNP TSC0026741
tataatgtttata

SEQ ID NO: 106832 - DNA, 13 bp, Artificial Sequence
  Oligonucleotide for detection of SNP TSC0026741
tataaacattata

SEQ ID NO: 106833 - DNA, 13 bp, Artificial Sequence
  Oligonucleotide for detection of SNP TSC0026744
ttttttgaattta

SEQ ID NO: 106834 - DNA, 13 bp, Artificial Sequence
  Oligonucleotide for detection of SNP TSC0026744
taaattcaaaaaa

SEQ ID NO: 106835 - DNA, 13 bp, Artificial Sequence
  Oligonucleotide for detection of SNP TSC0026744
tttttttaattta

SEQ ID NO: 106836 - DNA, 13 bp, Artificial Sequence
  Oligonucleotide for detection of SNP TSC0026744
taaattaaaaaaa

SEQ ID NO: 106837 - DNA, 13 bp, Artificial Sequence
  Oligonucleotide for detection of SNP TSC0026744
tgagtttagaaaa

SEQ ID NO: 106838 - DNA, 13 bp, Artificial Sequence
  Oligonucleotide for detection of SNP TSC0026744
ttttctaaactca

SEQ ID NO: 106839 - DNA, 13 bp, Artificial Sequence
  Oligonucleotide for detection of SNP TSC0026744
tgagttaagaaaa

SEQ ID NO: 106840 - DNA, 13 bp, Artificial Sequence
  Oligonucleotide for detection of SNP TSC0026744
ttttcttaactca

SEQ ID NO: 106841 - DNA, 13 bp, Artificial Sequence
  Oligonucleotide for detection of SNP TSC0026746
gaaaataaggata

SEQ ID NO: 106842 - DNA, 13 bp, Artificial Sequence
  Oligonucleotide for detection of SNP TSC0026746
tatccttattttc

SEQ ID NO: 106843 - DNA, 13 bp, Artificial Sequence
  Oligonucleotide for detection of SNP TSC0026746
gaaaattaggata

SEQ ID NO: 106844 - DNA, 13 bp, Artificial Sequence
  Oligonucleotide for detection of SNP TSC0026746
tatcctaattttc

SEQ ID NO: 106845 - DNA, 13 bp, Artificial Sequence
  Oligonucleotide for detection of SNP TSC0026750
tttttggttttaa

SEQ ID NO: 106846 - DNA, 13 bp, Artificial Sequence
  Oligonucleotide for detection of SNP TSC0026750
ttaaaaccaaaaa

SEQ ID NO: 106847 - DNA, 13 bp, Artificial Sequence
  Oligonucleotide for detection of SNP TSC0026750
tttttgtttttaa

SEQ ID NO: 106848 - DNA, 13 bp, Artificial Sequence
  Oligonucleotide for detection of SNP TSC0026750
ttaaaaacaaaaa

SEQ ID NO: 106849 - DNA, 13 bp, Artificial Sequence
  Oligonucleotide for detection of SNP TSC0026750
ttaaaattagaaa

SEQ ID NO: 106850 - DNA, 13 bp, Artificial Sequence
  Oligonucleotide for detection of SNP TSC0026750
tttctaattttaa

SEQ ID NO: 106851 - DNA, 13 bp, Artificial Sequence
  Oligonucleotide for detection of SNP TSC0026750
ttaaaaatagaaa

SEQ ID NO: 106852 - DNA, 13 bp, Artificial Sequence
  Oligonucleotide for detection of SNP TSC0026750
tttctatttttaa

SEQ ID NO: 106853 - DNA, 13 bp, Artificial Sequence
  Oligonucleotide for detection of SNP TSC0026752
tattattgtttty

SEQ ID NO: 106854 - DNA, 13 bp, Artificial Sequence
  Oligonucleotide for detection of SNP TSC0026752
raaaacaataata

SEQ ID NO: 106855 - DNA, 13 bp, Artificial Sequence
  Oligonucleotide for detection of SNP TSC0026752
tattatcgtttty

SEQ ID NO: 106856 - DNA, 13 bp, Artificial Sequence
  Oligonucleotide for detection of SNP TSC0026752
raaaacgataata

SEQ ID NO: 106857 - DNA, 13 bp, Artificial Sequence
  Oligonucleotide for detection of SNP TSC0026752
gagggtggtgata

SEQ ID NO: 106858 - DNA, 13 bp, Artificial Sequence
  Oligonucleotide for detection of SNP TSC0026752
tatcaccaccctc

SEQ ID NO: 106859 - DNA, 13 bp, Artificial Sequence
  Oligonucleotide for detection of SNP TSC0026752
gagggtagtgata

SEQ ID NO: 106860 - DNA, 13 bp, Artificial Sequence
  Oligonucleotide for detection of SNP TSC0026752
tatcactaccctc

SEQ ID NO: 106861 - DNA, 13 bp, Artificial Sequence
  Oligonucleotide for detection of SNP TSC0026752
gagggcggtgata

SEQ ID NO: 106862 - DNA, 13 bp, Artificial Sequence
  Oligonucleotide for detection of SNP TSC0026752
tatcaccgccctc

SEQ ID NO: 106863 - DNA, 13 bp, Artificial Sequence
  Oligonucleotide for detection of SNP TSC0026753
tttttttttatgt

SEQ ID NO: 106864 - DNA, 13 bp, Artificial Sequence
  Oligonucleotide for detection of SNP TSC0026753
acataaaaaaaaa

SEQ ID NO: 106865 - DNA, 13 bp, Artificial Sequence
  Oligonucleotide for detection of SNP TSC0026753
atatggtggggaa

SEQ ID NO: 106866 - DNA, 13 bp, Artificial Sequence
  Oligonucleotide for detection of SNP TSC0026753
ttccccaccatat

SEQ ID NO: 106867 - DNA, 13 bp, Artificial Sequence
  Oligonucleotide for detection of SNP TSC0026753
atatgggggggaa

SEQ ID NO: 106868 - DNA, 13 bp, Artificial Sequence
  Oligonucleotide for detection of SNP TSC0026753
ttcccccccatat

SEQ ID NO: 106869 - DNA, 13 bp, Artificial Sequence
  Oligonucleotide for detection of SNP TSC0026757
aaaagtgtttttt

SEQ ID NO: 106870 - DNA, 13 bp, Artificial Sequence
  Oligonucleotide for detection of SNP TSC0026757
aaaaaacactttt

SEQ ID NO: 106871 - DNA, 13 bp, Artificial Sequence
  Oligonucleotide for detection of SNP TSC0026757
aaaagtatttttt

SEQ ID NO: 106872 - DNA, 13 bp, Artificial Sequence
  Oligonucleotide for detection of SNP TSC0026757
aaaaaatactttt

SEQ ID NO: 106873 - DNA, 13 bp, Artificial Sequence
  Oligonucleotide for detection of SNP TSC0026758
atattgttttttt

SEQ ID NO: 106874 - DNA, 13 bp, Artificial Sequence
  Oligonucleotide for detection of SNP TSC0026758
aaaaaaacaatat

SEQ ID NO: 106875 - DNA, 13 bp, Artificial Sequence
  Oligonucleotide for detection of SNP TSC0026758
atattggtttttt

SEQ ID NO: 106876 - DNA, 13 bp, Artificial Sequence
  Oligonucleotide for detection of SNP TSC0026758
aaaaaaccaatat

SEQ ID NO: 106877 - DNA, 13 bp, Artificial Sequence
  Oligonucleotide for detection of SNP TSC0026758
aaaaaagtagtgt

SEQ ID NO: 106878 - DNA, 13 bp, Artificial Sequence
  Oligonucleotide for detection of SNP TSC0026758
acactactttttt

SEQ ID NO: 106879 - DNA, 13 bp, Artificial Sequence
  Oligonucleotide for detection of SNP TSC0026758
aaaaaattagtgt

SEQ ID NO: 106880 - DNA, 13 bp, Artificial Sequence
  Oligonucleotide for detection of SNP TSC0026758
acactaatttttt

SEQ ID NO: 106881 - DNA, 13 bp, Artificial Sequence
  Oligonucleotide for detection of SNP TSC0026759
taggattgtagtg

SEQ ID NO: 106882 - DNA, 13 bp, Artificial Sequence
  Oligonucleotide for detection of SNP TSC0026759
cactacaatccta

SEQ ID NO: 106883 - DNA, 13 bp, Artificial Sequence
  Oligonucleotide for detection of SNP TSC0026759
taggatcgtagtg

SEQ ID NO: 106884 - DNA, 13 bp, Artificial Sequence
  Oligonucleotide for detection of SNP TSC0026759
cactacgatccta

SEQ ID NO: 106885 - DNA, 13 bp, Artificial Sequence
  Oligonucleotide for detection of SNP TSC0026759
tattgtggttttg

SEQ ID NO: 106886 - DNA, 13 bp, Artificial Sequence
  Oligonucleotide for detection of SNP TSC0026759
caaaaccacaata

SEQ ID NO: 106887 - DNA, 13 bp, Artificial Sequence
  Oligonucleotide for detection of SNP TSC0026759
tattgtagttttg

SEQ ID NO: 106888 - DNA, 13 bp, Artificial Sequence
  Oligonucleotide for detection of SNP TSC0026759
caaaactacaata

SEQ ID NO: 106889 - DNA, 13 bp, Artificial Sequence
  Oligonucleotide for detection of SNP TSC0026759
tattgcggttttg

SEQ ID NO: 106890 - DNA, 13 bp, Artificial Sequence
  Oligonucleotide for detection of SNP TSC0026759
caaaaccgcaata

SEQ ID NO: 106891 - DNA, 13 bp, Artificial Sequence
  Oligonucleotide for detection of SNP TSC0026761
agtagtattgatg

SEQ ID NO: 106892 - DNA, 13 bp, Artificial Sequence
  Oligonucleotide for detection of SNP TSC0026761
catcaatactact

SEQ ID NO: 106893 - DNA, 13 bp, Artificial Sequence
  Oligonucleotide for detection of SNP TSC0026761
agtagtgttgatg

SEQ ID NO: 106894 - DNA, 13 bp, Artificial Sequence
  Oligonucleotide for detection of SNP TSC0026761
catcaacactact

SEQ ID NO: 106895 - DNA, 13 bp, Artificial Sequence
  Oligonucleotide for detection of SNP TSC0026761
agtagcgttgatg

SEQ ID NO: 106896 - DNA, 13 bp, Artificial Sequence
  Oligonucleotide for detection of SNP TSC0026761
catcaacgctact

SEQ ID NO: 106897 - DNA, 13 bp, Artificial Sequence
  Oligonucleotide for detection of SNP TSC0026761
tattaatgttgtt

SEQ ID NO: 106898 - DNA, 13 bp, Artificial Sequence
  Oligonucleotide for detection of SNP TSC0026761
aacaacattaata

SEQ ID NO: 106899 - DNA, 13 bp, Artificial Sequence
  Oligonucleotide for detection of SNP TSC0026761
tattaacgttgtt

SEQ ID NO: 106900 - DNA, 13 bp, Artificial Sequence
  Oligonucleotide for detection of SNP TSC0026761
aacaacgttaata

SEQ ID NO: 106901 - DNA, 13 bp, Artificial Sequence
  Oligonucleotide for detection of SNP TSC0026763
ttatagatggtga

SEQ ID NO: 106902 - DNA, 13 bp, Artificial Sequence
  Oligonucleotide for detection of SNP TSC0026763
tcaccatctataa

SEQ ID NO: 106903 - DNA, 13 bp, Artificial Sequence
  Oligonucleotide for detection of SNP TSC0026763
ttataggtggtga

SEQ ID NO: 106904 - DNA, 13 bp, Artificial Sequence
  Oligonucleotide for detection of SNP TSC0026763
tcaccacctataa

SEQ ID NO: 106905 - DNA, 13 bp, Artificial Sequence
  Oligonucleotide for detection of SNP TSC0026765
ggtaaaagtttga

SEQ ID NO: 106906 - DNA, 13 bp, Artificial Sequence
  Oligonucleotide for detection of SNP TSC0026765
tcaaacttttacc

SEQ ID NO: 106907 - DNA, 13 bp, Artificial Sequence
  Oligonucleotide for detection of SNP TSC0026765
ggtaaatgtttga

SEQ ID NO: 106908 - DNA, 13 bp, Artificial Sequence
  Oligonucleotide for detection of SNP TSC0026765
tcaaacatttacc

SEQ ID NO: 106909 - DNA, 13 bp, Artificial Sequence
  Oligonucleotide for detection of SNP TSC0026765
ggtaaacgtttga

SEQ ID NO: 106910 - DNA, 13 bp, Artificial Sequence
  Oligonucleotide for detection of SNP TSC0026765
tcaaacgtttacc

SEQ ID NO: 106911 - DNA, 13 bp, Artificial Sequence
  Oligonucleotide for detection of SNP TSC0026765
ttaaatttttgty

SEQ ID NO: 106912 - DNA, 13 bp, Artificial Sequence
  Oligonucleotide for detection of SNP TSC0026765
racaaaaatttaa

SEQ ID NO: 106913 - DNA, 13 bp, Artificial Sequence
  Oligonucleotide for detection of SNP TSC0026765
ttaaatgtttgty

SEQ ID NO: 106914 - DNA, 13 bp, Artificial Sequence
  Oligonucleotide for detection of SNP TSC0026765
racaaacatttaa

SEQ ID NO: 106915 - DNA, 13 bp, Artificial Sequence
  Oligonucleotide for detection of SNP TSC0026765
ttaaacgtttgty

SEQ ID NO: 106916 - DNA, 13 bp, Artificial Sequence
  Oligonucleotide for detection of SNP TSC0026765
racaaacgtttaa

SEQ ID NO: 106917 - DNA, 13 bp, Artificial Sequence
  Oligonucleotide for detection of SNP TSC0026766
ttgaattgtgaga

SEQ ID NO: 106918 - DNA, 13 bp, Artificial Sequence
  Oligonucleotide for detection of SNP TSC0026766
tctcacaattcaa

SEQ ID NO: 106919 - DNA, 13 bp, Artificial Sequence
  Oligonucleotide for detection of SNP TSC0026766
ttgaatcgtgaga

SEQ ID NO: 106920 - DNA, 13 bp, Artificial Sequence
  Oligonucleotide for detection of SNP TSC0026766
tctcacgattcaa

SEQ ID NO: 106921 - DNA, 13 bp, Artificial Sequence
  Oligonucleotide for detection of SNP TSC0026766
ttttacggtttag

SEQ ID NO: 106922 - DNA, 13 bp, Artificial Sequence
  Oligonucleotide for detection of SNP TSC0026766
ctaaaccgtaaaa

SEQ ID NO: 106923 - DNA, 13 bp, Artificial Sequence
  Oligonucleotide for detection of SNP TSC0026770
tgataatgattag

SEQ ID NO: 106924 - DNA, 13 bp, Artificial Sequence
  Oligonucleotide for detection of SNP TSC0026770
ctaatcattatca

SEQ ID NO: 106925 - DNA, 13 bp, Artificial Sequence
  Oligonucleotide for detection of SNP TSC0026770
tgataacgattag

SEQ ID NO: 106926 - DNA, 13 bp, Artificial Sequence
  Oligonucleotide for detection of SNP TSC0026770
ctaatcgttatca

SEQ ID NO: 106927 - DNA, 13 bp, Artificial Sequence
  Oligonucleotide for detection of SNP TSC0026770
ttagttgttgtta

SEQ ID NO: 106928 - DNA, 13 bp, Artificial Sequence
  Oligonucleotide for detection of SNP TSC0026770
taacaacaactaa

SEQ ID NO: 106929 - DNA, 13 bp, Artificial Sequence
  Oligonucleotide for detection of SNP TSC0026770
ttagttattgtta

SEQ ID NO: 106930 - DNA, 13 bp, Artificial Sequence
  Oligonucleotide for detection of SNP TSC0026770
taacaataactaa

SEQ ID NO: 106931 - DNA, 13 bp, Artificial Sequence
  Oligonucleotide for detection of SNP TSC0026770
ttagtcgttgtta

SEQ ID NO: 106932 - DNA, 13 bp, Artificial Sequence
  Oligonucleotide for detection of SNP TSC0026770
taacaacgactaa

SEQ ID NO: 106933 - DNA, 13 bp, Artificial Sequence
  Oligonucleotide for detection of SNP TSC0026771
tggattgttagty

SEQ ID NO: 106934 - DNA, 13 bp, Artificial Sequence
  Oligonucleotide for detection of SNP TSC0026771
ractaacaatcca

SEQ ID NO: 106935 - DNA, 13 bp, Artificial Sequence
  Oligonucleotide for detection of SNP TSC0026771
tggattattagty

SEQ ID NO: 106936 - DNA, 13 bp, Artificial Sequence
  Oligonucleotide for detection of SNP TSC0026771
ractaataatcca

SEQ ID NO: 106937 - DNA, 13 bp, Artificial Sequence
  Oligonucleotide for detection of SNP TSC0026772
aaaaaaaaaaagy

SEQ ID NO: 106938 - DNA, 13 bp, Artificial Sequence
  Oligonucleotide for detection of SNP TSC0026772
rcttttttttttt

SEQ ID NO: 106939 - DNA, 13 bp, Artificial Sequence
  Oligonucleotide for detection of SNP TSC0026772
aaaaaataaaagy

SEQ ID NO: 106940 - DNA, 13 bp, Artificial Sequence
  Oligonucleotide for detection of SNP TSC0026772
rcttttatttttt

SEQ ID NO: 106941 - DNA, 13 bp, Artificial Sequence
  Oligonucleotide for detection of SNP TSC0026772
gtttttttttttt

SEQ ID NO: 106942 - DNA, 13 bp, Artificial Sequence
  Oligonucleotide for detection of SNP TSC0026772
aaaaaaaaaaaac

SEQ ID NO: 106943 - DNA, 13 bp, Artificial Sequence
  Oligonucleotide for detection of SNP TSC0026773
ataaatgaatgat

SEQ ID NO: 106944 - DNA, 13 bp, Artificial Sequence
  Oligonucleotide for detection of SNP TSC0026773
atcattcatttat

SEQ ID NO: 106945 - DNA, 13 bp, Artificial Sequence
  Oligonucleotide for detection of SNP TSC0026773
ataaattaatgat

SEQ ID NO: 106946 - DNA, 13 bp, Artificial Sequence
  Oligonucleotide for detection of SNP TSC0026773
atcattaatttat

SEQ ID NO: 106947 - DNA, 13 bp, Artificial Sequence
  Oligonucleotide for detection of SNP TSC0026773
attatttatttgt

SEQ ID NO: 106948 - DNA, 13 bp, Artificial Sequence
  Oligonucleotide for detection of SNP TSC0026773
acaaataaataat

SEQ ID NO: 106949 - DNA, 13 bp, Artificial Sequence
  Oligonucleotide for detection of SNP TSC0026773
attattaatttgt

SEQ ID NO: 106950 - DNA, 13 bp, Artificial Sequence
  Oligonucleotide for detection of SNP TSC0026773
acaaattaataat

SEQ ID NO: 106951 - DNA, 13 bp, Artificial Sequence
  Oligonucleotide for detection of SNP TSC0026778
tagggtagttatt

SEQ ID NO: 106952 - DNA, 13 bp, Artificial Sequence
  Oligonucleotide for detection of SNP TSC0026778
aataactacccta

SEQ ID NO: 106953 - DNA, 13 bp, Artificial Sequence
  Oligonucleotide for detection of SNP TSC0026778
tagggttgttatt

SEQ ID NO: 106954 - DNA, 13 bp, Artificial Sequence
  Oligonucleotide for detection of SNP TSC0026778
aataacaacccta

SEQ ID NO: 106955 - DNA, 13 bp, Artificial Sequence
  Oligonucleotide for detection of SNP TSC0026778
tagggtcgttatt

SEQ ID NO: 106956 - DNA, 13 bp, Artificial Sequence
  Oligonucleotide for detection of SNP TSC0026778
aataacgacccta

SEQ ID NO: 106957 - DNA, 13 bp, Artificial Sequence
  Oligonucleotide for detection of SNP TSC0026778
aataattgttttg

SEQ ID NO: 106958 - DNA, 13 bp, Artificial Sequence
  Oligonucleotide for detection of SNP TSC0026778
caaaacaattatt

SEQ ID NO: 106959 - DNA, 13 bp, Artificial Sequence
  Oligonucleotide for detection of SNP TSC0026778
aataatggttttg

SEQ ID NO: 106960 - DNA, 13 bp, Artificial Sequence
  Oligonucleotide for detection of SNP TSC0026778
caaaaccattatt

SEQ ID NO: 106961 - DNA, 13 bp, Artificial Sequence
  Oligonucleotide for detection of SNP TSC0026778
aataacggttttg

SEQ ID NO: 106962 - DNA, 13 bp, Artificial Sequence
  Oligonucleotide for detection of SNP TSC0026778
caaaaccgttatt

SEQ ID NO: 106963 - DNA, 13 bp, Artificial Sequence
  Oligonucleotide for detection of SNP TSC0026781
atggagtgaggag

SEQ ID NO: 106964 - DNA, 13 bp, Artificial Sequence
  Oligonucleotide for detection of SNP TSC0026781
ctcctcactccat

SEQ ID NO: 106965 - DNA, 13 bp, Artificial Sequence
  Oligonucleotide for detection of SNP TSC0026781
atggagagaggag

SEQ ID NO: 106966 - DNA, 13 bp, Artificial Sequence
  Oligonucleotide for detection of SNP TSC0026781
ctcctctctccat

SEQ ID NO: 106967 - DNA, 13 bp, Artificial Sequence
  Oligonucleotide for detection of SNP TSC0026781
atggagcgaggag

SEQ ID NO: 106968 - DNA, 13 bp, Artificial Sequence
  Oligonucleotide for detection of SNP TSC0026781
ctcctcgctccat

SEQ ID NO: 106969 - DNA, 13 bp, Artificial Sequence
  Oligonucleotide for detection of SNP TSC0026782
gttatttgagtta

SEQ ID NO: 106970 - DNA, 13 bp, Artificial Sequence
  Oligonucleotide for detection of SNP TSC0026782
taactcaaataac

SEQ ID NO: 106971 - DNA, 13 bp, Artificial Sequence
  Oligonucleotide for detection of SNP TSC0026782
gttattcgagtta

SEQ ID NO: 106972 - DNA, 13 bp, Artificial Sequence
  Oligonucleotide for detection of SNP TSC0026782
taactcgaataac

SEQ ID NO: 106973 - DNA, 13 bp, Artificial Sequence
  Oligonucleotide for detection of SNP TSC0026782
tggtttggatgay

SEQ ID NO: 106974 - DNA, 13 bp, Artificial Sequence
  Oligonucleotide for detection of SNP TSC0026782
rtcatccaaacca

SEQ ID NO: 106975 - DNA, 13 bp, Artificial Sequence
  Oligonucleotide for detection of SNP TSC0026782
tggtttagatgay

SEQ ID NO: 106976 - DNA, 13 bp, Artificial Sequence
  Oligonucleotide for detection of SNP TSC0026782
rtcatctaaacca

SEQ ID NO: 106977 - DNA, 13 bp, Artificial Sequence
  Oligonucleotide for detection of SNP TSC0026782
tggttcggatgay

SEQ ID NO: 106978 - DNA, 13 bp, Artificial Sequence
  Oligonucleotide for detection of SNP TSC0026782
rtcatccgaacca

SEQ ID NO: 106979 - DNA, 13 bp, Artificial Sequence
  Oligonucleotide for detection of SNP TSC0026783
tatttaatttgty

SEQ ID NO: 106980 - DNA, 13 bp, Artificial Sequence
  Oligonucleotide for detection of SNP TSC0026783
racaaattaaata

SEQ ID NO: 106981 - DNA, 13 bp, Artificial Sequence
  Oligonucleotide for detection of SNP TSC0026783
tatttagtttgty

SEQ ID NO: 106982 - DNA, 13 bp, Artificial Sequence
  Oligonucleotide for detection of SNP TSC0026783
racaaactaaata

SEQ ID NO: 106983 - DNA, 13 bp, Artificial Sequence
  Oligonucleotide for detection of SNP TSC0026784
tattaaattaagy

SEQ ID NO: 106984 - DNA, 13 bp, Artificial Sequence
  Oligonucleotide for detection of SNP TSC0026784
rcttaatttaata

SEQ ID NO: 106985 - DNA, 13 bp, Artificial Sequence
  Oligonucleotide for detection of SNP TSC0026784
tattaatttaagy

SEQ ID NO: 106986 - DNA, 13 bp, Artificial Sequence
  Oligonucleotide for detection of SNP TSC0026784
rcttaaattaata

SEQ ID NO: 106987 - DNA, 13 bp, Artificial Sequence
  Oligonucleotide for detection of SNP TSC0026784
gtttaatttaata

SEQ ID NO: 106988 - DNA, 13 bp, Artificial Sequence
  Oligonucleotide for detection of SNP TSC0026784
tattaaattaaac

SEQ ID NO: 106989 - DNA, 13 bp, Artificial Sequence
  Oligonucleotide for detection of SNP TSC0026784
gtttaagttaata

SEQ ID NO: 106990 - DNA, 13 bp, Artificial Sequence
  Oligonucleotide for detection of SNP TSC0026784
tattaacttaaac

SEQ ID NO: 106991 - DNA, 13 bp, Artificial Sequence
  Oligonucleotide for detection of SNP TSC0026785
aaaatatgaagat

SEQ ID NO: 106992 - DNA, 13 bp, Artificial Sequence
  Oligonucleotide for detection of SNP TSC0026785
atcttcatatttt

SEQ ID NO: 106993 - DNA, 13 bp, Artificial Sequence
  Oligonucleotide for detection of SNP TSC0026785
aaaataggaagat

SEQ ID NO: 106994 - DNA, 13 bp, Artificial Sequence
  Oligonucleotide for detection of SNP TSC0026785
atcttcctatttt

SEQ ID NO: 106995 - DNA, 13 bp, Artificial Sequence
  Oligonucleotide for detection of SNP TSC0026785
aaaatacgaagat

SEQ ID NO: 106996 - DNA, 13 bp, Artificial Sequence
  Oligonucleotide for detection of SNP TSC0026785
atcttcgtatttt

SEQ ID NO: 106997 - DNA, 13 bp, Artificial Sequence
  Oligonucleotide for detection of SNP TSC0026785
atttttttgtttt

SEQ ID NO: 106998 - DNA, 13 bp, Artificial Sequence
  Oligonucleotide for detection of SNP TSC0026785
aaaacaaaaaaat

SEQ ID NO: 106999 - DNA, 13 bp, Artificial Sequence
  Oligonucleotide for detection of SNP TSC0026786
gatggtaatgtay

SEQ ID NO: 107000 - DNA, 13 bp, Artificial Sequence
  Oligonucleotide for detection of SNP TSC0026786
rtacattaccatc

SEQ ID NO: 107001 - DNA, 13 bp, Artificial Sequence
  Oligonucleotide for detection of SNP TSC0026786
gatggtgatgtay

SEQ ID NO: 107002 - DNA, 13 bp, Artificial Sequence
  Oligonucleotide for detection of SNP TSC0026786
rtacatcaccatc

SEQ ID NO: 107003 - DNA, 13 bp, Artificial Sequence
  Oligonucleotide for detection of SNP TSC0026786
gatggcgatgtay

SEQ ID NO: 107004 - DNA, 13 bp, Artificial Sequence
  Oligonucleotide for detection of SNP TSC0026786
rtacatcgccatc

SEQ ID NO: 107005 - DNA, 13 bp, Artificial Sequence
  Oligonucleotide for detection of SNP TSC0026786
gtgtattgttaty

SEQ ID NO: 107006 - DNA, 13 bp, Artificial Sequence
  Oligonucleotide for detection of SNP TSC0026786
rataacaatacac

SEQ ID NO: 107007 - DNA, 13 bp, Artificial Sequence
  Oligonucleotide for detection of SNP TSC0026786
gtgtatcgttaty

SEQ ID NO: 107008 - DNA, 13 bp, Artificial Sequence
  Oligonucleotide for detection of SNP TSC0026786
rataacgatacac

SEQ ID NO: 107009 - DNA, 13 bp, Artificial Sequence
  Oligonucleotide for detection of SNP TSC0026789
ttttatggatgtg

SEQ ID NO: 107010 - DNA, 13 bp, Artificial Sequence
  Oligonucleotide for detection of SNP TSC0026789
cacatccataaaa

SEQ ID NO: 107011 - DNA, 13 bp, Artificial Sequence
  Oligonucleotide for detection of SNP TSC0026789
ttttatagatgtg

SEQ ID NO: 107012 - DNA, 13 bp, Artificial Sequence
  Oligonucleotide for detection of SNP TSC0026789
cacatctataaaa

SEQ ID NO: 107013 - DNA, 13 bp, Artificial Sequence
  Oligonucleotide for detection of SNP TSC0026790
tatttttagttag

SEQ ID NO: 107014 - DNA, 13 bp, Artificial Sequence
  Oligonucleotide for detection of SNP TSC0026790
ctaactaaaaata

SEQ ID NO: 107015 - DNA, 13 bp, Artificial Sequence
  Oligonucleotide for detection of SNP TSC0026790
tattttgagttag

SEQ ID NO: 107016 - DNA, 13 bp, Artificial Sequence
  Oligonucleotide for detection of SNP TSC0026790
ctaactcaaaata

SEQ ID NO: 107017 - DNA, 13 bp, Artificial Sequence
  Oligonucleotide for detection of SNP TSC0026790
ttgattgaggatg

SEQ ID NO: 107018 - DNA, 13 bp, Artificial Sequence
  Oligonucleotide for detection of SNP TSC0026790
catcctcaatcaa

SEQ ID NO: 107019 - DNA, 13 bp, Artificial Sequence
  Oligonucleotide for detection of SNP TSC0026790
ttgatttaggatg

SEQ ID NO: 107020 - DNA, 13 bp, Artificial Sequence
  Oligonucleotide for detection of SNP TSC0026790
catcctaaatcaa

SEQ ID NO: 107021 - DNA, 13 bp, Artificial Sequence
  Oligonucleotide for detection of SNP TSC0026793
atttgaggttaag

SEQ ID NO: 107022 - DNA, 13 bp, Artificial Sequence
  Oligonucleotide for detection of SNP TSC0026793
cttaacctcaaat

SEQ ID NO: 107023 - DNA, 13 bp, Artificial Sequence
  Oligonucleotide for detection of SNP TSC0026793
atttgatgttaag

SEQ ID NO: 107024 - DNA, 13 bp, Artificial Sequence
  Oligonucleotide for detection of SNP TSC0026793
cttaacatcaaat

SEQ ID NO: 107025 - DNA, 13 bp, Artificial Sequence
  Oligonucleotide for detection of SNP TSC0026793
tttagttttaggt

SEQ ID NO: 107026 - DNA, 13 bp, Artificial Sequence
  Oligonucleotide for detection of SNP TSC0026793
acctaaaactaaa

SEQ ID NO: 107027 - DNA, 13 bp, Artificial Sequence
  Oligonucleotide for detection of SNP TSC0026793
tttagtattaggt

SEQ ID NO: 107028 - DNA, 13 bp, Artificial Sequence
  Oligonucleotide for detection of SNP TSC0026793
acctaatactaaa

SEQ ID NO: 107029 - DNA, 13 bp, Artificial Sequence
  Oligonucleotide for detection of SNP TSC0026798
ggaagggagtaga

SEQ ID NO: 107030 - DNA, 13 bp, Artificial Sequence
  Oligonucleotide for detection of SNP TSC0026798
tctactcccttcc

SEQ ID NO: 107031 - DNA, 13 bp, Artificial Sequence
  Oligonucleotide for detection of SNP TSC0026798
ggaaggaagtaga

SEQ ID NO: 107032 - DNA, 13 bp, Artificial Sequence
  Oligonucleotide for detection of SNP TSC0026798
tctacttccttcc

SEQ ID NO: 107033 - DNA, 13 bp, Artificial Sequence
  Oligonucleotide for detection of SNP TSC0026801
atatttagggaaa

SEQ ID NO: 107034 - DNA, 13 bp, Artificial Sequence
  Oligonucleotide for detection of SNP TSC0026801
tttccctaaatat

SEQ ID NO: 107035 - DNA, 13 bp, Artificial Sequence
  Oligonucleotide for detection of SNP TSC0026801
atatttggggaaa

SEQ ID NO: 107036 - DNA, 13 bp, Artificial Sequence
  Oligonucleotide for detection of SNP TSC0026801
tttccccaaatat

SEQ ID NO: 107037 - DNA, 13 bp, Artificial Sequence
  Oligonucleotide for detection of SNP TSC0026801
atattcggggaaa

SEQ ID NO: 107038 - DNA, 13 bp, Artificial Sequence
  Oligonucleotide for detection of SNP TSC0026801
tttccccgaatat

SEQ ID NO: 107039 - DNA, 13 bp, Artificial Sequence
  Oligonucleotide for detection of SNP TSC0026801
tttttttggatat

SEQ ID NO: 107040 - DNA, 13 bp, Artificial Sequence
  Oligonucleotide for detection of SNP TSC0026801
atatccaaaaaaa

SEQ ID NO: 107041 - DNA, 13 bp, Artificial Sequence
  Oligonucleotide for detection of SNP TSC0026801
ttttttcggatat

SEQ ID NO: 107042 - DNA, 13 bp, Artificial Sequence
  Oligonucleotide for detection of SNP TSC0026801
atatccgaaaaaa

SEQ ID NO: 107043 - DNA, 13 bp, Artificial Sequence
  Oligonucleotide for detection of SNP TSC0026803
gaggttaaggtaa

SEQ ID NO: 107044 - DNA, 13 bp, Artificial Sequence
  Oligonucleotide for detection of SNP TSC0026803
ttaccttaacctc

SEQ ID NO: 107045 - DNA, 13 bp, Artificial Sequence
  Oligonucleotide for detection of SNP TSC0026803
gaggttgaggtaa

SEQ ID NO: 107046 - DNA, 13 bp, Artificial Sequence
  Oligonucleotide for detection of SNP TSC0026803
ttacctcaacctc

SEQ ID NO: 107047 - DNA, 13 bp, Artificial Sequence
  Oligonucleotide for detection of SNP TSC0026803
gaggtcgaggtaa

SEQ ID NO: 107048 - DNA, 13 bp, Artificial Sequence
  Oligonucleotide for detection of SNP TSC0026803
ttacctcgacctc

SEQ ID NO: 107049 - DNA, 13 bp, Artificial Sequence
  Oligonucleotide for detection of SNP TSC0026806
ttttagatttggt

SEQ ID NO: 107050 - DNA, 13 bp, Artificial Sequence
  Oligonucleotide for detection of SNP TSC0026806
accaaatctaaaa

SEQ ID NO: 107051 - DNA, 13 bp, Artificial Sequence
  Oligonucleotide for detection of SNP TSC0026806
ttttagttttggt

SEQ ID NO: 107052 - DNA, 13 bp, Artificial Sequence
  Oligonucleotide for detection of SNP TSC0026806
accaaaactaaaa

SEQ ID NO: 107053 - DNA, 13 bp, Artificial Sequence
  Oligonucleotide for detection of SNP TSC0026806
attaagtttggga

SEQ ID NO: 107054 - DNA, 13 bp, Artificial Sequence
  Oligonucleotide for detection of SNP TSC0026806
tcccaaacttaat

SEQ ID NO: 107055 - DNA, 13 bp, Artificial Sequence
  Oligonucleotide for detection of SNP TSC0026806
attaaggttggga

SEQ ID NO: 107056 - DNA, 13 bp, Artificial Sequence
  Oligonucleotide for detection of SNP TSC0026806
tcccaaccttaat

SEQ ID NO: 107057 - DNA, 13 bp, Artificial Sequence
  Oligonucleotide for detection of SNP TSC0026807
tatgttatgtgta

SEQ ID NO: 107058 - DNA, 13 bp, Artificial Sequence
  Oligonucleotide for detection of SNP TSC0026807
tacacataacata

SEQ ID NO: 107059 - DNA, 13 bp, Artificial Sequence
  Oligonucleotide for detection of SNP TSC0026807
tatgttgtgtgta

SEQ ID NO: 107060 - DNA, 13 bp, Artificial Sequence
  Oligonucleotide for detection of SNP TSC0026807
tacacacaacata

SEQ ID NO: 107061 - DNA, 13 bp, Artificial Sequence
  Oligonucleotide for detection of SNP TSC0026807
tatgtcgtgtgta

SEQ ID NO: 107062 - DNA, 13 bp, Artificial Sequence
  Oligonucleotide for detection of SNP TSC0026807
tacacacgacata

SEQ ID NO: 107063 - DNA, 13 bp, Artificial Sequence
  Oligonucleotide for detection of SNP TSC0026807
tatatatgatatg

SEQ ID NO: 107064 - DNA, 13 bp, Artificial Sequence
  Oligonucleotide for detection of SNP TSC0026807
catatcatatata

SEQ ID NO: 107065 - DNA, 13 bp, Artificial Sequence
  Oligonucleotide for detection of SNP TSC0026807
tatatacgatatg

SEQ ID NO: 107066 - DNA, 13 bp, Artificial Sequence
  Oligonucleotide for detection of SNP TSC0026807
catatcgtatata

SEQ ID NO: 107067 - DNA, 13 bp, Artificial Sequence
  Oligonucleotide for detection of SNP TSC0026815
ttgggaatgttta

SEQ ID NO: 107068 - DNA, 13 bp, Artificial Sequence
  Oligonucleotide for detection of SNP TSC0026815
taaacattcccaa

SEQ ID NO: 107069 - DNA, 13 bp, Artificial Sequence
  Oligonucleotide for detection of SNP TSC0026815
ttgggattgttta

SEQ ID NO: 107070 - DNA, 13 bp, Artificial Sequence
  Oligonucleotide for detection of SNP TSC0026815
taaacaatcccaa

SEQ ID NO: 107071 - DNA, 13 bp, Artificial Sequence
  Oligonucleotide for detection of SNP TSC0026815
tgagtatttttaa

SEQ ID NO: 107072 - DNA, 13 bp, Artificial Sequence
  Oligonucleotide for detection of SNP TSC0026815
ttaaaaatactca

SEQ ID NO: 107073 - DNA, 13 bp, Artificial Sequence
  Oligonucleotide for detection of SNP TSC0026815
tgagtaattttaa

SEQ ID NO: 107074 - DNA, 13 bp, Artificial Sequence
  Oligonucleotide for detection of SNP TSC0026815
ttaaaattactca

SEQ ID NO: 107075 - DNA, 13 bp, Artificial Sequence
  Oligonucleotide for detection of SNP TSC0026818
attggaaggggga

SEQ ID NO: 107076 - DNA, 13 bp, Artificial Sequence
  Oligonucleotide for detection of SNP TSC0026818
tcccccttccaat

SEQ ID NO: 107077 - DNA, 13 bp, Artificial Sequence
  Oligonucleotide for detection of SNP TSC0026818
attggatggggga

SEQ ID NO: 107078 - DNA, 13 bp, Artificial Sequence
  Oligonucleotide for detection of SNP TSC0026818
tcccccatccaat

SEQ ID NO: 107079 - DNA, 13 bp, Artificial Sequence
  Oligonucleotide for detection of SNP TSC0026818
ttttttttttagt

SEQ ID NO: 107080 - DNA, 13 bp, Artificial Sequence
  Oligonucleotide for detection of SNP TSC0026818
actaaaaaaaaaa

SEQ ID NO: 107081 - DNA, 13 bp, Artificial Sequence
  Oligonucleotide for detection of SNP TSC0026819
tgttttttttggg

SEQ ID NO: 107082 - DNA, 13 bp, Artificial Sequence
  Oligonucleotide for detection of SNP TSC0026819
cccaaaaaaaaca

SEQ ID NO: 107083 - DNA, 13 bp, Artificial Sequence
  Oligonucleotide for detection of SNP TSC0026819
tgttttgtttggg

SEQ ID NO: 107084 - DNA, 13 bp, Artificial Sequence
  Oligonucleotide for detection of SNP TSC0026819
cccaaacaaaaca

SEQ ID NO: 107085 - DNA, 13 bp, Artificial Sequence
  Oligonucleotide for detection of SNP TSC0026819
tttagagaagata

SEQ ID NO: 107086 - DNA, 13 bp, Artificial Sequence
  Oligonucleotide for detection of SNP TSC0026819
tatcttctctaaa

SEQ ID NO: 107087 - DNA, 13 bp, Artificial Sequence
  Oligonucleotide for detection of SNP TSC0026819
tttagataagata

SEQ ID NO: 107088 - DNA, 13 bp, Artificial Sequence
  Oligonucleotide for detection of SNP TSC0026819
tatcttatctaaa

SEQ ID NO: 107089 - DNA, 13 bp, Artificial Sequence
  Oligonucleotide for detection of SNP TSC0026820
attttagagatga

SEQ ID NO: 107090 - DNA, 13 bp, Artificial Sequence
  Oligonucleotide for detection of SNP TSC0026820
tcatctctaaaat

SEQ ID NO: 107091 - DNA, 13 bp, Artificial Sequence
  Oligonucleotide for detection of SNP TSC0026820
attttaaagatga

SEQ ID NO: 107092 - DNA, 13 bp, Artificial Sequence
  Oligonucleotide for detection of SNP TSC0026820
tcatctttaaaat

SEQ ID NO: 107093 - DNA, 13 bp, Artificial Sequence
  Oligonucleotide for detection of SNP TSC0026821
taggttatttata

SEQ ID NO: 107094 - DNA, 13 bp, Artificial Sequence
  Oligonucleotide for detection of SNP TSC0026821
tataaataaccta

SEQ ID NO: 107095 - DNA, 13 bp, Artificial Sequence
  Oligonucleotide for detection of SNP TSC0026821
taggttgtttata

SEQ ID NO: 107096 - DNA, 13 bp, Artificial Sequence
  Oligonucleotide for detection of SNP TSC0026821
tataaacaaccta

SEQ ID NO: 107097 - DNA, 13 bp, Artificial Sequence
  Oligonucleotide for detection of SNP TSC0026821
taggtcgtttata

SEQ ID NO: 107098 - DNA, 13 bp, Artificial Sequence
  Oligonucleotide for detection of SNP TSC0026821
tataaacgaccta

SEQ ID NO: 107099 - DNA, 13 bp, Artificial Sequence
  Oligonucleotide for detection of SNP TSC0026821
tgtgagtggtttg

SEQ ID NO: 107100 - DNA, 13 bp, Artificial Sequence
  Oligonucleotide for detection of SNP TSC0026821
caaaccactcaca

SEQ ID NO: 107101 - DNA, 13 bp, Artificial Sequence
  Oligonucleotide for detection of SNP TSC0026821
tgtgagcggtttg

SEQ ID NO: 107102 - DNA, 13 bp, Artificial Sequence
  Oligonucleotide for detection of SNP TSC0026821
caaaccgctcaca

SEQ ID NO: 107103 - DNA, 13 bp, Artificial Sequence
  Oligonucleotide for detection of SNP TSC0026822
gaggaattaggat

SEQ ID NO: 107104 - DNA, 13 bp, Artificial Sequence
  Oligonucleotide for detection of SNP TSC0026822
atcctaattcctc

SEQ ID NO: 107105 - DNA, 13 bp, Artificial Sequence
  Oligonucleotide for detection of SNP TSC0026822
gaggaagtaggat

SEQ ID NO: 107106 - DNA, 13 bp, Artificial Sequence
  Oligonucleotide for detection of SNP TSC0026822
atcctacttcctc

SEQ ID NO: 107107 - DNA, 13 bp, Artificial Sequence
  Oligonucleotide for detection of SNP TSC0026826
tttgattattttt

SEQ ID NO: 107108 - DNA, 13 bp, Artificial Sequence
  Oligonucleotide for detection of SNP TSC0026826
aaaaataatcaaa

SEQ ID NO: 107109 - DNA, 13 bp, Artificial Sequence
  Oligonucleotide for detection of SNP TSC0026826
tttgatgattttt

SEQ ID NO: 107110 - DNA, 13 bp, Artificial Sequence
  Oligonucleotide for detection of SNP TSC0026826
aaaaatcatcaaa

SEQ ID NO: 107111 - DNA, 13 bp, Artificial Sequence
  Oligonucleotide for detection of SNP TSC0026826
agagatgattaga

SEQ ID NO: 107112 - DNA, 13 bp, Artificial Sequence
  Oligonucleotide for detection of SNP TSC0026826
tctaatcatctct

SEQ ID NO: 107113 - DNA, 13 bp, Artificial Sequence
  Oligonucleotide for detection of SNP TSC0026826
agagattattaga

SEQ ID NO: 107114 - DNA, 13 bp, Artificial Sequence
  Oligonucleotide for detection of SNP TSC0026826
tctaataatctct

SEQ ID NO: 107115 - DNA, 13 bp, Artificial Sequence
  Oligonucleotide for detection of SNP TSC0026827
attttaggttttg

SEQ ID NO: 107116 - DNA, 13 bp, Artificial Sequence
  Oligonucleotide for detection of SNP TSC0026827
caaaacctaaaat

SEQ ID NO: 107117 - DNA, 13 bp, Artificial Sequence
  Oligonucleotide for detection of SNP TSC0026827
attttaagttttg

SEQ ID NO: 107118 - DNA, 13 bp, Artificial Sequence
  Oligonucleotide for detection of SNP TSC0026827
caaaacttaaaat

SEQ ID NO: 107119 - DNA, 13 bp, Artificial Sequence
  Oligonucleotide for detection of SNP TSC0026828
gatgattgttgat

SEQ ID NO: 107120 - DNA, 13 bp, Artificial Sequence
  Oligonucleotide for detection of SNP TSC0026828
atcaacaatcatc

SEQ ID NO: 107121 - DNA, 13 bp, Artificial Sequence
  Oligonucleotide for detection of SNP TSC0026828
gatgatcgttgat

SEQ ID NO: 107122 - DNA, 13 bp, Artificial Sequence
  Oligonucleotide for detection of SNP TSC0026828
atcaacgatcatc

SEQ ID NO: 107123 - DNA, 13 bp, Artificial Sequence
  Oligonucleotide for detection of SNP TSC0026828
attagtgattaty

SEQ ID NO: 107124 - DNA, 13 bp, Artificial Sequence
  Oligonucleotide for detection of SNP TSC0026828
rataatcactaat

SEQ ID NO: 107125 - DNA, 13 bp, Artificial Sequence
  Oligonucleotide for detection of SNP TSC0026828
attagtaattaty

SEQ ID NO: 107126 - DNA, 13 bp, Artificial Sequence
  Oligonucleotide for detection of SNP TSC0026828
rataattactaat

SEQ ID NO: 107127 - DNA, 13 bp, Artificial Sequence
  Oligonucleotide for detection of SNP TSC0026828
attagcgattaty

SEQ ID NO: 107128 - DNA, 13 bp, Artificial Sequence
  Oligonucleotide for detection of SNP TSC0026828
rataatcgctaat

SEQ ID NO: 107129 - DNA, 13 bp, Artificial Sequence
  Oligonucleotide for detection of SNP TSC0026830
aaaagaataaaty

SEQ ID NO: 107130 - DNA, 13 bp, Artificial Sequence
  Oligonucleotide for detection of SNP TSC0026830
ratttattctttt

SEQ ID NO: 107131 - DNA, 13 bp, Artificial Sequence
  Oligonucleotide for detection of SNP TSC0026830
aaaagagtaaaty

SEQ ID NO: 107132 - DNA, 13 bp, Artificial Sequence
  Oligonucleotide for detection of SNP TSC0026830
ratttactctttt

SEQ ID NO: 107133 - DNA, 13 bp, Artificial Sequence
  Oligonucleotide for detection of SNP TSC0026831
tgtattatttttg

SEQ ID NO: 107134 - DNA, 13 bp, Artificial Sequence
  Oligonucleotide for detection of SNP TSC0026831
caaaaataataca

SEQ ID NO: 107135 - DNA, 13 bp, Artificial Sequence
  Oligonucleotide for detection of SNP TSC0026831
tgtattgtttttg

SEQ ID NO: 107136 - DNA, 13 bp, Artificial Sequence
  Oligonucleotide for detection of SNP TSC0026831
caaaaacaataca

SEQ ID NO: 107137 - DNA, 13 bp, Artificial Sequence
  Oligonucleotide for detection of SNP TSC0026831
cgtattatttttg

SEQ ID NO: 107138 - DNA, 13 bp, Artificial Sequence
  Oligonucleotide for detection of SNP TSC0026831
caaaaataatacg

SEQ ID NO: 107139 - DNA, 13 bp, Artificial Sequence
  Oligonucleotide for detection of SNP TSC0026831
cgtattgtttttg

SEQ ID NO: 107140 - DNA, 13 bp, Artificial Sequence
  Oligonucleotide for detection of SNP TSC0026831
caaaaacaatacg

SEQ ID NO: 107141 - DNA, 13 bp, Artificial Sequence
  Oligonucleotide for detection of SNP TSC0026831
tgtattattttcg

SEQ ID NO: 107142 - DNA, 13 bp, Artificial Sequence
  Oligonucleotide for detection of SNP TSC0026831
cgaaaataataca

SEQ ID NO: 107143 - DNA, 13 bp, Artificial Sequence
  Oligonucleotide for detection of SNP TSC0026831
tgtatcgtttttg

SEQ ID NO: 107144 - DNA, 13 bp, Artificial Sequence
  Oligonucleotide for detection of SNP TSC0026831
caaaaacgataca

SEQ ID NO: 107145 - DNA, 13 bp, Artificial Sequence
  Oligonucleotide for detection of SNP TSC0026831
cgtattattttcg

SEQ ID NO: 107146 - DNA, 13 bp, Artificial Sequence
  Oligonucleotide for detection of SNP TSC0026831
cgaaaataatacg

SEQ ID NO: 107147 - DNA, 13 bp, Artificial Sequence
  Oligonucleotide for detection of SNP TSC0026831
tgtattgttttcg

SEQ ID NO: 107148 - DNA, 13 bp, Artificial Sequence
  Oligonucleotide for detection of SNP TSC0026831
cgaaaacaataca

SEQ ID NO: 107149 - DNA, 13 bp, Artificial Sequence
  Oligonucleotide for detection of SNP TSC0026831
cgtatcgtttttg

SEQ ID NO: 107150 - DNA, 13 bp, Artificial Sequence
  Oligonucleotide for detection of SNP TSC0026831
caaaaacgatacg

SEQ ID NO: 107151 - DNA, 13 bp, Artificial Sequence
  Oligonucleotide for detection of SNP TSC0026831
cgtattgttttcg

SEQ ID NO: 107152 - DNA, 13 bp, Artificial Sequence
  Oligonucleotide for detection of SNP TSC0026831
cgaaaacaatacg

SEQ ID NO: 107153 - DNA, 13 bp, Artificial Sequence
  Oligonucleotide for detection of SNP TSC0026831
tgtatcgttttcg

SEQ ID NO: 107154 - DNA, 13 bp, Artificial Sequence
  Oligonucleotide for detection of SNP TSC0026831
cgaaaacgataca

SEQ ID NO: 107155 - DNA, 13 bp, Artificial Sequence
  Oligonucleotide for detection of SNP TSC0026831
cgtatcgttttcg

SEQ ID NO: 107156 - DNA, 13 bp, Artificial Sequence
  Oligonucleotide for detection of SNP TSC0026831
cgaaaacgatacg

SEQ ID NO: 107157 - DNA, 13 bp, Artificial Sequence
  Oligonucleotide for detection of SNP TSC0026831
tgggaatggtgtg

SEQ ID NO: 107158 - DNA, 13 bp, Artificial Sequence
  Oligonucleotide for detection of SNP TSC0026831
cacaccattccca

SEQ ID NO: 107159 - DNA, 13 bp, Artificial Sequence
  Oligonucleotide for detection of SNP TSC0026831
cgggaatggtgtg

SEQ ID NO: 107160 - DNA, 13 bp, Artificial Sequence
  Oligonucleotide for detection of SNP TSC0026831
cacaccattcccg

SEQ ID NO: 107161 - DNA, 13 bp, Artificial Sequence
  Oligonucleotide for detection of SNP TSC0026831
tgggaatggtgcg

SEQ ID NO: 107162 - DNA, 13 bp, Artificial Sequence
  Oligonucleotide for detection of SNP TSC0026831
cgcaccattccca

SEQ ID NO: 107163 - DNA, 13 bp, Artificial Sequence
  Oligonucleotide for detection of SNP TSC0026831
tgggaacggtgtg

SEQ ID NO: 107164 - DNA, 13 bp, Artificial Sequence
  Oligonucleotide for detection of SNP TSC0026831
cacaccgttccca

SEQ ID NO: 107165 - DNA, 13 bp, Artificial Sequence
  Oligonucleotide for detection of SNP TSC0026831
cgggaatggtgcg

SEQ ID NO: 107166 - DNA, 13 bp, Artificial Sequence
  Oligonucleotide for detection of SNP TSC0026831
cgcaccattcccg

SEQ ID NO: 107167 - DNA, 13 bp, Artificial Sequence
  Oligonucleotide for detection of SNP TSC0026831
cgggaacggtgtg

SEQ ID NO: 107168 - DNA, 13 bp, Artificial Sequence
  Oligonucleotide for detection of SNP TSC0026831
cacaccgttcccg

SEQ ID NO: 107169 - DNA, 13 bp, Artificial Sequence
  Oligonucleotide for detection of SNP TSC0026831
tgggaacggtgcg

SEQ ID NO: 107170 - DNA, 13 bp, Artificial Sequence
  Oligonucleotide for detection of SNP TSC0026831
cgcaccgttccca

SEQ ID NO: 107171 - DNA, 13 bp, Artificial Sequence
  Oligonucleotide for detection of SNP TSC0026831
cgggaacggtgcg

SEQ ID NO: 107172 - DNA, 13 bp, Artificial Sequence
  Oligonucleotide for detection of SNP TSC0026831
cgcaccgttcccg

SEQ ID NO: 107173 - DNA, 13 bp, Artificial Sequence
  Oligonucleotide for detection of SNP TSC0026832
gatatagttttta

SEQ ID NO: 107174 - DNA, 13 bp, Artificial Sequence
  Oligonucleotide for detection of SNP TSC0026832
taaaaactatatc

SEQ ID NO: 107175 - DNA, 13 bp, Artificial Sequence
  Oligonucleotide for detection of SNP TSC0026832
gatataattttta

SEQ ID NO: 107176 - DNA, 13 bp, Artificial Sequence
  Oligonucleotide for detection of SNP TSC0026832
taaaaattatatc

SEQ ID NO: 107177 - DNA, 13 bp, Artificial Sequence
  Oligonucleotide for detection of SNP TSC0026833
taaaaaatattga

SEQ ID NO: 107178 - DNA, 13 bp, Artificial Sequence
  Oligonucleotide for detection of SNP TSC0026833
tcaatatttttta

SEQ ID NO: 107179 - DNA, 13 bp, Artificial Sequence
  Oligonucleotide for detection of SNP TSC0026833
taaaaattattga

SEQ ID NO: 107180 - DNA, 13 bp, Artificial Sequence
  Oligonucleotide for detection of SNP TSC0026833
tcaataattttta

SEQ ID NO: 107181 - DNA, 13 bp, Artificial Sequence
  Oligonucleotide for detection of SNP TSC0026834
ttttaagggaaty

SEQ ID NO: 107182 - DNA, 13 bp, Artificial Sequence
  Oligonucleotide for detection of SNP TSC0026834
rattcccttaaaa

SEQ ID NO: 107183 - DNA, 13 bp, Artificial Sequence
  Oligonucleotide for detection of SNP TSC0026834
ttttaaaggaaty

SEQ ID NO: 107184 - DNA, 13 bp, Artificial Sequence
  Oligonucleotide for detection of SNP TSC0026834
rattcctttaaaa

SEQ ID NO: 107185 - DNA, 13 bp, Artificial Sequence
  Oligonucleotide for detection of SNP TSC0026835
ttagaattgttty

SEQ ID NO: 107186 - DNA, 13 bp, Artificial Sequence
  Oligonucleotide for detection of SNP TSC0026835
raaacaattctaa

SEQ ID NO: 107187 - DNA, 13 bp, Artificial Sequence
  Oligonucleotide for detection of SNP TSC0026835
ttagaagtgttty

SEQ ID NO: 107188 - DNA, 13 bp, Artificial Sequence
  Oligonucleotide for detection of SNP TSC0026835
raaacacttctaa

SEQ ID NO: 107189 - DNA, 13 bp, Artificial Sequence
  Oligonucleotide for detection of SNP TSC0026835
ggggtagttttgg

SEQ ID NO: 107190 - DNA, 13 bp, Artificial Sequence
  Oligonucleotide for detection of SNP TSC0026835
ccaaaactacccc

SEQ ID NO: 107191 - DNA, 13 bp, Artificial Sequence
  Oligonucleotide for detection of SNP TSC0026835
ggggtatttttgg

SEQ ID NO: 107192 - DNA, 13 bp, Artificial Sequence
  Oligonucleotide for detection of SNP TSC0026835
ccaaaaatacccc

SEQ ID NO: 107193 - DNA, 13 bp, Artificial Sequence
  Oligonucleotide for detection of SNP TSC0026836
atagatagttata

SEQ ID NO: 107194 - DNA, 13 bp, Artificial Sequence
  Oligonucleotide for detection of SNP TSC0026836
tataactatctat

SEQ ID NO: 107195 - DNA, 13 bp, Artificial Sequence
  Oligonucleotide for detection of SNP TSC0026836
tataattatttgt

SEQ ID NO: 107196 - DNA, 13 bp, Artificial Sequence
  Oligonucleotide for detection of SNP TSC0026836
acaaataattata

SEQ ID NO: 107197 - DNA, 13 bp, Artificial Sequence
  Oligonucleotide for detection of SNP TSC0026836
tataatgatttgt

SEQ ID NO: 107198 - DNA, 13 bp, Artificial Sequence
  Oligonucleotide for detection of SNP TSC0026836
acaaatcattata

SEQ ID NO: 107199 - DNA, 13 bp, Artificial Sequence
  Oligonucleotide for detection of SNP TSC0026836
tataacgatttgt

SEQ ID NO: 107200 - DNA, 13 bp, Artificial Sequence
  Oligonucleotide for detection of SNP TSC0026836
acaaatcgttata

SEQ ID NO: 107201 - DNA, 13 bp, Artificial Sequence
  Oligonucleotide for detection of SNP TSC0026837
aatttaagaaaat

SEQ ID NO: 107202 - DNA, 13 bp, Artificial Sequence
  Oligonucleotide for detection of SNP TSC0026837
attttcttaaatt

SEQ ID NO: 107203 - DNA, 13 bp, Artificial Sequence
  Oligonucleotide for detection of SNP TSC0026837
aatttaggaaaat

SEQ ID NO: 107204 - DNA, 13 bp, Artificial Sequence
  Oligonucleotide for detection of SNP TSC0026837
attttcctaaatt

SEQ ID NO: 107205 - DNA, 13 bp, Artificial Sequence
  Oligonucleotide for detection of SNP TSC0026841
gttaaagtttatt

SEQ ID NO: 107206 - DNA, 13 bp, Artificial Sequence
  Oligonucleotide for detection of SNP TSC0026841
aataaactttaac

SEQ ID NO: 107207 - DNA, 13 bp, Artificial Sequence
  Oligonucleotide for detection of SNP TSC0026841
gttaaaatttatt

SEQ ID NO: 107208 - DNA, 13 bp, Artificial Sequence
  Oligonucleotide for detection of SNP TSC0026841
aataaattttaac

SEQ ID NO: 107209 - DNA, 13 bp, Artificial Sequence
  Oligonucleotide for detection of SNP TSC0026845
ggtggggaaggty

SEQ ID NO: 107210 - DNA, 13 bp, Artificial Sequence
  Oligonucleotide for detection of SNP TSC0026845
raccttccccacc

SEQ ID NO: 107211 - DNA, 13 bp, Artificial Sequence
  Oligonucleotide for detection of SNP TSC0026845
ggtgggaaaggty

SEQ ID NO: 107212 - DNA, 13 bp, Artificial Sequence
  Oligonucleotide for detection of SNP TSC0026845
racctttcccacc

SEQ ID NO: 107213 - DNA, 13 bp, Artificial Sequence
  Oligonucleotide for detection of SNP TSC0026848
aggaaagggggtt

SEQ ID NO: 107214 - DNA, 13 bp, Artificial Sequence
  Oligonucleotide for detection of SNP TSC0026848
aaccccctttcct

SEQ ID NO: 107215 - DNA, 13 bp, Artificial Sequence
  Oligonucleotide for detection of SNP TSC0026848
aggaaatggggtt

SEQ ID NO: 107216 - DNA, 13 bp, Artificial Sequence
  Oligonucleotide for detection of SNP TSC0026848
aaccccatttcct

SEQ ID NO: 107217 - DNA, 13 bp, Artificial Sequence
  Oligonucleotide for detection of SNP TSC0026848
aggaaacggggtt

SEQ ID NO: 107218 - DNA, 13 bp, Artificial Sequence
  Oligonucleotide for detection of SNP TSC0026848
aaccccgtttcct

SEQ ID NO: 107219 - DNA, 13 bp, Artificial Sequence
  Oligonucleotide for detection of SNP TSC0026849
ggagaaggggttt

SEQ ID NO: 107220 - DNA, 13 bp, Artificial Sequence
  Oligonucleotide for detection of SNP TSC0026849
aaaccccttctcc

SEQ ID NO: 107221 - DNA, 13 bp, Artificial Sequence
  Oligonucleotide for detection of SNP TSC0026849
ggagaatgggttt

SEQ ID NO: 107222 - DNA, 13 bp, Artificial Sequence
  Oligonucleotide for detection of SNP TSC0026849
aaacccattctcc

SEQ ID NO: 107223 - DNA, 13 bp, Artificial Sequence
  Oligonucleotide for detection of SNP TSC0026849
agattttttttty

SEQ ID NO: 107224 - DNA, 13 bp, Artificial Sequence
  Oligonucleotide for detection of SNP TSC0026849
raaaaaaaaatct

SEQ ID NO: 107225 - DNA, 13 bp, Artificial Sequence
  Oligonucleotide for detection of SNP TSC0026849
agatttattttty

SEQ ID NO: 107226 - DNA, 13 bp, Artificial Sequence
  Oligonucleotide for detection of SNP TSC0026849
raaaaataaatct

SEQ ID NO: 107227 - DNA, 13 bp, Artificial Sequence
  Oligonucleotide for detection of SNP TSC0026850
aggggagttttag

SEQ ID NO: 107228 - DNA, 13 bp, Artificial Sequence
  Oligonucleotide for detection of SNP TSC0026850
ctaaaactcccct

SEQ ID NO: 107229 - DNA, 13 bp, Artificial Sequence
  Oligonucleotide for detection of SNP TSC0026850
aggggaattttag

SEQ ID NO: 107230 - DNA, 13 bp, Artificial Sequence
  Oligonucleotide for detection of SNP TSC0026850
ctaaaattcccct

SEQ ID NO: 107231 - DNA, 13 bp, Artificial Sequence
  Oligonucleotide for detection of SNP TSC0026851
ttttaagattgat

SEQ ID NO: 107232 - DNA, 13 bp, Artificial Sequence
  Oligonucleotide for detection of SNP TSC0026851
atcaatcttaaaa

SEQ ID NO: 107233 - DNA, 13 bp, Artificial Sequence
  Oligonucleotide for detection of SNP TSC0026851
ttttaatattgat

SEQ ID NO: 107234 - DNA, 13 bp, Artificial Sequence
  Oligonucleotide for detection of SNP TSC0026851
atcaatattaaaa

SEQ ID NO: 107235 - DNA, 13 bp, Artificial Sequence
  Oligonucleotide for detection of SNP TSC0026851
attaattttaagg

SEQ ID NO: 107236 - DNA, 13 bp, Artificial Sequence
  Oligonucleotide for detection of SNP TSC0026851
ccttaaaattaat

SEQ ID NO: 107237 - DNA, 13 bp, Artificial Sequence
  Oligonucleotide for detection of SNP TSC0026851
attaatattaagg

SEQ ID NO: 107238 - DNA, 13 bp, Artificial Sequence
  Oligonucleotide for detection of SNP TSC0026851
ccttaatattaat

SEQ ID NO: 107239 - DNA, 13 bp, Artificial Sequence
  Oligonucleotide for detection of SNP TSC0026853
aaatgtatagaaa

SEQ ID NO: 107240 - DNA, 13 bp, Artificial Sequence
  Oligonucleotide for detection of SNP TSC0026853
tttctatacattt

SEQ ID NO: 107241 - DNA, 13 bp, Artificial Sequence
  Oligonucleotide for detection of SNP TSC0026853
aaatgtttagaaa

SEQ ID NO: 107242 - DNA, 13 bp, Artificial Sequence
  Oligonucleotide for detection of SNP TSC0026853
tttctaaacattt

SEQ ID NO: 107243 - DNA, 13 bp, Artificial Sequence
  Oligonucleotide for detection of SNP TSC0026853
tttttaggtattt

SEQ ID NO: 107244 - DNA, 13 bp, Artificial Sequence
  Oligonucleotide for detection of SNP TSC0026853
aaatacctaaaaa

SEQ ID NO: 107245 - DNA, 13 bp, Artificial Sequence
  Oligonucleotide for detection of SNP TSC0026854
gtttataatatty

SEQ ID NO: 107246 - DNA, 13 bp, Artificial Sequence
  Oligonucleotide for detection of SNP TSC0026854
raatattataaac

SEQ ID NO: 107247 - DNA, 13 bp, Artificial Sequence
  Oligonucleotide for detection of SNP TSC0026854
gtttatgatatty

SEQ ID NO: 107248 - DNA, 13 bp, Artificial Sequence
  Oligonucleotide for detection of SNP TSC0026854
raatatcataaac

SEQ ID NO: 107249 - DNA, 13 bp, Artificial Sequence
  Oligonucleotide for detection of SNP TSC0026854
gtttacgatatty

SEQ ID NO: 107250 - DNA, 13 bp, Artificial Sequence
  Oligonucleotide for detection of SNP TSC0026854
raatatcgtaaac

SEQ ID NO: 107251 - DNA, 13 bp, Artificial Sequence
  Oligonucleotide for detection of SNP TSC0026854
ggatgttgtggay

SEQ ID NO: 107252 - DNA, 13 bp, Artificial Sequence
  Oligonucleotide for detection of SNP TSC0026854
rtccacaacatcc

SEQ ID NO: 107253 - DNA, 13 bp, Artificial Sequence
  Oligonucleotide for detection of SNP TSC0026854
ggatgtcgtggay

SEQ ID NO: 107254 - DNA, 13 bp, Artificial Sequence
  Oligonucleotide for detection of SNP TSC0026854
rtccacgacatcc

SEQ ID NO: 107255 - DNA, 13 bp, Artificial Sequence
  Oligonucleotide for detection of SNP TSC0026856
aataatatattta

SEQ ID NO: 107256 - DNA, 13 bp, Artificial Sequence
  Oligonucleotide for detection of SNP TSC0026856
taaatatattatt

SEQ ID NO: 107257 - DNA, 13 bp, Artificial Sequence
  Oligonucleotide for detection of SNP TSC0026856
aataatgtattta

SEQ ID NO: 107258 - DNA, 13 bp, Artificial Sequence
  Oligonucleotide for detection of SNP TSC0026856
taaatacattatt

SEQ ID NO: 107259 - DNA, 13 bp, Artificial Sequence
  Oligonucleotide for detection of SNP TSC0026856
aataacgtattta

SEQ ID NO: 107260 - DNA, 13 bp, Artificial Sequence
  Oligonucleotide for detection of SNP TSC0026856
taaatacgttatt

SEQ ID NO: 107261 - DNA, 13 bp, Artificial Sequence
  Oligonucleotide for detection of SNP TSC0026856
taaatgtgttgtt

SEQ ID NO: 107262 - DNA, 13 bp, Artificial Sequence
  Oligonucleotide for detection of SNP TSC0026856
aacaacacattta

SEQ ID NO: 107263 - DNA, 13 bp, Artificial Sequence
  Oligonucleotide for detection of SNP TSC0026856
taaatgcgttgtt

SEQ ID NO: 107264 - DNA, 13 bp, Artificial Sequence
  Oligonucleotide for detection of SNP TSC0026856
aacaacgcattta

SEQ ID NO: 107265 - DNA, 13 bp, Artificial Sequence
  Oligonucleotide for detection of SNP TSC0026858
ttaggtagtttty

SEQ ID NO: 107266 - DNA, 13 bp, Artificial Sequence
  Oligonucleotide for detection of SNP TSC0026858
raaaactacctaa

SEQ ID NO: 107267 - DNA, 13 bp, Artificial Sequence
  Oligonucleotide for detection of SNP TSC0026858
ttaggtggtttty

SEQ ID NO: 107268 - DNA, 13 bp, Artificial Sequence
  Oligonucleotide for detection of SNP TSC0026858
raaaaccacctaa

SEQ ID NO: 107269 - DNA, 13 bp, Artificial Sequence
  Oligonucleotide for detection of SNP TSC0026858
ttaggcggtttty

SEQ ID NO: 107270 - DNA, 13 bp, Artificial Sequence
  Oligonucleotide for detection of SNP TSC0026858
raaaaccgcctaa

SEQ ID NO: 107271 - DNA, 13 bp, Artificial Sequence
  Oligonucleotide for detection of SNP TSC0026858
gggggttgtttgg

SEQ ID NO: 107272 - DNA, 13 bp, Artificial Sequence
  Oligonucleotide for detection of SNP TSC0026858
ccaaacaaccccc

SEQ ID NO: 107273 - DNA, 13 bp, Artificial Sequence
  Oligonucleotide for detection of SNP TSC0026858
gggggtcgtttgg

SEQ ID NO: 107274 - DNA, 13 bp, Artificial Sequence
  Oligonucleotide for detection of SNP TSC0026858
ccaaacgaccccc

SEQ ID NO: 107275 - DNA, 13 bp, Artificial Sequence
  Oligonucleotide for detection of SNP TSC0026860
aggtttattttgy

SEQ ID NO: 107276 - DNA, 13 bp, Artificial Sequence
  Oligonucleotide for detection of SNP TSC0026860
rcaaaataaacct

SEQ ID NO: 107277 - DNA, 13 bp, Artificial Sequence
  Oligonucleotide for detection of SNP TSC0026860
aggttttttttgy

SEQ ID NO: 107278 - DNA, 13 bp, Artificial Sequence
  Oligonucleotide for detection of SNP TSC0026860
rcaaaaaaaacct

SEQ ID NO: 107279 - DNA, 13 bp, Artificial Sequence
  Oligonucleotide for detection of SNP TSC0026860
gtagagtaaattt

SEQ ID NO: 107280 - DNA, 13 bp, Artificial Sequence
  Oligonucleotide for detection of SNP TSC0026860
aaatttactctac

SEQ ID NO: 107281 - DNA, 13 bp, Artificial Sequence
  Oligonucleotide for detection of SNP TSC0026860
gtagaggaaattt

SEQ ID NO: 107282 - DNA, 13 bp, Artificial Sequence
  Oligonucleotide for detection of SNP TSC0026860
aaatttcctctac

SEQ ID NO: 107283 - DNA, 13 bp, Artificial Sequence
  Oligonucleotide for detection of SNP TSC0026861
tggatggtaatgy

SEQ ID NO: 107284 - DNA, 13 bp, Artificial Sequence
  Oligonucleotide for detection of SNP TSC0026861
rcattaccatcca

SEQ ID NO: 107285 - DNA, 13 bp, Artificial Sequence
  Oligonucleotide for detection of SNP TSC0026861
tggatgataatgy

SEQ ID NO: 107286 - DNA, 13 bp, Artificial Sequence
  Oligonucleotide for detection of SNP TSC0026861
rcattatcatcca

SEQ ID NO: 107287 - DNA, 13 bp, Artificial Sequence
  Oligonucleotide for detection of SNP TSC0026862
ttttagaatatta

SEQ ID NO: 107288 - DNA, 13 bp, Artificial Sequence
  Oligonucleotide for detection of SNP TSC0026862
taatattctaaaa

SEQ ID NO: 107289 - DNA, 13 bp, Artificial Sequence
  Oligonucleotide for detection of SNP TSC0026862
ttttagtatatta

SEQ ID NO: 107290 - DNA, 13 bp, Artificial Sequence
  Oligonucleotide for detection of SNP TSC0026862
taatatactaaaa

SEQ ID NO: 107291 - DNA, 13 bp, Artificial Sequence
  Oligonucleotide for detection of SNP TSC0026862
tggtattttagaa

SEQ ID NO: 107292 - DNA, 13 bp, Artificial Sequence
  Oligonucleotide for detection of SNP TSC0026862
ttctaaaatacca

SEQ ID NO: 107293 - DNA, 13 bp, Artificial Sequence
  Oligonucleotide for detection of SNP TSC0026862
tggtatattagaa

SEQ ID NO: 107294 - DNA, 13 bp, Artificial Sequence
  Oligonucleotide for detection of SNP TSC0026862
ttctaatatacca

SEQ ID NO: 107295 - DNA, 13 bp, Artificial Sequence
  Oligonucleotide for detection of SNP TSC0026863
ttaatttgagtty

SEQ ID NO: 107296 - DNA, 13 bp, Artificial Sequence
  Oligonucleotide for detection of SNP TSC0026863
raactcaaattaa

SEQ ID NO: 107297 - DNA, 13 bp, Artificial Sequence
  Oligonucleotide for detection of SNP TSC0026863
ttaattcgagtty

SEQ ID NO: 107298 - DNA, 13 bp, Artificial Sequence
  Oligonucleotide for detection of SNP TSC0026863
raactcgaattaa

SEQ ID NO: 107299 - DNA, 13 bp, Artificial Sequence
  Oligonucleotide for detection of SNP TSC0026863
gggtttgggttag

SEQ ID NO: 107300 - DNA, 13 bp, Artificial Sequence
  Oligonucleotide for detection of SNP TSC0026863
ctaacccaaaccc

SEQ ID NO: 107301 - DNA, 13 bp, Artificial Sequence
  Oligonucleotide for detection of SNP TSC0026863
gggtttaggttag

SEQ ID NO: 107302 - DNA, 13 bp, Artificial Sequence
  Oligonucleotide for detection of SNP TSC0026863
ctaacctaaaccc

SEQ ID NO: 107303 - DNA, 13 bp, Artificial Sequence
  Oligonucleotide for detection of SNP TSC0026863
gggttcgggttag

SEQ ID NO: 107304 - DNA, 13 bp, Artificial Sequence
  Oligonucleotide for detection of SNP TSC0026863
ctaacccgaaccc

SEQ ID NO: 107305 - DNA, 13 bp, Artificial Sequence
  Oligonucleotide for detection of SNP TSC0026864
agtgggatgatgg

SEQ ID NO: 107306 - DNA, 13 bp, Artificial Sequence
  Oligonucleotide for detection of SNP TSC0026864
ccatcatcccact

SEQ ID NO: 107307 - DNA, 13 bp, Artificial Sequence
  Oligonucleotide for detection of SNP TSC0026864
agtggggtgatgg

SEQ ID NO: 107308 - DNA, 13 bp, Artificial Sequence
  Oligonucleotide for detection of SNP TSC0026864
ccatcaccccact

SEQ ID NO: 107309 - DNA, 13 bp, Artificial Sequence
  Oligonucleotide for detection of SNP TSC0026865
ttttaagggagat

SEQ ID NO: 107310 - DNA, 13 bp, Artificial Sequence
  Oligonucleotide for detection of SNP TSC0026865
atctcccttaaaa

SEQ ID NO: 107311 - DNA, 13 bp, Artificial Sequence
  Oligonucleotide for detection of SNP TSC0026865
ttttaaaggagat

SEQ ID NO: 107312 - DNA, 13 bp, Artificial Sequence
  Oligonucleotide for detection of SNP TSC0026865
atctcctttaaaa

SEQ ID NO: 107313 - DNA, 13 bp, Artificial Sequence
  Oligonucleotide for detection of SNP TSC0026867
gtagtagttaatt

SEQ ID NO: 107314 - DNA, 13 bp, Artificial Sequence
  Oligonucleotide for detection of SNP TSC0026867
aattaactactac

SEQ ID NO: 107315 - DNA, 13 bp, Artificial Sequence
  Oligonucleotide for detection of SNP TSC0026867
gtagtatttaatt

SEQ ID NO: 107316 - DNA, 13 bp, Artificial Sequence
  Oligonucleotide for detection of SNP TSC0026867
aattaaatactac

SEQ ID NO: 107317 - DNA, 13 bp, Artificial Sequence
  Oligonucleotide for detection of SNP TSC0026867
agttggttattay

SEQ ID NO: 107318 - DNA, 13 bp, Artificial Sequence
  Oligonucleotide for detection of SNP TSC0026867
rtaataaccaact

SEQ ID NO: 107319 - DNA, 13 bp, Artificial Sequence
  Oligonucleotide for detection of SNP TSC0026867
agttggatattay

SEQ ID NO: 107320 - DNA, 13 bp, Artificial Sequence
  Oligonucleotide for detection of SNP TSC0026867
rtaatatccaact

SEQ ID NO: 107321 - DNA, 13 bp, Artificial Sequence
  Oligonucleotide for detection of SNP TSC0026869
tgagatagtatta

SEQ ID NO: 107322 - DNA, 13 bp, Artificial Sequence
  Oligonucleotide for detection of SNP TSC0026869
taatactatctca

SEQ ID NO: 107323 - DNA, 13 bp, Artificial Sequence
  Oligonucleotide for detection of SNP TSC0026869
tggtgttatttta

SEQ ID NO: 107324 - DNA, 13 bp, Artificial Sequence
  Oligonucleotide for detection of SNP TSC0026869
taaaataacacca

SEQ ID NO: 107325 - DNA, 13 bp, Artificial Sequence
  Oligonucleotide for detection of SNP TSC0026869
tggtgtgatttta

SEQ ID NO: 107326 - DNA, 13 bp, Artificial Sequence
  Oligonucleotide for detection of SNP TSC0026869
taaaatcacacca

SEQ ID NO: 107327 - DNA, 13 bp, Artificial Sequence
  Oligonucleotide for detection of SNP TSC0026869
tggtgcgatttta

SEQ ID NO: 107328 - DNA, 13 bp, Artificial Sequence
  Oligonucleotide for detection of SNP TSC0026869
taaaatcgcacca

SEQ ID NO: 107329 - DNA, 13 bp, Artificial Sequence
  Oligonucleotide for detection of SNP TSC0026871
ttattatgttcgg

SEQ ID NO: 107330 - DNA, 13 bp, Artificial Sequence
  Oligonucleotide for detection of SNP TSC0026871
ccgaacataataa

SEQ ID NO: 107331 - DNA, 13 bp, Artificial Sequence
  Oligonucleotide for detection of SNP TSC0026871
ttattacgttcgg

SEQ ID NO: 107332 - DNA, 13 bp, Artificial Sequence
  Oligonucleotide for detection of SNP TSC0026871
ccgaacgtaataa

SEQ ID NO: 107333 - DNA, 13 bp, Artificial Sequence
  Oligonucleotide for detection of SNP TSC0026872
tagttaagaagty

SEQ ID NO: 107334 - DNA, 13 bp, Artificial Sequence
  Oligonucleotide for detection of SNP TSC0026872
racttcttaacta

SEQ ID NO: 107335 - DNA, 13 bp, Artificial Sequence
  Oligonucleotide for detection of SNP TSC0026872
tagttatgaagty

SEQ ID NO: 107336 - DNA, 13 bp, Artificial Sequence
  Oligonucleotide for detection of SNP TSC0026872
racttcataacta

SEQ ID NO: 107337 - DNA, 13 bp, Artificial Sequence
  Oligonucleotide for detection of SNP TSC0026872
tagttacgaagty

SEQ ID NO: 107338 - DNA, 13 bp, Artificial Sequence
  Oligonucleotide for detection of SNP TSC0026872
racttcgtaacta

SEQ ID NO: 107339 - DNA, 13 bp, Artificial Sequence
  Oligonucleotide for detection of SNP TSC0026872
ggttttttggtta

SEQ ID NO: 107340 - DNA, 13 bp, Artificial Sequence
  Oligonucleotide for detection of SNP TSC0026872
taaccaaaaaacc

SEQ ID NO: 107341 - DNA, 13 bp, Artificial Sequence
  Oligonucleotide for detection of SNP TSC0026872
ggttttgtggtta

SEQ ID NO: 107342 - DNA, 13 bp, Artificial Sequence
  Oligonucleotide for detection of SNP TSC0026872
taaccacaaaacc

SEQ ID NO: 107343 - DNA, 13 bp, Artificial Sequence
  Oligonucleotide for detection of SNP TSC0026872
ggtttcgtggtta

SEQ ID NO: 107344 - DNA, 13 bp, Artificial Sequence
  Oligonucleotide for detection of SNP TSC0026872
taaccacgaaacc

SEQ ID NO: 107345 - DNA, 13 bp, Artificial Sequence
  Oligonucleotide for detection of SNP TSC0026873
taggttgttttty

SEQ ID NO: 107346 - DNA, 13 bp, Artificial Sequence
  Oligonucleotide for detection of SNP TSC0026873
raaaaacaaccta

SEQ ID NO: 107347 - DNA, 13 bp, Artificial Sequence
  Oligonucleotide for detection of SNP TSC0026873
taggttattttty

SEQ ID NO: 107348 - DNA, 13 bp, Artificial Sequence
  Oligonucleotide for detection of SNP TSC0026873
raaaaataaccta

SEQ ID NO: 107349 - DNA, 13 bp, Artificial Sequence
  Oligonucleotide for detection of SNP TSC0026874
ggttgaagtagga

SEQ ID NO: 107350 - DNA, 13 bp, Artificial Sequence
  Oligonucleotide for detection of SNP TSC0026874
tcctacttcaacc

SEQ ID NO: 107351 - DNA, 13 bp, Artificial Sequence
  Oligonucleotide for detection of SNP TSC0026874
ggttgaggtagga

SEQ ID NO: 107352 - DNA, 13 bp, Artificial Sequence
  Oligonucleotide for detection of SNP TSC0026874
tcctacctcaacc

SEQ ID NO: 107353 - DNA, 13 bp, Artificial Sequence
  Oligonucleotide for detection of SNP TSC0026889
ttatttattaaty

SEQ ID NO: 107354 - DNA, 13 bp, Artificial Sequence
  Oligonucleotide for detection of SNP TSC0026889
rattaataaataa

SEQ ID NO: 107355 - DNA, 13 bp, Artificial Sequence
  Oligonucleotide for detection of SNP TSC0026889
ttatttgttaaty

SEQ ID NO: 107356 - DNA, 13 bp, Artificial Sequence
  Oligonucleotide for detection of SNP TSC0026889
rattaacaaataa

SEQ ID NO: 107357 - DNA, 13 bp, Artificial Sequence
  Oligonucleotide for detection of SNP TSC0026889
ttattcgttaaty

SEQ ID NO: 107358 - DNA, 13 bp, Artificial Sequence
  Oligonucleotide for detection of SNP TSC0026889
rattaacgaataa

SEQ ID NO: 107359 - DNA, 13 bp, Artificial Sequence
  Oligonucleotide for detection of SNP TSC0026889
gattgatggatgg

SEQ ID NO: 107360 - DNA, 13 bp, Artificial Sequence
  Oligonucleotide for detection of SNP TSC0026889
ccatccatcaatc

SEQ ID NO: 107361 - DNA, 13 bp, Artificial Sequence
  Oligonucleotide for detection of SNP TSC0026889
gattgacggatgg

SEQ ID NO: 107362 - DNA, 13 bp, Artificial Sequence
  Oligonucleotide for detection of SNP TSC0026889
ccatccgtcaatc

SEQ ID NO: 107363 - DNA, 13 bp, Artificial Sequence
  Oligonucleotide for detection of SNP TSC0026893
tagtaaatggagy

SEQ ID NO: 107364 - DNA, 13 bp, Artificial Sequence
  Oligonucleotide for detection of SNP TSC0026893
rctccatttacta

SEQ ID NO: 107365 - DNA, 13 bp, Artificial Sequence
  Oligonucleotide for detection of SNP TSC0026893
tagtaagtggagy

SEQ ID NO: 107366 - DNA, 13 bp, Artificial Sequence
  Oligonucleotide for detection of SNP TSC0026893
rctccacttacta

SEQ ID NO: 107367 - DNA, 13 bp, Artificial Sequence
  Oligonucleotide for detection of SNP TSC0026894
aaatgttgtttat

SEQ ID NO: 107368 - DNA, 13 bp, Artificial Sequence
  Oligonucleotide for detection of SNP TSC0026894
ataaacaacattt

SEQ ID NO: 107369 - DNA, 13 bp, Artificial Sequence
  Oligonucleotide for detection of SNP TSC0026894
aaatgtcgtttat

SEQ ID NO: 107370 - DNA, 13 bp, Artificial Sequence
  Oligonucleotide for detection of SNP TSC0026894
ataaacgacattt

SEQ ID NO: 107371 - DNA, 13 bp, Artificial Sequence
  Oligonucleotide for detection of SNP TSC0026894
atgagtggtattt

SEQ ID NO: 107372 - DNA, 13 bp, Artificial Sequence
  Oligonucleotide for detection of SNP TSC0026894
aaataccactcat

SEQ ID NO: 107373 - DNA, 13 bp, Artificial Sequence
  Oligonucleotide for detection of SNP TSC0026894
atgagtagtattt

SEQ ID NO: 107374 - DNA, 13 bp, Artificial Sequence
  Oligonucleotide for detection of SNP TSC0026894
aaatactactcat

SEQ ID NO: 107375 - DNA, 13 bp, Artificial Sequence
  Oligonucleotide for detection of SNP TSC0026894
atgagcggtattt

SEQ ID NO: 107376 - DNA, 13 bp, Artificial Sequence
  Oligonucleotide for detection of SNP TSC0026894
aaataccgctcat

SEQ ID NO: 107377 - DNA, 13 bp, Artificial Sequence
  Oligonucleotide for detection of SNP TSC0026895
tgtaatatgattt

SEQ ID NO: 107378 - DNA, 13 bp, Artificial Sequence
  Oligonucleotide for detection of SNP TSC0026895
aaatcatattaca

SEQ ID NO: 107379 - DNA, 13 bp, Artificial Sequence
  Oligonucleotide for detection of SNP TSC0026895
tgtaatgtgattt

SEQ ID NO: 107380 - DNA, 13 bp, Artificial Sequence
  Oligonucleotide for detection of SNP TSC0026895
aaatcacattaca

SEQ ID NO: 107381 - DNA, 13 bp, Artificial Sequence
  Oligonucleotide for detection of SNP TSC0026896
tgtgggtgggata

SEQ ID NO: 107382 - DNA, 13 bp, Artificial Sequence
  Oligonucleotide for detection of SNP TSC0026896
tatcccacccaca

SEQ ID NO: 107383 - DNA, 13 bp, Artificial Sequence
  Oligonucleotide for detection of SNP TSC0026896
tgtgggcgggata

SEQ ID NO: 107384 - DNA, 13 bp, Artificial Sequence
  Oligonucleotide for detection of SNP TSC0026896
tatcccgcccaca

SEQ ID NO: 107385 - DNA, 13 bp, Artificial Sequence
  Oligonucleotide for detection of SNP TSC0026896
tgttttgtttata

SEQ ID NO: 107386 - DNA, 13 bp, Artificial Sequence
  Oligonucleotide for detection of SNP TSC0026896
tataaacaaaaca

SEQ ID NO: 107387 - DNA, 13 bp, Artificial Sequence
  Oligonucleotide for detection of SNP TSC0026896
tgttttatttata

SEQ ID NO: 107388 - DNA, 13 bp, Artificial Sequence
  Oligonucleotide for detection of SNP TSC0026896
tataaataaaaca

SEQ ID NO: 107389 - DNA, 13 bp, Artificial Sequence
  Oligonucleotide for detection of SNP TSC0026896
tgtttcgtttata

SEQ ID NO: 107390 - DNA, 13 bp, Artificial Sequence
  Oligonucleotide for detection of SNP TSC0026896
tataaacgaaaca

SEQ ID NO: 107391 - DNA, 13 bp, Artificial Sequence
  Oligonucleotide for detection of SNP TSC0026897
taggaggttttgy

SEQ ID NO: 107392 - DNA, 13 bp, Artificial Sequence
  Oligonucleotide for detection of SNP TSC0026897
rcaaaacctccta

SEQ ID NO: 107393 - DNA, 13 bp, Artificial Sequence
  Oligonucleotide for detection of SNP TSC0026897
taggagtttttgy

SEQ ID NO: 107394 - DNA, 13 bp, Artificial Sequence
  Oligonucleotide for detection of SNP TSC0026897
rcaaaaactccta

SEQ ID NO: 107395 - DNA, 13 bp, Artificial Sequence
  Oligonucleotide for detection of SNP TSC0026897
gtagggttttttg

SEQ ID NO: 107396 - DNA, 13 bp, Artificial Sequence
  Oligonucleotide for detection of SNP TSC0026897
caaaaaaccctac

SEQ ID NO: 107397 - DNA, 13 bp, Artificial Sequence
  Oligonucleotide for detection of SNP TSC0026897
gtagggatttttg

SEQ ID NO: 107398 - DNA, 13 bp, Artificial Sequence
  Oligonucleotide for detection of SNP TSC0026897
caaaaatccctac

SEQ ID NO: 107399 - DNA, 13 bp, Artificial Sequence
  Oligonucleotide for detection of SNP TSC0026898
gatataattatat

SEQ ID NO: 107400 - DNA, 13 bp, Artificial Sequence
  Oligonucleotide for detection of SNP TSC0026898
atataattatatc

SEQ ID NO: 107401 - DNA, 13 bp, Artificial Sequence
  Oligonucleotide for detection of SNP TSC0026898
gatatatttatat

SEQ ID NO: 107402 - DNA, 13 bp, Artificial Sequence
  Oligonucleotide for detection of SNP TSC0026898
atataaatatatc

SEQ ID NO: 107403 - DNA, 13 bp, Artificial Sequence
  Oligonucleotide for detection of SNP TSC0026898
atgtggttatgty

SEQ ID NO: 107404 - DNA, 13 bp, Artificial Sequence
  Oligonucleotide for detection of SNP TSC0026898
racataaccacat

SEQ ID NO: 107405 - DNA, 13 bp, Artificial Sequence
  Oligonucleotide for detection of SNP TSC0026898
atgtgggtatgty

SEQ ID NO: 107406 - DNA, 13 bp, Artificial Sequence
  Oligonucleotide for detection of SNP TSC0026898
racatacccacat

SEQ ID NO: 107407 - DNA, 13 bp, Artificial Sequence
  Oligonucleotide for detection of SNP TSC0026900
agggattaaagga

SEQ ID NO: 107408 - DNA, 13 bp, Artificial Sequence
  Oligonucleotide for detection of SNP TSC0026900
tcctttaatccct

SEQ ID NO: 107409 - DNA, 13 bp, Artificial Sequence
  Oligonucleotide for detection of SNP TSC0026900
agggatgaaagga

SEQ ID NO: 107410 - DNA, 13 bp, Artificial Sequence
  Oligonucleotide for detection of SNP TSC0026900
tcctttcatccct

SEQ ID NO: 107411 - DNA, 13 bp, Artificial Sequence
  Oligonucleotide for detection of SNP TSC0026903
ttcgtatgtttty

SEQ ID NO: 107412 - DNA, 13 bp, Artificial Sequence
  Oligonucleotide for detection of SNP TSC0026903
raaaacatacgaa

SEQ ID NO: 107413 - DNA, 13 bp, Artificial Sequence
  Oligonucleotide for detection of SNP TSC0026903
ttcgtacgtttty

SEQ ID NO: 107414 - DNA, 13 bp, Artificial Sequence
  Oligonucleotide for detection of SNP TSC0026903
raaaacgtacgaa

SEQ ID NO: 107415 - DNA, 13 bp, Artificial Sequence
  Oligonucleotide for detection of SNP TSC0026903
gagggtgtatggg

SEQ ID NO: 107416 - DNA, 13 bp, Artificial Sequence
  Oligonucleotide for detection of SNP TSC0026903
cccatacaccctc

SEQ ID NO: 107417 - DNA, 13 bp, Artificial Sequence
  Oligonucleotide for detection of SNP TSC0026903
gagggtatatggg

SEQ ID NO: 107418 - DNA, 13 bp, Artificial Sequence
  Oligonucleotide for detection of SNP TSC0026903
cccatataccctc

SEQ ID NO: 107419 - DNA, 13 bp, Artificial Sequence
  Oligonucleotide for detection of SNP TSC0026903
gagggcgtatggg

SEQ ID NO: 107420 - DNA, 13 bp, Artificial Sequence
  Oligonucleotide for detection of SNP TSC0026903
cccatacgccctc

SEQ ID NO: 107421 - DNA, 13 bp, Artificial Sequence
  Oligonucleotide for detection of SNP TSC0026903
gagggtatacggg

SEQ ID NO: 107422 - DNA, 13 bp, Artificial Sequence
  Oligonucleotide for detection of SNP TSC0026903
cccgtataccctc

SEQ ID NO: 107423 - DNA, 13 bp, Artificial Sequence
  Oligonucleotide for detection of SNP TSC0026903
gagggtgtacggg

SEQ ID NO: 107424 - DNA, 13 bp, Artificial Sequence
  Oligonucleotide for detection of SNP TSC0026903
cccgtacaccctc

SEQ ID NO: 107425 - DNA, 13 bp, Artificial Sequence
  Oligonucleotide for detection of SNP TSC0026903
gagggcgtacggg

SEQ ID NO: 107426 - DNA, 13 bp, Artificial Sequence
  Oligonucleotide for detection of SNP TSC0026903
cccgtacgccctc

SEQ ID NO: 107427 - DNA, 13 bp, Artificial Sequence
  Oligonucleotide for detection of SNP TSC0026904
tagagttgaagta

SEQ ID NO: 107428 - DNA, 13 bp, Artificial Sequence
  Oligonucleotide for detection of SNP TSC0026904
tacttcaactcta

SEQ ID NO: 107429 - DNA, 13 bp, Artificial Sequence
  Oligonucleotide for detection of SNP TSC0026904
tagagtcgaagta

SEQ ID NO: 107430 - DNA, 13 bp, Artificial Sequence
  Oligonucleotide for detection of SNP TSC0026904
tacttcgactcta

SEQ ID NO: 107431 - DNA, 13 bp, Artificial Sequence
  Oligonucleotide for detection of SNP TSC0026907
atgaatatattay

SEQ ID NO: 107432 - DNA, 13 bp, Artificial Sequence
  Oligonucleotide for detection of SNP TSC0026907
rtaatatattcat

SEQ ID NO: 107433 - DNA, 13 bp, Artificial Sequence
  Oligonucleotide for detection of SNP TSC0026907
atgaatgtattay

SEQ ID NO: 107434 - DNA, 13 bp, Artificial Sequence
  Oligonucleotide for detection of SNP TSC0026907
rtaatacattcat

SEQ ID NO: 107435 - DNA, 13 bp, Artificial Sequence
  Oligonucleotide for detection of SNP TSC0026908
aagttgtgtttay

SEQ ID NO: 107436 - DNA, 13 bp, Artificial Sequence
  Oligonucleotide for detection of SNP TSC0026908
rtaaacacaactt

SEQ ID NO: 107437 - DNA, 13 bp, Artificial Sequence
  Oligonucleotide for detection of SNP TSC0026908
aagttgcgtttay

SEQ ID NO: 107438 - DNA, 13 bp, Artificial Sequence
  Oligonucleotide for detection of SNP TSC0026908
rtaaacgcaactt

SEQ ID NO: 107439 - DNA, 13 bp, Artificial Sequence
  Oligonucleotide for detection of SNP TSC0026908
gtgaatgtaattt

SEQ ID NO: 107440 - DNA, 13 bp, Artificial Sequence
  Oligonucleotide for detection of SNP TSC0026908
aaattacattcac

SEQ ID NO: 107441 - DNA, 13 bp, Artificial Sequence
  Oligonucleotide for detection of SNP TSC0026908
gtgaatataattt

SEQ ID NO: 107442 - DNA, 13 bp, Artificial Sequence
  Oligonucleotide for detection of SNP TSC0026908
aaattatattcac

SEQ ID NO: 107443 - DNA, 13 bp, Artificial Sequence
  Oligonucleotide for detection of SNP TSC0026908
gtgaacgtaattt

SEQ ID NO: 107444 - DNA, 13 bp, Artificial Sequence
  Oligonucleotide for detection of SNP TSC0026908
aaattacgttcac

SEQ ID NO: 107445 - DNA, 13 bp, Artificial Sequence
  Oligonucleotide for detection of SNP TSC0026910
gtatggtggtaga

SEQ ID NO: 107446 - DNA, 13 bp, Artificial Sequence
  Oligonucleotide for detection of SNP TSC0026910
tctaccaccatac

SEQ ID NO: 107447 - DNA, 13 bp, Artificial Sequence
  Oligonucleotide for detection of SNP TSC0026910
gtatggcggtaga

SEQ ID NO: 107448 - DNA, 13 bp, Artificial Sequence
  Oligonucleotide for detection of SNP TSC0026910
tctaccgccatac

SEQ ID NO: 107449 - DNA, 13 bp, Artificial Sequence
  Oligonucleotide for detection of SNP TSC0026912
agagtttgatatg

SEQ ID NO: 107450 - DNA, 13 bp, Artificial Sequence
  Oligonucleotide for detection of SNP TSC0026912
catatcaaactct

SEQ ID NO: 107451 - DNA, 13 bp, Artificial Sequence
  Oligonucleotide for detection of SNP TSC0026912
agagttcgatatg

SEQ ID NO: 107452 - DNA, 13 bp, Artificial Sequence
  Oligonucleotide for detection of SNP TSC0026912
catatcgaactct

SEQ ID NO: 107453 - DNA, 13 bp, Artificial Sequence
  Oligonucleotide for detection of SNP TSC0026912
tatgttgaatttt

SEQ ID NO: 107454 - DNA, 13 bp, Artificial Sequence
  Oligonucleotide for detection of SNP TSC0026912
aaaattcaacata

SEQ ID NO: 107455 - DNA, 13 bp, Artificial Sequence
  Oligonucleotide for detection of SNP TSC0026912
tatgtcgaatttt

SEQ ID NO: 107456 - DNA, 13 bp, Artificial Sequence
  Oligonucleotide for detection of SNP TSC0026912
aaaattcgacata

SEQ ID NO: 107457 - DNA, 13 bp, Artificial Sequence
  Oligonucleotide for detection of SNP TSC0026913
tgtagtggttaag

SEQ ID NO: 107458 - DNA, 13 bp, Artificial Sequence
  Oligonucleotide for detection of SNP TSC0026913
cttaaccactaca

SEQ ID NO: 107459 - DNA, 13 bp, Artificial Sequence
  Oligonucleotide for detection of SNP TSC0026913
tgtagtagttaag

SEQ ID NO: 107460 - DNA, 13 bp, Artificial Sequence
  Oligonucleotide for detection of SNP TSC0026913
cttaactactaca

SEQ ID NO: 107461 - DNA, 13 bp, Artificial Sequence
  Oligonucleotide for detection of SNP TSC0026914
gggataagattgg

SEQ ID NO: 107462 - DNA, 13 bp, Artificial Sequence
  Oligonucleotide for detection of SNP TSC0026914
ccaatcttatccc

SEQ ID NO: 107463 - DNA, 13 bp, Artificial Sequence
  Oligonucleotide for detection of SNP TSC0026914
gggataggattgg

SEQ ID NO: 107464 - DNA, 13 bp, Artificial Sequence
  Oligonucleotide for detection of SNP TSC0026914
ccaatcctatccc

SEQ ID NO: 107465 - DNA, 13 bp, Artificial Sequence
  Oligonucleotide for detection of SNP TSC0026915
ttgttaaatgggg

SEQ ID NO: 107466 - DNA, 13 bp, Artificial Sequence
  Oligonucleotide for detection of SNP TSC0026915
ccccatttaacaa

SEQ ID NO: 107467 - DNA, 13 bp, Artificial Sequence
  Oligonucleotide for detection of SNP TSC0026915
ttgttatatgggg

SEQ ID NO: 107468 - DNA, 13 bp, Artificial Sequence
  Oligonucleotide for detection of SNP TSC0026915
ccccatataacaa

SEQ ID NO: 107469 - DNA, 13 bp, Artificial Sequence
  Oligonucleotide for detection of SNP TSC0026915
ttttatttgatag

SEQ ID NO: 107470 - DNA, 13 bp, Artificial Sequence
  Oligonucleotide for detection of SNP TSC0026915
ctatcaaataaaa

SEQ ID NO: 107471 - DNA, 13 bp, Artificial Sequence
  Oligonucleotide for detection of SNP TSC0026915
ttttatgtgatag

SEQ ID NO: 107472 - DNA, 13 bp, Artificial Sequence
  Oligonucleotide for detection of SNP TSC0026915
ctatcacataaaa

SEQ ID NO: 107473 - DNA, 13 bp, Artificial Sequence
  Oligonucleotide for detection of SNP TSC0026916
ttaaaagatattt

SEQ ID NO: 107474 - DNA, 13 bp, Artificial Sequence
  Oligonucleotide for detection of SNP TSC0026916
aaatatcttttaa

SEQ ID NO: 107475 - DNA, 13 bp, Artificial Sequence
  Oligonucleotide for detection of SNP TSC0026916
ttaaaatatattt

SEQ ID NO: 107476 - DNA, 13 bp, Artificial Sequence
  Oligonucleotide for detection of SNP TSC0026916
aaatatattttaa

SEQ ID NO: 107477 - DNA, 13 bp, Artificial Sequence
  Oligonucleotide for detection of SNP TSC0026916
aaatattttttag

SEQ ID NO: 107478 - DNA, 13 bp, Artificial Sequence
  Oligonucleotide for detection of SNP TSC0026916
ctaaaaaatattt

SEQ ID NO: 107479 - DNA, 13 bp, Artificial Sequence
  Oligonucleotide for detection of SNP TSC0026916
aaatatattttag

SEQ ID NO: 107480 - DNA, 13 bp, Artificial Sequence
  Oligonucleotide for detection of SNP TSC0026916
ctaaaatatattt

SEQ ID NO: 107481 - DNA, 13 bp, Artificial Sequence
  Oligonucleotide for detection of SNP TSC0026917
taatgatgatgat

SEQ ID NO: 107482 - DNA, 13 bp, Artificial Sequence
  Oligonucleotide for detection of SNP TSC0026917
atcatcatcatta

SEQ ID NO: 107483 - DNA, 13 bp, Artificial Sequence
  Oligonucleotide for detection of SNP TSC0026917
taacgatgatgat

SEQ ID NO: 107484 - DNA, 13 bp, Artificial Sequence
  Oligonucleotide for detection of SNP TSC0026917
atcatcatcgtta

SEQ ID NO: 107485 - DNA, 13 bp, Artificial Sequence
  Oligonucleotide for detection of SNP TSC0026917
taatgacgatgat

SEQ ID NO: 107486 - DNA, 13 bp, Artificial Sequence
  Oligonucleotide for detection of SNP TSC0026917
atcatcgtcatta

SEQ ID NO: 107487 - DNA, 13 bp, Artificial Sequence
  Oligonucleotide for detection of SNP TSC0026917
taacgacgatgat

SEQ ID NO: 107488 - DNA, 13 bp, Artificial Sequence
  Oligonucleotide for detection of SNP TSC0026917
atcatcgtcgtta

SEQ ID NO: 107489 - DNA, 13 bp, Artificial Sequence
  Oligonucleotide for detection of SNP TSC0026917
attattgttgtta

SEQ ID NO: 107490 - DNA, 13 bp, Artificial Sequence
  Oligonucleotide for detection of SNP TSC0026917
taacaacaataat

SEQ ID NO: 107491 - DNA, 13 bp, Artificial Sequence
  Oligonucleotide for detection of SNP TSC0026917
attattattgtta

SEQ ID NO: 107492 - DNA, 13 bp, Artificial Sequence
  Oligonucleotide for detection of SNP TSC0026917
taacaataataat

SEQ ID NO: 107493 - DNA, 13 bp, Artificial Sequence
  Oligonucleotide for detection of SNP TSC0026917
attatcgttgtta

SEQ ID NO: 107494 - DNA, 13 bp, Artificial Sequence
  Oligonucleotide for detection of SNP TSC0026917
taacaacgataat

SEQ ID NO: 107495 - DNA, 13 bp, Artificial Sequence
  Oligonucleotide for detection of SNP TSC0026917
attattatcgtta

SEQ ID NO: 107496 - DNA, 13 bp, Artificial Sequence
  Oligonucleotide for detection of SNP TSC0026917
taacgataataat

SEQ ID NO: 107497 - DNA, 13 bp, Artificial Sequence
  Oligonucleotide for detection of SNP TSC0026917
attattgtcgtta

SEQ ID NO: 107498 - DNA, 13 bp, Artificial Sequence
  Oligonucleotide for detection of SNP TSC0026917
taacgacaataat

SEQ ID NO: 107499 - DNA, 13 bp, Artificial Sequence
  Oligonucleotide for detection of SNP TSC0026917
attatcgtcgtta

SEQ ID NO: 107500 - DNA, 13 bp, Artificial Sequence
  Oligonucleotide for detection of SNP TSC0026917
taacgacgataat

SEQ ID NO: 107501 - DNA, 13 bp, Artificial Sequence
  Oligonucleotide for detection of SNP TSC0026918
ttttttaagggta

SEQ ID NO: 107502 - DNA, 13 bp, Artificial Sequence
  Oligonucleotide for detection of SNP TSC0026918
tacccttaaaaaa

SEQ ID NO: 107503 - DNA, 13 bp, Artificial Sequence
  Oligonucleotide for detection of SNP TSC0026918
tttttttagggta

SEQ ID NO: 107504 - DNA, 13 bp, Artificial Sequence
  Oligonucleotide for detection of SNP TSC0026918
taccctaaaaaaa

SEQ ID NO: 107505 - DNA, 13 bp, Artificial Sequence
  Oligonucleotide for detection of SNP TSC0026920
tggatgattttty

SEQ ID NO: 107506 - DNA, 13 bp, Artificial Sequence
  Oligonucleotide for detection of SNP TSC0026920
raaaaatcatcca

SEQ ID NO: 107507 - DNA, 13 bp, Artificial Sequence
  Oligonucleotide for detection of SNP TSC0026920
tggatggttttty

SEQ ID NO: 107508 - DNA, 13 bp, Artificial Sequence
  Oligonucleotide for detection of SNP TSC0026920
raaaaaccatcca

SEQ ID NO: 107509 - DNA, 13 bp, Artificial Sequence
  Oligonucleotide for detection of SNP TSC0026921
tgttagtgtatat

SEQ ID NO: 107510 - DNA, 13 bp, Artificial Sequence
  Oligonucleotide for detection of SNP TSC0026921
atatacactaaca

SEQ ID NO: 107511 - DNA, 13 bp, Artificial Sequence
  Oligonucleotide for detection of SNP TSC0026921
tgttagcgtatat

SEQ ID NO: 107512 - DNA, 13 bp, Artificial Sequence
  Oligonucleotide for detection of SNP TSC0026921
atatacgctaaca

SEQ ID NO: 107513 - DNA, 13 bp, Artificial Sequence
  Oligonucleotide for detection of SNP TSC0026921
atgtgtgttaata

SEQ ID NO: 107514 - DNA, 13 bp, Artificial Sequence
  Oligonucleotide for detection of SNP TSC0026921
tattaacacacat

SEQ ID NO: 107515 - DNA, 13 bp, Artificial Sequence
  Oligonucleotide for detection of SNP TSC0026921
atgtgtattaata

SEQ ID NO: 107516 - DNA, 13 bp, Artificial Sequence
  Oligonucleotide for detection of SNP TSC0026921
tattaatacacat

SEQ ID NO: 107517 - DNA, 13 bp, Artificial Sequence
  Oligonucleotide for detection of SNP TSC0026921
atgtgcgttaata

SEQ ID NO: 107518 - DNA, 13 bp, Artificial Sequence
  Oligonucleotide for detection of SNP TSC0026921
tattaacgcacat

SEQ ID NO: 107519 - DNA, 13 bp, Artificial Sequence
  Oligonucleotide for detection of SNP TSC0026922
tttgttagttttg

SEQ ID NO: 107520 - DNA, 13 bp, Artificial Sequence
  Oligonucleotide for detection of SNP TSC0026922
caaaactaacaaa

SEQ ID NO: 107521 - DNA, 13 bp, Artificial Sequence
  Oligonucleotide for detection of SNP TSC0026922
tttgttggttttg

SEQ ID NO: 107522 - DNA, 13 bp, Artificial Sequence
  Oligonucleotide for detection of SNP TSC0026922
caaaaccaacaaa

SEQ ID NO: 107523 - DNA, 13 bp, Artificial Sequence
  Oligonucleotide for detection of SNP TSC0026922
ttcgttagttttg

SEQ ID NO: 107524 - DNA, 13 bp, Artificial Sequence
  Oligonucleotide for detection of SNP TSC0026922
caaaactaacgaa

SEQ ID NO: 107525 - DNA, 13 bp, Artificial Sequence
  Oligonucleotide for detection of SNP TSC0026922
ttcgttggttttg

SEQ ID NO: 107526 - DNA, 13 bp, Artificial Sequence
  Oligonucleotide for detection of SNP TSC0026922
caaaaccaacgaa

SEQ ID NO: 107527 - DNA, 13 bp, Artificial Sequence
  Oligonucleotide for detection of SNP TSC0026923
gggagttggaata

SEQ ID NO: 107528 - DNA, 13 bp, Artificial Sequence
  Oligonucleotide for detection of SNP TSC0026923
tattccaactccc

SEQ ID NO: 107529 - DNA, 13 bp, Artificial Sequence
  Oligonucleotide for detection of SNP TSC0026923
gggagtcggaata

SEQ ID NO: 107530 - DNA, 13 bp, Artificial Sequence
  Oligonucleotide for detection of SNP TSC0026923
tattccgactccc

SEQ ID NO: 107531 - DNA, 13 bp, Artificial Sequence
  Oligonucleotide for detection of SNP TSC0026924
tttaaaatgttaa

SEQ ID NO: 107532 - DNA, 13 bp, Artificial Sequence
  Oligonucleotide for detection of SNP TSC0026924
ttaacattttaaa

SEQ ID NO: 107533 - DNA, 13 bp, Artificial Sequence
  Oligonucleotide for detection of SNP TSC0026924
tttaaagtgttaa

SEQ ID NO: 107534 - DNA, 13 bp, Artificial Sequence
  Oligonucleotide for detection of SNP TSC0026924
ttaacactttaaa

SEQ ID NO: 107535 - DNA, 13 bp, Artificial Sequence
  Oligonucleotide for detection of SNP TSC0026925
aataaataaattg

SEQ ID NO: 107536 - DNA, 13 bp, Artificial Sequence
  Oligonucleotide for detection of SNP TSC0026925
caatttatttatt

SEQ ID NO: 107537 - DNA, 13 bp, Artificial Sequence
  Oligonucleotide for detection of SNP TSC0026925
aataaagaaattg

SEQ ID NO: 107538 - DNA, 13 bp, Artificial Sequence
  Oligonucleotide for detection of SNP TSC0026925
caatttctttatt

SEQ ID NO: 107539 - DNA, 13 bp, Artificial Sequence
  Oligonucleotide for detection of SNP TSC0026925
taatttttttatt

SEQ ID NO: 107540 - DNA, 13 bp, Artificial Sequence
  Oligonucleotide for detection of SNP TSC0026925
aataaaaaaatta

SEQ ID NO: 107541 - DNA, 13 bp, Artificial Sequence
  Oligonucleotide for detection of SNP TSC0026926
gtgtggggttttt

SEQ ID NO: 107542 - DNA, 13 bp, Artificial Sequence
  Oligonucleotide for detection of SNP TSC0026926
aaaaaccccacac

SEQ ID NO: 107543 - DNA, 13 bp, Artificial Sequence
  Oligonucleotide for detection of SNP TSC0026926
gtgtggtgttttt

SEQ ID NO: 107544 - DNA, 13 bp, Artificial Sequence
  Oligonucleotide for detection of SNP TSC0026926
aaaaacaccacac

SEQ ID NO: 107545 - DNA, 13 bp, Artificial Sequence
  Oligonucleotide for detection of SNP TSC0026926
aaaaattttatay

SEQ ID NO: 107546 - DNA, 13 bp, Artificial Sequence
  Oligonucleotide for detection of SNP TSC0026926
rtataaaattttt

SEQ ID NO: 107547 - DNA, 13 bp, Artificial Sequence
  Oligonucleotide for detection of SNP TSC0026926
aaaaatattatay

SEQ ID NO: 107548 - DNA, 13 bp, Artificial Sequence
  Oligonucleotide for detection of SNP TSC0026926
rtataatattttt

SEQ ID NO: 107549 - DNA, 13 bp, Artificial Sequence
  Oligonucleotide for detection of SNP TSC0026927
tgtggggtttttt

SEQ ID NO: 107550 - DNA, 13 bp, Artificial Sequence
  Oligonucleotide for detection of SNP TSC0026927
aaaaaaccccaca

SEQ ID NO: 107551 - DNA, 13 bp, Artificial Sequence
  Oligonucleotide for detection of SNP TSC0026927
tgtgggttttttt

SEQ ID NO: 107552 - DNA, 13 bp, Artificial Sequence
  Oligonucleotide for detection of SNP TSC0026927
aaaaaaacccaca

SEQ ID NO: 107553 - DNA, 13 bp, Artificial Sequence
  Oligonucleotide for detection of SNP TSC0026928
gtggggtggggty

SEQ ID NO: 107554 - DNA, 13 bp, Artificial Sequence
  Oligonucleotide for detection of SNP TSC0026928
raccccaccccac

SEQ ID NO: 107555 - DNA, 13 bp, Artificial Sequence
  Oligonucleotide for detection of SNP TSC0026928
gtggggcggggty

SEQ ID NO: 107556 - DNA, 13 bp, Artificial Sequence
  Oligonucleotide for detection of SNP TSC0026928
raccccgccccac

SEQ ID NO: 107557 - DNA, 13 bp, Artificial Sequence
  Oligonucleotide for detection of SNP TSC0026929
tggtaggagggat

SEQ ID NO: 107558 - DNA, 13 bp, Artificial Sequence
  Oligonucleotide for detection of SNP TSC0026929
atccctcctacca

SEQ ID NO: 107559 - DNA, 13 bp, Artificial Sequence
  Oligonucleotide for detection of SNP TSC0026929
tggtagaagggat

SEQ ID NO: 107560 - DNA, 13 bp, Artificial Sequence
  Oligonucleotide for detection of SNP TSC0026929
atcccttctacca

SEQ ID NO: 107561 - DNA, 13 bp, Artificial Sequence
  Oligonucleotide for detection of SNP TSC0026929
cggtaggagggat

SEQ ID NO: 107562 - DNA, 13 bp, Artificial Sequence
  Oligonucleotide for detection of SNP TSC0026929
atccctcctaccg

SEQ ID NO: 107563 - DNA, 13 bp, Artificial Sequence
  Oligonucleotide for detection of SNP TSC0026929
cggtagaagggat

SEQ ID NO: 107564 - DNA, 13 bp, Artificial Sequence
  Oligonucleotide for detection of SNP TSC0026929
atcccttctaccg

SEQ ID NO: 107565 - DNA, 13 bp, Artificial Sequence
  Oligonucleotide for detection of SNP TSC0026931
ttaataaatgttt

SEQ ID NO: 107566 - DNA, 13 bp, Artificial Sequence
  Oligonucleotide for detection of SNP TSC0026931
aaacatttattaa

SEQ ID NO: 107567 - DNA, 13 bp, Artificial Sequence
  Oligonucleotide for detection of SNP TSC0026931
ttaatatatgttt

SEQ ID NO: 107568 - DNA, 13 bp, Artificial Sequence
  Oligonucleotide for detection of SNP TSC0026931
aaacatatattaa

SEQ ID NO: 107569 - DNA, 13 bp, Artificial Sequence
  Oligonucleotide for detection of SNP TSC0026931
aagtatttattgg

SEQ ID NO: 107570 - DNA, 13 bp, Artificial Sequence
  Oligonucleotide for detection of SNP TSC0026931
ccaataaatactt

SEQ ID NO: 107571 - DNA, 13 bp, Artificial Sequence
  Oligonucleotide for detection of SNP TSC0026931
aagtatgtattgg

SEQ ID NO: 107572 - DNA, 13 bp, Artificial Sequence
  Oligonucleotide for detection of SNP TSC0026931
ccaatacatactt

SEQ ID NO: 107573 - DNA, 13 bp, Artificial Sequence
  Oligonucleotide for detection of SNP TSC0026935
atagtaggtttta

SEQ ID NO: 107574 - DNA, 13 bp, Artificial Sequence
  Oligonucleotide for detection of SNP TSC0026935
taaaacctactat

SEQ ID NO: 107575 - DNA, 13 bp, Artificial Sequence
  Oligonucleotide for detection of SNP TSC0026935
atagtaagtttta

SEQ ID NO: 107576 - DNA, 13 bp, Artificial Sequence
  Oligonucleotide for detection of SNP TSC0026935
taaaacttactat

SEQ ID NO: 107577 - DNA, 13 bp, Artificial Sequence
  Oligonucleotide for detection of SNP TSC0026936
tattatgattata

SEQ ID NO: 107578 - DNA, 13 bp, Artificial Sequence
  Oligonucleotide for detection of SNP TSC0026936
tataatcataata

SEQ ID NO: 107579 - DNA, 13 bp, Artificial Sequence
  Oligonucleotide for detection of SNP TSC0026937
gtggaaggtatta

SEQ ID NO: 107580 - DNA, 13 bp, Artificial Sequence
  Oligonucleotide for detection of SNP TSC0026937
taataccttccac

SEQ ID NO: 107581 - DNA, 13 bp, Artificial Sequence
  Oligonucleotide for detection of SNP TSC0026937
gtggaaagtatta

SEQ ID NO: 107582 - DNA, 13 bp, Artificial Sequence
  Oligonucleotide for detection of SNP TSC0026937
taatactttccac

SEQ ID NO: 107583 - DNA, 13 bp, Artificial Sequence
  Oligonucleotide for detection of SNP TSC0026938
aataaagtttttt

SEQ ID NO: 107584 - DNA, 13 bp, Artificial Sequence
  Oligonucleotide for detection of SNP TSC0026938
aaaaaactttatt

SEQ ID NO: 107585 - DNA, 13 bp, Artificial Sequence
  Oligonucleotide for detection of SNP TSC0026938
aataaattttttt

SEQ ID NO: 107586 - DNA, 13 bp, Artificial Sequence
  Oligonucleotide for detection of SNP TSC0026938
aaaaaaatttatt

SEQ ID NO: 107587 - DNA, 13 bp, Artificial Sequence
  Oligonucleotide for detection of SNP TSC0026938
agggagttttgtt

SEQ ID NO: 107588 - DNA, 13 bp, Artificial Sequence
  Oligonucleotide for detection of SNP TSC0026938
aacaaaactccct

SEQ ID NO: 107589 - DNA, 13 bp, Artificial Sequence
  Oligonucleotide for detection of SNP TSC0026938
agggagatttgtt

SEQ ID NO: 107590 - DNA, 13 bp, Artificial Sequence
  Oligonucleotide for detection of SNP TSC0026938
aacaaatctccct

SEQ ID NO: 107591 - DNA, 13 bp, Artificial Sequence
  Oligonucleotide for detection of SNP TSC0026940
ttaggggtagaty

SEQ ID NO: 107592 - DNA, 13 bp, Artificial Sequence
  Oligonucleotide for detection of SNP TSC0026940
ratctacccctaa

SEQ ID NO: 107593 - DNA, 13 bp, Artificial Sequence
  Oligonucleotide for detection of SNP TSC0026940
ttagggatagaty

SEQ ID NO: 107594 - DNA, 13 bp, Artificial Sequence
  Oligonucleotide for detection of SNP TSC0026940
ratctatccctaa

SEQ ID NO: 107595 - DNA, 13 bp, Artificial Sequence
  Oligonucleotide for detection of SNP TSC0026942
gtttgaatatttt

SEQ ID NO: 107596 - DNA, 13 bp, Artificial Sequence
  Oligonucleotide for detection of SNP TSC0026942
aaaatattcaaac

SEQ ID NO: 107597 - DNA, 13 bp, Artificial Sequence
  Oligonucleotide for detection of SNP TSC0026942
gtttgagtatttt

SEQ ID NO: 107598 - DNA, 13 bp, Artificial Sequence
  Oligonucleotide for detection of SNP TSC0026942
aaaatactcaaac

SEQ ID NO: 107599 - DNA, 13 bp, Artificial Sequence
  Oligonucleotide for detection of SNP TSC0026944
atattagggttat

SEQ ID NO: 107600 - DNA, 13 bp, Artificial Sequence
  Oligonucleotide for detection of SNP TSC0026944
ataaccctaatat

SEQ ID NO: 107601 - DNA, 13 bp, Artificial Sequence
  Oligonucleotide for detection of SNP TSC0026944
atggttgtagtgt

SEQ ID NO: 107602 - DNA, 13 bp, Artificial Sequence
  Oligonucleotide for detection of SNP TSC0026944
acactacaaccat

SEQ ID NO: 107603 - DNA, 13 bp, Artificial Sequence
  Oligonucleotide for detection of SNP TSC0026944
atggttttagtgt

SEQ ID NO: 107604 - DNA, 13 bp, Artificial Sequence
  Oligonucleotide for detection of SNP TSC0026944
acactaaaaccat

SEQ ID NO: 107605 - DNA, 13 bp, Artificial Sequence
  Oligonucleotide for detection of SNP TSC0026944
atggtcgtagtgt

SEQ ID NO: 107606 - DNA, 13 bp, Artificial Sequence
  Oligonucleotide for detection of SNP TSC0026944
acactacgaccat

SEQ ID NO: 107607 - DNA, 13 bp, Artificial Sequence
  Oligonucleotide for detection of SNP TSC0026948
gagtaagtttata

SEQ ID NO: 107608 - DNA, 13 bp, Artificial Sequence
  Oligonucleotide for detection of SNP TSC0026948
tataaacttactc

SEQ ID NO: 107609 - DNA, 13 bp, Artificial Sequence
  Oligonucleotide for detection of SNP TSC0026948
gagtaaatttata

SEQ ID NO: 107610 - DNA, 13 bp, Artificial Sequence
  Oligonucleotide for detection of SNP TSC0026948
tataaatttactc

SEQ ID NO: 107611 - DNA, 13 bp, Artificial Sequence
  Oligonucleotide for detection of SNP TSC0026951
gggaatagtttty

SEQ ID NO: 107612 - DNA, 13 bp, Artificial Sequence
  Oligonucleotide for detection of SNP TSC0026951
raaaactattccc

SEQ ID NO: 107613 - DNA, 13 bp, Artificial Sequence
  Oligonucleotide for detection of SNP TSC0026951
gggaattgtttty

SEQ ID NO: 107614 - DNA, 13 bp, Artificial Sequence
  Oligonucleotide for detection of SNP TSC0026951
raaaacaattccc

SEQ ID NO: 107615 - DNA, 13 bp, Artificial Sequence
  Oligonucleotide for detection of SNP TSC0026951
gggagttgtttty

SEQ ID NO: 107616 - DNA, 13 bp, Artificial Sequence
  Oligonucleotide for detection of SNP TSC0026951
raaaacaactccc

SEQ ID NO: 107617 - DNA, 13 bp, Artificial Sequence
  Oligonucleotide for detection of SNP TSC0026951
gggagtagtttty

SEQ ID NO: 107618 - DNA, 13 bp, Artificial Sequence
  Oligonucleotide for detection of SNP TSC0026951
raaaactactccc

SEQ ID NO: 107619 - DNA, 13 bp, Artificial Sequence
  Oligonucleotide for detection of SNP TSC0026952
tgtttgggttagt

SEQ ID NO: 107620 - DNA, 13 bp, Artificial Sequence
  Oligonucleotide for detection of SNP TSC0026952
actaacccaaaca

SEQ ID NO: 107621 - DNA, 13 bp, Artificial Sequence
  Oligonucleotide for detection of SNP TSC0026952
tgtttgagttagt

SEQ ID NO: 107622 - DNA, 13 bp, Artificial Sequence
  Oligonucleotide for detection of SNP TSC0026952
actaactcaaaca

SEQ ID NO: 107623 - DNA, 13 bp, Artificial Sequence
  Oligonucleotide for detection of SNP TSC0026953
tagtgagaagtty

SEQ ID NO: 107624 - DNA, 13 bp, Artificial Sequence
  Oligonucleotide for detection of SNP TSC0026953
raacttctcacta

SEQ ID NO: 107625 - DNA, 13 bp, Artificial Sequence
  Oligonucleotide for detection of SNP TSC0026953
tagtgaaaagtty

SEQ ID NO: 107626 - DNA, 13 bp, Artificial Sequence
  Oligonucleotide for detection of SNP TSC0026953
raacttttcacta

SEQ ID NO: 107627 - DNA, 13 bp, Artificial Sequence
  Oligonucleotide for detection of SNP TSC0026954
ttatggttatgty

SEQ ID NO: 107628 - DNA, 13 bp, Artificial Sequence
  Oligonucleotide for detection of SNP TSC0026954
racataaccataa

SEQ ID NO: 107629 - DNA, 13 bp, Artificial Sequence
  Oligonucleotide for detection of SNP TSC0026954
ttatgggtatgty

SEQ ID NO: 107630 - DNA, 13 bp, Artificial Sequence
  Oligonucleotide for detection of SNP TSC0026954
racatacccataa

SEQ ID NO: 107631 - DNA, 13 bp, Artificial Sequence
  Oligonucleotide for detection of SNP TSC0026954
gatatggttatgg

SEQ ID NO: 107632 - DNA, 13 bp, Artificial Sequence
  Oligonucleotide for detection of SNP TSC0026954
ccataaccatatc

SEQ ID NO: 107633 - DNA, 13 bp, Artificial Sequence
  Oligonucleotide for detection of SNP TSC0026954
gatatgtttatgg

SEQ ID NO: 107634 - DNA, 13 bp, Artificial Sequence
  Oligonucleotide for detection of SNP TSC0026954
ccataaacatatc

SEQ ID NO: 107635 - DNA, 13 bp, Artificial Sequence
  Oligonucleotide for detection of SNP TSC0026955
tgtataattggty

SEQ ID NO: 107636 - DNA, 13 bp, Artificial Sequence
  Oligonucleotide for detection of SNP TSC0026955
raccaattataca

SEQ ID NO: 107637 - DNA, 13 bp, Artificial Sequence
  Oligonucleotide for detection of SNP TSC0026955
tgtatagttggty

SEQ ID NO: 107638 - DNA, 13 bp, Artificial Sequence
  Oligonucleotide for detection of SNP TSC0026955
raccaactataca

SEQ ID NO: 107639 - DNA, 13 bp, Artificial Sequence
  Oligonucleotide for detection of SNP TSC0026956
gaagattagatta

SEQ ID NO: 107640 - DNA, 13 bp, Artificial Sequence
  Oligonucleotide for detection of SNP TSC0026956
taatctaatcttc

SEQ ID NO: 107641 - DNA, 13 bp, Artificial Sequence
  Oligonucleotide for detection of SNP TSC0026956
gaagatgagatta

SEQ ID NO: 107642 - DNA, 13 bp, Artificial Sequence
  Oligonucleotide for detection of SNP TSC0026956
taatctcatcttc

SEQ ID NO: 107643 - DNA, 13 bp, Artificial Sequence
  Oligonucleotide for detection of SNP TSC0026956
tgatttgatttty

SEQ ID NO: 107644 - DNA, 13 bp, Artificial Sequence
  Oligonucleotide for detection of SNP TSC0026956
raaaatcaaatca

SEQ ID NO: 107645 - DNA, 13 bp, Artificial Sequence
  Oligonucleotide for detection of SNP TSC0026957
ttttggatttgta

SEQ ID NO: 107646 - DNA, 13 bp, Artificial Sequence
  Oligonucleotide for detection of SNP TSC0026957
tacaaatccaaaa

SEQ ID NO: 107647 - DNA, 13 bp, Artificial Sequence
  Oligonucleotide for detection of SNP TSC0026957
ttttgggtttgta

SEQ ID NO: 107648 - DNA, 13 bp, Artificial Sequence
  Oligonucleotide for detection of SNP TSC0026957
tacaaacccaaaa

SEQ ID NO: 107649 - DNA, 13 bp, Artificial Sequence
  Oligonucleotide for detection of SNP TSC0026958
ttgtataaggtgg

SEQ ID NO: 107650 - DNA, 13 bp, Artificial Sequence
  Oligonucleotide for detection of SNP TSC0026958
ccaccttatacaa

SEQ ID NO: 107651 - DNA, 13 bp, Artificial Sequence
  Oligonucleotide for detection of SNP TSC0026958
ttgtatgaggtgg

SEQ ID NO: 107652 - DNA, 13 bp, Artificial Sequence
  Oligonucleotide for detection of SNP TSC0026958
ccacctcatacaa

SEQ ID NO: 107653 - DNA, 13 bp, Artificial Sequence
  Oligonucleotide for detection of SNP TSC0026963
tttgtgtgttttt

SEQ ID NO: 107654 - DNA, 13 bp, Artificial Sequence
  Oligonucleotide for detection of SNP TSC0026963
aaaaacacacaaa

SEQ ID NO: 107655 - DNA, 13 bp, Artificial Sequence
  Oligonucleotide for detection of SNP TSC0026963
tttgcgtgttttt

SEQ ID NO: 107656 - DNA, 13 bp, Artificial Sequence
  Oligonucleotide for detection of SNP TSC0026963
aaaaacacgcaaa

SEQ ID NO: 107657 - DNA, 13 bp, Artificial Sequence
  Oligonucleotide for detection of SNP TSC0026963
tttgtgcgttttt

SEQ ID NO: 107658 - DNA, 13 bp, Artificial Sequence
  Oligonucleotide for detection of SNP TSC0026963
aaaaacgcacaaa

SEQ ID NO: 107659 - DNA, 13 bp, Artificial Sequence
  Oligonucleotide for detection of SNP TSC0026963
tttgcgcgttttt

SEQ ID NO: 107660 - DNA, 13 bp, Artificial Sequence
  Oligonucleotide for detection of SNP TSC0026963
aaaaacgcgcaaa

SEQ ID NO: 107661 - DNA, 13 bp, Artificial Sequence
  Oligonucleotide for detection of SNP TSC0026963
aaaaatgtgtaga

SEQ ID NO: 107662 - DNA, 13 bp, Artificial Sequence
  Oligonucleotide for detection of SNP TSC0026963
tctacacattttt

SEQ ID NO: 107663 - DNA, 13 bp, Artificial Sequence
  Oligonucleotide for detection of SNP TSC0026963
aaaaatatgtaga

SEQ ID NO: 107664 - DNA, 13 bp, Artificial Sequence
  Oligonucleotide for detection of SNP TSC0026963
tctacatattttt

SEQ ID NO: 107665 - DNA, 13 bp, Artificial Sequence
  Oligonucleotide for detection of SNP TSC0026963
aaaaacgtgtaga

SEQ ID NO: 107666 - DNA, 13 bp, Artificial Sequence
  Oligonucleotide for detection of SNP TSC0026963
tctacacgttttt

SEQ ID NO: 107667 - DNA, 13 bp, Artificial Sequence
  Oligonucleotide for detection of SNP TSC0026963
aaaaatacgtaga

SEQ ID NO: 107668 - DNA, 13 bp, Artificial Sequence
  Oligonucleotide for detection of SNP TSC0026963
tctacgtattttt

SEQ ID NO: 107669 - DNA, 13 bp, Artificial Sequence
  Oligonucleotide for detection of SNP TSC0026963
aaaaatgcgtaga

SEQ ID NO: 107670 - DNA, 13 bp, Artificial Sequence
  Oligonucleotide for detection of SNP TSC0026963
tctacgcattttt

SEQ ID NO: 107671 - DNA, 13 bp, Artificial Sequence
  Oligonucleotide for detection of SNP TSC0026963
aaaaacgcgtaga

SEQ ID NO: 107672 - DNA, 13 bp, Artificial Sequence
  Oligonucleotide for detection of SNP TSC0026963
tctacgcgttttt

SEQ ID NO: 107673 - DNA, 13 bp, Artificial Sequence
  Oligonucleotide for detection of SNP TSC0026966
ttgtgaattaata

SEQ ID NO: 107674 - DNA, 13 bp, Artificial Sequence
  Oligonucleotide for detection of SNP TSC0026966
tattaattcacaa

SEQ ID NO: 107675 - DNA, 13 bp, Artificial Sequence
  Oligonucleotide for detection of SNP TSC0026966
ttgtgatttaata

SEQ ID NO: 107676 - DNA, 13 bp, Artificial Sequence
  Oligonucleotide for detection of SNP TSC0026966
tattaaatcacaa

SEQ ID NO: 107677 - DNA, 13 bp, Artificial Sequence
  Oligonucleotide for detection of SNP TSC0026966
tgttggtttataa

SEQ ID NO: 107678 - DNA, 13 bp, Artificial Sequence
  Oligonucleotide for detection of SNP TSC0026966
ttataaaccaaca

SEQ ID NO: 107679 - DNA, 13 bp, Artificial Sequence
  Oligonucleotide for detection of SNP TSC0026966
tgttgggttataa

SEQ ID NO: 107680 - DNA, 13 bp, Artificial Sequence
  Oligonucleotide for detection of SNP TSC0026966
ttataacccaaca

SEQ ID NO: 107681 - DNA, 13 bp, Artificial Sequence
  Oligonucleotide for detection of SNP TSC0026967
tgattaagttggt

SEQ ID NO: 107682 - DNA, 13 bp, Artificial Sequence
  Oligonucleotide for detection of SNP TSC0026967
accaacttaatca

SEQ ID NO: 107683 - DNA, 13 bp, Artificial Sequence
  Oligonucleotide for detection of SNP TSC0026968
tattaaagtttaa

SEQ ID NO: 107684 - DNA, 13 bp, Artificial Sequence
  Oligonucleotide for detection of SNP TSC0026968
ttaaactttaata

SEQ ID NO: 107685 - DNA, 13 bp, Artificial Sequence
  Oligonucleotide for detection of SNP TSC0026968
tattaaggtttaa

SEQ ID NO: 107686 - DNA, 13 bp, Artificial Sequence
  Oligonucleotide for detection of SNP TSC0026968
ttaaaccttaata

SEQ ID NO: 107687 - DNA, 13 bp, Artificial Sequence
  Oligonucleotide for detection of SNP TSC0026969
ggaaatattttty

SEQ ID NO: 107688 - DNA, 13 bp, Artificial Sequence
  Oligonucleotide for detection of SNP TSC0026969
raaaaatatttcc

SEQ ID NO: 107689 - DNA, 13 bp, Artificial Sequence
  Oligonucleotide for detection of SNP TSC0026969
ggaaatgttttty

SEQ ID NO: 107690 - DNA, 13 bp, Artificial Sequence
  Oligonucleotide for detection of SNP TSC0026969
raaaaacatttcc

SEQ ID NO: 107691 - DNA, 13 bp, Artificial Sequence
  Oligonucleotide for detection of SNP TSC0026969
ggaaacgttttty

SEQ ID NO: 107692 - DNA, 13 bp, Artificial Sequence
  Oligonucleotide for detection of SNP TSC0026969
raaaaacgtttcc

SEQ ID NO: 107693 - DNA, 13 bp, Artificial Sequence
  Oligonucleotide for detection of SNP TSC0026969
gaaaaatgtttty

SEQ ID NO: 107694 - DNA, 13 bp, Artificial Sequence
  Oligonucleotide for detection of SNP TSC0026969
raaaacatttttc

SEQ ID NO: 107695 - DNA, 13 bp, Artificial Sequence
  Oligonucleotide for detection of SNP TSC0026969
gaaaaacgtttty

SEQ ID NO: 107696 - DNA, 13 bp, Artificial Sequence
  Oligonucleotide for detection of SNP TSC0026969
raaaacgtttttc

SEQ ID NO: 107697 - DNA, 13 bp, Artificial Sequence
  Oligonucleotide for detection of SNP TSC0026970
ggtgaaatttatt

SEQ ID NO: 107698 - DNA, 13 bp, Artificial Sequence
  Oligonucleotide for detection of SNP TSC0026970
aataaatttcacc

SEQ ID NO: 107699 - DNA, 13 bp, Artificial Sequence
  Oligonucleotide for detection of SNP TSC0026970
ggtgaagtttatt

SEQ ID NO: 107700 - DNA, 13 bp, Artificial Sequence
  Oligonucleotide for detection of SNP TSC0026970
aataaacttcacc

SEQ ID NO: 107701 - DNA, 13 bp, Artificial Sequence
  Oligonucleotide for detection of SNP TSC0026971
gaggggtggtggt

SEQ ID NO: 107702 - DNA, 13 bp, Artificial Sequence
  Oligonucleotide for detection of SNP TSC0026971
accaccacccctc

SEQ ID NO: 107703 - DNA, 13 bp, Artificial Sequence
  Oligonucleotide for detection of SNP TSC0026971
gaggggcggtggt

SEQ ID NO: 107704 - DNA, 13 bp, Artificial Sequence
  Oligonucleotide for detection of SNP TSC0026971
accaccgcccctc

SEQ ID NO: 107705 - DNA, 13 bp, Artificial Sequence
  Oligonucleotide for detection of SNP TSC0026971
gaggggtggcggt

SEQ ID NO: 107706 - DNA, 13 bp, Artificial Sequence
  Oligonucleotide for detection of SNP TSC0026971
accgccacccctc

SEQ ID NO: 107707 - DNA, 13 bp, Artificial Sequence
  Oligonucleotide for detection of SNP TSC0026971
gaggggcggcggt

SEQ ID NO: 107708 - DNA, 13 bp, Artificial Sequence
  Oligonucleotide for detection of SNP TSC0026971
accgccgcccctc

SEQ ID NO: 107709 - DNA, 13 bp, Artificial Sequence
  Oligonucleotide for detection of SNP TSC0026971
atcgttgttttty

SEQ ID NO: 107710 - DNA, 13 bp, Artificial Sequence
  Oligonucleotide for detection of SNP TSC0026971
raaaaacaacgat

SEQ ID NO: 107711 - DNA, 13 bp, Artificial Sequence
  Oligonucleotide for detection of SNP TSC0026971
atcgttattttty

SEQ ID NO: 107712 - DNA, 13 bp, Artificial Sequence
  Oligonucleotide for detection of SNP TSC0026971
raaaaataacgat

SEQ ID NO: 107713 - DNA, 13 bp, Artificial Sequence
  Oligonucleotide for detection of SNP TSC0026971
attgtcgttttty

SEQ ID NO: 107714 - DNA, 13 bp, Artificial Sequence
  Oligonucleotide for detection of SNP TSC0026971
raaaaacgacaat

SEQ ID NO: 107715 - DNA, 13 bp, Artificial Sequence
  Oligonucleotide for detection of SNP TSC0026971
atcgtcgttttty

SEQ ID NO: 107716 - DNA, 13 bp, Artificial Sequence
  Oligonucleotide for detection of SNP TSC0026971
raaaaacgacgat

SEQ ID NO: 107717 - DNA, 13 bp, Artificial Sequence
  Oligonucleotide for detection of SNP TSC0026974
aatttttaagtty

SEQ ID NO: 107718 - DNA, 13 bp, Artificial Sequence
  Oligonucleotide for detection of SNP TSC0026974
raacttaaaaatt

SEQ ID NO: 107719 - DNA, 13 bp, Artificial Sequence
  Oligonucleotide for detection of SNP TSC0026974
aattttgaagtty

SEQ ID NO: 107720 - DNA, 13 bp, Artificial Sequence
  Oligonucleotide for detection of SNP TSC0026974
raacttcaaaatt

SEQ ID NO: 107721 - DNA, 13 bp, Artificial Sequence
  Oligonucleotide for detection of SNP TSC0026974
aatttcgaagtty

SEQ ID NO: 107722 - DNA, 13 bp, Artificial Sequence
  Oligonucleotide for detection of SNP TSC0026974
raacttcgaaatt

SEQ ID NO: 107723 - DNA, 13 bp, Artificial Sequence
  Oligonucleotide for detection of SNP TSC0026974
gggtttggaggtt

SEQ ID NO: 107724 - DNA, 13 bp, Artificial Sequence
  Oligonucleotide for detection of SNP TSC0026974
aacctccaaaccc

SEQ ID NO: 107725 - DNA, 13 bp, Artificial Sequence
  Oligonucleotide for detection of SNP TSC0026974
gggttttgaggtt

SEQ ID NO: 107726 - DNA, 13 bp, Artificial Sequence
  Oligonucleotide for detection of SNP TSC0026974
aacctcaaaaccc

SEQ ID NO: 107727 - DNA, 13 bp, Artificial Sequence
  Oligonucleotide for detection of SNP TSC0026974
gggtttcgaggtt

SEQ ID NO: 107728 - DNA, 13 bp, Artificial Sequence
  Oligonucleotide for detection of SNP TSC0026974
aacctcgaaaccc

SEQ ID NO: 107729 - DNA, 13 bp, Artificial Sequence
  Oligonucleotide for detection of SNP TSC0026975
ggttttgggggay

SEQ ID NO: 107730 - DNA, 13 bp, Artificial Sequence
  Oligonucleotide for detection of SNP TSC0026975
rtcccccaaaacc

SEQ ID NO: 107731 - DNA, 13 bp, Artificial Sequence
  Oligonucleotide for detection of SNP TSC0026975
ggtttttggggay

SEQ ID NO: 107732 - DNA, 13 bp, Artificial Sequence
  Oligonucleotide for detection of SNP TSC0026975
rtccccaaaaacc

SEQ ID NO: 107733 - DNA, 13 bp, Artificial Sequence
  Oligonucleotide for detection of SNP TSC0026975
ggtttcgggggay

SEQ ID NO: 107734 - DNA, 13 bp, Artificial Sequence
  Oligonucleotide for detection of SNP TSC0026975
rtcccccgaaacc

SEQ ID NO: 107735 - DNA, 13 bp, Artificial Sequence
  Oligonucleotide for detection of SNP TSC0026975
gttttttgaagty

SEQ ID NO: 107736 - DNA, 13 bp, Artificial Sequence
  Oligonucleotide for detection of SNP TSC0026975
racttcaaaaaac

SEQ ID NO: 107737 - DNA, 13 bp, Artificial Sequence
  Oligonucleotide for detection of SNP TSC0026975
gtttttagaagty

SEQ ID NO: 107738 - DNA, 13 bp, Artificial Sequence
  Oligonucleotide for detection of SNP TSC0026975
racttctaaaaac

SEQ ID NO: 107739 - DNA, 13 bp, Artificial Sequence
  Oligonucleotide for detection of SNP TSC0026975
gtttttcgaagty

SEQ ID NO: 107740 - DNA, 13 bp, Artificial Sequence
  Oligonucleotide for detection of SNP TSC0026975
racttcgaaaaac

SEQ ID NO: 107741 - DNA, 13 bp, Artificial Sequence
  Oligonucleotide for detection of SNP TSC0026977
aatataatttaaa

SEQ ID NO: 107742 - DNA, 13 bp, Artificial Sequence
  Oligonucleotide for detection of SNP TSC0026977
tttaaattatatt

SEQ ID NO: 107743 - DNA, 13 bp, Artificial Sequence
  Oligonucleotide for detection of SNP TSC0026977
aatatagtttaaa

SEQ ID NO: 107744 - DNA, 13 bp, Artificial Sequence
  Oligonucleotide for detection of SNP TSC0026977
tttaaactatatt

SEQ ID NO: 107745 - DNA, 13 bp, Artificial Sequence
  Oligonucleotide for detection of SNP TSC0026979
agtgattggaaay

SEQ ID NO: 107746 - DNA, 13 bp, Artificial Sequence
  Oligonucleotide for detection of SNP TSC0026979
rtttccaatcact

SEQ ID NO: 107747 - DNA, 13 bp, Artificial Sequence
  Oligonucleotide for detection of SNP TSC0026979
agtgatgggaaay

SEQ ID NO: 107748 - DNA, 13 bp, Artificial Sequence
  Oligonucleotide for detection of SNP TSC0026979
rtttcccatcact

SEQ ID NO: 107749 - DNA, 13 bp, Artificial Sequence
  Oligonucleotide for detection of SNP TSC0026979
agtgatcggaaay

SEQ ID NO: 107750 - DNA, 13 bp, Artificial Sequence
  Oligonucleotide for detection of SNP TSC0026979
rtttccgatcact

SEQ ID NO: 107751 - DNA, 13 bp, Artificial Sequence
  Oligonucleotide for detection of SNP TSC0026979
agtgacgggaaay

SEQ ID NO: 107752 - DNA, 13 bp, Artificial Sequence
  Oligonucleotide for detection of SNP TSC0026979
rtttcccgtcact

SEQ ID NO: 107753 - DNA, 13 bp, Artificial Sequence
  Oligonucleotide for detection of SNP TSC0026979
gttttttgttatt

SEQ ID NO: 107754 - DNA, 13 bp, Artificial Sequence
  Oligonucleotide for detection of SNP TSC0026979
aataacaaaaaac

SEQ ID NO: 107755 - DNA, 13 bp, Artificial Sequence
  Oligonucleotide for detection of SNP TSC0026979
gtttttcgttatt

SEQ ID NO: 107756 - DNA, 13 bp, Artificial Sequence
  Oligonucleotide for detection of SNP TSC0026979
aataacgaaaaac

SEQ ID NO: 107757 - DNA, 13 bp, Artificial Sequence
  Oligonucleotide for detection of SNP TSC0026980
tgggataagtatt

SEQ ID NO: 107758 - DNA, 13 bp, Artificial Sequence
  Oligonucleotide for detection of SNP TSC0026980
aatacttatccca

SEQ ID NO: 107759 - DNA, 13 bp, Artificial Sequence
  Oligonucleotide for detection of SNP TSC0026980
tgggatgagtatt

SEQ ID NO: 107760 - DNA, 13 bp, Artificial Sequence
  Oligonucleotide for detection of SNP TSC0026980
aatactcatccca

SEQ ID NO: 107761 - DNA, 13 bp, Artificial Sequence
  Oligonucleotide for detection of SNP TSC0026980
cgggataagtatt

SEQ ID NO: 107762 - DNA, 13 bp, Artificial Sequence
  Oligonucleotide for detection of SNP TSC0026980
aatacttatcccg

SEQ ID NO: 107763 - DNA, 13 bp, Artificial Sequence
  Oligonucleotide for detection of SNP TSC0026980
cgggatgagtatt

SEQ ID NO: 107764 - DNA, 13 bp, Artificial Sequence
  Oligonucleotide for detection of SNP TSC0026980
aatactcatcccg

SEQ ID NO: 107765 - DNA, 13 bp, Artificial Sequence
  Oligonucleotide for detection of SNP TSC0026980
tgggacgagtatt

SEQ ID NO: 107766 - DNA, 13 bp, Artificial Sequence
  Oligonucleotide for detection of SNP TSC0026980
aatactcgtccca

SEQ ID NO: 107767 - DNA, 13 bp, Artificial Sequence
  Oligonucleotide for detection of SNP TSC0026980
cgggacgagtatt

SEQ ID NO: 107768 - DNA, 13 bp, Artificial Sequence
  Oligonucleotide for detection of SNP TSC0026980
aatactcgtcccg

SEQ ID NO: 107769 - DNA, 13 bp, Artificial Sequence
  Oligonucleotide for detection of SNP TSC0026980
agtgtttgtttcg

SEQ ID NO: 107770 - DNA, 13 bp, Artificial Sequence
  Oligonucleotide for detection of SNP TSC0026980
cgaaacaaacact

SEQ ID NO: 107771 - DNA, 13 bp, Artificial Sequence
  Oligonucleotide for detection of SNP TSC0026980
agtgttcgtttcg

SEQ ID NO: 107772 - DNA, 13 bp, Artificial Sequence
  Oligonucleotide for detection of SNP TSC0026980
cgaaacgaacact

SEQ ID NO: 107773 - DNA, 13 bp, Artificial Sequence
  Oligonucleotide for detection of SNP TSC0026981
ttgttaatatttt

SEQ ID NO: 107774 - DNA, 13 bp, Artificial Sequence
  Oligonucleotide for detection of SNP TSC0026981
aaaatattaacaa

SEQ ID NO: 107775 - DNA, 13 bp, Artificial Sequence
  Oligonucleotide for detection of SNP TSC0026982
ggagttgaagtta

SEQ ID NO: 107776 - DNA, 13 bp, Artificial Sequence
  Oligonucleotide for detection of SNP TSC0026982
taacttcaactcc

SEQ ID NO: 107777 - DNA, 13 bp, Artificial Sequence
  Oligonucleotide for detection of SNP TSC0026982
ggagtttaagtta

SEQ ID NO: 107778 - DNA, 13 bp, Artificial Sequence
  Oligonucleotide for detection of SNP TSC0026982
taacttaaactcc

SEQ ID NO: 107779 - DNA, 13 bp, Artificial Sequence
  Oligonucleotide for detection of SNP TSC0026982
tggttttaattty

SEQ ID NO: 107780 - DNA, 13 bp, Artificial Sequence
  Oligonucleotide for detection of SNP TSC0026982
raaattaaaacca

SEQ ID NO: 107781 - DNA, 13 bp, Artificial Sequence
  Oligonucleotide for detection of SNP TSC0026982
tggtttaaattty

SEQ ID NO: 107782 - DNA, 13 bp, Artificial Sequence
  Oligonucleotide for detection of SNP TSC0026982
raaatttaaacca

SEQ ID NO: 107783 - DNA, 13 bp, Artificial Sequence
  Oligonucleotide for detection of SNP TSC0026983
tagtggtggaatt

SEQ ID NO: 107784 - DNA, 13 bp, Artificial Sequence
  Oligonucleotide for detection of SNP TSC0026983
aattccaccacta

SEQ ID NO: 107785 - DNA, 13 bp, Artificial Sequence
  Oligonucleotide for detection of SNP TSC0026983
tagtggaggaatt

SEQ ID NO: 107786 - DNA, 13 bp, Artificial Sequence
  Oligonucleotide for detection of SNP TSC0026983
aattcctccacta

SEQ ID NO: 107787 - DNA, 13 bp, Artificial Sequence
  Oligonucleotide for detection of SNP TSC0026984
tgagtaattggaa

SEQ ID NO: 107788 - DNA, 13 bp, Artificial Sequence
  Oligonucleotide for detection of SNP TSC0026984
ttccaattactca

SEQ ID NO: 107789 - DNA, 13 bp, Artificial Sequence
  Oligonucleotide for detection of SNP TSC0026984
tgagtagttggaa

SEQ ID NO: 107790 - DNA, 13 bp, Artificial Sequence
  Oligonucleotide for detection of SNP TSC0026984
ttccaactactca

SEQ ID NO: 107791 - DNA, 13 bp, Artificial Sequence
  Oligonucleotide for detection of SNP TSC0026985
gggggttgggttg

SEQ ID NO: 107792 - DNA, 13 bp, Artificial Sequence
  Oligonucleotide for detection of SNP TSC0026985
caacccaaccccc

SEQ ID NO: 107793 - DNA, 13 bp, Artificial Sequence
  Oligonucleotide for detection of SNP TSC0026985
gggggtcgggttg

SEQ ID NO: 107794 - DNA, 13 bp, Artificial Sequence
  Oligonucleotide for detection of SNP TSC0026985
caacccgaccccc

SEQ ID NO: 107795 - DNA, 13 bp, Artificial Sequence
  Oligonucleotide for detection of SNP TSC0026985
tagtttggtttty

SEQ ID NO: 107796 - DNA, 13 bp, Artificial Sequence
  Oligonucleotide for detection of SNP TSC0026985
raaaaccaaacta

SEQ ID NO: 107797 - DNA, 13 bp, Artificial Sequence
  Oligonucleotide for detection of SNP TSC0026985
tagtttagtttty

SEQ ID NO: 107798 - DNA, 13 bp, Artificial Sequence
  Oligonucleotide for detection of SNP TSC0026985
raaaactaaacta

SEQ ID NO: 107799 - DNA, 13 bp, Artificial Sequence
  Oligonucleotide for detection of SNP TSC0026985
tagttcggtttty

SEQ ID NO: 107800 - DNA, 13 bp, Artificial Sequence
  Oligonucleotide for detection of SNP TSC0026985
raaaaccgaacta

SEQ ID NO: 107801 - DNA, 13 bp, Artificial Sequence
  Oligonucleotide for detection of SNP TSC0026991
atggttatgtttt

SEQ ID NO: 107802 - DNA, 13 bp, Artificial Sequence
  Oligonucleotide for detection of SNP TSC0026991
aaaacataaccat

SEQ ID NO: 107803 - DNA, 13 bp, Artificial Sequence
  Oligonucleotide for detection of SNP TSC0026991
atggttgtgtttt

SEQ ID NO: 107804 - DNA, 13 bp, Artificial Sequence
  Oligonucleotide for detection of SNP TSC0026991
aaaacacaaccat

SEQ ID NO: 107805 - DNA, 13 bp, Artificial Sequence
  Oligonucleotide for detection of SNP TSC0026991
acggttatgtttt

SEQ ID NO: 107806 - DNA, 13 bp, Artificial Sequence
  Oligonucleotide for detection of SNP TSC0026991
aaaacataaccgt

SEQ ID NO: 107807 - DNA, 13 bp, Artificial Sequence
  Oligonucleotide for detection of SNP TSC0026991
acggttgtgtttt

SEQ ID NO: 107808 - DNA, 13 bp, Artificial Sequence
  Oligonucleotide for detection of SNP TSC0026991
aaaacacaaccgt

SEQ ID NO: 107809 - DNA, 13 bp, Artificial Sequence
  Oligonucleotide for detection of SNP TSC0026991
atggtcgtgtttt

SEQ ID NO: 107810 - DNA, 13 bp, Artificial Sequence
  Oligonucleotide for detection of SNP TSC0026991
aaaacacgaccat

SEQ ID NO: 107811 - DNA, 13 bp, Artificial Sequence
  Oligonucleotide for detection of SNP TSC0026991
acggtcgtgtttt

SEQ ID NO: 107812 - DNA, 13 bp, Artificial Sequence
  Oligonucleotide for detection of SNP TSC0026991
aaaacacgaccgt

SEQ ID NO: 107813 - DNA, 13 bp, Artificial Sequence
  Oligonucleotide for detection of SNP TSC0026991
aggatatggttgt

SEQ ID NO: 107814 - DNA, 13 bp, Artificial Sequence
  Oligonucleotide for detection of SNP TSC0026991
acaaccatatcct

SEQ ID NO: 107815 - DNA, 13 bp, Artificial Sequence
  Oligonucleotide for detection of SNP TSC0026991
aggatatggtcgt

SEQ ID NO: 107816 - DNA, 13 bp, Artificial Sequence
  Oligonucleotide for detection of SNP TSC0026991
acgaccatatcct

SEQ ID NO: 107817 - DNA, 13 bp, Artificial Sequence
  Oligonucleotide for detection of SNP TSC0026991
aggatacggttgt

SEQ ID NO: 107818 - DNA, 13 bp, Artificial Sequence
  Oligonucleotide for detection of SNP TSC0026991
acaaccgtatcct

SEQ ID NO: 107819 - DNA, 13 bp, Artificial Sequence
  Oligonucleotide for detection of SNP TSC0026991
aggatacggtcgt

SEQ ID NO: 107820 - DNA, 13 bp, Artificial Sequence
  Oligonucleotide for detection of SNP TSC0026991
acgaccgtatcct

SEQ ID NO: 107821 - DNA, 13 bp, Artificial Sequence
  Oligonucleotide for detection of SNP TSC0026992
agttgtgtatata

SEQ ID NO: 107822 - DNA, 13 bp, Artificial Sequence
  Oligonucleotide for detection of SNP TSC0026992
tatatacacaact

SEQ ID NO: 107823 - DNA, 13 bp, Artificial Sequence
  Oligonucleotide for detection of SNP TSC0026992
agttgtatatata

SEQ ID NO: 107824 - DNA, 13 bp, Artificial Sequence
  Oligonucleotide for detection of SNP TSC0026992
tatatatacaact

SEQ ID NO: 107825 - DNA, 13 bp, Artificial Sequence
  Oligonucleotide for detection of SNP TSC0026992
agtcgtgtatata

SEQ ID NO: 107826 - DNA, 13 bp, Artificial Sequence
  Oligonucleotide for detection of SNP TSC0026992
tatatacacgact

SEQ ID NO: 107827 - DNA, 13 bp, Artificial Sequence
  Oligonucleotide for detection of SNP TSC0026992
agtcgtatatata

SEQ ID NO: 107828 - DNA, 13 bp, Artificial Sequence
  Oligonucleotide for detection of SNP TSC0026992
tatatatacgact

SEQ ID NO: 107829 - DNA, 13 bp, Artificial Sequence
  Oligonucleotide for detection of SNP TSC0026994
gtgtttatagtty

SEQ ID NO: 107830 - DNA, 13 bp, Artificial Sequence
  Oligonucleotide for detection of SNP TSC0026994
raactataaacac

SEQ ID NO: 107831 - DNA, 13 bp, Artificial Sequence
  Oligonucleotide for detection of SNP TSC0026994
gtgtttgtagtty

SEQ ID NO: 107832 - DNA, 13 bp, Artificial Sequence
  Oligonucleotide for detection of SNP TSC0026994
raactacaaacac

SEQ ID NO: 107833 - DNA, 13 bp, Artificial Sequence
  Oligonucleotide for detection of SNP TSC0026996
tttttaggtagty

SEQ ID NO: 107834 - DNA, 13 bp, Artificial Sequence
  Oligonucleotide for detection of SNP TSC0026996
ractacctaaaaa

SEQ ID NO: 107835 - DNA, 13 bp, Artificial Sequence
  Oligonucleotide for detection of SNP TSC0026996
tttttaagtagty

SEQ ID NO: 107836 - DNA, 13 bp, Artificial Sequence
  Oligonucleotide for detection of SNP TSC0026996
ractacttaaaaa

SEQ ID NO: 107837 - DNA, 13 bp, Artificial Sequence
  Oligonucleotide for detection of SNP TSC0026999
tagataataatgy

SEQ ID NO: 107838 - DNA, 13 bp, Artificial Sequence
  Oligonucleotide for detection of SNP TSC0026999
rcattattatcta

SEQ ID NO: 107839 - DNA, 13 bp, Artificial Sequence
  Oligonucleotide for detection of SNP TSC0026999
tagatagtaatgy

SEQ ID NO: 107840 - DNA, 13 bp, Artificial Sequence
  Oligonucleotide for detection of SNP TSC0026999
rcattactatcta

SEQ ID NO: 107841 - DNA, 13 bp, Artificial Sequence
  Oligonucleotide for detection of SNP TSC0027000
tggaagagtggtt

SEQ ID NO: 107842 - DNA, 13 bp, Artificial Sequence
  Oligonucleotide for detection of SNP TSC0027000
aaccactcttcca

SEQ ID NO: 107843 - DNA, 13 bp, Artificial Sequence
  Oligonucleotide for detection of SNP TSC0027000
tggaagtgtggtt

SEQ ID NO: 107844 - DNA, 13 bp, Artificial Sequence
  Oligonucleotide for detection of SNP TSC0027000
aaccacacttcca

SEQ ID NO: 107845 - DNA, 13 bp, Artificial Sequence
  Oligonucleotide for detection of SNP TSC0027000
aattattttttta

SEQ ID NO: 107846 - DNA, 13 bp, Artificial Sequence
  Oligonucleotide for detection of SNP TSC0027000
taaaaaaataatt

SEQ ID NO: 107847 - DNA, 13 bp, Artificial Sequence
  Oligonucleotide for detection of SNP TSC0027000
aattatattttta

SEQ ID NO: 107848 - DNA, 13 bp, Artificial Sequence
  Oligonucleotide for detection of SNP TSC0027000
taaaaatataatt

SEQ ID NO: 107849 - DNA, 13 bp, Artificial Sequence
  Oligonucleotide for detection of SNP TSC0027001
attttggtttatt

SEQ ID NO: 107850 - DNA, 13 bp, Artificial Sequence
  Oligonucleotide for detection of SNP TSC0027001
aataaaccaaaat

SEQ ID NO: 107851 - DNA, 13 bp, Artificial Sequence
  Oligonucleotide for detection of SNP TSC0027001
attttgatttatt

SEQ ID NO: 107852 - DNA, 13 bp, Artificial Sequence
  Oligonucleotide for detection of SNP TSC0027001
aataaatcaaaat

SEQ ID NO: 107853 - DNA, 13 bp, Artificial Sequence
  Oligonucleotide for detection of SNP TSC0027008
gtgttagtattty

SEQ ID NO: 107854 - DNA, 13 bp, Artificial Sequence
  Oligonucleotide for detection of SNP TSC0027008
raaatactaacac

SEQ ID NO: 107855 - DNA, 13 bp, Artificial Sequence
  Oligonucleotide for detection of SNP TSC0027008
gtgttattattty

SEQ ID NO: 107856 - DNA, 13 bp, Artificial Sequence
  Oligonucleotide for detection of SNP TSC0027008
raaataataacac

SEQ ID NO: 107857 - DNA, 13 bp, Artificial Sequence
  Oligonucleotide for detection of SNP TSC0027008
gagatgttggtay

SEQ ID NO: 107858 - DNA, 13 bp, Artificial Sequence
  Oligonucleotide for detection of SNP TSC0027008
rtaccaacatctc

SEQ ID NO: 107859 - DNA, 13 bp, Artificial Sequence
  Oligonucleotide for detection of SNP TSC0027008
gagatgatggtay

SEQ ID NO: 107860 - DNA, 13 bp, Artificial Sequence
  Oligonucleotide for detection of SNP TSC0027008
rtaccatcatctc

SEQ ID NO: 107861 - DNA, 13 bp, Artificial Sequence
  Oligonucleotide for detection of SNP TSC0027009
aaattggtatttt

SEQ ID NO: 107862 - DNA, 13 bp, Artificial Sequence
  Oligonucleotide for detection of SNP TSC0027009
aaaataccaattt

SEQ ID NO: 107863 - DNA, 13 bp, Artificial Sequence
  Oligonucleotide for detection of SNP TSC0027009
aaattgatatttt

SEQ ID NO: 107864 - DNA, 13 bp, Artificial Sequence
  Oligonucleotide for detection of SNP TSC0027009
aaaatatcaattt

SEQ ID NO: 107865 - DNA, 13 bp, Artificial Sequence
  Oligonucleotide for detection of SNP TSC0027012
aagaggatttgtg

SEQ ID NO: 107866 - DNA, 13 bp, Artificial Sequence
  Oligonucleotide for detection of SNP TSC0027012
cacaaatcctctt

SEQ ID NO: 107867 - DNA, 13 bp, Artificial Sequence
  Oligonucleotide for detection of SNP TSC0027012
aagagggtttgtg

SEQ ID NO: 107868 - DNA, 13 bp, Artificial Sequence
  Oligonucleotide for detection of SNP TSC0027012
cacaaaccctctt

SEQ ID NO: 107869 - DNA, 13 bp, Artificial Sequence
  Oligonucleotide for detection of SNP TSC0027013
ttaattaaagaga

SEQ ID NO: 107870 - DNA, 13 bp, Artificial Sequence
  Oligonucleotide for detection of SNP TSC0027013
tctctttaattaa

SEQ ID NO: 107871 - DNA, 13 bp, Artificial Sequence
  Oligonucleotide for detection of SNP TSC0027013
ttaattgaagaga

SEQ ID NO: 107872 - DNA, 13 bp, Artificial Sequence
  Oligonucleotide for detection of SNP TSC0027013
tctcttcaattaa

SEQ ID NO: 107873 - DNA, 13 bp, Artificial Sequence
  Oligonucleotide for detection of SNP TSC0027013
ttaatcgaagaga

SEQ ID NO: 107874 - DNA, 13 bp, Artificial Sequence
  Oligonucleotide for detection of SNP TSC0027013
tctcttcgattaa

SEQ ID NO: 107875 - DNA, 13 bp, Artificial Sequence
  Oligonucleotide for detection of SNP TSC0027013
tttttttggttaa

SEQ ID NO: 107876 - DNA, 13 bp, Artificial Sequence
  Oligonucleotide for detection of SNP TSC0027013
ttaaccaaaaaaa

SEQ ID NO: 107877 - DNA, 13 bp, Artificial Sequence
  Oligonucleotide for detection of SNP TSC0027013
ttttttcggttaa

SEQ ID NO: 107878 - DNA, 13 bp, Artificial Sequence
  Oligonucleotide for detection of SNP TSC0027013
ttaaccgaaaaaa

SEQ ID NO: 107879 - DNA, 13 bp, Artificial Sequence
  Oligonucleotide for detection of SNP TSC0027014
taagttagttttg

SEQ ID NO: 107880 - DNA, 13 bp, Artificial Sequence
  Oligonucleotide for detection of SNP TSC0027014
caaaactaactta

SEQ ID NO: 107881 - DNA, 13 bp, Artificial Sequence
  Oligonucleotide for detection of SNP TSC0027014
taagtttgttttg

SEQ ID NO: 107882 - DNA, 13 bp, Artificial Sequence
  Oligonucleotide for detection of SNP TSC0027014
caaaacaaactta

SEQ ID NO: 107883 - DNA, 13 bp, Artificial Sequence
  Oligonucleotide for detection of SNP TSC0027014
taaaattgattta

SEQ ID NO: 107884 - DNA, 13 bp, Artificial Sequence
  Oligonucleotide for detection of SNP TSC0027014
taaatcaatttta

SEQ ID NO: 107885 - DNA, 13 bp, Artificial Sequence
  Oligonucleotide for detection of SNP TSC0027014
taaaatagattta

SEQ ID NO: 107886 - DNA, 13 bp, Artificial Sequence
  Oligonucleotide for detection of SNP TSC0027014
taaatctatttta

SEQ ID NO: 107887 - DNA, 13 bp, Artificial Sequence
  Oligonucleotide for detection of SNP TSC0027016
gttataatgtatt

SEQ ID NO: 107888 - DNA, 13 bp, Artificial Sequence
  Oligonucleotide for detection of SNP TSC0027016
aatacattataac

SEQ ID NO: 107889 - DNA, 13 bp, Artificial Sequence
  Oligonucleotide for detection of SNP TSC0027016
gttatattgtatt

SEQ ID NO: 107890 - DNA, 13 bp, Artificial Sequence
  Oligonucleotide for detection of SNP TSC0027016
aatacaatataac

SEQ ID NO: 107891 - DNA, 13 bp, Artificial Sequence
  Oligonucleotide for detection of SNP TSC0027016
agtatattatggy

SEQ ID NO: 107892 - DNA, 13 bp, Artificial Sequence
  Oligonucleotide for detection of SNP TSC0027016
rccataatatact

SEQ ID NO: 107893 - DNA, 13 bp, Artificial Sequence
  Oligonucleotide for detection of SNP TSC0027016
agtatagtatggy

SEQ ID NO: 107894 - DNA, 13 bp, Artificial Sequence
  Oligonucleotide for detection of SNP TSC0027016
rccatactatact

SEQ ID NO: 107895 - DNA, 13 bp, Artificial Sequence
  Oligonucleotide for detection of SNP TSC0027017
atgttttgaagtt

SEQ ID NO: 107896 - DNA, 13 bp, Artificial Sequence
  Oligonucleotide for detection of SNP TSC0027017
aacttcaaaacat

SEQ ID NO: 107897 - DNA, 13 bp, Artificial Sequence
  Oligonucleotide for detection of SNP TSC0027017
atgtttcgaagtt

SEQ ID NO: 107898 - DNA, 13 bp, Artificial Sequence
  Oligonucleotide for detection of SNP TSC0027017
aacttcgaaacat

SEQ ID NO: 107899 - DNA, 13 bp, Artificial Sequence
  Oligonucleotide for detection of SNP TSC0027017
aattttggaatat

SEQ ID NO: 107900 - DNA, 13 bp, Artificial Sequence
  Oligonucleotide for detection of SNP TSC0027017
atattccaaaatt

SEQ ID NO: 107901 - DNA, 13 bp, Artificial Sequence
  Oligonucleotide for detection of SNP TSC0027017
aattttagaatat

SEQ ID NO: 107902 - DNA, 13 bp, Artificial Sequence
  Oligonucleotide for detection of SNP TSC0027017
atattctaaaatt

SEQ ID NO: 107903 - DNA, 13 bp, Artificial Sequence
  Oligonucleotide for detection of SNP TSC0027017
aatttcggaatat

SEQ ID NO: 107904 - DNA, 13 bp, Artificial Sequence
  Oligonucleotide for detection of SNP TSC0027017
atattccgaaatt

SEQ ID NO: 107905 - DNA, 13 bp, Artificial Sequence
  Oligonucleotide for detection of SNP TSC0027019
tgggttattgata

SEQ ID NO: 107906 - DNA, 13 bp, Artificial Sequence
  Oligonucleotide for detection of SNP TSC0027019
tatcaataaccca

SEQ ID NO: 107907 - DNA, 13 bp, Artificial Sequence
  Oligonucleotide for detection of SNP TSC0027019
tgggttgttgata

SEQ ID NO: 107908 - DNA, 13 bp, Artificial Sequence
  Oligonucleotide for detection of SNP TSC0027019
tatcaacaaccca

SEQ ID NO: 107909 - DNA, 13 bp, Artificial Sequence
  Oligonucleotide for detection of SNP TSC0027020
ttatagggtgttg

SEQ ID NO: 107910 - DNA, 13 bp, Artificial Sequence
  Oligonucleotide for detection of SNP TSC0027020
caacaccctataa

SEQ ID NO: 107911 - DNA, 13 bp, Artificial Sequence
  Oligonucleotide for detection of SNP TSC0027020
ttatagtgtgttg

SEQ ID NO: 107912 - DNA, 13 bp, Artificial Sequence
  Oligonucleotide for detection of SNP TSC0027020
caacacactataa

SEQ ID NO: 107913 - DNA, 13 bp, Artificial Sequence
  Oligonucleotide for detection of SNP TSC0027020
tagtattttgtga

SEQ ID NO: 107914 - DNA, 13 bp, Artificial Sequence
  Oligonucleotide for detection of SNP TSC0027020
tcacaaaatacta

SEQ ID NO: 107915 - DNA, 13 bp, Artificial Sequence
  Oligonucleotide for detection of SNP TSC0027020
tagtatattgtga

SEQ ID NO: 107916 - DNA, 13 bp, Artificial Sequence
  Oligonucleotide for detection of SNP TSC0027020
tcacaatatacta

SEQ ID NO: 107917 - DNA, 13 bp, Artificial Sequence
  Oligonucleotide for detection of SNP TSC0027021
aatattaaagatt

SEQ ID NO: 107918 - DNA, 13 bp, Artificial Sequence
  Oligonucleotide for detection of SNP TSC0027021
aatctttaatatt

SEQ ID NO: 107919 - DNA, 13 bp, Artificial Sequence
  Oligonucleotide for detection of SNP TSC0027021
aatatttaagatt

SEQ ID NO: 107920 - DNA, 13 bp, Artificial Sequence
  Oligonucleotide for detection of SNP TSC0027021
aatcttaaatatt

SEQ ID NO: 107921 - DNA, 13 bp, Artificial Sequence
  Oligonucleotide for detection of SNP TSC0027021
agtttttgatatt

SEQ ID NO: 107922 - DNA, 13 bp, Artificial Sequence
  Oligonucleotide for detection of SNP TSC0027021
aatatcaaaaact

SEQ ID NO: 107923 - DNA, 13 bp, Artificial Sequence
  Oligonucleotide for detection of SNP TSC0027021
agttttggatatt

SEQ ID NO: 107924 - DNA, 13 bp, Artificial Sequence
  Oligonucleotide for detection of SNP TSC0027021
aatatccaaaact

SEQ ID NO: 107925 - DNA, 13 bp, Artificial Sequence
  Oligonucleotide for detection of SNP TSC0027022
tagaagaaaatag

SEQ ID NO: 107926 - DNA, 13 bp, Artificial Sequence
  Oligonucleotide for detection of SNP TSC0027022
ctattttcttcta

SEQ ID NO: 107927 - DNA, 13 bp, Artificial Sequence
  Oligonucleotide for detection of SNP TSC0027022
tagaaggaaatag

SEQ ID NO: 107928 - DNA, 13 bp, Artificial Sequence
  Oligonucleotide for detection of SNP TSC0027022
ctatttccttcta

SEQ ID NO: 107929 - DNA, 13 bp, Artificial Sequence
  Oligonucleotide for detection of SNP TSC0027023
atttatgatttat

SEQ ID NO: 107930 - DNA, 13 bp, Artificial Sequence
  Oligonucleotide for detection of SNP TSC0027023
ataaatcataaat

SEQ ID NO: 107931 - DNA, 13 bp, Artificial Sequence
  Oligonucleotide for detection of SNP TSC0027023
atttataatttat

SEQ ID NO: 107932 - DNA, 13 bp, Artificial Sequence
  Oligonucleotide for detection of SNP TSC0027023
ataaattataaat

SEQ ID NO: 107933 - DNA, 13 bp, Artificial Sequence
  Oligonucleotide for detection of SNP TSC0027026
ggtggaaaggtaa

SEQ ID NO: 107934 - DNA, 13 bp, Artificial Sequence
  Oligonucleotide for detection of SNP TSC0027026
ttacctttccacc

SEQ ID NO: 107935 - DNA, 13 bp, Artificial Sequence
  Oligonucleotide for detection of SNP TSC0027026
ggtggagaggtaa

SEQ ID NO: 107936 - DNA, 13 bp, Artificial Sequence
  Oligonucleotide for detection of SNP TSC0027026
ttacctctccacc

SEQ ID NO: 107937 - DNA, 13 bp, Artificial Sequence
  Oligonucleotide for detection of SNP TSC0027026
ggcggaaaggtaa

SEQ ID NO: 107938 - DNA, 13 bp, Artificial Sequence
  Oligonucleotide for detection of SNP TSC0027026
ttacctttccgcc

SEQ ID NO: 107939 - DNA, 13 bp, Artificial Sequence
  Oligonucleotide for detection of SNP TSC0027026
ggcggagaggtaa

SEQ ID NO: 107940 - DNA, 13 bp, Artificial Sequence
  Oligonucleotide for detection of SNP TSC0027026
ttacctctccgcc

SEQ ID NO: 107941 - DNA, 13 bp, Artificial Sequence
  Oligonucleotide for detection of SNP TSC0027027
aaggtaaaattty

SEQ ID NO: 107942 - DNA, 13 bp, Artificial Sequence
  Oligonucleotide for detection of SNP TSC0027027
raaattttacctt

SEQ ID NO: 107943 - DNA, 13 bp, Artificial Sequence
  Oligonucleotide for detection of SNP TSC0027027
aaggtagaattty

SEQ ID NO: 107944 - DNA, 13 bp, Artificial Sequence
  Oligonucleotide for detection of SNP TSC0027027
raaattctacctt

SEQ ID NO: 107945 - DNA, 13 bp, Artificial Sequence
  Oligonucleotide for detection of SNP TSC0027034
tttatgtgtaagt

SEQ ID NO: 107946 - DNA, 13 bp, Artificial Sequence
  Oligonucleotide for detection of SNP TSC0027034
acttacacataaa

SEQ ID NO: 107947 - DNA, 13 bp, Artificial Sequence
  Oligonucleotide for detection of SNP TSC0027034
tttatgcgtaagt

SEQ ID NO: 107948 - DNA, 13 bp, Artificial Sequence
  Oligonucleotide for detection of SNP TSC0027034
acttacgcataaa

SEQ ID NO: 107949 - DNA, 13 bp, Artificial Sequence
  Oligonucleotide for detection of SNP TSC0027034
atttatgtatggg

SEQ ID NO: 107950 - DNA, 13 bp, Artificial Sequence
  Oligonucleotide for detection of SNP TSC0027034
cccatacataaat

SEQ ID NO: 107951 - DNA, 13 bp, Artificial Sequence
  Oligonucleotide for detection of SNP TSC0027034
atttatatatggg

SEQ ID NO: 107952 - DNA, 13 bp, Artificial Sequence
  Oligonucleotide for detection of SNP TSC0027034
cccatatataaat

SEQ ID NO: 107953 - DNA, 13 bp, Artificial Sequence
  Oligonucleotide for detection of SNP TSC0027034
atttacgtatggg

SEQ ID NO: 107954 - DNA, 13 bp, Artificial Sequence
  Oligonucleotide for detection of SNP TSC0027034
cccatacgtaaat

SEQ ID NO: 107955 - DNA, 13 bp, Artificial Sequence
  Oligonucleotide for detection of SNP TSC0027035
taatatgttttgy

SEQ ID NO: 107956 - DNA, 13 bp, Artificial Sequence
  Oligonucleotide for detection of SNP TSC0027035
rcaaaacatatta

SEQ ID NO: 107957 - DNA, 13 bp, Artificial Sequence
  Oligonucleotide for detection of SNP TSC0027035
taatattttttgy

SEQ ID NO: 107958 - DNA, 13 bp, Artificial Sequence
  Oligonucleotide for detection of SNP TSC0027035
rcaaaaaatatta

SEQ ID NO: 107959 - DNA, 13 bp, Artificial Sequence
  Oligonucleotide for detection of SNP TSC0027035
gtaaggtatgtta

SEQ ID NO: 107960 - DNA, 13 bp, Artificial Sequence
  Oligonucleotide for detection of SNP TSC0027035
taacataccttac

SEQ ID NO: 107961 - DNA, 13 bp, Artificial Sequence
  Oligonucleotide for detection of SNP TSC0027035
gtaaggaatgtta

SEQ ID NO: 107962 - DNA, 13 bp, Artificial Sequence
  Oligonucleotide for detection of SNP TSC0027035
taacattccttac

SEQ ID NO: 107963 - DNA, 13 bp, Artificial Sequence
  Oligonucleotide for detection of SNP TSC0027038
taaaattaggtaa

SEQ ID NO: 107964 - DNA, 13 bp, Artificial Sequence
  Oligonucleotide for detection of SNP TSC0027038
ttacctaatttta

SEQ ID NO: 107965 - DNA, 13 bp, Artificial Sequence
  Oligonucleotide for detection of SNP TSC0027038
taaaataaggtaa

SEQ ID NO: 107966 - DNA, 13 bp, Artificial Sequence
  Oligonucleotide for detection of SNP TSC0027038
ttaccttatttta

SEQ ID NO: 107967 - DNA, 13 bp, Artificial Sequence
  Oligonucleotide for detection of SNP TSC0027039
gttttttttgtta

SEQ ID NO: 107968 - DNA, 13 bp, Artificial Sequence
  Oligonucleotide for detection of SNP TSC0027039
taacaaaaaaaac

SEQ ID NO: 107969 - DNA, 13 bp, Artificial Sequence
  Oligonucleotide for detection of SNP TSC0027039
gtttttgttgtta

SEQ ID NO: 107970 - DNA, 13 bp, Artificial Sequence
  Oligonucleotide for detection of SNP TSC0027039
taacaacaaaaac

SEQ ID NO: 107971 - DNA, 13 bp, Artificial Sequence
  Oligonucleotide for detection of SNP TSC0027039
gtttttttcgtta

SEQ ID NO: 107972 - DNA, 13 bp, Artificial Sequence
  Oligonucleotide for detection of SNP TSC0027039
taacgaaaaaaac

SEQ ID NO: 107973 - DNA, 13 bp, Artificial Sequence
  Oligonucleotide for detection of SNP TSC0027039
gtttttgtcgtta

SEQ ID NO: 107974 - DNA, 13 bp, Artificial Sequence
  Oligonucleotide for detection of SNP TSC0027039
taacgacaaaaac

SEQ ID NO: 107975 - DNA, 13 bp, Artificial Sequence
  Oligonucleotide for detection of SNP TSC0027039
tggtgggaaaagy

SEQ ID NO: 107976 - DNA, 13 bp, Artificial Sequence
  Oligonucleotide for detection of SNP TSC0027039
rcttttcccacca

SEQ ID NO: 107977 - DNA, 13 bp, Artificial Sequence
  Oligonucleotide for detection of SNP TSC0027039
tggtggtaaaagy

SEQ ID NO: 107978 - DNA, 13 bp, Artificial Sequence
  Oligonucleotide for detection of SNP TSC0027039
rcttttaccacca

SEQ ID NO: 107979 - DNA, 13 bp, Artificial Sequence
  Oligonucleotide for detection of SNP TSC0027039
tggcgggaaaagy

SEQ ID NO: 107980 - DNA, 13 bp, Artificial Sequence
  Oligonucleotide for detection of SNP TSC0027039
rcttttcccgcca

SEQ ID NO: 107981 - DNA, 13 bp, Artificial Sequence
  Oligonucleotide for detection of SNP TSC0027039
tggcggtaaaagy

SEQ ID NO: 107982 - DNA, 13 bp, Artificial Sequence
  Oligonucleotide for detection of SNP TSC0027039
rcttttaccgcca

SEQ ID NO: 107983 - DNA, 13 bp, Artificial Sequence
  Oligonucleotide for detection of SNP TSC0027040
gaggatgatgtta

SEQ ID NO: 107984 - DNA, 13 bp, Artificial Sequence
  Oligonucleotide for detection of SNP TSC0027040
taacatcatcctc

SEQ ID NO: 107985 - DNA, 13 bp, Artificial Sequence
  Oligonucleotide for detection of SNP TSC0027040
gaggattatgtta

SEQ ID NO: 107986 - DNA, 13 bp, Artificial Sequence
  Oligonucleotide for detection of SNP TSC0027040
taacataatcctc

SEQ ID NO: 107987 - DNA, 13 bp, Artificial Sequence
  Oligonucleotide for detection of SNP TSC0027040
gaggacgatgtta

SEQ ID NO: 107988 - DNA, 13 bp, Artificial Sequence
  Oligonucleotide for detection of SNP TSC0027040
taacatcgtcctc

SEQ ID NO: 107989 - DNA, 13 bp, Artificial Sequence
  Oligonucleotide for detection of SNP TSC0027042
tattattatatty

SEQ ID NO: 107990 - DNA, 13 bp, Artificial Sequence
  Oligonucleotide for detection of SNP TSC0027042
raatataataata

SEQ ID NO: 107991 - DNA, 13 bp, Artificial Sequence
  Oligonucleotide for detection of SNP TSC0027042
tattatgatatty

SEQ ID NO: 107992 - DNA, 13 bp, Artificial Sequence
  Oligonucleotide for detection of SNP TSC0027042
raatatcataata

SEQ ID NO: 107993 - DNA, 13 bp, Artificial Sequence
  Oligonucleotide for detection of SNP TSC0027042
tattacgatatty

SEQ ID NO: 107994 - DNA, 13 bp, Artificial Sequence
  Oligonucleotide for detection of SNP TSC0027042
raatatcgtaata

SEQ ID NO: 107995 - DNA, 13 bp, Artificial Sequence
  Oligonucleotide for detection of SNP TSC0027042
ggatgtggtggtg

SEQ ID NO: 107996 - DNA, 13 bp, Artificial Sequence
  Oligonucleotide for detection of SNP TSC0027042
caccaccacatcc

SEQ ID NO: 107997 - DNA, 13 bp, Artificial Sequence
  Oligonucleotide for detection of SNP TSC0027042
ggatgttgtggtg

SEQ ID NO: 107998 - DNA, 13 bp, Artificial Sequence
  Oligonucleotide for detection of SNP TSC0027042
caccacaacatcc

SEQ ID NO: 107999 - DNA, 13 bp, Artificial Sequence
  Oligonucleotide for detection of SNP TSC0027042
ggatgtcgtggtg

SEQ ID NO: 108000 - DNA, 13 bp, Artificial Sequence
  Oligonucleotide for detection of SNP TSC0027042
caccacgacatcc

SEQ ID NO: 108001 - DNA, 13 bp, Artificial Sequence
  Oligonucleotide for detection of SNP TSC0027043
ttagttgggttay

SEQ ID NO: 108002 - DNA, 13 bp, Artificial Sequence
  Oligonucleotide for detection of SNP TSC0027043
rtaacccaactaa

SEQ ID NO: 108003 - DNA, 13 bp, Artificial Sequence
  Oligonucleotide for detection of SNP TSC0027043
ttagttaggttay

SEQ ID NO: 108004 - DNA, 13 bp, Artificial Sequence
  Oligonucleotide for detection of SNP TSC0027043
rtaacctaactaa

SEQ ID NO: 108005 - DNA, 13 bp, Artificial Sequence
  Oligonucleotide for detection of SNP TSC0027044
tttgaaattgtta

SEQ ID NO: 108006 - DNA, 13 bp, Artificial Sequence
  Oligonucleotide for detection of SNP TSC0027044
taacaatttcaaa

SEQ ID NO: 108007 - DNA, 13 bp, Artificial Sequence
  Oligonucleotide for detection of SNP TSC0027044
tttgaagttgtta

SEQ ID NO: 108008 - DNA, 13 bp, Artificial Sequence
  Oligonucleotide for detection of SNP TSC0027044
taacaacttcaaa

SEQ ID NO: 108009 - DNA, 13 bp, Artificial Sequence
  Oligonucleotide for detection of SNP TSC0027046
gtatttagggtta

SEQ ID NO: 108010 - DNA, 13 bp, Artificial Sequence
  Oligonucleotide for detection of SNP TSC0027046
taaccctaaatac

SEQ ID NO: 108011 - DNA, 13 bp, Artificial Sequence
  Oligonucleotide for detection of SNP TSC0027046
gtatttggggtta

SEQ ID NO: 108012 - DNA, 13 bp, Artificial Sequence
  Oligonucleotide for detection of SNP TSC0027046
taaccccaaatac

SEQ ID NO: 108013 - DNA, 13 bp, Artificial Sequence
  Oligonucleotide for detection of SNP TSC0027046
gtattcggggtta

SEQ ID NO: 108014 - DNA, 13 bp, Artificial Sequence
  Oligonucleotide for detection of SNP TSC0027046
taaccccgaatac

SEQ ID NO: 108015 - DNA, 13 bp, Artificial Sequence
  Oligonucleotide for detection of SNP TSC0027046
tgattttgagtay

SEQ ID NO: 108016 - DNA, 13 bp, Artificial Sequence
  Oligonucleotide for detection of SNP TSC0027046
rtactcaaaatca

SEQ ID NO: 108017 - DNA, 13 bp, Artificial Sequence
  Oligonucleotide for detection of SNP TSC0027046
tgatttcgagtay

SEQ ID NO: 108018 - DNA, 13 bp, Artificial Sequence
  Oligonucleotide for detection of SNP TSC0027046
rtactcgaaatca

SEQ ID NO: 108019 - DNA, 13 bp, Artificial Sequence
  Oligonucleotide for detection of SNP TSC0027047
agttggggttaaa

SEQ ID NO: 108020 - DNA, 13 bp, Artificial Sequence
  Oligonucleotide for detection of SNP TSC0027047
tttaaccccaact

SEQ ID NO: 108021 - DNA, 13 bp, Artificial Sequence
  Oligonucleotide for detection of SNP TSC0027047
agttggagttaaa

SEQ ID NO: 108022 - DNA, 13 bp, Artificial Sequence
  Oligonucleotide for detection of SNP TSC0027047
tttaactccaact

SEQ ID NO: 108023 - DNA, 13 bp, Artificial Sequence
  Oligonucleotide for detection of SNP TSC0027048
tattaatgttata

SEQ ID NO: 108024 - DNA, 13 bp, Artificial Sequence
  Oligonucleotide for detection of SNP TSC0027048
tataacattaata

SEQ ID NO: 108025 - DNA, 13 bp, Artificial Sequence
  Oligonucleotide for detection of SNP TSC0027048
tattaacgttata

SEQ ID NO: 108026 - DNA, 13 bp, Artificial Sequence
  Oligonucleotide for detection of SNP TSC0027048
tataacgttaata

SEQ ID NO: 108027 - DNA, 13 bp, Artificial Sequence
  Oligonucleotide for detection of SNP TSC0027048
tgtaatgttaatg

SEQ ID NO: 108028 - DNA, 13 bp, Artificial Sequence
  Oligonucleotide for detection of SNP TSC0027048
cattaacattaca

SEQ ID NO: 108029 - DNA, 13 bp, Artificial Sequence
  Oligonucleotide for detection of SNP TSC0027048
tgtaatattaatg

SEQ ID NO: 108030 - DNA, 13 bp, Artificial Sequence
  Oligonucleotide for detection of SNP TSC0027048
cattaatattaca

SEQ ID NO: 108031 - DNA, 13 bp, Artificial Sequence
  Oligonucleotide for detection of SNP TSC0027048
tgtaacgttaatg

SEQ ID NO: 108032 - DNA, 13 bp, Artificial Sequence
  Oligonucleotide for detection of SNP TSC0027048
cattaacgttaca

SEQ ID NO: 108033 - DNA, 13 bp, Artificial Sequence
  Oligonucleotide for detection of SNP TSC0027049
ggtgtgggttttg

SEQ ID NO: 108034 - DNA, 13 bp, Artificial Sequence
  Oligonucleotide for detection of SNP TSC0027049
caaaacccacacc

SEQ ID NO: 108035 - DNA, 13 bp, Artificial Sequence
  Oligonucleotide for detection of SNP TSC0027049
ggtgtgagttttg

SEQ ID NO: 108036 - DNA, 13 bp, Artificial Sequence
  Oligonucleotide for detection of SNP TSC0027049
caaaactcacacc

SEQ ID NO: 108037 - DNA, 13 bp, Artificial Sequence
  Oligonucleotide for detection of SNP TSC0027050
gagattgtaggtt

SEQ ID NO: 108038 - DNA, 13 bp, Artificial Sequence
  Oligonucleotide for detection of SNP TSC0027050
aacctacaatctc

SEQ ID NO: 108039 - DNA, 13 bp, Artificial Sequence
  Oligonucleotide for detection of SNP TSC0027050
gagattataggtt

SEQ ID NO: 108040 - DNA, 13 bp, Artificial Sequence
  Oligonucleotide for detection of SNP TSC0027050
aacctataatctc

SEQ ID NO: 108041 - DNA, 13 bp, Artificial Sequence
  Oligonucleotide for detection of SNP TSC0027051
gtggttatagtat

SEQ ID NO: 108042 - DNA, 13 bp, Artificial Sequence
  Oligonucleotide for detection of SNP TSC0027051
atactataaccac

SEQ ID NO: 108043 - DNA, 13 bp, Artificial Sequence
  Oligonucleotide for detection of SNP TSC0027051
gtggttgtagtat

SEQ ID NO: 108044 - DNA, 13 bp, Artificial Sequence
  Oligonucleotide for detection of SNP TSC0027051
atactacaaccac

SEQ ID NO: 108045 - DNA, 13 bp, Artificial Sequence
  Oligonucleotide for detection of SNP TSC0027051
gtggtcgtagtat

SEQ ID NO: 108046 - DNA, 13 bp, Artificial Sequence
  Oligonucleotide for detection of SNP TSC0027051
atactacgaccac

SEQ ID NO: 108047 - DNA, 13 bp, Artificial Sequence
  Oligonucleotide for detection of SNP TSC0027051
atgttgtggttay

SEQ ID NO: 108048 - DNA, 13 bp, Artificial Sequence
  Oligonucleotide for detection of SNP TSC0027051
rtaaccacaacat

SEQ ID NO: 108049 - DNA, 13 bp, Artificial Sequence
  Oligonucleotide for detection of SNP TSC0027051
atgttgcggttay

SEQ ID NO: 108050 - DNA, 13 bp, Artificial Sequence
  Oligonucleotide for detection of SNP TSC0027051
rtaaccgcaacat

SEQ ID NO: 108051 - DNA, 13 bp, Artificial Sequence
  Oligonucleotide for detection of SNP TSC0027054
gttgtaagaagtt

SEQ ID NO: 108052 - DNA, 13 bp, Artificial Sequence
  Oligonucleotide for detection of SNP TSC0027054
aacttcttacaac

SEQ ID NO: 108053 - DNA, 13 bp, Artificial Sequence
  Oligonucleotide for detection of SNP TSC0027054
gttgtaggaagtt

SEQ ID NO: 108054 - DNA, 13 bp, Artificial Sequence
  Oligonucleotide for detection of SNP TSC0027054
aacttcctacaac

SEQ ID NO: 108055 - DNA, 13 bp, Artificial Sequence
  Oligonucleotide for detection of SNP TSC0027059
tgtattgggggtg

SEQ ID NO: 108056 - DNA, 13 bp, Artificial Sequence
  Oligonucleotide for detection of SNP TSC0027059
cacccccaataca

SEQ ID NO: 108057 - DNA, 13 bp, Artificial Sequence
  Oligonucleotide for detection of SNP TSC0027059
tgtatttggggtg

SEQ ID NO: 108058 - DNA, 13 bp, Artificial Sequence
  Oligonucleotide for detection of SNP TSC0027059
caccccaaataca

SEQ ID NO: 108059 - DNA, 13 bp, Artificial Sequence
  Oligonucleotide for detection of SNP TSC0027059
tatttttagtgta

SEQ ID NO: 108060 - DNA, 13 bp, Artificial Sequence
  Oligonucleotide for detection of SNP TSC0027059
tacactaaaaata

SEQ ID NO: 108061 - DNA, 13 bp, Artificial Sequence
  Oligonucleotide for detection of SNP TSC0027059
tattttaagtgta

SEQ ID NO: 108062 - DNA, 13 bp, Artificial Sequence
  Oligonucleotide for detection of SNP TSC0027059
tacacttaaaata

SEQ ID NO: 108063 - DNA, 13 bp, Artificial Sequence
  Oligonucleotide for detection of SNP TSC0027060
aattttattagta

SEQ ID NO: 108064 - DNA, 13 bp, Artificial Sequence
  Oligonucleotide for detection of SNP TSC0027060
tactaataaaatt

SEQ ID NO: 108065 - DNA, 13 bp, Artificial Sequence
  Oligonucleotide for detection of SNP TSC0027060
aattttgttagta

SEQ ID NO: 108066 - DNA, 13 bp, Artificial Sequence
  Oligonucleotide for detection of SNP TSC0027060
tactaacaaaatt

SEQ ID NO: 108067 - DNA, 13 bp, Artificial Sequence
  Oligonucleotide for detection of SNP TSC0027063
agtgtgtggttaa

SEQ ID NO: 108068 - DNA, 13 bp, Artificial Sequence
  Oligonucleotide for detection of SNP TSC0027063
ttaaccacacact

SEQ ID NO: 108069 - DNA, 13 bp, Artificial Sequence
  Oligonucleotide for detection of SNP TSC0027063
agtgtgcggttaa

SEQ ID NO: 108070 - DNA, 13 bp, Artificial Sequence
  Oligonucleotide for detection of SNP TSC0027063
ttaaccgcacact

SEQ ID NO: 108071 - DNA, 13 bp, Artificial Sequence
  Oligonucleotide for detection of SNP TSC0027063
ttaattgtatatt

SEQ ID NO: 108072 - DNA, 13 bp, Artificial Sequence
  Oligonucleotide for detection of SNP TSC0027063
aatatacaattaa

SEQ ID NO: 108073 - DNA, 13 bp, Artificial Sequence
  Oligonucleotide for detection of SNP TSC0027063
ttaattatatatt

SEQ ID NO: 108074 - DNA, 13 bp, Artificial Sequence
  Oligonucleotide for detection of SNP TSC0027063
aatatataattaa

SEQ ID NO: 108075 - DNA, 13 bp, Artificial Sequence
  Oligonucleotide for detection of SNP TSC0027063
ttaatcgtatatt

SEQ ID NO: 108076 - DNA, 13 bp, Artificial Sequence
  Oligonucleotide for detection of SNP TSC0027063
aatatacgattaa

SEQ ID NO: 108077 - DNA, 13 bp, Artificial Sequence
  Oligonucleotide for detection of SNP TSC0027064
tagaaaatgtata

SEQ ID NO: 108078 - DNA, 13 bp, Artificial Sequence
  Oligonucleotide for detection of SNP TSC0027064
tatacattttcta

SEQ ID NO: 108079 - DNA, 13 bp, Artificial Sequence
  Oligonucleotide for detection of SNP TSC0027064
tagaaagtgtata

SEQ ID NO: 108080 - DNA, 13 bp, Artificial Sequence
  Oligonucleotide for detection of SNP TSC0027064
tatacactttcta

SEQ ID NO: 108081 - DNA, 13 bp, Artificial Sequence
  Oligonucleotide for detection of SNP TSC0027065
taaatgattagta

SEQ ID NO: 108082 - DNA, 13 bp, Artificial Sequence
  Oligonucleotide for detection of SNP TSC0027065
tactaatcattta

SEQ ID NO: 108083 - DNA, 13 bp, Artificial Sequence
  Oligonucleotide for detection of SNP TSC0027065
taaatgtttagta

SEQ ID NO: 108084 - DNA, 13 bp, Artificial Sequence
  Oligonucleotide for detection of SNP TSC0027065
tactaaacattta

SEQ ID NO: 108085 - DNA, 13 bp, Artificial Sequence
  Oligonucleotide for detection of SNP TSC0027065
tgttaattattta

SEQ ID NO: 108086 - DNA, 13 bp, Artificial Sequence
  Oligonucleotide for detection of SNP TSC0027065
taaataattaaca

SEQ ID NO: 108087 - DNA, 13 bp, Artificial Sequence
  Oligonucleotide for detection of SNP TSC0027065
tgttaaatattta

SEQ ID NO: 108088 - DNA, 13 bp, Artificial Sequence
  Oligonucleotide for detection of SNP TSC0027065
taaatatttaaca

SEQ ID NO: 108089 - DNA, 13 bp, Artificial Sequence
  Oligonucleotide for detection of SNP TSC0027068
tgtttttgagtga

SEQ ID NO: 108090 - DNA, 13 bp, Artificial Sequence
  Oligonucleotide for detection of SNP TSC0027068
tcactcaaaaaca

SEQ ID NO: 108091 - DNA, 13 bp, Artificial Sequence
  Oligonucleotide for detection of SNP TSC0027068
cgttttggagtga

SEQ ID NO: 108092 - DNA, 13 bp, Artificial Sequence
  Oligonucleotide for detection of SNP TSC0027068
tcactccaaaacg

SEQ ID NO: 108093 - DNA, 13 bp, Artificial Sequence
  Oligonucleotide for detection of SNP TSC0027068
cgtttttgagtga

SEQ ID NO: 108094 - DNA, 13 bp, Artificial Sequence
  Oligonucleotide for detection of SNP TSC0027068
tcactcaaaaacg

SEQ ID NO: 108095 - DNA, 13 bp, Artificial Sequence
  Oligonucleotide for detection of SNP TSC0027068
cgtttcggagtga

SEQ ID NO: 108096 - DNA, 13 bp, Artificial Sequence
  Oligonucleotide for detection of SNP TSC0027068
tcactccgaaacg

SEQ ID NO: 108097 - DNA, 13 bp, Artificial Sequence
  Oligonucleotide for detection of SNP TSC0027068
ttattttgaaatg

SEQ ID NO: 108098 - DNA, 13 bp, Artificial Sequence
  Oligonucleotide for detection of SNP TSC0027068
catttcaaaataa

SEQ ID NO: 108099 - DNA, 13 bp, Artificial Sequence
  Oligonucleotide for detection of SNP TSC0027068
ttatttagaaatg

SEQ ID NO: 108100 - DNA, 13 bp, Artificial Sequence
  Oligonucleotide for detection of SNP TSC0027068
catttctaaataa

SEQ ID NO: 108101 - DNA, 13 bp, Artificial Sequence
  Oligonucleotide for detection of SNP TSC0027068
ttatttcgaaatg

SEQ ID NO: 108102 - DNA, 13 bp, Artificial Sequence
  Oligonucleotide for detection of SNP TSC0027068
catttcgaaataa

SEQ ID NO: 108103 - DNA, 13 bp, Artificial Sequence
  Oligonucleotide for detection of SNP TSC0027068
ttatttagaaacg

SEQ ID NO: 108104 - DNA, 13 bp, Artificial Sequence
  Oligonucleotide for detection of SNP TSC0027068
cgtttctaaataa

SEQ ID NO: 108105 - DNA, 13 bp, Artificial Sequence
  Oligonucleotide for detection of SNP TSC0027068
ttattttgaaacg

SEQ ID NO: 108106 - DNA, 13 bp, Artificial Sequence
  Oligonucleotide for detection of SNP TSC0027068
cgtttcaaaataa

SEQ ID NO: 108107 - DNA, 13 bp, Artificial Sequence
  Oligonucleotide for detection of SNP TSC0027068
ttatttcgaaacg

SEQ ID NO: 108108 - DNA, 13 bp, Artificial Sequence
  Oligonucleotide for detection of SNP TSC0027068
cgtttcgaaataa

SEQ ID NO: 108109 - DNA, 13 bp, Artificial Sequence
  Oligonucleotide for detection of SNP TSC0027074
ttgtaaatttagt

SEQ ID NO: 108110 - DNA, 13 bp, Artificial Sequence
  Oligonucleotide for detection of SNP TSC0027074
actaaatttacaa

SEQ ID NO: 108111 - DNA, 13 bp, Artificial Sequence
  Oligonucleotide for detection of SNP TSC0027074
ttgtaattttagt

SEQ ID NO: 108112 - DNA, 13 bp, Artificial Sequence
  Oligonucleotide for detection of SNP TSC0027074
actaaaattacaa

SEQ ID NO: 108113 - DNA, 13 bp, Artificial Sequence
  Oligonucleotide for detection of SNP TSC0027074
attgggtttatag

SEQ ID NO: 108114 - DNA, 13 bp, Artificial Sequence
  Oligonucleotide for detection of SNP TSC0027074
ctataaacccaat

SEQ ID NO: 108115 - DNA, 13 bp, Artificial Sequence
  Oligonucleotide for detection of SNP TSC0027074
attgggattatag

SEQ ID NO: 108116 - DNA, 13 bp, Artificial Sequence
  Oligonucleotide for detection of SNP TSC0027074
ctataatcccaat

SEQ ID NO: 108117 - DNA, 13 bp, Artificial Sequence
  Oligonucleotide for detection of SNP TSC0027079
ttatttgtagtay

SEQ ID NO: 108118 - DNA, 13 bp, Artificial Sequence
  Oligonucleotide for detection of SNP TSC0027079
rtactacaaataa

SEQ ID NO: 108119 - DNA, 13 bp, Artificial Sequence
  Oligonucleotide for detection of SNP TSC0027079
ttatttttagtay

SEQ ID NO: 108120 - DNA, 13 bp, Artificial Sequence
  Oligonucleotide for detection of SNP TSC0027079
rtactaaaaataa

SEQ ID NO: 108121 - DNA, 13 bp, Artificial Sequence
  Oligonucleotide for detection of SNP TSC0027079
gtattataaatag

SEQ ID NO: 108122 - DNA, 13 bp, Artificial Sequence
  Oligonucleotide for detection of SNP TSC0027079
ctatttataatac

SEQ ID NO: 108123 - DNA, 13 bp, Artificial Sequence
  Oligonucleotide for detection of SNP TSC0027079
gtattaaaaatag

SEQ ID NO: 108124 - DNA, 13 bp, Artificial Sequence
  Oligonucleotide for detection of SNP TSC0027079
ctatttttaatac

SEQ ID NO: 108125 - DNA, 13 bp, Artificial Sequence
  Oligonucleotide for detection of SNP TSC0027080
ttatttatttgtt

SEQ ID NO: 108126 - DNA, 13 bp, Artificial Sequence
  Oligonucleotide for detection of SNP TSC0027080
aacaaataaataa

SEQ ID NO: 108127 - DNA, 13 bp, Artificial Sequence
  Oligonucleotide for detection of SNP TSC0027081
tttggaattttay

SEQ ID NO: 108128 - DNA, 13 bp, Artificial Sequence
  Oligonucleotide for detection of SNP TSC0027081
rtaaaattccaaa

SEQ ID NO: 108129 - DNA, 13 bp, Artificial Sequence
  Oligonucleotide for detection of SNP TSC0027081
tttggagttttay

SEQ ID NO: 108130 - DNA, 13 bp, Artificial Sequence
  Oligonucleotide for detection of SNP TSC0027081
rtaaaactccaaa

SEQ ID NO: 108131 - DNA, 13 bp, Artificial Sequence
  Oligonucleotide for detection of SNP TSC0027082
gttgtatgtatga

SEQ ID NO: 108132 - DNA, 13 bp, Artificial Sequence
  Oligonucleotide for detection of SNP TSC0027082
tcatacatacaac

SEQ ID NO: 108133 - DNA, 13 bp, Artificial Sequence
  Oligonucleotide for detection of SNP TSC0027082
gttgtacgtatga

SEQ ID NO: 108134 - DNA, 13 bp, Artificial Sequence
  Oligonucleotide for detection of SNP TSC0027082
tcatacgtacaac

SEQ ID NO: 108135 - DNA, 13 bp, Artificial Sequence
  Oligonucleotide for detection of SNP TSC0027082
ttatgtgtgtaay

SEQ ID NO: 108136 - DNA, 13 bp, Artificial Sequence
  Oligonucleotide for detection of SNP TSC0027082
rttacacacataa

SEQ ID NO: 108137 - DNA, 13 bp, Artificial Sequence
  Oligonucleotide for detection of SNP TSC0027082
ttatgtatgtaay

SEQ ID NO: 108138 - DNA, 13 bp, Artificial Sequence
  Oligonucleotide for detection of SNP TSC0027082
rttacatacataa

SEQ ID NO: 108139 - DNA, 13 bp, Artificial Sequence
  Oligonucleotide for detection of SNP TSC0027082
ttatgcgtgtaay

SEQ ID NO: 108140 - DNA, 13 bp, Artificial Sequence
  Oligonucleotide for detection of SNP TSC0027082
rttacacgcataa

SEQ ID NO: 108141 - DNA, 13 bp, Artificial Sequence
  Oligonucleotide for detection of SNP TSC0027083
tttgtttgttgty

SEQ ID NO: 108142 - DNA, 13 bp, Artificial Sequence
  Oligonucleotide for detection of SNP TSC0027083
racaacaaacaaa

SEQ ID NO: 108143 - DNA, 13 bp, Artificial Sequence
  Oligonucleotide for detection of SNP TSC0027083
tttgttcgttgty

SEQ ID NO: 108144 - DNA, 13 bp, Artificial Sequence
  Oligonucleotide for detection of SNP TSC0027083
racaacgaacaaa

SEQ ID NO: 108145 - DNA, 13 bp, Artificial Sequence
  Oligonucleotide for detection of SNP TSC0027083
ggtaatggataga

SEQ ID NO: 108146 - DNA, 13 bp, Artificial Sequence
  Oligonucleotide for detection of SNP TSC0027083
tctatccattacc

SEQ ID NO: 108147 - DNA, 13 bp, Artificial Sequence
  Oligonucleotide for detection of SNP TSC0027083
ggtaatagataga

SEQ ID NO: 108148 - DNA, 13 bp, Artificial Sequence
  Oligonucleotide for detection of SNP TSC0027083
tctatctattacc

SEQ ID NO: 108149 - DNA, 13 bp, Artificial Sequence
  Oligonucleotide for detection of SNP TSC0027083
ggtaacggataga

SEQ ID NO: 108150 - DNA, 13 bp, Artificial Sequence
  Oligonucleotide for detection of SNP TSC0027083
tctatccgttacc

SEQ ID NO: 108151 - DNA, 13 bp, Artificial Sequence
  Oligonucleotide for detection of SNP TSC0027084
tttataggggtty

SEQ ID NO: 108152 - DNA, 13 bp, Artificial Sequence
  Oligonucleotide for detection of SNP TSC0027084
raacccctataaa

SEQ ID NO: 108153 - DNA, 13 bp, Artificial Sequence
  Oligonucleotide for detection of SNP TSC0027084
tttatatgggtty

SEQ ID NO: 108154 - DNA, 13 bp, Artificial Sequence
  Oligonucleotide for detection of SNP TSC0027084
raacccatataaa

SEQ ID NO: 108155 - DNA, 13 bp, Artificial Sequence
  Oligonucleotide for detection of SNP TSC0027084
gagtttttgtggg

SEQ ID NO: 108156 - DNA, 13 bp, Artificial Sequence
  Oligonucleotide for detection of SNP TSC0027084
cccacaaaaactc

SEQ ID NO: 108157 - DNA, 13 bp, Artificial Sequence
  Oligonucleotide for detection of SNP TSC0027084
gagtttatgtggg

SEQ ID NO: 108158 - DNA, 13 bp, Artificial Sequence
  Oligonucleotide for detection of SNP TSC0027084
cccacataaactc

SEQ ID NO: 108159 - DNA, 13 bp, Artificial Sequence
  Oligonucleotide for detection of SNP TSC0027086
gaagagtttgtgy

SEQ ID NO: 108160 - DNA, 13 bp, Artificial Sequence
  Oligonucleotide for detection of SNP TSC0027086
rcacaaactcttc

SEQ ID NO: 108161 - DNA, 13 bp, Artificial Sequence
  Oligonucleotide for detection of SNP TSC0027086
gaagaggttgtgy

SEQ ID NO: 108162 - DNA, 13 bp, Artificial Sequence
  Oligonucleotide for detection of SNP TSC0027086
rcacaacctcttc

SEQ ID NO: 108163 - DNA, 13 bp, Artificial Sequence
  Oligonucleotide for detection of SNP TSC0027086
gaagagtttgcgy

SEQ ID NO: 108164 - DNA, 13 bp, Artificial Sequence
  Oligonucleotide for detection of SNP TSC0027086
rcgcaaactcttc

SEQ ID NO: 108165 - DNA, 13 bp, Artificial Sequence
  Oligonucleotide for detection of SNP TSC0027086
gaagaggttgcgy

SEQ ID NO: 108166 - DNA, 13 bp, Artificial Sequence
  Oligonucleotide for detection of SNP TSC0027086
rcgcaacctcttc

SEQ ID NO: 108167 - DNA, 13 bp, Artificial Sequence
  Oligonucleotide for detection of SNP TSC0027086
gtgtaggttttty

SEQ ID NO: 108168 - DNA, 13 bp, Artificial Sequence
  Oligonucleotide for detection of SNP TSC0027086
raaaaacctacac

SEQ ID NO: 108169 - DNA, 13 bp, Artificial Sequence
  Oligonucleotide for detection of SNP TSC0027086
gtgtagtttttty

SEQ ID NO: 108170 - DNA, 13 bp, Artificial Sequence
  Oligonucleotide for detection of SNP TSC0027086
raaaaaactacac

SEQ ID NO: 108171 - DNA, 13 bp, Artificial Sequence
  Oligonucleotide for detection of SNP TSC0027086
gcgtaggttttty

SEQ ID NO: 108172 - DNA, 13 bp, Artificial Sequence
  Oligonucleotide for detection of SNP TSC0027086
raaaaacctacgc

SEQ ID NO: 108173 - DNA, 13 bp, Artificial Sequence
  Oligonucleotide for detection of SNP TSC0027086
gcgtagtttttty

SEQ ID NO: 108174 - DNA, 13 bp, Artificial Sequence
  Oligonucleotide for detection of SNP TSC0027086
raaaaaactacgc

SEQ ID NO: 108175 - DNA, 13 bp, Artificial Sequence
  Oligonucleotide for detection of SNP TSC0027087
ttatttagtttag

SEQ ID NO: 108176 - DNA, 13 bp, Artificial Sequence
  Oligonucleotide for detection of SNP TSC0027087
ctaaactaaataa

SEQ ID NO: 108177 - DNA, 13 bp, Artificial Sequence
  Oligonucleotide for detection of SNP TSC0027087
ttatttggtttag

SEQ ID NO: 108178 - DNA, 13 bp, Artificial Sequence
  Oligonucleotide for detection of SNP TSC0027087
ctaaaccaaataa

SEQ ID NO: 108179 - DNA, 13 bp, Artificial Sequence
  Oligonucleotide for detection of SNP TSC0027088
atgtgtagtgaay

SEQ ID NO: 108180 - DNA, 13 bp, Artificial Sequence
  Oligonucleotide for detection of SNP TSC0027088
rttcactacacat

SEQ ID NO: 108181 - DNA, 13 bp, Artificial Sequence
  Oligonucleotide for detection of SNP TSC0027088
atgtgtggtgaay

SEQ ID NO: 108182 - DNA, 13 bp, Artificial Sequence
  Oligonucleotide for detection of SNP TSC0027088
rttcaccacacat

SEQ ID NO: 108183 - DNA, 13 bp, Artificial Sequence
  Oligonucleotide for detection of SNP TSC0027088
atgcgtagtgaay

SEQ ID NO: 108184 - DNA, 13 bp, Artificial Sequence
  Oligonucleotide for detection of SNP TSC0027088
rttcactacgcat

SEQ ID NO: 108185 - DNA, 13 bp, Artificial Sequence
  Oligonucleotide for detection of SNP TSC0027088
atgcgtggtgaay

SEQ ID NO: 108186 - DNA, 13 bp, Artificial Sequence
  Oligonucleotide for detection of SNP TSC0027088
rttcaccacgcat

SEQ ID NO: 108187 - DNA, 13 bp, Artificial Sequence
  Oligonucleotide for detection of SNP TSC0027088
atgtgcggtgaay

SEQ ID NO: 108188 - DNA, 13 bp, Artificial Sequence
  Oligonucleotide for detection of SNP TSC0027088
rttcaccgcacat

SEQ ID NO: 108189 - DNA, 13 bp, Artificial Sequence
  Oligonucleotide for detection of SNP TSC0027088
atgcgcggtgaay

SEQ ID NO: 108190 - DNA, 13 bp, Artificial Sequence
  Oligonucleotide for detection of SNP TSC0027088
rttcaccgcgcat

SEQ ID NO: 108191 - DNA, 13 bp, Artificial Sequence
  Oligonucleotide for detection of SNP TSC0027088
gtttattgtgtat

SEQ ID NO: 108192 - DNA, 13 bp, Artificial Sequence
  Oligonucleotide for detection of SNP TSC0027088
atacacaataaac

SEQ ID NO: 108193 - DNA, 13 bp, Artificial Sequence
  Oligonucleotide for detection of SNP TSC0027088
gtttattgcgtat

SEQ ID NO: 108194 - DNA, 13 bp, Artificial Sequence
  Oligonucleotide for detection of SNP TSC0027088
atacgcaataaac

SEQ ID NO: 108195 - DNA, 13 bp, Artificial Sequence
  Oligonucleotide for detection of SNP TSC0027088
gtttatcgtgtat

SEQ ID NO: 108196 - DNA, 13 bp, Artificial Sequence
  Oligonucleotide for detection of SNP TSC0027088
atacacgataaac

SEQ ID NO: 108197 - DNA, 13 bp, Artificial Sequence
  Oligonucleotide for detection of SNP TSC0027088
gtttatcgcgtat

SEQ ID NO: 108198 - DNA, 13 bp, Artificial Sequence
  Oligonucleotide for detection of SNP TSC0027088
atacgcgataaac

SEQ ID NO: 108199 - DNA, 13 bp, Artificial Sequence
  Oligonucleotide for detection of SNP TSC0027089
atataggatttat

SEQ ID NO: 108200 - DNA, 13 bp, Artificial Sequence
  Oligonucleotide for detection of SNP TSC0027089
ataaatcctatat

SEQ ID NO: 108201 - DNA, 13 bp, Artificial Sequence
  Oligonucleotide for detection of SNP TSC0027089
atatagaatttat

SEQ ID NO: 108202 - DNA, 13 bp, Artificial Sequence
  Oligonucleotide for detection of SNP TSC0027089
ataaattctatat

SEQ ID NO: 108203 - DNA, 13 bp, Artificial Sequence
  Oligonucleotide for detection of SNP TSC0027090
gtagattggagtt

SEQ ID NO: 108204 - DNA, 13 bp, Artificial Sequence
  Oligonucleotide for detection of SNP TSC0027090
aactccaatctac

SEQ ID NO: 108205 - DNA, 13 bp, Artificial Sequence
  Oligonucleotide for detection of SNP TSC0027090
gtagatcggagtt

SEQ ID NO: 108206 - DNA, 13 bp, Artificial Sequence
  Oligonucleotide for detection of SNP TSC0027090
aactccgatctac

SEQ ID NO: 108207 - DNA, 13 bp, Artificial Sequence
  Oligonucleotide for detection of SNP TSC0027090
agttttggtttgy

SEQ ID NO: 108208 - DNA, 13 bp, Artificial Sequence
  Oligonucleotide for detection of SNP TSC0027090
rcaaaccaaaact

SEQ ID NO: 108209 - DNA, 13 bp, Artificial Sequence
  Oligonucleotide for detection of SNP TSC0027090
agttttagtttgy

SEQ ID NO: 108210 - DNA, 13 bp, Artificial Sequence
  Oligonucleotide for detection of SNP TSC0027090
rcaaactaaaact

SEQ ID NO: 108211 - DNA, 13 bp, Artificial Sequence
  Oligonucleotide for detection of SNP TSC0027090
agtttcggtttgy

SEQ ID NO: 108212 - DNA, 13 bp, Artificial Sequence
  Oligonucleotide for detection of SNP TSC0027090
rcaaaccgaaact

SEQ ID NO: 108213 - DNA, 13 bp, Artificial Sequence
  Oligonucleotide for detection of SNP TSC0027094
tttattatgaata

SEQ ID NO: 108214 - DNA, 13 bp, Artificial Sequence
  Oligonucleotide for detection of SNP TSC0027094
tattcataataaa

SEQ ID NO: 108215 - DNA, 13 bp, Artificial Sequence
  Oligonucleotide for detection of SNP TSC0027094
tttattgtgaata

SEQ ID NO: 108216 - DNA, 13 bp, Artificial Sequence
  Oligonucleotide for detection of SNP TSC0027094
tattcacaataaa

SEQ ID NO: 108217 - DNA, 13 bp, Artificial Sequence
  Oligonucleotide for detection of SNP TSC0027099
ttagtaaaatgtt

SEQ ID NO: 108218 - DNA, 13 bp, Artificial Sequence
  Oligonucleotide for detection of SNP TSC0027099
aacattttactaa

SEQ ID NO: 108219 - DNA, 13 bp, Artificial Sequence
  Oligonucleotide for detection of SNP TSC0027099
ttagtataatgtt

SEQ ID NO: 108220 - DNA, 13 bp, Artificial Sequence
  Oligonucleotide for detection of SNP TSC0027099
aacattatactaa

SEQ ID NO: 108221 - DNA, 13 bp, Artificial Sequence
  Oligonucleotide for detection of SNP TSC0027099
aatattttgttaa

SEQ ID NO: 108222 - DNA, 13 bp, Artificial Sequence
  Oligonucleotide for detection of SNP TSC0027099
ttaacaaaatatt

SEQ ID NO: 108223 - DNA, 13 bp, Artificial Sequence
  Oligonucleotide for detection of SNP TSC0027099
aatattgtgttaa

SEQ ID NO: 108224 - DNA, 13 bp, Artificial Sequence
  Oligonucleotide for detection of SNP TSC0027099
ttaacacaatatt

SEQ ID NO: 108225 - DNA, 13 bp, Artificial Sequence
  Oligonucleotide for detection of SNP TSC0027100
gtttttagtgagg

SEQ ID NO: 108226 - DNA, 13 bp, Artificial Sequence
  Oligonucleotide for detection of SNP TSC0027100
cctcactaaaaac

SEQ ID NO: 108227 - DNA, 13 bp, Artificial Sequence
  Oligonucleotide for detection of SNP TSC0027100
gtttttggtgagg

SEQ ID NO: 108228 - DNA, 13 bp, Artificial Sequence
  Oligonucleotide for detection of SNP TSC0027100
cctcaccaaaaac

SEQ ID NO: 108229 - DNA, 13 bp, Artificial Sequence
  Oligonucleotide for detection of SNP TSC0027101
agagggtttattt

SEQ ID NO: 108230 - DNA, 13 bp, Artificial Sequence
  Oligonucleotide for detection of SNP TSC0027101
aaataaaccctct

SEQ ID NO: 108231 - DNA, 13 bp, Artificial Sequence
  Oligonucleotide for detection of SNP TSC0027101
agagggattattt

SEQ ID NO: 108232 - DNA, 13 bp, Artificial Sequence
  Oligonucleotide for detection of SNP TSC0027101
aaataatccctct

SEQ ID NO: 108233 - DNA, 13 bp, Artificial Sequence
  Oligonucleotide for detection of SNP TSC0027102
gaataggggtgtt

SEQ ID NO: 108234 - DNA, 13 bp, Artificial Sequence
  Oligonucleotide for detection of SNP TSC0027102
aacacccctattc

SEQ ID NO: 108235 - DNA, 13 bp, Artificial Sequence
  Oligonucleotide for detection of SNP TSC0027102
gaatagaggtgtt

SEQ ID NO: 108236 - DNA, 13 bp, Artificial Sequence
  Oligonucleotide for detection of SNP TSC0027102
aacacctctattc

SEQ ID NO: 108237 - DNA, 13 bp, Artificial Sequence
  Oligonucleotide for detection of SNP TSC0027103
aaaaatttattgg

SEQ ID NO: 108238 - DNA, 13 bp, Artificial Sequence
  Oligonucleotide for detection of SNP TSC0027103
ccaataaattttt

SEQ ID NO: 108239 - DNA, 13 bp, Artificial Sequence
  Oligonucleotide for detection of SNP TSC0027103
aaaaatgtattgg

SEQ ID NO: 108240 - DNA, 13 bp, Artificial Sequence
  Oligonucleotide for detection of SNP TSC0027103
ccaatacattttt

SEQ ID NO: 108241 - DNA, 13 bp, Artificial Sequence
  Oligonucleotide for detection of SNP TSC0027103
aaaaacgtattgg

SEQ ID NO: 108242 - DNA, 13 bp, Artificial Sequence
  Oligonucleotide for detection of SNP TSC0027103
ccaatacgttttt

SEQ ID NO: 108243 - DNA, 13 bp, Artificial Sequence
  Oligonucleotide for detection of SNP TSC0027103
ttagtaggttttt

SEQ ID NO: 108244 - DNA, 13 bp, Artificial Sequence
  Oligonucleotide for detection of SNP TSC0027103
aaaaacctactaa

SEQ ID NO: 108245 - DNA, 13 bp, Artificial Sequence
  Oligonucleotide for detection of SNP TSC0027107
ggggggagtttta

SEQ ID NO: 108246 - DNA, 13 bp, Artificial Sequence
  Oligonucleotide for detection of SNP TSC0027107
taaaactcccccc

SEQ ID NO: 108247 - DNA, 13 bp, Artificial Sequence
  Oligonucleotide for detection of SNP TSC0027107
ggggggtgtttta

SEQ ID NO: 108248 - DNA, 13 bp, Artificial Sequence
  Oligonucleotide for detection of SNP TSC0027107
taaaacacccccc

SEQ ID NO: 108249 - DNA, 13 bp, Artificial Sequence
  Oligonucleotide for detection of SNP TSC0027107
taaaattttttty

SEQ ID NO: 108250 - DNA, 13 bp, Artificial Sequence
  Oligonucleotide for detection of SNP TSC0027107
raaaaaaatttta

SEQ ID NO: 108251 - DNA, 13 bp, Artificial Sequence
  Oligonucleotide for detection of SNP TSC0027107
taaaatattttty

SEQ ID NO: 108252 - DNA, 13 bp, Artificial Sequence
  Oligonucleotide for detection of SNP TSC0027107
raaaaatatttta

SEQ ID NO: 108253 - DNA, 13 bp, Artificial Sequence
  Oligonucleotide for detection of SNP TSC0027108
tgtatatgtgtag

SEQ ID NO: 108254 - DNA, 13 bp, Artificial Sequence
  Oligonucleotide for detection of SNP TSC0027108
ctacacatataca

SEQ ID NO: 108255 - DNA, 13 bp, Artificial Sequence
  Oligonucleotide for detection of SNP TSC0027108
tgtatacgtgtag

SEQ ID NO: 108256 - DNA, 13 bp, Artificial Sequence
  Oligonucleotide for detection of SNP TSC0027108
ctacacgtataca

SEQ ID NO: 108257 - DNA, 13 bp, Artificial Sequence
  Oligonucleotide for detection of SNP TSC0027108
ttgtatgtgtata

SEQ ID NO: 108258 - DNA, 13 bp, Artificial Sequence
  Oligonucleotide for detection of SNP TSC0027108
tatacacatacaa

SEQ ID NO: 108259 - DNA, 13 bp, Artificial Sequence
  Oligonucleotide for detection of SNP TSC0027108
ttgtatatgtata

SEQ ID NO: 108260 - DNA, 13 bp, Artificial Sequence
  Oligonucleotide for detection of SNP TSC0027108
tatacatatacaa

SEQ ID NO: 108261 - DNA, 13 bp, Artificial Sequence
  Oligonucleotide for detection of SNP TSC0027108
ttgtacgtgtata

SEQ ID NO: 108262 - DNA, 13 bp, Artificial Sequence
  Oligonucleotide for detection of SNP TSC0027108
tatacacgtacaa

SEQ ID NO: 108263 - DNA, 13 bp, Artificial Sequence
  Oligonucleotide for detection of SNP TSC0027110
tgttatatgtttt

SEQ ID NO: 108264 - DNA, 13 bp, Artificial Sequence
  Oligonucleotide for detection of SNP TSC0027110
aaaacatataaca

SEQ ID NO: 108265 - DNA, 13 bp, Artificial Sequence
  Oligonucleotide for detection of SNP TSC0027110
tgttatgtgtttt

SEQ ID NO: 108266 - DNA, 13 bp, Artificial Sequence
  Oligonucleotide for detection of SNP TSC0027110
aaaacacataaca

SEQ ID NO: 108267 - DNA, 13 bp, Artificial Sequence
  Oligonucleotide for detection of SNP TSC0027110
tgttacgtgtttt

SEQ ID NO: 108268 - DNA, 13 bp, Artificial Sequence
  Oligonucleotide for detection of SNP TSC0027110
aaaacacgtaaca

SEQ ID NO: 108269 - DNA, 13 bp, Artificial Sequence
  Oligonucleotide for detection of SNP TSC0027110
aaggtatgtgata

SEQ ID NO: 108270 - DNA, 13 bp, Artificial Sequence
  Oligonucleotide for detection of SNP TSC0027110
tatcacatacctt

SEQ ID NO: 108271 - DNA, 13 bp, Artificial Sequence
  Oligonucleotide for detection of SNP TSC0027110
aaggtacgtgata

SEQ ID NO: 108272 - DNA, 13 bp, Artificial Sequence
  Oligonucleotide for detection of SNP TSC0027110
tatcacgtacctt

SEQ ID NO: 108273 - DNA, 13 bp, Artificial Sequence
  Oligonucleotide for detection of SNP TSC0027111
tgttagtggggaa

SEQ ID NO: 108274 - DNA, 13 bp, Artificial Sequence
  Oligonucleotide for detection of SNP TSC0027111
ttccccactaaca

SEQ ID NO: 108275 - DNA, 13 bp, Artificial Sequence
  Oligonucleotide for detection of SNP TSC0027111
cgttagtggggaa

SEQ ID NO: 108276 - DNA, 13 bp, Artificial Sequence
  Oligonucleotide for detection of SNP TSC0027111
ttccccactaacg

SEQ ID NO: 108277 - DNA, 13 bp, Artificial Sequence
  Oligonucleotide for detection of SNP TSC0027111
tgttagcggggaa

SEQ ID NO: 108278 - DNA, 13 bp, Artificial Sequence
  Oligonucleotide for detection of SNP TSC0027111
ttccccgctaaca

SEQ ID NO: 108279 - DNA, 13 bp, Artificial Sequence
  Oligonucleotide for detection of SNP TSC0027111
cgttagcggggaa

SEQ ID NO: 108280 - DNA, 13 bp, Artificial Sequence
  Oligonucleotide for detection of SNP TSC0027111
ttccccgctaacg

SEQ ID NO: 108281 - DNA, 13 bp, Artificial Sequence
  Oligonucleotide for detection of SNP TSC0027111
ttttttgttggtg

SEQ ID NO: 108282 - DNA, 13 bp, Artificial Sequence
  Oligonucleotide for detection of SNP TSC0027111
caccaacaaaaaa

SEQ ID NO: 108283 - DNA, 13 bp, Artificial Sequence
  Oligonucleotide for detection of SNP TSC0027111
ttttttattggtg

SEQ ID NO: 108284 - DNA, 13 bp, Artificial Sequence
  Oligonucleotide for detection of SNP TSC0027111
caccaataaaaaa

SEQ ID NO: 108285 - DNA, 13 bp, Artificial Sequence
  Oligonucleotide for detection of SNP TSC0027111
tttttcgttggtg

SEQ ID NO: 108286 - DNA, 13 bp, Artificial Sequence
  Oligonucleotide for detection of SNP TSC0027111
caccaacgaaaaa

SEQ ID NO: 108287 - DNA, 13 bp, Artificial Sequence
  Oligonucleotide for detection of SNP TSC0027111
ttttttattggcg

SEQ ID NO: 108288 - DNA, 13 bp, Artificial Sequence
  Oligonucleotide for detection of SNP TSC0027111
cgccaataaaaaa

SEQ ID NO: 108289 - DNA, 13 bp, Artificial Sequence
  Oligonucleotide for detection of SNP TSC0027111
ttttttgttggcg

SEQ ID NO: 108290 - DNA, 13 bp, Artificial Sequence
  Oligonucleotide for detection of SNP TSC0027111
cgccaacaaaaaa

SEQ ID NO: 108291 - DNA, 13 bp, Artificial Sequence
  Oligonucleotide for detection of SNP TSC0027111
tttttcgttggcg

SEQ ID NO: 108292 - DNA, 13 bp, Artificial Sequence
  Oligonucleotide for detection of SNP TSC0027111
cgccaacgaaaaa

SEQ ID NO: 108293 - DNA, 13 bp, Artificial Sequence
  Oligonucleotide for detection of SNP TSC0027113
agtgtaatggtgy

SEQ ID NO: 108294 - DNA, 13 bp, Artificial Sequence
  Oligonucleotide for detection of SNP TSC0027113
rcaccattacact

SEQ ID NO: 108295 - DNA, 13 bp, Artificial Sequence
  Oligonucleotide for detection of SNP TSC0027113
agtgtagtggtgy

SEQ ID NO: 108296 - DNA, 13 bp, Artificial Sequence
  Oligonucleotide for detection of SNP TSC0027113
rcaccactacact

SEQ ID NO: 108297 - DNA, 13 bp, Artificial Sequence
  Oligonucleotide for detection of SNP TSC0027113
agtgtaacggtgy

SEQ ID NO: 108298 - DNA, 13 bp, Artificial Sequence
  Oligonucleotide for detection of SNP TSC0027113
rcaccgttacact

SEQ ID NO: 108299 - DNA, 13 bp, Artificial Sequence
  Oligonucleotide for detection of SNP TSC0027113
agtgtagcggtgy

SEQ ID NO: 108300 - DNA, 13 bp, Artificial Sequence
  Oligonucleotide for detection of SNP TSC0027113
rcaccgctacact

SEQ ID NO: 108301 - DNA, 13 bp, Artificial Sequence
  Oligonucleotide for detection of SNP TSC0027114
ttattcgtttaat

SEQ ID NO: 108302 - DNA, 13 bp, Artificial Sequence
  Oligonucleotide for detection of SNP TSC0027114
attaaacgaataa

SEQ ID NO: 108303 - DNA, 13 bp, Artificial Sequence
  Oligonucleotide for detection of SNP TSC0027114
attagatgggtaa

SEQ ID NO: 108304 - DNA, 13 bp, Artificial Sequence
  Oligonucleotide for detection of SNP TSC0027114
ttacccatctaat

SEQ ID NO: 108305 - DNA, 13 bp, Artificial Sequence
  Oligonucleotide for detection of SNP TSC0027114
attagacgggtaa

SEQ ID NO: 108306 - DNA, 13 bp, Artificial Sequence
  Oligonucleotide for detection of SNP TSC0027114
ttacccgtctaat

SEQ ID NO: 108307 - DNA, 13 bp, Artificial Sequence
  Oligonucleotide for detection of SNP TSC0027118
ttagattgtatta

SEQ ID NO: 108308 - DNA, 13 bp, Artificial Sequence
  Oligonucleotide for detection of SNP TSC0027118
taatacaatctaa

SEQ ID NO: 108309 - DNA, 13 bp, Artificial Sequence
  Oligonucleotide for detection of SNP TSC0027118
ttagatcgtatta

SEQ ID NO: 108310 - DNA, 13 bp, Artificial Sequence
  Oligonucleotide for detection of SNP TSC0027118
taatacgatctaa

SEQ ID NO: 108311 - DNA, 13 bp, Artificial Sequence
  Oligonucleotide for detection of SNP TSC0027118
tgatatgatttga

SEQ ID NO: 108312 - DNA, 13 bp, Artificial Sequence
  Oligonucleotide for detection of SNP TSC0027118
tcaaatcatatca

SEQ ID NO: 108313 - DNA, 13 bp, Artificial Sequence
  Oligonucleotide for detection of SNP TSC0027118
tgatataatttga

SEQ ID NO: 108314 - DNA, 13 bp, Artificial Sequence
  Oligonucleotide for detection of SNP TSC0027118
tcaaattatatca

SEQ ID NO: 108315 - DNA, 13 bp, Artificial Sequence
  Oligonucleotide for detection of SNP TSC0027118
tgatacgatttga

SEQ ID NO: 108316 - DNA, 13 bp, Artificial Sequence
  Oligonucleotide for detection of SNP TSC0027118
tcaaatcgtatca

SEQ ID NO: 108317 - DNA, 13 bp, Artificial Sequence
  Oligonucleotide for detection of SNP TSC0027119
ttagagatgatay

SEQ ID NO: 108318 - DNA, 13 bp, Artificial Sequence
  Oligonucleotide for detection of SNP TSC0027119
rtatcatctctaa

SEQ ID NO: 108319 - DNA, 13 bp, Artificial Sequence
  Oligonucleotide for detection of SNP TSC0027119
ttagaggtgatay

SEQ ID NO: 108320 - DNA, 13 bp, Artificial Sequence
  Oligonucleotide for detection of SNP TSC0027119
rtatcacctctaa

SEQ ID NO: 108321 - DNA, 13 bp, Artificial Sequence
  Oligonucleotide for detection of SNP TSC0027120
ttatatagtttag

SEQ ID NO: 108322 - DNA, 13 bp, Artificial Sequence
  Oligonucleotide for detection of SNP TSC0027120
ctaaactatataa

SEQ ID NO: 108323 - DNA, 13 bp, Artificial Sequence
  Oligonucleotide for detection of SNP TSC0027120
ttatatggtttag

SEQ ID NO: 108324 - DNA, 13 bp, Artificial Sequence
  Oligonucleotide for detection of SNP TSC0027120
ctaaaccatataa

SEQ ID NO: 108325 - DNA, 13 bp, Artificial Sequence
  Oligonucleotide for detection of SNP TSC0027120
ttatacggtttag

SEQ ID NO: 108326 - DNA, 13 bp, Artificial Sequence
  Oligonucleotide for detection of SNP TSC0027120
ctaaaccgtataa

SEQ ID NO: 108327 - DNA, 13 bp, Artificial Sequence
  Oligonucleotide for detection of SNP TSC0027120
ttaaattgtgtga

SEQ ID NO: 108328 - DNA, 13 bp, Artificial Sequence
  Oligonucleotide for detection of SNP TSC0027120
tcacacaatttaa

SEQ ID NO: 108329 - DNA, 13 bp, Artificial Sequence
  Oligonucleotide for detection of SNP TSC0027120
ttaaatcgtgtga

SEQ ID NO: 108330 - DNA, 13 bp, Artificial Sequence
  Oligonucleotide for detection of SNP TSC0027120
tcacacgatttaa

SEQ ID NO: 108331 - DNA, 13 bp, Artificial Sequence
  Oligonucleotide for detection of SNP TSC0027121
ttttaggagagtt

SEQ ID NO: 108332 - DNA, 13 bp, Artificial Sequence
  Oligonucleotide for detection of SNP TSC0027121
aactctcctaaaa

SEQ ID NO: 108333 - DNA, 13 bp, Artificial Sequence
  Oligonucleotide for detection of SNP TSC0027121
ttttagtagagtt

SEQ ID NO: 108334 - DNA, 13 bp, Artificial Sequence
  Oligonucleotide for detection of SNP TSC0027121
aactctactaaaa

SEQ ID NO: 108335 - DNA, 13 bp, Artificial Sequence
  Oligonucleotide for detection of SNP TSC0027121
agtttttttaaaa

SEQ ID NO: 108336 - DNA, 13 bp, Artificial Sequence
  Oligonucleotide for detection of SNP TSC0027121
ttttaaaaaaact

SEQ ID NO: 108337 - DNA, 13 bp, Artificial Sequence
  Oligonucleotide for detection of SNP TSC0027121
agttttattaaaa

SEQ ID NO: 108338 - DNA, 13 bp, Artificial Sequence
  Oligonucleotide for detection of SNP TSC0027121
ttttaataaaact

SEQ ID NO: 108339 - DNA, 13 bp, Artificial Sequence
  Oligonucleotide for detection of SNP TSC0027122
ggtttttgggatg

SEQ ID NO: 108340 - DNA, 13 bp, Artificial Sequence
  Oligonucleotide for detection of SNP TSC0027122
catcccaaaaacc

SEQ ID NO: 108341 - DNA, 13 bp, Artificial Sequence
  Oligonucleotide for detection of SNP TSC0027122
ggttttcgggatg

SEQ ID NO: 108342 - DNA, 13 bp, Artificial Sequence
  Oligonucleotide for detection of SNP TSC0027122
catcccgaaaacc

SEQ ID NO: 108343 - DNA, 13 bp, Artificial Sequence
  Oligonucleotide for detection of SNP TSC0027122
ggtttttgggacg

SEQ ID NO: 108344 - DNA, 13 bp, Artificial Sequence
  Oligonucleotide for detection of SNP TSC0027122
cgtcccaaaaacc

SEQ ID NO: 108345 - DNA, 13 bp, Artificial Sequence
  Oligonucleotide for detection of SNP TSC0027122
ggttttcgggacg

SEQ ID NO: 108346 - DNA, 13 bp, Artificial Sequence
  Oligonucleotide for detection of SNP TSC0027122
cgtcccgaaaacc

SEQ ID NO: 108347 - DNA, 13 bp, Artificial Sequence
  Oligonucleotide for detection of SNP TSC0027122
tgttttgggagty

SEQ ID NO: 108348 - DNA, 13 bp, Artificial Sequence
  Oligonucleotide for detection of SNP TSC0027122
ractcccaaaaca

SEQ ID NO: 108349 - DNA, 13 bp, Artificial Sequence
  Oligonucleotide for detection of SNP TSC0027122
tgttttaggagty

SEQ ID NO: 108350 - DNA, 13 bp, Artificial Sequence
  Oligonucleotide for detection of SNP TSC0027122
ractcctaaaaca

SEQ ID NO: 108351 - DNA, 13 bp, Artificial Sequence
  Oligonucleotide for detection of SNP TSC0027122
cgttttgggagty

SEQ ID NO: 108352 - DNA, 13 bp, Artificial Sequence
  Oligonucleotide for detection of SNP TSC0027122
ractcccaaaacg

SEQ ID NO: 108353 - DNA, 13 bp, Artificial Sequence
  Oligonucleotide for detection of SNP TSC0027122
cgttttaggagty

SEQ ID NO: 108354 - DNA, 13 bp, Artificial Sequence
  Oligonucleotide for detection of SNP TSC0027122
ractcctaaaacg

SEQ ID NO: 108355 - DNA, 13 bp, Artificial Sequence
  Oligonucleotide for detection of SNP TSC0027122
tgtttcgggagty

SEQ ID NO: 108356 - DNA, 13 bp, Artificial Sequence
  Oligonucleotide for detection of SNP TSC0027122
ractcccgaaaca

SEQ ID NO: 108357 - DNA, 13 bp, Artificial Sequence
  Oligonucleotide for detection of SNP TSC0027122
cgtttcgggagty

SEQ ID NO: 108358 - DNA, 13 bp, Artificial Sequence
  Oligonucleotide for detection of SNP TSC0027122
ractcccgaaacg

SEQ ID NO: 108359 - DNA, 13 bp, Artificial Sequence
  Oligonucleotide for detection of SNP TSC0027123
ttttttggtaggy

SEQ ID NO: 108360 - DNA, 13 bp, Artificial Sequence
  Oligonucleotide for detection of SNP TSC0027123
rcctaccaaaaaa

SEQ ID NO: 108361 - DNA, 13 bp, Artificial Sequence
  Oligonucleotide for detection of SNP TSC0027123
tttttcggtaggy

SEQ ID NO: 108362 - DNA, 13 bp, Artificial Sequence
  Oligonucleotide for detection of SNP TSC0027123
rcctaccgaaaaa

SEQ ID NO: 108363 - DNA, 13 bp, Artificial Sequence
  Oligonucleotide for detection of SNP TSC0027123
gtttgtggggaga

SEQ ID NO: 108364 - DNA, 13 bp, Artificial Sequence
  Oligonucleotide for detection of SNP TSC0027123
tctccccacaaac

SEQ ID NO: 108365 - DNA, 13 bp, Artificial Sequence
  Oligonucleotide for detection of SNP TSC0027123
gtttgttgggaga

SEQ ID NO: 108366 - DNA, 13 bp, Artificial Sequence
  Oligonucleotide for detection of SNP TSC0027123
tctcccaacaaac

SEQ ID NO: 108367 - DNA, 13 bp, Artificial Sequence
  Oligonucleotide for detection of SNP TSC0027123
gtttgcggggaga

SEQ ID NO: 108368 - DNA, 13 bp, Artificial Sequence
  Oligonucleotide for detection of SNP TSC0027123
tctccccgcaaac

SEQ ID NO: 108369 - DNA, 13 bp, Artificial Sequence
  Oligonucleotide for detection of SNP TSC0027123
gtttgtcgggaga

SEQ ID NO: 108370 - DNA, 13 bp, Artificial Sequence
  Oligonucleotide for detection of SNP TSC0027123
tctcccgacaaac

SEQ ID NO: 108371 - DNA, 13 bp, Artificial Sequence
  Oligonucleotide for detection of SNP TSC0027124
tttattatgtagg

SEQ ID NO: 108372 - DNA, 13 bp, Artificial Sequence
  Oligonucleotide for detection of SNP TSC0027124
cctacataataaa

SEQ ID NO: 108373 - DNA, 13 bp, Artificial Sequence
  Oligonucleotide for detection of SNP TSC0027124
tttattgtgtagg

SEQ ID NO: 108374 - DNA, 13 bp, Artificial Sequence
  Oligonucleotide for detection of SNP TSC0027124
cctacacaataaa

SEQ ID NO: 108375 - DNA, 13 bp, Artificial Sequence
  Oligonucleotide for detection of SNP TSC0027124
tttatcgtgtagg

SEQ ID NO: 108376 - DNA, 13 bp, Artificial Sequence
  Oligonucleotide for detection of SNP TSC0027124
cctacacgataaa

SEQ ID NO: 108377 - DNA, 13 bp, Artificial Sequence
  Oligonucleotide for detection of SNP TSC0027124
tttgtatggtaga

SEQ ID NO: 108378 - DNA, 13 bp, Artificial Sequence
  Oligonucleotide for detection of SNP TSC0027124
tctaccatacaaa

SEQ ID NO: 108379 - DNA, 13 bp, Artificial Sequence
  Oligonucleotide for detection of SNP TSC0027124
tttgtacggtaga

SEQ ID NO: 108380 - DNA, 13 bp, Artificial Sequence
  Oligonucleotide for detection of SNP TSC0027124
tctaccgtacaaa

SEQ ID NO: 108381 - DNA, 13 bp, Artificial Sequence
  Oligonucleotide for detection of SNP TSC0027125
atttttagtagga

SEQ ID NO: 108382 - DNA, 13 bp, Artificial Sequence
  Oligonucleotide for detection of SNP TSC0027125
tcctactaaaaat

SEQ ID NO: 108383 - DNA, 13 bp, Artificial Sequence
  Oligonucleotide for detection of SNP TSC0027125
atttttggtagga

SEQ ID NO: 108384 - DNA, 13 bp, Artificial Sequence
  Oligonucleotide for detection of SNP TSC0027125
tcctaccaaaaat

SEQ ID NO: 108385 - DNA, 13 bp, Artificial Sequence
  Oligonucleotide for detection of SNP TSC0027125
attttcggtagga

SEQ ID NO: 108386 - DNA, 13 bp, Artificial Sequence
  Oligonucleotide for detection of SNP TSC0027125
tcctaccgaaaat

SEQ ID NO: 108387 - DNA, 13 bp, Artificial Sequence
  Oligonucleotide for detection of SNP TSC0027125
ttttgttgaggat

SEQ ID NO: 108388 - DNA, 13 bp, Artificial Sequence
  Oligonucleotide for detection of SNP TSC0027125
atcctcaacaaaa

SEQ ID NO: 108389 - DNA, 13 bp, Artificial Sequence
  Oligonucleotide for detection of SNP TSC0027125
ttttgtcgaggat

SEQ ID NO: 108390 - DNA, 13 bp, Artificial Sequence
  Oligonucleotide for detection of SNP TSC0027125
atcctcgacaaaa

SEQ ID NO: 108391 - DNA, 13 bp, Artificial Sequence
  Oligonucleotide for detection of SNP TSC0027126
ttgatgaatgata

SEQ ID NO: 108392 - DNA, 13 bp, Artificial Sequence
  Oligonucleotide for detection of SNP TSC0027126
tatcattcatcaa

SEQ ID NO: 108393 - DNA, 13 bp, Artificial Sequence
  Oligonucleotide for detection of SNP TSC0027126
ttgatgtatgata

SEQ ID NO: 108394 - DNA, 13 bp, Artificial Sequence
  Oligonucleotide for detection of SNP TSC0027126
tatcatacatcaa

SEQ ID NO: 108395 - DNA, 13 bp, Artificial Sequence
  Oligonucleotide for detection of SNP TSC0027126
ttgatgaacgata

SEQ ID NO: 108396 - DNA, 13 bp, Artificial Sequence
  Oligonucleotide for detection of SNP TSC0027126
tatcgttcatcaa

SEQ ID NO: 108397 - DNA, 13 bp, Artificial Sequence
  Oligonucleotide for detection of SNP TSC0027126
ttgatgtacgata

SEQ ID NO: 108398 - DNA, 13 bp, Artificial Sequence
  Oligonucleotide for detection of SNP TSC0027126
tatcgtacatcaa

SEQ ID NO: 108399 - DNA, 13 bp, Artificial Sequence
  Oligonucleotide for detection of SNP TSC0027126
tgttgtttattaa

SEQ ID NO: 108400 - DNA, 13 bp, Artificial Sequence
  Oligonucleotide for detection of SNP TSC0027126
ttaataaacaaca

SEQ ID NO: 108401 - DNA, 13 bp, Artificial Sequence
  Oligonucleotide for detection of SNP TSC0027126
tgttgtgtattaa

SEQ ID NO: 108402 - DNA, 13 bp, Artificial Sequence
  Oligonucleotide for detection of SNP TSC0027126
ttaatacacaaca

SEQ ID NO: 108403 - DNA, 13 bp, Artificial Sequence
  Oligonucleotide for detection of SNP TSC0027126
tgtcgtttattaa

SEQ ID NO: 108404 - DNA, 13 bp, Artificial Sequence
  Oligonucleotide for detection of SNP TSC0027126
ttaataaacgaca

SEQ ID NO: 108405 - DNA, 13 bp, Artificial Sequence
  Oligonucleotide for detection of SNP TSC0027126
tgtcgtgtattaa

SEQ ID NO: 108406 - DNA, 13 bp, Artificial Sequence
  Oligonucleotide for detection of SNP TSC0027126
ttaatacacgaca

SEQ ID NO: 108407 - DNA, 13 bp, Artificial Sequence
  Oligonucleotide for detection of SNP TSC0027127
aagttattagggg

SEQ ID NO: 108408 - DNA, 13 bp, Artificial Sequence
  Oligonucleotide for detection of SNP TSC0027127
cccctaataactt

SEQ ID NO: 108409 - DNA, 13 bp, Artificial Sequence
  Oligonucleotide for detection of SNP TSC0027127
aagttagtagggg

SEQ ID NO: 108410 - DNA, 13 bp, Artificial Sequence
  Oligonucleotide for detection of SNP TSC0027127
cccctactaactt

SEQ ID NO: 108411 - DNA, 13 bp, Artificial Sequence
  Oligonucleotide for detection of SNP TSC0027129
aatgatgtgattg

SEQ ID NO: 108412 - DNA, 13 bp, Artificial Sequence
  Oligonucleotide for detection of SNP TSC0027129
caatcacatcatt

SEQ ID NO: 108413 - DNA, 13 bp, Artificial Sequence
  Oligonucleotide for detection of SNP TSC0027129
aatgatatgattg

SEQ ID NO: 108414 - DNA, 13 bp, Artificial Sequence
  Oligonucleotide for detection of SNP TSC0027129
caatcatatcatt

SEQ ID NO: 108415 - DNA, 13 bp, Artificial Sequence
  Oligonucleotide for detection of SNP TSC0027130
gtatttaatttta

SEQ ID NO: 108416 - DNA, 13 bp, Artificial Sequence
  Oligonucleotide for detection of SNP TSC0027130
taaaattaaatac

SEQ ID NO: 108417 - DNA, 13 bp, Artificial Sequence
  Oligonucleotide for detection of SNP TSC0027130
gtattttatttta

SEQ ID NO: 108418 - DNA, 13 bp, Artificial Sequence
  Oligonucleotide for detection of SNP TSC0027130
taaaataaaatac

SEQ ID NO: 108419 - DNA, 13 bp, Artificial Sequence
  Oligonucleotide for detection of SNP TSC0027130
tgaaattaaatgy

SEQ ID NO: 108420 - DNA, 13 bp, Artificial Sequence
  Oligonucleotide for detection of SNP TSC0027130
rcatttaatttca

SEQ ID NO: 108421 - DNA, 13 bp, Artificial Sequence
  Oligonucleotide for detection of SNP TSC0027130
tgaaataaaatgy

SEQ ID NO: 108422 - DNA, 13 bp, Artificial Sequence
  Oligonucleotide for detection of SNP TSC0027130
rcattttatttca

SEQ ID NO: 108423 - DNA, 13 bp, Artificial Sequence
  Oligonucleotide for detection of SNP TSC0027131
ttttggaattttt

SEQ ID NO: 108424 - DNA, 13 bp, Artificial Sequence
  Oligonucleotide for detection of SNP TSC0027131
aaaaattccaaaa

SEQ ID NO: 108425 - DNA, 13 bp, Artificial Sequence
  Oligonucleotide for detection of SNP TSC0027131
ttttgggattttt

SEQ ID NO: 108426 - DNA, 13 bp, Artificial Sequence
  Oligonucleotide for detection of SNP TSC0027131
aaaaatcccaaaa

SEQ ID NO: 108427 - DNA, 13 bp, Artificial Sequence
  Oligonucleotide for detection of SNP TSC0027132
gggtttatgtttt

SEQ ID NO: 108428 - DNA, 13 bp, Artificial Sequence
  Oligonucleotide for detection of SNP TSC0027132
aaaacataaaccc

SEQ ID NO: 108429 - DNA, 13 bp, Artificial Sequence
  Oligonucleotide for detection of SNP TSC0027135
ttttatagttata

SEQ ID NO: 108430 - DNA, 13 bp, Artificial Sequence
  Oligonucleotide for detection of SNP TSC0027135
tataactataaaa

SEQ ID NO: 108431 - DNA, 13 bp, Artificial Sequence
  Oligonucleotide for detection of SNP TSC0027135
ttttatggttata

SEQ ID NO: 108432 - DNA, 13 bp, Artificial Sequence
  Oligonucleotide for detection of SNP TSC0027135
tataaccataaaa

SEQ ID NO: 108433 - DNA, 13 bp, Artificial Sequence
  Oligonucleotide for detection of SNP TSC0027136
gttatttgtatty

SEQ ID NO: 108434 - DNA, 13 bp, Artificial Sequence
  Oligonucleotide for detection of SNP TSC0027136
raatacaaataac

SEQ ID NO: 108435 - DNA, 13 bp, Artificial Sequence
  Oligonucleotide for detection of SNP TSC0027136
gttattcgtatty

SEQ ID NO: 108436 - DNA, 13 bp, Artificial Sequence
  Oligonucleotide for detection of SNP TSC0027136
raatacgaataac

SEQ ID NO: 108437 - DNA, 13 bp, Artificial Sequence
  Oligonucleotide for detection of SNP TSC0027136
gggtgtgaatagy

SEQ ID NO: 108438 - DNA, 13 bp, Artificial Sequence
  Oligonucleotide for detection of SNP TSC0027136
rctattcacaccc

SEQ ID NO: 108439 - DNA, 13 bp, Artificial Sequence
  Oligonucleotide for detection of SNP TSC0027136
gggtgtaaatagy

SEQ ID NO: 108440 - DNA, 13 bp, Artificial Sequence
  Oligonucleotide for detection of SNP TSC0027136
rctatttacaccc

SEQ ID NO: 108441 - DNA, 13 bp, Artificial Sequence
  Oligonucleotide for detection of SNP TSC0027136
gggtgcgaatagy

SEQ ID NO: 108442 - DNA, 13 bp, Artificial Sequence
  Oligonucleotide for detection of SNP TSC0027136
rctattcgcaccc

SEQ ID NO: 108443 - DNA, 13 bp, Artificial Sequence
  Oligonucleotide for detection of SNP TSC0027138
atttaggaggtty

SEQ ID NO: 108444 - DNA, 13 bp, Artificial Sequence
  Oligonucleotide for detection of SNP TSC0027138
raacctcctaaat

SEQ ID NO: 108445 - DNA, 13 bp, Artificial Sequence
  Oligonucleotide for detection of SNP TSC0027138
atttagaaggtty

SEQ ID NO: 108446 - DNA, 13 bp, Artificial Sequence
  Oligonucleotide for detection of SNP TSC0027138
raaccttctaaat

SEQ ID NO: 108447 - DNA, 13 bp, Artificial Sequence
  Oligonucleotide for detection of SNP TSC0027139
gatggggttatgt

SEQ ID NO: 108448 - DNA, 13 bp, Artificial Sequence
  Oligonucleotide for detection of SNP TSC0027139
acataaccccatc

SEQ ID NO: 108449 - DNA, 13 bp, Artificial Sequence
  Oligonucleotide for detection of SNP TSC0027139
gatgggattatgt

SEQ ID NO: 108450 - DNA, 13 bp, Artificial Sequence
  Oligonucleotide for detection of SNP TSC0027139
acataatcccatc

SEQ ID NO: 108451 - DNA, 13 bp, Artificial Sequence
  Oligonucleotide for detection of SNP TSC0027141
ggttttattgggy

SEQ ID NO: 108452 - DNA, 13 bp, Artificial Sequence
  Oligonucleotide for detection of SNP TSC0027141
rcccaataaaacc

SEQ ID NO: 108453 - DNA, 13 bp, Artificial Sequence
  Oligonucleotide for detection of SNP TSC0027141
ggttttgttgggy

SEQ ID NO: 108454 - DNA, 13 bp, Artificial Sequence
  Oligonucleotide for detection of SNP TSC0027141
rcccaacaaaacc

SEQ ID NO: 108455 - DNA, 13 bp, Artificial Sequence
  Oligonucleotide for detection of SNP TSC0027141
ggtttcgttgggy

SEQ ID NO: 108456 - DNA, 13 bp, Artificial Sequence
  Oligonucleotide for detection of SNP TSC0027141
rcccaacgaaacc

SEQ ID NO: 108457 - DNA, 13 bp, Artificial Sequence
  Oligonucleotide for detection of SNP TSC0027141
gtttagtggggty

SEQ ID NO: 108458 - DNA, 13 bp, Artificial Sequence
  Oligonucleotide for detection of SNP TSC0027141
raccccactaaac

SEQ ID NO: 108459 - DNA, 13 bp, Artificial Sequence
  Oligonucleotide for detection of SNP TSC0027141
gtttagcggggty

SEQ ID NO: 108460 - DNA, 13 bp, Artificial Sequence
  Oligonucleotide for detection of SNP TSC0027141
raccccgctaaac

SEQ ID NO: 108461 - DNA, 13 bp, Artificial Sequence
  Oligonucleotide for detection of SNP TSC0027142
tgttgttgtgagg

SEQ ID NO: 108462 - DNA, 13 bp, Artificial Sequence
  Oligonucleotide for detection of SNP TSC0027142
cctcacaacaaca

SEQ ID NO: 108463 - DNA, 13 bp, Artificial Sequence
  Oligonucleotide for detection of SNP TSC0027142
tgttgtcgtgagg

SEQ ID NO: 108464 - DNA, 13 bp, Artificial Sequence
  Oligonucleotide for detection of SNP TSC0027142
cctcacgacaaca

SEQ ID NO: 108465 - DNA, 13 bp, Artificial Sequence
  Oligonucleotide for detection of SNP TSC0027142
ttttatgatagta

SEQ ID NO: 108466 - DNA, 13 bp, Artificial Sequence
  Oligonucleotide for detection of SNP TSC0027142
tactatcataaaa

SEQ ID NO: 108467 - DNA, 13 bp, Artificial Sequence
  Oligonucleotide for detection of SNP TSC0027142
ttttataatagta

SEQ ID NO: 108468 - DNA, 13 bp, Artificial Sequence
  Oligonucleotide for detection of SNP TSC0027142
tactattataaaa

SEQ ID NO: 108469 - DNA, 13 bp, Artificial Sequence
  Oligonucleotide for detection of SNP TSC0027142
ttttacgatagta

SEQ ID NO: 108470 - DNA, 13 bp, Artificial Sequence
  Oligonucleotide for detection of SNP TSC0027142
tactatcgtaaaa

SEQ ID NO: 108471 - DNA, 13 bp, Artificial Sequence
  Oligonucleotide for detection of SNP TSC0027143
gtggtgtgattay

SEQ ID NO: 108472 - DNA, 13 bp, Artificial Sequence
  Oligonucleotide for detection of SNP TSC0027143
rtaatcacaccac

SEQ ID NO: 108473 - DNA, 13 bp, Artificial Sequence
  Oligonucleotide for detection of SNP TSC0027143
gtggcgtgattay

SEQ ID NO: 108474 - DNA, 13 bp, Artificial Sequence
  Oligonucleotide for detection of SNP TSC0027143
rtaatcacgccac

SEQ ID NO: 108475 - DNA, 13 bp, Artificial Sequence
  Oligonucleotide for detection of SNP TSC0027143
gtggtgcgattay

SEQ ID NO: 108476 - DNA, 13 bp, Artificial Sequence
  Oligonucleotide for detection of SNP TSC0027143
rtaatcgcaccac

SEQ ID NO: 108477 - DNA, 13 bp, Artificial Sequence
  Oligonucleotide for detection of SNP TSC0027143
gtggcgcgattay

SEQ ID NO: 108478 - DNA, 13 bp, Artificial Sequence
  Oligonucleotide for detection of SNP TSC0027143
rtaatcgcgccac

SEQ ID NO: 108479 - DNA, 13 bp, Artificial Sequence
  Oligonucleotide for detection of SNP TSC0027143
gtgattgtgttay

SEQ ID NO: 108480 - DNA, 13 bp, Artificial Sequence
  Oligonucleotide for detection of SNP TSC0027143
rtaacacaatcac

SEQ ID NO: 108481 - DNA, 13 bp, Artificial Sequence
  Oligonucleotide for detection of SNP TSC0027143
gtgattatgttay

SEQ ID NO: 108482 - DNA, 13 bp, Artificial Sequence
  Oligonucleotide for detection of SNP TSC0027143
rtaacataatcac

SEQ ID NO: 108483 - DNA, 13 bp, Artificial Sequence
  Oligonucleotide for detection of SNP TSC0027143
gtgatcgtgttay

SEQ ID NO: 108484 - DNA, 13 bp, Artificial Sequence
  Oligonucleotide for detection of SNP TSC0027143
rtaacacgatcac

SEQ ID NO: 108485 - DNA, 13 bp, Artificial Sequence
  Oligonucleotide for detection of SNP TSC0027143
gtgattacgttay

SEQ ID NO: 108486 - DNA, 13 bp, Artificial Sequence
  Oligonucleotide for detection of SNP TSC0027143
rtaacgtaatcac

SEQ ID NO: 108487 - DNA, 13 bp, Artificial Sequence
  Oligonucleotide for detection of SNP TSC0027143
gtgattgcgttay

SEQ ID NO: 108488 - DNA, 13 bp, Artificial Sequence
  Oligonucleotide for detection of SNP TSC0027143
rtaacgcaatcac

SEQ ID NO: 108489 - DNA, 13 bp, Artificial Sequence
  Oligonucleotide for detection of SNP TSC0027143
gtgatcgcgttay

SEQ ID NO: 108490 - DNA, 13 bp, Artificial Sequence
  Oligonucleotide for detection of SNP TSC0027143
rtaacgcgatcac

SEQ ID NO: 108491 - DNA, 13 bp, Artificial Sequence
  Oligonucleotide for detection of SNP TSC0027144
atataatgtttag

SEQ ID NO: 108492 - DNA, 13 bp, Artificial Sequence
  Oligonucleotide for detection of SNP TSC0027144
ctaaacattatat

SEQ ID NO: 108493 - DNA, 13 bp, Artificial Sequence
  Oligonucleotide for detection of SNP TSC0027144
atataacgtttag

SEQ ID NO: 108494 - DNA, 13 bp, Artificial Sequence
  Oligonucleotide for detection of SNP TSC0027144
ctaaacgttatat

SEQ ID NO: 108495 - DNA, 13 bp, Artificial Sequence
  Oligonucleotide for detection of SNP TSC0027144
ttgagtgttgtat

SEQ ID NO: 108496 - DNA, 13 bp, Artificial Sequence
  Oligonucleotide for detection of SNP TSC0027144
atacaacactcaa

SEQ ID NO: 108497 - DNA, 13 bp, Artificial Sequence
  Oligonucleotide for detection of SNP TSC0027144
ttgagtattgtat

SEQ ID NO: 108498 - DNA, 13 bp, Artificial Sequence
  Oligonucleotide for detection of SNP TSC0027144
atacaatactcaa

SEQ ID NO: 108499 - DNA, 13 bp, Artificial Sequence
  Oligonucleotide for detection of SNP TSC0027144
ttgagcgttgtat

SEQ ID NO: 108500 - DNA, 13 bp, Artificial Sequence
  Oligonucleotide for detection of SNP TSC0027144
atacaacgctcaa

SEQ ID NO: 108501 - DNA, 13 bp, Artificial Sequence
  Oligonucleotide for detection of SNP TSC0027145
atttttagtagtg

SEQ ID NO: 108502 - DNA, 13 bp, Artificial Sequence
  Oligonucleotide for detection of SNP TSC0027145
cactactaaaaat

SEQ ID NO: 108503 - DNA, 13 bp, Artificial Sequence
  Oligonucleotide for detection of SNP TSC0027145
atttttggtagtg

SEQ ID NO: 108504 - DNA, 13 bp, Artificial Sequence
  Oligonucleotide for detection of SNP TSC0027145
cactaccaaaaat

SEQ ID NO: 108505 - DNA, 13 bp, Artificial Sequence
  Oligonucleotide for detection of SNP TSC0027145
atttttagtagcg

SEQ ID NO: 108506 - DNA, 13 bp, Artificial Sequence
  Oligonucleotide for detection of SNP TSC0027145
cgctactaaaaat

SEQ ID NO: 108507 - DNA, 13 bp, Artificial Sequence
  Oligonucleotide for detection of SNP TSC0027145
attttcggtagtg

SEQ ID NO: 108508 - DNA, 13 bp, Artificial Sequence
  Oligonucleotide for detection of SNP TSC0027145
cactaccgaaaat

SEQ ID NO: 108509 - DNA, 13 bp, Artificial Sequence
  Oligonucleotide for detection of SNP TSC0027145
atttttggtagcg

SEQ ID NO: 108510 - DNA, 13 bp, Artificial Sequence
  Oligonucleotide for detection of SNP TSC0027145
cgctaccaaaaat

SEQ ID NO: 108511 - DNA, 13 bp, Artificial Sequence
  Oligonucleotide for detection of SNP TSC0027145
attttcggtagcg

SEQ ID NO: 108512 - DNA, 13 bp, Artificial Sequence
  Oligonucleotide for detection of SNP TSC0027145
cgctaccgaaaat

SEQ ID NO: 108513 - DNA, 13 bp, Artificial Sequence
  Oligonucleotide for detection of SNP TSC0027145
tgttgttgggagt

SEQ ID NO: 108514 - DNA, 13 bp, Artificial Sequence
  Oligonucleotide for detection of SNP TSC0027145
actcccaacaaca

SEQ ID NO: 108515 - DNA, 13 bp, Artificial Sequence
  Oligonucleotide for detection of SNP TSC0027145
cgttgttgggagt

SEQ ID NO: 108516 - DNA, 13 bp, Artificial Sequence
  Oligonucleotide for detection of SNP TSC0027145
actcccaacaacg

SEQ ID NO: 108517 - DNA, 13 bp, Artificial Sequence
  Oligonucleotide for detection of SNP TSC0027145
tgttgtcgggagt

SEQ ID NO: 108518 - DNA, 13 bp, Artificial Sequence
  Oligonucleotide for detection of SNP TSC0027145
actcccgacaaca

SEQ ID NO: 108519 - DNA, 13 bp, Artificial Sequence
  Oligonucleotide for detection of SNP TSC0027145
cgttgtcgggagt

SEQ ID NO: 108520 - DNA, 13 bp, Artificial Sequence
  Oligonucleotide for detection of SNP TSC0027145
actcccgacaacg

SEQ ID NO: 108521 - DNA, 13 bp, Artificial Sequence
  Oligonucleotide for detection of SNP TSC0027146
ttaaatgagttaa

SEQ ID NO: 108522 - DNA, 13 bp, Artificial Sequence
  Oligonucleotide for detection of SNP TSC0027146
ttaactcatttaa

SEQ ID NO: 108523 - DNA, 13 bp, Artificial Sequence
  Oligonucleotide for detection of SNP TSC0027146
ttaaataagttaa

SEQ ID NO: 108524 - DNA, 13 bp, Artificial Sequence
  Oligonucleotide for detection of SNP TSC0027146
ttaacttatttaa

SEQ ID NO: 108525 - DNA, 13 bp, Artificial Sequence
  Oligonucleotide for detection of SNP TSC0027147
ttggggtgtatag

SEQ ID NO: 108526 - DNA, 13 bp, Artificial Sequence
  Oligonucleotide for detection of SNP TSC0027147
ctatacaccccaa

SEQ ID NO: 108527 - DNA, 13 bp, Artificial Sequence
  Oligonucleotide for detection of SNP TSC0027147
ttggggggtatag

SEQ ID NO: 108528 - DNA, 13 bp, Artificial Sequence
  Oligonucleotide for detection of SNP TSC0027147
ctataccccccaa

SEQ ID NO: 108529 - DNA, 13 bp, Artificial Sequence
  Oligonucleotide for detection of SNP TSC0027147
ttggggcgtatag

SEQ ID NO: 108530 - DNA, 13 bp, Artificial Sequence
  Oligonucleotide for detection of SNP TSC0027147
ctatacgccccaa

SEQ ID NO: 108531 - DNA, 13 bp, Artificial Sequence
  Oligonucleotide for detection of SNP TSC0027147
ttgtgtgttttag

SEQ ID NO: 108532 - DNA, 13 bp, Artificial Sequence
  Oligonucleotide for detection of SNP TSC0027147
ctaaaacacacaa

SEQ ID NO: 108533 - DNA, 13 bp, Artificial Sequence
  Oligonucleotide for detection of SNP TSC0027147
ttgtgttttttag

SEQ ID NO: 108534 - DNA, 13 bp, Artificial Sequence
  Oligonucleotide for detection of SNP TSC0027147
ctaaaaaacacaa

SEQ ID NO: 108535 - DNA, 13 bp, Artificial Sequence
  Oligonucleotide for detection of SNP TSC0027147
ttgtgcgttttag

SEQ ID NO: 108536 - DNA, 13 bp, Artificial Sequence
  Oligonucleotide for detection of SNP TSC0027147
ctaaaacgcacaa

SEQ ID NO: 108537 - DNA, 13 bp, Artificial Sequence
  Oligonucleotide for detection of SNP TSC0027151
gatttttgtgaag

SEQ ID NO: 108538 - DNA, 13 bp, Artificial Sequence
  Oligonucleotide for detection of SNP TSC0027151
cttcacaaaaatc

SEQ ID NO: 108539 - DNA, 13 bp, Artificial Sequence
  Oligonucleotide for detection of SNP TSC0027151
gattttcgtgaag

SEQ ID NO: 108540 - DNA, 13 bp, Artificial Sequence
  Oligonucleotide for detection of SNP TSC0027151
cttcacgaaaatc

SEQ ID NO: 108541 - DNA, 13 bp, Artificial Sequence
  Oligonucleotide for detection of SNP TSC0027151
ttttatgagagty

SEQ ID NO: 108542 - DNA, 13 bp, Artificial Sequence
  Oligonucleotide for detection of SNP TSC0027151
ractctcataaaa

SEQ ID NO: 108543 - DNA, 13 bp, Artificial Sequence
  Oligonucleotide for detection of SNP TSC0027151
ttttataagagty

SEQ ID NO: 108544 - DNA, 13 bp, Artificial Sequence
  Oligonucleotide for detection of SNP TSC0027151
ractcttataaaa

SEQ ID NO: 108545 - DNA, 13 bp, Artificial Sequence
  Oligonucleotide for detection of SNP TSC0027151
ttttacgagagty

SEQ ID NO: 108546 - DNA, 13 bp, Artificial Sequence
  Oligonucleotide for detection of SNP TSC0027151
ractctcgtaaaa

SEQ ID NO: 108547 - DNA, 13 bp, Artificial Sequence
  Oligonucleotide for detection of SNP TSC0027152
aatgtaagtaaty

SEQ ID NO: 108548 - DNA, 13 bp, Artificial Sequence
  Oligonucleotide for detection of SNP TSC0027152
rattacttacatt

SEQ ID NO: 108549 - DNA, 13 bp, Artificial Sequence
  Oligonucleotide for detection of SNP TSC0027152
aatgtatgtaaty

SEQ ID NO: 108550 - DNA, 13 bp, Artificial Sequence
  Oligonucleotide for detection of SNP TSC0027152
rattacatacatt

SEQ ID NO: 108551 - DNA, 13 bp, Artificial Sequence
  Oligonucleotide for detection of SNP TSC0027152
aatgtacgtaaty

SEQ ID NO: 108552 - DNA, 13 bp, Artificial Sequence
  Oligonucleotide for detection of SNP TSC0027152
rattacgtacatt

SEQ ID NO: 108553 - DNA, 13 bp, Artificial Sequence
  Oligonucleotide for detection of SNP TSC0027152
ggttgtttatatt

SEQ ID NO: 108554 - DNA, 13 bp, Artificial Sequence
  Oligonucleotide for detection of SNP TSC0027152
aatataaacaacc

SEQ ID NO: 108555 - DNA, 13 bp, Artificial Sequence
  Oligonucleotide for detection of SNP TSC0027152
ggttgtgtatatt

SEQ ID NO: 108556 - DNA, 13 bp, Artificial Sequence
  Oligonucleotide for detection of SNP TSC0027152
aatatacacaacc

SEQ ID NO: 108557 - DNA, 13 bp, Artificial Sequence
  Oligonucleotide for detection of SNP TSC0027152
ggttgcgtatatt

SEQ ID NO: 108558 - DNA, 13 bp, Artificial Sequence
  Oligonucleotide for detection of SNP TSC0027152
aatatacgcaacc

SEQ ID NO: 108559 - DNA, 13 bp, Artificial Sequence
  Oligonucleotide for detection of SNP TSC0027154
tattgagtgaata

SEQ ID NO: 108560 - DNA, 13 bp, Artificial Sequence
  Oligonucleotide for detection of SNP TSC0027154
tattcactcaata

SEQ ID NO: 108561 - DNA, 13 bp, Artificial Sequence
  Oligonucleotide for detection of SNP TSC0027154
tattgaatgaata

SEQ ID NO: 108562 - DNA, 13 bp, Artificial Sequence
  Oligonucleotide for detection of SNP TSC0027154
tattcattcaata

SEQ ID NO: 108563 - DNA, 13 bp, Artificial Sequence
  Oligonucleotide for detection of SNP TSC0027155
attatttgaaata

SEQ ID NO: 108564 - DNA, 13 bp, Artificial Sequence
  Oligonucleotide for detection of SNP TSC0027155
tatttcaaataat

SEQ ID NO: 108565 - DNA, 13 bp, Artificial Sequence
  Oligonucleotide for detection of SNP TSC0027155
attattcgaaata

SEQ ID NO: 108566 - DNA, 13 bp, Artificial Sequence
  Oligonucleotide for detection of SNP TSC0027155
tatttcgaataat

SEQ ID NO: 108567 - DNA, 13 bp, Artificial Sequence
  Oligonucleotide for detection of SNP TSC0027155
tgttttgggtaat

SEQ ID NO: 108568 - DNA, 13 bp, Artificial Sequence
  Oligonucleotide for detection of SNP TSC0027155
attacccaaaaca

SEQ ID NO: 108569 - DNA, 13 bp, Artificial Sequence
  Oligonucleotide for detection of SNP TSC0027155
tgttttaggtaat

SEQ ID NO: 108570 - DNA, 13 bp, Artificial Sequence
  Oligonucleotide for detection of SNP TSC0027155
attacctaaaaca

SEQ ID NO: 108571 - DNA, 13 bp, Artificial Sequence
  Oligonucleotide for detection of SNP TSC0027155
tgtttcgggtaat

SEQ ID NO: 108572 - DNA, 13 bp, Artificial Sequence
  Oligonucleotide for detection of SNP TSC0027155
attacccgaaaca

SEQ ID NO: 108573 - DNA, 13 bp, Artificial Sequence
  Oligonucleotide for detection of SNP TSC0027157
aatatttgttttt

SEQ ID NO: 108574 - DNA, 13 bp, Artificial Sequence
  Oligonucleotide for detection of SNP TSC0027157
aaaaacaaatatt

SEQ ID NO: 108575 - DNA, 13 bp, Artificial Sequence
  Oligonucleotide for detection of SNP TSC0027157
aatattcgttttt

SEQ ID NO: 108576 - DNA, 13 bp, Artificial Sequence
  Oligonucleotide for detection of SNP TSC0027157
aaaaacgaatatt

SEQ ID NO: 108577 - DNA, 13 bp, Artificial Sequence
  Oligonucleotide for detection of SNP TSC0027157
aagggtgggtatt

SEQ ID NO: 108578 - DNA, 13 bp, Artificial Sequence
  Oligonucleotide for detection of SNP TSC0027157
aatacccaccctt

SEQ ID NO: 108579 - DNA, 13 bp, Artificial Sequence
  Oligonucleotide for detection of SNP TSC0027157
aagggtaggtatt

SEQ ID NO: 108580 - DNA, 13 bp, Artificial Sequence
  Oligonucleotide for detection of SNP TSC0027157
aatacctaccctt

SEQ ID NO: 108581 - DNA, 13 bp, Artificial Sequence
  Oligonucleotide for detection of SNP TSC0027157
aagggcgggtatt

SEQ ID NO: 108582 - DNA, 13 bp, Artificial Sequence
  Oligonucleotide for detection of SNP TSC0027157
aatacccgccctt

SEQ ID NO: 108583 - DNA, 13 bp, Artificial Sequence
  Oligonucleotide for detection of SNP TSC0027160
attattattgtgt

SEQ ID NO: 108584 - DNA, 13 bp, Artificial Sequence
  Oligonucleotide for detection of SNP TSC0027160
acacaataataat

SEQ ID NO: 108585 - DNA, 13 bp, Artificial Sequence
  Oligonucleotide for detection of SNP TSC0027160
attattgttgtgt

SEQ ID NO: 108586 - DNA, 13 bp, Artificial Sequence
  Oligonucleotide for detection of SNP TSC0027160
acacaacaataat

SEQ ID NO: 108587 - DNA, 13 bp, Artificial Sequence
  Oligonucleotide for detection of SNP TSC0027160
attatcgttgtgt

SEQ ID NO: 108588 - DNA, 13 bp, Artificial Sequence
  Oligonucleotide for detection of SNP TSC0027160
acacaacgataat

SEQ ID NO: 108589 - DNA, 13 bp, Artificial Sequence
  Oligonucleotide for detection of SNP TSC0027160
atatagtggtgat

SEQ ID NO: 108590 - DNA, 13 bp, Artificial Sequence
  Oligonucleotide for detection of SNP TSC0027160
atcaccactatat

SEQ ID NO: 108591 - DNA, 13 bp, Artificial Sequence
  Oligonucleotide for detection of SNP TSC0027160
atatagcggtgat

SEQ ID NO: 108592 - DNA, 13 bp, Artificial Sequence
  Oligonucleotide for detection of SNP TSC0027160
atcaccgctatat

SEQ ID NO: 108593 - DNA, 13 bp, Artificial Sequence
  Oligonucleotide for detection of SNP TSC0027162
tttagaattggag

SEQ ID NO: 108594 - DNA, 13 bp, Artificial Sequence
  Oligonucleotide for detection of SNP TSC0027162
ctccaattctaaa

SEQ ID NO: 108595 - DNA, 13 bp, Artificial Sequence
  Oligonucleotide for detection of SNP TSC0027162
tttagatttggag

SEQ ID NO: 108596 - DNA, 13 bp, Artificial Sequence
  Oligonucleotide for detection of SNP TSC0027162
ctccaaatctaaa

SEQ ID NO: 108597 - DNA, 13 bp, Artificial Sequence
  Oligonucleotide for detection of SNP TSC0027162
ttttagttttaaa

SEQ ID NO: 108598 - DNA, 13 bp, Artificial Sequence
  Oligonucleotide for detection of SNP TSC0027162
tttaaaactaaaa

SEQ ID NO: 108599 - DNA, 13 bp, Artificial Sequence
  Oligonucleotide for detection of SNP TSC0027163
gatttataatgga

SEQ ID NO: 108600 - DNA, 13 bp, Artificial Sequence
  Oligonucleotide for detection of SNP TSC0027163
tccattataaatc

SEQ ID NO: 108601 - DNA, 13 bp, Artificial Sequence
  Oligonucleotide for detection of SNP TSC0027163
gatttagaatgga

SEQ ID NO: 108602 - DNA, 13 bp, Artificial Sequence
  Oligonucleotide for detection of SNP TSC0027163
tccattctaaatc

SEQ ID NO: 108603 - DNA, 13 bp, Artificial Sequence
  Oligonucleotide for detection of SNP TSC0027163
tttattttaggty

SEQ ID NO: 108604 - DNA, 13 bp, Artificial Sequence
  Oligonucleotide for detection of SNP TSC0027163
racctaaaataaa

SEQ ID NO: 108605 - DNA, 13 bp, Artificial Sequence
  Oligonucleotide for detection of SNP TSC0027164
tttagagttaatg

SEQ ID NO: 108606 - DNA, 13 bp, Artificial Sequence
  Oligonucleotide for detection of SNP TSC0027164
cattaactctaaa

SEQ ID NO: 108607 - DNA, 13 bp, Artificial Sequence
  Oligonucleotide for detection of SNP TSC0027164
tttagaattaatg

SEQ ID NO: 108608 - DNA, 13 bp, Artificial Sequence
  Oligonucleotide for detection of SNP TSC0027164
cattaattctaaa

SEQ ID NO: 108609 - DNA, 13 bp, Artificial Sequence
  Oligonucleotide for detection of SNP TSC0027166
ttgtagagttaga

SEQ ID NO: 108610 - DNA, 13 bp, Artificial Sequence
  Oligonucleotide for detection of SNP TSC0027166
tctaactctacaa

SEQ ID NO: 108611 - DNA, 13 bp, Artificial Sequence
  Oligonucleotide for detection of SNP TSC0027166
ttgtagggttaga

SEQ ID NO: 108612 - DNA, 13 bp, Artificial Sequence
  Oligonucleotide for detection of SNP TSC0027166
tctaaccctacaa

SEQ ID NO: 108613 - DNA, 13 bp, Artificial Sequence
  Oligonucleotide for detection of SNP TSC0027166
tcgtagagttaga

SEQ ID NO: 108614 - DNA, 13 bp, Artificial Sequence
  Oligonucleotide for detection of SNP TSC0027166
tctaactctacga

SEQ ID NO: 108615 - DNA, 13 bp, Artificial Sequence
  Oligonucleotide for detection of SNP TSC0027166
tcgtagggttaga

SEQ ID NO: 108616 - DNA, 13 bp, Artificial Sequence
  Oligonucleotide for detection of SNP TSC0027166
tctaaccctacga

SEQ ID NO: 108617 - DNA, 13 bp, Artificial Sequence
  Oligonucleotide for detection of SNP TSC0027170
ataataagtatgt

SEQ ID NO: 108618 - DNA, 13 bp, Artificial Sequence
  Oligonucleotide for detection of SNP TSC0027170
acatacttattat

SEQ ID NO: 108619 - DNA, 13 bp, Artificial Sequence
  Oligonucleotide for detection of SNP TSC0027170
ataataggtatgt

SEQ ID NO: 108620 - DNA, 13 bp, Artificial Sequence
  Oligonucleotide for detection of SNP TSC0027170
acatacctattat

SEQ ID NO: 108621 - DNA, 13 bp, Artificial Sequence
  Oligonucleotide for detection of SNP TSC0027171
aatttagaggatg

SEQ ID NO: 108622 - DNA, 13 bp, Artificial Sequence
  Oligonucleotide for detection of SNP TSC0027171
catcctctaaatt

SEQ ID NO: 108623 - DNA, 13 bp, Artificial Sequence
  Oligonucleotide for detection of SNP TSC0027171
aatttaaaggatg

SEQ ID NO: 108624 - DNA, 13 bp, Artificial Sequence
  Oligonucleotide for detection of SNP TSC0027171
catcctttaaatt

SEQ ID NO: 108625 - DNA, 13 bp, Artificial Sequence
  Oligonucleotide for detection of SNP TSC0027172
atgtaaagtttgy

SEQ ID NO: 108626 - DNA, 13 bp, Artificial Sequence
  Oligonucleotide for detection of SNP TSC0027172
rcaaactttacat

SEQ ID NO: 108627 - DNA, 13 bp, Artificial Sequence
  Oligonucleotide for detection of SNP TSC0027172
atgtaaggtttgy

SEQ ID NO: 108628 - DNA, 13 bp, Artificial Sequence
  Oligonucleotide for detection of SNP TSC0027172
rcaaaccttacat

SEQ ID NO: 108629 - DNA, 13 bp, Artificial Sequence
  Oligonucleotide for detection of SNP TSC0027175
gggaattttatty

SEQ ID NO: 108630 - DNA, 13 bp, Artificial Sequence
  Oligonucleotide for detection of SNP TSC0027175
raataaaattccc

SEQ ID NO: 108631 - DNA, 13 bp, Artificial Sequence
  Oligonucleotide for detection of SNP TSC0027175
gggaatgttatty

SEQ ID NO: 108632 - DNA, 13 bp, Artificial Sequence
  Oligonucleotide for detection of SNP TSC0027175
raataacattccc

SEQ ID NO: 108633 - DNA, 13 bp, Artificial Sequence
  Oligonucleotide for detection of SNP TSC0027175
ggatgagatttty

SEQ ID NO: 108634 - DNA, 13 bp, Artificial Sequence
  Oligonucleotide for detection of SNP TSC0027175
raaaatctcatcc

SEQ ID NO: 108635 - DNA, 13 bp, Artificial Sequence
  Oligonucleotide for detection of SNP TSC0027175
ggatgatatttty

SEQ ID NO: 108636 - DNA, 13 bp, Artificial Sequence
  Oligonucleotide for detection of SNP TSC0027175
raaaatatcatcc

SEQ ID NO: 108637 - DNA, 13 bp, Artificial Sequence
  Oligonucleotide for detection of SNP TSC0027178
ggtgggatgatgg

SEQ ID NO: 108638 - DNA, 13 bp, Artificial Sequence
  Oligonucleotide for detection of SNP TSC0027178
ccatcatcccacc

SEQ ID NO: 108639 - DNA, 13 bp, Artificial Sequence
  Oligonucleotide for detection of SNP TSC0027178
ggtggggtgatgg

SEQ ID NO: 108640 - DNA, 13 bp, Artificial Sequence
  Oligonucleotide for detection of SNP TSC0027178
ccatcaccccacc

SEQ ID NO: 108641 - DNA, 13 bp, Artificial Sequence
  Oligonucleotide for detection of SNP TSC0027178
ggcgggatgatgg

SEQ ID NO: 108642 - DNA, 13 bp, Artificial Sequence
  Oligonucleotide for detection of SNP TSC0027178
ccatcatcccgcc

SEQ ID NO: 108643 - DNA, 13 bp, Artificial Sequence
  Oligonucleotide for detection of SNP TSC0027178
ggcggggtgatgg

SEQ ID NO: 108644 - DNA, 13 bp, Artificial Sequence
  Oligonucleotide for detection of SNP TSC0027178
ccatcaccccgcc

SEQ ID NO: 108645 - DNA, 13 bp, Artificial Sequence
  Oligonucleotide for detection of SNP TSC0027182
aatattgttgtat

SEQ ID NO: 108646 - DNA, 13 bp, Artificial Sequence
  Oligonucleotide for detection of SNP TSC0027182
atacaacaatatt

SEQ ID NO: 108647 - DNA, 13 bp, Artificial Sequence
  Oligonucleotide for detection of SNP TSC0027182
aatatttttgtat

SEQ ID NO: 108648 - DNA, 13 bp, Artificial Sequence
  Oligonucleotide for detection of SNP TSC0027182
atacaaaaatatt

SEQ ID NO: 108649 - DNA, 13 bp, Artificial Sequence
  Oligonucleotide for detection of SNP TSC0027182
aatatcgttgtat

SEQ ID NO: 108650 - DNA, 13 bp, Artificial Sequence
  Oligonucleotide for detection of SNP TSC0027182
atacaacgatatt

SEQ ID NO: 108651 - DNA, 13 bp, Artificial Sequence
  Oligonucleotide for detection of SNP TSC0027182
atataatgatatt

SEQ ID NO: 108652 - DNA, 13 bp, Artificial Sequence
  Oligonucleotide for detection of SNP TSC0027182
aatatcattatat

SEQ ID NO: 108653 - DNA, 13 bp, Artificial Sequence
  Oligonucleotide for detection of SNP TSC0027182
atataaagatatt

SEQ ID NO: 108654 - DNA, 13 bp, Artificial Sequence
  Oligonucleotide for detection of SNP TSC0027182
aatatctttatat

SEQ ID NO: 108655 - DNA, 13 bp, Artificial Sequence
  Oligonucleotide for detection of SNP TSC0027182
atataacgatatt

SEQ ID NO: 108656 - DNA, 13 bp, Artificial Sequence
  Oligonucleotide for detection of SNP TSC0027182
aatatcgttatat

SEQ ID NO: 108657 - DNA, 13 bp, Artificial Sequence
  Oligonucleotide for detection of SNP TSC0027183
gtattagtttttt

SEQ ID NO: 108658 - DNA, 13 bp, Artificial Sequence
  Oligonucleotide for detection of SNP TSC0027183
aaaaaactaatac

SEQ ID NO: 108659 - DNA, 13 bp, Artificial Sequence
  Oligonucleotide for detection of SNP TSC0027190
tattaagtaaata

SEQ ID NO: 108660 - DNA, 13 bp, Artificial Sequence
  Oligonucleotide for detection of SNP TSC0027190
tatttacttaata

SEQ ID NO: 108661 - DNA, 13 bp, Artificial Sequence
  Oligonucleotide for detection of SNP TSC0027190
tattaaataaata

SEQ ID NO: 108662 - DNA, 13 bp, Artificial Sequence
  Oligonucleotide for detection of SNP TSC0027190
tatttatttaata

SEQ ID NO: 108663 - DNA, 13 bp, Artificial Sequence
  Oligonucleotide for detection of SNP TSC0027191
tgttatatatttt

SEQ ID NO: 108664 - DNA, 13 bp, Artificial Sequence
  Oligonucleotide for detection of SNP TSC0027191
aaaatatataaca

SEQ ID NO: 108665 - DNA, 13 bp, Artificial Sequence
  Oligonucleotide for detection of SNP TSC0027191
tgttatgtatttt

SEQ ID NO: 108666 - DNA, 13 bp, Artificial Sequence
  Oligonucleotide for detection of SNP TSC0027191
aaaatacataaca

SEQ ID NO: 108667 - DNA, 13 bp, Artificial Sequence
  Oligonucleotide for detection of SNP TSC0027191
tgttacgtatttt

SEQ ID NO: 108668 - DNA, 13 bp, Artificial Sequence
  Oligonucleotide for detection of SNP TSC0027191
aaaatacgtaaca

SEQ ID NO: 108669 - DNA, 13 bp, Artificial Sequence
  Oligonucleotide for detection of SNP TSC0027191
agggtgtgtggta

SEQ ID NO: 108670 - DNA, 13 bp, Artificial Sequence
  Oligonucleotide for detection of SNP TSC0027191
taccacacaccct

SEQ ID NO: 108671 - DNA, 13 bp, Artificial Sequence
  Oligonucleotide for detection of SNP TSC0027191
agggtgcgtggta

SEQ ID NO: 108672 - DNA, 13 bp, Artificial Sequence
  Oligonucleotide for detection of SNP TSC0027191
taccacgcaccct

SEQ ID NO: 108673 - DNA, 13 bp, Artificial Sequence
  Oligonucleotide for detection of SNP TSC0027193
gtaattattgtag

SEQ ID NO: 108674 - DNA, 13 bp, Artificial Sequence
  Oligonucleotide for detection of SNP TSC0027193
ctacaataattac

SEQ ID NO: 108675 - DNA, 13 bp, Artificial Sequence
  Oligonucleotide for detection of SNP TSC0027193
gtaattgttgtag

SEQ ID NO: 108676 - DNA, 13 bp, Artificial Sequence
  Oligonucleotide for detection of SNP TSC0027193
ctacaacaattac

SEQ ID NO: 108677 - DNA, 13 bp, Artificial Sequence
  Oligonucleotide for detection of SNP TSC0027194
attaaaatgaaag

SEQ ID NO: 108678 - DNA, 13 bp, Artificial Sequence
  Oligonucleotide for detection of SNP TSC0027194
ctttcattttaat

SEQ ID NO: 108679 - DNA, 13 bp, Artificial Sequence
  Oligonucleotide for detection of SNP TSC0027194
attaaagtgaaag

SEQ ID NO: 108680 - DNA, 13 bp, Artificial Sequence
  Oligonucleotide for detection of SNP TSC0027194
ctttcactttaat

SEQ ID NO: 108681 - DNA, 13 bp, Artificial Sequence
  Oligonucleotide for detection of SNP TSC0027201
tatatagtataaa

SEQ ID NO: 108682 - DNA, 13 bp, Artificial Sequence
  Oligonucleotide for detection of SNP TSC0027201
tttatactatata

SEQ ID NO: 108683 - DNA, 13 bp, Artificial Sequence
  Oligonucleotide for detection of SNP TSC0027201
tatataatataaa

SEQ ID NO: 108684 - DNA, 13 bp, Artificial Sequence
  Oligonucleotide for detection of SNP TSC0027201
tttatattatata

SEQ ID NO: 108685 - DNA, 13 bp, Artificial Sequence
  Oligonucleotide for detection of SNP TSC0027202
tagtgaattagtg

SEQ ID NO: 108686 - DNA, 13 bp, Artificial Sequence
  Oligonucleotide for detection of SNP TSC0027202
cactaattcacta

SEQ ID NO: 108687 - DNA, 13 bp, Artificial Sequence
  Oligonucleotide for detection of SNP TSC0027202
tagtgatttagtg

SEQ ID NO: 108688 - DNA, 13 bp, Artificial Sequence
  Oligonucleotide for detection of SNP TSC0027202
cactaaatcacta

SEQ ID NO: 108689 - DNA, 13 bp, Artificial Sequence
  Oligonucleotide for detection of SNP TSC0027202
tattagtttattg

SEQ ID NO: 108690 - DNA, 13 bp, Artificial Sequence
  Oligonucleotide for detection of SNP TSC0027202
caataaactaata

SEQ ID NO: 108691 - DNA, 13 bp, Artificial Sequence
  Oligonucleotide for detection of SNP TSC0027202
tattaggttattg

SEQ ID NO: 108692 - DNA, 13 bp, Artificial Sequence
  Oligonucleotide for detection of SNP TSC0027202
caataacctaata

SEQ ID NO: 108693 - DNA, 13 bp, Artificial Sequence
  Oligonucleotide for detection of SNP TSC0027203
tgttattggttaa

SEQ ID NO: 108694 - DNA, 13 bp, Artificial Sequence
  Oligonucleotide for detection of SNP TSC0027203
ttaaccaataaca

SEQ ID NO: 108695 - DNA, 13 bp, Artificial Sequence
  Oligonucleotide for detection of SNP TSC0027203
cgttattggttaa

SEQ ID NO: 108696 - DNA, 13 bp, Artificial Sequence
  Oligonucleotide for detection of SNP TSC0027203
ttaaccaataacg

SEQ ID NO: 108697 - DNA, 13 bp, Artificial Sequence
  Oligonucleotide for detection of SNP TSC0027203
tgttatcggttaa

SEQ ID NO: 108698 - DNA, 13 bp, Artificial Sequence
  Oligonucleotide for detection of SNP TSC0027203
ttaaccgataaca

SEQ ID NO: 108699 - DNA, 13 bp, Artificial Sequence
  Oligonucleotide for detection of SNP TSC0027203
cgttatcggttaa

SEQ ID NO: 108700 - DNA, 13 bp, Artificial Sequence
  Oligonucleotide for detection of SNP TSC0027203
ttaaccgataacg

SEQ ID NO: 108701 - DNA, 13 bp, Artificial Sequence
  Oligonucleotide for detection of SNP TSC0027203
ttaattggtgatg

SEQ ID NO: 108702 - DNA, 13 bp, Artificial Sequence
  Oligonucleotide for detection of SNP TSC0027203
catcaccaattaa

SEQ ID NO: 108703 - DNA, 13 bp, Artificial Sequence
  Oligonucleotide for detection of SNP TSC0027203
ttaattagtgatg

SEQ ID NO: 108704 - DNA, 13 bp, Artificial Sequence
  Oligonucleotide for detection of SNP TSC0027203
catcactaattaa

SEQ ID NO: 108705 - DNA, 13 bp, Artificial Sequence
  Oligonucleotide for detection of SNP TSC0027203
ttaatcggtgatg

SEQ ID NO: 108706 - DNA, 13 bp, Artificial Sequence
  Oligonucleotide for detection of SNP TSC0027203
catcaccgattaa

SEQ ID NO: 108707 - DNA, 13 bp, Artificial Sequence
  Oligonucleotide for detection of SNP TSC0027203
ttaattagtgacg

SEQ ID NO: 108708 - DNA, 13 bp, Artificial Sequence
  Oligonucleotide for detection of SNP TSC0027203
cgtcactaattaa

SEQ ID NO: 108709 - DNA, 13 bp, Artificial Sequence
  Oligonucleotide for detection of SNP TSC0027203
ttaattggtgacg

SEQ ID NO: 108710 - DNA, 13 bp, Artificial Sequence
  Oligonucleotide for detection of SNP TSC0027203
cgtcaccaattaa

SEQ ID NO: 108711 - DNA, 13 bp, Artificial Sequence
  Oligonucleotide for detection of SNP TSC0027203
ttaatcggtgacg

SEQ ID NO: 108712 - DNA, 13 bp, Artificial Sequence
  Oligonucleotide for detection of SNP TSC0027203
cgtcaccgattaa

SEQ ID NO: 108713 - DNA, 13 bp, Artificial Sequence
  Oligonucleotide for detection of SNP TSC0027204
gttttaaaaggty

SEQ ID NO: 108714 - DNA, 13 bp, Artificial Sequence
  Oligonucleotide for detection of SNP TSC0027204
raccttttaaaac

SEQ ID NO: 108715 - DNA, 13 bp, Artificial Sequence
  Oligonucleotide for detection of SNP TSC0027204
gttttagaaggty

SEQ ID NO: 108716 - DNA, 13 bp, Artificial Sequence
  Oligonucleotide for detection of SNP TSC0027204
raccttctaaaac

SEQ ID NO: 108717 - DNA, 13 bp, Artificial Sequence
  Oligonucleotide for detection of SNP TSC0027205
ttttaaataggat

SEQ ID NO: 108718 - DNA, 13 bp, Artificial Sequence
  Oligonucleotide for detection of SNP TSC0027205
atcctatttaaaa

SEQ ID NO: 108719 - DNA, 13 bp, Artificial Sequence
  Oligonucleotide for detection of SNP TSC0027205
ttttaagtaggat

SEQ ID NO: 108720 - DNA, 13 bp, Artificial Sequence
  Oligonucleotide for detection of SNP TSC0027205
atcctacttaaaa

SEQ ID NO: 108721 - DNA, 13 bp, Artificial Sequence
  Oligonucleotide for detection of SNP TSC0027206
tttaggttgaaag

SEQ ID NO: 108722 - DNA, 13 bp, Artificial Sequence
  Oligonucleotide for detection of SNP TSC0027206
ctttcaacctaaa

SEQ ID NO: 108723 - DNA, 13 bp, Artificial Sequence
  Oligonucleotide for detection of SNP TSC0027206
tttagggtgaaag

SEQ ID NO: 108724 - DNA, 13 bp, Artificial Sequence
  Oligonucleotide for detection of SNP TSC0027206
ctttcaccctaaa

SEQ ID NO: 108725 - DNA, 13 bp, Artificial Sequence
  Oligonucleotide for detection of SNP TSC0027206
tttttagtttgaa

SEQ ID NO: 108726 - DNA, 13 bp, Artificial Sequence
  Oligonucleotide for detection of SNP TSC0027206
ttcaaactaaaaa

SEQ ID NO: 108727 - DNA, 13 bp, Artificial Sequence
  Oligonucleotide for detection of SNP TSC0027206
tttttattttgaa

SEQ ID NO: 108728 - DNA, 13 bp, Artificial Sequence
  Oligonucleotide for detection of SNP TSC0027206
ttcaaaataaaaa

SEQ ID NO: 108729 - DNA, 13 bp, Artificial Sequence
  Oligonucleotide for detection of SNP TSC0027214
agggttatagtty

SEQ ID NO: 108730 - DNA, 13 bp, Artificial Sequence
  Oligonucleotide for detection of SNP TSC0027214
raactataaccct

SEQ ID NO: 108731 - DNA, 13 bp, Artificial Sequence
  Oligonucleotide for detection of SNP TSC0027214
agggttgtagtty

SEQ ID NO: 108732 - DNA, 13 bp, Artificial Sequence
  Oligonucleotide for detection of SNP TSC0027214
raactacaaccct

SEQ ID NO: 108733 - DNA, 13 bp, Artificial Sequence
  Oligonucleotide for detection of SNP TSC0027214
agggtcgtagtty

SEQ ID NO: 108734 - DNA, 13 bp, Artificial Sequence
  Oligonucleotide for detection of SNP TSC0027214
raactacgaccct

SEQ ID NO: 108735 - DNA, 13 bp, Artificial Sequence
  Oligonucleotide for detection of SNP TSC0027214
gggttgtggtttt

SEQ ID NO: 108736 - DNA, 13 bp, Artificial Sequence
  Oligonucleotide for detection of SNP TSC0027214
aaaaccacaaccc

SEQ ID NO: 108737 - DNA, 13 bp, Artificial Sequence
  Oligonucleotide for detection of SNP TSC0027214
gggttgcggtttt

SEQ ID NO: 108738 - DNA, 13 bp, Artificial Sequence
  Oligonucleotide for detection of SNP TSC0027214
aaaaccgcaaccc

SEQ ID NO: 108739 - DNA, 13 bp, Artificial Sequence
  Oligonucleotide for detection of SNP TSC0027215
gatatttgttttg

SEQ ID NO: 108740 - DNA, 13 bp, Artificial Sequence
  Oligonucleotide for detection of SNP TSC0027215
caaaacaaatatc

SEQ ID NO: 108741 - DNA, 13 bp, Artificial Sequence
  Oligonucleotide for detection of SNP TSC0027215
gatattcgttttg

SEQ ID NO: 108742 - DNA, 13 bp, Artificial Sequence
  Oligonucleotide for detection of SNP TSC0027215
caaaacgaatatc

SEQ ID NO: 108743 - DNA, 13 bp, Artificial Sequence
  Oligonucleotide for detection of SNP TSC0027215
tagaatggatgty

SEQ ID NO: 108744 - DNA, 13 bp, Artificial Sequence
  Oligonucleotide for detection of SNP TSC0027215
racatccattcta

SEQ ID NO: 108745 - DNA, 13 bp, Artificial Sequence
  Oligonucleotide for detection of SNP TSC0027215
tagaatagatgty

SEQ ID NO: 108746 - DNA, 13 bp, Artificial Sequence
  Oligonucleotide for detection of SNP TSC0027215
racatctattcta

SEQ ID NO: 108747 - DNA, 13 bp, Artificial Sequence
  Oligonucleotide for detection of SNP TSC0027215
tagaacggatgty

SEQ ID NO: 108748 - DNA, 13 bp, Artificial Sequence
  Oligonucleotide for detection of SNP TSC0027215
racatccgttcta

SEQ ID NO: 108749 - DNA, 13 bp, Artificial Sequence
  Oligonucleotide for detection of SNP TSC0027217
taaattatttttg

SEQ ID NO: 108750 - DNA, 13 bp, Artificial Sequence
  Oligonucleotide for detection of SNP TSC0027217
caaaaataattta

SEQ ID NO: 108751 - DNA, 13 bp, Artificial Sequence
  Oligonucleotide for detection of SNP TSC0027217
taaattttttttg

SEQ ID NO: 108752 - DNA, 13 bp, Artificial Sequence
  Oligonucleotide for detection of SNP TSC0027217
caaaaaaaattta

SEQ ID NO: 108753 - DNA, 13 bp, Artificial Sequence
  Oligonucleotide for detection of SNP TSC0027217
taggaataattta

SEQ ID NO: 108754 - DNA, 13 bp, Artificial Sequence
  Oligonucleotide for detection of SNP TSC0027217
taaattattccta

SEQ ID NO: 108755 - DNA, 13 bp, Artificial Sequence
  Oligonucleotide for detection of SNP TSC0027217
taggaagaattta

SEQ ID NO: 108756 - DNA, 13 bp, Artificial Sequence
  Oligonucleotide for detection of SNP TSC0027217
taaattcttccta

SEQ ID NO: 108757 - DNA, 13 bp, Artificial Sequence
  Oligonucleotide for detection of SNP TSC0027221
tttgttatgtttt

SEQ ID NO: 108758 - DNA, 13 bp, Artificial Sequence
  Oligonucleotide for detection of SNP TSC0027221
aaaacataacaaa

SEQ ID NO: 108759 - DNA, 13 bp, Artificial Sequence
  Oligonucleotide for detection of SNP TSC0027222
atgagatgggtga

SEQ ID NO: 108760 - DNA, 13 bp, Artificial Sequence
  Oligonucleotide for detection of SNP TSC0027222
tcacccatctcat

SEQ ID NO: 108761 - DNA, 13 bp, Artificial Sequence
  Oligonucleotide for detection of SNP TSC0027222
atgagacgggtga

SEQ ID NO: 108762 - DNA, 13 bp, Artificial Sequence
  Oligonucleotide for detection of SNP TSC0027222
tcacccgtctcat

SEQ ID NO: 108763 - DNA, 13 bp, Artificial Sequence
  Oligonucleotide for detection of SNP TSC0027222
ttatttgttttat

SEQ ID NO: 108764 - DNA, 13 bp, Artificial Sequence
  Oligonucleotide for detection of SNP TSC0027222
ataaaacaaataa

SEQ ID NO: 108765 - DNA, 13 bp, Artificial Sequence
  Oligonucleotide for detection of SNP TSC0027222
ttatttattttat

SEQ ID NO: 108766 - DNA, 13 bp, Artificial Sequence
  Oligonucleotide for detection of SNP TSC0027222
ataaaataaataa

SEQ ID NO: 108767 - DNA, 13 bp, Artificial Sequence
  Oligonucleotide for detection of SNP TSC0027222
ttattcgttttat

SEQ ID NO: 108768 - DNA, 13 bp, Artificial Sequence
  Oligonucleotide for detection of SNP TSC0027222
ataaaacgaataa

SEQ ID NO: 108769 - DNA, 13 bp, Artificial Sequence
  Oligonucleotide for detection of SNP TSC0027226
agagtagttttgt

SEQ ID NO: 108770 - DNA, 13 bp, Artificial Sequence
  Oligonucleotide for detection of SNP TSC0027226
acaaaactactct

SEQ ID NO: 108771 - DNA, 13 bp, Artificial Sequence
  Oligonucleotide for detection of SNP TSC0027226
agagtaattttgt

SEQ ID NO: 108772 - DNA, 13 bp, Artificial Sequence
  Oligonucleotide for detection of SNP TSC0027226
acaaaattactct

SEQ ID NO: 108773 - DNA, 13 bp, Artificial Sequence
  Oligonucleotide for detection of SNP TSC0027226
agagtagtttcgt

SEQ ID NO: 108774 - DNA, 13 bp, Artificial Sequence
  Oligonucleotide for detection of SNP TSC0027226
acgaaactactct

SEQ ID NO: 108775 - DNA, 13 bp, Artificial Sequence
  Oligonucleotide for detection of SNP TSC0027226
agagtaatttcgt

SEQ ID NO: 108776 - DNA, 13 bp, Artificial Sequence
  Oligonucleotide for detection of SNP TSC0027226
acgaaattactct

SEQ ID NO: 108777 - DNA, 13 bp, Artificial Sequence
  Oligonucleotide for detection of SNP TSC0027229
tttttttggaagy

SEQ ID NO: 108778 - DNA, 13 bp, Artificial Sequence
  Oligonucleotide for detection of SNP TSC0027229
rcttccaaaaaaa

SEQ ID NO: 108779 - DNA, 13 bp, Artificial Sequence
  Oligonucleotide for detection of SNP TSC0027229
ttttttgggaagy

SEQ ID NO: 108780 - DNA, 13 bp, Artificial Sequence
  Oligonucleotide for detection of SNP TSC0027229
rcttcccaaaaaa

SEQ ID NO: 108781 - DNA, 13 bp, Artificial Sequence
  Oligonucleotide for detection of SNP TSC0027229
ttttttcggaagy

SEQ ID NO: 108782 - DNA, 13 bp, Artificial Sequence
  Oligonucleotide for detection of SNP TSC0027229
rcttccgaaaaaa

SEQ ID NO: 108783 - DNA, 13 bp, Artificial Sequence
  Oligonucleotide for detection of SNP TSC0027229
tttttcgggaagy

SEQ ID NO: 108784 - DNA, 13 bp, Artificial Sequence
  Oligonucleotide for detection of SNP TSC0027229
rcttcccgaaaaa

SEQ ID NO: 108785 - DNA, 13 bp, Artificial Sequence
  Oligonucleotide for detection of SNP TSC0027229
gtttttgggagag

SEQ ID NO: 108786 - DNA, 13 bp, Artificial Sequence
  Oligonucleotide for detection of SNP TSC0027229
ctctcccaaaaac

SEQ ID NO: 108787 - DNA, 13 bp, Artificial Sequence
  Oligonucleotide for detection of SNP TSC0027229
gttttttggagag

SEQ ID NO: 108788 - DNA, 13 bp, Artificial Sequence
  Oligonucleotide for detection of SNP TSC0027229
ctctccaaaaaac

SEQ ID NO: 108789 - DNA, 13 bp, Artificial Sequence
  Oligonucleotide for detection of SNP TSC0027229
gttttcgggagag

SEQ ID NO: 108790 - DNA, 13 bp, Artificial Sequence
  Oligonucleotide for detection of SNP TSC0027229
ctctcccgaaaac

SEQ ID NO: 108791 - DNA, 13 bp, Artificial Sequence
  Oligonucleotide for detection of SNP TSC0027229
gtttttcggagag

SEQ ID NO: 108792 - DNA, 13 bp, Artificial Sequence
  Oligonucleotide for detection of SNP TSC0027229
ctctccgaaaaac

SEQ ID NO: 108793 - DNA, 13 bp, Artificial Sequence
  Oligonucleotide for detection of SNP TSC0027231
tggtttagtttaa

SEQ ID NO: 108794 - DNA, 13 bp, Artificial Sequence
  Oligonucleotide for detection of SNP TSC0027231
ttaaactaaacca

SEQ ID NO: 108795 - DNA, 13 bp, Artificial Sequence
  Oligonucleotide for detection of SNP TSC0027231
ttgagttgagtta

SEQ ID NO: 108796 - DNA, 13 bp, Artificial Sequence
  Oligonucleotide for detection of SNP TSC0027231
taactcaactcaa

SEQ ID NO: 108797 - DNA, 13 bp, Artificial Sequence
  Oligonucleotide for detection of SNP TSC0027231
ttgagtagagtta

SEQ ID NO: 108798 - DNA, 13 bp, Artificial Sequence
  Oligonucleotide for detection of SNP TSC0027231
taactctactcaa

SEQ ID NO: 108799 - DNA, 13 bp, Artificial Sequence
  Oligonucleotide for detection of SNP TSC0027232
aggttatgtttta

SEQ ID NO: 108800 - DNA, 13 bp, Artificial Sequence
  Oligonucleotide for detection of SNP TSC0027232
taaaacataacct

SEQ ID NO: 108801 - DNA, 13 bp, Artificial Sequence
  Oligonucleotide for detection of SNP TSC0027232
aggttacgtttta

SEQ ID NO: 108802 - DNA, 13 bp, Artificial Sequence
  Oligonucleotide for detection of SNP TSC0027232
taaaacgtaacct

SEQ ID NO: 108803 - DNA, 13 bp, Artificial Sequence
  Oligonucleotide for detection of SNP TSC0027232
tgagatgtgattt

SEQ ID NO: 108804 - DNA, 13 bp, Artificial Sequence
  Oligonucleotide for detection of SNP TSC0027232
aaatcacatctca

SEQ ID NO: 108805 - DNA, 13 bp, Artificial Sequence
  Oligonucleotide for detection of SNP TSC0027232
tgagatatgattt

SEQ ID NO: 108806 - DNA, 13 bp, Artificial Sequence
  Oligonucleotide for detection of SNP TSC0027232
aaatcatatctca

SEQ ID NO: 108807 - DNA, 13 bp, Artificial Sequence
  Oligonucleotide for detection of SNP TSC0027232
tgagacgtgattt

SEQ ID NO: 108808 - DNA, 13 bp, Artificial Sequence
  Oligonucleotide for detection of SNP TSC0027232
aaatcacgtctca

SEQ ID NO: 108809 - DNA, 13 bp, Artificial Sequence
  Oligonucleotide for detection of SNP TSC0027233
gttgatattgaay

SEQ ID NO: 108810 - DNA, 13 bp, Artificial Sequence
  Oligonucleotide for detection of SNP TSC0027233
rttcaatatcaac

SEQ ID NO: 108811 - DNA, 13 bp, Artificial Sequence
  Oligonucleotide for detection of SNP TSC0027233
gttgattttgaay

SEQ ID NO: 108812 - DNA, 13 bp, Artificial Sequence
  Oligonucleotide for detection of SNP TSC0027233
rttcaaaatcaac

SEQ ID NO: 108813 - DNA, 13 bp, Artificial Sequence
  Oligonucleotide for detection of SNP TSC0027233
gttgatatcgaay

SEQ ID NO: 108814 - DNA, 13 bp, Artificial Sequence
  Oligonucleotide for detection of SNP TSC0027233
rttcgatatcaac

SEQ ID NO: 108815 - DNA, 13 bp, Artificial Sequence
  Oligonucleotide for detection of SNP TSC0027233
gttgatttcgaay

SEQ ID NO: 108816 - DNA, 13 bp, Artificial Sequence
  Oligonucleotide for detection of SNP TSC0027233
rttcgaaatcaac

SEQ ID NO: 108817 - DNA, 13 bp, Artificial Sequence
  Oligonucleotide for detection of SNP TSC0027233
gtttgatattagy

SEQ ID NO: 108818 - DNA, 13 bp, Artificial Sequence
  Oligonucleotide for detection of SNP TSC0027233
rctaatatcaaac

SEQ ID NO: 108819 - DNA, 13 bp, Artificial Sequence
  Oligonucleotide for detection of SNP TSC0027233
gtttgagattagy

SEQ ID NO: 108820 - DNA, 13 bp, Artificial Sequence
  Oligonucleotide for detection of SNP TSC0027233
rctaatctcaaac

SEQ ID NO: 108821 - DNA, 13 bp, Artificial Sequence
  Oligonucleotide for detection of SNP TSC0027233
gttcgatattagy

SEQ ID NO: 108822 - DNA, 13 bp, Artificial Sequence
  Oligonucleotide for detection of SNP TSC0027233
rctaatatcgaac

SEQ ID NO: 108823 - DNA, 13 bp, Artificial Sequence
  Oligonucleotide for detection of SNP TSC0027233
gttcgagattagy

SEQ ID NO: 108824 - DNA, 13 bp, Artificial Sequence
  Oligonucleotide for detection of SNP TSC0027233
rctaatctcgaac

SEQ ID NO: 108825 - DNA, 13 bp, Artificial Sequence
  Oligonucleotide for detection of SNP TSC0027234
gtttaattaatty

SEQ ID NO: 108826 - DNA, 13 bp, Artificial Sequence
  Oligonucleotide for detection of SNP TSC0027234
raattaattaaac

SEQ ID NO: 108827 - DNA, 13 bp, Artificial Sequence
  Oligonucleotide for detection of SNP TSC0027234
gtttaagtaatty

SEQ ID NO: 108828 - DNA, 13 bp, Artificial Sequence
  Oligonucleotide for detection of SNP TSC0027234
raattacttaaac

SEQ ID NO: 108829 - DNA, 13 bp, Artificial Sequence
  Oligonucleotide for detection of SNP TSC0027234
ggattggttgagy

SEQ ID NO: 108830 - DNA, 13 bp, Artificial Sequence
  Oligonucleotide for detection of SNP TSC0027234
rctcaaccaatcc

SEQ ID NO: 108831 - DNA, 13 bp, Artificial Sequence
  Oligonucleotide for detection of SNP TSC0027234
ggattgtttgagy

SEQ ID NO: 108832 - DNA, 13 bp, Artificial Sequence
  Oligonucleotide for detection of SNP TSC0027234
rctcaaacaatcc

SEQ ID NO: 108833 - DNA, 13 bp, Artificial Sequence
  Oligonucleotide for detection of SNP TSC0027235
tgtttagaagtty

SEQ ID NO: 108834 - DNA, 13 bp, Artificial Sequence
  Oligonucleotide for detection of SNP TSC0027235
raacttctaaaca

SEQ ID NO: 108835 - DNA, 13 bp, Artificial Sequence
  Oligonucleotide for detection of SNP TSC0027235
tgtttataagtty

SEQ ID NO: 108836 - DNA, 13 bp, Artificial Sequence
  Oligonucleotide for detection of SNP TSC0027235
raacttataaaca

SEQ ID NO: 108837 - DNA, 13 bp, Artificial Sequence
  Oligonucleotide for detection of SNP TSC0027235
gggtttttaaata

SEQ ID NO: 108838 - DNA, 13 bp, Artificial Sequence
  Oligonucleotide for detection of SNP TSC0027235
tatttaaaaaccc

SEQ ID NO: 108839 - DNA, 13 bp, Artificial Sequence
  Oligonucleotide for detection of SNP TSC0027235
gggtttataaata

SEQ ID NO: 108840 - DNA, 13 bp, Artificial Sequence
  Oligonucleotide for detection of SNP TSC0027235
tatttataaaccc

SEQ ID NO: 108841 - DNA, 13 bp, Artificial Sequence
  Oligonucleotide for detection of SNP TSC0027236
ggtgttattttgy

SEQ ID NO: 108842 - DNA, 13 bp, Artificial Sequence
  Oligonucleotide for detection of SNP TSC0027236
rcaaaataacacc

SEQ ID NO: 108843 - DNA, 13 bp, Artificial Sequence
  Oligonucleotide for detection of SNP TSC0027236
ggtgttgttttgy

SEQ ID NO: 108844 - DNA, 13 bp, Artificial Sequence
  Oligonucleotide for detection of SNP TSC0027236
rcaaaacaacacc

SEQ ID NO: 108845 - DNA, 13 bp, Artificial Sequence
  Oligonucleotide for detection of SNP TSC0027236
ggcgttattttgy

SEQ ID NO: 108846 - DNA, 13 bp, Artificial Sequence
  Oligonucleotide for detection of SNP TSC0027236
rcaaaataacgcc

SEQ ID NO: 108847 - DNA, 13 bp, Artificial Sequence
  Oligonucleotide for detection of SNP TSC0027236
ggcgttgttttgy

SEQ ID NO: 108848 - DNA, 13 bp, Artificial Sequence
  Oligonucleotide for detection of SNP TSC0027236
rcaaaacaacgcc

SEQ ID NO: 108849 - DNA, 13 bp, Artificial Sequence
  Oligonucleotide for detection of SNP TSC0027237
ttgatgatggggg

SEQ ID NO: 108850 - DNA, 13 bp, Artificial Sequence
  Oligonucleotide for detection of SNP TSC0027237
cccccatcatcaa

SEQ ID NO: 108851 - DNA, 13 bp, Artificial Sequence
  Oligonucleotide for detection of SNP TSC0027237
ttgatggtggggg

SEQ ID NO: 108852 - DNA, 13 bp, Artificial Sequence
  Oligonucleotide for detection of SNP TSC0027237
cccccaccatcaa

SEQ ID NO: 108853 - DNA, 13 bp, Artificial Sequence
  Oligonucleotide for detection of SNP TSC0027239
tggtatagtatag

SEQ ID NO: 108854 - DNA, 13 bp, Artificial Sequence
  Oligonucleotide for detection of SNP TSC0027239
ctatactatacca

SEQ ID NO: 108855 - DNA, 13 bp, Artificial Sequence
  Oligonucleotide for detection of SNP TSC0027239
tggtatggtatag

SEQ ID NO: 108856 - DNA, 13 bp, Artificial Sequence
  Oligonucleotide for detection of SNP TSC0027239
ctataccatacca

SEQ ID NO: 108857 - DNA, 13 bp, Artificial Sequence
  Oligonucleotide for detection of SNP TSC0027240
gatagaaaaaaag

SEQ ID NO: 108858 - DNA, 13 bp, Artificial Sequence
  Oligonucleotide for detection of SNP TSC0027240
ctttttttctatc

SEQ ID NO: 108859 - DNA, 13 bp, Artificial Sequence
  Oligonucleotide for detection of SNP TSC0027240
gatagagaaaaag

SEQ ID NO: 108860 - DNA, 13 bp, Artificial Sequence
  Oligonucleotide for detection of SNP TSC0027240
ctttttctctatc

SEQ ID NO: 108861 - DNA, 13 bp, Artificial Sequence
  Oligonucleotide for detection of SNP TSC0027241
gtttgggaatatg

SEQ ID NO: 108862 - DNA, 13 bp, Artificial Sequence
  Oligonucleotide for detection of SNP TSC0027241
catattcccaaac

SEQ ID NO: 108863 - DNA, 13 bp, Artificial Sequence
  Oligonucleotide for detection of SNP TSC0027241
gtttggtaatatg

SEQ ID NO: 108864 - DNA, 13 bp, Artificial Sequence
  Oligonucleotide for detection of SNP TSC0027241
catattaccaaac

SEQ ID NO: 108865 - DNA, 13 bp, Artificial Sequence
  Oligonucleotide for detection of SNP TSC0027241
tatatttttaaay

SEQ ID NO: 108866 - DNA, 13 bp, Artificial Sequence
  Oligonucleotide for detection of SNP TSC0027241
rtttaaaaatata

SEQ ID NO: 108867 - DNA, 13 bp, Artificial Sequence
  Oligonucleotide for detection of SNP TSC0027241
tatattattaaay

SEQ ID NO: 108868 - DNA, 13 bp, Artificial Sequence
  Oligonucleotide for detection of SNP TSC0027241
rtttaataatata

SEQ ID NO: 108869 - DNA, 13 bp, Artificial Sequence
  Oligonucleotide for detection of SNP TSC0027246
ttttggattggtg

SEQ ID NO: 108870 - DNA, 13 bp, Artificial Sequence
  Oligonucleotide for detection of SNP TSC0027246
caccaatccaaaa

SEQ ID NO: 108871 - DNA, 13 bp, Artificial Sequence
  Oligonucleotide for detection of SNP TSC0027246
ttttgggttggtg

SEQ ID NO: 108872 - DNA, 13 bp, Artificial Sequence
  Oligonucleotide for detection of SNP TSC0027246
caccaacccaaaa

SEQ ID NO: 108873 - DNA, 13 bp, Artificial Sequence
  Oligonucleotide for detection of SNP TSC0027252
tgtttatgggatt

SEQ ID NO: 108874 - DNA, 13 bp, Artificial Sequence
  Oligonucleotide for detection of SNP TSC0027252
aatcccataaaca

SEQ ID NO: 108875 - DNA, 13 bp, Artificial Sequence
  Oligonucleotide for detection of SNP TSC0027252
tgtttacgggatt

SEQ ID NO: 108876 - DNA, 13 bp, Artificial Sequence
  Oligonucleotide for detection of SNP TSC0027252
aatcccgtaaaca

SEQ ID NO: 108877 - DNA, 13 bp, Artificial Sequence
  Oligonucleotide for detection of SNP TSC0027252
agttttgtgggta

SEQ ID NO: 108878 - DNA, 13 bp, Artificial Sequence
  Oligonucleotide for detection of SNP TSC0027252
tacccacaaaact

SEQ ID NO: 108879 - DNA, 13 bp, Artificial Sequence
  Oligonucleotide for detection of SNP TSC0027252
agttttatgggta

SEQ ID NO: 108880 - DNA, 13 bp, Artificial Sequence
  Oligonucleotide for detection of SNP TSC0027252
tacccataaaact

SEQ ID NO: 108881 - DNA, 13 bp, Artificial Sequence
  Oligonucleotide for detection of SNP TSC0027252
agtttcgtgggta

SEQ ID NO: 108882 - DNA, 13 bp, Artificial Sequence
  Oligonucleotide for detection of SNP TSC0027252
tacccacgaaact

SEQ ID NO: 108883 - DNA, 13 bp, Artificial Sequence
  Oligonucleotide for detection of SNP TSC0027256
tattttgaggaaa

SEQ ID NO: 108884 - DNA, 13 bp, Artificial Sequence
  Oligonucleotide for detection of SNP TSC0027256
tttcctcaaaata

SEQ ID NO: 108885 - DNA, 13 bp, Artificial Sequence
  Oligonucleotide for detection of SNP TSC0027256
tattttaaggaaa

SEQ ID NO: 108886 - DNA, 13 bp, Artificial Sequence
  Oligonucleotide for detection of SNP TSC0027256
tttccttaaaata

SEQ ID NO: 108887 - DNA, 13 bp, Artificial Sequence
  Oligonucleotide for detection of SNP TSC0027256
tatttcgaggaaa

SEQ ID NO: 108888 - DNA, 13 bp, Artificial Sequence
  Oligonucleotide for detection of SNP TSC0027256
tttcctcgaaata

SEQ ID NO: 108889 - DNA, 13 bp, Artificial Sequence
  Oligonucleotide for detection of SNP TSC0027257
gggattatttttg

SEQ ID NO: 108890 - DNA, 13 bp, Artificial Sequence
  Oligonucleotide for detection of SNP TSC0027257
caaaaataatccc

SEQ ID NO: 108891 - DNA, 13 bp, Artificial Sequence
  Oligonucleotide for detection of SNP TSC0027257
gggattttttttg

SEQ ID NO: 108892 - DNA, 13 bp, Artificial Sequence
  Oligonucleotide for detection of SNP TSC0027257
caaaaaaaatccc

SEQ ID NO: 108893 - DNA, 13 bp, Artificial Sequence
  Oligonucleotide for detection of SNP TSC0027257
taggggtagttty

SEQ ID NO: 108894 - DNA, 13 bp, Artificial Sequence
  Oligonucleotide for detection of SNP TSC0027257
raaactaccccta

SEQ ID NO: 108895 - DNA, 13 bp, Artificial Sequence
  Oligonucleotide for detection of SNP TSC0027257
tagggggagttty

SEQ ID NO: 108896 - DNA, 13 bp, Artificial Sequence
  Oligonucleotide for detection of SNP TSC0027257
raaactcccccta

SEQ ID NO: 108897 - DNA, 13 bp, Artificial Sequence
  Oligonucleotide for detection of SNP TSC0027258
agttataaaaatg

SEQ ID NO: 108898 - DNA, 13 bp, Artificial Sequence
  Oligonucleotide for detection of SNP TSC0027258
catttttataact

SEQ ID NO: 108899 - DNA, 13 bp, Artificial Sequence
  Oligonucleotide for detection of SNP TSC0027258
agttatgaaaatg

SEQ ID NO: 108900 - DNA, 13 bp, Artificial Sequence
  Oligonucleotide for detection of SNP TSC0027258
cattttcataact

SEQ ID NO: 108901 - DNA, 13 bp, Artificial Sequence
  Oligonucleotide for detection of SNP TSC0027258
agttacgaaaatg

SEQ ID NO: 108902 - DNA, 13 bp, Artificial Sequence
  Oligonucleotide for detection of SNP TSC0027258
cattttcgtaact

SEQ ID NO: 108903 - DNA, 13 bp, Artificial Sequence
  Oligonucleotide for detection of SNP TSC0027261
ttatagtggggtt

SEQ ID NO: 108904 - DNA, 13 bp, Artificial Sequence
  Oligonucleotide for detection of SNP TSC0027261
aaccccactataa

SEQ ID NO: 108905 - DNA, 13 bp, Artificial Sequence
  Oligonucleotide for detection of SNP TSC0027261
ttatagcggggtt

SEQ ID NO: 108906 - DNA, 13 bp, Artificial Sequence
  Oligonucleotide for detection of SNP TSC0027261
aaccccgctataa

SEQ ID NO: 108907 - DNA, 13 bp, Artificial Sequence
  Oligonucleotide for detection of SNP TSC0027261
aattttgttgtga

SEQ ID NO: 108908 - DNA, 13 bp, Artificial Sequence
  Oligonucleotide for detection of SNP TSC0027261
tcacaacaaaatt

SEQ ID NO: 108909 - DNA, 13 bp, Artificial Sequence
  Oligonucleotide for detection of SNP TSC0027261
aattttattgtga

SEQ ID NO: 108910 - DNA, 13 bp, Artificial Sequence
  Oligonucleotide for detection of SNP TSC0027261
tcacaataaaatt

SEQ ID NO: 108911 - DNA, 13 bp, Artificial Sequence
  Oligonucleotide for detection of SNP TSC0027261
aatttcgttgtga

SEQ ID NO: 108912 - DNA, 13 bp, Artificial Sequence
  Oligonucleotide for detection of SNP TSC0027261
tcacaacgaaatt

SEQ ID NO: 108913 - DNA, 13 bp, Artificial Sequence
  Oligonucleotide for detection of SNP TSC0027263
tatggttgggaag

SEQ ID NO: 108914 - DNA, 13 bp, Artificial Sequence
  Oligonucleotide for detection of SNP TSC0027263
cttcccaaccata

SEQ ID NO: 108915 - DNA, 13 bp, Artificial Sequence
  Oligonucleotide for detection of SNP TSC0027263
tatggtcgggaag

SEQ ID NO: 108916 - DNA, 13 bp, Artificial Sequence
  Oligonucleotide for detection of SNP TSC0027263
cttcccgaccata

SEQ ID NO: 108917 - DNA, 13 bp, Artificial Sequence
  Oligonucleotide for detection of SNP TSC0027264
gttggtgtttgty

SEQ ID NO: 108918 - DNA, 13 bp, Artificial Sequence
  Oligonucleotide for detection of SNP TSC0027264
racaaacaccaac

SEQ ID NO: 108919 - DNA, 13 bp, Artificial Sequence
  Oligonucleotide for detection of SNP TSC0027264
gttggtatttgty

SEQ ID NO: 108920 - DNA, 13 bp, Artificial Sequence
  Oligonucleotide for detection of SNP TSC0027264
racaaataccaac

SEQ ID NO: 108921 - DNA, 13 bp, Artificial Sequence
  Oligonucleotide for detection of SNP TSC0027265
atttaatggtatt

SEQ ID NO: 108922 - DNA, 13 bp, Artificial Sequence
  Oligonucleotide for detection of SNP TSC0027265
aataccattaaat

SEQ ID NO: 108923 - DNA, 13 bp, Artificial Sequence
  Oligonucleotide for detection of SNP TSC0027265
atttaagggtatt

SEQ ID NO: 108924 - DNA, 13 bp, Artificial Sequence
  Oligonucleotide for detection of SNP TSC0027265
aatacccttaaat

SEQ ID NO: 108925 - DNA, 13 bp, Artificial Sequence
  Oligonucleotide for detection of SNP TSC0027265
atttaacggtatt

SEQ ID NO: 108926 - DNA, 13 bp, Artificial Sequence
  Oligonucleotide for detection of SNP TSC0027265
aataccgttaaat

SEQ ID NO: 108927 - DNA, 13 bp, Artificial Sequence
  Oligonucleotide for detection of SNP TSC0027265
agtgttgttaggt

SEQ ID NO: 108928 - DNA, 13 bp, Artificial Sequence
  Oligonucleotide for detection of SNP TSC0027265
acctaacaacact

SEQ ID NO: 108929 - DNA, 13 bp, Artificial Sequence
  Oligonucleotide for detection of SNP TSC0027265
agtgtttttaggt

SEQ ID NO: 108930 - DNA, 13 bp, Artificial Sequence
  Oligonucleotide for detection of SNP TSC0027265
acctaaaaacact

SEQ ID NO: 108931 - DNA, 13 bp, Artificial Sequence
  Oligonucleotide for detection of SNP TSC0027265
agtgtcgttaggt

SEQ ID NO: 108932 - DNA, 13 bp, Artificial Sequence
  Oligonucleotide for detection of SNP TSC0027265
acctaacgacact

SEQ ID NO: 108933 - DNA, 13 bp, Artificial Sequence
  Oligonucleotide for detection of SNP TSC0027266
gtattgattttta

SEQ ID NO: 108934 - DNA, 13 bp, Artificial Sequence
  Oligonucleotide for detection of SNP TSC0027266
taaaaatcaatac

SEQ ID NO: 108935 - DNA, 13 bp, Artificial Sequence
  Oligonucleotide for detection of SNP TSC0027266
gtattgtttttta

SEQ ID NO: 108936 - DNA, 13 bp, Artificial Sequence
  Oligonucleotide for detection of SNP TSC0027266
taaaaaacaatac

SEQ ID NO: 108937 - DNA, 13 bp, Artificial Sequence
  Oligonucleotide for detection of SNP TSC0027266
tggaagttagtgy

SEQ ID NO: 108938 - DNA, 13 bp, Artificial Sequence
  Oligonucleotide for detection of SNP TSC0027266
rcactaacttcca

SEQ ID NO: 108939 - DNA, 13 bp, Artificial Sequence
  Oligonucleotide for detection of SNP TSC0027266
tggaaggtagtgy

SEQ ID NO: 108940 - DNA, 13 bp, Artificial Sequence
  Oligonucleotide for detection of SNP TSC0027266
rcactaccttcca

SEQ ID NO: 108941 - DNA, 13 bp, Artificial Sequence
  Oligonucleotide for detection of SNP TSC0027267
tatatatatgtaa

SEQ ID NO: 108942 - DNA, 13 bp, Artificial Sequence
  Oligonucleotide for detection of SNP TSC0027267
ttacatatatata

SEQ ID NO: 108943 - DNA, 13 bp, Artificial Sequence
  Oligonucleotide for detection of SNP TSC0027267
tatatagatgtaa

SEQ ID NO: 108944 - DNA, 13 bp, Artificial Sequence
  Oligonucleotide for detection of SNP TSC0027267
ttacatctatata

SEQ ID NO: 108945 - DNA, 13 bp, Artificial Sequence
  Oligonucleotide for detection of SNP TSC0027271
atgtgggtggggg

SEQ ID NO: 108946 - DNA, 13 bp, Artificial Sequence
  Oligonucleotide for detection of SNP TSC0027271
cccccacccacat

SEQ ID NO: 108947 - DNA, 13 bp, Artificial Sequence
  Oligonucleotide for detection of SNP TSC0027271
atgtggttggggg

SEQ ID NO: 108948 - DNA, 13 bp, Artificial Sequence
  Oligonucleotide for detection of SNP TSC0027271
cccccaaccacat

SEQ ID NO: 108949 - DNA, 13 bp, Artificial Sequence
  Oligonucleotide for detection of SNP TSC0027271
tttttatttatat

SEQ ID NO: 108950 - DNA, 13 bp, Artificial Sequence
  Oligonucleotide for detection of SNP TSC0027271
atataaataaaaa

SEQ ID NO: 108951 - DNA, 13 bp, Artificial Sequence
  Oligonucleotide for detection of SNP TSC0027271
tttttaattatat

SEQ ID NO: 108952 - DNA, 13 bp, Artificial Sequence
  Oligonucleotide for detection of SNP TSC0027271
atataattaaaaa

SEQ ID NO: 108953 - DNA, 13 bp, Artificial Sequence
  Oligonucleotide for detection of SNP TSC0027274
tggtttataagga

SEQ ID NO: 108954 - DNA, 13 bp, Artificial Sequence
  Oligonucleotide for detection of SNP TSC0027274
tccttataaacca

SEQ ID NO: 108955 - DNA, 13 bp, Artificial Sequence
  Oligonucleotide for detection of SNP TSC0027274
tggtttttaagga

SEQ ID NO: 108956 - DNA, 13 bp, Artificial Sequence
  Oligonucleotide for detection of SNP TSC0027274
tccttaaaaacca

SEQ ID NO: 108957 - DNA, 13 bp, Artificial Sequence
  Oligonucleotide for detection of SNP TSC0027274
tttttgtgggtta

SEQ ID NO: 108958 - DNA, 13 bp, Artificial Sequence
  Oligonucleotide for detection of SNP TSC0027274
taacccacaaaaa

SEQ ID NO: 108959 - DNA, 13 bp, Artificial Sequence
  Oligonucleotide for detection of SNP TSC0027274
tttttgagggtta

SEQ ID NO: 108960 - DNA, 13 bp, Artificial Sequence
  Oligonucleotide for detection of SNP TSC0027274
taaccctcaaaaa

SEQ ID NO: 108961 - DNA, 13 bp, Artificial Sequence
  Oligonucleotide for detection of SNP TSC0027276
tattttgtagtaa

SEQ ID NO: 108962 - DNA, 13 bp, Artificial Sequence
  Oligonucleotide for detection of SNP TSC0027276
ttactacaaaata

SEQ ID NO: 108963 - DNA, 13 bp, Artificial Sequence
  Oligonucleotide for detection of SNP TSC0027277
aagtaaatattat

SEQ ID NO: 108964 - DNA, 13 bp, Artificial Sequence
  Oligonucleotide for detection of SNP TSC0027277
ataatatttactt

SEQ ID NO: 108965 - DNA, 13 bp, Artificial Sequence
  Oligonucleotide for detection of SNP TSC0027277
aagtaagtattat

SEQ ID NO: 108966 - DNA, 13 bp, Artificial Sequence
  Oligonucleotide for detection of SNP TSC0027277
ataatacttactt

SEQ ID NO: 108967 - DNA, 13 bp, Artificial Sequence
  Oligonucleotide for detection of SNP TSC0027278
agaattagaggag

SEQ ID NO: 108968 - DNA, 13 bp, Artificial Sequence
  Oligonucleotide for detection of SNP TSC0027278
ctcctctaattct

SEQ ID NO: 108969 - DNA, 13 bp, Artificial Sequence
  Oligonucleotide for detection of SNP TSC0027278
agaattggaggag

SEQ ID NO: 108970 - DNA, 13 bp, Artificial Sequence
  Oligonucleotide for detection of SNP TSC0027278
ctcctccaattct

SEQ ID NO: 108971 - DNA, 13 bp, Artificial Sequence
  Oligonucleotide for detection of SNP TSC0027279
tggaatatgggaa

SEQ ID NO: 108972 - DNA, 13 bp, Artificial Sequence
  Oligonucleotide for detection of SNP TSC0027279
ttcccatattcca

SEQ ID NO: 108973 - DNA, 13 bp, Artificial Sequence
  Oligonucleotide for detection of SNP TSC0027279
tggaatgtgggaa

SEQ ID NO: 108974 - DNA, 13 bp, Artificial Sequence
  Oligonucleotide for detection of SNP TSC0027279
ttcccacattcca

SEQ ID NO: 108975 - DNA, 13 bp, Artificial Sequence
  Oligonucleotide for detection of SNP TSC0027280
aaggatggtggty

SEQ ID NO: 108976 - DNA, 13 bp, Artificial Sequence
  Oligonucleotide for detection of SNP TSC0027280
raccaccatcctt

SEQ ID NO: 108977 - DNA, 13 bp, Artificial Sequence
  Oligonucleotide for detection of SNP TSC0027280
aaggattgtggty

SEQ ID NO: 108978 - DNA, 13 bp, Artificial Sequence
  Oligonucleotide for detection of SNP TSC0027280
raccacaatcctt

SEQ ID NO: 108979 - DNA, 13 bp, Artificial Sequence
  Oligonucleotide for detection of SNP TSC0027280
gattattattttt

SEQ ID NO: 108980 - DNA, 13 bp, Artificial Sequence
  Oligonucleotide for detection of SNP TSC0027280
aaaaataataatc

SEQ ID NO: 108981 - DNA, 13 bp, Artificial Sequence
  Oligonucleotide for detection of SNP TSC0027280
gattataattttt

SEQ ID NO: 108982 - DNA, 13 bp, Artificial Sequence
  Oligonucleotide for detection of SNP TSC0027280
aaaaattataatc

SEQ ID NO: 108983 - DNA, 13 bp, Artificial Sequence
  Oligonucleotide for detection of SNP TSC0027281
gttttgagaagat

SEQ ID NO: 108984 - DNA, 13 bp, Artificial Sequence
  Oligonucleotide for detection of SNP TSC0027281
atcttctcaaaac

SEQ ID NO: 108985 - DNA, 13 bp, Artificial Sequence
  Oligonucleotide for detection of SNP TSC0027281
gttttgtgaagat

SEQ ID NO: 108986 - DNA, 13 bp, Artificial Sequence
  Oligonucleotide for detection of SNP TSC0027281
atcttcacaaaac

SEQ ID NO: 108987 - DNA, 13 bp, Artificial Sequence
  Oligonucleotide for detection of SNP TSC0027281
gttttgcgaagat

SEQ ID NO: 108988 - DNA, 13 bp, Artificial Sequence
  Oligonucleotide for detection of SNP TSC0027281
atcttcgcaaaac

SEQ ID NO: 108989 - DNA, 13 bp, Artificial Sequence
  Oligonucleotide for detection of SNP TSC0027281
atttttttagagy

SEQ ID NO: 108990 - DNA, 13 bp, Artificial Sequence
  Oligonucleotide for detection of SNP TSC0027281
rctctaaaaaaat

SEQ ID NO: 108991 - DNA, 13 bp, Artificial Sequence
  Oligonucleotide for detection of SNP TSC0027281
atttttgtagagy

SEQ ID NO: 108992 - DNA, 13 bp, Artificial Sequence
  Oligonucleotide for detection of SNP TSC0027281
rctctacaaaaat

SEQ ID NO: 108993 - DNA, 13 bp, Artificial Sequence
  Oligonucleotide for detection of SNP TSC0027281
attttcgtagagy

SEQ ID NO: 108994 - DNA, 13 bp, Artificial Sequence
  Oligonucleotide for detection of SNP TSC0027281
rctctacgaaaat

SEQ ID NO: 108995 - DNA, 13 bp, Artificial Sequence
  Oligonucleotide for detection of SNP TSC0027282
gtatggattttga

SEQ ID NO: 108996 - DNA, 13 bp, Artificial Sequence
  Oligonucleotide for detection of SNP TSC0027282
tcaaaatccatac

SEQ ID NO: 108997 - DNA, 13 bp, Artificial Sequence
  Oligonucleotide for detection of SNP TSC0027282
gtatgggttttga

SEQ ID NO: 108998 - DNA, 13 bp, Artificial Sequence
  Oligonucleotide for detection of SNP TSC0027282
tcaaaacccatac

SEQ ID NO: 108999 - DNA, 13 bp, Artificial Sequence
  Oligonucleotide for detection of SNP TSC0027284
tggattgtagtag

SEQ ID NO: 109000 - DNA, 13 bp, Artificial Sequence
  Oligonucleotide for detection of SNP TSC0027284
ctactacaatcca

SEQ ID NO: 109001 - DNA, 13 bp, Artificial Sequence
  Oligonucleotide for detection of SNP TSC0027284
tggattatagtag

SEQ ID NO: 109002 - DNA, 13 bp, Artificial Sequence
  Oligonucleotide for detection of SNP TSC0027284
ctactataatcca

SEQ ID NO: 109003 - DNA, 13 bp, Artificial Sequence
  Oligonucleotide for detection of SNP TSC0027285
tagttcgtatttt

SEQ ID NO: 109004 - DNA, 13 bp, Artificial Sequence
  Oligonucleotide for detection of SNP TSC0027285
aaaatacgaacta

SEQ ID NO: 109005 - DNA, 13 bp, Artificial Sequence
  Oligonucleotide for detection of SNP TSC0027285
agagtatgagtta

SEQ ID NO: 109006 - DNA, 13 bp, Artificial Sequence
  Oligonucleotide for detection of SNP TSC0027285
taactcatactct

SEQ ID NO: 109007 - DNA, 13 bp, Artificial Sequence
  Oligonucleotide for detection of SNP TSC0027285
agagtacgagtta

SEQ ID NO: 109008 - DNA, 13 bp, Artificial Sequence
  Oligonucleotide for detection of SNP TSC0027285
taactcgtactct

SEQ ID NO: 109009 - DNA, 13 bp, Artificial Sequence
  Oligonucleotide for detection of SNP TSC0027286
tttttaatgtatt

SEQ ID NO: 109010 - DNA, 13 bp, Artificial Sequence
  Oligonucleotide for detection of SNP TSC0027286
aatacattaaaaa

SEQ ID NO: 109011 - DNA, 13 bp, Artificial Sequence
  Oligonucleotide for detection of SNP TSC0027286
tttttagtgtatt

SEQ ID NO: 109012 - DNA, 13 bp, Artificial Sequence
  Oligonucleotide for detection of SNP TSC0027286
aatacactaaaaa

SEQ ID NO: 109013 - DNA, 13 bp, Artificial Sequence
  Oligonucleotide for detection of SNP TSC0027287
ggggagtgtatat

SEQ ID NO: 109014 - DNA, 13 bp, Artificial Sequence
  Oligonucleotide for detection of SNP TSC0027287
atatacactcccc

SEQ ID NO: 109015 - DNA, 13 bp, Artificial Sequence
  Oligonucleotide for detection of SNP TSC0027287
ggggagcgtatat

SEQ ID NO: 109016 - DNA, 13 bp, Artificial Sequence
  Oligonucleotide for detection of SNP TSC0027287
atatacgctcccc

SEQ ID NO: 109017 - DNA, 13 bp, Artificial Sequence
  Oligonucleotide for detection of SNP TSC0027288
gaaatataatatg

SEQ ID NO: 109018 - DNA, 13 bp, Artificial Sequence
  Oligonucleotide for detection of SNP TSC0027288
catattatatttc

SEQ ID NO: 109019 - DNA, 13 bp, Artificial Sequence
  Oligonucleotide for detection of SNP TSC0027288
gaaatagaatatg

SEQ ID NO: 109020 - DNA, 13 bp, Artificial Sequence
  Oligonucleotide for detection of SNP TSC0027288
catattctatttc

SEQ ID NO: 109021 - DNA, 13 bp, Artificial Sequence
  Oligonucleotide for detection of SNP TSC0027288
tatattgtattty

SEQ ID NO: 109022 - DNA, 13 bp, Artificial Sequence
  Oligonucleotide for detection of SNP TSC0027288
raaatacaatata

SEQ ID NO: 109023 - DNA, 13 bp, Artificial Sequence
  Oligonucleotide for detection of SNP TSC0027288
tatattttattty

SEQ ID NO: 109024 - DNA, 13 bp, Artificial Sequence
  Oligonucleotide for detection of SNP TSC0027288
raaataaaatata

SEQ ID NO: 109025 - DNA, 13 bp, Artificial Sequence
  Oligonucleotide for detection of SNP TSC0027289
tgggtatggtggy

SEQ ID NO: 109026 - DNA, 13 bp, Artificial Sequence
  Oligonucleotide for detection of SNP TSC0027289
rccaccataccca

SEQ ID NO: 109027 - DNA, 13 bp, Artificial Sequence
  Oligonucleotide for detection of SNP TSC0027289
tgggtacggtggy

SEQ ID NO: 109028 - DNA, 13 bp, Artificial Sequence
  Oligonucleotide for detection of SNP TSC0027289
rccaccgtaccca

SEQ ID NO: 109029 - DNA, 13 bp, Artificial Sequence
  Oligonucleotide for detection of SNP TSC0027289
gttatcgtgttta

SEQ ID NO: 109030 - DNA, 13 bp, Artificial Sequence
  Oligonucleotide for detection of SNP TSC0027289
taaacacgataac

SEQ ID NO: 109031 - DNA, 13 bp, Artificial Sequence
  Oligonucleotide for detection of SNP TSC0027290
ttaatttataaaa

SEQ ID NO: 109032 - DNA, 13 bp, Artificial Sequence
  Oligonucleotide for detection of SNP TSC0027290
ttttataaattaa

SEQ ID NO: 109033 - DNA, 13 bp, Artificial Sequence
  Oligonucleotide for detection of SNP TSC0027294
aagaatagagtgt

SEQ ID NO: 109034 - DNA, 13 bp, Artificial Sequence
  Oligonucleotide for detection of SNP TSC0027294
acactctattctt

SEQ ID NO: 109035 - DNA, 13 bp, Artificial Sequence
  Oligonucleotide for detection of SNP TSC0027294
aagaatggagtgt

SEQ ID NO: 109036 - DNA, 13 bp, Artificial Sequence
  Oligonucleotide for detection of SNP TSC0027294
acactccattctt

SEQ ID NO: 109037 - DNA, 13 bp, Artificial Sequence
  Oligonucleotide for detection of SNP TSC0027295
atagtaggtgtat

SEQ ID NO: 109038 - DNA, 13 bp, Artificial Sequence
  Oligonucleotide for detection of SNP TSC0027295
atacacctactat

SEQ ID NO: 109039 - DNA, 13 bp, Artificial Sequence
  Oligonucleotide for detection of SNP TSC0027295
atagtaagtgtat

SEQ ID NO: 109040 - DNA, 13 bp, Artificial Sequence
  Oligonucleotide for detection of SNP TSC0027295
atacacttactat

SEQ ID NO: 109041 - DNA, 13 bp, Artificial Sequence
  Oligonucleotide for detection of SNP TSC0027296
ttaattgaaataa

SEQ ID NO: 109042 - DNA, 13 bp, Artificial Sequence
  Oligonucleotide for detection of SNP TSC0027296
ttatttcaattaa

SEQ ID NO: 109043 - DNA, 13 bp, Artificial Sequence
  Oligonucleotide for detection of SNP TSC0027296
ttaattaaaataa

SEQ ID NO: 109044 - DNA, 13 bp, Artificial Sequence
  Oligonucleotide for detection of SNP TSC0027296
ttattttaattaa

SEQ ID NO: 109045 - DNA, 13 bp, Artificial Sequence
  Oligonucleotide for detection of SNP TSC0027297
ttaattagattta

SEQ ID NO: 109046 - DNA, 13 bp, Artificial Sequence
  Oligonucleotide for detection of SNP TSC0027297
taaatctaattaa

SEQ ID NO: 109047 - DNA, 13 bp, Artificial Sequence
  Oligonucleotide for detection of SNP TSC0027297
ttaatttgattta

SEQ ID NO: 109048 - DNA, 13 bp, Artificial Sequence
  Oligonucleotide for detection of SNP TSC0027297
taaatcaaattaa

SEQ ID NO: 109049 - DNA, 13 bp, Artificial Sequence
  Oligonucleotide for detection of SNP TSC0027297
tggatttaattga

SEQ ID NO: 109050 - DNA, 13 bp, Artificial Sequence
  Oligonucleotide for detection of SNP TSC0027297
tcaattaaatcca

SEQ ID NO: 109051 - DNA, 13 bp, Artificial Sequence
  Oligonucleotide for detection of SNP TSC0027297
tggattaaattga

SEQ ID NO: 109052 - DNA, 13 bp, Artificial Sequence
  Oligonucleotide for detection of SNP TSC0027297
tcaatttaatcca

SEQ ID NO: 109053 - DNA, 13 bp, Artificial Sequence
  Oligonucleotide for detection of SNP TSC0027298
ggggagtatgttg

SEQ ID NO: 109054 - DNA, 13 bp, Artificial Sequence
  Oligonucleotide for detection of SNP TSC0027298
caacatactcccc

SEQ ID NO: 109055 - DNA, 13 bp, Artificial Sequence
  Oligonucleotide for detection of SNP TSC0027298
ggggaggatgttg

SEQ ID NO: 109056 - DNA, 13 bp, Artificial Sequence
  Oligonucleotide for detection of SNP TSC0027298
caacatcctcccc

SEQ ID NO: 109057 - DNA, 13 bp, Artificial Sequence
  Oligonucleotide for detection of SNP TSC0027298
tagtatgttttty

SEQ ID NO: 109058 - DNA, 13 bp, Artificial Sequence
  Oligonucleotide for detection of SNP TSC0027298
raaaaacatacta

SEQ ID NO: 109059 - DNA, 13 bp, Artificial Sequence
  Oligonucleotide for detection of SNP TSC0027298
tagtattttttty

SEQ ID NO: 109060 - DNA, 13 bp, Artificial Sequence
  Oligonucleotide for detection of SNP TSC0027298
raaaaaaatacta

SEQ ID NO: 109061 - DNA, 13 bp, Artificial Sequence
  Oligonucleotide for detection of SNP TSC0027299
tttgttattgtty

SEQ ID NO: 109062 - DNA, 13 bp, Artificial Sequence
  Oligonucleotide for detection of SNP TSC0027299
raacaataacaaa

SEQ ID NO: 109063 - DNA, 13 bp, Artificial Sequence
  Oligonucleotide for detection of SNP TSC0027299
tttgtttttgtty

SEQ ID NO: 109064 - DNA, 13 bp, Artificial Sequence
  Oligonucleotide for detection of SNP TSC0027299
raacaaaaacaaa

SEQ ID NO: 109065 - DNA, 13 bp, Artificial Sequence
  Oligonucleotide for detection of SNP TSC0027299
tttgttatcgtty

SEQ ID NO: 109066 - DNA, 13 bp, Artificial Sequence
  Oligonucleotide for detection of SNP TSC0027299
raacgataacaaa

SEQ ID NO: 109067 - DNA, 13 bp, Artificial Sequence
  Oligonucleotide for detection of SNP TSC0027299
tttgttttcgtty

SEQ ID NO: 109068 - DNA, 13 bp, Artificial Sequence
  Oligonucleotide for detection of SNP TSC0027299
raacgaaaacaaa

SEQ ID NO: 109069 - DNA, 13 bp, Artificial Sequence
  Oligonucleotide for detection of SNP TSC0027299
gagtggtagtaag

SEQ ID NO: 109070 - DNA, 13 bp, Artificial Sequence
  Oligonucleotide for detection of SNP TSC0027299
cttactaccactc

SEQ ID NO: 109071 - DNA, 13 bp, Artificial Sequence
  Oligonucleotide for detection of SNP TSC0027299
gagtgggagtaag

SEQ ID NO: 109072 - DNA, 13 bp, Artificial Sequence
  Oligonucleotide for detection of SNP TSC0027299
cttactcccactc

SEQ ID NO: 109073 - DNA, 13 bp, Artificial Sequence
  Oligonucleotide for detection of SNP TSC0027299
gagcggtagtaag

SEQ ID NO: 109074 - DNA, 13 bp, Artificial Sequence
  Oligonucleotide for detection of SNP TSC0027299
cttactaccgctc

SEQ ID NO: 109075 - DNA, 13 bp, Artificial Sequence
  Oligonucleotide for detection of SNP TSC0027299
gagcgggagtaag

SEQ ID NO: 109076 - DNA, 13 bp, Artificial Sequence
  Oligonucleotide for detection of SNP TSC0027299
cttactcccgctc

SEQ ID NO: 109077 - DNA, 13 bp, Artificial Sequence
  Oligonucleotide for detection of SNP TSC0027300
atgaaaatatttg

SEQ ID NO: 109078 - DNA, 13 bp, Artificial Sequence
  Oligonucleotide for detection of SNP TSC0027300
caaatattttcat

SEQ ID NO: 109079 - DNA, 13 bp, Artificial Sequence
  Oligonucleotide for detection of SNP TSC0027300
atgaaagtatttg

SEQ ID NO: 109080 - DNA, 13 bp, Artificial Sequence
  Oligonucleotide for detection of SNP TSC0027300
caaatactttcat

SEQ ID NO: 109081 - DNA, 13 bp, Artificial Sequence
  Oligonucleotide for detection of SNP TSC0027301
ggttttgtatttt

SEQ ID NO: 109082 - DNA, 13 bp, Artificial Sequence
  Oligonucleotide for detection of SNP TSC0027301
aaaatacaaaacc

SEQ ID NO: 109083 - DNA, 13 bp, Artificial Sequence
  Oligonucleotide for detection of SNP TSC0027301
aaaatgtaaagty

SEQ ID NO: 109084 - DNA, 13 bp, Artificial Sequence
  Oligonucleotide for detection of SNP TSC0027301
ractttacatttt

SEQ ID NO: 109085 - DNA, 13 bp, Artificial Sequence
  Oligonucleotide for detection of SNP TSC0027301
aaaatgaaaagty

SEQ ID NO: 109086 - DNA, 13 bp, Artificial Sequence
  Oligonucleotide for detection of SNP TSC0027301
racttttcatttt

SEQ ID NO: 109087 - DNA, 13 bp, Artificial Sequence
  Oligonucleotide for detection of SNP TSC0027306
agtggtataagag

SEQ ID NO: 109088 - DNA, 13 bp, Artificial Sequence
  Oligonucleotide for detection of SNP TSC0027306
ctcttataccact

SEQ ID NO: 109089 - DNA, 13 bp, Artificial Sequence
  Oligonucleotide for detection of SNP TSC0027306
agtggtgtaagag

SEQ ID NO: 109090 - DNA, 13 bp, Artificial Sequence
  Oligonucleotide for detection of SNP TSC0027306
ctcttacaccact

SEQ ID NO: 109091 - DNA, 13 bp, Artificial Sequence
  Oligonucleotide for detection of SNP TSC0027306
agtggcgtaagag

SEQ ID NO: 109092 - DNA, 13 bp, Artificial Sequence
  Oligonucleotide for detection of SNP TSC0027306
ctcttacgccact

SEQ ID NO: 109093 - DNA, 13 bp, Artificial Sequence
  Oligonucleotide for detection of SNP TSC0027306
tttttgtgttatt

SEQ ID NO: 109094 - DNA, 13 bp, Artificial Sequence
  Oligonucleotide for detection of SNP TSC0027306
aataacacaaaaa

SEQ ID NO: 109095 - DNA, 13 bp, Artificial Sequence
  Oligonucleotide for detection of SNP TSC0027306
tttttgcgttatt

SEQ ID NO: 109096 - DNA, 13 bp, Artificial Sequence
  Oligonucleotide for detection of SNP TSC0027306
aataacgcaaaaa

SEQ ID NO: 109097 - DNA, 13 bp, Artificial Sequence
  Oligonucleotide for detection of SNP TSC0027307
ggttagatttttg

SEQ ID NO: 109098 - DNA, 13 bp, Artificial Sequence
  Oligonucleotide for detection of SNP TSC0027307
caaaaatctaacc

SEQ ID NO: 109099 - DNA, 13 bp, Artificial Sequence
  Oligonucleotide for detection of SNP TSC0027309
gagggggatttta

SEQ ID NO: 109100 - DNA, 13 bp, Artificial Sequence
  Oligonucleotide for detection of SNP TSC0027309
taaaatccccctc

SEQ ID NO: 109101 - DNA, 13 bp, Artificial Sequence
  Oligonucleotide for detection of SNP TSC0027309
gaggggtatttta

SEQ ID NO: 109102 - DNA, 13 bp, Artificial Sequence
  Oligonucleotide for detection of SNP TSC0027309
taaaatacccctc

SEQ ID NO: 109103 - DNA, 13 bp, Artificial Sequence
  Oligonucleotide for detection of SNP TSC0027309
tggggtattttty

SEQ ID NO: 109104 - DNA, 13 bp, Artificial Sequence
  Oligonucleotide for detection of SNP TSC0027309
raaaaatacccca

SEQ ID NO: 109105 - DNA, 13 bp, Artificial Sequence
  Oligonucleotide for detection of SNP TSC0027310
ttaatgagagttt

SEQ ID NO: 109106 - DNA, 13 bp, Artificial Sequence
  Oligonucleotide for detection of SNP TSC0027310
aaactctcattaa

SEQ ID NO: 109107 - DNA, 13 bp, Artificial Sequence
  Oligonucleotide for detection of SNP TSC0027310
ttaatgggagttt

SEQ ID NO: 109108 - DNA, 13 bp, Artificial Sequence
  Oligonucleotide for detection of SNP TSC0027310
aaactcccattaa

SEQ ID NO: 109109 - DNA, 13 bp, Artificial Sequence
  Oligonucleotide for detection of SNP TSC0027311
ttttttgtgtagt

SEQ ID NO: 109110 - DNA, 13 bp, Artificial Sequence
  Oligonucleotide for detection of SNP TSC0027311
actacacaaaaaa

SEQ ID NO: 109111 - DNA, 13 bp, Artificial Sequence
  Oligonucleotide for detection of SNP TSC0027312
ttatatagaaggt

SEQ ID NO: 109112 - DNA, 13 bp, Artificial Sequence
  Oligonucleotide for detection of SNP TSC0027312
accttctatataa

SEQ ID NO: 109113 - DNA, 13 bp, Artificial Sequence
  Oligonucleotide for detection of SNP TSC0027312
ttatatggaaggt

SEQ ID NO: 109114 - DNA, 13 bp, Artificial Sequence
  Oligonucleotide for detection of SNP TSC0027312
accttccatataa

SEQ ID NO: 109115 - DNA, 13 bp, Artificial Sequence
  Oligonucleotide for detection of SNP TSC0027312
ttatacggaaggt

SEQ ID NO: 109116 - DNA, 13 bp, Artificial Sequence
  Oligonucleotide for detection of SNP TSC0027312
accttccgtataa

SEQ ID NO: 109117 - DNA, 13 bp, Artificial Sequence
  Oligonucleotide for detection of SNP TSC0027312
attttttgtgtag

SEQ ID NO: 109118 - DNA, 13 bp, Artificial Sequence
  Oligonucleotide for detection of SNP TSC0027312
ctacacaaaaaat

SEQ ID NO: 109119 - DNA, 13 bp, Artificial Sequence
  Oligonucleotide for detection of SNP TSC0027312
atttttcgtgtag

SEQ ID NO: 109120 - DNA, 13 bp, Artificial Sequence
  Oligonucleotide for detection of SNP TSC0027312
ctacacgaaaaat

SEQ ID NO: 109121 - DNA, 13 bp, Artificial Sequence
  Oligonucleotide for detection of SNP TSC0027313
ataggtataattg

SEQ ID NO: 109122 - DNA, 13 bp, Artificial Sequence
  Oligonucleotide for detection of SNP TSC0027313
caattatacctat

SEQ ID NO: 109123 - DNA, 13 bp, Artificial Sequence
  Oligonucleotide for detection of SNP TSC0027313
ataggtttaattg

SEQ ID NO: 109124 - DNA, 13 bp, Artificial Sequence
  Oligonucleotide for detection of SNP TSC0027313
caattaaacctat

SEQ ID NO: 109125 - DNA, 13 bp, Artificial Sequence
  Oligonucleotide for detection of SNP TSC0027313
tagttatatttgt

SEQ ID NO: 109126 - DNA, 13 bp, Artificial Sequence
  Oligonucleotide for detection of SNP TSC0027313
acaaatataacta

SEQ ID NO: 109127 - DNA, 13 bp, Artificial Sequence
  Oligonucleotide for detection of SNP TSC0027313
tagttaaatttgt

SEQ ID NO: 109128 - DNA, 13 bp, Artificial Sequence
  Oligonucleotide for detection of SNP TSC0027313
acaaatttaacta

SEQ ID NO: 109129 - DNA, 13 bp, Artificial Sequence
  Oligonucleotide for detection of SNP TSC0027314
aattatttgttgg

SEQ ID NO: 109130 - DNA, 13 bp, Artificial Sequence
  Oligonucleotide for detection of SNP TSC0027314
ccaacaaataatt

SEQ ID NO: 109131 - DNA, 13 bp, Artificial Sequence
  Oligonucleotide for detection of SNP TSC0027314
aattatgtgttgg

SEQ ID NO: 109132 - DNA, 13 bp, Artificial Sequence
  Oligonucleotide for detection of SNP TSC0027314
ccaacacataatt

SEQ ID NO: 109133 - DNA, 13 bp, Artificial Sequence
  Oligonucleotide for detection of SNP TSC0027314
aattacgtgttgg

SEQ ID NO: 109134 - DNA, 13 bp, Artificial Sequence
  Oligonucleotide for detection of SNP TSC0027314
ccaacacgtaatt

SEQ ID NO: 109135 - DNA, 13 bp, Artificial Sequence
  Oligonucleotide for detection of SNP TSC0027314
ttagtaggtgatt

SEQ ID NO: 109136 - DNA, 13 bp, Artificial Sequence
  Oligonucleotide for detection of SNP TSC0027314
aatcacctactaa

SEQ ID NO: 109137 - DNA, 13 bp, Artificial Sequence
  Oligonucleotide for detection of SNP TSC0027314
ttagtatgtgatt

SEQ ID NO: 109138 - DNA, 13 bp, Artificial Sequence
  Oligonucleotide for detection of SNP TSC0027314
aatcacatactaa

SEQ ID NO: 109139 - DNA, 13 bp, Artificial Sequence
  Oligonucleotide for detection of SNP TSC0027314
ttagtacgtgatt

SEQ ID NO: 109140 - DNA, 13 bp, Artificial Sequence
  Oligonucleotide for detection of SNP TSC0027314
aatcacgtactaa

SEQ ID NO: 109141 - DNA, 13 bp, Artificial Sequence
  Oligonucleotide for detection of SNP TSC0027315
ttagttattgtty

SEQ ID NO: 109142 - DNA, 13 bp, Artificial Sequence
  Oligonucleotide for detection of SNP TSC0027315
raacaataactaa

SEQ ID NO: 109143 - DNA, 13 bp, Artificial Sequence
  Oligonucleotide for detection of SNP TSC0027315
ttagttgttgtty

SEQ ID NO: 109144 - DNA, 13 bp, Artificial Sequence
  Oligonucleotide for detection of SNP TSC0027315
raacaacaactaa

SEQ ID NO: 109145 - DNA, 13 bp, Artificial Sequence
  Oligonucleotide for detection of SNP TSC0027315
ttagtcgttgtty

SEQ ID NO: 109146 - DNA, 13 bp, Artificial Sequence
  Oligonucleotide for detection of SNP TSC0027315
raacaacgactaa

SEQ ID NO: 109147 - DNA, 13 bp, Artificial Sequence
  Oligonucleotide for detection of SNP TSC0027315
gggtagtggttgg

SEQ ID NO: 109148 - DNA, 13 bp, Artificial Sequence
  Oligonucleotide for detection of SNP TSC0027315
ccaaccactaccc

SEQ ID NO: 109149 - DNA, 13 bp, Artificial Sequence
  Oligonucleotide for detection of SNP TSC0027315
gggtagcggttgg

SEQ ID NO: 109150 - DNA, 13 bp, Artificial Sequence
  Oligonucleotide for detection of SNP TSC0027315
ccaaccgctaccc

SEQ ID NO: 109151 - DNA, 13 bp, Artificial Sequence
  Oligonucleotide for detection of SNP TSC0027316
agtagtatttatt

SEQ ID NO: 109152 - DNA, 13 bp, Artificial Sequence
  Oligonucleotide for detection of SNP TSC0027316
aataaatactact

SEQ ID NO: 109153 - DNA, 13 bp, Artificial Sequence
  Oligonucleotide for detection of SNP TSC0027316
agtagtgtttatt

SEQ ID NO: 109154 - DNA, 13 bp, Artificial Sequence
  Oligonucleotide for detection of SNP TSC0027316
aataaacactact

SEQ ID NO: 109155 - DNA, 13 bp, Artificial Sequence
  Oligonucleotide for detection of SNP TSC0027316
agtagcgtttatt

SEQ ID NO: 109156 - DNA, 13 bp, Artificial Sequence
  Oligonucleotide for detection of SNP TSC0027316
aataaacgctact

SEQ ID NO: 109157 - DNA, 13 bp, Artificial Sequence
  Oligonucleotide for detection of SNP TSC0027316
agtgggtgttgtt

SEQ ID NO: 109158 - DNA, 13 bp, Artificial Sequence
  Oligonucleotide for detection of SNP TSC0027316
aacaacacccact

SEQ ID NO: 109159 - DNA, 13 bp, Artificial Sequence
  Oligonucleotide for detection of SNP TSC0027316
agtgggcgttgtt

SEQ ID NO: 109160 - DNA, 13 bp, Artificial Sequence
  Oligonucleotide for detection of SNP TSC0027316
aacaacgcccact

SEQ ID NO: 109161 - DNA, 13 bp, Artificial Sequence
  Oligonucleotide for detection of SNP TSC0027317
tgagaaataaaat

SEQ ID NO: 109162 - DNA, 13 bp, Artificial Sequence
  Oligonucleotide for detection of SNP TSC0027317
attttatttctca

SEQ ID NO: 109163 - DNA, 13 bp, Artificial Sequence
  Oligonucleotide for detection of SNP TSC0027317
tgagaattaaaat

SEQ ID NO: 109164 - DNA, 13 bp, Artificial Sequence
  Oligonucleotide for detection of SNP TSC0027317
attttaattctca

SEQ ID NO: 109165 - DNA, 13 bp, Artificial Sequence
  Oligonucleotide for detection of SNP TSC0027317
attttatttttta

SEQ ID NO: 109166 - DNA, 13 bp, Artificial Sequence
  Oligonucleotide for detection of SNP TSC0027317
taaaaaataaaat

SEQ ID NO: 109167 - DNA, 13 bp, Artificial Sequence
  Oligonucleotide for detection of SNP TSC0027318
tttaataggatgt

SEQ ID NO: 109168 - DNA, 13 bp, Artificial Sequence
  Oligonucleotide for detection of SNP TSC0027318
acatcctattaaa

SEQ ID NO: 109169 - DNA, 13 bp, Artificial Sequence
  Oligonucleotide for detection of SNP TSC0027318
tttaatgggatgt

SEQ ID NO: 109170 - DNA, 13 bp, Artificial Sequence
  Oligonucleotide for detection of SNP TSC0027318
acatcccattaaa

SEQ ID NO: 109171 - DNA, 13 bp, Artificial Sequence
  Oligonucleotide for detection of SNP TSC0027318
tttaataggacgt

SEQ ID NO: 109172 - DNA, 13 bp, Artificial Sequence
  Oligonucleotide for detection of SNP TSC0027318
acgtcctattaaa

SEQ ID NO: 109173 - DNA, 13 bp, Artificial Sequence
  Oligonucleotide for detection of SNP TSC0027318
tttaatgggacgt

SEQ ID NO: 109174 - DNA, 13 bp, Artificial Sequence
  Oligonucleotide for detection of SNP TSC0027318
acgtcccattaaa

SEQ ID NO: 109175 - DNA, 13 bp, Artificial Sequence
  Oligonucleotide for detection of SNP TSC0027321
taatatattggta

SEQ ID NO: 109176 - DNA, 13 bp, Artificial Sequence
  Oligonucleotide for detection of SNP TSC0027321
taccaatatatta

SEQ ID NO: 109177 - DNA, 13 bp, Artificial Sequence
  Oligonucleotide for detection of SNP TSC0027321
taatatgttggta

SEQ ID NO: 109178 - DNA, 13 bp, Artificial Sequence
  Oligonucleotide for detection of SNP TSC0027321
taccaacatatta

SEQ ID NO: 109179 - DNA, 13 bp, Artificial Sequence
  Oligonucleotide for detection of SNP TSC0027321
taatacgttggta

SEQ ID NO: 109180 - DNA, 13 bp, Artificial Sequence
  Oligonucleotide for detection of SNP TSC0027321
taccaacgtatta

SEQ ID NO: 109181 - DNA, 13 bp, Artificial Sequence
  Oligonucleotide for detection of SNP TSC0027321
tattagtgtatta

SEQ ID NO: 109182 - DNA, 13 bp, Artificial Sequence
  Oligonucleotide for detection of SNP TSC0027321
taatacactaata

SEQ ID NO: 109183 - DNA, 13 bp, Artificial Sequence
  Oligonucleotide for detection of SNP TSC0027321
tattagcgtatta

SEQ ID NO: 109184 - DNA, 13 bp, Artificial Sequence
  Oligonucleotide for detection of SNP TSC0027321
taatacgctaata

SEQ ID NO: 109185 - DNA, 13 bp, Artificial Sequence
  Oligonucleotide for detection of SNP TSC0027322
gggatgagttagg

SEQ ID NO: 109186 - DNA, 13 bp, Artificial Sequence
  Oligonucleotide for detection of SNP TSC0027322
cctaactcatccc

SEQ ID NO: 109187 - DNA, 13 bp, Artificial Sequence
  Oligonucleotide for detection of SNP TSC0027322
gggatgggttagg

SEQ ID NO: 109188 - DNA, 13 bp, Artificial Sequence
  Oligonucleotide for detection of SNP TSC0027322
cctaacccatccc

SEQ ID NO: 109189 - DNA, 13 bp, Artificial Sequence
  Oligonucleotide for detection of SNP TSC0027324
tttatttgatagy

SEQ ID NO: 109190 - DNA, 13 bp, Artificial Sequence
  Oligonucleotide for detection of SNP TSC0027324
rctatcaaataaa

SEQ ID NO: 109191 - DNA, 13 bp, Artificial Sequence
  Oligonucleotide for detection of SNP TSC0027324
tttattcgatagy

SEQ ID NO: 109192 - DNA, 13 bp, Artificial Sequence
  Oligonucleotide for detection of SNP TSC0027324
rctatcgaataaa

SEQ ID NO: 109193 - DNA, 13 bp, Artificial Sequence
  Oligonucleotide for detection of SNP TSC0027324
gttgttgggtagg

SEQ ID NO: 109194 - DNA, 13 bp, Artificial Sequence
  Oligonucleotide for detection of SNP TSC0027324
cctacccaacaac

SEQ ID NO: 109195 - DNA, 13 bp, Artificial Sequence
  Oligonucleotide for detection of SNP TSC0027324
gttgttaggtagg

SEQ ID NO: 109196 - DNA, 13 bp, Artificial Sequence
  Oligonucleotide for detection of SNP TSC0027324
cctacctaacaac

SEQ ID NO: 109197 - DNA, 13 bp, Artificial Sequence
  Oligonucleotide for detection of SNP TSC0027324
gttgtcgggtagg

SEQ ID NO: 109198 - DNA, 13 bp, Artificial Sequence
  Oligonucleotide for detection of SNP TSC0027324
cctacccgacaac

SEQ ID NO: 109199 - DNA, 13 bp, Artificial Sequence
  Oligonucleotide for detection of SNP TSC0027326
ggagttttttttt

SEQ ID NO: 109200 - DNA, 13 bp, Artificial Sequence
  Oligonucleotide for detection of SNP TSC0027326
aaaaaaaaactcc

SEQ ID NO: 109201 - DNA, 13 bp, Artificial Sequence
  Oligonucleotide for detection of SNP TSC0027326
ggagttgtttttt

SEQ ID NO: 109202 - DNA, 13 bp, Artificial Sequence
  Oligonucleotide for detection of SNP TSC0027326
aaaaaacaactcc

SEQ ID NO: 109203 - DNA, 13 bp, Artificial Sequence
  Oligonucleotide for detection of SNP TSC0027326
ggagtcgtttttt

SEQ ID NO: 109204 - DNA, 13 bp, Artificial Sequence
  Oligonucleotide for detection of SNP TSC0027326
aaaaaacgactcc

SEQ ID NO: 109205 - DNA, 13 bp, Artificial Sequence
  Oligonucleotide for detection of SNP TSC0027326
agaagagggttty

SEQ ID NO: 109206 - DNA, 13 bp, Artificial Sequence
  Oligonucleotide for detection of SNP TSC0027326
raaaccctcttct

SEQ ID NO: 109207 - DNA, 13 bp, Artificial Sequence
  Oligonucleotide for detection of SNP TSC0027326
agaagatggttty

SEQ ID NO: 109208 - DNA, 13 bp, Artificial Sequence
  Oligonucleotide for detection of SNP TSC0027326
raaaccatcttct

SEQ ID NO: 109209 - DNA, 13 bp, Artificial Sequence
  Oligonucleotide for detection of SNP TSC0027326
agaagacggttty

SEQ ID NO: 109210 - DNA, 13 bp, Artificial Sequence
  Oligonucleotide for detection of SNP TSC0027326
raaaccgtcttct

SEQ ID NO: 109211 - DNA, 13 bp, Artificial Sequence
  Oligonucleotide for detection of SNP TSC0027328
attataaattgtt

SEQ ID NO: 109212 - DNA, 13 bp, Artificial Sequence
  Oligonucleotide for detection of SNP TSC0027328
aacaatttataat

SEQ ID NO: 109213 - DNA, 13 bp, Artificial Sequence
  Oligonucleotide for detection of SNP TSC0027328
attatagattgtt

SEQ ID NO: 109214 - DNA, 13 bp, Artificial Sequence
  Oligonucleotide for detection of SNP TSC0027328
aacaatctataat

SEQ ID NO: 109215 - DNA, 13 bp, Artificial Sequence
  Oligonucleotide for detection of SNP TSC0027329
ggggggatgaggt

SEQ ID NO: 109216 - DNA, 13 bp, Artificial Sequence
  Oligonucleotide for detection of SNP TSC0027329
acctcatcccccc

SEQ ID NO: 109217 - DNA, 13 bp, Artificial Sequence
  Oligonucleotide for detection of SNP TSC0027329
ggggggttgaggt

SEQ ID NO: 109218 - DNA, 13 bp, Artificial Sequence
  Oligonucleotide for detection of SNP TSC0027329
acctcaacccccc

SEQ ID NO: 109219 - DNA, 13 bp, Artificial Sequence
  Oligonucleotide for detection of SNP TSC0027329
attttatttttty

SEQ ID NO: 109220 - DNA, 13 bp, Artificial Sequence
  Oligonucleotide for detection of SNP TSC0027329
raaaaaataaaat

SEQ ID NO: 109221 - DNA, 13 bp, Artificial Sequence
  Oligonucleotide for detection of SNP TSC0027330
ttgtatgggggty

SEQ ID NO: 109222 - DNA, 13 bp, Artificial Sequence
  Oligonucleotide for detection of SNP TSC0027330
racccccatacaa

SEQ ID NO: 109223 - DNA, 13 bp, Artificial Sequence
  Oligonucleotide for detection of SNP TSC0027330
ttgtataggggty

SEQ ID NO: 109224 - DNA, 13 bp, Artificial Sequence
  Oligonucleotide for detection of SNP TSC0027330
racccctatacaa

SEQ ID NO: 109225 - DNA, 13 bp, Artificial Sequence
  Oligonucleotide for detection of SNP TSC0027330
ttgtacgggggty

SEQ ID NO: 109226 - DNA, 13 bp, Artificial Sequence
  Oligonucleotide for detection of SNP TSC0027330
racccccgtacaa

SEQ ID NO: 109227 - DNA, 13 bp, Artificial Sequence
  Oligonucleotide for detection of SNP TSC0027331
agaatagtatggg

SEQ ID NO: 109228 - DNA, 13 bp, Artificial Sequence
  Oligonucleotide for detection of SNP TSC0027331
cccatactattct

SEQ ID NO: 109229 - DNA, 13 bp, Artificial Sequence
  Oligonucleotide for detection of SNP TSC0027331
agaataatatggg

SEQ ID NO: 109230 - DNA, 13 bp, Artificial Sequence
  Oligonucleotide for detection of SNP TSC0027331
cccatattattct

SEQ ID NO: 109231 - DNA, 13 bp, Artificial Sequence
  Oligonucleotide for detection of SNP TSC0027332
ggttttatgatta

SEQ ID NO: 109232 - DNA, 13 bp, Artificial Sequence
  Oligonucleotide for detection of SNP TSC0027332
taatcataaaacc

SEQ ID NO: 109233 - DNA, 13 bp, Artificial Sequence
  Oligonucleotide for detection of SNP TSC0027332
ggttttgtgatta

SEQ ID NO: 109234 - DNA, 13 bp, Artificial Sequence
  Oligonucleotide for detection of SNP TSC0027332
taatcacaaaacc

SEQ ID NO: 109235 - DNA, 13 bp, Artificial Sequence
  Oligonucleotide for detection of SNP TSC0027332
ggtttcgtgatta

SEQ ID NO: 109236 - DNA, 13 bp, Artificial Sequence
  Oligonucleotide for detection of SNP TSC0027332
taatcacgaaacc

SEQ ID NO: 109237 - DNA, 13 bp, Artificial Sequence
  Oligonucleotide for detection of SNP TSC0027332
tgattatggggty

SEQ ID NO: 109238 - DNA, 13 bp, Artificial Sequence
  Oligonucleotide for detection of SNP TSC0027332
raccccataatca

SEQ ID NO: 109239 - DNA, 13 bp, Artificial Sequence
  Oligonucleotide for detection of SNP TSC0027332
tgattacggggty

SEQ ID NO: 109240 - DNA, 13 bp, Artificial Sequence
  Oligonucleotide for detection of SNP TSC0027332
raccccgtaatca

SEQ ID NO: 109241 - DNA, 13 bp, Artificial Sequence
  Oligonucleotide for detection of SNP TSC0027333
tatgatatatgtg

SEQ ID NO: 109242 - DNA, 13 bp, Artificial Sequence
  Oligonucleotide for detection of SNP TSC0027333
cacatatatcata

SEQ ID NO: 109243 - DNA, 13 bp, Artificial Sequence
  Oligonucleotide for detection of SNP TSC0027333
tatgatgtatgtg

SEQ ID NO: 109244 - DNA, 13 bp, Artificial Sequence
  Oligonucleotide for detection of SNP TSC0027333
cacatacatcata

SEQ ID NO: 109245 - DNA, 13 bp, Artificial Sequence
  Oligonucleotide for detection of SNP TSC0027333
tatgacgtatgtg

SEQ ID NO: 109246 - DNA, 13 bp, Artificial Sequence
  Oligonucleotide for detection of SNP TSC0027333
cacatacgtcata

SEQ ID NO: 109247 - DNA, 13 bp, Artificial Sequence
  Oligonucleotide for detection of SNP TSC0027333
tatatatgttata

SEQ ID NO: 109248 - DNA, 13 bp, Artificial Sequence
  Oligonucleotide for detection of SNP TSC0027333
tataacatatata

SEQ ID NO: 109249 - DNA, 13 bp, Artificial Sequence
  Oligonucleotide for detection of SNP TSC0027333
tatatacgttata

SEQ ID NO: 109250 - DNA, 13 bp, Artificial Sequence
  Oligonucleotide for detection of SNP TSC0027333
tataacgtatata

SEQ ID NO: 109251 - DNA, 13 bp, Artificial Sequence
  Oligonucleotide for detection of SNP TSC0027334
tattagggggtty

SEQ ID NO: 109252 - DNA, 13 bp, Artificial Sequence
  Oligonucleotide for detection of SNP TSC0027334
raaccccctaata

SEQ ID NO: 109253 - DNA, 13 bp, Artificial Sequence
  Oligonucleotide for detection of SNP TSC0027334
tattagagggtty

SEQ ID NO: 109254 - DNA, 13 bp, Artificial Sequence
  Oligonucleotide for detection of SNP TSC0027334
raaccctctaata

SEQ ID NO: 109255 - DNA, 13 bp, Artificial Sequence
  Oligonucleotide for detection of SNP TSC0027335
ttttagatatttg

SEQ ID NO: 109256 - DNA, 13 bp, Artificial Sequence
  Oligonucleotide for detection of SNP TSC0027335
caaatatctaaaa

SEQ ID NO: 109257 - DNA, 13 bp, Artificial Sequence
  Oligonucleotide for detection of SNP TSC0027335
ttttagttatttg

SEQ ID NO: 109258 - DNA, 13 bp, Artificial Sequence
  Oligonucleotide for detection of SNP TSC0027335
caaataactaaaa

SEQ ID NO: 109259 - DNA, 13 bp, Artificial Sequence
  Oligonucleotide for detection of SNP TSC0027335
ttttagatattcg

SEQ ID NO: 109260 - DNA, 13 bp, Artificial Sequence
  Oligonucleotide for detection of SNP TSC0027335
cgaatatctaaaa

SEQ ID NO: 109261 - DNA, 13 bp, Artificial Sequence
  Oligonucleotide for detection of SNP TSC0027335
ttttagttattcg

SEQ ID NO: 109262 - DNA, 13 bp, Artificial Sequence
  Oligonucleotide for detection of SNP TSC0027335
cgaataactaaaa

SEQ ID NO: 109263 - DNA, 13 bp, Artificial Sequence
  Oligonucleotide for detection of SNP TSC0027335
tgaatatttggaa

SEQ ID NO: 109264 - DNA, 13 bp, Artificial Sequence
  Oligonucleotide for detection of SNP TSC0027335
ttccaaatattca

SEQ ID NO: 109265 - DNA, 13 bp, Artificial Sequence
  Oligonucleotide for detection of SNP TSC0027335
tgaatagttggaa

SEQ ID NO: 109266 - DNA, 13 bp, Artificial Sequence
  Oligonucleotide for detection of SNP TSC0027335
ttccaactattca

SEQ ID NO: 109267 - DNA, 13 bp, Artificial Sequence
  Oligonucleotide for detection of SNP TSC0027335
cgaatatttggaa

SEQ ID NO: 109268 - DNA, 13 bp, Artificial Sequence
  Oligonucleotide for detection of SNP TSC0027335
ttccaaatattcg

SEQ ID NO: 109269 - DNA, 13 bp, Artificial Sequence
  Oligonucleotide for detection of SNP TSC0027335
cgaatagttggaa

SEQ ID NO: 109270 - DNA, 13 bp, Artificial Sequence
  Oligonucleotide for detection of SNP TSC0027335
ttccaactattcg

SEQ ID NO: 109271 - DNA, 13 bp, Artificial Sequence
  Oligonucleotide for detection of SNP TSC0027336
agtgttataagga

SEQ ID NO: 109272 - DNA, 13 bp, Artificial Sequence
  Oligonucleotide for detection of SNP TSC0027336
tccttataacact

SEQ ID NO: 109273 - DNA, 13 bp, Artificial Sequence
  Oligonucleotide for detection of SNP TSC0027336
agtgttttaagga

SEQ ID NO: 109274 - DNA, 13 bp, Artificial Sequence
  Oligonucleotide for detection of SNP TSC0027336
tccttaaaacact

SEQ ID NO: 109275 - DNA, 13 bp, Artificial Sequence
  Oligonucleotide for detection of SNP TSC0027336
tttttgtgatatt

SEQ ID NO: 109276 - DNA, 13 bp, Artificial Sequence
  Oligonucleotide for detection of SNP TSC0027336
aatatcacaaaaa

SEQ ID NO: 109277 - DNA, 13 bp, Artificial Sequence
  Oligonucleotide for detection of SNP TSC0027336
tttttgagatatt

SEQ ID NO: 109278 - DNA, 13 bp, Artificial Sequence
  Oligonucleotide for detection of SNP TSC0027336
aatatctcaaaaa

SEQ ID NO: 109279 - DNA, 13 bp, Artificial Sequence
  Oligonucleotide for detection of SNP TSC0027337
gttaatagaggty

SEQ ID NO: 109280 - DNA, 13 bp, Artificial Sequence
  Oligonucleotide for detection of SNP TSC0027337
racctctattaac

SEQ ID NO: 109281 - DNA, 13 bp, Artificial Sequence
  Oligonucleotide for detection of SNP TSC0027337
gttaatggaggty

SEQ ID NO: 109282 - DNA, 13 bp, Artificial Sequence
  Oligonucleotide for detection of SNP TSC0027337
racctccattaac

SEQ ID NO: 109283 - DNA, 13 bp, Artificial Sequence
  Oligonucleotide for detection of SNP TSC0027337
gttaacggaggty

SEQ ID NO: 109284 - DNA, 13 bp, Artificial Sequence
  Oligonucleotide for detection of SNP TSC0027337
racctccgttaac

SEQ ID NO: 109285 - DNA, 13 bp, Artificial Sequence
  Oligonucleotide for detection of SNP TSC0027337
gatttttgttggy

SEQ ID NO: 109286 - DNA, 13 bp, Artificial Sequence
  Oligonucleotide for detection of SNP TSC0027337
rccaacaaaaatc

SEQ ID NO: 109287 - DNA, 13 bp, Artificial Sequence
  Oligonucleotide for detection of SNP TSC0027337
gattttcgttggy

SEQ ID NO: 109288 - DNA, 13 bp, Artificial Sequence
  Oligonucleotide for detection of SNP TSC0027337
rccaacgaaaatc

SEQ ID NO: 109289 - DNA, 13 bp, Artificial Sequence
  Oligonucleotide for detection of SNP TSC0027338
aaattagtgtaga

SEQ ID NO: 109290 - DNA, 13 bp, Artificial Sequence
  Oligonucleotide for detection of SNP TSC0027338
tctacactaattt

SEQ ID NO: 109291 - DNA, 13 bp, Artificial Sequence
  Oligonucleotide for detection of SNP TSC0027338
aaattaatgtaga

SEQ ID NO: 109292 - DNA, 13 bp, Artificial Sequence
  Oligonucleotide for detection of SNP TSC0027338
tctacattaattt

SEQ ID NO: 109293 - DNA, 13 bp, Artificial Sequence
  Oligonucleotide for detection of SNP TSC0027346
ataagatggttta

SEQ ID NO: 109294 - DNA, 13 bp, Artificial Sequence
  Oligonucleotide for detection of SNP TSC0027346
taaaccatcttat

SEQ ID NO: 109295 - DNA, 13 bp, Artificial Sequence
  Oligonucleotide for detection of SNP TSC0027346
ataagacggttta

SEQ ID NO: 109296 - DNA, 13 bp, Artificial Sequence
  Oligonucleotide for detection of SNP TSC0027346
taaaccgtcttat

SEQ ID NO: 109297 - DNA, 13 bp, Artificial Sequence
  Oligonucleotide for detection of SNP TSC0027346
tgagtcgttttat

SEQ ID NO: 109298 - DNA, 13 bp, Artificial Sequence
  Oligonucleotide for detection of SNP TSC0027346
ataaaacgactca

SEQ ID NO: 109299 - DNA, 13 bp, Artificial Sequence
  Oligonucleotide for detection of SNP TSC0027348
gaatgaatgtgcg

SEQ ID NO: 109300 - DNA, 13 bp, Artificial Sequence
  Oligonucleotide for detection of SNP TSC0027348
cgcacattcattc

SEQ ID NO: 109301 - DNA, 13 bp, Artificial Sequence
  Oligonucleotide for detection of SNP TSC0027348
gaatgagtgtgcg

SEQ ID NO: 109302 - DNA, 13 bp, Artificial Sequence
  Oligonucleotide for detection of SNP TSC0027348
cgcacactcattc

SEQ ID NO: 109303 - DNA, 13 bp, Artificial Sequence
  Oligonucleotide for detection of SNP TSC0027350
taatttaagaagy

SEQ ID NO: 109304 - DNA, 13 bp, Artificial Sequence
  Oligonucleotide for detection of SNP TSC0027350
rcttcttaaatta

SEQ ID NO: 109305 - DNA, 13 bp, Artificial Sequence
  Oligonucleotide for detection of SNP TSC0027350
taattttagaagy

SEQ ID NO: 109306 - DNA, 13 bp, Artificial Sequence
  Oligonucleotide for detection of SNP TSC0027350
rcttctaaaatta

SEQ ID NO: 109307 - DNA, 13 bp, Artificial Sequence
  Oligonucleotide for detection of SNP TSC0027350
gttttttgaatta

SEQ ID NO: 109308 - DNA, 13 bp, Artificial Sequence
  Oligonucleotide for detection of SNP TSC0027350
taattcaaaaaac

SEQ ID NO: 109309 - DNA, 13 bp, Artificial Sequence
  Oligonucleotide for detection of SNP TSC0027350
gtttttggaatta

SEQ ID NO: 109310 - DNA, 13 bp, Artificial Sequence
  Oligonucleotide for detection of SNP TSC0027350
taattccaaaaac

SEQ ID NO: 109311 - DNA, 13 bp, Artificial Sequence
  Oligonucleotide for detection of SNP TSC0027351
tgtgtagtattat

SEQ ID NO: 109312 - DNA, 13 bp, Artificial Sequence
  Oligonucleotide for detection of SNP TSC0027351
ataatactacaca

SEQ ID NO: 109313 - DNA, 13 bp, Artificial Sequence
  Oligonucleotide for detection of SNP TSC0027351
ataatattatata

SEQ ID NO: 109314 - DNA, 13 bp, Artificial Sequence
  Oligonucleotide for detection of SNP TSC0027351
tatataatattat

SEQ ID NO: 109315 - DNA, 13 bp, Artificial Sequence
  Oligonucleotide for detection of SNP TSC0027351
ataataatatata

SEQ ID NO: 109316 - DNA, 13 bp, Artificial Sequence
  Oligonucleotide for detection of SNP TSC0027351
tatatattattat

SEQ ID NO: 109317 - DNA, 13 bp, Artificial Sequence
  Oligonucleotide for detection of SNP TSC0027352
taaagaattgttg

SEQ ID NO: 109318 - DNA, 13 bp, Artificial Sequence
  Oligonucleotide for detection of SNP TSC0027352
caacaattcttta

SEQ ID NO: 109319 - DNA, 13 bp, Artificial Sequence
  Oligonucleotide for detection of SNP TSC0027352
taaagagttgttg

SEQ ID NO: 109320 - DNA, 13 bp, Artificial Sequence
  Oligonucleotide for detection of SNP TSC0027352
caacaactcttta

SEQ ID NO: 109321 - DNA, 13 bp, Artificial Sequence
  Oligonucleotide for detection of SNP TSC0027352
taaagaattgtcg

SEQ ID NO: 109322 - DNA, 13 bp, Artificial Sequence
  Oligonucleotide for detection of SNP TSC0027352
cgacaattcttta

SEQ ID NO: 109323 - DNA, 13 bp, Artificial Sequence
  Oligonucleotide for detection of SNP TSC0027352
taaagagttgtcg

SEQ ID NO: 109324 - DNA, 13 bp, Artificial Sequence
  Oligonucleotide for detection of SNP TSC0027352
cgacaactcttta

SEQ ID NO: 109325 - DNA, 13 bp, Artificial Sequence
  Oligonucleotide for detection of SNP TSC0027354
ttatagggagtgy

SEQ ID NO: 109326 - DNA, 13 bp, Artificial Sequence
  Oligonucleotide for detection of SNP TSC0027354
rcactccctataa

SEQ ID NO: 109327 - DNA, 13 bp, Artificial Sequence
  Oligonucleotide for detection of SNP TSC0027354
ttatagtgagtgy

SEQ ID NO: 109328 - DNA, 13 bp, Artificial Sequence
  Oligonucleotide for detection of SNP TSC0027354
rcactcactataa

SEQ ID NO: 109329 - DNA, 13 bp, Artificial Sequence
  Oligonucleotide for detection of SNP TSC0027354
gtattttttgtgg

SEQ ID NO: 109330 - DNA, 13 bp, Artificial Sequence
  Oligonucleotide for detection of SNP TSC0027354
ccacaaaaaatac

SEQ ID NO: 109331 - DNA, 13 bp, Artificial Sequence
  Oligonucleotide for detection of SNP TSC0027354
gtatttattgtgg

SEQ ID NO: 109332 - DNA, 13 bp, Artificial Sequence
  Oligonucleotide for detection of SNP TSC0027354
ccacaataaatac

SEQ ID NO: 109333 - DNA, 13 bp, Artificial Sequence
  Oligonucleotide for detection of SNP TSC0027355
gtgtttaggatat

SEQ ID NO: 109334 - DNA, 13 bp, Artificial Sequence
  Oligonucleotide for detection of SNP TSC0027355
atatcctaaacac

SEQ ID NO: 109335 - DNA, 13 bp, Artificial Sequence
  Oligonucleotide for detection of SNP TSC0027355
gtgtttgggatat

SEQ ID NO: 109336 - DNA, 13 bp, Artificial Sequence
  Oligonucleotide for detection of SNP TSC0027355
atatcccaaacac

SEQ ID NO: 109337 - DNA, 13 bp, Artificial Sequence
  Oligonucleotide for detection of SNP TSC0027356
ggatatttggatg

SEQ ID NO: 109338 - DNA, 13 bp, Artificial Sequence
  Oligonucleotide for detection of SNP TSC0027356
catccaaatatcc

SEQ ID NO: 109339 - DNA, 13 bp, Artificial Sequence
  Oligonucleotide for detection of SNP TSC0027356
ggatatgtggatg

SEQ ID NO: 109340 - DNA, 13 bp, Artificial Sequence
  Oligonucleotide for detection of SNP TSC0027356
catccacatatcc

SEQ ID NO: 109341 - DNA, 13 bp, Artificial Sequence
  Oligonucleotide for detection of SNP TSC0027356
tatttagatgtty

SEQ ID NO: 109342 - DNA, 13 bp, Artificial Sequence
  Oligonucleotide for detection of SNP TSC0027356
raacatctaaata

SEQ ID NO: 109343 - DNA, 13 bp, Artificial Sequence
  Oligonucleotide for detection of SNP TSC0027356
tatttatatgtty

SEQ ID NO: 109344 - DNA, 13 bp, Artificial Sequence
  Oligonucleotide for detection of SNP TSC0027356
raacatataaata

SEQ ID NO: 109345 - DNA, 13 bp, Artificial Sequence
  Oligonucleotide for detection of SNP TSC0027358
ttaattttgataa

SEQ ID NO: 109346 - DNA, 13 bp, Artificial Sequence
  Oligonucleotide for detection of SNP TSC0027358
ttatcaaaattaa

SEQ ID NO: 109347 - DNA, 13 bp, Artificial Sequence
  Oligonucleotide for detection of SNP TSC0027358
ttaattgtgataa

SEQ ID NO: 109348 - DNA, 13 bp, Artificial Sequence
  Oligonucleotide for detection of SNP TSC0027358
ttatcacaattaa

SEQ ID NO: 109349 - DNA, 13 bp, Artificial Sequence
  Oligonucleotide for detection of SNP TSC0027358
ttaatcgtgataa

SEQ ID NO: 109350 - DNA, 13 bp, Artificial Sequence
  Oligonucleotide for detection of SNP TSC0027358
ttatcacgattaa

SEQ ID NO: 109351 - DNA, 13 bp, Artificial Sequence
  Oligonucleotide for detection of SNP TSC0027358
ttgttaggattaa

SEQ ID NO: 109352 - DNA, 13 bp, Artificial Sequence
  Oligonucleotide for detection of SNP TSC0027358
ttaatcctaacaa

SEQ ID NO: 109353 - DNA, 13 bp, Artificial Sequence
  Oligonucleotide for detection of SNP TSC0027358
ttgttatgattaa

SEQ ID NO: 109354 - DNA, 13 bp, Artificial Sequence
  Oligonucleotide for detection of SNP TSC0027358
ttaatcataacaa

SEQ ID NO: 109355 - DNA, 13 bp, Artificial Sequence
  Oligonucleotide for detection of SNP TSC0027358
ttgttacgattaa

SEQ ID NO: 109356 - DNA, 13 bp, Artificial Sequence
  Oligonucleotide for detection of SNP TSC0027358
ttaatcgtaacaa

SEQ ID NO: 109357 - DNA, 13 bp, Artificial Sequence
  Oligonucleotide for detection of SNP TSC0027359
ttttagtttttta

SEQ ID NO: 109358 - DNA, 13 bp, Artificial Sequence
  Oligonucleotide for detection of SNP TSC0027359
taaaaaactaaaa

SEQ ID NO: 109359 - DNA, 13 bp, Artificial Sequence
  Oligonucleotide for detection of SNP TSC0027359
tagaaatttgaag

SEQ ID NO: 109360 - DNA, 13 bp, Artificial Sequence
  Oligonucleotide for detection of SNP TSC0027359
cttcaaatttcta

SEQ ID NO: 109361 - DNA, 13 bp, Artificial Sequence
  Oligonucleotide for detection of SNP TSC0027359
tagaaaattgaag

SEQ ID NO: 109362 - DNA, 13 bp, Artificial Sequence
  Oligonucleotide for detection of SNP TSC0027359
cttcaattttcta

SEQ ID NO: 109363 - DNA, 13 bp, Artificial Sequence
  Oligonucleotide for detection of SNP TSC0027360
attatggttttaa

SEQ ID NO: 109364 - DNA, 13 bp, Artificial Sequence
  Oligonucleotide for detection of SNP TSC0027360
ttaaaaccataat

SEQ ID NO: 109365 - DNA, 13 bp, Artificial Sequence
  Oligonucleotide for detection of SNP TSC0027360
ttaagagtatgat

SEQ ID NO: 109366 - DNA, 13 bp, Artificial Sequence
  Oligonucleotide for detection of SNP TSC0027360
atcatactcttaa

SEQ ID NO: 109367 - DNA, 13 bp, Artificial Sequence
  Oligonucleotide for detection of SNP TSC0027360
ttaagattatgat

SEQ ID NO: 109368 - DNA, 13 bp, Artificial Sequence
  Oligonucleotide for detection of SNP TSC0027360
atcataatcttaa

SEQ ID NO: 109369 - DNA, 13 bp, Artificial Sequence
  Oligonucleotide for detection of SNP TSC0027361
tatgtttttaaaa

SEQ ID NO: 109370 - DNA, 13 bp, Artificial Sequence
  Oligonucleotide for detection of SNP TSC0027361
ttttaaaaacata

SEQ ID NO: 109371 - DNA, 13 bp, Artificial Sequence
  Oligonucleotide for detection of SNP TSC0027361
ttttaagagtatg

SEQ ID NO: 109372 - DNA, 13 bp, Artificial Sequence
  Oligonucleotide for detection of SNP TSC0027361
catactcttaaaa

SEQ ID NO: 109373 - DNA, 13 bp, Artificial Sequence
  Oligonucleotide for detection of SNP TSC0027361
ttttaatagtatg

SEQ ID NO: 109374 - DNA, 13 bp, Artificial Sequence
  Oligonucleotide for detection of SNP TSC0027361
catactattaaaa

SEQ ID NO: 109375 - DNA, 13 bp, Artificial Sequence
  Oligonucleotide for detection of SNP TSC0027363
ttatagattttay

SEQ ID NO: 109376 - DNA, 13 bp, Artificial Sequence
  Oligonucleotide for detection of SNP TSC0027363
rtaaaatctataa

SEQ ID NO: 109377 - DNA, 13 bp, Artificial Sequence
  Oligonucleotide for detection of SNP TSC0027363
ttatagtttttay

SEQ ID NO: 109378 - DNA, 13 bp, Artificial Sequence
  Oligonucleotide for detection of SNP TSC0027363
rtaaaaactataa

SEQ ID NO: 109379 - DNA, 13 bp, Artificial Sequence
  Oligonucleotide for detection of SNP TSC0027363
gtaggatttgtgg

SEQ ID NO: 109380 - DNA, 13 bp, Artificial Sequence
  Oligonucleotide for detection of SNP TSC0027363
ccacaaatcctac

SEQ ID NO: 109381 - DNA, 13 bp, Artificial Sequence
  Oligonucleotide for detection of SNP TSC0027363
gtaggagttgtgg

SEQ ID NO: 109382 - DNA, 13 bp, Artificial Sequence
  Oligonucleotide for detection of SNP TSC0027363
ccacaactcctac

SEQ ID NO: 109383 - DNA, 13 bp, Artificial Sequence
  Oligonucleotide for detection of SNP TSC0027364
gattgagtttaga

SEQ ID NO: 109384 - DNA, 13 bp, Artificial Sequence
  Oligonucleotide for detection of SNP TSC0027364
tctaaactcaatc

SEQ ID NO: 109385 - DNA, 13 bp, Artificial Sequence
  Oligonucleotide for detection of SNP TSC0027364
gattgaatttaga

SEQ ID NO: 109386 - DNA, 13 bp, Artificial Sequence
  Oligonucleotide for detection of SNP TSC0027364
tctaaattcaatc

SEQ ID NO: 109387 - DNA, 13 bp, Artificial Sequence
  Oligonucleotide for detection of SNP TSC0027368
ttggtgttattat

SEQ ID NO: 109388 - DNA, 13 bp, Artificial Sequence
  Oligonucleotide for detection of SNP TSC0027368
ataataacaccaa

SEQ ID NO: 109389 - DNA, 13 bp, Artificial Sequence
  Oligonucleotide for detection of SNP TSC0027368
ttggtggtattat

SEQ ID NO: 109390 - DNA, 13 bp, Artificial Sequence
  Oligonucleotide for detection of SNP TSC0027368
ataataccaccaa

SEQ ID NO: 109391 - DNA, 13 bp, Artificial Sequence
  Oligonucleotide for detection of SNP TSC0027369
gtttttatattgy

SEQ ID NO: 109392 - DNA, 13 bp, Artificial Sequence
  Oligonucleotide for detection of SNP TSC0027369
rcaatataaaaac

SEQ ID NO: 109393 - DNA, 13 bp, Artificial Sequence
  Oligonucleotide for detection of SNP TSC0027369
gtttttttattgy

SEQ ID NO: 109394 - DNA, 13 bp, Artificial Sequence
  Oligonucleotide for detection of SNP TSC0027369
rcaataaaaaaac

SEQ ID NO: 109395 - DNA, 13 bp, Artificial Sequence
  Oligonucleotide for detection of SNP TSC0027369
gtaatgtaaggay

SEQ ID NO: 109396 - DNA, 13 bp, Artificial Sequence
  Oligonucleotide for detection of SNP TSC0027369
rtccttacattac

SEQ ID NO: 109397 - DNA, 13 bp, Artificial Sequence
  Oligonucleotide for detection of SNP TSC0027369
gtaatggaaggay

SEQ ID NO: 109398 - DNA, 13 bp, Artificial Sequence
  Oligonucleotide for detection of SNP TSC0027369
rtccttccattac

SEQ ID NO: 109399 - DNA, 13 bp, Artificial Sequence
  Oligonucleotide for detection of SNP TSC0027377
ttaaatataagtt

SEQ ID NO: 109400 - DNA, 13 bp, Artificial Sequence
  Oligonucleotide for detection of SNP TSC0027377
aacttatatttaa

SEQ ID NO: 109401 - DNA, 13 bp, Artificial Sequence
  Oligonucleotide for detection of SNP TSC0027377
ttaaatgtaagtt

SEQ ID NO: 109402 - DNA, 13 bp, Artificial Sequence
  Oligonucleotide for detection of SNP TSC0027377
aacttacatttaa

SEQ ID NO: 109403 - DNA, 13 bp, Artificial Sequence
  Oligonucleotide for detection of SNP TSC0027378
ttttattgggtay

SEQ ID NO: 109404 - DNA, 13 bp, Artificial Sequence
  Oligonucleotide for detection of SNP TSC0027378
rtacccaataaaa

SEQ ID NO: 109405 - DNA, 13 bp, Artificial Sequence
  Oligonucleotide for detection of SNP TSC0027378
ttttatcgggtay

SEQ ID NO: 109406 - DNA, 13 bp, Artificial Sequence
  Oligonucleotide for detection of SNP TSC0027378
rtacccgataaaa

SEQ ID NO: 109407 - DNA, 13 bp, Artificial Sequence
  Oligonucleotide for detection of SNP TSC0027378
gtatttggtggag

SEQ ID NO: 109408 - DNA, 13 bp, Artificial Sequence
  Oligonucleotide for detection of SNP TSC0027378
ctccaccaaatac

SEQ ID NO: 109409 - DNA, 13 bp, Artificial Sequence
  Oligonucleotide for detection of SNP TSC0027378
gtatttagtggag

SEQ ID NO: 109410 - DNA, 13 bp, Artificial Sequence
  Oligonucleotide for detection of SNP TSC0027378
ctccactaaatac

SEQ ID NO: 109411 - DNA, 13 bp, Artificial Sequence
  Oligonucleotide for detection of SNP TSC0027378
gtattcggtggag

SEQ ID NO: 109412 - DNA, 13 bp, Artificial Sequence
  Oligonucleotide for detection of SNP TSC0027378
ctccaccgaatac

SEQ ID NO: 109413 - DNA, 13 bp, Artificial Sequence
  Oligonucleotide for detection of SNP TSC0027379
ataattataattg

SEQ ID NO: 109414 - DNA, 13 bp, Artificial Sequence
  Oligonucleotide for detection of SNP TSC0027379
caattataattat

SEQ ID NO: 109415 - DNA, 13 bp, Artificial Sequence
  Oligonucleotide for detection of SNP TSC0027379
ataattgtaattg

SEQ ID NO: 109416 - DNA, 13 bp, Artificial Sequence
  Oligonucleotide for detection of SNP TSC0027379
caattacaattat

SEQ ID NO: 109417 - DNA, 13 bp, Artificial Sequence
  Oligonucleotide for detection of SNP TSC0027380
agttataatagtt

SEQ ID NO: 109418 - DNA, 13 bp, Artificial Sequence
  Oligonucleotide for detection of SNP TSC0027380
aactattataact

SEQ ID NO: 109419 - DNA, 13 bp, Artificial Sequence
  Oligonucleotide for detection of SNP TSC0027380
agttatgatagtt

SEQ ID NO: 109420 - DNA, 13 bp, Artificial Sequence
  Oligonucleotide for detection of SNP TSC0027380
aactatcataact

SEQ ID NO: 109421 - DNA, 13 bp, Artificial Sequence
  Oligonucleotide for detection of SNP TSC0027381
tttggggttattg

SEQ ID NO: 109422 - DNA, 13 bp, Artificial Sequence
  Oligonucleotide for detection of SNP TSC0027381
caataaccccaaa

SEQ ID NO: 109423 - DNA, 13 bp, Artificial Sequence
  Oligonucleotide for detection of SNP TSC0027381
tttgggattattg

SEQ ID NO: 109424 - DNA, 13 bp, Artificial Sequence
  Oligonucleotide for detection of SNP TSC0027381
caataatcccaaa

SEQ ID NO: 109425 - DNA, 13 bp, Artificial Sequence
  Oligonucleotide for detection of SNP TSC0027382
aagattattaaat

SEQ ID NO: 109426 - DNA, 13 bp, Artificial Sequence
  Oligonucleotide for detection of SNP TSC0027382
atttaataatctt

SEQ ID NO: 109427 - DNA, 13 bp, Artificial Sequence
  Oligonucleotide for detection of SNP TSC0027382
aagattgttaaat

SEQ ID NO: 109428 - DNA, 13 bp, Artificial Sequence
  Oligonucleotide for detection of SNP TSC0027382
atttaacaatctt

SEQ ID NO: 109429 - DNA, 13 bp, Artificial Sequence
  Oligonucleotide for detection of SNP TSC0027382
aagatcgttaaat

SEQ ID NO: 109430 - DNA, 13 bp, Artificial Sequence
  Oligonucleotide for detection of SNP TSC0027382
atttaacgatctt

SEQ ID NO: 109431 - DNA, 13 bp, Artificial Sequence
  Oligonucleotide for detection of SNP TSC0027382
atttaatgatttt

SEQ ID NO: 109432 - DNA, 13 bp, Artificial Sequence
  Oligonucleotide for detection of SNP TSC0027382
aaaatcattaaat

SEQ ID NO: 109433 - DNA, 13 bp, Artificial Sequence
  Oligonucleotide for detection of SNP TSC0027382
atttaacgatttt

SEQ ID NO: 109434 - DNA, 13 bp, Artificial Sequence
  Oligonucleotide for detection of SNP TSC0027382
aaaatcgttaaat

SEQ ID NO: 109435 - DNA, 13 bp, Artificial Sequence
  Oligonucleotide for detection of SNP TSC0027383
ttttttgggttat

SEQ ID NO: 109436 - DNA, 13 bp, Artificial Sequence
  Oligonucleotide for detection of SNP TSC0027383
ataacccaaaaaa

SEQ ID NO: 109437 - DNA, 13 bp, Artificial Sequence
  Oligonucleotide for detection of SNP TSC0027383
tttttttggttat

SEQ ID NO: 109438 - DNA, 13 bp, Artificial Sequence
  Oligonucleotide for detection of SNP TSC0027383
ataaccaaaaaaa

SEQ ID NO: 109439 - DNA, 13 bp, Artificial Sequence
  Oligonucleotide for detection of SNP TSC0027383
tttttcgggttat

SEQ ID NO: 109440 - DNA, 13 bp, Artificial Sequence
  Oligonucleotide for detection of SNP TSC0027383
ataacccgaaaaa

SEQ ID NO: 109441 - DNA, 13 bp, Artificial Sequence
  Oligonucleotide for detection of SNP TSC0027383
atgatttggaaaa

SEQ ID NO: 109442 - DNA, 13 bp, Artificial Sequence
  Oligonucleotide for detection of SNP TSC0027383
ttttccaaatcat

SEQ ID NO: 109443 - DNA, 13 bp, Artificial Sequence
  Oligonucleotide for detection of SNP TSC0027383
atgattaggaaaa

SEQ ID NO: 109444 - DNA, 13 bp, Artificial Sequence
  Oligonucleotide for detection of SNP TSC0027383
ttttcctaatcat

SEQ ID NO: 109445 - DNA, 13 bp, Artificial Sequence
  Oligonucleotide for detection of SNP TSC0027383
atgattcggaaaa

SEQ ID NO: 109446 - DNA, 13 bp, Artificial Sequence
  Oligonucleotide for detection of SNP TSC0027383
ttttccgaatcat

SEQ ID NO: 109447 - DNA, 13 bp, Artificial Sequence
  Oligonucleotide for detection of SNP TSC0027387
ttttttaagaatt

SEQ ID NO: 109448 - DNA, 13 bp, Artificial Sequence
  Oligonucleotide for detection of SNP TSC0027387
aattcttaaaaaa

SEQ ID NO: 109449 - DNA, 13 bp, Artificial Sequence
  Oligonucleotide for detection of SNP TSC0027387
tttttttagaatt

SEQ ID NO: 109450 - DNA, 13 bp, Artificial Sequence
  Oligonucleotide for detection of SNP TSC0027387
aattctaaaaaaa

SEQ ID NO: 109451 - DNA, 13 bp, Artificial Sequence
  Oligonucleotide for detection of SNP TSC0027387
aatttttgaaaga

SEQ ID NO: 109452 - DNA, 13 bp, Artificial Sequence
  Oligonucleotide for detection of SNP TSC0027387
tctttcaaaaatt

SEQ ID NO: 109453 - DNA, 13 bp, Artificial Sequence
  Oligonucleotide for detection of SNP TSC0027387
aattttagaaaga

SEQ ID NO: 109454 - DNA, 13 bp, Artificial Sequence
  Oligonucleotide for detection of SNP TSC0027387
tctttctaaaatt

SEQ ID NO: 109455 - DNA, 13 bp, Artificial Sequence
  Oligonucleotide for detection of SNP TSC0027389
tgttaggaaagga

SEQ ID NO: 109456 - DNA, 13 bp, Artificial Sequence
  Oligonucleotide for detection of SNP TSC0027389
tcctttcctaaca

SEQ ID NO: 109457 - DNA, 13 bp, Artificial Sequence
  Oligonucleotide for detection of SNP TSC0027389
tgttagaaaagga

SEQ ID NO: 109458 - DNA, 13 bp, Artificial Sequence
  Oligonucleotide for detection of SNP TSC0027389
tccttttctaaca

SEQ ID NO: 109459 - DNA, 13 bp, Artificial Sequence
  Oligonucleotide for detection of SNP TSC0027390
aatttatatagay

SEQ ID NO: 109460 - DNA, 13 bp, Artificial Sequence
  Oligonucleotide for detection of SNP TSC0027390
rtctatataaatt

SEQ ID NO: 109461 - DNA, 13 bp, Artificial Sequence
  Oligonucleotide for detection of SNP TSC0027390
gtttatttgggtt

SEQ ID NO: 109462 - DNA, 13 bp, Artificial Sequence
  Oligonucleotide for detection of SNP TSC0027390
aacccaaataaac

SEQ ID NO: 109463 - DNA, 13 bp, Artificial Sequence
  Oligonucleotide for detection of SNP TSC0027390
gtttatatgggtt

SEQ ID NO: 109464 - DNA, 13 bp, Artificial Sequence
  Oligonucleotide for detection of SNP TSC0027390
aacccatataaac

SEQ ID NO: 109465 - DNA, 13 bp, Artificial Sequence
  Oligonucleotide for detection of SNP TSC0027391
atttgtagttttg

SEQ ID NO: 109466 - DNA, 13 bp, Artificial Sequence
  Oligonucleotide for detection of SNP TSC0027391
caaaactacaaat

SEQ ID NO: 109467 - DNA, 13 bp, Artificial Sequence
  Oligonucleotide for detection of SNP TSC0027391
atttgtggttttg

SEQ ID NO: 109468 - DNA, 13 bp, Artificial Sequence
  Oligonucleotide for detection of SNP TSC0027391
caaaaccacaaat

SEQ ID NO: 109469 - DNA, 13 bp, Artificial Sequence
  Oligonucleotide for detection of SNP TSC0027391
atttgtagtttcg

SEQ ID NO: 109470 - DNA, 13 bp, Artificial Sequence
  Oligonucleotide for detection of SNP TSC0027391
cgaaactacaaat

SEQ ID NO: 109471 - DNA, 13 bp, Artificial Sequence
  Oligonucleotide for detection of SNP TSC0027391
atttgcggttttg

SEQ ID NO: 109472 - DNA, 13 bp, Artificial Sequence
  Oligonucleotide for detection of SNP TSC0027391
caaaaccgcaaat

SEQ ID NO: 109473 - DNA, 13 bp, Artificial Sequence
  Oligonucleotide for detection of SNP TSC0027391
atttgtggtttcg

SEQ ID NO: 109474 - DNA, 13 bp, Artificial Sequence
  Oligonucleotide for detection of SNP TSC0027391
cgaaaccacaaat

SEQ ID NO: 109475 - DNA, 13 bp, Artificial Sequence
  Oligonucleotide for detection of SNP TSC0027391
atttgcggtttcg

SEQ ID NO: 109476 - DNA, 13 bp, Artificial Sequence
  Oligonucleotide for detection of SNP TSC0027391
cgaaaccgcaaat

SEQ ID NO: 109477 - DNA, 13 bp, Artificial Sequence
  Oligonucleotide for detection of SNP TSC0027391
tgaggttgtaggt

SEQ ID NO: 109478 - DNA, 13 bp, Artificial Sequence
  Oligonucleotide for detection of SNP TSC0027391
acctacaacctca

SEQ ID NO: 109479 - DNA, 13 bp, Artificial Sequence
  Oligonucleotide for detection of SNP TSC0027391
cgaggttgtaggt

SEQ ID NO: 109480 - DNA, 13 bp, Artificial Sequence
  Oligonucleotide for detection of SNP TSC0027391
acctacaacctcg

SEQ ID NO: 109481 - DNA, 13 bp, Artificial Sequence
  Oligonucleotide for detection of SNP TSC0027391
tgaggtcgtaggt

SEQ ID NO: 109482 - DNA, 13 bp, Artificial Sequence
  Oligonucleotide for detection of SNP TSC0027391
acctacgacctca

SEQ ID NO: 109483 - DNA, 13 bp, Artificial Sequence
  Oligonucleotide for detection of SNP TSC0027391
cgaggtcgtaggt

SEQ ID NO: 109484 - DNA, 13 bp, Artificial Sequence
  Oligonucleotide for detection of SNP TSC0027391
acctacgacctcg

SEQ ID NO: 109485 - DNA, 13 bp, Artificial Sequence
  Oligonucleotide for detection of SNP TSC0027392
tagggtgagggta

SEQ ID NO: 109486 - DNA, 13 bp, Artificial Sequence
  Oligonucleotide for detection of SNP TSC0027392
taccctcacccta

SEQ ID NO: 109487 - DNA, 13 bp, Artificial Sequence
  Oligonucleotide for detection of SNP TSC0027392
tagggtaagggta

SEQ ID NO: 109488 - DNA, 13 bp, Artificial Sequence
  Oligonucleotide for detection of SNP TSC0027392
tacccttacccta

SEQ ID NO: 109489 - DNA, 13 bp, Artificial Sequence
  Oligonucleotide for detection of SNP TSC0027392
tagggcgagggta

SEQ ID NO: 109490 - DNA, 13 bp, Artificial Sequence
  Oligonucleotide for detection of SNP TSC0027392
taccctcgcccta

SEQ ID NO: 109491 - DNA, 13 bp, Artificial Sequence
  Oligonucleotide for detection of SNP TSC0027394
ggttggaggattg

SEQ ID NO: 109492 - DNA, 13 bp, Artificial Sequence
  Oligonucleotide for detection of SNP TSC0027394
caatcctccaacc

SEQ ID NO: 109493 - DNA, 13 bp, Artificial Sequence
  Oligonucleotide for detection of SNP TSC0027394
ggttgggggattg

SEQ ID NO: 109494 - DNA, 13 bp, Artificial Sequence
  Oligonucleotide for detection of SNP TSC0027394
caatcccccaacc

SEQ ID NO: 109495 - DNA, 13 bp, Artificial Sequence
  Oligonucleotide for detection of SNP TSC0027395
gtttttttgagtt

SEQ ID NO: 109496 - DNA, 13 bp, Artificial Sequence
  Oligonucleotide for detection of SNP TSC0027395
aactcaaaaaaac

SEQ ID NO: 109497 - DNA, 13 bp, Artificial Sequence
  Oligonucleotide for detection of SNP TSC0027395
gtttttgtgagtt

SEQ ID NO: 109498 - DNA, 13 bp, Artificial Sequence
  Oligonucleotide for detection of SNP TSC0027395
aactcacaaaaac

SEQ ID NO: 109499 - DNA, 13 bp, Artificial Sequence
  Oligonucleotide for detection of SNP TSC0027395
gttttcgtgagtt

SEQ ID NO: 109500 - DNA, 13 bp, Artificial Sequence
  Oligonucleotide for detection of SNP TSC0027395
aactcacgaaaac

SEQ ID NO: 109501 - DNA, 13 bp, Artificial Sequence
  Oligonucleotide for detection of SNP TSC0027395
agtttaggagagy

SEQ ID NO: 109502 - DNA, 13 bp, Artificial Sequence
  Oligonucleotide for detection of SNP TSC0027395
rctctcctaaact

SEQ ID NO: 109503 - DNA, 13 bp, Artificial Sequence
  Oligonucleotide for detection of SNP TSC0027395
agtttatgagagy

SEQ ID NO: 109504 - DNA, 13 bp, Artificial Sequence
  Oligonucleotide for detection of SNP TSC0027395
rctctcataaact

SEQ ID NO: 109505 - DNA, 13 bp, Artificial Sequence
  Oligonucleotide for detection of SNP TSC0027395
agtttacgagagy

SEQ ID NO: 109506 - DNA, 13 bp, Artificial Sequence
  Oligonucleotide for detection of SNP TSC0027395
rctctcgtaaact

SEQ ID NO: 109507 - DNA, 13 bp, Artificial Sequence
  Oligonucleotide for detection of SNP TSC0027397
ggtttaaagttaa

SEQ ID NO: 109508 - DNA, 13 bp, Artificial Sequence
  Oligonucleotide for detection of SNP TSC0027397
ttaactttaaacc

SEQ ID NO: 109509 - DNA, 13 bp, Artificial Sequence
  Oligonucleotide for detection of SNP TSC0027397
ggtttagagttaa

SEQ ID NO: 109510 - DNA, 13 bp, Artificial Sequence
  Oligonucleotide for detection of SNP TSC0027397
ttaactctaaacc

SEQ ID NO: 109511 - DNA, 13 bp, Artificial Sequence
  Oligonucleotide for detection of SNP TSC0027398
ttgtagtgagatg

SEQ ID NO: 109512 - DNA, 13 bp, Artificial Sequence
  Oligonucleotide for detection of SNP TSC0027398
catctcactacaa

SEQ ID NO: 109513 - DNA, 13 bp, Artificial Sequence
  Oligonucleotide for detection of SNP TSC0027398
ttgtagcgagatg

SEQ ID NO: 109514 - DNA, 13 bp, Artificial Sequence
  Oligonucleotide for detection of SNP TSC0027398
catctcgctacaa

SEQ ID NO: 109515 - DNA, 13 bp, Artificial Sequence
  Oligonucleotide for detection of SNP TSC0027398
ttgtagtgagacg

SEQ ID NO: 109516 - DNA, 13 bp, Artificial Sequence
  Oligonucleotide for detection of SNP TSC0027398
cgtctcactacaa

SEQ ID NO: 109517 - DNA, 13 bp, Artificial Sequence
  Oligonucleotide for detection of SNP TSC0027398
ttgtagcgagacg

SEQ ID NO: 109518 - DNA, 13 bp, Artificial Sequence
  Oligonucleotide for detection of SNP TSC0027398
cgtctcgctacaa

SEQ ID NO: 109519 - DNA, 13 bp, Artificial Sequence
  Oligonucleotide for detection of SNP TSC0027398
tgttttgttgtag

SEQ ID NO: 109520 - DNA, 13 bp, Artificial Sequence
  Oligonucleotide for detection of SNP TSC0027398
ctacaacaaaaca

SEQ ID NO: 109521 - DNA, 13 bp, Artificial Sequence
  Oligonucleotide for detection of SNP TSC0027398
tgttttattgtag

SEQ ID NO: 109522 - DNA, 13 bp, Artificial Sequence
  Oligonucleotide for detection of SNP TSC0027398
ctacaataaaaca

SEQ ID NO: 109523 - DNA, 13 bp, Artificial Sequence
  Oligonucleotide for detection of SNP TSC0027398
cgttttgttgtag

SEQ ID NO: 109524 - DNA, 13 bp, Artificial Sequence
  Oligonucleotide for detection of SNP TSC0027398
ctacaacaaaacg

SEQ ID NO: 109525 - DNA, 13 bp, Artificial Sequence
  Oligonucleotide for detection of SNP TSC0027398
cgttttattgtag

SEQ ID NO: 109526 - DNA, 13 bp, Artificial Sequence
  Oligonucleotide for detection of SNP TSC0027398
ctacaataaaacg

SEQ ID NO: 109527 - DNA, 13 bp, Artificial Sequence
  Oligonucleotide for detection of SNP TSC0027398
tgtttcgttgtag

SEQ ID NO: 109528 - DNA, 13 bp, Artificial Sequence
  Oligonucleotide for detection of SNP TSC0027398
ctacaacgaaaca

SEQ ID NO: 109529 - DNA, 13 bp, Artificial Sequence
  Oligonucleotide for detection of SNP TSC0027398
cgtttcgttgtag

SEQ ID NO: 109530 - DNA, 13 bp, Artificial Sequence
  Oligonucleotide for detection of SNP TSC0027398
ctacaacgaaacg

SEQ ID NO: 109531 - DNA, 13 bp, Artificial Sequence
  Oligonucleotide for detection of SNP TSC0027401
tttaagaaagttt

SEQ ID NO: 109532 - DNA, 13 bp, Artificial Sequence
  Oligonucleotide for detection of SNP TSC0027401
aaactttcttaaa

SEQ ID NO: 109533 - DNA, 13 bp, Artificial Sequence
  Oligonucleotide for detection of SNP TSC0027401
tttaaggaagttt

SEQ ID NO: 109534 - DNA, 13 bp, Artificial Sequence
  Oligonucleotide for detection of SNP TSC0027401
aaacttccttaaa

SEQ ID NO: 109535 - DNA, 13 bp, Artificial Sequence
  Oligonucleotide for detection of SNP TSC0027402
gtttttgggtaty

SEQ ID NO: 109536 - DNA, 13 bp, Artificial Sequence
  Oligonucleotide for detection of SNP TSC0027402
ratacccaaaaac

SEQ ID NO: 109537 - DNA, 13 bp, Artificial Sequence
  Oligonucleotide for detection of SNP TSC0027402
gtttttaggtaty

SEQ ID NO: 109538 - DNA, 13 bp, Artificial Sequence
  Oligonucleotide for detection of SNP TSC0027402
ratacctaaaaac

SEQ ID NO: 109539 - DNA, 13 bp, Artificial Sequence
  Oligonucleotide for detection of SNP TSC0027404
atatatatgtgty

SEQ ID NO: 109540 - DNA, 13 bp, Artificial Sequence
  Oligonucleotide for detection of SNP TSC0027404
racacatatatat

SEQ ID NO: 109541 - DNA, 13 bp, Artificial Sequence
  Oligonucleotide for detection of SNP TSC0027404
atatatgtgtgty

SEQ ID NO: 109542 - DNA, 13 bp, Artificial Sequence
  Oligonucleotide for detection of SNP TSC0027404
racacacatatat

SEQ ID NO: 109543 - DNA, 13 bp, Artificial Sequence
  Oligonucleotide for detection of SNP TSC0027404
atatatacgtgty

SEQ ID NO: 109544 - DNA, 13 bp, Artificial Sequence
  Oligonucleotide for detection of SNP TSC0027404
racacgtatatat

SEQ ID NO: 109545 - DNA, 13 bp, Artificial Sequence
  Oligonucleotide for detection of SNP TSC0027404
atatacgtgtgty

SEQ ID NO: 109546 - DNA, 13 bp, Artificial Sequence
  Oligonucleotide for detection of SNP TSC0027404
racacacgtatat

SEQ ID NO: 109547 - DNA, 13 bp, Artificial Sequence
  Oligonucleotide for detection of SNP TSC0027404
atatatatgcgty

SEQ ID NO: 109548 - DNA, 13 bp, Artificial Sequence
  Oligonucleotide for detection of SNP TSC0027404
racgcatatatat

SEQ ID NO: 109549 - DNA, 13 bp, Artificial Sequence
  Oligonucleotide for detection of SNP TSC0027404
atatatgcgtgty

SEQ ID NO: 109550 - DNA, 13 bp, Artificial Sequence
  Oligonucleotide for detection of SNP TSC0027404
racacgcatatat

SEQ ID NO: 109551 - DNA, 13 bp, Artificial Sequence
  Oligonucleotide for detection of SNP TSC0027404
atatatacgcgty

SEQ ID NO: 109552 - DNA, 13 bp, Artificial Sequence
  Oligonucleotide for detection of SNP TSC0027404
racgcgtatatat

SEQ ID NO: 109553 - DNA, 13 bp, Artificial Sequence
  Oligonucleotide for detection of SNP TSC0027404
atatatgtgcgty

SEQ ID NO: 109554 - DNA, 13 bp, Artificial Sequence
  Oligonucleotide for detection of SNP TSC0027404
racgcacatatat

SEQ ID NO: 109555 - DNA, 13 bp, Artificial Sequence
  Oligonucleotide for detection of SNP TSC0027404
atatacgcgtgty

SEQ ID NO: 109556 - DNA, 13 bp, Artificial Sequence
  Oligonucleotide for detection of SNP TSC0027404
racacgcgtatat

SEQ ID NO: 109557 - DNA, 13 bp, Artificial Sequence
  Oligonucleotide for detection of SNP TSC0027404
atatacgtgcgty

SEQ ID NO: 109558 - DNA, 13 bp, Artificial Sequence
  Oligonucleotide for detection of SNP TSC0027404
racgcacgtatat

SEQ ID NO: 109559 - DNA, 13 bp, Artificial Sequence
  Oligonucleotide for detection of SNP TSC0027404
atatatgcgcgty

SEQ ID NO: 109560 - DNA, 13 bp, Artificial Sequence
  Oligonucleotide for detection of SNP TSC0027404
racgcgcatatat

SEQ ID NO: 109561 - DNA, 13 bp, Artificial Sequence
  Oligonucleotide for detection of SNP TSC0027404
atatacgcgcgty

SEQ ID NO: 109562 - DNA, 13 bp, Artificial Sequence
  Oligonucleotide for detection of SNP TSC0027404
racgcgcgtatat

SEQ ID NO: 109563 - DNA, 13 bp, Artificial Sequence
  Oligonucleotide for detection of SNP TSC0027404
ggtgtgtgtgtgt

SEQ ID NO: 109564 - DNA, 13 bp, Artificial Sequence
  Oligonucleotide for detection of SNP TSC0027404
acacacacacacc

SEQ ID NO: 109565 - DNA, 13 bp, Artificial Sequence
  Oligonucleotide for detection of SNP TSC0027404
ggcgtgtgtgtgt

SEQ ID NO: 109566 - DNA, 13 bp, Artificial Sequence
  Oligonucleotide for detection of SNP TSC0027404
acacacacacgcc

SEQ ID NO: 109567 - DNA, 13 bp, Artificial Sequence
  Oligonucleotide for detection of SNP TSC0027404
ggtgcgtgtgtgt

SEQ ID NO: 109568 - DNA, 13 bp, Artificial Sequence
  Oligonucleotide for detection of SNP TSC0027404
acacacacgcacc

SEQ ID NO: 109569 - DNA, 13 bp, Artificial Sequence
  Oligonucleotide for detection of SNP TSC0027404
ggcgcgtgtgtgt

SEQ ID NO: 109570 - DNA, 13 bp, Artificial Sequence
  Oligonucleotide for detection of SNP TSC0027404
acacacacgcgcc

SEQ ID NO: 109571 - DNA, 13 bp, Artificial Sequence
  Oligonucleotide for detection of SNP TSC0027404
ggtgtgcgtgtgt

SEQ ID NO: 109572 - DNA, 13 bp, Artificial Sequence
  Oligonucleotide for detection of SNP TSC0027404
acacacgcacacc

SEQ ID NO: 109573 - DNA, 13 bp, Artificial Sequence
  Oligonucleotide for detection of SNP TSC0027404
ggcgtgcgtgtgt

SEQ ID NO: 109574 - DNA, 13 bp, Artificial Sequence
  Oligonucleotide for detection of SNP TSC0027404
acacacgcacgcc

SEQ ID NO: 109575 - DNA, 13 bp, Artificial Sequence
  Oligonucleotide for detection of SNP TSC0027404
ggtgcgcgtgtgt

SEQ ID NO: 109576 - DNA, 13 bp, Artificial Sequence
  Oligonucleotide for detection of SNP TSC0027404
acacacgcgcacc

SEQ ID NO: 109577 - DNA, 13 bp, Artificial Sequence
  Oligonucleotide for detection of SNP TSC0027404
ggcgcgcgtgtgt

SEQ ID NO: 109578 - DNA, 13 bp, Artificial Sequence
  Oligonucleotide for detection of SNP TSC0027404
acacacgcgcgcc

SEQ ID NO: 109579 - DNA, 13 bp, Artificial Sequence
  Oligonucleotide for detection of SNP TSC0027410
ggtgtatgtgggg

SEQ ID NO: 109580 - DNA, 13 bp, Artificial Sequence
  Oligonucleotide for detection of SNP TSC0027410
ccccacatacacc

SEQ ID NO: 109581 - DNA, 13 bp, Artificial Sequence
  Oligonucleotide for detection of SNP TSC0027410
ggtgtacgtgggg

SEQ ID NO: 109582 - DNA, 13 bp, Artificial Sequence
  Oligonucleotide for detection of SNP TSC0027410
ccccacgtacacc

SEQ ID NO: 109583 - DNA, 13 bp, Artificial Sequence
  Oligonucleotide for detection of SNP TSC0027411
gaaatgggttgaa

SEQ ID NO: 109584 - DNA, 13 bp, Artificial Sequence
  Oligonucleotide for detection of SNP TSC0027411
ttcaacccatttc

SEQ ID NO: 109585 - DNA, 13 bp, Artificial Sequence
  Oligonucleotide for detection of SNP TSC0027411
gaaatgtgttgaa

SEQ ID NO: 109586 - DNA, 13 bp, Artificial Sequence
  Oligonucleotide for detection of SNP TSC0027411
ttcaacacatttc

SEQ ID NO: 109587 - DNA, 13 bp, Artificial Sequence
  Oligonucleotide for detection of SNP TSC0027411
tttaatttattty

SEQ ID NO: 109588 - DNA, 13 bp, Artificial Sequence
  Oligonucleotide for detection of SNP TSC0027411
raaataaattaaa

SEQ ID NO: 109589 - DNA, 13 bp, Artificial Sequence
  Oligonucleotide for detection of SNP TSC0027411
tttaatatattty

SEQ ID NO: 109590 - DNA, 13 bp, Artificial Sequence
  Oligonucleotide for detection of SNP TSC0027411
raaatatattaaa

SEQ ID NO: 109591 - DNA, 13 bp, Artificial Sequence
  Oligonucleotide for detection of SNP TSC0027413
ttgtttttagtgt

SEQ ID NO: 109592 - DNA, 13 bp, Artificial Sequence
  Oligonucleotide for detection of SNP TSC0027413
acactaaaaacaa

SEQ ID NO: 109593 - DNA, 13 bp, Artificial Sequence
  Oligonucleotide for detection of SNP TSC0027413
ttgtttgtagtgt

SEQ ID NO: 109594 - DNA, 13 bp, Artificial Sequence
  Oligonucleotide for detection of SNP TSC0027413
acactacaaacaa

SEQ ID NO: 109595 - DNA, 13 bp, Artificial Sequence
  Oligonucleotide for detection of SNP TSC0027413
atattagagatag

SEQ ID NO: 109596 - DNA, 13 bp, Artificial Sequence
  Oligonucleotide for detection of SNP TSC0027413
ctatctctaatat

SEQ ID NO: 109597 - DNA, 13 bp, Artificial Sequence
  Oligonucleotide for detection of SNP TSC0027413
atattatagatag

SEQ ID NO: 109598 - DNA, 13 bp, Artificial Sequence
  Oligonucleotide for detection of SNP TSC0027413
ctatctataatat

SEQ ID NO: 109599 - DNA, 13 bp, Artificial Sequence
  Oligonucleotide for detection of SNP TSC0027417
ttttattttgttt

SEQ ID NO: 109600 - DNA, 13 bp, Artificial Sequence
  Oligonucleotide for detection of SNP TSC0027417
aaacaaaataaaa

SEQ ID NO: 109601 - DNA, 13 bp, Artificial Sequence
  Oligonucleotide for detection of SNP TSC0027417
aagtagtatagaa

SEQ ID NO: 109602 - DNA, 13 bp, Artificial Sequence
  Oligonucleotide for detection of SNP TSC0027417
ttctatactactt

SEQ ID NO: 109603 - DNA, 13 bp, Artificial Sequence
  Oligonucleotide for detection of SNP TSC0027417
aagtagaatagaa

SEQ ID NO: 109604 - DNA, 13 bp, Artificial Sequence
  Oligonucleotide for detection of SNP TSC0027417
ttctattctactt

SEQ ID NO: 109605 - DNA, 13 bp, Artificial Sequence
  Oligonucleotide for detection of SNP TSC0027418
atatatatatttt

SEQ ID NO: 109606 - DNA, 13 bp, Artificial Sequence
  Oligonucleotide for detection of SNP TSC0027418
aaaatatatatat

SEQ ID NO: 109607 - DNA, 13 bp, Artificial Sequence
  Oligonucleotide for detection of SNP TSC0027418
atatatttatttt

SEQ ID NO: 109608 - DNA, 13 bp, Artificial Sequence
  Oligonucleotide for detection of SNP TSC0027418
aaaataaatatat

SEQ ID NO: 109609 - DNA, 13 bp, Artificial Sequence
  Oligonucleotide for detection of SNP TSC0027418
agagtgtgtgtgt

SEQ ID NO: 109610 - DNA, 13 bp, Artificial Sequence
  Oligonucleotide for detection of SNP TSC0027418
acacacacactct

SEQ ID NO: 109611 - DNA, 13 bp, Artificial Sequence
  Oligonucleotide for detection of SNP TSC0027418
agagtgagtgtgt

SEQ ID NO: 109612 - DNA, 13 bp, Artificial Sequence
  Oligonucleotide for detection of SNP TSC0027418
acacactcactct

SEQ ID NO: 109613 - DNA, 13 bp, Artificial Sequence
  Oligonucleotide for detection of SNP TSC0027420
ttttggaaggtta

SEQ ID NO: 109614 - DNA, 13 bp, Artificial Sequence
  Oligonucleotide for detection of SNP TSC0027420
taaccttccaaaa

SEQ ID NO: 109615 - DNA, 13 bp, Artificial Sequence
  Oligonucleotide for detection of SNP TSC0027420
ttttgggaggtta

SEQ ID NO: 109616 - DNA, 13 bp, Artificial Sequence
  Oligonucleotide for detection of SNP TSC0027420
taacctcccaaaa

SEQ ID NO: 109617 - DNA, 13 bp, Artificial Sequence
  Oligonucleotide for detection of SNP TSC0027421
taaaaaggaaata

SEQ ID NO: 109618 - DNA, 13 bp, Artificial Sequence
  Oligonucleotide for detection of SNP TSC0027421
tatttccttttta

SEQ ID NO: 109619 - DNA, 13 bp, Artificial Sequence
  Oligonucleotide for detection of SNP TSC0027421
taaaaatgaaata

SEQ ID NO: 109620 - DNA, 13 bp, Artificial Sequence
  Oligonucleotide for detection of SNP TSC0027421
tatttcattttta

SEQ ID NO: 109621 - DNA, 13 bp, Artificial Sequence
  Oligonucleotide for detection of SNP TSC0027422
agtgtttagtaaa

SEQ ID NO: 109622 - DNA, 13 bp, Artificial Sequence
  Oligonucleotide for detection of SNP TSC0027422
tttactaaacact

SEQ ID NO: 109623 - DNA, 13 bp, Artificial Sequence
  Oligonucleotide for detection of SNP TSC0027422
agtgttgagtaaa

SEQ ID NO: 109624 - DNA, 13 bp, Artificial Sequence
  Oligonucleotide for detection of SNP TSC0027422
tttactcaacact

SEQ ID NO: 109625 - DNA, 13 bp, Artificial Sequence
  Oligonucleotide for detection of SNP TSC0027422
agcgtttagtaaa

SEQ ID NO: 109626 - DNA, 13 bp, Artificial Sequence
  Oligonucleotide for detection of SNP TSC0027422
tttactaaacgct

SEQ ID NO: 109627 - DNA, 13 bp, Artificial Sequence
  Oligonucleotide for detection of SNP TSC0027422
agcgttgagtaaa

SEQ ID NO: 109628 - DNA, 13 bp, Artificial Sequence
  Oligonucleotide for detection of SNP TSC0027422
tttactcaacgct

SEQ ID NO: 109629 - DNA, 13 bp, Artificial Sequence
  Oligonucleotide for detection of SNP TSC0027422
tttgttgaatgtt

SEQ ID NO: 109630 - DNA, 13 bp, Artificial Sequence
  Oligonucleotide for detection of SNP TSC0027422
aacattcaacaaa

SEQ ID NO: 109631 - DNA, 13 bp, Artificial Sequence
  Oligonucleotide for detection of SNP TSC0027422
tttgtttaatgtt

SEQ ID NO: 109632 - DNA, 13 bp, Artificial Sequence
  Oligonucleotide for detection of SNP TSC0027422
aacattaaacaaa

SEQ ID NO: 109633 - DNA, 13 bp, Artificial Sequence
  Oligonucleotide for detection of SNP TSC0027422
tttgttgaacgtt

SEQ ID NO: 109634 - DNA, 13 bp, Artificial Sequence
  Oligonucleotide for detection of SNP TSC0027422
aacgttcaacaaa

SEQ ID NO: 109635 - DNA, 13 bp, Artificial Sequence
  Oligonucleotide for detection of SNP TSC0027422
tttgtttaacgtt

SEQ ID NO: 109636 - DNA, 13 bp, Artificial Sequence
  Oligonucleotide for detection of SNP TSC0027422
aacgttaaacaaa

SEQ ID NO: 109637 - DNA, 13 bp, Artificial Sequence
  Oligonucleotide for detection of SNP TSC0027423
ttggatggagtty

SEQ ID NO: 109638 - DNA, 13 bp, Artificial Sequence
  Oligonucleotide for detection of SNP TSC0027423
raactccatccaa

SEQ ID NO: 109639 - DNA, 13 bp, Artificial Sequence
  Oligonucleotide for detection of SNP TSC0027423
ttggatagagtty

SEQ ID NO: 109640 - DNA, 13 bp, Artificial Sequence
  Oligonucleotide for detection of SNP TSC0027423
raactctatccaa

SEQ ID NO: 109641 - DNA, 13 bp, Artificial Sequence
  Oligonucleotide for detection of SNP TSC0027423
ttggacggagtty

SEQ ID NO: 109642 - DNA, 13 bp, Artificial Sequence
  Oligonucleotide for detection of SNP TSC0027423
raactccgtccaa

SEQ ID NO: 109643 - DNA, 13 bp, Artificial Sequence
  Oligonucleotide for detection of SNP TSC0027424
ttaggagtaagag

SEQ ID NO: 109644 - DNA, 13 bp, Artificial Sequence
  Oligonucleotide for detection of SNP TSC0027424
ctcttactcctaa

SEQ ID NO: 109645 - DNA, 13 bp, Artificial Sequence
  Oligonucleotide for detection of SNP TSC0027424
ttaggaataagag

SEQ ID NO: 109646 - DNA, 13 bp, Artificial Sequence
  Oligonucleotide for detection of SNP TSC0027424
ctcttattcctaa

SEQ ID NO: 109647 - DNA, 13 bp, Artificial Sequence
  Oligonucleotide for detection of SNP TSC0027425
ttattttaggtaa

SEQ ID NO: 109648 - DNA, 13 bp, Artificial Sequence
  Oligonucleotide for detection of SNP TSC0027425
ttacctaaaataa

SEQ ID NO: 109649 - DNA, 13 bp, Artificial Sequence
  Oligonucleotide for detection of SNP TSC0027425
ttatttgaggtaa

SEQ ID NO: 109650 - DNA, 13 bp, Artificial Sequence
  Oligonucleotide for detection of SNP TSC0027425
ttacctcaaataa

SEQ ID NO: 109651 - DNA, 13 bp, Artificial Sequence
  Oligonucleotide for detection of SNP TSC0027425
ttgtttgaagtaa

SEQ ID NO: 109652 - DNA, 13 bp, Artificial Sequence
  Oligonucleotide for detection of SNP TSC0027425
ttacttcaaacaa

SEQ ID NO: 109653 - DNA, 13 bp, Artificial Sequence
  Oligonucleotide for detection of SNP TSC0027426
agagtatgggaaa

SEQ ID NO: 109654 - DNA, 13 bp, Artificial Sequence
  Oligonucleotide for detection of SNP TSC0027426
tttcccatactct

SEQ ID NO: 109655 - DNA, 13 bp, Artificial Sequence
  Oligonucleotide for detection of SNP TSC0027426
agagtacgggaaa

SEQ ID NO: 109656 - DNA, 13 bp, Artificial Sequence
  Oligonucleotide for detection of SNP TSC0027426
tttcccgtactct

SEQ ID NO: 109657 - DNA, 13 bp, Artificial Sequence
  Oligonucleotide for detection of SNP TSC0027426
tttttcgtgtttt

SEQ ID NO: 109658 - DNA, 13 bp, Artificial Sequence
  Oligonucleotide for detection of SNP TSC0027426
aaaacacgaaaaa

SEQ ID NO: 109659 - DNA, 13 bp, Artificial Sequence
  Oligonucleotide for detection of SNP TSC0027429
ttaagaggaggag

SEQ ID NO: 109660 - DNA, 13 bp, Artificial Sequence
  Oligonucleotide for detection of SNP TSC0027429
ctcctcctcttaa

SEQ ID NO: 109661 - DNA, 13 bp, Artificial Sequence
  Oligonucleotide for detection of SNP TSC0027429
ttaagaagaggag

SEQ ID NO: 109662 - DNA, 13 bp, Artificial Sequence
  Oligonucleotide for detection of SNP TSC0027429
ctcctcttcttaa

SEQ ID NO: 109663 - DNA, 13 bp, Artificial Sequence
  Oligonucleotide for detection of SNP TSC0027430
gatttggtaaagg

SEQ ID NO: 109664 - DNA, 13 bp, Artificial Sequence
  Oligonucleotide for detection of SNP TSC0027430
cctttaccaaatc

SEQ ID NO: 109665 - DNA, 13 bp, Artificial Sequence
  Oligonucleotide for detection of SNP TSC0027430
gatttgttaaagg

SEQ ID NO: 109666 - DNA, 13 bp, Artificial Sequence
  Oligonucleotide for detection of SNP TSC0027430
cctttaacaaatc

SEQ ID NO: 109667 - DNA, 13 bp, Artificial Sequence
  Oligonucleotide for detection of SNP TSC0027430
tttttattaagty

SEQ ID NO: 109668 - DNA, 13 bp, Artificial Sequence
  Oligonucleotide for detection of SNP TSC0027430
racttaataaaaa

SEQ ID NO: 109669 - DNA, 13 bp, Artificial Sequence
  Oligonucleotide for detection of SNP TSC0027430
tttttaataagty

SEQ ID NO: 109670 - DNA, 13 bp, Artificial Sequence
  Oligonucleotide for detection of SNP TSC0027430
racttattaaaaa

SEQ ID NO: 109671 - DNA, 13 bp, Artificial Sequence
  Oligonucleotide for detection of SNP TSC0027431
tttgaaaaaaaaa

SEQ ID NO: 109672 - DNA, 13 bp, Artificial Sequence
  Oligonucleotide for detection of SNP TSC0027431
tttttttttcaaa

SEQ ID NO: 109673 - DNA, 13 bp, Artificial Sequence
  Oligonucleotide for detection of SNP TSC0027431
tttgaagaaaaaa

SEQ ID NO: 109674 - DNA, 13 bp, Artificial Sequence
  Oligonucleotide for detection of SNP TSC0027431
ttttttcttcaaa

SEQ ID NO: 109675 - DNA, 13 bp, Artificial Sequence
  Oligonucleotide for detection of SNP TSC0027432
aaatagataattg

SEQ ID NO: 109676 - DNA, 13 bp, Artificial Sequence
  Oligonucleotide for detection of SNP TSC0027432
caattatctattt

SEQ ID NO: 109677 - DNA, 13 bp, Artificial Sequence
  Oligonucleotide for detection of SNP TSC0027432
aaatagttaattg

SEQ ID NO: 109678 - DNA, 13 bp, Artificial Sequence
  Oligonucleotide for detection of SNP TSC0027432
caattaactattt

SEQ ID NO: 109679 - DNA, 13 bp, Artificial Sequence
  Oligonucleotide for detection of SNP TSC0027432
taattatttgttt

SEQ ID NO: 109680 - DNA, 13 bp, Artificial Sequence
  Oligonucleotide for detection of SNP TSC0027432
aaacaaataatta

SEQ ID NO: 109681 - DNA, 13 bp, Artificial Sequence
  Oligonucleotide for detection of SNP TSC0027432
taattagttgttt

SEQ ID NO: 109682 - DNA, 13 bp, Artificial Sequence
  Oligonucleotide for detection of SNP TSC0027432
aaacaactaatta

SEQ ID NO: 109683 - DNA, 13 bp, Artificial Sequence
  Oligonucleotide for detection of SNP TSC0027435
tagtaggatttta

SEQ ID NO: 109684 - DNA, 13 bp, Artificial Sequence
  Oligonucleotide for detection of SNP TSC0027435
taaaatcctacta

SEQ ID NO: 109685 - DNA, 13 bp, Artificial Sequence
  Oligonucleotide for detection of SNP TSC0027435
tagtagaatttta

SEQ ID NO: 109686 - DNA, 13 bp, Artificial Sequence
  Oligonucleotide for detection of SNP TSC0027435
taaaattctacta

SEQ ID NO: 109687 - DNA, 13 bp, Artificial Sequence
  Oligonucleotide for detection of SNP TSC0027440
ataaatatgttga

SEQ ID NO: 109688 - DNA, 13 bp, Artificial Sequence
  Oligonucleotide for detection of SNP TSC0027440
tcaacatatttat

SEQ ID NO: 109689 - DNA, 13 bp, Artificial Sequence
  Oligonucleotide for detection of SNP TSC0027440
ataaatgtgttga

SEQ ID NO: 109690 - DNA, 13 bp, Artificial Sequence
  Oligonucleotide for detection of SNP TSC0027440
tcaacacatttat

SEQ ID NO: 109691 - DNA, 13 bp, Artificial Sequence
  Oligonucleotide for detection of SNP TSC0027440
ataaatatgtcga

SEQ ID NO: 109692 - DNA, 13 bp, Artificial Sequence
  Oligonucleotide for detection of SNP TSC0027440
tcgacatatttat

SEQ ID NO: 109693 - DNA, 13 bp, Artificial Sequence
  Oligonucleotide for detection of SNP TSC0027440
ataaacgtgttga

SEQ ID NO: 109694 - DNA, 13 bp, Artificial Sequence
  Oligonucleotide for detection of SNP TSC0027440
tcaacacgtttat

SEQ ID NO: 109695 - DNA, 13 bp, Artificial Sequence
  Oligonucleotide for detection of SNP TSC0027440
ataaatgtgtcga

SEQ ID NO: 109696 - DNA, 13 bp, Artificial Sequence
  Oligonucleotide for detection of SNP TSC0027440
tcgacacatttat

SEQ ID NO: 109697 - DNA, 13 bp, Artificial Sequence
  Oligonucleotide for detection of SNP TSC0027440
ataaacgtgtcga

SEQ ID NO: 109698 - DNA, 13 bp, Artificial Sequence
  Oligonucleotide for detection of SNP TSC0027440
tcgacacgtttat

SEQ ID NO: 109699 - DNA, 13 bp, Artificial Sequence
  Oligonucleotide for detection of SNP TSC0027440
tcgatatgtttgt

SEQ ID NO: 109700 - DNA, 13 bp, Artificial Sequence
  Oligonucleotide for detection of SNP TSC0027440
acaaacatatcga

SEQ ID NO: 109701 - DNA, 13 bp, Artificial Sequence
  Oligonucleotide for detection of SNP TSC0027440
ttgatacgtttgt

SEQ ID NO: 109702 - DNA, 13 bp, Artificial Sequence
  Oligonucleotide for detection of SNP TSC0027440
acaaacgtatcaa

SEQ ID NO: 109703 - DNA, 13 bp, Artificial Sequence
  Oligonucleotide for detection of SNP TSC0027440
tcgatacgtttgt

SEQ ID NO: 109704 - DNA, 13 bp, Artificial Sequence
  Oligonucleotide for detection of SNP TSC0027440
acaaacgtatcga

SEQ ID NO: 109705 - DNA, 13 bp, Artificial Sequence
  Oligonucleotide for detection of SNP TSC0027444
gtaaaggggaagt

SEQ ID NO: 109706 - DNA, 13 bp, Artificial Sequence
  Oligonucleotide for detection of SNP TSC0027444
acttcccctttac

SEQ ID NO: 109707 - DNA, 13 bp, Artificial Sequence
  Oligonucleotide for detection of SNP TSC0027444
gtaaagtggaagt

SEQ ID NO: 109708 - DNA, 13 bp, Artificial Sequence
  Oligonucleotide for detection of SNP TSC0027444
acttccactttac

SEQ ID NO: 109709 - DNA, 13 bp, Artificial Sequence
  Oligonucleotide for detection of SNP TSC0027444
atttttattttay

SEQ ID NO: 109710 - DNA, 13 bp, Artificial Sequence
  Oligonucleotide for detection of SNP TSC0027444
rtaaaataaaaat

SEQ ID NO: 109711 - DNA, 13 bp, Artificial Sequence
  Oligonucleotide for detection of SNP TSC0027445
tgtaggttgggga

SEQ ID NO: 109712 - DNA, 13 bp, Artificial Sequence
  Oligonucleotide for detection of SNP TSC0027445
tccccaacctaca

SEQ ID NO: 109713 - DNA, 13 bp, Artificial Sequence
  Oligonucleotide for detection of SNP TSC0027445
tgtaggatgggga

SEQ ID NO: 109714 - DNA, 13 bp, Artificial Sequence
  Oligonucleotide for detection of SNP TSC0027445
tccccatcctaca

SEQ ID NO: 109715 - DNA, 13 bp, Artificial Sequence
  Oligonucleotide for detection of SNP TSC0027446
tttaaggggatat

SEQ ID NO: 109716 - DNA, 13 bp, Artificial Sequence
  Oligonucleotide for detection of SNP TSC0027446
atatccccttaaa

SEQ ID NO: 109717 - DNA, 13 bp, Artificial Sequence
  Oligonucleotide for detection of SNP TSC0027446
tttaagaggatat

SEQ ID NO: 109718 - DNA, 13 bp, Artificial Sequence
  Oligonucleotide for detection of SNP TSC0027446
atatcctcttaaa

SEQ ID NO: 109719 - DNA, 13 bp, Artificial Sequence
  Oligonucleotide for detection of SNP TSC0027447
aaggagataatty

SEQ ID NO: 109720 - DNA, 13 bp, Artificial Sequence
  Oligonucleotide for detection of SNP TSC0027447
raattatctcctt

SEQ ID NO: 109721 - DNA, 13 bp, Artificial Sequence
  Oligonucleotide for detection of SNP TSC0027447
aaggagttaatty

SEQ ID NO: 109722 - DNA, 13 bp, Artificial Sequence
  Oligonucleotide for detection of SNP TSC0027447
raattaactcctt

SEQ ID NO: 109723 - DNA, 13 bp, Artificial Sequence
  Oligonucleotide for detection of SNP TSC0027447
gagttgttttttt

SEQ ID NO: 109724 - DNA, 13 bp, Artificial Sequence
  Oligonucleotide for detection of SNP TSC0027447
aaaaaaacaactc

SEQ ID NO: 109725 - DNA, 13 bp, Artificial Sequence
  Oligonucleotide for detection of SNP TSC0027447
gagttgatttttt

SEQ ID NO: 109726 - DNA, 13 bp, Artificial Sequence
  Oligonucleotide for detection of SNP TSC0027447
aaaaaatcaactc

SEQ ID NO: 109727 - DNA, 13 bp, Artificial Sequence
  Oligonucleotide for detection of SNP TSC0027448
tatttagaatgtt

SEQ ID NO: 109728 - DNA, 13 bp, Artificial Sequence
  Oligonucleotide for detection of SNP TSC0027448
aacattctaaata

SEQ ID NO: 109729 - DNA, 13 bp, Artificial Sequence
  Oligonucleotide for detection of SNP TSC0027448
tatttataatgtt

SEQ ID NO: 109730 - DNA, 13 bp, Artificial Sequence
  Oligonucleotide for detection of SNP TSC0027448
aacattataaata

SEQ ID NO: 109731 - DNA, 13 bp, Artificial Sequence
  Oligonucleotide for detection of SNP TSC0027450
ttagaagaatgga

SEQ ID NO: 109732 - DNA, 13 bp, Artificial Sequence
  Oligonucleotide for detection of SNP TSC0027450
tccattcttctaa

SEQ ID NO: 109733 - DNA, 13 bp, Artificial Sequence
  Oligonucleotide for detection of SNP TSC0027450
ttagaaaaatgga

SEQ ID NO: 109734 - DNA, 13 bp, Artificial Sequence
  Oligonucleotide for detection of SNP TSC0027450
tccatttttctaa

SEQ ID NO: 109735 - DNA, 13 bp, Artificial Sequence
  Oligonucleotide for detection of SNP TSC0027452
gagtataattagy

SEQ ID NO: 109736 - DNA, 13 bp, Artificial Sequence
  Oligonucleotide for detection of SNP TSC0027452
rctaattatactc

SEQ ID NO: 109737 - DNA, 13 bp, Artificial Sequence
  Oligonucleotide for detection of SNP TSC0027452
gagtatgattagy

SEQ ID NO: 109738 - DNA, 13 bp, Artificial Sequence
  Oligonucleotide for detection of SNP TSC0027452
rctaatcatactc

SEQ ID NO: 109739 - DNA, 13 bp, Artificial Sequence
  Oligonucleotide for detection of SNP TSC0027452
gagtacgattagy

SEQ ID NO: 109740 - DNA, 13 bp, Artificial Sequence
  Oligonucleotide for detection of SNP TSC0027452
rctaatcgtactc

SEQ ID NO: 109741 - DNA, 13 bp, Artificial Sequence
  Oligonucleotide for detection of SNP TSC0027452
gttaattgtatty

SEQ ID NO: 109742 - DNA, 13 bp, Artificial Sequence
  Oligonucleotide for detection of SNP TSC0027452
raatacaattaac

SEQ ID NO: 109743 - DNA, 13 bp, Artificial Sequence
  Oligonucleotide for detection of SNP TSC0027452
gttaatcgtatty

SEQ ID NO: 109744 - DNA, 13 bp, Artificial Sequence
  Oligonucleotide for detection of SNP TSC0027452
raatacgattaac

SEQ ID NO: 109745 - DNA, 13 bp, Artificial Sequence
  Oligonucleotide for detection of SNP TSC0027453
tagaaagtggtag

SEQ ID NO: 109746 - DNA, 13 bp, Artificial Sequence
  Oligonucleotide for detection of SNP TSC0027453
ctaccactttcta

SEQ ID NO: 109747 - DNA, 13 bp, Artificial Sequence
  Oligonucleotide for detection of SNP TSC0027453
tagaaaatggtag

SEQ ID NO: 109748 - DNA, 13 bp, Artificial Sequence
  Oligonucleotide for detection of SNP TSC0027453
ctaccattttcta

SEQ ID NO: 109749 - DNA, 13 bp, Artificial Sequence
  Oligonucleotide for detection of SNP TSC0027453
tagaaagcggtag

SEQ ID NO: 109750 - DNA, 13 bp, Artificial Sequence
  Oligonucleotide for detection of SNP TSC0027453
ctaccgctttcta

SEQ ID NO: 109751 - DNA, 13 bp, Artificial Sequence
  Oligonucleotide for detection of SNP TSC0027453
tagaaaacggtag

SEQ ID NO: 109752 - DNA, 13 bp, Artificial Sequence
  Oligonucleotide for detection of SNP TSC0027453
ctaccgttttcta

SEQ ID NO: 109753 - DNA, 13 bp, Artificial Sequence
  Oligonucleotide for detection of SNP TSC0027454
gatttgagttgat

SEQ ID NO: 109754 - DNA, 13 bp, Artificial Sequence
  Oligonucleotide for detection of SNP TSC0027454
atcaactcaaatc

SEQ ID NO: 109755 - DNA, 13 bp, Artificial Sequence
  Oligonucleotide for detection of SNP TSC0027454
gatttgggttgat

SEQ ID NO: 109756 - DNA, 13 bp, Artificial Sequence
  Oligonucleotide for detection of SNP TSC0027454
atcaacccaaatc

SEQ ID NO: 109757 - DNA, 13 bp, Artificial Sequence
  Oligonucleotide for detection of SNP TSC0027455
agtaaaataatag

SEQ ID NO: 109758 - DNA, 13 bp, Artificial Sequence
  Oligonucleotide for detection of SNP TSC0027455
ctattattttact

SEQ ID NO: 109759 - DNA, 13 bp, Artificial Sequence
  Oligonucleotide for detection of SNP TSC0027455
agtaaattaatag

SEQ ID NO: 109760 - DNA, 13 bp, Artificial Sequence
  Oligonucleotide for detection of SNP TSC0027455
ctattaatttact

SEQ ID NO: 109761 - DNA, 13 bp, Artificial Sequence
  Oligonucleotide for detection of SNP TSC0027455
ttgttgttttatt

SEQ ID NO: 109762 - DNA, 13 bp, Artificial Sequence
  Oligonucleotide for detection of SNP TSC0027455
aataaaacaacaa

SEQ ID NO: 109763 - DNA, 13 bp, Artificial Sequence
  Oligonucleotide for detection of SNP TSC0027455
ttgttggtttatt

SEQ ID NO: 109764 - DNA, 13 bp, Artificial Sequence
  Oligonucleotide for detection of SNP TSC0027455
aataaaccaacaa

SEQ ID NO: 109765 - DNA, 13 bp, Artificial Sequence
  Oligonucleotide for detection of SNP TSC0027456
tggttttgtgaag

SEQ ID NO: 109766 - DNA, 13 bp, Artificial Sequence
  Oligonucleotide for detection of SNP TSC0027456
cttcacaaaacca

SEQ ID NO: 109767 - DNA, 13 bp, Artificial Sequence
  Oligonucleotide for detection of SNP TSC0027456
tggtttcgtgaag

SEQ ID NO: 109768 - DNA, 13 bp, Artificial Sequence
  Oligonucleotide for detection of SNP TSC0027456
cttcacgaaacca

SEQ ID NO: 109769 - DNA, 13 bp, Artificial Sequence
  Oligonucleotide for detection of SNP TSC0027456
tggttttgcgaag

SEQ ID NO: 109770 - DNA, 13 bp, Artificial Sequence
  Oligonucleotide for detection of SNP TSC0027456
cttcgcaaaacca

SEQ ID NO: 109771 - DNA, 13 bp, Artificial Sequence
  Oligonucleotide for detection of SNP TSC0027456
tggtttcgcgaag

SEQ ID NO: 109772 - DNA, 13 bp, Artificial Sequence
  Oligonucleotide for detection of SNP TSC0027456
cttcgcgaaacca

SEQ ID NO: 109773 - DNA, 13 bp, Artificial Sequence
  Oligonucleotide for detection of SNP TSC0027456
ttttgtggagtta

SEQ ID NO: 109774 - DNA, 13 bp, Artificial Sequence
  Oligonucleotide for detection of SNP TSC0027456
taactccacaaaa

SEQ ID NO: 109775 - DNA, 13 bp, Artificial Sequence
  Oligonucleotide for detection of SNP TSC0027456
ttttgtagagtta

SEQ ID NO: 109776 - DNA, 13 bp, Artificial Sequence
  Oligonucleotide for detection of SNP TSC0027456
taactctacaaaa

SEQ ID NO: 109777 - DNA, 13 bp, Artificial Sequence
  Oligonucleotide for detection of SNP TSC0027456
tttcgtggagtta

SEQ ID NO: 109778 - DNA, 13 bp, Artificial Sequence
  Oligonucleotide for detection of SNP TSC0027456
taactccacgaaa

SEQ ID NO: 109779 - DNA, 13 bp, Artificial Sequence
  Oligonucleotide for detection of SNP TSC0027456
tttcgtagagtta

SEQ ID NO: 109780 - DNA, 13 bp, Artificial Sequence
  Oligonucleotide for detection of SNP TSC0027456
taactctacgaaa

SEQ ID NO: 109781 - DNA, 13 bp, Artificial Sequence
  Oligonucleotide for detection of SNP TSC0027456
ttttgcggagtta

SEQ ID NO: 109782 - DNA, 13 bp, Artificial Sequence
  Oligonucleotide for detection of SNP TSC0027456
taactccgcaaaa

SEQ ID NO: 109783 - DNA, 13 bp, Artificial Sequence
  Oligonucleotide for detection of SNP TSC0027456
tttcgcggagtta

SEQ ID NO: 109784 - DNA, 13 bp, Artificial Sequence
  Oligonucleotide for detection of SNP TSC0027456
taactccgcgaaa

SEQ ID NO: 109785 - DNA, 13 bp, Artificial Sequence
  Oligonucleotide for detection of SNP TSC0027457
ttaggtggaaagy

SEQ ID NO: 109786 - DNA, 13 bp, Artificial Sequence
  Oligonucleotide for detection of SNP TSC0027457
rctttccacctaa

SEQ ID NO: 109787 - DNA, 13 bp, Artificial Sequence
  Oligonucleotide for detection of SNP TSC0027457
ttaggtagaaagy

SEQ ID NO: 109788 - DNA, 13 bp, Artificial Sequence
  Oligonucleotide for detection of SNP TSC0027457
rctttctacctaa

SEQ ID NO: 109789 - DNA, 13 bp, Artificial Sequence
  Oligonucleotide for detection of SNP TSC0027458
tatttaatgttgt

SEQ ID NO: 109790 - DNA, 13 bp, Artificial Sequence
  Oligonucleotide for detection of SNP TSC0027458
acaacattaaata

SEQ ID NO: 109791 - DNA, 13 bp, Artificial Sequence
  Oligonucleotide for detection of SNP TSC0027459
tattgtgagcggg

SEQ ID NO: 109792 - DNA, 13 bp, Artificial Sequence
  Oligonucleotide for detection of SNP TSC0027459
cccgctcacaata

SEQ ID NO: 109793 - DNA, 13 bp, Artificial Sequence
  Oligonucleotide for detection of SNP TSC0027459
tattgtaagcggg

SEQ ID NO: 109794 - DNA, 13 bp, Artificial Sequence
  Oligonucleotide for detection of SNP TSC0027459
cccgcttacaata

SEQ ID NO: 109795 - DNA, 13 bp, Artificial Sequence
  Oligonucleotide for detection of SNP TSC0027460
ttaggtttggtgg

SEQ ID NO: 109796 - DNA, 13 bp, Artificial Sequence
  Oligonucleotide for detection of SNP TSC0027460
ccaccaaacctaa

SEQ ID NO: 109797 - DNA, 13 bp, Artificial Sequence
  Oligonucleotide for detection of SNP TSC0027460
ttaggttcggtgg

SEQ ID NO: 109798 - DNA, 13 bp, Artificial Sequence
  Oligonucleotide for detection of SNP TSC0027460
ccaccgaacctaa

SEQ ID NO: 109799 - DNA, 13 bp, Artificial Sequence
  Oligonucleotide for detection of SNP TSC0027460
ttattgggtttgg

SEQ ID NO: 109800 - DNA, 13 bp, Artificial Sequence
  Oligonucleotide for detection of SNP TSC0027460
ccaaacccaataa

SEQ ID NO: 109801 - DNA, 13 bp, Artificial Sequence
  Oligonucleotide for detection of SNP TSC0027460
ttatcgggtttgg

SEQ ID NO: 109802 - DNA, 13 bp, Artificial Sequence
  Oligonucleotide for detection of SNP TSC0027460
ccaaacccgataa

SEQ ID NO: 109803 - DNA, 13 bp, Artificial Sequence
  Oligonucleotide for detection of SNP TSC0027461
ttgtttgttttga

SEQ ID NO: 109804 - DNA, 13 bp, Artificial Sequence
  Oligonucleotide for detection of SNP TSC0027461
tcaaaacaaacaa

SEQ ID NO: 109805 - DNA, 13 bp, Artificial Sequence
  Oligonucleotide for detection of SNP TSC0027461
ttgttttttttga

SEQ ID NO: 109806 - DNA, 13 bp, Artificial Sequence
  Oligonucleotide for detection of SNP TSC0027461
tcaaaaaaaacaa

SEQ ID NO: 109807 - DNA, 13 bp, Artificial Sequence
  Oligonucleotide for detection of SNP TSC0027461
ttgttcgttttga

SEQ ID NO: 109808 - DNA, 13 bp, Artificial Sequence
  Oligonucleotide for detection of SNP TSC0027461
tcaaaacgaacaa

SEQ ID NO: 109809 - DNA, 13 bp, Artificial Sequence
  Oligonucleotide for detection of SNP TSC0027461
ttagggtgggtag

SEQ ID NO: 109810 - DNA, 13 bp, Artificial Sequence
  Oligonucleotide for detection of SNP TSC0027461
ctacccaccctaa

SEQ ID NO: 109811 - DNA, 13 bp, Artificial Sequence
  Oligonucleotide for detection of SNP TSC0027461
ttagggagggtag

SEQ ID NO: 109812 - DNA, 13 bp, Artificial Sequence
  Oligonucleotide for detection of SNP TSC0027461
ctaccctccctaa

SEQ ID NO: 109813 - DNA, 13 bp, Artificial Sequence
  Oligonucleotide for detection of SNP TSC0027461
ttagggcgggtag

SEQ ID NO: 109814 - DNA, 13 bp, Artificial Sequence
  Oligonucleotide for detection of SNP TSC0027461
ctacccgccctaa

SEQ ID NO: 109815 - DNA, 13 bp, Artificial Sequence
  Oligonucleotide for detection of SNP TSC0027462
tgttttatggtag

SEQ ID NO: 109816 - DNA, 13 bp, Artificial Sequence
  Oligonucleotide for detection of SNP TSC0027462
ctaccataaaaca

SEQ ID NO: 109817 - DNA, 13 bp, Artificial Sequence
  Oligonucleotide for detection of SNP TSC0027462
tgttttgtggtag

SEQ ID NO: 109818 - DNA, 13 bp, Artificial Sequence
  Oligonucleotide for detection of SNP TSC0027462
ctaccacaaaaca

SEQ ID NO: 109819 - DNA, 13 bp, Artificial Sequence
  Oligonucleotide for detection of SNP TSC0027462
cgttttatggtag

SEQ ID NO: 109820 - DNA, 13 bp, Artificial Sequence
  Oligonucleotide for detection of SNP TSC0027462
ctaccataaaacg

SEQ ID NO: 109821 - DNA, 13 bp, Artificial Sequence
  Oligonucleotide for detection of SNP TSC0027462
cgttttgtggtag

SEQ ID NO: 109822 - DNA, 13 bp, Artificial Sequence
  Oligonucleotide for detection of SNP TSC0027462
ctaccacaaaacg

SEQ ID NO: 109823 - DNA, 13 bp, Artificial Sequence
  Oligonucleotide for detection of SNP TSC0027462
tgtttcgtggtag

SEQ ID NO: 109824 - DNA, 13 bp, Artificial Sequence
  Oligonucleotide for detection of SNP TSC0027462
ctaccacgaaaca

SEQ ID NO: 109825 - DNA, 13 bp, Artificial Sequence
  Oligonucleotide for detection of SNP TSC0027462
cgtttcgtggtag

SEQ ID NO: 109826 - DNA, 13 bp, Artificial Sequence
  Oligonucleotide for detection of SNP TSC0027462
ctaccacgaaacg

SEQ ID NO: 109827 - DNA, 13 bp, Artificial Sequence
  Oligonucleotide for detection of SNP TSC0027462
ttgttatgaagtg

SEQ ID NO: 109828 - DNA, 13 bp, Artificial Sequence
  Oligonucleotide for detection of SNP TSC0027462
cacttcataacaa

SEQ ID NO: 109829 - DNA, 13 bp, Artificial Sequence
  Oligonucleotide for detection of SNP TSC0027462
ttgttatgaagcg

SEQ ID NO: 109830 - DNA, 13 bp, Artificial Sequence
  Oligonucleotide for detection of SNP TSC0027462
cgcttcataacaa

SEQ ID NO: 109831 - DNA, 13 bp, Artificial Sequence
  Oligonucleotide for detection of SNP TSC0027462
ttgttacgaagtg

SEQ ID NO: 109832 - DNA, 13 bp, Artificial Sequence
  Oligonucleotide for detection of SNP TSC0027462
cacttcgtaacaa

SEQ ID NO: 109833 - DNA, 13 bp, Artificial Sequence
  Oligonucleotide for detection of SNP TSC0027462
ttgttacgaagcg

SEQ ID NO: 109834 - DNA, 13 bp, Artificial Sequence
  Oligonucleotide for detection of SNP TSC0027462
cgcttcgtaacaa

SEQ ID NO: 109835 - DNA, 13 bp, Artificial Sequence
  Oligonucleotide for detection of SNP TSC0027463
agttatgtaggag

SEQ ID NO: 109836 - DNA, 13 bp, Artificial Sequence
  Oligonucleotide for detection of SNP TSC0027463
ctcctacataact

SEQ ID NO: 109837 - DNA, 13 bp, Artificial Sequence
  Oligonucleotide for detection of SNP TSC0027463
agttatttaggag

SEQ ID NO: 109838 - DNA, 13 bp, Artificial Sequence
  Oligonucleotide for detection of SNP TSC0027463
ctcctaaataact

SEQ ID NO: 109839 - DNA, 13 bp, Artificial Sequence
  Oligonucleotide for detection of SNP TSC0027463
agttacgtaggag

SEQ ID NO: 109840 - DNA, 13 bp, Artificial Sequence
  Oligonucleotide for detection of SNP TSC0027463
ctcctacgtaact

SEQ ID NO: 109841 - DNA, 13 bp, Artificial Sequence
  Oligonucleotide for detection of SNP TSC0027463
tttttgtgtagtt

SEQ ID NO: 109842 - DNA, 13 bp, Artificial Sequence
  Oligonucleotide for detection of SNP TSC0027463
aactacacaaaaa

SEQ ID NO: 109843 - DNA, 13 bp, Artificial Sequence
  Oligonucleotide for detection of SNP TSC0027463
tttttgagtagtt

SEQ ID NO: 109844 - DNA, 13 bp, Artificial Sequence
  Oligonucleotide for detection of SNP TSC0027463
aactactcaaaaa

SEQ ID NO: 109845 - DNA, 13 bp, Artificial Sequence
  Oligonucleotide for detection of SNP TSC0027463
tttttgcgtagtt

SEQ ID NO: 109846 - DNA, 13 bp, Artificial Sequence
  Oligonucleotide for detection of SNP TSC0027463
aactacgcaaaaa

SEQ ID NO: 109847 - DNA, 13 bp, Artificial Sequence
  Oligonucleotide for detection of SNP TSC0027464
ataagtagtttty

SEQ ID NO: 109848 - DNA, 13 bp, Artificial Sequence
  Oligonucleotide for detection of SNP TSC0027464
raaaactacttat

SEQ ID NO: 109849 - DNA, 13 bp, Artificial Sequence
  Oligonucleotide for detection of SNP TSC0027464
ataagttgtttty

SEQ ID NO: 109850 - DNA, 13 bp, Artificial Sequence
  Oligonucleotide for detection of SNP TSC0027464
raaaacaacttat

SEQ ID NO: 109851 - DNA, 13 bp, Artificial Sequence
  Oligonucleotide for detection of SNP TSC0027464
ataagtcgtttty

SEQ ID NO: 109852 - DNA, 13 bp, Artificial Sequence
  Oligonucleotide for detection of SNP TSC0027464
raaaacgacttat

SEQ ID NO: 109853 - DNA, 13 bp, Artificial Sequence
  Oligonucleotide for detection of SNP TSC0027464
gaggattgtttgt

SEQ ID NO: 109854 - DNA, 13 bp, Artificial Sequence
  Oligonucleotide for detection of SNP TSC0027464
acaaacaatcctc

SEQ ID NO: 109855 - DNA, 13 bp, Artificial Sequence
  Oligonucleotide for detection of SNP TSC0027464
gaggatggtttgt

SEQ ID NO: 109856 - DNA, 13 bp, Artificial Sequence
  Oligonucleotide for detection of SNP TSC0027464
acaaaccatcctc

SEQ ID NO: 109857 - DNA, 13 bp, Artificial Sequence
  Oligonucleotide for detection of SNP TSC0027464
gaggacggtttgt

SEQ ID NO: 109858 - DNA, 13 bp, Artificial Sequence
  Oligonucleotide for detection of SNP TSC0027464
acaaaccgtcctc

SEQ ID NO: 109859 - DNA, 13 bp, Artificial Sequence
  Oligonucleotide for detection of SNP TSC0027468
tagatatgttaty

SEQ ID NO: 109860 - DNA, 13 bp, Artificial Sequence
  Oligonucleotide for detection of SNP TSC0027468
rataacatatcta

SEQ ID NO: 109861 - DNA, 13 bp, Artificial Sequence
  Oligonucleotide for detection of SNP TSC0027468
tagatacgttaty

SEQ ID NO: 109862 - DNA, 13 bp, Artificial Sequence
  Oligonucleotide for detection of SNP TSC0027468
rataacgtatcta

SEQ ID NO: 109863 - DNA, 13 bp, Artificial Sequence
  Oligonucleotide for detection of SNP TSC0027468
gatggtgtgtttg

SEQ ID NO: 109864 - DNA, 13 bp, Artificial Sequence
  Oligonucleotide for detection of SNP TSC0027468
caaacacaccatc

SEQ ID NO: 109865 - DNA, 13 bp, Artificial Sequence
  Oligonucleotide for detection of SNP TSC0027468
gatggtatgtttg

SEQ ID NO: 109866 - DNA, 13 bp, Artificial Sequence
  Oligonucleotide for detection of SNP TSC0027468
caaacataccatc

SEQ ID NO: 109867 - DNA, 13 bp, Artificial Sequence
  Oligonucleotide for detection of SNP TSC0027468
gatggcgtgtttg

SEQ ID NO: 109868 - DNA, 13 bp, Artificial Sequence
  Oligonucleotide for detection of SNP TSC0027468
caaacacgccatc

SEQ ID NO: 109869 - DNA, 13 bp, Artificial Sequence
  Oligonucleotide for detection of SNP TSC0027469
gaatggtttttta

SEQ ID NO: 109870 - DNA, 13 bp, Artificial Sequence
  Oligonucleotide for detection of SNP TSC0027469
taaaaaaccattc

SEQ ID NO: 109871 - DNA, 13 bp, Artificial Sequence
  Oligonucleotide for detection of SNP TSC0027469
gaatgggttttta

SEQ ID NO: 109872 - DNA, 13 bp, Artificial Sequence
  Oligonucleotide for detection of SNP TSC0027469
taaaaacccattc

SEQ ID NO: 109873 - DNA, 13 bp, Artificial Sequence
  Oligonucleotide for detection of SNP TSC0027469
tagagagttatty

SEQ ID NO: 109874 - DNA, 13 bp, Artificial Sequence
  Oligonucleotide for detection of SNP TSC0027469
raataactctcta

SEQ ID NO: 109875 - DNA, 13 bp, Artificial Sequence
  Oligonucleotide for detection of SNP TSC0027469
tagagatttatty

SEQ ID NO: 109876 - DNA, 13 bp, Artificial Sequence
  Oligonucleotide for detection of SNP TSC0027469
raataaatctcta

SEQ ID NO: 109877 - DNA, 13 bp, Artificial Sequence
  Oligonucleotide for detection of SNP TSC0027471
ttgttgtaaattg

SEQ ID NO: 109878 - DNA, 13 bp, Artificial Sequence
  Oligonucleotide for detection of SNP TSC0027471
caatttacaacaa

SEQ ID NO: 109879 - DNA, 13 bp, Artificial Sequence
  Oligonucleotide for detection of SNP TSC0027471
ttgttggaaattg

SEQ ID NO: 109880 - DNA, 13 bp, Artificial Sequence
  Oligonucleotide for detection of SNP TSC0027471
caatttccaacaa

SEQ ID NO: 109881 - DNA, 13 bp, Artificial Sequence
  Oligonucleotide for detection of SNP TSC0027471
tcgttgtaaattg

SEQ ID NO: 109882 - DNA, 13 bp, Artificial Sequence
  Oligonucleotide for detection of SNP TSC0027471
caatttacaacga

SEQ ID NO: 109883 - DNA, 13 bp, Artificial Sequence
  Oligonucleotide for detection of SNP TSC0027471
tcgttggaaattg

SEQ ID NO: 109884 - DNA, 13 bp, Artificial Sequence
  Oligonucleotide for detection of SNP TSC0027471
caatttccaacga

SEQ ID NO: 109885 - DNA, 13 bp, Artificial Sequence
  Oligonucleotide for detection of SNP TSC0027471
tagtttgtaatgg

SEQ ID NO: 109886 - DNA, 13 bp, Artificial Sequence
  Oligonucleotide for detection of SNP TSC0027471
ccattacaaacta

SEQ ID NO: 109887 - DNA, 13 bp, Artificial Sequence
  Oligonucleotide for detection of SNP TSC0027471
tagtttttaatgg

SEQ ID NO: 109888 - DNA, 13 bp, Artificial Sequence
  Oligonucleotide for detection of SNP TSC0027471
ccattaaaaacta

SEQ ID NO: 109889 - DNA, 13 bp, Artificial Sequence
  Oligonucleotide for detection of SNP TSC0027471
tagtttgtaacgg

SEQ ID NO: 109890 - DNA, 13 bp, Artificial Sequence
  Oligonucleotide for detection of SNP TSC0027471
ccgttacaaacta

SEQ ID NO: 109891 - DNA, 13 bp, Artificial Sequence
  Oligonucleotide for detection of SNP TSC0027471
tagtttttaacgg

SEQ ID NO: 109892 - DNA, 13 bp, Artificial Sequence
  Oligonucleotide for detection of SNP TSC0027471
ccgttaaaaacta

SEQ ID NO: 109893 - DNA, 13 bp, Artificial Sequence
  Oligonucleotide for detection of SNP TSC0027472
gaggtaaaggttt

SEQ ID NO: 109894 - DNA, 13 bp, Artificial Sequence
  Oligonucleotide for detection of SNP TSC0027472
aaacctttacctc

SEQ ID NO: 109895 - DNA, 13 bp, Artificial Sequence
  Oligonucleotide for detection of SNP TSC0027472
gaggtagaggttt

SEQ ID NO: 109896 - DNA, 13 bp, Artificial Sequence
  Oligonucleotide for detection of SNP TSC0027472
aaacctctacctc

SEQ ID NO: 109897 - DNA, 13 bp, Artificial Sequence
  Oligonucleotide for detection of SNP TSC0027473
tattttgatttay

SEQ ID NO: 109898 - DNA, 13 bp, Artificial Sequence
  Oligonucleotide for detection of SNP TSC0027473
rtaaatcaaaata

SEQ ID NO: 109899 - DNA, 13 bp, Artificial Sequence
  Oligonucleotide for detection of SNP TSC0027473
tatttttatttay

SEQ ID NO: 109900 - DNA, 13 bp, Artificial Sequence
  Oligonucleotide for detection of SNP TSC0027473
rtaaataaaaata

SEQ ID NO: 109901 - DNA, 13 bp, Artificial Sequence
  Oligonucleotide for detection of SNP TSC0027473
gtaggttaaaatg

SEQ ID NO: 109902 - DNA, 13 bp, Artificial Sequence
  Oligonucleotide for detection of SNP TSC0027473
cattttaacctac

SEQ ID NO: 109903 - DNA, 13 bp, Artificial Sequence
  Oligonucleotide for detection of SNP TSC0027473
gtaggtaaaaatg

SEQ ID NO: 109904 - DNA, 13 bp, Artificial Sequence
  Oligonucleotide for detection of SNP TSC0027473
catttttacctac

SEQ ID NO: 109905 - DNA, 13 bp, Artificial Sequence
  Oligonucleotide for detection of SNP TSC0027474
tggattgtatgaa

SEQ ID NO: 109906 - DNA, 13 bp, Artificial Sequence
  Oligonucleotide for detection of SNP TSC0027474
ttcatacaatcca

SEQ ID NO: 109907 - DNA, 13 bp, Artificial Sequence
  Oligonucleotide for detection of SNP TSC0027474
tggattatatgaa

SEQ ID NO: 109908 - DNA, 13 bp, Artificial Sequence
  Oligonucleotide for detection of SNP TSC0027474
ttcatataatcca

SEQ ID NO: 109909 - DNA, 13 bp, Artificial Sequence
  Oligonucleotide for detection of SNP TSC0027475
gagtattggttag

SEQ ID NO: 109910 - DNA, 13 bp, Artificial Sequence
  Oligonucleotide for detection of SNP TSC0027475
ctaaccaatactc

SEQ ID NO: 109911 - DNA, 13 bp, Artificial Sequence
  Oligonucleotide for detection of SNP TSC0027475
gagtatcggttag

SEQ ID NO: 109912 - DNA, 13 bp, Artificial Sequence
  Oligonucleotide for detection of SNP TSC0027475
ctaaccgatactc

SEQ ID NO: 109913 - DNA, 13 bp, Artificial Sequence
  Oligonucleotide for detection of SNP TSC0027475
ttggttggtgtty

SEQ ID NO: 109914 - DNA, 13 bp, Artificial Sequence
  Oligonucleotide for detection of SNP TSC0027475
raacaccaaccaa

SEQ ID NO: 109915 - DNA, 13 bp, Artificial Sequence
  Oligonucleotide for detection of SNP TSC0027475
ttggttagtgtty

SEQ ID NO: 109916 - DNA, 13 bp, Artificial Sequence
  Oligonucleotide for detection of SNP TSC0027475
raacactaaccaa

SEQ ID NO: 109917 - DNA, 13 bp, Artificial Sequence
  Oligonucleotide for detection of SNP TSC0027475
ttggtcggtgtty

SEQ ID NO: 109918 - DNA, 13 bp, Artificial Sequence
  Oligonucleotide for detection of SNP TSC0027475
raacaccgaccaa

SEQ ID NO: 109919 - DNA, 13 bp, Artificial Sequence
  Oligonucleotide for detection of SNP TSC0027476
tttgattgagatg

SEQ ID NO: 109920 - DNA, 13 bp, Artificial Sequence
  Oligonucleotide for detection of SNP TSC0027476
catctcaatcaaa

SEQ ID NO: 109921 - DNA, 13 bp, Artificial Sequence
  Oligonucleotide for detection of SNP TSC0027476
tttgatcgagatg

SEQ ID NO: 109922 - DNA, 13 bp, Artificial Sequence
  Oligonucleotide for detection of SNP TSC0027476
catctcgatcaaa

SEQ ID NO: 109923 - DNA, 13 bp, Artificial Sequence
  Oligonucleotide for detection of SNP TSC0027476
tttgattgagacg

SEQ ID NO: 109924 - DNA, 13 bp, Artificial Sequence
  Oligonucleotide for detection of SNP TSC0027476
cgtctcaatcaaa

SEQ ID NO: 109925 - DNA, 13 bp, Artificial Sequence
  Oligonucleotide for detection of SNP TSC0027476
tttgatcgagacg

SEQ ID NO: 109926 - DNA, 13 bp, Artificial Sequence
  Oligonucleotide for detection of SNP TSC0027476
cgtctcgatcaaa

SEQ ID NO: 109927 - DNA, 13 bp, Artificial Sequence
  Oligonucleotide for detection of SNP TSC0027476
tgttttggttagg

SEQ ID NO: 109928 - DNA, 13 bp, Artificial Sequence
  Oligonucleotide for detection of SNP TSC0027476
cctaaccaaaaca

SEQ ID NO: 109929 - DNA, 13 bp, Artificial Sequence
  Oligonucleotide for detection of SNP TSC0027476
tgttttagttagg

SEQ ID NO: 109930 - DNA, 13 bp, Artificial Sequence
  Oligonucleotide for detection of SNP TSC0027476
cctaactaaaaca

SEQ ID NO: 109931 - DNA, 13 bp, Artificial Sequence
  Oligonucleotide for detection of SNP TSC0027476
cgttttggttagg

SEQ ID NO: 109932 - DNA, 13 bp, Artificial Sequence
  Oligonucleotide for detection of SNP TSC0027476
cctaaccaaaacg

SEQ ID NO: 109933 - DNA, 13 bp, Artificial Sequence
  Oligonucleotide for detection of SNP TSC0027476
cgttttagttagg

SEQ ID NO: 109934 - DNA, 13 bp, Artificial Sequence
  Oligonucleotide for detection of SNP TSC0027476
cctaactaaaacg

SEQ ID NO: 109935 - DNA, 13 bp, Artificial Sequence
  Oligonucleotide for detection of SNP TSC0027476
tgtttcggttagg

SEQ ID NO: 109936 - DNA, 13 bp, Artificial Sequence
  Oligonucleotide for detection of SNP TSC0027476
cctaaccgaaaca

SEQ ID NO: 109937 - DNA, 13 bp, Artificial Sequence
  Oligonucleotide for detection of SNP TSC0027476
cgtttcggttagg

SEQ ID NO: 109938 - DNA, 13 bp, Artificial Sequence
  Oligonucleotide for detection of SNP TSC0027476
cctaaccgaaacg

SEQ ID NO: 109939 - DNA, 13 bp, Artificial Sequence
  Oligonucleotide for detection of SNP TSC0027477
tgttttagtgtaa

SEQ ID NO: 109940 - DNA, 13 bp, Artificial Sequence
  Oligonucleotide for detection of SNP TSC0027477
ttacactaaaaca

SEQ ID NO: 109941 - DNA, 13 bp, Artificial Sequence
  Oligonucleotide for detection of SNP TSC0027477
tgtttttgtgtaa

SEQ ID NO: 109942 - DNA, 13 bp, Artificial Sequence
  Oligonucleotide for detection of SNP TSC0027477
ttacacaaaaaca

SEQ ID NO: 109943 - DNA, 13 bp, Artificial Sequence
  Oligonucleotide for detection of SNP TSC0027477
tgttttcgtgtaa

SEQ ID NO: 109944 - DNA, 13 bp, Artificial Sequence
  Oligonucleotide for detection of SNP TSC0027477
ttacacgaaaaca

SEQ ID NO: 109945 - DNA, 13 bp, Artificial Sequence
  Oligonucleotide for detection of SNP TSC0027477
ttatattaaaata

SEQ ID NO: 109946 - DNA, 13 bp, Artificial Sequence
  Oligonucleotide for detection of SNP TSC0027477
tattttaatataa

SEQ ID NO: 109947 - DNA, 13 bp, Artificial Sequence
  Oligonucleotide for detection of SNP TSC0027477
ttatatgaaaata

SEQ ID NO: 109948 - DNA, 13 bp, Artificial Sequence
  Oligonucleotide for detection of SNP TSC0027477
tattttcatataa

SEQ ID NO: 109949 - DNA, 13 bp, Artificial Sequence
  Oligonucleotide for detection of SNP TSC0027477
ttatacgaaaata

SEQ ID NO: 109950 - DNA, 13 bp, Artificial Sequence
  Oligonucleotide for detection of SNP TSC0027477
tattttcgtataa

SEQ ID NO: 109951 - DNA, 13 bp, Artificial Sequence
  Oligonucleotide for detection of SNP TSC0027478
gggaagaaggtga

SEQ ID NO: 109952 - DNA, 13 bp, Artificial Sequence
  Oligonucleotide for detection of SNP TSC0027478
tcaccttcttccc

SEQ ID NO: 109953 - DNA, 13 bp, Artificial Sequence
  Oligonucleotide for detection of SNP TSC0027478
gggaaggaggtga

SEQ ID NO: 109954 - DNA, 13 bp, Artificial Sequence
  Oligonucleotide for detection of SNP TSC0027478
tcacctccttccc

SEQ ID NO: 109955 - DNA, 13 bp, Artificial Sequence
  Oligonucleotide for detection of SNP TSC0027478
gggaagaaggcga

SEQ ID NO: 109956 - DNA, 13 bp, Artificial Sequence
  Oligonucleotide for detection of SNP TSC0027478
tcgccttcttccc

SEQ ID NO: 109957 - DNA, 13 bp, Artificial Sequence
  Oligonucleotide for detection of SNP TSC0027478
gggaaggaggcga

SEQ ID NO: 109958 - DNA, 13 bp, Artificial Sequence
  Oligonucleotide for detection of SNP TSC0027478
tcgcctccttccc

SEQ ID NO: 109959 - DNA, 13 bp, Artificial Sequence
  Oligonucleotide for detection of SNP TSC0027479
tttatatatttty

SEQ ID NO: 109960 - DNA, 13 bp, Artificial Sequence
  Oligonucleotide for detection of SNP TSC0027479
raaaatatataaa

SEQ ID NO: 109961 - DNA, 13 bp, Artificial Sequence
  Oligonucleotide for detection of SNP TSC0027479
tttatagatttty

SEQ ID NO: 109962 - DNA, 13 bp, Artificial Sequence
  Oligonucleotide for detection of SNP TSC0027479
raaaatctataaa

SEQ ID NO: 109963 - DNA, 13 bp, Artificial Sequence
  Oligonucleotide for detection of SNP TSC0027479
ggaaatgtgtgga

SEQ ID NO: 109964 - DNA, 13 bp, Artificial Sequence
  Oligonucleotide for detection of SNP TSC0027479
tccacacatttcc

SEQ ID NO: 109965 - DNA, 13 bp, Artificial Sequence
  Oligonucleotide for detection of SNP TSC0027479
ggaaatttgtgga

SEQ ID NO: 109966 - DNA, 13 bp, Artificial Sequence
  Oligonucleotide for detection of SNP TSC0027479
tccacaaatttcc

SEQ ID NO: 109967 - DNA, 13 bp, Artificial Sequence
  Oligonucleotide for detection of SNP TSC0027480
ttgtaaaggattg

SEQ ID NO: 109968 - DNA, 13 bp, Artificial Sequence
  Oligonucleotide for detection of SNP TSC0027480
caatcctttacaa

SEQ ID NO: 109969 - DNA, 13 bp, Artificial Sequence
  Oligonucleotide for detection of SNP TSC0027480
ttgtaatggattg

SEQ ID NO: 109970 - DNA, 13 bp, Artificial Sequence
  Oligonucleotide for detection of SNP TSC0027480
caatccattacaa

SEQ ID NO: 109971 - DNA, 13 bp, Artificial Sequence
  Oligonucleotide for detection of SNP TSC0027480
ttgtaacggattg

SEQ ID NO: 109972 - DNA, 13 bp, Artificial Sequence
  Oligonucleotide for detection of SNP TSC0027480
caatccgttacaa

SEQ ID NO: 109973 - DNA, 13 bp, Artificial Sequence
  Oligonucleotide for detection of SNP TSC0027480
tagttttttgtaa

SEQ ID NO: 109974 - DNA, 13 bp, Artificial Sequence
  Oligonucleotide for detection of SNP TSC0027480
ttacaaaaaacta

SEQ ID NO: 109975 - DNA, 13 bp, Artificial Sequence
  Oligonucleotide for detection of SNP TSC0027480
tagtttgttgtaa

SEQ ID NO: 109976 - DNA, 13 bp, Artificial Sequence
  Oligonucleotide for detection of SNP TSC0027480
ttacaacaaacta

SEQ ID NO: 109977 - DNA, 13 bp, Artificial Sequence
  Oligonucleotide for detection of SNP TSC0027480
tagttcgttgtaa

SEQ ID NO: 109978 - DNA, 13 bp, Artificial Sequence
  Oligonucleotide for detection of SNP TSC0027480
ttacaacgaacta

SEQ ID NO: 109979 - DNA, 13 bp, Artificial Sequence
  Oligonucleotide for detection of SNP TSC0027481
ttttttaatgtag

SEQ ID NO: 109980 - DNA, 13 bp, Artificial Sequence
  Oligonucleotide for detection of SNP TSC0027481
ctacattaaaaaa

SEQ ID NO: 109981 - DNA, 13 bp, Artificial Sequence
  Oligonucleotide for detection of SNP TSC0027481
tttttttatgtag

SEQ ID NO: 109982 - DNA, 13 bp, Artificial Sequence
  Oligonucleotide for detection of SNP TSC0027481
ctacataaaaaaa

SEQ ID NO: 109983 - DNA, 13 bp, Artificial Sequence
  Oligonucleotide for detection of SNP TSC0027481
ttgtattgggaaa

SEQ ID NO: 109984 - DNA, 13 bp, Artificial Sequence
  Oligonucleotide for detection of SNP TSC0027481
tttcccaatacaa

SEQ ID NO: 109985 - DNA, 13 bp, Artificial Sequence
  Oligonucleotide for detection of SNP TSC0027481
ttgtatggggaaa

SEQ ID NO: 109986 - DNA, 13 bp, Artificial Sequence
  Oligonucleotide for detection of SNP TSC0027481
tttccccatacaa

SEQ ID NO: 109987 - DNA, 13 bp, Artificial Sequence
  Oligonucleotide for detection of SNP TSC0027482
tttatttgttttt

SEQ ID NO: 109988 - DNA, 13 bp, Artificial Sequence
  Oligonucleotide for detection of SNP TSC0027482
aaaaacaaataaa

SEQ ID NO: 109989 - DNA, 13 bp, Artificial Sequence
  Oligonucleotide for detection of SNP TSC0027482
tttattggttttt

SEQ ID NO: 109990 - DNA, 13 bp, Artificial Sequence
  Oligonucleotide for detection of SNP TSC0027482
aaaaaccaataaa

SEQ ID NO: 109991 - DNA, 13 bp, Artificial Sequence
  Oligonucleotide for detection of SNP TSC0027482
tttattcgttttt

SEQ ID NO: 109992 - DNA, 13 bp, Artificial Sequence
  Oligonucleotide for detection of SNP TSC0027482
aaaaacgaataaa

SEQ ID NO: 109993 - DNA, 13 bp, Artificial Sequence
  Oligonucleotide for detection of SNP TSC0027482
aaaaatgagtgga

SEQ ID NO: 109994 - DNA, 13 bp, Artificial Sequence
  Oligonucleotide for detection of SNP TSC0027482
tccactcattttt

SEQ ID NO: 109995 - DNA, 13 bp, Artificial Sequence
  Oligonucleotide for detection of SNP TSC0027482
aaaaattagtgga

SEQ ID NO: 109996 - DNA, 13 bp, Artificial Sequence
  Oligonucleotide for detection of SNP TSC0027482
tccactaattttt

SEQ ID NO: 109997 - DNA, 13 bp, Artificial Sequence
  Oligonucleotide for detection of SNP TSC0027482
aaaaacgagtgga

SEQ ID NO: 109998 - DNA, 13 bp, Artificial Sequence
  Oligonucleotide for detection of SNP TSC0027482
tccactcgttttt

SEQ ID NO: 109999 - DNA, 13 bp, Artificial Sequence
  Oligonucleotide for detection of SNP TSC0027483
tttatatgtttag

SEQ ID NO: 110000 - DNA, 13 bp, Artificial Sequence
  Oligonucleotide for detection of SNP TSC0027483
ctaaacatataaa

SEQ ID NO: 110001 - DNA, 13 bp, Artificial Sequence
  Oligonucleotide for detection of SNP TSC0027483
tttatacgtttag

SEQ ID NO: 110002 - DNA, 13 bp, Artificial Sequence
  Oligonucleotide for detection of SNP TSC0027483
ctaaacgtataaa

SEQ ID NO: 110003 - DNA, 13 bp, Artificial Sequence
  Oligonucleotide for detection of SNP TSC0027483
ttgaatgtatggg

SEQ ID NO: 110004 - DNA, 13 bp, Artificial Sequence
  Oligonucleotide for detection of SNP TSC0027483
cccatacattcaa

SEQ ID NO: 110005 - DNA, 13 bp, Artificial Sequence
  Oligonucleotide for detection of SNP TSC0027483
ttgaatatatggg

SEQ ID NO: 110006 - DNA, 13 bp, Artificial Sequence
  Oligonucleotide for detection of SNP TSC0027483
cccatatattcaa

SEQ ID NO: 110007 - DNA, 13 bp, Artificial Sequence
  Oligonucleotide for detection of SNP TSC0027483
ttgaacgtatggg

SEQ ID NO: 110008 - DNA, 13 bp, Artificial Sequence
  Oligonucleotide for detection of SNP TSC0027483
cccatacgttcaa

SEQ ID NO: 110009 - DNA, 13 bp, Artificial Sequence
  Oligonucleotide for detection of SNP TSC0027487
tggagagggggga

SEQ ID NO: 110010 - DNA, 13 bp, Artificial Sequence
  Oligonucleotide for detection of SNP TSC0027487
tcccccctctcca

SEQ ID NO: 110011 - DNA, 13 bp, Artificial Sequence
  Oligonucleotide for detection of SNP TSC0027487
tggagatggggga

SEQ ID NO: 110012 - DNA, 13 bp, Artificial Sequence
  Oligonucleotide for detection of SNP TSC0027487
tcccccatctcca

SEQ ID NO: 110013 - DNA, 13 bp, Artificial Sequence
  Oligonucleotide for detection of SNP TSC0027487
tggagacggggga

SEQ ID NO: 110014 - DNA, 13 bp, Artificial Sequence
  Oligonucleotide for detection of SNP TSC0027487
tcccccgtctcca

SEQ ID NO: 110015 - DNA, 13 bp, Artificial Sequence
  Oligonucleotide for detection of SNP TSC0027488
atgatagggttty

SEQ ID NO: 110016 - DNA, 13 bp, Artificial Sequence
  Oligonucleotide for detection of SNP TSC0027488
raaaccctatcat

SEQ ID NO: 110017 - DNA, 13 bp, Artificial Sequence
  Oligonucleotide for detection of SNP TSC0027488
atgataaggttty

SEQ ID NO: 110018 - DNA, 13 bp, Artificial Sequence
  Oligonucleotide for detection of SNP TSC0027488
raaaccttatcat

SEQ ID NO: 110019 - DNA, 13 bp, Artificial Sequence
  Oligonucleotide for detection of SNP TSC0027488
acgatagggttty

SEQ ID NO: 110020 - DNA, 13 bp, Artificial Sequence
  Oligonucleotide for detection of SNP TSC0027488
raaaccctatcgt

SEQ ID NO: 110021 - DNA, 13 bp, Artificial Sequence
  Oligonucleotide for detection of SNP TSC0027488
acgataaggttty

SEQ ID NO: 110022 - DNA, 13 bp, Artificial Sequence
  Oligonucleotide for detection of SNP TSC0027488
raaaccttatcgt

SEQ ID NO: 110023 - DNA, 13 bp, Artificial Sequence
  Oligonucleotide for detection of SNP TSC0027489
attttatgtttty

SEQ ID NO: 110024 - DNA, 13 bp, Artificial Sequence
  Oligonucleotide for detection of SNP TSC0027489
raaaacataaaat

SEQ ID NO: 110025 - DNA, 13 bp, Artificial Sequence
  Oligonucleotide for detection of SNP TSC0027489
gagagtttggggt

SEQ ID NO: 110026 - DNA, 13 bp, Artificial Sequence
  Oligonucleotide for detection of SNP TSC0027489
accccaaactctc

SEQ ID NO: 110027 - DNA, 13 bp, Artificial Sequence
  Oligonucleotide for detection of SNP TSC0027489
gagagtatggggt

SEQ ID NO: 110028 - DNA, 13 bp, Artificial Sequence
  Oligonucleotide for detection of SNP TSC0027489
accccatactctc

SEQ ID NO: 110029 - DNA, 13 bp, Artificial Sequence
  Oligonucleotide for detection of SNP TSC0027490
taagtaataaagy

SEQ ID NO: 110030 - DNA, 13 bp, Artificial Sequence
  Oligonucleotide for detection of SNP TSC0027490
rctttattactta

SEQ ID NO: 110031 - DNA, 13 bp, Artificial Sequence
  Oligonucleotide for detection of SNP TSC0027490
taagtagtaaagy

SEQ ID NO: 110032 - DNA, 13 bp, Artificial Sequence
  Oligonucleotide for detection of SNP TSC0027490
rctttactactta

SEQ ID NO: 110033 - DNA, 13 bp, Artificial Sequence
  Oligonucleotide for detection of SNP TSC0027491
ttgggtgagttgt

SEQ ID NO: 110034 - DNA, 13 bp, Artificial Sequence
  Oligonucleotide for detection of SNP TSC0027491
acaactcacccaa

SEQ ID NO: 110035 - DNA, 13 bp, Artificial Sequence
  Oligonucleotide for detection of SNP TSC0027491
ttgggtaagttgt

SEQ ID NO: 110036 - DNA, 13 bp, Artificial Sequence
  Oligonucleotide for detection of SNP TSC0027491
acaacttacccaa

SEQ ID NO: 110037 - DNA, 13 bp, Artificial Sequence
  Oligonucleotide for detection of SNP TSC0027491
ttgggtgagtcgt

SEQ ID NO: 110038 - DNA, 13 bp, Artificial Sequence
  Oligonucleotide for detection of SNP TSC0027491
acgactcacccaa

SEQ ID NO: 110039 - DNA, 13 bp, Artificial Sequence
  Oligonucleotide for detection of SNP TSC0027491
ttgggtaagtcgt

SEQ ID NO: 110040 - DNA, 13 bp, Artificial Sequence
  Oligonucleotide for detection of SNP TSC0027491
acgacttacccaa

SEQ ID NO: 110041 - DNA, 13 bp, Artificial Sequence
  Oligonucleotide for detection of SNP TSC0027493
gatttagtgttta

SEQ ID NO: 110042 - DNA, 13 bp, Artificial Sequence
  Oligonucleotide for detection of SNP TSC0027493
taaacactaaatc

SEQ ID NO: 110043 - DNA, 13 bp, Artificial Sequence
  Oligonucleotide for detection of SNP TSC0027493
gatttaatgttta

SEQ ID NO: 110044 - DNA, 13 bp, Artificial Sequence
  Oligonucleotide for detection of SNP TSC0027493
taaacattaaatc

SEQ ID NO: 110045 - DNA, 13 bp, Artificial Sequence
  Oligonucleotide for detection of SNP TSC0027494
tttaaaatatatt

SEQ ID NO: 110046 - DNA, 13 bp, Artificial Sequence
  Oligonucleotide for detection of SNP TSC0027494
aatatattttaaa

SEQ ID NO: 110047 - DNA, 13 bp, Artificial Sequence
  Oligonucleotide for detection of SNP TSC0027494
tttaaagtatatt

SEQ ID NO: 110048 - DNA, 13 bp, Artificial Sequence
  Oligonucleotide for detection of SNP TSC0027494
aatatactttaaa

SEQ ID NO: 110049 - DNA, 13 bp, Artificial Sequence
  Oligonucleotide for detection of SNP TSC0027495
gttgtagagagag

SEQ ID NO: 110050 - DNA, 13 bp, Artificial Sequence
  Oligonucleotide for detection of SNP TSC0027495
ctctctctacaac

SEQ ID NO: 110051 - DNA, 13 bp, Artificial Sequence
  Oligonucleotide for detection of SNP TSC0027495
gttgtaaagagag

SEQ ID NO: 110052 - DNA, 13 bp, Artificial Sequence
  Oligonucleotide for detection of SNP TSC0027495
ctctctttacaac

SEQ ID NO: 110053 - DNA, 13 bp, Artificial Sequence
  Oligonucleotide for detection of SNP TSC0027496
aatttttgtaaty

SEQ ID NO: 110054 - DNA, 13 bp, Artificial Sequence
  Oligonucleotide for detection of SNP TSC0027496
rattacaaaaatt

SEQ ID NO: 110055 - DNA, 13 bp, Artificial Sequence
  Oligonucleotide for detection of SNP TSC0027496
aattttcgtaaty

SEQ ID NO: 110056 - DNA, 13 bp, Artificial Sequence
  Oligonucleotide for detection of SNP TSC0027496
rattacgaaaatt

SEQ ID NO: 110057 - DNA, 13 bp, Artificial Sequence
  Oligonucleotide for detection of SNP TSC0027496
ggttgtggagatt

SEQ ID NO: 110058 - DNA, 13 bp, Artificial Sequence
  Oligonucleotide for detection of SNP TSC0027496
aatctccacaacc

SEQ ID NO: 110059 - DNA, 13 bp, Artificial Sequence
  Oligonucleotide for detection of SNP TSC0027496
ggttgtagagatt

SEQ ID NO: 110060 - DNA, 13 bp, Artificial Sequence
  Oligonucleotide for detection of SNP TSC0027496
aatctctacaacc

SEQ ID NO: 110061 - DNA, 13 bp, Artificial Sequence
  Oligonucleotide for detection of SNP TSC0027496
ggttgcggagatt

SEQ ID NO: 110062 - DNA, 13 bp, Artificial Sequence
  Oligonucleotide for detection of SNP TSC0027496
aatctccgcaacc

SEQ ID NO: 110063 - DNA, 13 bp, Artificial Sequence
  Oligonucleotide for detection of SNP TSC0027497
tttgatgttatgg

SEQ ID NO: 110064 - DNA, 13 bp, Artificial Sequence
  Oligonucleotide for detection of SNP TSC0027497
ccataacatcaaa

SEQ ID NO: 110065 - DNA, 13 bp, Artificial Sequence
  Oligonucleotide for detection of SNP TSC0027497
tttgatattatgg

SEQ ID NO: 110066 - DNA, 13 bp, Artificial Sequence
  Oligonucleotide for detection of SNP TSC0027497
ccataatatcaaa

SEQ ID NO: 110067 - DNA, 13 bp, Artificial Sequence
  Oligonucleotide for detection of SNP TSC0027502
taaagtatagttt

SEQ ID NO: 110068 - DNA, 13 bp, Artificial Sequence
  Oligonucleotide for detection of SNP TSC0027502
aaactatacttta

SEQ ID NO: 110069 - DNA, 13 bp, Artificial Sequence
  Oligonucleotide for detection of SNP TSC0027502
taaagtgtagttt

SEQ ID NO: 110070 - DNA, 13 bp, Artificial Sequence
  Oligonucleotide for detection of SNP TSC0027502
aaactacacttta

SEQ ID NO: 110071 - DNA, 13 bp, Artificial Sequence
  Oligonucleotide for detection of SNP TSC0027503
gggagattgttgg

SEQ ID NO: 110072 - DNA, 13 bp, Artificial Sequence
  Oligonucleotide for detection of SNP TSC0027503
ccaacaatctccc

SEQ ID NO: 110073 - DNA, 13 bp, Artificial Sequence
  Oligonucleotide for detection of SNP TSC0027503
gggagagtgttgg

SEQ ID NO: 110074 - DNA, 13 bp, Artificial Sequence
  Oligonucleotide for detection of SNP TSC0027503
ccaacactctccc

SEQ ID NO: 110075 - DNA, 13 bp, Artificial Sequence
  Oligonucleotide for detection of SNP TSC0027503
gggagatcgttgg

SEQ ID NO: 110076 - DNA, 13 bp, Artificial Sequence
  Oligonucleotide for detection of SNP TSC0027503
ccaacgatctccc

SEQ ID NO: 110077 - DNA, 13 bp, Artificial Sequence
  Oligonucleotide for detection of SNP TSC0027503
gggagagcgttgg

SEQ ID NO: 110078 - DNA, 13 bp, Artificial Sequence
  Oligonucleotide for detection of SNP TSC0027503
ccaacgctctccc

SEQ ID NO: 110079 - DNA, 13 bp, Artificial Sequence
  Oligonucleotide for detection of SNP TSC0027503
ttaatggttttty

SEQ ID NO: 110080 - DNA, 13 bp, Artificial Sequence
  Oligonucleotide for detection of SNP TSC0027503
raaaaaccattaa

SEQ ID NO: 110081 - DNA, 13 bp, Artificial Sequence
  Oligonucleotide for detection of SNP TSC0027503
ttaatgtttttty

SEQ ID NO: 110082 - DNA, 13 bp, Artificial Sequence
  Oligonucleotide for detection of SNP TSC0027503
raaaaaacattaa

SEQ ID NO: 110083 - DNA, 13 bp, Artificial Sequence
  Oligonucleotide for detection of SNP TSC0027503
ttaacggttttty

SEQ ID NO: 110084 - DNA, 13 bp, Artificial Sequence
  Oligonucleotide for detection of SNP TSC0027503
raaaaaccgttaa

SEQ ID NO: 110085 - DNA, 13 bp, Artificial Sequence
  Oligonucleotide for detection of SNP TSC0027503
ttaacgtttttty

SEQ ID NO: 110086 - DNA, 13 bp, Artificial Sequence
  Oligonucleotide for detection of SNP TSC0027503
raaaaaacgttaa

SEQ ID NO: 110087 - DNA, 13 bp, Artificial Sequence
  Oligonucleotide for detection of SNP TSC0027505
agaggtatgttta

SEQ ID NO: 110088 - DNA, 13 bp, Artificial Sequence
  Oligonucleotide for detection of SNP TSC0027505
taaacatacctct

SEQ ID NO: 110089 - DNA, 13 bp, Artificial Sequence
  Oligonucleotide for detection of SNP TSC0027505
agaggtgtgttta

SEQ ID NO: 110090 - DNA, 13 bp, Artificial Sequence
  Oligonucleotide for detection of SNP TSC0027505
taaacacacctct

SEQ ID NO: 110091 - DNA, 13 bp, Artificial Sequence
  Oligonucleotide for detection of SNP TSC0027505
agaggcgtgttta

SEQ ID NO: 110092 - DNA, 13 bp, Artificial Sequence
  Oligonucleotide for detection of SNP TSC0027505
taaacacgcctct

SEQ ID NO: 110093 - DNA, 13 bp, Artificial Sequence
  Oligonucleotide for detection of SNP TSC0027505
taggtatgttttt

SEQ ID NO: 110094 - DNA, 13 bp, Artificial Sequence
  Oligonucleotide for detection of SNP TSC0027505
aaaaacataccta

SEQ ID NO: 110095 - DNA, 13 bp, Artificial Sequence
  Oligonucleotide for detection of SNP TSC0027505
taggtacgttttt

SEQ ID NO: 110096 - DNA, 13 bp, Artificial Sequence
  Oligonucleotide for detection of SNP TSC0027505
aaaaacgtaccta

SEQ ID NO: 110097 - DNA, 13 bp, Artificial Sequence
  Oligonucleotide for detection of SNP TSC0027506
aatttaagagttt

SEQ ID NO: 110098 - DNA, 13 bp, Artificial Sequence
  Oligonucleotide for detection of SNP TSC0027506
aaactcttaaatt

SEQ ID NO: 110099 - DNA, 13 bp, Artificial Sequence
  Oligonucleotide for detection of SNP TSC0027506
aatttaggagttt

SEQ ID NO: 110100 - DNA, 13 bp, Artificial Sequence
  Oligonucleotide for detection of SNP TSC0027506
aaactcctaaatt

SEQ ID NO: 110101 - DNA, 13 bp, Artificial Sequence
  Oligonucleotide for detection of SNP TSC0027509
taggtttgggggy

SEQ ID NO: 110102 - DNA, 13 bp, Artificial Sequence
  Oligonucleotide for detection of SNP TSC0027509
rcccccaaaccta

SEQ ID NO: 110103 - DNA, 13 bp, Artificial Sequence
  Oligonucleotide for detection of SNP TSC0027509
taggttcgggggy

SEQ ID NO: 110104 - DNA, 13 bp, Artificial Sequence
  Oligonucleotide for detection of SNP TSC0027509
rcccccgaaccta

SEQ ID NO: 110105 - DNA, 13 bp, Artificial Sequence
  Oligonucleotide for detection of SNP TSC0027509
gtttttgaattta

SEQ ID NO: 110106 - DNA, 13 bp, Artificial Sequence
  Oligonucleotide for detection of SNP TSC0027509
taaattcaaaaac

SEQ ID NO: 110107 - DNA, 13 bp, Artificial Sequence
  Oligonucleotide for detection of SNP TSC0027509
gttttcgaattta

SEQ ID NO: 110108 - DNA, 13 bp, Artificial Sequence
  Oligonucleotide for detection of SNP TSC0027509
taaattcgaaaac

SEQ ID NO: 110109 - DNA, 13 bp, Artificial Sequence
  Oligonucleotide for detection of SNP TSC0027510
agggggaagtatg

SEQ ID NO: 110110 - DNA, 13 bp, Artificial Sequence
  Oligonucleotide for detection of SNP TSC0027510
catacttccccct

SEQ ID NO: 110111 - DNA, 13 bp, Artificial Sequence
  Oligonucleotide for detection of SNP TSC0027510
agggggtagtatg

SEQ ID NO: 110112 - DNA, 13 bp, Artificial Sequence
  Oligonucleotide for detection of SNP TSC0027510
catactaccccct

SEQ ID NO: 110113 - DNA, 13 bp, Artificial Sequence
  Oligonucleotide for detection of SNP TSC0027510
tatgttttttttt

SEQ ID NO: 110114 - DNA, 13 bp, Artificial Sequence
  Oligonucleotide for detection of SNP TSC0027510
aaaaaaaaacata

SEQ ID NO: 110115 - DNA, 13 bp, Artificial Sequence
  Oligonucleotide for detection of SNP TSC0027510
tatgttgtttttt

SEQ ID NO: 110116 - DNA, 13 bp, Artificial Sequence
  Oligonucleotide for detection of SNP TSC0027510
aaaaaacaacata

SEQ ID NO: 110117 - DNA, 13 bp, Artificial Sequence
  Oligonucleotide for detection of SNP TSC0027513
atttttaattatg

SEQ ID NO: 110118 - DNA, 13 bp, Artificial Sequence
  Oligonucleotide for detection of SNP TSC0027513
cataattaaaaat

SEQ ID NO: 110119 - DNA, 13 bp, Artificial Sequence
  Oligonucleotide for detection of SNP TSC0027513
atttttgattatg

SEQ ID NO: 110120 - DNA, 13 bp, Artificial Sequence
  Oligonucleotide for detection of SNP TSC0027513
cataatcaaaaat

SEQ ID NO: 110121 - DNA, 13 bp, Artificial Sequence
  Oligonucleotide for detection of SNP TSC0027514
attttatgatttt

SEQ ID NO: 110122 - DNA, 13 bp, Artificial Sequence
  Oligonucleotide for detection of SNP TSC0027514
aaaatcataaaat

SEQ ID NO: 110123 - DNA, 13 bp, Artificial Sequence
  Oligonucleotide for detection of SNP TSC0027514
attttacgatttt

SEQ ID NO: 110124 - DNA, 13 bp, Artificial Sequence
  Oligonucleotide for detection of SNP TSC0027514
aaaatcgtaaaat

SEQ ID NO: 110125 - DNA, 13 bp, Artificial Sequence
  Oligonucleotide for detection of SNP TSC0027514
aagattgtggaat

SEQ ID NO: 110126 - DNA, 13 bp, Artificial Sequence
  Oligonucleotide for detection of SNP TSC0027514
attccacaatctt

SEQ ID NO: 110127 - DNA, 13 bp, Artificial Sequence
  Oligonucleotide for detection of SNP TSC0027514
aagattatggaat

SEQ ID NO: 110128 - DNA, 13 bp, Artificial Sequence
  Oligonucleotide for detection of SNP TSC0027514
attccataatctt

SEQ ID NO: 110129 - DNA, 13 bp, Artificial Sequence
  Oligonucleotide for detection of SNP TSC0027514
aagatcgtggaat

SEQ ID NO: 110130 - DNA, 13 bp, Artificial Sequence
  Oligonucleotide for detection of SNP TSC0027514
attccacgatctt

SEQ ID NO: 110131 - DNA, 13 bp, Artificial Sequence
  Oligonucleotide for detection of SNP TSC0027515
tgtgtagtggtgy

SEQ ID NO: 110132 - DNA, 13 bp, Artificial Sequence
  Oligonucleotide for detection of SNP TSC0027515
rcaccactacaca

SEQ ID NO: 110133 - DNA, 13 bp, Artificial Sequence
  Oligonucleotide for detection of SNP TSC0027515
tgtgtattggtgy

SEQ ID NO: 110134 - DNA, 13 bp, Artificial Sequence
  Oligonucleotide for detection of SNP TSC0027515
rcaccaatacaca

SEQ ID NO: 110135 - DNA, 13 bp, Artificial Sequence
  Oligonucleotide for detection of SNP TSC0027515
cgtgtagtggtgy

SEQ ID NO: 110136 - DNA, 13 bp, Artificial Sequence
  Oligonucleotide for detection of SNP TSC0027515
rcaccactacacg

SEQ ID NO: 110137 - DNA, 13 bp, Artificial Sequence
  Oligonucleotide for detection of SNP TSC0027515
cgtgtattggtgy

SEQ ID NO: 110138 - DNA, 13 bp, Artificial Sequence
  Oligonucleotide for detection of SNP TSC0027515
rcaccaatacacg

SEQ ID NO: 110139 - DNA, 13 bp, Artificial Sequence
  Oligonucleotide for detection of SNP TSC0027515
gtattattgtatg

SEQ ID NO: 110140 - DNA, 13 bp, Artificial Sequence
  Oligonucleotide for detection of SNP TSC0027515
catacaataatac

SEQ ID NO: 110141 - DNA, 13 bp, Artificial Sequence
  Oligonucleotide for detection of SNP TSC0027515
gtattaatgtatg

SEQ ID NO: 110142 - DNA, 13 bp, Artificial Sequence
  Oligonucleotide for detection of SNP TSC0027515
catacattaatac

SEQ ID NO: 110143 - DNA, 13 bp, Artificial Sequence
  Oligonucleotide for detection of SNP TSC0027515
gtattattgtacg

SEQ ID NO: 110144 - DNA, 13 bp, Artificial Sequence
  Oligonucleotide for detection of SNP TSC0027515
cgtacaataatac

SEQ ID NO: 110145 - DNA, 13 bp, Artificial Sequence
  Oligonucleotide for detection of SNP TSC0027515
gtattaatgtacg

SEQ ID NO: 110146 - DNA, 13 bp, Artificial Sequence
  Oligonucleotide for detection of SNP TSC0027515
cgtacattaatac

SEQ ID NO: 110147 - DNA, 13 bp, Artificial Sequence
  Oligonucleotide for detection of SNP TSC0027516
ggtttatttttag

SEQ ID NO: 110148 - DNA, 13 bp, Artificial Sequence
  Oligonucleotide for detection of SNP TSC0027516
ctaaaaataaacc

SEQ ID NO: 110149 - DNA, 13 bp, Artificial Sequence
  Oligonucleotide for detection of SNP TSC0027516
ttggggttgggty

SEQ ID NO: 110150 - DNA, 13 bp, Artificial Sequence
  Oligonucleotide for detection of SNP TSC0027516
racccaaccccaa

SEQ ID NO: 110151 - DNA, 13 bp, Artificial Sequence
  Oligonucleotide for detection of SNP TSC0027516
ttgggggtgggty

SEQ ID NO: 110152 - DNA, 13 bp, Artificial Sequence
  Oligonucleotide for detection of SNP TSC0027516
racccacccccaa

SEQ ID NO: 110153 - DNA, 13 bp, Artificial Sequence
  Oligonucleotide for detection of SNP TSC0027518
gtaaatggtatgg

SEQ ID NO: 110154 - DNA, 13 bp, Artificial Sequence
  Oligonucleotide for detection of SNP TSC0027518
ccataccatttac

SEQ ID NO: 110155 - DNA, 13 bp, Artificial Sequence
  Oligonucleotide for detection of SNP TSC0027518
gtaaatagtatgg

SEQ ID NO: 110156 - DNA, 13 bp, Artificial Sequence
  Oligonucleotide for detection of SNP TSC0027518
ccatactatttac

SEQ ID NO: 110157 - DNA, 13 bp, Artificial Sequence
  Oligonucleotide for detection of SNP TSC0027520
tggttggggttta

SEQ ID NO: 110158 - DNA, 13 bp, Artificial Sequence
  Oligonucleotide for detection of SNP TSC0027520
taaaccccaacca

SEQ ID NO: 110159 - DNA, 13 bp, Artificial Sequence
  Oligonucleotide for detection of SNP TSC0027520
tggttgtggttta

SEQ ID NO: 110160 - DNA, 13 bp, Artificial Sequence
  Oligonucleotide for detection of SNP TSC0027520
taaaccacaacca

SEQ ID NO: 110161 - DNA, 13 bp, Artificial Sequence
  Oligonucleotide for detection of SNP TSC0027520
tggtcggggttta

SEQ ID NO: 110162 - DNA, 13 bp, Artificial Sequence
  Oligonucleotide for detection of SNP TSC0027520
taaaccccgacca

SEQ ID NO: 110163 - DNA, 13 bp, Artificial Sequence
  Oligonucleotide for detection of SNP TSC0027520
tggtcgtggttta

SEQ ID NO: 110164 - DNA, 13 bp, Artificial Sequence
  Oligonucleotide for detection of SNP TSC0027520
taaaccacgacca

SEQ ID NO: 110165 - DNA, 13 bp, Artificial Sequence
  Oligonucleotide for detection of SNP TSC0027520
tgggttttggtta

SEQ ID NO: 110166 - DNA, 13 bp, Artificial Sequence
  Oligonucleotide for detection of SNP TSC0027520
taaccaaaaccca

SEQ ID NO: 110167 - DNA, 13 bp, Artificial Sequence
  Oligonucleotide for detection of SNP TSC0027520
tgggttatggtta

SEQ ID NO: 110168 - DNA, 13 bp, Artificial Sequence
  Oligonucleotide for detection of SNP TSC0027520
taaccataaccca

SEQ ID NO: 110169 - DNA, 13 bp, Artificial Sequence
  Oligonucleotide for detection of SNP TSC0027520
tgggtttcggtta

SEQ ID NO: 110170 - DNA, 13 bp, Artificial Sequence
  Oligonucleotide for detection of SNP TSC0027520
taaccgaaaccca

SEQ ID NO: 110171 - DNA, 13 bp, Artificial Sequence
  Oligonucleotide for detection of SNP TSC0027520
tgggttacggtta

SEQ ID NO: 110172 - DNA, 13 bp, Artificial Sequence
  Oligonucleotide for detection of SNP TSC0027520
taaccgtaaccca

SEQ ID NO: 110173 - DNA, 13 bp, Artificial Sequence
  Oligonucleotide for detection of SNP TSC0027521
atggttatagttt

SEQ ID NO: 110174 - DNA, 13 bp, Artificial Sequence
  Oligonucleotide for detection of SNP TSC0027521
aaactataaccat

SEQ ID NO: 110175 - DNA, 13 bp, Artificial Sequence
  Oligonucleotide for detection of SNP TSC0027521
atggttgtagttt

SEQ ID NO: 110176 - DNA, 13 bp, Artificial Sequence
  Oligonucleotide for detection of SNP TSC0027521
aaactacaaccat

SEQ ID NO: 110177 - DNA, 13 bp, Artificial Sequence
  Oligonucleotide for detection of SNP TSC0027522
atgattgtaggta

SEQ ID NO: 110178 - DNA, 13 bp, Artificial Sequence
  Oligonucleotide for detection of SNP TSC0027522
tacctacaatcat

SEQ ID NO: 110179 - DNA, 13 bp, Artificial Sequence
  Oligonucleotide for detection of SNP TSC0027522
atgattataggta

SEQ ID NO: 110180 - DNA, 13 bp, Artificial Sequence
  Oligonucleotide for detection of SNP TSC0027522
tacctataatcat

SEQ ID NO: 110181 - DNA, 13 bp, Artificial Sequence
  Oligonucleotide for detection of SNP TSC0027523
ttttaaataggty

SEQ ID NO: 110182 - DNA, 13 bp, Artificial Sequence
  Oligonucleotide for detection of SNP TSC0027523
racctatttaaaa

SEQ ID NO: 110183 - DNA, 13 bp, Artificial Sequence
  Oligonucleotide for detection of SNP TSC0027523
ttttaagtaggty

SEQ ID NO: 110184 - DNA, 13 bp, Artificial Sequence
  Oligonucleotide for detection of SNP TSC0027523
racctacttaaaa

SEQ ID NO: 110185 - DNA, 13 bp, Artificial Sequence
  Oligonucleotide for detection of SNP TSC0027524
tttgtagtttttt

SEQ ID NO: 110186 - DNA, 13 bp, Artificial Sequence
  Oligonucleotide for detection of SNP TSC0027524
aaaaaactacaaa

SEQ ID NO: 110187 - DNA, 13 bp, Artificial Sequence
  Oligonucleotide for detection of SNP TSC0027524
tttgtaatttttt

SEQ ID NO: 110188 - DNA, 13 bp, Artificial Sequence
  Oligonucleotide for detection of SNP TSC0027524
aaaaaattacaaa

SEQ ID NO: 110189 - DNA, 13 bp, Artificial Sequence
  Oligonucleotide for detection of SNP TSC0027524
ttcgtagtttttt

SEQ ID NO: 110190 - DNA, 13 bp, Artificial Sequence
  Oligonucleotide for detection of SNP TSC0027524
aaaaaactacgaa

SEQ ID NO: 110191 - DNA, 13 bp, Artificial Sequence
  Oligonucleotide for detection of SNP TSC0027524
ttcgtaatttttt

SEQ ID NO: 110192 - DNA, 13 bp, Artificial Sequence
  Oligonucleotide for detection of SNP TSC0027524
aaaaaattacgaa

SEQ ID NO: 110193 - DNA, 13 bp, Artificial Sequence
  Oligonucleotide for detection of SNP TSC0027525
tataaaataattt

SEQ ID NO: 110194 - DNA, 13 bp, Artificial Sequence
  Oligonucleotide for detection of SNP TSC0027525
aaattattttata

SEQ ID NO: 110195 - DNA, 13 bp, Artificial Sequence
  Oligonucleotide for detection of SNP TSC0027525
tataaagtaattt

SEQ ID NO: 110196 - DNA, 13 bp, Artificial Sequence
  Oligonucleotide for detection of SNP TSC0027525
aaattactttata

SEQ ID NO: 110197 - DNA, 13 bp, Artificial Sequence
  Oligonucleotide for detection of SNP TSC0027526
agaagaatagatg

SEQ ID NO: 110198 - DNA, 13 bp, Artificial Sequence
  Oligonucleotide for detection of SNP TSC0027526
catctattcttct

SEQ ID NO: 110199 - DNA, 13 bp, Artificial Sequence
  Oligonucleotide for detection of SNP TSC0027526
agaagattagatg

SEQ ID NO: 110200 - DNA, 13 bp, Artificial Sequence
  Oligonucleotide for detection of SNP TSC0027526
catctaatcttct

SEQ ID NO: 110201 - DNA, 13 bp, Artificial Sequence
  Oligonucleotide for detection of SNP TSC0027527
agattgataaggg

SEQ ID NO: 110202 - DNA, 13 bp, Artificial Sequence
  Oligonucleotide for detection of SNP TSC0027527
cccttatcaatct

SEQ ID NO: 110203 - DNA, 13 bp, Artificial Sequence
  Oligonucleotide for detection of SNP TSC0027527
agattggtaaggg

SEQ ID NO: 110204 - DNA, 13 bp, Artificial Sequence
  Oligonucleotide for detection of SNP TSC0027527
cccttaccaatct

SEQ ID NO: 110205 - DNA, 13 bp, Artificial Sequence
  Oligonucleotide for detection of SNP TSC0027528
gggaaatggaagy

SEQ ID NO: 110206 - DNA, 13 bp, Artificial Sequence
  Oligonucleotide for detection of SNP TSC0027528
rcttccatttccc

SEQ ID NO: 110207 - DNA, 13 bp, Artificial Sequence
  Oligonucleotide for detection of SNP TSC0027528
gggaaacggaagy

SEQ ID NO: 110208 - DNA, 13 bp, Artificial Sequence
  Oligonucleotide for detection of SNP TSC0027528
rcttccgtttccc

SEQ ID NO: 110209 - DNA, 13 bp, Artificial Sequence
  Oligonucleotide for detection of SNP TSC0027529
tattatgattttt

SEQ ID NO: 110210 - DNA, 13 bp, Artificial Sequence
  Oligonucleotide for detection of SNP TSC0027529
aaaaatcataata

SEQ ID NO: 110211 - DNA, 13 bp, Artificial Sequence
  Oligonucleotide for detection of SNP TSC0027529
tattattattttt

SEQ ID NO: 110212 - DNA, 13 bp, Artificial Sequence
  Oligonucleotide for detection of SNP TSC0027529
aaaaataataata

SEQ ID NO: 110213 - DNA, 13 bp, Artificial Sequence
  Oligonucleotide for detection of SNP TSC0027529
aaaaattatgatg

SEQ ID NO: 110214 - DNA, 13 bp, Artificial Sequence
  Oligonucleotide for detection of SNP TSC0027529
catcataattttt

SEQ ID NO: 110215 - DNA, 13 bp, Artificial Sequence
  Oligonucleotide for detection of SNP TSC0027529
aaaaataatgatg

SEQ ID NO: 110216 - DNA, 13 bp, Artificial Sequence
  Oligonucleotide for detection of SNP TSC0027529
catcattattttt

SEQ ID NO: 110217 - DNA, 13 bp, Artificial Sequence
  Oligonucleotide for detection of SNP TSC0027531
gtttttaaggttt

SEQ ID NO: 110218 - DNA, 13 bp, Artificial Sequence
  Oligonucleotide for detection of SNP TSC0027531
aaaccttaaaaac

SEQ ID NO: 110219 - DNA, 13 bp, Artificial Sequence
  Oligonucleotide for detection of SNP TSC0027531
gtttttgaggttt

SEQ ID NO: 110220 - DNA, 13 bp, Artificial Sequence
  Oligonucleotide for detection of SNP TSC0027531
aaacctcaaaaac

SEQ ID NO: 110221 - DNA, 13 bp, Artificial Sequence
  Oligonucleotide for detection of SNP TSC0027531
gttttcgaggttt

SEQ ID NO: 110222 - DNA, 13 bp, Artificial Sequence
  Oligonucleotide for detection of SNP TSC0027531
aaacctcgaaaac

SEQ ID NO: 110223 - DNA, 13 bp, Artificial Sequence
  Oligonucleotide for detection of SNP TSC0027531
aagttttggaggy

SEQ ID NO: 110224 - DNA, 13 bp, Artificial Sequence
  Oligonucleotide for detection of SNP TSC0027531
rcctccaaaactt

SEQ ID NO: 110225 - DNA, 13 bp, Artificial Sequence
  Oligonucleotide for detection of SNP TSC0027531
aagtttcggaggy

SEQ ID NO: 110226 - DNA, 13 bp, Artificial Sequence
  Oligonucleotide for detection of SNP TSC0027531
rcctccgaaactt

SEQ ID NO: 110227 - DNA, 13 bp, Artificial Sequence
  Oligonucleotide for detection of SNP TSC0027534
tgagagagagagy

SEQ ID NO: 110228 - DNA, 13 bp, Artificial Sequence
  Oligonucleotide for detection of SNP TSC0027534
rctctctctctca

SEQ ID NO: 110229 - DNA, 13 bp, Artificial Sequence
  Oligonucleotide for detection of SNP TSC0027534
tgagagggagagy

SEQ ID NO: 110230 - DNA, 13 bp, Artificial Sequence
  Oligonucleotide for detection of SNP TSC0027534
rctctccctctca

SEQ ID NO: 110231 - DNA, 13 bp, Artificial Sequence
  Oligonucleotide for detection of SNP TSC0027535
taggttgttttay

SEQ ID NO: 110232 - DNA, 13 bp, Artificial Sequence
  Oligonucleotide for detection of SNP TSC0027535
rtaaaacaaccta

SEQ ID NO: 110233 - DNA, 13 bp, Artificial Sequence
  Oligonucleotide for detection of SNP TSC0027535
taggtttttttay

SEQ ID NO: 110234 - DNA, 13 bp, Artificial Sequence
  Oligonucleotide for detection of SNP TSC0027535
rtaaaaaaaccta

SEQ ID NO: 110235 - DNA, 13 bp, Artificial Sequence
  Oligonucleotide for detection of SNP TSC0027535
gtaaagtaattta

SEQ ID NO: 110236 - DNA, 13 bp, Artificial Sequence
  Oligonucleotide for detection of SNP TSC0027535
taaattactttac

SEQ ID NO: 110237 - DNA, 13 bp, Artificial Sequence
  Oligonucleotide for detection of SNP TSC0027535
gtaaagaaattta

SEQ ID NO: 110238 - DNA, 13 bp, Artificial Sequence
  Oligonucleotide for detection of SNP TSC0027535
taaatttctttac

SEQ ID NO: 110239 - DNA, 13 bp, Artificial Sequence
  Oligonucleotide for detection of SNP TSC0027536
ttttggggaaggt

SEQ ID NO: 110240 - DNA, 13 bp, Artificial Sequence
  Oligonucleotide for detection of SNP TSC0027536
accttccccaaaa

SEQ ID NO: 110241 - DNA, 13 bp, Artificial Sequence
  Oligonucleotide for detection of SNP TSC0027536
ttttggtgaaggt

SEQ ID NO: 110242 - DNA, 13 bp, Artificial Sequence
  Oligonucleotide for detection of SNP TSC0027536
accttcaccaaaa

SEQ ID NO: 110243 - DNA, 13 bp, Artificial Sequence
  Oligonucleotide for detection of SNP TSC0027537
gtttggatgtttg

SEQ ID NO: 110244 - DNA, 13 bp, Artificial Sequence
  Oligonucleotide for detection of SNP TSC0027537
caaacatccaaac

SEQ ID NO: 110245 - DNA, 13 bp, Artificial Sequence
  Oligonucleotide for detection of SNP TSC0027537
gtttgggtgtttg

SEQ ID NO: 110246 - DNA, 13 bp, Artificial Sequence
  Oligonucleotide for detection of SNP TSC0027537
caaacacccaaac

SEQ ID NO: 110247 - DNA, 13 bp, Artificial Sequence
  Oligonucleotide for detection of SNP TSC0027537
gtttggacgtttg

SEQ ID NO: 110248 - DNA, 13 bp, Artificial Sequence
  Oligonucleotide for detection of SNP TSC0027537
caaacgtccaaac

SEQ ID NO: 110249 - DNA, 13 bp, Artificial Sequence
  Oligonucleotide for detection of SNP TSC0027537
gtttgggcgtttg

SEQ ID NO: 110250 - DNA, 13 bp, Artificial Sequence
  Oligonucleotide for detection of SNP TSC0027537
caaacgcccaaac

SEQ ID NO: 110251 - DNA, 13 bp, Artificial Sequence
  Oligonucleotide for detection of SNP TSC0027538
gtgtaagttttag

SEQ ID NO: 110252 - DNA, 13 bp, Artificial Sequence
  Oligonucleotide for detection of SNP TSC0027538
ctaaaacttacac

SEQ ID NO: 110253 - DNA, 13 bp, Artificial Sequence
  Oligonucleotide for detection of SNP TSC0027538
gtgtaaattttag

SEQ ID NO: 110254 - DNA, 13 bp, Artificial Sequence
  Oligonucleotide for detection of SNP TSC0027538
ctaaaatttacac

SEQ ID NO: 110255 - DNA, 13 bp, Artificial Sequence
  Oligonucleotide for detection of SNP TSC0027542
aataatgtggttt

SEQ ID NO: 110256 - DNA, 13 bp, Artificial Sequence
  Oligonucleotide for detection of SNP TSC0027542
aaaccacattatt

SEQ ID NO: 110257 - DNA, 13 bp, Artificial Sequence
  Oligonucleotide for detection of SNP TSC0027542
aataatatggttt

SEQ ID NO: 110258 - DNA, 13 bp, Artificial Sequence
  Oligonucleotide for detection of SNP TSC0027542
aaaccatattatt

SEQ ID NO: 110259 - DNA, 13 bp, Artificial Sequence
  Oligonucleotide for detection of SNP TSC0027543
ttcgtttggggta

SEQ ID NO: 110260 - DNA, 13 bp, Artificial Sequence
  Oligonucleotide for detection of SNP TSC0027543
taccccaaacgaa

SEQ ID NO: 110261 - DNA, 13 bp, Artificial Sequence
  Oligonucleotide for detection of SNP TSC0027543
ttcgttcggggta

SEQ ID NO: 110262 - DNA, 13 bp, Artificial Sequence
  Oligonucleotide for detection of SNP TSC0027543
taccccgaacgaa

SEQ ID NO: 110263 - DNA, 13 bp, Artificial Sequence
  Oligonucleotide for detection of SNP TSC0027543
tattttgggtgag

SEQ ID NO: 110264 - DNA, 13 bp, Artificial Sequence
  Oligonucleotide for detection of SNP TSC0027543
ctcacccaaaata

SEQ ID NO: 110265 - DNA, 13 bp, Artificial Sequence
  Oligonucleotide for detection of SNP TSC0027543
tattttaggtgag

SEQ ID NO: 110266 - DNA, 13 bp, Artificial Sequence
  Oligonucleotide for detection of SNP TSC0027543
ctcacctaaaata

SEQ ID NO: 110267 - DNA, 13 bp, Artificial Sequence
  Oligonucleotide for detection of SNP TSC0027543
tatttcgggtgag

SEQ ID NO: 110268 - DNA, 13 bp, Artificial Sequence
  Oligonucleotide for detection of SNP TSC0027543
ctcacccgaaata

SEQ ID NO: 110269 - DNA, 13 bp, Artificial Sequence
  Oligonucleotide for detection of SNP TSC0027543
tattttaggcgag

SEQ ID NO: 110270 - DNA, 13 bp, Artificial Sequence
  Oligonucleotide for detection of SNP TSC0027543
ctcgcctaaaata

SEQ ID NO: 110271 - DNA, 13 bp, Artificial Sequence
  Oligonucleotide for detection of SNP TSC0027543
tattttgggcgag

SEQ ID NO: 110272 - DNA, 13 bp, Artificial Sequence
  Oligonucleotide for detection of SNP TSC0027543
ctcgcccaaaata

SEQ ID NO: 110273 - DNA, 13 bp, Artificial Sequence
  Oligonucleotide for detection of SNP TSC0027543
tatttcgggcgag

SEQ ID NO: 110274 - DNA, 13 bp, Artificial Sequence
  Oligonucleotide for detection of SNP TSC0027543
ctcgcccgaaata

SEQ ID NO: 110275 - DNA, 13 bp, Artificial Sequence
  Oligonucleotide for detection of SNP TSC0027544
gagagggtatttg

SEQ ID NO: 110276 - DNA, 13 bp, Artificial Sequence
  Oligonucleotide for detection of SNP TSC0027544
caaataccctctc

SEQ ID NO: 110277 - DNA, 13 bp, Artificial Sequence
  Oligonucleotide for detection of SNP TSC0027544
gagaggatatttg

SEQ ID NO: 110278 - DNA, 13 bp, Artificial Sequence
  Oligonucleotide for detection of SNP TSC0027544
caaatatcctctc

SEQ ID NO: 110279 - DNA, 13 bp, Artificial Sequence
  Oligonucleotide for detection of SNP TSC0027546
agttaagtataag

SEQ ID NO: 110280 - DNA, 13 bp, Artificial Sequence
  Oligonucleotide for detection of SNP TSC0027546
cttatacttaact

SEQ ID NO: 110281 - DNA, 13 bp, Artificial Sequence
  Oligonucleotide for detection of SNP TSC0027546
agttaattataag

SEQ ID NO: 110282 - DNA, 13 bp, Artificial Sequence
  Oligonucleotide for detection of SNP TSC0027546
cttataattaact

SEQ ID NO: 110283 - DNA, 13 bp, Artificial Sequence
  Oligonucleotide for detection of SNP TSC0027546
tttgtatttaatt

SEQ ID NO: 110284 - DNA, 13 bp, Artificial Sequence
  Oligonucleotide for detection of SNP TSC0027546
aattaaatacaaa

SEQ ID NO: 110285 - DNA, 13 bp, Artificial Sequence
  Oligonucleotide for detection of SNP TSC0027546
tttgtaattaatt

SEQ ID NO: 110286 - DNA, 13 bp, Artificial Sequence
  Oligonucleotide for detection of SNP TSC0027546
aattaattacaaa

SEQ ID NO: 110287 - DNA, 13 bp, Artificial Sequence
  Oligonucleotide for detection of SNP TSC0027550
tatgtgtgtgtgy

SEQ ID NO: 110288 - DNA, 13 bp, Artificial Sequence
  Oligonucleotide for detection of SNP TSC0027550
rcacacacacata

SEQ ID NO: 110289 - DNA, 13 bp, Artificial Sequence
  Oligonucleotide for detection of SNP TSC0027550
tatgcgtgtgtgy

SEQ ID NO: 110290 - DNA, 13 bp, Artificial Sequence
  Oligonucleotide for detection of SNP TSC0027550
rcacacacgcata

SEQ ID NO: 110291 - DNA, 13 bp, Artificial Sequence
  Oligonucleotide for detection of SNP TSC0027550
tatgtgcgtgtgy

SEQ ID NO: 110292 - DNA, 13 bp, Artificial Sequence
  Oligonucleotide for detection of SNP TSC0027550
rcacacgcacata

SEQ ID NO: 110293 - DNA, 13 bp, Artificial Sequence
  Oligonucleotide for detection of SNP TSC0027550
tatgcgcgtgtgy

SEQ ID NO: 110294 - DNA, 13 bp, Artificial Sequence
  Oligonucleotide for detection of SNP TSC0027550
rcacacgcgcata

SEQ ID NO: 110295 - DNA, 13 bp, Artificial Sequence
  Oligonucleotide for detection of SNP TSC0027550
gtatatgtgtatg

SEQ ID NO: 110296 - DNA, 13 bp, Artificial Sequence
  Oligonucleotide for detection of SNP TSC0027550
catacacatatac

SEQ ID NO: 110297 - DNA, 13 bp, Artificial Sequence
  Oligonucleotide for detection of SNP TSC0027550
gtatatatgtatg

SEQ ID NO: 110298 - DNA, 13 bp, Artificial Sequence
  Oligonucleotide for detection of SNP TSC0027550
catacatatatac

SEQ ID NO: 110299 - DNA, 13 bp, Artificial Sequence
  Oligonucleotide for detection of SNP TSC0027550
gtatacgtgtatg

SEQ ID NO: 110300 - DNA, 13 bp, Artificial Sequence
  Oligonucleotide for detection of SNP TSC0027550
catacacgtatac

SEQ ID NO: 110301 - DNA, 13 bp, Artificial Sequence
  Oligonucleotide for detection of SNP TSC0027550
gtatatacgtatg

SEQ ID NO: 110302 - DNA, 13 bp, Artificial Sequence
  Oligonucleotide for detection of SNP TSC0027550
catacgtatatac

SEQ ID NO: 110303 - DNA, 13 bp, Artificial Sequence
  Oligonucleotide for detection of SNP TSC0027550
gtatatgcgtatg

SEQ ID NO: 110304 - DNA, 13 bp, Artificial Sequence
  Oligonucleotide for detection of SNP TSC0027550
catacgcatatac

SEQ ID NO: 110305 - DNA, 13 bp, Artificial Sequence
  Oligonucleotide for detection of SNP TSC0027550
gtatacgcgtatg

SEQ ID NO: 110306 - DNA, 13 bp, Artificial Sequence
  Oligonucleotide for detection of SNP TSC0027550
catacgcgtatac

SEQ ID NO: 110307 - DNA, 13 bp, Artificial Sequence
  Oligonucleotide for detection of SNP TSC0027554
tattataaaatty

SEQ ID NO: 110308 - DNA, 13 bp, Artificial Sequence
  Oligonucleotide for detection of SNP TSC0027554
raattttataata

SEQ ID NO: 110309 - DNA, 13 bp, Artificial Sequence
  Oligonucleotide for detection of SNP TSC0027554
tattatgaaatty

SEQ ID NO: 110310 - DNA, 13 bp, Artificial Sequence
  Oligonucleotide for detection of SNP TSC0027554
raatttcataata

SEQ ID NO: 110311 - DNA, 13 bp, Artificial Sequence
  Oligonucleotide for detection of SNP TSC0027555
agtattgtagttt

SEQ ID NO: 110312 - DNA, 13 bp, Artificial Sequence
  Oligonucleotide for detection of SNP TSC0027555
aaactacaatact

SEQ ID NO: 110313 - DNA, 13 bp, Artificial Sequence
  Oligonucleotide for detection of SNP TSC0027555
agtattatagttt

SEQ ID NO: 110314 - DNA, 13 bp, Artificial Sequence
  Oligonucleotide for detection of SNP TSC0027555
aaactataatact

SEQ ID NO: 110315 - DNA, 13 bp, Artificial Sequence
  Oligonucleotide for detection of SNP TSC0027556
ttttgtttttaga

SEQ ID NO: 110316 - DNA, 13 bp, Artificial Sequence
  Oligonucleotide for detection of SNP TSC0027556
tctaaaaacaaaa

SEQ ID NO: 110317 - DNA, 13 bp, Artificial Sequence
  Oligonucleotide for detection of SNP TSC0027556
tttagatataagg

SEQ ID NO: 110318 - DNA, 13 bp, Artificial Sequence
  Oligonucleotide for detection of SNP TSC0027556
ccttatatctaaa

SEQ ID NO: 110319 - DNA, 13 bp, Artificial Sequence
  Oligonucleotide for detection of SNP TSC0027556
tttagaaataagg

SEQ ID NO: 110320 - DNA, 13 bp, Artificial Sequence
  Oligonucleotide for detection of SNP TSC0027556
ccttatttctaaa

SEQ ID NO: 110321 - DNA, 13 bp, Artificial Sequence
  Oligonucleotide for detection of SNP TSC0027557
tagagtgggaaga

SEQ ID NO: 110322 - DNA, 13 bp, Artificial Sequence
  Oligonucleotide for detection of SNP TSC0027557
tcttcccactcta

SEQ ID NO: 110323 - DNA, 13 bp, Artificial Sequence
  Oligonucleotide for detection of SNP TSC0027557
tagagtaggaaga

SEQ ID NO: 110324 - DNA, 13 bp, Artificial Sequence
  Oligonucleotide for detection of SNP TSC0027557
tcttcctactcta

SEQ ID NO: 110325 - DNA, 13 bp, Artificial Sequence
  Oligonucleotide for detection of SNP TSC0027557
tagagcgggaaga

SEQ ID NO: 110326 - DNA, 13 bp, Artificial Sequence
  Oligonucleotide for detection of SNP TSC0027557
tcttcccgctcta

SEQ ID NO: 110327 - DNA, 13 bp, Artificial Sequence
  Oligonucleotide for detection of SNP TSC0027559
tggggaggggggg

SEQ ID NO: 110328 - DNA, 13 bp, Artificial Sequence
  Oligonucleotide for detection of SNP TSC0027559
ccccccctcccca

SEQ ID NO: 110329 - DNA, 13 bp, Artificial Sequence
  Oligonucleotide for detection of SNP TSC0027559
tggggatgggggg

SEQ ID NO: 110330 - DNA, 13 bp, Artificial Sequence
  Oligonucleotide for detection of SNP TSC0027559
ccccccatcccca

SEQ ID NO: 110331 - DNA, 13 bp, Artificial Sequence
  Oligonucleotide for detection of SNP TSC0027559
cggggaggggggg

SEQ ID NO: 110332 - DNA, 13 bp, Artificial Sequence
  Oligonucleotide for detection of SNP TSC0027559
ccccccctccccg

SEQ ID NO: 110333 - DNA, 13 bp, Artificial Sequence
  Oligonucleotide for detection of SNP TSC0027559
cggggatgggggg

SEQ ID NO: 110334 - DNA, 13 bp, Artificial Sequence
  Oligonucleotide for detection of SNP TSC0027559
ccccccatccccg

SEQ ID NO: 110335 - DNA, 13 bp, Artificial Sequence
  Oligonucleotide for detection of SNP TSC0027560
atttatatatatt

SEQ ID NO: 110336 - DNA, 13 bp, Artificial Sequence
  Oligonucleotide for detection of SNP TSC0027560
aatatatataaat

SEQ ID NO: 110337 - DNA, 13 bp, Artificial Sequence
  Oligonucleotide for detection of SNP TSC0027560
atttatgtatatt

SEQ ID NO: 110338 - DNA, 13 bp, Artificial Sequence
  Oligonucleotide for detection of SNP TSC0027560
aatatacataaat

SEQ ID NO: 110339 - DNA, 13 bp, Artificial Sequence
  Oligonucleotide for detection of SNP TSC0027562
ggaagtagggtta

SEQ ID NO: 110340 - DNA, 13 bp, Artificial Sequence
  Oligonucleotide for detection of SNP TSC0027562
taaccctacttcc

SEQ ID NO: 110341 - DNA, 13 bp, Artificial Sequence
  Oligonucleotide for detection of SNP TSC0027562
ggaagtggggtta

SEQ ID NO: 110342 - DNA, 13 bp, Artificial Sequence
  Oligonucleotide for detection of SNP TSC0027562
taaccccacttcc

SEQ ID NO: 110343 - DNA, 13 bp, Artificial Sequence
  Oligonucleotide for detection of SNP TSC0027562
ggaagcggggtta

SEQ ID NO: 110344 - DNA, 13 bp, Artificial Sequence
  Oligonucleotide for detection of SNP TSC0027562
taaccccgcttcc

SEQ ID NO: 110345 - DNA, 13 bp, Artificial Sequence
  Oligonucleotide for detection of SNP TSC0027562
tagttttgtttty

SEQ ID NO: 110346 - DNA, 13 bp, Artificial Sequence
  Oligonucleotide for detection of SNP TSC0027562
raaaacaaaacta

SEQ ID NO: 110347 - DNA, 13 bp, Artificial Sequence
  Oligonucleotide for detection of SNP TSC0027562
tagtttcgtttty

SEQ ID NO: 110348 - DNA, 13 bp, Artificial Sequence
  Oligonucleotide for detection of SNP TSC0027562
raaaacgaaacta

SEQ ID NO: 110349 - DNA, 13 bp, Artificial Sequence
  Oligonucleotide for detection of SNP TSC0027563
gttgtttgtttgg

SEQ ID NO: 110350 - DNA, 13 bp, Artificial Sequence
  Oligonucleotide for detection of SNP TSC0027563
ccaaacaaacaac

SEQ ID NO: 110351 - DNA, 13 bp, Artificial Sequence
  Oligonucleotide for detection of SNP TSC0027563
gtcgtttgtttgg

SEQ ID NO: 110352 - DNA, 13 bp, Artificial Sequence
  Oligonucleotide for detection of SNP TSC0027563
ccaaacaaacgac

SEQ ID NO: 110353 - DNA, 13 bp, Artificial Sequence
  Oligonucleotide for detection of SNP TSC0027563
gttgttcgtttgg

SEQ ID NO: 110354 - DNA, 13 bp, Artificial Sequence
  Oligonucleotide for detection of SNP TSC0027563
ccaaacgaacaac

SEQ ID NO: 110355 - DNA, 13 bp, Artificial Sequence
  Oligonucleotide for detection of SNP TSC0027563
gtcgttcgtttgg

SEQ ID NO: 110356 - DNA, 13 bp, Artificial Sequence
  Oligonucleotide for detection of SNP TSC0027563
ccaaacgaacgac

SEQ ID NO: 110357 - DNA, 13 bp, Artificial Sequence
  Oligonucleotide for detection of SNP TSC0027563
ttaggtgggtgay

SEQ ID NO: 110358 - DNA, 13 bp, Artificial Sequence
  Oligonucleotide for detection of SNP TSC0027563
rtcacccacctaa

SEQ ID NO: 110359 - DNA, 13 bp, Artificial Sequence
  Oligonucleotide for detection of SNP TSC0027563
ttaggtaggtgay

SEQ ID NO: 110360 - DNA, 13 bp, Artificial Sequence
  Oligonucleotide for detection of SNP TSC0027563
rtcacctacctaa

SEQ ID NO: 110361 - DNA, 13 bp, Artificial Sequence
  Oligonucleotide for detection of SNP TSC0027563
ttaggcgggtgay

SEQ ID NO: 110362 - DNA, 13 bp, Artificial Sequence
  Oligonucleotide for detection of SNP TSC0027563
rtcacccgcctaa

SEQ ID NO: 110363 - DNA, 13 bp, Artificial Sequence
  Oligonucleotide for detection of SNP TSC0027563
ttaggtaggcgay

SEQ ID NO: 110364 - DNA, 13 bp, Artificial Sequence
  Oligonucleotide for detection of SNP TSC0027563
rtcgcctacctaa

SEQ ID NO: 110365 - DNA, 13 bp, Artificial Sequence
  Oligonucleotide for detection of SNP TSC0027563
ttaggtgggcgay

SEQ ID NO: 110366 - DNA, 13 bp, Artificial Sequence
  Oligonucleotide for detection of SNP TSC0027563
rtcgcccacctaa

SEQ ID NO: 110367 - DNA, 13 bp, Artificial Sequence
  Oligonucleotide for detection of SNP TSC0027563
ttaggcgggcgay

SEQ ID NO: 110368 - DNA, 13 bp, Artificial Sequence
  Oligonucleotide for detection of SNP TSC0027563
rtcgcccgcctaa

SEQ ID NO: 110369 - DNA, 13 bp, Artificial Sequence
  Oligonucleotide for detection of SNP TSC0027564
tatttttattaat

SEQ ID NO: 110370 - DNA, 13 bp, Artificial Sequence
  Oligonucleotide for detection of SNP TSC0027564
attaataaaaata

SEQ ID NO: 110371 - DNA, 13 bp, Artificial Sequence
  Oligonucleotide for detection of SNP TSC0027564
tattttaattaat

SEQ ID NO: 110372 - DNA, 13 bp, Artificial Sequence
  Oligonucleotide for detection of SNP TSC0027564
attaattaaaata

SEQ ID NO: 110373 - DNA, 13 bp, Artificial Sequence
  Oligonucleotide for detection of SNP TSC0027565
gaaagggatggga

SEQ ID NO: 110374 - DNA, 13 bp, Artificial Sequence
  Oligonucleotide for detection of SNP TSC0027565
tcccatccctttc

SEQ ID NO: 110375 - DNA, 13 bp, Artificial Sequence
  Oligonucleotide for detection of SNP TSC0027565
gaaaggtatggga

SEQ ID NO: 110376 - DNA, 13 bp, Artificial Sequence
  Oligonucleotide for detection of SNP TSC0027565
tcccatacctttc

SEQ ID NO: 110377 - DNA, 13 bp, Artificial Sequence
  Oligonucleotide for detection of SNP TSC0027566
gtggggattgtty

SEQ ID NO: 110378 - DNA, 13 bp, Artificial Sequence
  Oligonucleotide for detection of SNP TSC0027566
raacaatccccac

SEQ ID NO: 110379 - DNA, 13 bp, Artificial Sequence
  Oligonucleotide for detection of SNP TSC0027566
gtggggtttgtty

SEQ ID NO: 110380 - DNA, 13 bp, Artificial Sequence
  Oligonucleotide for detection of SNP TSC0027566
raacaaaccccac

SEQ ID NO: 110381 - DNA, 13 bp, Artificial Sequence
  Oligonucleotide for detection of SNP TSC0027566
gagtagtttttay

SEQ ID NO: 110382 - DNA, 13 bp, Artificial Sequence
  Oligonucleotide for detection of SNP TSC0027566
rtaaaaactactc

SEQ ID NO: 110383 - DNA, 13 bp, Artificial Sequence
  Oligonucleotide for detection of SNP TSC0027566
gagtaggttttay

SEQ ID NO: 110384 - DNA, 13 bp, Artificial Sequence
  Oligonucleotide for detection of SNP TSC0027566
rtaaaacctactc

SEQ ID NO: 110385 - DNA, 13 bp, Artificial Sequence
  Oligonucleotide for detection of SNP TSC0027567
tagggtagtattt

SEQ ID NO: 110386 - DNA, 13 bp, Artificial Sequence
  Oligonucleotide for detection of SNP TSC0027567
aaatactacccta

SEQ ID NO: 110387 - DNA, 13 bp, Artificial Sequence
  Oligonucleotide for detection of SNP TSC0027567
tagggtggtattt

SEQ ID NO: 110388 - DNA, 13 bp, Artificial Sequence
  Oligonucleotide for detection of SNP TSC0027567
aaataccacccta

SEQ ID NO: 110389 - DNA, 13 bp, Artificial Sequence
  Oligonucleotide for detection of SNP TSC0027567
tagggcggtattt

SEQ ID NO: 110390 - DNA, 13 bp, Artificial Sequence
  Oligonucleotide for detection of SNP TSC0027567
aaataccgcccta

SEQ ID NO: 110391 - DNA, 13 bp, Artificial Sequence
  Oligonucleotide for detection of SNP TSC0027567
agatgttgttttg

SEQ ID NO: 110392 - DNA, 13 bp, Artificial Sequence
  Oligonucleotide for detection of SNP TSC0027567
caaaacaacatct

SEQ ID NO: 110393 - DNA, 13 bp, Artificial Sequence
  Oligonucleotide for detection of SNP TSC0027567
agatgtcgttttg

SEQ ID NO: 110394 - DNA, 13 bp, Artificial Sequence
  Oligonucleotide for detection of SNP TSC0027567
caaaacgacatct

SEQ ID NO: 110395 - DNA, 13 bp, Artificial Sequence
  Oligonucleotide for detection of SNP TSC0027568
tttttagaatttg

SEQ ID NO: 110396 - DNA, 13 bp, Artificial Sequence
  Oligonucleotide for detection of SNP TSC0027568
caaattctaaaaa

SEQ ID NO: 110397 - DNA, 13 bp, Artificial Sequence
  Oligonucleotide for detection of SNP TSC0027568
tttttaaaatttg

SEQ ID NO: 110398 - DNA, 13 bp, Artificial Sequence
  Oligonucleotide for detection of SNP TSC0027568
caaattttaaaaa

SEQ ID NO: 110399 - DNA, 13 bp, Artificial Sequence
  Oligonucleotide for detection of SNP TSC0027569
atatttagttaat

SEQ ID NO: 110400 - DNA, 13 bp, Artificial Sequence
  Oligonucleotide for detection of SNP TSC0027569
attaactaaatat

SEQ ID NO: 110401 - DNA, 13 bp, Artificial Sequence
  Oligonucleotide for detection of SNP TSC0027570
gcgtgtatgtgtg

SEQ ID NO: 110402 - DNA, 13 bp, Artificial Sequence
  Oligonucleotide for detection of SNP TSC0027570
cacacatacacgc

SEQ ID NO: 110403 - DNA, 13 bp, Artificial Sequence
  Oligonucleotide for detection of SNP TSC0027570
gcgtgtgtgtgtg

SEQ ID NO: 110404 - DNA, 13 bp, Artificial Sequence
  Oligonucleotide for detection of SNP TSC0027570
cacacacacacgc

SEQ ID NO: 110405 - DNA, 13 bp, Artificial Sequence
  Oligonucleotide for detection of SNP TSC0027570
gtgcgtatgtgtg

SEQ ID NO: 110406 - DNA, 13 bp, Artificial Sequence
  Oligonucleotide for detection of SNP TSC0027570
cacacatacgcac

SEQ ID NO: 110407 - DNA, 13 bp, Artificial Sequence
  Oligonucleotide for detection of SNP TSC0027570
gtgcgtgtgtgtg

SEQ ID NO: 110408 - DNA, 13 bp, Artificial Sequence
  Oligonucleotide for detection of SNP TSC0027570
cacacacacgcac

SEQ ID NO: 110409 - DNA, 13 bp, Artificial Sequence
  Oligonucleotide for detection of SNP TSC0027570
gtgtgtacgtgtg

SEQ ID NO: 110410 - DNA, 13 bp, Artificial Sequence
  Oligonucleotide for detection of SNP TSC0027570
cacacgtacacac

SEQ ID NO: 110411 - DNA, 13 bp, Artificial Sequence
  Oligonucleotide for detection of SNP TSC0027570
gcgcgtatgtgtg

SEQ ID NO: 110412 - DNA, 13 bp, Artificial Sequence
  Oligonucleotide for detection of SNP TSC0027570
cacacatacgcgc

SEQ ID NO: 110413 - DNA, 13 bp, Artificial Sequence
  Oligonucleotide for detection of SNP TSC0027570
gtgtgtgcgtgtg

SEQ ID NO: 110414 - DNA, 13 bp, Artificial Sequence
  Oligonucleotide for detection of SNP TSC0027570
cacacgcacacac

SEQ ID NO: 110415 - DNA, 13 bp, Artificial Sequence
  Oligonucleotide for detection of SNP TSC0027570
gcgtgtacgtgtg

SEQ ID NO: 110416 - DNA, 13 bp, Artificial Sequence
  Oligonucleotide for detection of SNP TSC0027570
cacacgtacacgc

SEQ ID NO: 110417 - DNA, 13 bp, Artificial Sequence
  Oligonucleotide for detection of SNP TSC0027570
gcgcgtgtgtgtg

SEQ ID NO: 110418 - DNA, 13 bp, Artificial Sequence
  Oligonucleotide for detection of SNP TSC0027570
cacacacacgcgc

SEQ ID NO: 110419 - DNA, 13 bp, Artificial Sequence
  Oligonucleotide for detection of SNP TSC0027570
gtgcgtacgtgtg

SEQ ID NO: 110420 - DNA, 13 bp, Artificial Sequence
  Oligonucleotide for detection of SNP TSC0027570
cacacgtacgcac

SEQ ID NO: 110421 - DNA, 13 bp, Artificial Sequence
  Oligonucleotide for detection of SNP TSC0027570
gcgtgcgtgtgtg

SEQ ID NO: 110422 - DNA, 13 bp, Artificial Sequence
  Oligonucleotide for detection of SNP TSC0027570
cacacacgcacgc

SEQ ID NO: 110423 - DNA, 13 bp, Artificial Sequence
  Oligonucleotide for detection of SNP TSC0027570
gcgcgtacgtgtg

SEQ ID NO: 110424 - DNA, 13 bp, Artificial Sequence
  Oligonucleotide for detection of SNP TSC0027570
cacacgtacgcgc

SEQ ID NO: 110425 - DNA, 13 bp, Artificial Sequence
  Oligonucleotide for detection of SNP TSC0027570
gcgtgtgcgtgtg

SEQ ID NO: 110426 - DNA, 13 bp, Artificial Sequence
  Oligonucleotide for detection of SNP TSC0027570
cacacgcacacgc

SEQ ID NO: 110427 - DNA, 13 bp, Artificial Sequence
  Oligonucleotide for detection of SNP TSC0027570
gtgcgcgtgtgtg

SEQ ID NO: 110428 - DNA, 13 bp, Artificial Sequence
  Oligonucleotide for detection of SNP TSC0027570
cacacacgcgcac

SEQ ID NO: 110429 - DNA, 13 bp, Artificial Sequence
  Oligonucleotide for detection of SNP TSC0027570
gtgcgtgcgtgtg

SEQ ID NO: 110430 - DNA, 13 bp, Artificial Sequence
  Oligonucleotide for detection of SNP TSC0027570
cacacgcacgcac

SEQ ID NO: 110431 - DNA, 13 bp, Artificial Sequence
  Oligonucleotide for detection of SNP TSC0027570
gtgtgcgcgtgtg

SEQ ID NO: 110432 - DNA, 13 bp, Artificial Sequence
  Oligonucleotide for detection of SNP TSC0027570
cacacgcgcacac

SEQ ID NO: 110433 - DNA, 13 bp, Artificial Sequence
  Oligonucleotide for detection of SNP TSC0027570
gcgcgcgtgtgtg

SEQ ID NO: 110434 - DNA, 13 bp, Artificial Sequence
  Oligonucleotide for detection of SNP TSC0027570
cacacacgcgcgc

SEQ ID NO: 110435 - DNA, 13 bp, Artificial Sequence
  Oligonucleotide for detection of SNP TSC0027570
gcgcgtgcgtgtg

SEQ ID NO: 110436 - DNA, 13 bp, Artificial Sequence
  Oligonucleotide for detection of SNP TSC0027570
cacacgcacgcgc

SEQ ID NO: 110437 - DNA, 13 bp, Artificial Sequence
  Oligonucleotide for detection of SNP TSC0027570
gcgtgcgcgtgtg

SEQ ID NO: 110438 - DNA, 13 bp, Artificial Sequence
  Oligonucleotide for detection of SNP TSC0027570
cacacgcgcacgc

SEQ ID NO: 110439 - DNA, 13 bp, Artificial Sequence
  Oligonucleotide for detection of SNP TSC0027570
gtgcgcgcgtgtg

SEQ ID NO: 110440 - DNA, 13 bp, Artificial Sequence
  Oligonucleotide for detection of SNP TSC0027570
cacacgcgcgcac

SEQ ID NO: 110441 - DNA, 13 bp, Artificial Sequence
  Oligonucleotide for detection of SNP TSC0027570
gcgcgcgcgtgtg

SEQ ID NO: 110442 - DNA, 13 bp, Artificial Sequence
  Oligonucleotide for detection of SNP TSC0027570
cacacgcgcgcgc

SEQ ID NO: 110443 - DNA, 13 bp, Artificial Sequence
  Oligonucleotide for detection of SNP TSC0027570
tatatgtgtgtgy

SEQ ID NO: 110444 - DNA, 13 bp, Artificial Sequence
  Oligonucleotide for detection of SNP TSC0027570
rcacacacatata

SEQ ID NO: 110445 - DNA, 13 bp, Artificial Sequence
  Oligonucleotide for detection of SNP TSC0027570
tatacgtgtgtgy

SEQ ID NO: 110446 - DNA, 13 bp, Artificial Sequence
  Oligonucleotide for detection of SNP TSC0027570
rcacacacgtata

SEQ ID NO: 110447 - DNA, 13 bp, Artificial Sequence
  Oligonucleotide for detection of SNP TSC0027570
tatatgtgcgtgy

SEQ ID NO: 110448 - DNA, 13 bp, Artificial Sequence
  Oligonucleotide for detection of SNP TSC0027570
rcacgcacatata

SEQ ID NO: 110449 - DNA, 13 bp, Artificial Sequence
  Oligonucleotide for detection of SNP TSC0027570
tatatgcgtgtgy

SEQ ID NO: 110450 - DNA, 13 bp, Artificial Sequence
  Oligonucleotide for detection of SNP TSC0027570
rcacacgcatata

SEQ ID NO: 110451 - DNA, 13 bp, Artificial Sequence
  Oligonucleotide for detection of SNP TSC0027570
tatatgtgtgcgy

SEQ ID NO: 110452 - DNA, 13 bp, Artificial Sequence
  Oligonucleotide for detection of SNP TSC0027570
rcgcacacatata

SEQ ID NO: 110453 - DNA, 13 bp, Artificial Sequence
  Oligonucleotide for detection of SNP TSC0027570
tatacgtgcgtgy

SEQ ID NO: 110454 - DNA, 13 bp, Artificial Sequence
  Oligonucleotide for detection of SNP TSC0027570
rcacgcacgtata

SEQ ID NO: 110455 - DNA, 13 bp, Artificial Sequence
  Oligonucleotide for detection of SNP TSC0027570
tatacgtgtgcgy

SEQ ID NO: 110456 - DNA, 13 bp, Artificial Sequence
  Oligonucleotide for detection of SNP TSC0027570
rcgcacacgtata

SEQ ID NO: 110457 - DNA, 13 bp, Artificial Sequence
  Oligonucleotide for detection of SNP TSC0027570
tatacgcgtgtgy

SEQ ID NO: 110458 - DNA, 13 bp, Artificial Sequence
  Oligonucleotide for detection of SNP TSC0027570
rcacacgcgtata

SEQ ID NO: 110459 - DNA, 13 bp, Artificial Sequence
  Oligonucleotide for detection of SNP TSC0027570
tatatgtgcgcgy

SEQ ID NO: 110460 - DNA, 13 bp, Artificial Sequence
  Oligonucleotide for detection of SNP TSC0027570
rcgcgcacatata

SEQ ID NO: 110461 - DNA, 13 bp, Artificial Sequence
  Oligonucleotide for detection of SNP TSC0027570
tatacgtgcgcgy

SEQ ID NO: 110462 - DNA, 13 bp, Artificial Sequence
  Oligonucleotide for detection of SNP TSC0027570
rcgcgcacgtata

SEQ ID NO: 110463 - DNA, 13 bp, Artificial Sequence
  Oligonucleotide for detection of SNP TSC0027570
tatatgcgcgtgy

SEQ ID NO: 110464 - DNA, 13 bp, Artificial Sequence
  Oligonucleotide for detection of SNP TSC0027570
rcacgcgcatata

SEQ ID NO: 110465 - DNA, 13 bp, Artificial Sequence
  Oligonucleotide for detection of SNP TSC0027570
tatatgcgtgcgy

SEQ ID NO: 110466 - DNA, 13 bp, Artificial Sequence
  Oligonucleotide for detection of SNP TSC0027570
rcgcacgcatata

SEQ ID NO: 110467 - DNA, 13 bp, Artificial Sequence
  Oligonucleotide for detection of SNP TSC0027570
tatacgcgcgtgy

SEQ ID NO: 110468 - DNA, 13 bp, Artificial Sequence
  Oligonucleotide for detection of SNP TSC0027570
rcacgcgcgtata

SEQ ID NO: 110469 - DNA, 13 bp, Artificial Sequence
  Oligonucleotide for detection of SNP TSC0027570
tatacgcgtgcgy

SEQ ID NO: 110470 - DNA, 13 bp, Artificial Sequence
  Oligonucleotide for detection of SNP TSC0027570
rcgcacgcgtata

SEQ ID NO: 110471 - DNA, 13 bp, Artificial Sequence
  Oligonucleotide for detection of SNP TSC0027570
tatatgcgcgcgy

SEQ ID NO: 110472 - DNA, 13 bp, Artificial Sequence
  Oligonucleotide for detection of SNP TSC0027570
rcgcgcgcatata

SEQ ID NO: 110473 - DNA, 13 bp, Artificial Sequence
  Oligonucleotide for detection of SNP TSC0027570
tatacgcgcgcgy

SEQ ID NO: 110474 - DNA, 13 bp, Artificial Sequence
  Oligonucleotide for detection of SNP TSC0027570
rcgcgcgcgtata

SEQ ID NO: 110475 - DNA, 13 bp, Artificial Sequence
  Oligonucleotide for detection of SNP TSC0027571
gtaaatattggtg

SEQ ID NO: 110476 - DNA, 13 bp, Artificial Sequence
  Oligonucleotide for detection of SNP TSC0027571
caccaatatttac

SEQ ID NO: 110477 - DNA, 13 bp, Artificial Sequence
  Oligonucleotide for detection of SNP TSC0027571
gtaaatgttggtg

SEQ ID NO: 110478 - DNA, 13 bp, Artificial Sequence
  Oligonucleotide for detection of SNP TSC0027571
caccaacatttac

SEQ ID NO: 110479 - DNA, 13 bp, Artificial Sequence
  Oligonucleotide for detection of SNP TSC0027572
aagattattaggt

SEQ ID NO: 110480 - DNA, 13 bp, Artificial Sequence
  Oligonucleotide for detection of SNP TSC0027572
acctaataatctt

SEQ ID NO: 110481 - DNA, 13 bp, Artificial Sequence
  Oligonucleotide for detection of SNP TSC0027572
aagatttttaggt

SEQ ID NO: 110482 - DNA, 13 bp, Artificial Sequence
  Oligonucleotide for detection of SNP TSC0027572
acctaaaaatctt

SEQ ID NO: 110483 - DNA, 13 bp, Artificial Sequence
  Oligonucleotide for detection of SNP TSC0027572
atttggtgatttt

SEQ ID NO: 110484 - DNA, 13 bp, Artificial Sequence
  Oligonucleotide for detection of SNP TSC0027572
aaaatcaccaaat

SEQ ID NO: 110485 - DNA, 13 bp, Artificial Sequence
  Oligonucleotide for detection of SNP TSC0027572
atttggggatttt

SEQ ID NO: 110486 - DNA, 13 bp, Artificial Sequence
  Oligonucleotide for detection of SNP TSC0027572
aaaatccccaaat

SEQ ID NO: 110487 - DNA, 13 bp, Artificial Sequence
  Oligonucleotide for detection of SNP TSC0027579
ggttagggggtag

SEQ ID NO: 110488 - DNA, 13 bp, Artificial Sequence
  Oligonucleotide for detection of SNP TSC0027579
ctaccccctaacc

SEQ ID NO: 110489 - DNA, 13 bp, Artificial Sequence
  Oligonucleotide for detection of SNP TSC0027579
ggttagagggtag

SEQ ID NO: 110490 - DNA, 13 bp, Artificial Sequence
  Oligonucleotide for detection of SNP TSC0027579
ctaccctctaacc

SEQ ID NO: 110491 - DNA, 13 bp, Artificial Sequence
  Oligonucleotide for detection of SNP TSC0027580
aggtgtattggtg

SEQ ID NO: 110492 - DNA, 13 bp, Artificial Sequence
  Oligonucleotide for detection of SNP TSC0027580
caccaatacacct

SEQ ID NO: 110493 - DNA, 13 bp, Artificial Sequence
  Oligonucleotide for detection of SNP TSC0027580
aggtgtgttggtg

SEQ ID NO: 110494 - DNA, 13 bp, Artificial Sequence
  Oligonucleotide for detection of SNP TSC0027580
caccaacacacct

SEQ ID NO: 110495 - DNA, 13 bp, Artificial Sequence
  Oligonucleotide for detection of SNP TSC0027581
tggtgttttttga

SEQ ID NO: 110496 - DNA, 13 bp, Artificial Sequence
  Oligonucleotide for detection of SNP TSC0027581
tcaaaaaacacca

SEQ ID NO: 110497 - DNA, 13 bp, Artificial Sequence
  Oligonucleotide for detection of SNP TSC0027581
tggtgtgttttga

SEQ ID NO: 110498 - DNA, 13 bp, Artificial Sequence
  Oligonucleotide for detection of SNP TSC0027581
tcaaaacacacca

SEQ ID NO: 110499 - DNA, 13 bp, Artificial Sequence
  Oligonucleotide for detection of SNP TSC0027582
gattgtttttaty

SEQ ID NO: 110500 - DNA, 13 bp, Artificial Sequence
  Oligonucleotide for detection of SNP TSC0027582
rataaaaacaatc

SEQ ID NO: 110501 - DNA, 13 bp, Artificial Sequence
  Oligonucleotide for detection of SNP TSC0027582
gattgtgtttaty

SEQ ID NO: 110502 - DNA, 13 bp, Artificial Sequence
  Oligonucleotide for detection of SNP TSC0027582
rataaacacaatc

SEQ ID NO: 110503 - DNA, 13 bp, Artificial Sequence
  Oligonucleotide for detection of SNP TSC0027582
gatcgtttttaty

SEQ ID NO: 110504 - DNA, 13 bp, Artificial Sequence
  Oligonucleotide for detection of SNP TSC0027582
rataaaaacgatc

SEQ ID NO: 110505 - DNA, 13 bp, Artificial Sequence
  Oligonucleotide for detection of SNP TSC0027582
gatcgtgtttaty

SEQ ID NO: 110506 - DNA, 13 bp, Artificial Sequence
  Oligonucleotide for detection of SNP TSC0027582
rataaacacgatc

SEQ ID NO: 110507 - DNA, 13 bp, Artificial Sequence
  Oligonucleotide for detection of SNP TSC0027582
ggtggggatggty

SEQ ID NO: 110508 - DNA, 13 bp, Artificial Sequence
  Oligonucleotide for detection of SNP TSC0027582
raccatccccacc

SEQ ID NO: 110509 - DNA, 13 bp, Artificial Sequence
  Oligonucleotide for detection of SNP TSC0027582
ggtgggtatggty

SEQ ID NO: 110510 - DNA, 13 bp, Artificial Sequence
  Oligonucleotide for detection of SNP TSC0027582
raccatacccacc

SEQ ID NO: 110511 - DNA, 13 bp, Artificial Sequence
  Oligonucleotide for detection of SNP TSC0027582
ggtggggacggty

SEQ ID NO: 110512 - DNA, 13 bp, Artificial Sequence
  Oligonucleotide for detection of SNP TSC0027582
raccgtccccacc

SEQ ID NO: 110513 - DNA, 13 bp, Artificial Sequence
  Oligonucleotide for detection of SNP TSC0027582
ggtgggtacggty

SEQ ID NO: 110514 - DNA, 13 bp, Artificial Sequence
  Oligonucleotide for detection of SNP TSC0027582
raccgtacccacc

SEQ ID NO: 110515 - DNA, 13 bp, Artificial Sequence
  Oligonucleotide for detection of SNP TSC0027583
tttgttggtttta

SEQ ID NO: 110516 - DNA, 13 bp, Artificial Sequence
  Oligonucleotide for detection of SNP TSC0027583
taaaaccaacaaa

SEQ ID NO: 110517 - DNA, 13 bp, Artificial Sequence
  Oligonucleotide for detection of SNP TSC0027583
tttgttagtttta

SEQ ID NO: 110518 - DNA, 13 bp, Artificial Sequence
  Oligonucleotide for detection of SNP TSC0027583
taaaactaacaaa

SEQ ID NO: 110519 - DNA, 13 bp, Artificial Sequence
  Oligonucleotide for detection of SNP TSC0027586
tatattgattagg

SEQ ID NO: 110520 - DNA, 13 bp, Artificial Sequence
  Oligonucleotide for detection of SNP TSC0027586
cctaatcaatata

SEQ ID NO: 110521 - DNA, 13 bp, Artificial Sequence
  Oligonucleotide for detection of SNP TSC0027586
tatatttattagg

SEQ ID NO: 110522 - DNA, 13 bp, Artificial Sequence
  Oligonucleotide for detection of SNP TSC0027586
cctaataaatata

SEQ ID NO: 110523 - DNA, 13 bp, Artificial Sequence
  Oligonucleotide for detection of SNP TSC0027586
tttagttagtatg

SEQ ID NO: 110524 - DNA, 13 bp, Artificial Sequence
  Oligonucleotide for detection of SNP TSC0027586
catactaactaaa

SEQ ID NO: 110525 - DNA, 13 bp, Artificial Sequence
  Oligonucleotide for detection of SNP TSC0027586
tttagtaagtatg

SEQ ID NO: 110526 - DNA, 13 bp, Artificial Sequence
  Oligonucleotide for detection of SNP TSC0027586
catacttactaaa

SEQ ID NO: 110527 - DNA, 13 bp, Artificial Sequence
  Oligonucleotide for detection of SNP TSC0027587
tatttaagagata

SEQ ID NO: 110528 - DNA, 13 bp, Artificial Sequence
  Oligonucleotide for detection of SNP TSC0027587
tatctcttaaata

SEQ ID NO: 110529 - DNA, 13 bp, Artificial Sequence
  Oligonucleotide for detection of SNP TSC0027587
tatttaggagata

SEQ ID NO: 110530 - DNA, 13 bp, Artificial Sequence
  Oligonucleotide for detection of SNP TSC0027587
tatctcctaaata

SEQ ID NO: 110531 - DNA, 13 bp, Artificial Sequence
  Oligonucleotide for detection of SNP TSC0027588
gagaagtatttat

SEQ ID NO: 110532 - DNA, 13 bp, Artificial Sequence
  Oligonucleotide for detection of SNP TSC0027588
ataaatacttctc

SEQ ID NO: 110533 - DNA, 13 bp, Artificial Sequence
  Oligonucleotide for detection of SNP TSC0027588
gagaaggatttat

SEQ ID NO: 110534 - DNA, 13 bp, Artificial Sequence
  Oligonucleotide for detection of SNP TSC0027588
ataaatccttctc

SEQ ID NO: 110535 - DNA, 13 bp, Artificial Sequence
  Oligonucleotide for detection of SNP TSC0027588
ataaatgttttty

SEQ ID NO: 110536 - DNA, 13 bp, Artificial Sequence
  Oligonucleotide for detection of SNP TSC0027588
raaaaacatttat

SEQ ID NO: 110537 - DNA, 13 bp, Artificial Sequence
  Oligonucleotide for detection of SNP TSC0027588
ataaattttttty

SEQ ID NO: 110538 - DNA, 13 bp, Artificial Sequence
  Oligonucleotide for detection of SNP TSC0027588
raaaaaaatttat

SEQ ID NO: 110539 - DNA, 13 bp, Artificial Sequence
  Oligonucleotide for detection of SNP TSC0027589
gtaaatgtatatt

SEQ ID NO: 110540 - DNA, 13 bp, Artificial Sequence
  Oligonucleotide for detection of SNP TSC0027589
aatatacatttac

SEQ ID NO: 110541 - DNA, 13 bp, Artificial Sequence
  Oligonucleotide for detection of SNP TSC0027589
gtaaatatatatt

SEQ ID NO: 110542 - DNA, 13 bp, Artificial Sequence
  Oligonucleotide for detection of SNP TSC0027589
aatatatatttac

SEQ ID NO: 110543 - DNA, 13 bp, Artificial Sequence
  Oligonucleotide for detection of SNP TSC0027590
aaagttatgatgt

SEQ ID NO: 110544 - DNA, 13 bp, Artificial Sequence
  Oligonucleotide for detection of SNP TSC0027590
acatcataacttt

SEQ ID NO: 110545 - DNA, 13 bp, Artificial Sequence
  Oligonucleotide for detection of SNP TSC0027590
aaagttttgatgt

SEQ ID NO: 110546 - DNA, 13 bp, Artificial Sequence
  Oligonucleotide for detection of SNP TSC0027590
acatcaaaacttt

SEQ ID NO: 110547 - DNA, 13 bp, Artificial Sequence
  Oligonucleotide for detection of SNP TSC0027592
agttattggggga

SEQ ID NO: 110548 - DNA, 13 bp, Artificial Sequence
  Oligonucleotide for detection of SNP TSC0027592
tcccccaataact

SEQ ID NO: 110549 - DNA, 13 bp, Artificial Sequence
  Oligonucleotide for detection of SNP TSC0027592
agttatcggggga

SEQ ID NO: 110550 - DNA, 13 bp, Artificial Sequence
  Oligonucleotide for detection of SNP TSC0027592
tcccccgataact

SEQ ID NO: 110551 - DNA, 13 bp, Artificial Sequence
  Oligonucleotide for detection of SNP TSC0027592
ttttttggtgatt

SEQ ID NO: 110552 - DNA, 13 bp, Artificial Sequence
  Oligonucleotide for detection of SNP TSC0027592
aatcaccaaaaaa

SEQ ID NO: 110553 - DNA, 13 bp, Artificial Sequence
  Oligonucleotide for detection of SNP TSC0027592
ttttttagtgatt

SEQ ID NO: 110554 - DNA, 13 bp, Artificial Sequence
  Oligonucleotide for detection of SNP TSC0027592
aatcactaaaaaa

SEQ ID NO: 110555 - DNA, 13 bp, Artificial Sequence
  Oligonucleotide for detection of SNP TSC0027592
tttttcggtgatt

SEQ ID NO: 110556 - DNA, 13 bp, Artificial Sequence
  Oligonucleotide for detection of SNP TSC0027592
aatcaccgaaaaa

SEQ ID NO: 110557 - DNA, 13 bp, Artificial Sequence
  Oligonucleotide for detection of SNP TSC0027593
agggggtgttttg

SEQ ID NO: 110558 - DNA, 13 bp, Artificial Sequence
  Oligonucleotide for detection of SNP TSC0027593
caaaacaccccct

SEQ ID NO: 110559 - DNA, 13 bp, Artificial Sequence
  Oligonucleotide for detection of SNP TSC0027593
agggggggttttg

SEQ ID NO: 110560 - DNA, 13 bp, Artificial Sequence
  Oligonucleotide for detection of SNP TSC0027593
caaaaccccccct

SEQ ID NO: 110561 - DNA, 13 bp, Artificial Sequence
  Oligonucleotide for detection of SNP TSC0027593
agggggcgttttg

SEQ ID NO: 110562 - DNA, 13 bp, Artificial Sequence
  Oligonucleotide for detection of SNP TSC0027593
caaaacgccccct

SEQ ID NO: 110563 - DNA, 13 bp, Artificial Sequence
  Oligonucleotide for detection of SNP TSC0027593
taaaatgtttttt

SEQ ID NO: 110564 - DNA, 13 bp, Artificial Sequence
  Oligonucleotide for detection of SNP TSC0027593
aaaaaacatttta

SEQ ID NO: 110565 - DNA, 13 bp, Artificial Sequence
  Oligonucleotide for detection of SNP TSC0027593
taaaatttttttt

SEQ ID NO: 110566 - DNA, 13 bp, Artificial Sequence
  Oligonucleotide for detection of SNP TSC0027593
aaaaaaaatttta

SEQ ID NO: 110567 - DNA, 13 bp, Artificial Sequence
  Oligonucleotide for detection of SNP TSC0027593
taaaacgtttttt

SEQ ID NO: 110568 - DNA, 13 bp, Artificial Sequence
  Oligonucleotide for detection of SNP TSC0027593
aaaaaacgtttta

SEQ ID NO: 110569 - DNA, 13 bp, Artificial Sequence
  Oligonucleotide for detection of SNP TSC0027595
agggagaggtaay

SEQ ID NO: 110570 - DNA, 13 bp, Artificial Sequence
  Oligonucleotide for detection of SNP TSC0027595
rttacctctccct

SEQ ID NO: 110571 - DNA, 13 bp, Artificial Sequence
  Oligonucleotide for detection of SNP TSC0027595
agggagtggtaay

SEQ ID NO: 110572 - DNA, 13 bp, Artificial Sequence
  Oligonucleotide for detection of SNP TSC0027595
rttaccactccct

SEQ ID NO: 110573 - DNA, 13 bp, Artificial Sequence
  Oligonucleotide for detection of SNP TSC0027595
agggagcggtaay

SEQ ID NO: 110574 - DNA, 13 bp, Artificial Sequence
  Oligonucleotide for detection of SNP TSC0027595
rttaccgctccct

SEQ ID NO: 110575 - DNA, 13 bp, Artificial Sequence
  Oligonucleotide for detection of SNP TSC0027595
gttgtcgtttttt

SEQ ID NO: 110576 - DNA, 13 bp, Artificial Sequence
  Oligonucleotide for detection of SNP TSC0027595
aaaaaacgacaac

SEQ ID NO: 110577 - DNA, 13 bp, Artificial Sequence
  Oligonucleotide for detection of SNP TSC0027596
agttagatagata

SEQ ID NO: 110578 - DNA, 13 bp, Artificial Sequence
  Oligonucleotide for detection of SNP TSC0027596
tatctatctaact

SEQ ID NO: 110579 - DNA, 13 bp, Artificial Sequence
  Oligonucleotide for detection of SNP TSC0027596
agttagttagata

SEQ ID NO: 110580 - DNA, 13 bp, Artificial Sequence
  Oligonucleotide for detection of SNP TSC0027596
tatctaactaact

SEQ ID NO: 110581 - DNA, 13 bp, Artificial Sequence
  Oligonucleotide for detection of SNP TSC0027596
tatttatttagtt

SEQ ID NO: 110582 - DNA, 13 bp, Artificial Sequence
  Oligonucleotide for detection of SNP TSC0027596
aactaaataaata

SEQ ID NO: 110583 - DNA, 13 bp, Artificial Sequence
  Oligonucleotide for detection of SNP TSC0027596
tatttagttagtt

SEQ ID NO: 110584 - DNA, 13 bp, Artificial Sequence
  Oligonucleotide for detection of SNP TSC0027596
aactaactaaata

SEQ ID NO: 110585 - DNA, 13 bp, Artificial Sequence
  Oligonucleotide for detection of SNP TSC0027598
ttgttggggttty

SEQ ID NO: 110586 - DNA, 13 bp, Artificial Sequence
  Oligonucleotide for detection of SNP TSC0027598
raaaccccaacaa

SEQ ID NO: 110587 - DNA, 13 bp, Artificial Sequence
  Oligonucleotide for detection of SNP TSC0027598
ttgttgtggttty

SEQ ID NO: 110588 - DNA, 13 bp, Artificial Sequence
  Oligonucleotide for detection of SNP TSC0027598
raaaccacaacaa

SEQ ID NO: 110589 - DNA, 13 bp, Artificial Sequence
  Oligonucleotide for detection of SNP TSC0027598
gaagttttagtag

SEQ ID NO: 110590 - DNA, 13 bp, Artificial Sequence
  Oligonucleotide for detection of SNP TSC0027598
ctactaaaacttc

SEQ ID NO: 110591 - DNA, 13 bp, Artificial Sequence
  Oligonucleotide for detection of SNP TSC0027598
gaagttatagtag

SEQ ID NO: 110592 - DNA, 13 bp, Artificial Sequence
  Oligonucleotide for detection of SNP TSC0027598
ctactataacttc

SEQ ID NO: 110593 - DNA, 13 bp, Artificial Sequence
  Oligonucleotide for detection of SNP TSC0027600
tttaatgaaaaaa

SEQ ID NO: 110594 - DNA, 13 bp, Artificial Sequence
  Oligonucleotide for detection of SNP TSC0027600
ttttttcattaaa

SEQ ID NO: 110595 - DNA, 13 bp, Artificial Sequence
  Oligonucleotide for detection of SNP TSC0027600
tttaataaaaaaa

SEQ ID NO: 110596 - DNA, 13 bp, Artificial Sequence
  Oligonucleotide for detection of SNP TSC0027600
tttttttattaaa

SEQ ID NO: 110597 - DNA, 13 bp, Artificial Sequence
  Oligonucleotide for detection of SNP TSC0027602
attttaagttagg

SEQ ID NO: 110598 - DNA, 13 bp, Artificial Sequence
  Oligonucleotide for detection of SNP TSC0027602
cctaacttaaaat

SEQ ID NO: 110599 - DNA, 13 bp, Artificial Sequence
  Oligonucleotide for detection of SNP TSC0027602
attttatgttagg

SEQ ID NO: 110600 - DNA, 13 bp, Artificial Sequence
  Oligonucleotide for detection of SNP TSC0027602
cctaacataaaat

SEQ ID NO: 110601 - DNA, 13 bp, Artificial Sequence
  Oligonucleotide for detection of SNP TSC0027602
attttacgttagg

SEQ ID NO: 110602 - DNA, 13 bp, Artificial Sequence
  Oligonucleotide for detection of SNP TSC0027602
cctaacgtaaaat

SEQ ID NO: 110603 - DNA, 13 bp, Artificial Sequence
  Oligonucleotide for detection of SNP TSC0027602
tttggtttagagt

SEQ ID NO: 110604 - DNA, 13 bp, Artificial Sequence
  Oligonucleotide for detection of SNP TSC0027602
actctaaaccaaa

SEQ ID NO: 110605 - DNA, 13 bp, Artificial Sequence
  Oligonucleotide for detection of SNP TSC0027602
tttggtgtagagt

SEQ ID NO: 110606 - DNA, 13 bp, Artificial Sequence
  Oligonucleotide for detection of SNP TSC0027602
actctacaccaaa

SEQ ID NO: 110607 - DNA, 13 bp, Artificial Sequence
  Oligonucleotide for detection of SNP TSC0027602
tttggcgtagagt

SEQ ID NO: 110608 - DNA, 13 bp, Artificial Sequence
  Oligonucleotide for detection of SNP TSC0027602
actctacgccaaa

SEQ ID NO: 110609 - DNA, 13 bp, Artificial Sequence
  Oligonucleotide for detection of SNP TSC0027605
tttggtattttgt

SEQ ID NO: 110610 - DNA, 13 bp, Artificial Sequence
  Oligonucleotide for detection of SNP TSC0027605
acaaaataccaaa

SEQ ID NO: 110611 - DNA, 13 bp, Artificial Sequence
  Oligonucleotide for detection of SNP TSC0027605
tttggtgttttgt

SEQ ID NO: 110612 - DNA, 13 bp, Artificial Sequence
  Oligonucleotide for detection of SNP TSC0027605
acaaaacaccaaa

SEQ ID NO: 110613 - DNA, 13 bp, Artificial Sequence
  Oligonucleotide for detection of SNP TSC0027605
tttggcgttttgt

SEQ ID NO: 110614 - DNA, 13 bp, Artificial Sequence
  Oligonucleotide for detection of SNP TSC0027605
acaaaacgccaaa

SEQ ID NO: 110615 - DNA, 13 bp, Artificial Sequence
  Oligonucleotide for detection of SNP TSC0027605
ataggatgttaga

SEQ ID NO: 110616 - DNA, 13 bp, Artificial Sequence
  Oligonucleotide for detection of SNP TSC0027605
tctaacatcctat

SEQ ID NO: 110617 - DNA, 13 bp, Artificial Sequence
  Oligonucleotide for detection of SNP TSC0027605
ataggacgttaga

SEQ ID NO: 110618 - DNA, 13 bp, Artificial Sequence
  Oligonucleotide for detection of SNP TSC0027605
tctaacgtcctat

SEQ ID NO: 110619 - DNA, 13 bp, Artificial Sequence
  Oligonucleotide for detection of SNP TSC0027607
aatgatagatatg

SEQ ID NO: 110620 - DNA, 13 bp, Artificial Sequence
  Oligonucleotide for detection of SNP TSC0027607
catatctatcatt

SEQ ID NO: 110621 - DNA, 13 bp, Artificial Sequence
  Oligonucleotide for detection of SNP TSC0027607
aatgatggatatg

SEQ ID NO: 110622 - DNA, 13 bp, Artificial Sequence
  Oligonucleotide for detection of SNP TSC0027607
catatccatcatt

SEQ ID NO: 110623 - DNA, 13 bp, Artificial Sequence
  Oligonucleotide for detection of SNP TSC0027607
aatgacggatatg

SEQ ID NO: 110624 - DNA, 13 bp, Artificial Sequence
  Oligonucleotide for detection of SNP TSC0027607
catatccgtcatt

SEQ ID NO: 110625 - DNA, 13 bp, Artificial Sequence
  Oligonucleotide for detection of SNP TSC0027607
tatgtttgttatt

SEQ ID NO: 110626 - DNA, 13 bp, Artificial Sequence
  Oligonucleotide for detection of SNP TSC0027607
aataacaaacata

SEQ ID NO: 110627 - DNA, 13 bp, Artificial Sequence
  Oligonucleotide for detection of SNP TSC0027607
tatgttcgttatt

SEQ ID NO: 110628 - DNA, 13 bp, Artificial Sequence
  Oligonucleotide for detection of SNP TSC0027607
aataacgaacata

SEQ ID NO: 110629 - DNA, 13 bp, Artificial Sequence
  Oligonucleotide for detection of SNP TSC0027608
ttagttaggggag

SEQ ID NO: 110630 - DNA, 13 bp, Artificial Sequence
  Oligonucleotide for detection of SNP TSC0027608
ctcccctaactaa

SEQ ID NO: 110631 - DNA, 13 bp, Artificial Sequence
  Oligonucleotide for detection of SNP TSC0027608
ttagttgggggag

SEQ ID NO: 110632 - DNA, 13 bp, Artificial Sequence
  Oligonucleotide for detection of SNP TSC0027608
ctcccccaactaa

SEQ ID NO: 110633 - DNA, 13 bp, Artificial Sequence
  Oligonucleotide for detection of SNP TSC0027609
atttagagaagag

SEQ ID NO: 110634 - DNA, 13 bp, Artificial Sequence
  Oligonucleotide for detection of SNP TSC0027609
ctcttctctaaat

SEQ ID NO: 110635 - DNA, 13 bp, Artificial Sequence
  Oligonucleotide for detection of SNP TSC0027609
atttagtgaagag

SEQ ID NO: 110636 - DNA, 13 bp, Artificial Sequence
  Oligonucleotide for detection of SNP TSC0027609
ctcttcactaaat

SEQ ID NO: 110637 - DNA, 13 bp, Artificial Sequence
  Oligonucleotide for detection of SNP TSC0027609
tttttttttgggt

SEQ ID NO: 110638 - DNA, 13 bp, Artificial Sequence
  Oligonucleotide for detection of SNP TSC0027609
acccaaaaaaaaa

SEQ ID NO: 110639 - DNA, 13 bp, Artificial Sequence
  Oligonucleotide for detection of SNP TSC0027609
ttttttattgggt

SEQ ID NO: 110640 - DNA, 13 bp, Artificial Sequence
  Oligonucleotide for detection of SNP TSC0027609
acccaataaaaaa

SEQ ID NO: 110641 - DNA, 13 bp, Artificial Sequence
  Oligonucleotide for detection of SNP TSC0027614
gaaggagtagtat

SEQ ID NO: 110642 - DNA, 13 bp, Artificial Sequence
  Oligonucleotide for detection of SNP TSC0027614
atactactccttc

SEQ ID NO: 110643 - DNA, 13 bp, Artificial Sequence
  Oligonucleotide for detection of SNP TSC0027614
gaaggattagtat

SEQ ID NO: 110644 - DNA, 13 bp, Artificial Sequence
  Oligonucleotide for detection of SNP TSC0027614
atactaatccttc

SEQ ID NO: 110645 - DNA, 13 bp, Artificial Sequence
  Oligonucleotide for detection of SNP TSC0027614
atgttatttttty

SEQ ID NO: 110646 - DNA, 13 bp, Artificial Sequence
  Oligonucleotide for detection of SNP TSC0027614
raaaaaataacat

SEQ ID NO: 110647 - DNA, 13 bp, Artificial Sequence
  Oligonucleotide for detection of SNP TSC0027614
atgttaattttty

SEQ ID NO: 110648 - DNA, 13 bp, Artificial Sequence
  Oligonucleotide for detection of SNP TSC0027614
raaaaattaacat

SEQ ID NO: 110649 - DNA, 13 bp, Artificial Sequence
  Oligonucleotide for detection of SNP TSC0027615
ttgaaaaaaaaaa

SEQ ID NO: 110650 - DNA, 13 bp, Artificial Sequence
  Oligonucleotide for detection of SNP TSC0027615
ttttttttttcaa

SEQ ID NO: 110651 - DNA, 13 bp, Artificial Sequence
  Oligonucleotide for detection of SNP TSC0027615
ttgaaagaaaaaa

SEQ ID NO: 110652 - DNA, 13 bp, Artificial Sequence
  Oligonucleotide for detection of SNP TSC0027615
ttttttctttcaa

SEQ ID NO: 110653 - DNA, 13 bp, Artificial Sequence
  Oligonucleotide for detection of SNP TSC0027616
atgaatttattat

SEQ ID NO: 110654 - DNA, 13 bp, Artificial Sequence
  Oligonucleotide for detection of SNP TSC0027616
ataataaattcat

SEQ ID NO: 110655 - DNA, 13 bp, Artificial Sequence
  Oligonucleotide for detection of SNP TSC0027616
ataatatatttat

SEQ ID NO: 110656 - DNA, 13 bp, Artificial Sequence
  Oligonucleotide for detection of SNP TSC0027616
ataaatatattat

SEQ ID NO: 110657 - DNA, 13 bp, Artificial Sequence
  Oligonucleotide for detection of SNP TSC0027616
ataataaatttat

SEQ ID NO: 110658 - DNA, 13 bp, Artificial Sequence
  Oligonucleotide for detection of SNP TSC0027616
ataaatttattat

SEQ ID NO: 110659 - DNA, 13 bp, Artificial Sequence
  Oligonucleotide for detection of SNP TSC0027617
tgagtgtgatgat

SEQ ID NO: 110660 - DNA, 13 bp, Artificial Sequence
  Oligonucleotide for detection of SNP TSC0027617
atcatcacactca

SEQ ID NO: 110661 - DNA, 13 bp, Artificial Sequence
  Oligonucleotide for detection of SNP TSC0027617
tgagtgcgatgat

SEQ ID NO: 110662 - DNA, 13 bp, Artificial Sequence
  Oligonucleotide for detection of SNP TSC0027617
atcatcgcactca

SEQ ID NO: 110663 - DNA, 13 bp, Artificial Sequence
  Oligonucleotide for detection of SNP TSC0027617
attattgtattta

SEQ ID NO: 110664 - DNA, 13 bp, Artificial Sequence
  Oligonucleotide for detection of SNP TSC0027617
taaatacaataat

SEQ ID NO: 110665 - DNA, 13 bp, Artificial Sequence
  Oligonucleotide for detection of SNP TSC0027617
attattatattta

SEQ ID NO: 110666 - DNA, 13 bp, Artificial Sequence
  Oligonucleotide for detection of SNP TSC0027617
taaatataataat

SEQ ID NO: 110667 - DNA, 13 bp, Artificial Sequence
  Oligonucleotide for detection of SNP TSC0027617
attatcgtattta

SEQ ID NO: 110668 - DNA, 13 bp, Artificial Sequence
  Oligonucleotide for detection of SNP TSC0027617
taaatacgataat

SEQ ID NO: 110669 - DNA, 13 bp, Artificial Sequence
  Oligonucleotide for detection of SNP TSC0027619
gattgttgatgat

SEQ ID NO: 110670 - DNA, 13 bp, Artificial Sequence
  Oligonucleotide for detection of SNP TSC0027619
atcatcaacaatc

SEQ ID NO: 110671 - DNA, 13 bp, Artificial Sequence
  Oligonucleotide for detection of SNP TSC0027619
gattgtcgatgat

SEQ ID NO: 110672 - DNA, 13 bp, Artificial Sequence
  Oligonucleotide for detection of SNP TSC0027619
atcatcgacaatc

SEQ ID NO: 110673 - DNA, 13 bp, Artificial Sequence
  Oligonucleotide for detection of SNP TSC0027619
attattgataaty

SEQ ID NO: 110674 - DNA, 13 bp, Artificial Sequence
  Oligonucleotide for detection of SNP TSC0027619
rattatcaataat

SEQ ID NO: 110675 - DNA, 13 bp, Artificial Sequence
  Oligonucleotide for detection of SNP TSC0027619
attattaataaty

SEQ ID NO: 110676 - DNA, 13 bp, Artificial Sequence
  Oligonucleotide for detection of SNP TSC0027619
rattattaataat

SEQ ID NO: 110677 - DNA, 13 bp, Artificial Sequence
  Oligonucleotide for detection of SNP TSC0027619
attatcgataaty

SEQ ID NO: 110678 - DNA, 13 bp, Artificial Sequence
  Oligonucleotide for detection of SNP TSC0027619
rattatcgataat

SEQ ID NO: 110679 - DNA, 13 bp, Artificial Sequence
  Oligonucleotide for detection of SNP TSC0027620
ggttatgagatgy

SEQ ID NO: 110680 - DNA, 13 bp, Artificial Sequence
  Oligonucleotide for detection of SNP TSC0027620
rcatctcataacc

SEQ ID NO: 110681 - DNA, 13 bp, Artificial Sequence
  Oligonucleotide for detection of SNP TSC0027620
ggttataagatgy

SEQ ID NO: 110682 - DNA, 13 bp, Artificial Sequence
  Oligonucleotide for detection of SNP TSC0027620
rcatcttataacc

SEQ ID NO: 110683 - DNA, 13 bp, Artificial Sequence
  Oligonucleotide for detection of SNP TSC0027622
atttttagagata

SEQ ID NO: 110684 - DNA, 13 bp, Artificial Sequence
  Oligonucleotide for detection of SNP TSC0027622
tatctctaaaaat

SEQ ID NO: 110685 - DNA, 13 bp, Artificial Sequence
  Oligonucleotide for detection of SNP TSC0027622
atttttggagata

SEQ ID NO: 110686 - DNA, 13 bp, Artificial Sequence
  Oligonucleotide for detection of SNP TSC0027622
tatctccaaaaat

SEQ ID NO: 110687 - DNA, 13 bp, Artificial Sequence
  Oligonucleotide for detection of SNP TSC0027626
taggaaaaaagag

SEQ ID NO: 110688 - DNA, 13 bp, Artificial Sequence
  Oligonucleotide for detection of SNP TSC0027626
ctcttttttccta

SEQ ID NO: 110689 - DNA, 13 bp, Artificial Sequence
  Oligonucleotide for detection of SNP TSC0027626
taggaagaaagag

SEQ ID NO: 110690 - DNA, 13 bp, Artificial Sequence
  Oligonucleotide for detection of SNP TSC0027626
ctctttcttccta

SEQ ID NO: 110691 - DNA, 13 bp, Artificial Sequence
  Oligonucleotide for detection of SNP TSC0027627
ggaaataattaag

SEQ ID NO: 110692 - DNA, 13 bp, Artificial Sequence
  Oligonucleotide for detection of SNP TSC0027627
cttaattatttcc

SEQ ID NO: 110693 - DNA, 13 bp, Artificial Sequence
  Oligonucleotide for detection of SNP TSC0027627
ggaaatgattaag

SEQ ID NO: 110694 - DNA, 13 bp, Artificial Sequence
  Oligonucleotide for detection of SNP TSC0027627
cttaatcatttcc

SEQ ID NO: 110695 - DNA, 13 bp, Artificial Sequence
  Oligonucleotide for detection of SNP TSC0027627
ggaaacgattaag

SEQ ID NO: 110696 - DNA, 13 bp, Artificial Sequence
  Oligonucleotide for detection of SNP TSC0027627
cttaatcgtttcc

SEQ ID NO: 110697 - DNA, 13 bp, Artificial Sequence
  Oligonucleotide for detection of SNP TSC0027627
tttaattgtttty

SEQ ID NO: 110698 - DNA, 13 bp, Artificial Sequence
  Oligonucleotide for detection of SNP TSC0027627
raaaacaattaaa

SEQ ID NO: 110699 - DNA, 13 bp, Artificial Sequence
  Oligonucleotide for detection of SNP TSC0027627
tttaatcgtttty

SEQ ID NO: 110700 - DNA, 13 bp, Artificial Sequence
  Oligonucleotide for detection of SNP TSC0027627
raaaacgattaaa

SEQ ID NO: 110701 - DNA, 13 bp, Artificial Sequence
  Oligonucleotide for detection of SNP TSC0027628
gtttttagtaaat

SEQ ID NO: 110702 - DNA, 13 bp, Artificial Sequence
  Oligonucleotide for detection of SNP TSC0027628
atttactaaaaac

SEQ ID NO: 110703 - DNA, 13 bp, Artificial Sequence
  Oligonucleotide for detection of SNP TSC0027628
gtttttggtaaat

SEQ ID NO: 110704 - DNA, 13 bp, Artificial Sequence
  Oligonucleotide for detection of SNP TSC0027628
atttaccaaaaac

SEQ ID NO: 110705 - DNA, 13 bp, Artificial Sequence
  Oligonucleotide for detection of SNP TSC0027629
tagtttaggtgay

SEQ ID NO: 110706 - DNA, 13 bp, Artificial Sequence
  Oligonucleotide for detection of SNP TSC0027629
rtcacctaaacta

SEQ ID NO: 110707 - DNA, 13 bp, Artificial Sequence
  Oligonucleotide for detection of SNP TSC0027629
tagtttaggcgay

SEQ ID NO: 110708 - DNA, 13 bp, Artificial Sequence
  Oligonucleotide for detection of SNP TSC0027629
rtcgcctaaacta

SEQ ID NO: 110709 - DNA, 13 bp, Artificial Sequence
  Oligonucleotide for detection of SNP TSC0027629
tagttcgggtgay

SEQ ID NO: 110710 - DNA, 13 bp, Artificial Sequence
  Oligonucleotide for detection of SNP TSC0027629
rtcacccgaacta

SEQ ID NO: 110711 - DNA, 13 bp, Artificial Sequence
  Oligonucleotide for detection of SNP TSC0027629
tagtttgggcgay

SEQ ID NO: 110712 - DNA, 13 bp, Artificial Sequence
  Oligonucleotide for detection of SNP TSC0027629
rtcgcccaaacta

SEQ ID NO: 110713 - DNA, 13 bp, Artificial Sequence
  Oligonucleotide for detection of SNP TSC0027629
tagttcgggcgay

SEQ ID NO: 110714 - DNA, 13 bp, Artificial Sequence
  Oligonucleotide for detection of SNP TSC0027629
rtcgcccgaacta

SEQ ID NO: 110715 - DNA, 13 bp, Artificial Sequence
  Oligonucleotide for detection of SNP TSC0027629
gttgtttgggttg

SEQ ID NO: 110716 - DNA, 13 bp, Artificial Sequence
  Oligonucleotide for detection of SNP TSC0027629
caacccaaacaac

SEQ ID NO: 110717 - DNA, 13 bp, Artificial Sequence
  Oligonucleotide for detection of SNP TSC0027629
gtcgtttgggttg

SEQ ID NO: 110718 - DNA, 13 bp, Artificial Sequence
  Oligonucleotide for detection of SNP TSC0027629
caacccaaacgac

SEQ ID NO: 110719 - DNA, 13 bp, Artificial Sequence
  Oligonucleotide for detection of SNP TSC0027629
gttgttcgggttg

SEQ ID NO: 110720 - DNA, 13 bp, Artificial Sequence
  Oligonucleotide for detection of SNP TSC0027629
caacccgaacaac

SEQ ID NO: 110721 - DNA, 13 bp, Artificial Sequence
  Oligonucleotide for detection of SNP TSC0027629
gtcgttcgggttg

SEQ ID NO: 110722 - DNA, 13 bp, Artificial Sequence
  Oligonucleotide for detection of SNP TSC0027629
caacccgaacgac

SEQ ID NO: 110723 - DNA, 13 bp, Artificial Sequence
  Oligonucleotide for detection of SNP TSC0027630
tagagtagtgttt

SEQ ID NO: 110724 - DNA, 13 bp, Artificial Sequence
  Oligonucleotide for detection of SNP TSC0027630
aaacactactcta

SEQ ID NO: 110725 - DNA, 13 bp, Artificial Sequence
  Oligonucleotide for detection of SNP TSC0027630
tagagttgtgttt

SEQ ID NO: 110726 - DNA, 13 bp, Artificial Sequence
  Oligonucleotide for detection of SNP TSC0027630
aaacacaactcta

SEQ ID NO: 110727 - DNA, 13 bp, Artificial Sequence
  Oligonucleotide for detection of SNP TSC0027630
tagagtcgtgttt

SEQ ID NO: 110728 - DNA, 13 bp, Artificial Sequence
  Oligonucleotide for detection of SNP TSC0027630
aaacacgactcta

SEQ ID NO: 110729 - DNA, 13 bp, Artificial Sequence
  Oligonucleotide for detection of SNP TSC0027630
aagtattgttttg

SEQ ID NO: 110730 - DNA, 13 bp, Artificial Sequence
  Oligonucleotide for detection of SNP TSC0027630
caaaacaatactt

SEQ ID NO: 110731 - DNA, 13 bp, Artificial Sequence
  Oligonucleotide for detection of SNP TSC0027630
aagtatggttttg

SEQ ID NO: 110732 - DNA, 13 bp, Artificial Sequence
  Oligonucleotide for detection of SNP TSC0027630
caaaaccatactt

SEQ ID NO: 110733 - DNA, 13 bp, Artificial Sequence
  Oligonucleotide for detection of SNP TSC0027630
aagtacggttttg

SEQ ID NO: 110734 - DNA, 13 bp, Artificial Sequence
  Oligonucleotide for detection of SNP TSC0027630
caaaaccgtactt

SEQ ID NO: 110735 - DNA, 13 bp, Artificial Sequence
  Oligonucleotide for detection of SNP TSC0027631
tgtaataatggtt

SEQ ID NO: 110736 - DNA, 13 bp, Artificial Sequence
  Oligonucleotide for detection of SNP TSC0027631
aaccattattaca

SEQ ID NO: 110737 - DNA, 13 bp, Artificial Sequence
  Oligonucleotide for detection of SNP TSC0027631
tgtaattatggtt

SEQ ID NO: 110738 - DNA, 13 bp, Artificial Sequence
  Oligonucleotide for detection of SNP TSC0027631
aaccataattaca

SEQ ID NO: 110739 - DNA, 13 bp, Artificial Sequence
  Oligonucleotide for detection of SNP TSC0027631
aattattgttata

SEQ ID NO: 110740 - DNA, 13 bp, Artificial Sequence
  Oligonucleotide for detection of SNP TSC0027631
tataacaataatt

SEQ ID NO: 110741 - DNA, 13 bp, Artificial Sequence
  Oligonucleotide for detection of SNP TSC0027631
aattatggttata

SEQ ID NO: 110742 - DNA, 13 bp, Artificial Sequence
  Oligonucleotide for detection of SNP TSC0027631
tataaccataatt

SEQ ID NO: 110743 - DNA, 13 bp, Artificial Sequence
  Oligonucleotide for detection of SNP TSC0027633
gaattaatatatt

SEQ ID NO: 110744 - DNA, 13 bp, Artificial Sequence
  Oligonucleotide for detection of SNP TSC0027633
aatatattaattc

SEQ ID NO: 110745 - DNA, 13 bp, Artificial Sequence
  Oligonucleotide for detection of SNP TSC0027633
gaattagtatatt

SEQ ID NO: 110746 - DNA, 13 bp, Artificial Sequence
  Oligonucleotide for detection of SNP TSC0027633
aatatactaattc

SEQ ID NO: 110747 - DNA, 13 bp, Artificial Sequence
  Oligonucleotide for detection of SNP TSC0027634
attgagataagtt

SEQ ID NO: 110748 - DNA, 13 bp, Artificial Sequence
  Oligonucleotide for detection of SNP TSC0027634
aacttatctcaat

SEQ ID NO: 110749 - DNA, 13 bp, Artificial Sequence
  Oligonucleotide for detection of SNP TSC0027634
attgaggtaagtt

SEQ ID NO: 110750 - DNA, 13 bp, Artificial Sequence
  Oligonucleotide for detection of SNP TSC0027634
aacttacctcaat

SEQ ID NO: 110751 - DNA, 13 bp, Artificial Sequence
  Oligonucleotide for detection of SNP TSC0027636
aagttagtagagy

SEQ ID NO: 110752 - DNA, 13 bp, Artificial Sequence
  Oligonucleotide for detection of SNP TSC0027636
rctctactaactt

SEQ ID NO: 110753 - DNA, 13 bp, Artificial Sequence
  Oligonucleotide for detection of SNP TSC0027636
aagttaatagagy

SEQ ID NO: 110754 - DNA, 13 bp, Artificial Sequence
  Oligonucleotide for detection of SNP TSC0027636
rctctattaactt

SEQ ID NO: 110755 - DNA, 13 bp, Artificial Sequence
  Oligonucleotide for detection of SNP TSC0027637
aagaaagttattt

SEQ ID NO: 110756 - DNA, 13 bp, Artificial Sequence
  Oligonucleotide for detection of SNP TSC0027637
aaataactttctt

SEQ ID NO: 110757 - DNA, 13 bp, Artificial Sequence
  Oligonucleotide for detection of SNP TSC0027637
aagaaaattattt

SEQ ID NO: 110758 - DNA, 13 bp, Artificial Sequence
  Oligonucleotide for detection of SNP TSC0027637
aaataattttctt

SEQ ID NO: 110759 - DNA, 13 bp, Artificial Sequence
  Oligonucleotide for detection of SNP TSC0027642
tggttatggttay

SEQ ID NO: 110760 - DNA, 13 bp, Artificial Sequence
  Oligonucleotide for detection of SNP TSC0027642
rtaaccataacca

SEQ ID NO: 110761 - DNA, 13 bp, Artificial Sequence
  Oligonucleotide for detection of SNP TSC0027642
tggttagggttay

SEQ ID NO: 110762 - DNA, 13 bp, Artificial Sequence
  Oligonucleotide for detection of SNP TSC0027642
rtaaccctaacca

SEQ ID NO: 110763 - DNA, 13 bp, Artificial Sequence
  Oligonucleotide for detection of SNP TSC0027642
tggttacggttay

SEQ ID NO: 110764 - DNA, 13 bp, Artificial Sequence
  Oligonucleotide for detection of SNP TSC0027642
rtaaccgtaacca

SEQ ID NO: 110765 - DNA, 13 bp, Artificial Sequence
  Oligonucleotide for detection of SNP TSC0027642
gtaattgtagtta

SEQ ID NO: 110766 - DNA, 13 bp, Artificial Sequence
  Oligonucleotide for detection of SNP TSC0027642
taactacaattac

SEQ ID NO: 110767 - DNA, 13 bp, Artificial Sequence
  Oligonucleotide for detection of SNP TSC0027642
gtaattttagtta

SEQ ID NO: 110768 - DNA, 13 bp, Artificial Sequence
  Oligonucleotide for detection of SNP TSC0027642
taactaaaattac

SEQ ID NO: 110769 - DNA, 13 bp, Artificial Sequence
  Oligonucleotide for detection of SNP TSC0027642
gtaatcgtagtta

SEQ ID NO: 110770 - DNA, 13 bp, Artificial Sequence
  Oligonucleotide for detection of SNP TSC0027642
taactacgattac

SEQ ID NO: 110771 - DNA, 13 bp, Artificial Sequence
  Oligonucleotide for detection of SNP TSC0027643
gtagttgtgaaay

SEQ ID NO: 110772 - DNA, 13 bp, Artificial Sequence
  Oligonucleotide for detection of SNP TSC0027643
rtttcacaactac

SEQ ID NO: 110773 - DNA, 13 bp, Artificial Sequence
  Oligonucleotide for detection of SNP TSC0027643
gtagttttgaaay

SEQ ID NO: 110774 - DNA, 13 bp, Artificial Sequence
  Oligonucleotide for detection of SNP TSC0027643
rtttcaaaactac

SEQ ID NO: 110775 - DNA, 13 bp, Artificial Sequence
  Oligonucleotide for detection of SNP TSC0027643
gttttataattay

SEQ ID NO: 110776 - DNA, 13 bp, Artificial Sequence
  Oligonucleotide for detection of SNP TSC0027643
rtaattataaaac

SEQ ID NO: 110777 - DNA, 13 bp, Artificial Sequence
  Oligonucleotide for detection of SNP TSC0027643
gttttaaaattay

SEQ ID NO: 110778 - DNA, 13 bp, Artificial Sequence
  Oligonucleotide for detection of SNP TSC0027643
rtaattttaaaac

SEQ ID NO: 110779 - DNA, 13 bp, Artificial Sequence
  Oligonucleotide for detection of SNP TSC0027644
ttggtggtaaaag

SEQ ID NO: 110780 - DNA, 13 bp, Artificial Sequence
  Oligonucleotide for detection of SNP TSC0027644
cttttaccaccaa

SEQ ID NO: 110781 - DNA, 13 bp, Artificial Sequence
  Oligonucleotide for detection of SNP TSC0027644
ttggtgataaaag

SEQ ID NO: 110782 - DNA, 13 bp, Artificial Sequence
  Oligonucleotide for detection of SNP TSC0027644
cttttatcaccaa

SEQ ID NO: 110783 - DNA, 13 bp, Artificial Sequence
  Oligonucleotide for detection of SNP TSC0027645
gtgtaggtttata

SEQ ID NO: 110784 - DNA, 13 bp, Artificial Sequence
  Oligonucleotide for detection of SNP TSC0027645
tataaacctacac

SEQ ID NO: 110785 - DNA, 13 bp, Artificial Sequence
  Oligonucleotide for detection of SNP TSC0027645
gtgtagatttata

SEQ ID NO: 110786 - DNA, 13 bp, Artificial Sequence
  Oligonucleotide for detection of SNP TSC0027645
tataaatctacac

SEQ ID NO: 110787 - DNA, 13 bp, Artificial Sequence
  Oligonucleotide for detection of SNP TSC0027646
ttgtttggagaag

SEQ ID NO: 110788 - DNA, 13 bp, Artificial Sequence
  Oligonucleotide for detection of SNP TSC0027646
cttctccaaacaa

SEQ ID NO: 110789 - DNA, 13 bp, Artificial Sequence
  Oligonucleotide for detection of SNP TSC0027646
ttgtttagagaag

SEQ ID NO: 110790 - DNA, 13 bp, Artificial Sequence
  Oligonucleotide for detection of SNP TSC0027646
cttctctaaacaa

SEQ ID NO: 110791 - DNA, 13 bp, Artificial Sequence
  Oligonucleotide for detection of SNP TSC0027646
tcgtttggagaag

SEQ ID NO: 110792 - DNA, 13 bp, Artificial Sequence
  Oligonucleotide for detection of SNP TSC0027646
cttctccaaacga

SEQ ID NO: 110793 - DNA, 13 bp, Artificial Sequence
  Oligonucleotide for detection of SNP TSC0027646
tcgtttagagaag

SEQ ID NO: 110794 - DNA, 13 bp, Artificial Sequence
  Oligonucleotide for detection of SNP TSC0027646
cttctctaaacga

SEQ ID NO: 110795 - DNA, 13 bp, Artificial Sequence
  Oligonucleotide for detection of SNP TSC0027647
aagagtaattgta

SEQ ID NO: 110796 - DNA, 13 bp, Artificial Sequence
  Oligonucleotide for detection of SNP TSC0027647
tacaattactctt

SEQ ID NO: 110797 - DNA, 13 bp, Artificial Sequence
  Oligonucleotide for detection of SNP TSC0027647
aagagtgattgta

SEQ ID NO: 110798 - DNA, 13 bp, Artificial Sequence
  Oligonucleotide for detection of SNP TSC0027647
tacaatcactctt

SEQ ID NO: 110799 - DNA, 13 bp, Artificial Sequence
  Oligonucleotide for detection of SNP TSC0027647
aagagcgattgta

SEQ ID NO: 110800 - DNA, 13 bp, Artificial Sequence
  Oligonucleotide for detection of SNP TSC0027647
tacaatcgctctt

SEQ ID NO: 110801 - DNA, 13 bp, Artificial Sequence
  Oligonucleotide for detection of SNP TSC0027647
tatagttgttttt

SEQ ID NO: 110802 - DNA, 13 bp, Artificial Sequence
  Oligonucleotide for detection of SNP TSC0027647
aaaaacaactata

SEQ ID NO: 110803 - DNA, 13 bp, Artificial Sequence
  Oligonucleotide for detection of SNP TSC0027647
tatagtcgttttt

SEQ ID NO: 110804 - DNA, 13 bp, Artificial Sequence
  Oligonucleotide for detection of SNP TSC0027647
aaaaacgactata

SEQ ID NO: 110805 - DNA, 13 bp, Artificial Sequence
  Oligonucleotide for detection of SNP TSC0027648
aatgtaagataty

SEQ ID NO: 110806 - DNA, 13 bp, Artificial Sequence
  Oligonucleotide for detection of SNP TSC0027648
ratatcttacatt

SEQ ID NO: 110807 - DNA, 13 bp, Artificial Sequence
  Oligonucleotide for detection of SNP TSC0027648
aatgtaggataty

SEQ ID NO: 110808 - DNA, 13 bp, Artificial Sequence
  Oligonucleotide for detection of SNP TSC0027648
ratatcctacatt

SEQ ID NO: 110809 - DNA, 13 bp, Artificial Sequence
  Oligonucleotide for detection of SNP TSC0027650
agtaaaatatatt

SEQ ID NO: 110810 - DNA, 13 bp, Artificial Sequence
  Oligonucleotide for detection of SNP TSC0027650
aatatattttact

SEQ ID NO: 110811 - DNA, 13 bp, Artificial Sequence
  Oligonucleotide for detection of SNP TSC0027650
agtaaagtatatt

SEQ ID NO: 110812 - DNA, 13 bp, Artificial Sequence
  Oligonucleotide for detection of SNP TSC0027650
aatatactttact

SEQ ID NO: 110813 - DNA, 13 bp, Artificial Sequence
  Oligonucleotide for detection of SNP TSC0027651
gtagttattttta

SEQ ID NO: 110814 - DNA, 13 bp, Artificial Sequence
  Oligonucleotide for detection of SNP TSC0027651
taaaaataactac

SEQ ID NO: 110815 - DNA, 13 bp, Artificial Sequence
  Oligonucleotide for detection of SNP TSC0027651
gtagttgttttta

SEQ ID NO: 110816 - DNA, 13 bp, Artificial Sequence
  Oligonucleotide for detection of SNP TSC0027651
taaaaacaactac

SEQ ID NO: 110817 - DNA, 13 bp, Artificial Sequence
  Oligonucleotide for detection of SNP TSC0027651
gtagtcgttttta

SEQ ID NO: 110818 - DNA, 13 bp, Artificial Sequence
  Oligonucleotide for detection of SNP TSC0027651
taaaaacgactac

SEQ ID NO: 110819 - DNA, 13 bp, Artificial Sequence
  Oligonucleotide for detection of SNP TSC0027651
taaagatgattgy

SEQ ID NO: 110820 - DNA, 13 bp, Artificial Sequence
  Oligonucleotide for detection of SNP TSC0027651
rcaatcatcttta

SEQ ID NO: 110821 - DNA, 13 bp, Artificial Sequence
  Oligonucleotide for detection of SNP TSC0027651
taaagacgattgy

SEQ ID NO: 110822 - DNA, 13 bp, Artificial Sequence
  Oligonucleotide for detection of SNP TSC0027651
rcaatcgtcttta

SEQ ID NO: 110823 - DNA, 13 bp, Artificial Sequence
  Oligonucleotide for detection of SNP TSC0027660
agttaggggttat

SEQ ID NO: 110824 - DNA, 13 bp, Artificial Sequence
  Oligonucleotide for detection of SNP TSC0027660
ataacccctaact

SEQ ID NO: 110825 - DNA, 13 bp, Artificial Sequence
  Oligonucleotide for detection of SNP TSC0027660
agttagtggttat

SEQ ID NO: 110826 - DNA, 13 bp, Artificial Sequence
  Oligonucleotide for detection of SNP TSC0027660
ataaccactaact

SEQ ID NO: 110827 - DNA, 13 bp, Artificial Sequence
  Oligonucleotide for detection of SNP TSC0027660
atgatttttggtt

SEQ ID NO: 110828 - DNA, 13 bp, Artificial Sequence
  Oligonucleotide for detection of SNP TSC0027660
aaccaaaaatcat

SEQ ID NO: 110829 - DNA, 13 bp, Artificial Sequence
  Oligonucleotide for detection of SNP TSC0027660
atgattattggtt

SEQ ID NO: 110830 - DNA, 13 bp, Artificial Sequence
  Oligonucleotide for detection of SNP TSC0027660
aaccaataatcat

SEQ ID NO: 110831 - DNA, 13 bp, Artificial Sequence
  Oligonucleotide for detection of SNP TSC0027662
aaatatatgttga

SEQ ID NO: 110832 - DNA, 13 bp, Artificial Sequence
  Oligonucleotide for detection of SNP TSC0027662
tcaacatatattt

SEQ ID NO: 110833 - DNA, 13 bp, Artificial Sequence
  Oligonucleotide for detection of SNP TSC0027662
aaatatgtgttga

SEQ ID NO: 110834 - DNA, 13 bp, Artificial Sequence
  Oligonucleotide for detection of SNP TSC0027662
tcaacacatattt

SEQ ID NO: 110835 - DNA, 13 bp, Artificial Sequence
  Oligonucleotide for detection of SNP TSC0027664
gttttaatagaty

SEQ ID NO: 110836 - DNA, 13 bp, Artificial Sequence
  Oligonucleotide for detection of SNP TSC0027664
ratctattaaaac

SEQ ID NO: 110837 - DNA, 13 bp, Artificial Sequence
  Oligonucleotide for detection of SNP TSC0027664
gttttattagaty

SEQ ID NO: 110838 - DNA, 13 bp, Artificial Sequence
  Oligonucleotide for detection of SNP TSC0027664
ratctaataaaac

SEQ ID NO: 110839 - DNA, 13 bp, Artificial Sequence
  Oligonucleotide for detection of SNP TSC0027664
ggtttgttaaggy

SEQ ID NO: 110840 - DNA, 13 bp, Artificial Sequence
  Oligonucleotide for detection of SNP TSC0027664
rccttaacaaacc

SEQ ID NO: 110841 - DNA, 13 bp, Artificial Sequence
  Oligonucleotide for detection of SNP TSC0027664
ggtttggtaaggy

SEQ ID NO: 110842 - DNA, 13 bp, Artificial Sequence
  Oligonucleotide for detection of SNP TSC0027664
rccttaccaaacc

SEQ ID NO: 110843 - DNA, 13 bp, Artificial Sequence
  Oligonucleotide for detection of SNP TSC0027665
ttgaggatgggta

SEQ ID NO: 110844 - DNA, 13 bp, Artificial Sequence
  Oligonucleotide for detection of SNP TSC0027665
tacccatcctcaa

SEQ ID NO: 110845 - DNA, 13 bp, Artificial Sequence
  Oligonucleotide for detection of SNP TSC0027665
ttgaggttgggta

SEQ ID NO: 110846 - DNA, 13 bp, Artificial Sequence
  Oligonucleotide for detection of SNP TSC0027665
tacccaacctcaa

SEQ ID NO: 110847 - DNA, 13 bp, Artificial Sequence
  Oligonucleotide for detection of SNP TSC0027665
tatttagttttaa

SEQ ID NO: 110848 - DNA, 13 bp, Artificial Sequence
  Oligonucleotide for detection of SNP TSC0027665
ttaaaactaaata

SEQ ID NO: 110849 - DNA, 13 bp, Artificial Sequence
  Oligonucleotide for detection of SNP TSC0027667
gttgttattgttt

SEQ ID NO: 110850 - DNA, 13 bp, Artificial Sequence
  Oligonucleotide for detection of SNP TSC0027667
aaacaataacaac

SEQ ID NO: 110851 - DNA, 13 bp, Artificial Sequence
  Oligonucleotide for detection of SNP TSC0027667
gttgttgttgttt

SEQ ID NO: 110852 - DNA, 13 bp, Artificial Sequence
  Oligonucleotide for detection of SNP TSC0027667
aaacaacaacaac

SEQ ID NO: 110853 - DNA, 13 bp, Artificial Sequence
  Oligonucleotide for detection of SNP TSC0027668
tttgaagttttay

SEQ ID NO: 110854 - DNA, 13 bp, Artificial Sequence
  Oligonucleotide for detection of SNP TSC0027668
rtaaaacttcaaa

SEQ ID NO: 110855 - DNA, 13 bp, Artificial Sequence
  Oligonucleotide for detection of SNP TSC0027668
tttgaaattttay

SEQ ID NO: 110856 - DNA, 13 bp, Artificial Sequence
  Oligonucleotide for detection of SNP TSC0027668
rtaaaatttcaaa

SEQ ID NO: 110857 - DNA, 13 bp, Artificial Sequence
  Oligonucleotide for detection of SNP TSC0027670
ttttaggggagay

SEQ ID NO: 110858 - DNA, 13 bp, Artificial Sequence
  Oligonucleotide for detection of SNP TSC0027670
rtctcccctaaaa

SEQ ID NO: 110859 - DNA, 13 bp, Artificial Sequence
  Oligonucleotide for detection of SNP TSC0027670
ttttagtggagay

SEQ ID NO: 110860 - DNA, 13 bp, Artificial Sequence
  Oligonucleotide for detection of SNP TSC0027670
rtctccactaaaa

SEQ ID NO: 110861 - DNA, 13 bp, Artificial Sequence
  Oligonucleotide for detection of SNP TSC0027670
gttttttttaaaa

SEQ ID NO: 110862 - DNA, 13 bp, Artificial Sequence
  Oligonucleotide for detection of SNP TSC0027670
ttttaaaaaaaac

SEQ ID NO: 110863 - DNA, 13 bp, Artificial Sequence
  Oligonucleotide for detection of SNP TSC0027672
aagttgagattgt

SEQ ID NO: 110864 - DNA, 13 bp, Artificial Sequence
  Oligonucleotide for detection of SNP TSC0027672
acaatctcaactt

SEQ ID NO: 110865 - DNA, 13 bp, Artificial Sequence
  Oligonucleotide for detection of SNP TSC0027672
aagttgtgattgt

SEQ ID NO: 110866 - DNA, 13 bp, Artificial Sequence
  Oligonucleotide for detection of SNP TSC0027672
acaatcacaactt

SEQ ID NO: 110867 - DNA, 13 bp, Artificial Sequence
  Oligonucleotide for detection of SNP TSC0027672
ataattttagttt

SEQ ID NO: 110868 - DNA, 13 bp, Artificial Sequence
  Oligonucleotide for detection of SNP TSC0027672
aaactaaaattat

SEQ ID NO: 110869 - DNA, 13 bp, Artificial Sequence
  Oligonucleotide for detection of SNP TSC0027672
ataattatagttt

SEQ ID NO: 110870 - DNA, 13 bp, Artificial Sequence
  Oligonucleotide for detection of SNP TSC0027672
aaactataattat

SEQ ID NO: 110871 - DNA, 13 bp, Artificial Sequence
  Oligonucleotide for detection of SNP TSC0027674
tttttagggtttt

SEQ ID NO: 110872 - DNA, 13 bp, Artificial Sequence
  Oligonucleotide for detection of SNP TSC0027674
aaaaccctaaaaa

SEQ ID NO: 110873 - DNA, 13 bp, Artificial Sequence
  Oligonucleotide for detection of SNP TSC0027674
tttttaaggtttt

SEQ ID NO: 110874 - DNA, 13 bp, Artificial Sequence
  Oligonucleotide for detection of SNP TSC0027674
aaaaccttaaaaa

SEQ ID NO: 110875 - DNA, 13 bp, Artificial Sequence
  Oligonucleotide for detection of SNP TSC0027677
tagtgaatgggta

SEQ ID NO: 110876 - DNA, 13 bp, Artificial Sequence
  Oligonucleotide for detection of SNP TSC0027677
tacccattcacta

SEQ ID NO: 110877 - DNA, 13 bp, Artificial Sequence
  Oligonucleotide for detection of SNP TSC0027677
tagtgagtgggta

SEQ ID NO: 110878 - DNA, 13 bp, Artificial Sequence
  Oligonucleotide for detection of SNP TSC0027677
tacccactcacta

SEQ ID NO: 110879 - DNA, 13 bp, Artificial Sequence
  Oligonucleotide for detection of SNP TSC0027678
gtaagggtatggt

SEQ ID NO: 110880 - DNA, 13 bp, Artificial Sequence
  Oligonucleotide for detection of SNP TSC0027678
accatacccttac

SEQ ID NO: 110881 - DNA, 13 bp, Artificial Sequence
  Oligonucleotide for detection of SNP TSC0027678
gtaaggttatggt

SEQ ID NO: 110882 - DNA, 13 bp, Artificial Sequence
  Oligonucleotide for detection of SNP TSC0027678
accataaccttac

SEQ ID NO: 110883 - DNA, 13 bp, Artificial Sequence
  Oligonucleotide for detection of SNP TSC0027678
attatgtttttgy

SEQ ID NO: 110884 - DNA, 13 bp, Artificial Sequence
  Oligonucleotide for detection of SNP TSC0027678
rcaaaaacataat

SEQ ID NO: 110885 - DNA, 13 bp, Artificial Sequence
  Oligonucleotide for detection of SNP TSC0027678
attatgattttgy

SEQ ID NO: 110886 - DNA, 13 bp, Artificial Sequence
  Oligonucleotide for detection of SNP TSC0027678
rcaaaatcataat

SEQ ID NO: 110887 - DNA, 13 bp, Artificial Sequence
  Oligonucleotide for detection of SNP TSC0027679
tttttcgagtttt

SEQ ID NO: 110888 - DNA, 13 bp, Artificial Sequence
  Oligonucleotide for detection of SNP TSC0027679
aaaactcgaaaaa

SEQ ID NO: 110889 - DNA, 13 bp, Artificial Sequence
  Oligonucleotide for detection of SNP TSC0027679
aaaatttgggaaa

SEQ ID NO: 110890 - DNA, 13 bp, Artificial Sequence
  Oligonucleotide for detection of SNP TSC0027679
tttcccaaatttt

SEQ ID NO: 110891 - DNA, 13 bp, Artificial Sequence
  Oligonucleotide for detection of SNP TSC0027679
aaaattagggaaa

SEQ ID NO: 110892 - DNA, 13 bp, Artificial Sequence
  Oligonucleotide for detection of SNP TSC0027679
tttccctaatttt

SEQ ID NO: 110893 - DNA, 13 bp, Artificial Sequence
  Oligonucleotide for detection of SNP TSC0027679
aaaattcgggaaa

SEQ ID NO: 110894 - DNA, 13 bp, Artificial Sequence
  Oligonucleotide for detection of SNP TSC0027679
tttcccgaatttt

SEQ ID NO: 110895 - DNA, 13 bp, Artificial Sequence
  Oligonucleotide for detection of SNP TSC0027680
tgaattggggagg

SEQ ID NO: 110896 - DNA, 13 bp, Artificial Sequence
  Oligonucleotide for detection of SNP TSC0027680
cctccccaattca

SEQ ID NO: 110897 - DNA, 13 bp, Artificial Sequence
  Oligonucleotide for detection of SNP TSC0027680
tgaatcggggagg

SEQ ID NO: 110898 - DNA, 13 bp, Artificial Sequence
  Oligonucleotide for detection of SNP TSC0027680
cctccccgattca

SEQ ID NO: 110899 - DNA, 13 bp, Artificial Sequence
  Oligonucleotide for detection of SNP TSC0027682
ttttagtgttgtt

SEQ ID NO: 110900 - DNA, 13 bp, Artificial Sequence
  Oligonucleotide for detection of SNP TSC0027682
aacaacactaaaa

SEQ ID NO: 110901 - DNA, 13 bp, Artificial Sequence
  Oligonucleotide for detection of SNP TSC0027682
ttttagcgttgtt

SEQ ID NO: 110902 - DNA, 13 bp, Artificial Sequence
  Oligonucleotide for detection of SNP TSC0027682
aacaacgctaaaa

SEQ ID NO: 110903 - DNA, 13 bp, Artificial Sequence
  Oligonucleotide for detection of SNP TSC0027682
agtaatgttggga

SEQ ID NO: 110904 - DNA, 13 bp, Artificial Sequence
  Oligonucleotide for detection of SNP TSC0027682
tcccaacattact

SEQ ID NO: 110905 - DNA, 13 bp, Artificial Sequence
  Oligonucleotide for detection of SNP TSC0027682
agtaatattggga

SEQ ID NO: 110906 - DNA, 13 bp, Artificial Sequence
  Oligonucleotide for detection of SNP TSC0027682
tcccaatattact

SEQ ID NO: 110907 - DNA, 13 bp, Artificial Sequence
  Oligonucleotide for detection of SNP TSC0027682
agtaacgttggga

SEQ ID NO: 110908 - DNA, 13 bp, Artificial Sequence
  Oligonucleotide for detection of SNP TSC0027682
tcccaacgttact

SEQ ID NO: 110909 - DNA, 13 bp, Artificial Sequence
  Oligonucleotide for detection of SNP TSC0027690
gagggtatggtga

SEQ ID NO: 110910 - DNA, 13 bp, Artificial Sequence
  Oligonucleotide for detection of SNP TSC0027690
tcaccataccctc

SEQ ID NO: 110911 - DNA, 13 bp, Artificial Sequence
  Oligonucleotide for detection of SNP TSC0027690
gagggtgtggtga

SEQ ID NO: 110912 - DNA, 13 bp, Artificial Sequence
  Oligonucleotide for detection of SNP TSC0027690
tcaccacaccctc

SEQ ID NO: 110913 - DNA, 13 bp, Artificial Sequence
  Oligonucleotide for detection of SNP TSC0027690
gagggcgtggtga

SEQ ID NO: 110914 - DNA, 13 bp, Artificial Sequence
  Oligonucleotide for detection of SNP TSC0027690
tcaccacgccctc

SEQ ID NO: 110915 - DNA, 13 bp, Artificial Sequence
  Oligonucleotide for detection of SNP TSC0027696
taagatgattaat

SEQ ID NO: 110916 - DNA, 13 bp, Artificial Sequence
  Oligonucleotide for detection of SNP TSC0027696
attaatcatctta

SEQ ID NO: 110917 - DNA, 13 bp, Artificial Sequence
  Oligonucleotide for detection of SNP TSC0027696
taagataattaat

SEQ ID NO: 110918 - DNA, 13 bp, Artificial Sequence
  Oligonucleotide for detection of SNP TSC0027696
attaattatctta

SEQ ID NO: 110919 - DNA, 13 bp, Artificial Sequence
  Oligonucleotide for detection of SNP TSC0027697
taaagggttgaty

SEQ ID NO: 110920 - DNA, 13 bp, Artificial Sequence
  Oligonucleotide for detection of SNP TSC0027697
ratcaacccttta

SEQ ID NO: 110921 - DNA, 13 bp, Artificial Sequence
  Oligonucleotide for detection of SNP TSC0027697
taaaggattgaty

SEQ ID NO: 110922 - DNA, 13 bp, Artificial Sequence
  Oligonucleotide for detection of SNP TSC0027697
ratcaatccttta

SEQ ID NO: 110923 - DNA, 13 bp, Artificial Sequence
  Oligonucleotide for detection of SNP TSC0027697
taaagggtcgaty

SEQ ID NO: 110924 - DNA, 13 bp, Artificial Sequence
  Oligonucleotide for detection of SNP TSC0027697
ratcgacccttta

SEQ ID NO: 110925 - DNA, 13 bp, Artificial Sequence
  Oligonucleotide for detection of SNP TSC0027697
taaaggatcgaty

SEQ ID NO: 110926 - DNA, 13 bp, Artificial Sequence
  Oligonucleotide for detection of SNP TSC0027697
ratcgatccttta

SEQ ID NO: 110927 - DNA, 13 bp, Artificial Sequence
  Oligonucleotide for detection of SNP TSC0027698
tgatatgtgtaag

SEQ ID NO: 110928 - DNA, 13 bp, Artificial Sequence
  Oligonucleotide for detection of SNP TSC0027698
cttacacatatca

SEQ ID NO: 110929 - DNA, 13 bp, Artificial Sequence
  Oligonucleotide for detection of SNP TSC0027698
tgatatttgtaag

SEQ ID NO: 110930 - DNA, 13 bp, Artificial Sequence
  Oligonucleotide for detection of SNP TSC0027698
cttacaaatatca

SEQ ID NO: 110931 - DNA, 13 bp, Artificial Sequence
  Oligonucleotide for detection of SNP TSC0027700
ggaattagttatg

SEQ ID NO: 110932 - DNA, 13 bp, Artificial Sequence
  Oligonucleotide for detection of SNP TSC0027700
cataactaattcc

SEQ ID NO: 110933 - DNA, 13 bp, Artificial Sequence
  Oligonucleotide for detection of SNP TSC0027700
ggaattggttatg

SEQ ID NO: 110934 - DNA, 13 bp, Artificial Sequence
  Oligonucleotide for detection of SNP TSC0027700
cataaccaattcc

SEQ ID NO: 110935 - DNA, 13 bp, Artificial Sequence
  Oligonucleotide for detection of SNP TSC0027700
ggaatcggttatg

SEQ ID NO: 110936 - DNA, 13 bp, Artificial Sequence
  Oligonucleotide for detection of SNP TSC0027700
cataaccgattcc

SEQ ID NO: 110937 - DNA, 13 bp, Artificial Sequence
  Oligonucleotide for detection of SNP TSC0027700
tatggttgattty

SEQ ID NO: 110938 - DNA, 13 bp, Artificial Sequence
  Oligonucleotide for detection of SNP TSC0027700
raaatcaaccata

SEQ ID NO: 110939 - DNA, 13 bp, Artificial Sequence
  Oligonucleotide for detection of SNP TSC0027700
tatggtcgattty

SEQ ID NO: 110940 - DNA, 13 bp, Artificial Sequence
  Oligonucleotide for detection of SNP TSC0027700
raaatcgaccata

SEQ ID NO: 110941 - DNA, 13 bp, Artificial Sequence
  Oligonucleotide for detection of SNP TSC0027701
tgtgtttgtgtta

SEQ ID NO: 110942 - DNA, 13 bp, Artificial Sequence
  Oligonucleotide for detection of SNP TSC0027701
taacacaaacaca

SEQ ID NO: 110943 - DNA, 13 bp, Artificial Sequence
  Oligonucleotide for detection of SNP TSC0027701
tgtgttcgtgtta

SEQ ID NO: 110944 - DNA, 13 bp, Artificial Sequence
  Oligonucleotide for detection of SNP TSC0027701
taacacgaacaca

SEQ ID NO: 110945 - DNA, 13 bp, Artificial Sequence
  Oligonucleotide for detection of SNP TSC0027701
tgtgtttgcgtta

SEQ ID NO: 110946 - DNA, 13 bp, Artificial Sequence
  Oligonucleotide for detection of SNP TSC0027701
taacgcaaacaca

SEQ ID NO: 110947 - DNA, 13 bp, Artificial Sequence
  Oligonucleotide for detection of SNP TSC0027701
tgtgttcgcgtta

SEQ ID NO: 110948 - DNA, 13 bp, Artificial Sequence
  Oligonucleotide for detection of SNP TSC0027701
taacgcgaacaca

SEQ ID NO: 110949 - DNA, 13 bp, Artificial Sequence
  Oligonucleotide for detection of SNP TSC0027701
tggtgtggatata

SEQ ID NO: 110950 - DNA, 13 bp, Artificial Sequence
  Oligonucleotide for detection of SNP TSC0027701
tatatccacacca

SEQ ID NO: 110951 - DNA, 13 bp, Artificial Sequence
  Oligonucleotide for detection of SNP TSC0027701
tggtgtagatata

SEQ ID NO: 110952 - DNA, 13 bp, Artificial Sequence
  Oligonucleotide for detection of SNP TSC0027701
tatatctacacca

SEQ ID NO: 110953 - DNA, 13 bp, Artificial Sequence
  Oligonucleotide for detection of SNP TSC0027701
tggcgtggatata

SEQ ID NO: 110954 - DNA, 13 bp, Artificial Sequence
  Oligonucleotide for detection of SNP TSC0027701
tatatccacgcca

SEQ ID NO: 110955 - DNA, 13 bp, Artificial Sequence
  Oligonucleotide for detection of SNP TSC0027701
tggcgtagatata

SEQ ID NO: 110956 - DNA, 13 bp, Artificial Sequence
  Oligonucleotide for detection of SNP TSC0027701
tatatctacgcca

SEQ ID NO: 110957 - DNA, 13 bp, Artificial Sequence
  Oligonucleotide for detection of SNP TSC0027701
tggtgcggatata

SEQ ID NO: 110958 - DNA, 13 bp, Artificial Sequence
  Oligonucleotide for detection of SNP TSC0027701
tatatccgcacca

SEQ ID NO: 110959 - DNA, 13 bp, Artificial Sequence
  Oligonucleotide for detection of SNP TSC0027701
tggcgcggatata

SEQ ID NO: 110960 - DNA, 13 bp, Artificial Sequence
  Oligonucleotide for detection of SNP TSC0027701
tatatccgcgcca

SEQ ID NO: 110961 - DNA, 13 bp, Artificial Sequence
  Oligonucleotide for detection of SNP TSC0027702
aatgtatgagtgt

SEQ ID NO: 110962 - DNA, 13 bp, Artificial Sequence
  Oligonucleotide for detection of SNP TSC0027702
acactcatacatt

SEQ ID NO: 110963 - DNA, 13 bp, Artificial Sequence
  Oligonucleotide for detection of SNP TSC0027702
aatgtaggagtgt

SEQ ID NO: 110964 - DNA, 13 bp, Artificial Sequence
  Oligonucleotide for detection of SNP TSC0027702
acactcctacatt

SEQ ID NO: 110965 - DNA, 13 bp, Artificial Sequence
  Oligonucleotide for detection of SNP TSC0027702
aatgtacgagtgt

SEQ ID NO: 110966 - DNA, 13 bp, Artificial Sequence
  Oligonucleotide for detection of SNP TSC0027702
acactcgtacatt

SEQ ID NO: 110967 - DNA, 13 bp, Artificial Sequence
  Oligonucleotide for detection of SNP TSC0027702
aatgtaggagcgt

SEQ ID NO: 110968 - DNA, 13 bp, Artificial Sequence
  Oligonucleotide for detection of SNP TSC0027702
acgctcctacatt

SEQ ID NO: 110969 - DNA, 13 bp, Artificial Sequence
  Oligonucleotide for detection of SNP TSC0027702
aatgtatgagcgt

SEQ ID NO: 110970 - DNA, 13 bp, Artificial Sequence
  Oligonucleotide for detection of SNP TSC0027702
acgctcatacatt

SEQ ID NO: 110971 - DNA, 13 bp, Artificial Sequence
  Oligonucleotide for detection of SNP TSC0027702
aatgtacgagcgt

SEQ ID NO: 110972 - DNA, 13 bp, Artificial Sequence
  Oligonucleotide for detection of SNP TSC0027702
acgctcgtacatt

SEQ ID NO: 110973 - DNA, 13 bp, Artificial Sequence
  Oligonucleotide for detection of SNP TSC0027702
atgtttgtgtatt

SEQ ID NO: 110974 - DNA, 13 bp, Artificial Sequence
  Oligonucleotide for detection of SNP TSC0027702
aatacacaaacat

SEQ ID NO: 110975 - DNA, 13 bp, Artificial Sequence
  Oligonucleotide for detection of SNP TSC0027702
atgtttttgtatt

SEQ ID NO: 110976 - DNA, 13 bp, Artificial Sequence
  Oligonucleotide for detection of SNP TSC0027702
aatacaaaaacat

SEQ ID NO: 110977 - DNA, 13 bp, Artificial Sequence
  Oligonucleotide for detection of SNP TSC0027702
acgtttgtgtatt

SEQ ID NO: 110978 - DNA, 13 bp, Artificial Sequence
  Oligonucleotide for detection of SNP TSC0027702
aatacacaaacgt

SEQ ID NO: 110979 - DNA, 13 bp, Artificial Sequence
  Oligonucleotide for detection of SNP TSC0027702
acgtttttgtatt

SEQ ID NO: 110980 - DNA, 13 bp, Artificial Sequence
  Oligonucleotide for detection of SNP TSC0027702
aatacaaaaacgt

SEQ ID NO: 110981 - DNA, 13 bp, Artificial Sequence
  Oligonucleotide for detection of SNP TSC0027702
atgttcgtgtatt

SEQ ID NO: 110982 - DNA, 13 bp, Artificial Sequence
  Oligonucleotide for detection of SNP TSC0027702
aatacacgaacat

SEQ ID NO: 110983 - DNA, 13 bp, Artificial Sequence
  Oligonucleotide for detection of SNP TSC0027702
acgttcgtgtatt

SEQ ID NO: 110984 - DNA, 13 bp, Artificial Sequence
  Oligonucleotide for detection of SNP TSC0027702
aatacacgaacgt

SEQ ID NO: 110985 - DNA, 13 bp, Artificial Sequence
  Oligonucleotide for detection of SNP TSC0027703
ttattgtgtttta

SEQ ID NO: 110986 - DNA, 13 bp, Artificial Sequence
  Oligonucleotide for detection of SNP TSC0027703
taaaacacaataa

SEQ ID NO: 110987 - DNA, 13 bp, Artificial Sequence
  Oligonucleotide for detection of SNP TSC0027703
ttattgcgtttta

SEQ ID NO: 110988 - DNA, 13 bp, Artificial Sequence
  Oligonucleotide for detection of SNP TSC0027703
taaaacgcaataa

SEQ ID NO: 110989 - DNA, 13 bp, Artificial Sequence
  Oligonucleotide for detection of SNP TSC0027703
taaaatgtagtgg

SEQ ID NO: 110990 - DNA, 13 bp, Artificial Sequence
  Oligonucleotide for detection of SNP TSC0027703
ccactacatttta

SEQ ID NO: 110991 - DNA, 13 bp, Artificial Sequence
  Oligonucleotide for detection of SNP TSC0027703
taaaatatagtgg

SEQ ID NO: 110992 - DNA, 13 bp, Artificial Sequence
  Oligonucleotide for detection of SNP TSC0027703
ccactatatttta

SEQ ID NO: 110993 - DNA, 13 bp, Artificial Sequence
  Oligonucleotide for detection of SNP TSC0027703
taaaacgtagtgg

SEQ ID NO: 110994 - DNA, 13 bp, Artificial Sequence
  Oligonucleotide for detection of SNP TSC0027703
ccactacgtttta

SEQ ID NO: 110995 - DNA, 13 bp, Artificial Sequence
  Oligonucleotide for detection of SNP TSC0027704
aagtatgggaaaa

SEQ ID NO: 110996 - DNA, 13 bp, Artificial Sequence
  Oligonucleotide for detection of SNP TSC0027704
ttttcccatactt

SEQ ID NO: 110997 - DNA, 13 bp, Artificial Sequence
  Oligonucleotide for detection of SNP TSC0027704
aagtataggaaaa

SEQ ID NO: 110998 - DNA, 13 bp, Artificial Sequence
  Oligonucleotide for detection of SNP TSC0027704
ttttcctatactt

SEQ ID NO: 110999 - DNA, 13 bp, Artificial Sequence
  Oligonucleotide for detection of SNP TSC0027705
gatttaattttgg

SEQ ID NO: 111000 - DNA, 13 bp, Artificial Sequence
  Oligonucleotide for detection of SNP TSC0027705
ccaaaattaaatc

SEQ ID NO: 111001 - DNA, 13 bp, Artificial Sequence
  Oligonucleotide for detection of SNP TSC0027705
gatttagttttgg

SEQ ID NO: 111002 - DNA, 13 bp, Artificial Sequence
  Oligonucleotide for detection of SNP TSC0027705
ccaaaactaaatc

SEQ ID NO: 111003 - DNA, 13 bp, Artificial Sequence
  Oligonucleotide for detection of SNP TSC0027705
gatttaatttcgg

SEQ ID NO: 111004 - DNA, 13 bp, Artificial Sequence
  Oligonucleotide for detection of SNP TSC0027705
ccgaaattaaatc

SEQ ID NO: 111005 - DNA, 13 bp, Artificial Sequence
  Oligonucleotide for detection of SNP TSC0027705
gatttagtttcgg

SEQ ID NO: 111006 - DNA, 13 bp, Artificial Sequence
  Oligonucleotide for detection of SNP TSC0027705
ccgaaactaaatc

SEQ ID NO: 111007 - DNA, 13 bp, Artificial Sequence
  Oligonucleotide for detection of SNP TSC0027710
aataatatagata

SEQ ID NO: 111008 - DNA, 13 bp, Artificial Sequence
  Oligonucleotide for detection of SNP TSC0027710
tatctatattatt

SEQ ID NO: 111009 - DNA, 13 bp, Artificial Sequence
  Oligonucleotide for detection of SNP TSC0027710
aataatgtagata

SEQ ID NO: 111010 - DNA, 13 bp, Artificial Sequence
  Oligonucleotide for detection of SNP TSC0027710
tatctacattatt

SEQ ID NO: 111011 - DNA, 13 bp, Artificial Sequence
  Oligonucleotide for detection of SNP TSC0027710
aataacgtagata

SEQ ID NO: 111012 - DNA, 13 bp, Artificial Sequence
  Oligonucleotide for detection of SNP TSC0027710
tatctacgttatt

SEQ ID NO: 111013 - DNA, 13 bp, Artificial Sequence
  Oligonucleotide for detection of SNP TSC0027710
tatttatgttatt

SEQ ID NO: 111014 - DNA, 13 bp, Artificial Sequence
  Oligonucleotide for detection of SNP TSC0027710
aataacataaata

SEQ ID NO: 111015 - DNA, 13 bp, Artificial Sequence
  Oligonucleotide for detection of SNP TSC0027710
tatttacgttatt

SEQ ID NO: 111016 - DNA, 13 bp, Artificial Sequence
  Oligonucleotide for detection of SNP TSC0027710
aataacgtaaata

SEQ ID NO: 111017 - DNA, 13 bp, Artificial Sequence
  Oligonucleotide for detection of SNP TSC0027711
gattttatgtgaa

SEQ ID NO: 111018 - DNA, 13 bp, Artificial Sequence
  Oligonucleotide for detection of SNP TSC0027711
ttcacataaaatc

SEQ ID NO: 111019 - DNA, 13 bp, Artificial Sequence
  Oligonucleotide for detection of SNP TSC0027711
gattttgtgtgaa

SEQ ID NO: 111020 - DNA, 13 bp, Artificial Sequence
  Oligonucleotide for detection of SNP TSC0027711
ttcacacaaaatc

SEQ ID NO: 111021 - DNA, 13 bp, Artificial Sequence
  Oligonucleotide for detection of SNP TSC0027712
gttgttaggagga

SEQ ID NO: 111022 - DNA, 13 bp, Artificial Sequence
  Oligonucleotide for detection of SNP TSC0027712
tcctcctaacaac

SEQ ID NO: 111023 - DNA, 13 bp, Artificial Sequence
  Oligonucleotide for detection of SNP TSC0027712
gttgttgggagga

SEQ ID NO: 111024 - DNA, 13 bp, Artificial Sequence
  Oligonucleotide for detection of SNP TSC0027712
tcctcccaacaac

SEQ ID NO: 111025 - DNA, 13 bp, Artificial Sequence
  Oligonucleotide for detection of SNP TSC0027723
agaaaaatttaaa

SEQ ID NO: 111026 - DNA, 13 bp, Artificial Sequence
  Oligonucleotide for detection of SNP TSC0027723
tttaaatttttct

SEQ ID NO: 111027 - DNA, 13 bp, Artificial Sequence
  Oligonucleotide for detection of SNP TSC0027723
agaaaattttaaa

SEQ ID NO: 111028 - DNA, 13 bp, Artificial Sequence
  Oligonucleotide for detection of SNP TSC0027723
tttaaaattttct

SEQ ID NO: 111029 - DNA, 13 bp, Artificial Sequence
  Oligonucleotide for detection of SNP TSC0027724
taggatggtattg

SEQ ID NO: 111030 - DNA, 13 bp, Artificial Sequence
  Oligonucleotide for detection of SNP TSC0027724
caataccatccta

SEQ ID NO: 111031 - DNA, 13 bp, Artificial Sequence
  Oligonucleotide for detection of SNP TSC0027724
taggatagtattg

SEQ ID NO: 111032 - DNA, 13 bp, Artificial Sequence
  Oligonucleotide for detection of SNP TSC0027724
caatactatccta

SEQ ID NO: 111033 - DNA, 13 bp, Artificial Sequence
  Oligonucleotide for detection of SNP TSC0027727
cggttttgttttg

SEQ ID NO: 111034 - DNA, 13 bp, Artificial Sequence
  Oligonucleotide for detection of SNP TSC0027727
caaaacaaaaccg

SEQ ID NO: 111035 - DNA, 13 bp, Artificial Sequence
  Oligonucleotide for detection of SNP TSC0027727
tggttttgtttcg

SEQ ID NO: 111036 - DNA, 13 bp, Artificial Sequence
  Oligonucleotide for detection of SNP TSC0027727
cgaaacaaaacca

SEQ ID NO: 111037 - DNA, 13 bp, Artificial Sequence
  Oligonucleotide for detection of SNP TSC0027727
cggttttgtttcg

SEQ ID NO: 111038 - DNA, 13 bp, Artificial Sequence
  Oligonucleotide for detection of SNP TSC0027727
cgaaacaaaaccg

SEQ ID NO: 111039 - DNA, 13 bp, Artificial Sequence
  Oligonucleotide for detection of SNP TSC0027727
cggtttcgttttg

SEQ ID NO: 111040 - DNA, 13 bp, Artificial Sequence
  Oligonucleotide for detection of SNP TSC0027727
caaaacgaaaccg

SEQ ID NO: 111041 - DNA, 13 bp, Artificial Sequence
  Oligonucleotide for detection of SNP TSC0027727
tggtttcgtttcg

SEQ ID NO: 111042 - DNA, 13 bp, Artificial Sequence
  Oligonucleotide for detection of SNP TSC0027727
cgaaacgaaacca

SEQ ID NO: 111043 - DNA, 13 bp, Artificial Sequence
  Oligonucleotide for detection of SNP TSC0027727
cggtttcgtttcg

SEQ ID NO: 111044 - DNA, 13 bp, Artificial Sequence
  Oligonucleotide for detection of SNP TSC0027727
cgaaacgaaaccg

SEQ ID NO: 111045 - DNA, 13 bp, Artificial Sequence
  Oligonucleotide for detection of SNP TSC0027727
tggggtgagattg

SEQ ID NO: 111046 - DNA, 13 bp, Artificial Sequence
  Oligonucleotide for detection of SNP TSC0027727
caatctcacccca

SEQ ID NO: 111047 - DNA, 13 bp, Artificial Sequence
  Oligonucleotide for detection of SNP TSC0027727
tggggtaagattg

SEQ ID NO: 111048 - DNA, 13 bp, Artificial Sequence
  Oligonucleotide for detection of SNP TSC0027727
caatcttacccca

SEQ ID NO: 111049 - DNA, 13 bp, Artificial Sequence
  Oligonucleotide for detection of SNP TSC0027727
cggggtgagattg

SEQ ID NO: 111050 - DNA, 13 bp, Artificial Sequence
  Oligonucleotide for detection of SNP TSC0027727
caatctcaccccg

SEQ ID NO: 111051 - DNA, 13 bp, Artificial Sequence
  Oligonucleotide for detection of SNP TSC0027727
cggggtaagattg

SEQ ID NO: 111052 - DNA, 13 bp, Artificial Sequence
  Oligonucleotide for detection of SNP TSC0027727
caatcttaccccg

SEQ ID NO: 111053 - DNA, 13 bp, Artificial Sequence
  Oligonucleotide for detection of SNP TSC0027727
tggggcgagattg

SEQ ID NO: 111054 - DNA, 13 bp, Artificial Sequence
  Oligonucleotide for detection of SNP TSC0027727
caatctcgcccca

SEQ ID NO: 111055 - DNA, 13 bp, Artificial Sequence
  Oligonucleotide for detection of SNP TSC0027727
tggggtaagatcg

SEQ ID NO: 111056 - DNA, 13 bp, Artificial Sequence
  Oligonucleotide for detection of SNP TSC0027727
cgatcttacccca

SEQ ID NO: 111057 - DNA, 13 bp, Artificial Sequence
  Oligonucleotide for detection of SNP TSC0027727
tggggtgagatcg

SEQ ID NO: 111058 - DNA, 13 bp, Artificial Sequence
  Oligonucleotide for detection of SNP TSC0027727
cgatctcacccca

SEQ ID NO: 111059 - DNA, 13 bp, Artificial Sequence
  Oligonucleotide for detection of SNP TSC0027727
cggggtaagatcg

SEQ ID NO: 111060 - DNA, 13 bp, Artificial Sequence
  Oligonucleotide for detection of SNP TSC0027727
cgatcttaccccg

SEQ ID NO: 111061 - DNA, 13 bp, Artificial Sequence
  Oligonucleotide for detection of SNP TSC0027727
cggggcgagattg

SEQ ID NO: 111062 - DNA, 13 bp, Artificial Sequence
  Oligonucleotide for detection of SNP TSC0027727
caatctcgccccg

SEQ ID NO: 111063 - DNA, 13 bp, Artificial Sequence
  Oligonucleotide for detection of SNP TSC0027727
cggggtgagatcg

SEQ ID NO: 111064 - DNA, 13 bp, Artificial Sequence
  Oligonucleotide for detection of SNP TSC0027727
cgatctcaccccg

SEQ ID NO: 111065 - DNA, 13 bp, Artificial Sequence
  Oligonucleotide for detection of SNP TSC0027727
tggggcgagatcg

SEQ ID NO: 111066 - DNA, 13 bp, Artificial Sequence
  Oligonucleotide for detection of SNP TSC0027727
cgatctcgcccca

SEQ ID NO: 111067 - DNA, 13 bp, Artificial Sequence
  Oligonucleotide for detection of SNP TSC0027727
cggggcgagatcg

SEQ ID NO: 111068 - DNA, 13 bp, Artificial Sequence
  Oligonucleotide for detection of SNP TSC0027727
cgatctcgccccg

SEQ ID NO: 111069 - DNA, 13 bp, Artificial Sequence
  Oligonucleotide for detection of SNP TSC0027729
ggtttaaagtaag

SEQ ID NO: 111070 - DNA, 13 bp, Artificial Sequence
  Oligonucleotide for detection of SNP TSC0027729
cttactttaaacc

SEQ ID NO: 111071 - DNA, 13 bp, Artificial Sequence
  Oligonucleotide for detection of SNP TSC0027729
ggtttagagtaag

SEQ ID NO: 111072 - DNA, 13 bp, Artificial Sequence
  Oligonucleotide for detection of SNP TSC0027729
cttactctaaacc

SEQ ID NO: 111073 - DNA, 13 bp, Artificial Sequence
  Oligonucleotide for detection of SNP TSC0027730
ttttggattttag

SEQ ID NO: 111074 - DNA, 13 bp, Artificial Sequence
  Oligonucleotide for detection of SNP TSC0027730
ctaaaatccaaaa

SEQ ID NO: 111075 - DNA, 13 bp, Artificial Sequence
  Oligonucleotide for detection of SNP TSC0027730
ttttgggttttag

SEQ ID NO: 111076 - DNA, 13 bp, Artificial Sequence
  Oligonucleotide for detection of SNP TSC0027730
ctaaaacccaaaa

SEQ ID NO: 111077 - DNA, 13 bp, Artificial Sequence
  Oligonucleotide for detection of SNP TSC0027731
tttgagttagggt

SEQ ID NO: 111078 - DNA, 13 bp, Artificial Sequence
  Oligonucleotide for detection of SNP TSC0027731
accctaactcaaa

SEQ ID NO: 111079 - DNA, 13 bp, Artificial Sequence
  Oligonucleotide for detection of SNP TSC0027731
attttgttttaag

SEQ ID NO: 111080 - DNA, 13 bp, Artificial Sequence
  Oligonucleotide for detection of SNP TSC0027731
cttaaaacaaaat

SEQ ID NO: 111081 - DNA, 13 bp, Artificial Sequence
  Oligonucleotide for detection of SNP TSC0027731
attttgatttaag

SEQ ID NO: 111082 - DNA, 13 bp, Artificial Sequence
  Oligonucleotide for detection of SNP TSC0027731
cttaaatcaaaat

SEQ ID NO: 111083 - DNA, 13 bp, Artificial Sequence
  Oligonucleotide for detection of SNP TSC0027734
agatttataatta

SEQ ID NO: 111084 - DNA, 13 bp, Artificial Sequence
  Oligonucleotide for detection of SNP TSC0027734
taattataaatct

SEQ ID NO: 111085 - DNA, 13 bp, Artificial Sequence
  Oligonucleotide for detection of SNP TSC0027734
agatttgtaatta

SEQ ID NO: 111086 - DNA, 13 bp, Artificial Sequence
  Oligonucleotide for detection of SNP TSC0027734
taattacaaatct

SEQ ID NO: 111087 - DNA, 13 bp, Artificial Sequence
  Oligonucleotide for detection of SNP TSC0027734
agattcgtaatta

SEQ ID NO: 111088 - DNA, 13 bp, Artificial Sequence
  Oligonucleotide for detection of SNP TSC0027734
taattacgaatct

SEQ ID NO: 111089 - DNA, 13 bp, Artificial Sequence
  Oligonucleotide for detection of SNP TSC0027734
taattatgagttt

SEQ ID NO: 111090 - DNA, 13 bp, Artificial Sequence
  Oligonucleotide for detection of SNP TSC0027734
aaactcataatta

SEQ ID NO: 111091 - DNA, 13 bp, Artificial Sequence
  Oligonucleotide for detection of SNP TSC0027734
taattacgagttt

SEQ ID NO: 111092 - DNA, 13 bp, Artificial Sequence
  Oligonucleotide for detection of SNP TSC0027734
aaactcgtaatta

SEQ ID NO: 111093 - DNA, 13 bp, Artificial Sequence
  Oligonucleotide for detection of SNP TSC0027735
aggtattgtggtt

SEQ ID NO: 111094 - DNA, 13 bp, Artificial Sequence
  Oligonucleotide for detection of SNP TSC0027735
aaccacaatacct

SEQ ID NO: 111095 - DNA, 13 bp, Artificial Sequence
  Oligonucleotide for detection of SNP TSC0027740
ggtgatttataag

SEQ ID NO: 111096 - DNA, 13 bp, Artificial Sequence
  Oligonucleotide for detection of SNP TSC0027740
cttataaatcacc

SEQ ID NO: 111097 - DNA, 13 bp, Artificial Sequence
  Oligonucleotide for detection of SNP TSC0027740
ggtgatgtataag

SEQ ID NO: 111098 - DNA, 13 bp, Artificial Sequence
  Oligonucleotide for detection of SNP TSC0027740
cttatacatcacc

SEQ ID NO: 111099 - DNA, 13 bp, Artificial Sequence
  Oligonucleotide for detection of SNP TSC0027740
ggtgacgtataag

SEQ ID NO: 111100 - DNA, 13 bp, Artificial Sequence
  Oligonucleotide for detection of SNP TSC0027740
cttatacgtcacc

SEQ ID NO: 111101 - DNA, 13 bp, Artificial Sequence
  Oligonucleotide for detection of SNP TSC0027740
tttgtgggttaty

SEQ ID NO: 111102 - DNA, 13 bp, Artificial Sequence
  Oligonucleotide for detection of SNP TSC0027740
rataacccacaaa

SEQ ID NO: 111103 - DNA, 13 bp, Artificial Sequence
  Oligonucleotide for detection of SNP TSC0027740
tttgtgtgttaty

SEQ ID NO: 111104 - DNA, 13 bp, Artificial Sequence
  Oligonucleotide for detection of SNP TSC0027740
rataacacacaaa

SEQ ID NO: 111105 - DNA, 13 bp, Artificial Sequence
  Oligonucleotide for detection of SNP TSC0027740
tttgtgcgttaty

SEQ ID NO: 111106 - DNA, 13 bp, Artificial Sequence
  Oligonucleotide for detection of SNP TSC0027740
rataacgcacaaa

SEQ ID NO: 111107 - DNA, 13 bp, Artificial Sequence
  Oligonucleotide for detection of SNP TSC0027741
tttattatgtgag

SEQ ID NO: 111108 - DNA, 13 bp, Artificial Sequence
  Oligonucleotide for detection of SNP TSC0027741
ctcacataataaa

SEQ ID NO: 111109 - DNA, 13 bp, Artificial Sequence
  Oligonucleotide for detection of SNP TSC0027741
tttattgtgtgag

SEQ ID NO: 111110 - DNA, 13 bp, Artificial Sequence
  Oligonucleotide for detection of SNP TSC0027741
ctcacacaataaa

SEQ ID NO: 111111 - DNA, 13 bp, Artificial Sequence
  Oligonucleotide for detection of SNP TSC0027741
tttattatgcgag

SEQ ID NO: 111112 - DNA, 13 bp, Artificial Sequence
  Oligonucleotide for detection of SNP TSC0027741
ctcgcataataaa

SEQ ID NO: 111113 - DNA, 13 bp, Artificial Sequence
  Oligonucleotide for detection of SNP TSC0027741
tttatcgtgtgag

SEQ ID NO: 111114 - DNA, 13 bp, Artificial Sequence
  Oligonucleotide for detection of SNP TSC0027741
ctcacacgataaa

SEQ ID NO: 111115 - DNA, 13 bp, Artificial Sequence
  Oligonucleotide for detection of SNP TSC0027741
tttattgtgcgag

SEQ ID NO: 111116 - DNA, 13 bp, Artificial Sequence
  Oligonucleotide for detection of SNP TSC0027741
ctcgcacaataaa

SEQ ID NO: 111117 - DNA, 13 bp, Artificial Sequence
  Oligonucleotide for detection of SNP TSC0027741
tttatcgtgcgag

SEQ ID NO: 111118 - DNA, 13 bp, Artificial Sequence
  Oligonucleotide for detection of SNP TSC0027741
ctcgcacgataaa

SEQ ID NO: 111119 - DNA, 13 bp, Artificial Sequence
  Oligonucleotide for detection of SNP TSC0027741
ttcgtatggtaga

SEQ ID NO: 111120 - DNA, 13 bp, Artificial Sequence
  Oligonucleotide for detection of SNP TSC0027741
tctaccatacgaa

SEQ ID NO: 111121 - DNA, 13 bp, Artificial Sequence
  Oligonucleotide for detection of SNP TSC0027741
ttcgtacggtaga

SEQ ID NO: 111122 - DNA, 13 bp, Artificial Sequence
  Oligonucleotide for detection of SNP TSC0027741
tctaccgtacgaa

SEQ ID NO: 111123 - DNA, 13 bp, Artificial Sequence
  Oligonucleotide for detection of SNP TSC0027742
ttagttaatttat

SEQ ID NO: 111124 - DNA, 13 bp, Artificial Sequence
  Oligonucleotide for detection of SNP TSC0027742
ataaattaactaa

SEQ ID NO: 111125 - DNA, 13 bp, Artificial Sequence
  Oligonucleotide for detection of SNP TSC0027742
ttagtttatttat

SEQ ID NO: 111126 - DNA, 13 bp, Artificial Sequence
  Oligonucleotide for detection of SNP TSC0027742
ataaataaactaa

SEQ ID NO: 111127 - DNA, 13 bp, Artificial Sequence
  Oligonucleotide for detection of SNP TSC0027742
ataagttagttga

SEQ ID NO: 111128 - DNA, 13 bp, Artificial Sequence
  Oligonucleotide for detection of SNP TSC0027742
tcaactaacttat

SEQ ID NO: 111129 - DNA, 13 bp, Artificial Sequence
  Oligonucleotide for detection of SNP TSC0027742
ataagtgagttga

SEQ ID NO: 111130 - DNA, 13 bp, Artificial Sequence
  Oligonucleotide for detection of SNP TSC0027742
tcaactcacttat

SEQ ID NO: 111131 - DNA, 13 bp, Artificial Sequence
  Oligonucleotide for detection of SNP TSC0027743
atgaggatttgtg

SEQ ID NO: 111132 - DNA, 13 bp, Artificial Sequence
  Oligonucleotide for detection of SNP TSC0027743
cacaaatcctcat

SEQ ID NO: 111133 - DNA, 13 bp, Artificial Sequence
  Oligonucleotide for detection of SNP TSC0027743
atgagggtttgtg

SEQ ID NO: 111134 - DNA, 13 bp, Artificial Sequence
  Oligonucleotide for detection of SNP TSC0027743
cacaaaccctcat

SEQ ID NO: 111135 - DNA, 13 bp, Artificial Sequence
  Oligonucleotide for detection of SNP TSC0027750
agatggggtttgy

SEQ ID NO: 111136 - DNA, 13 bp, Artificial Sequence
  Oligonucleotide for detection of SNP TSC0027750
rcaaaccccatct

SEQ ID NO: 111137 - DNA, 13 bp, Artificial Sequence
  Oligonucleotide for detection of SNP TSC0027750
agatggtgtttgy

SEQ ID NO: 111138 - DNA, 13 bp, Artificial Sequence
  Oligonucleotide for detection of SNP TSC0027750
rcaaacaccatct

SEQ ID NO: 111139 - DNA, 13 bp, Artificial Sequence
  Oligonucleotide for detection of SNP TSC0027750
gtaggttttattt

SEQ ID NO: 111140 - DNA, 13 bp, Artificial Sequence
  Oligonucleotide for detection of SNP TSC0027750
aaataaaacctac

SEQ ID NO: 111141 - DNA, 13 bp, Artificial Sequence
  Oligonucleotide for detection of SNP TSC0027750
gtaggtattattt

SEQ ID NO: 111142 - DNA, 13 bp, Artificial Sequence
  Oligonucleotide for detection of SNP TSC0027750
aaataatacctac

SEQ ID NO: 111143 - DNA, 13 bp, Artificial Sequence
  Oligonucleotide for detection of SNP TSC0027753
tttgggatatgag

SEQ ID NO: 111144 - DNA, 13 bp, Artificial Sequence
  Oligonucleotide for detection of SNP TSC0027753
ctcatatcccaaa

SEQ ID NO: 111145 - DNA, 13 bp, Artificial Sequence
  Oligonucleotide for detection of SNP TSC0027753
tttggggtatgag

SEQ ID NO: 111146 - DNA, 13 bp, Artificial Sequence
  Oligonucleotide for detection of SNP TSC0027753
ctcataccccaaa

SEQ ID NO: 111147 - DNA, 13 bp, Artificial Sequence
  Oligonucleotide for detection of SNP TSC0027754
ttttggttttgta

SEQ ID NO: 111148 - DNA, 13 bp, Artificial Sequence
  Oligonucleotide for detection of SNP TSC0027754
tacaaaaccaaaa

SEQ ID NO: 111149 - DNA, 13 bp, Artificial Sequence
  Oligonucleotide for detection of SNP TSC0027754
tgtagagttaggg

SEQ ID NO: 111150 - DNA, 13 bp, Artificial Sequence
  Oligonucleotide for detection of SNP TSC0027754
ccctaactctaca

SEQ ID NO: 111151 - DNA, 13 bp, Artificial Sequence
  Oligonucleotide for detection of SNP TSC0027754
tgtagatttaggg

SEQ ID NO: 111152 - DNA, 13 bp, Artificial Sequence
  Oligonucleotide for detection of SNP TSC0027754
ccctaaatctaca

SEQ ID NO: 111153 - DNA, 13 bp, Artificial Sequence
  Oligonucleotide for detection of SNP TSC0027760
tgtgtgtgcgtat

SEQ ID NO: 111154 - DNA, 13 bp, Artificial Sequence
  Oligonucleotide for detection of SNP TSC0027760
atacgcacacaca

SEQ ID NO: 111155 - DNA, 13 bp, Artificial Sequence
  Oligonucleotide for detection of SNP TSC0027760
tgtgtgcgcgtat

SEQ ID NO: 111156 - DNA, 13 bp, Artificial Sequence
  Oligonucleotide for detection of SNP TSC0027760
atacgcgcacaca

SEQ ID NO: 111157 - DNA, 13 bp, Artificial Sequence
  Oligonucleotide for detection of SNP TSC0027760
atgtgtgtatata

SEQ ID NO: 111158 - DNA, 13 bp, Artificial Sequence
  Oligonucleotide for detection of SNP TSC0027760
tatatacacacat

SEQ ID NO: 111159 - DNA, 13 bp, Artificial Sequence
  Oligonucleotide for detection of SNP TSC0027760
atgtgtatatata

SEQ ID NO: 111160 - DNA, 13 bp, Artificial Sequence
  Oligonucleotide for detection of SNP TSC0027760
tatatatacacat

SEQ ID NO: 111161 - DNA, 13 bp, Artificial Sequence
  Oligonucleotide for detection of SNP TSC0027760
atgcgtgtatata

SEQ ID NO: 111162 - DNA, 13 bp, Artificial Sequence
  Oligonucleotide for detection of SNP TSC0027760
tatatacacgcat

SEQ ID NO: 111163 - DNA, 13 bp, Artificial Sequence
  Oligonucleotide for detection of SNP TSC0027760
atgcgtatatata

SEQ ID NO: 111164 - DNA, 13 bp, Artificial Sequence
  Oligonucleotide for detection of SNP TSC0027760
tatatatacgcat

SEQ ID NO: 111165 - DNA, 13 bp, Artificial Sequence
  Oligonucleotide for detection of SNP TSC0027760
atgtgcgtatata

SEQ ID NO: 111166 - DNA, 13 bp, Artificial Sequence
  Oligonucleotide for detection of SNP TSC0027760
tatatacgcacat

SEQ ID NO: 111167 - DNA, 13 bp, Artificial Sequence
  Oligonucleotide for detection of SNP TSC0027760
atgcgcgtatata

SEQ ID NO: 111168 - DNA, 13 bp, Artificial Sequence
  Oligonucleotide for detection of SNP TSC0027760
tatatacgcgcat

SEQ ID NO: 111169 - DNA, 13 bp, Artificial Sequence
  Oligonucleotide for detection of SNP TSC0027763
ggtggtatttgat

SEQ ID NO: 111170 - DNA, 13 bp, Artificial Sequence
  Oligonucleotide for detection of SNP TSC0027763
atcaaataccacc

SEQ ID NO: 111171 - DNA, 13 bp, Artificial Sequence
  Oligonucleotide for detection of SNP TSC0027763
ggtggtgtttgat

SEQ ID NO: 111172 - DNA, 13 bp, Artificial Sequence
  Oligonucleotide for detection of SNP TSC0027763
atcaaacaccacc

SEQ ID NO: 111173 - DNA, 13 bp, Artificial Sequence
  Oligonucleotide for detection of SNP TSC0027763
ggtggcgtttgat

SEQ ID NO: 111174 - DNA, 13 bp, Artificial Sequence
  Oligonucleotide for detection of SNP TSC0027763
atcaaacgccacc

SEQ ID NO: 111175 - DNA, 13 bp, Artificial Sequence
  Oligonucleotide for detection of SNP TSC0027763
attaaatgttaty

SEQ ID NO: 111176 - DNA, 13 bp, Artificial Sequence
  Oligonucleotide for detection of SNP TSC0027763
rataacatttaat

SEQ ID NO: 111177 - DNA, 13 bp, Artificial Sequence
  Oligonucleotide for detection of SNP TSC0027763
attaaacgttaty

SEQ ID NO: 111178 - DNA, 13 bp, Artificial Sequence
  Oligonucleotide for detection of SNP TSC0027763
rataacgtttaat

SEQ ID NO: 111179 - DNA, 13 bp, Artificial Sequence
  Oligonucleotide for detection of SNP TSC0027765
ttatttatataaa

SEQ ID NO: 111180 - DNA, 13 bp, Artificial Sequence
  Oligonucleotide for detection of SNP TSC0027765
tttatataaataa

SEQ ID NO: 111181 - DNA, 13 bp, Artificial Sequence
  Oligonucleotide for detection of SNP TSC0027765
tttgtatagatgg

SEQ ID NO: 111182 - DNA, 13 bp, Artificial Sequence
  Oligonucleotide for detection of SNP TSC0027765
ccatctatacaaa

SEQ ID NO: 111183 - DNA, 13 bp, Artificial Sequence
  Oligonucleotide for detection of SNP TSC0027765
tttgtagagatgg

SEQ ID NO: 111184 - DNA, 13 bp, Artificial Sequence
  Oligonucleotide for detection of SNP TSC0027765
ccatctctacaaa

SEQ ID NO: 111185 - DNA, 13 bp, Artificial Sequence
  Oligonucleotide for detection of SNP TSC0027768
tattaagaaaatt

SEQ ID NO: 111186 - DNA, 13 bp, Artificial Sequence
  Oligonucleotide for detection of SNP TSC0027768
aattttcttaata

SEQ ID NO: 111187 - DNA, 13 bp, Artificial Sequence
  Oligonucleotide for detection of SNP TSC0027768
tattaataaaatt

SEQ ID NO: 111188 - DNA, 13 bp, Artificial Sequence
  Oligonucleotide for detection of SNP TSC0027768
aattttattaata

SEQ ID NO: 111189 - DNA, 13 bp, Artificial Sequence
  Oligonucleotide for detection of SNP TSC0027768
aatttttttgata

SEQ ID NO: 111190 - DNA, 13 bp, Artificial Sequence
  Oligonucleotide for detection of SNP TSC0027768
tatcaaaaaaatt

SEQ ID NO: 111191 - DNA, 13 bp, Artificial Sequence
  Oligonucleotide for detection of SNP TSC0027768
aattttattgata

SEQ ID NO: 111192 - DNA, 13 bp, Artificial Sequence
  Oligonucleotide for detection of SNP TSC0027768
tatcaataaaatt

SEQ ID NO: 111193 - DNA, 13 bp, Artificial Sequence
  Oligonucleotide for detection of SNP TSC0027770
gtgtggcggttta

SEQ ID NO: 111194 - DNA, 13 bp, Artificial Sequence
  Oligonucleotide for detection of SNP TSC0027770
taaaccgccacac

SEQ ID NO: 111195 - DNA, 13 bp, Artificial Sequence
  Oligonucleotide for detection of SNP TSC0027770
tgagttgttatay

SEQ ID NO: 111196 - DNA, 13 bp, Artificial Sequence
  Oligonucleotide for detection of SNP TSC0027770
rtataacaactca

SEQ ID NO: 111197 - DNA, 13 bp, Artificial Sequence
  Oligonucleotide for detection of SNP TSC0027770
tgagttattatay

SEQ ID NO: 111198 - DNA, 13 bp, Artificial Sequence
  Oligonucleotide for detection of SNP TSC0027770
rtataataactca

SEQ ID NO: 111199 - DNA, 13 bp, Artificial Sequence
  Oligonucleotide for detection of SNP TSC0027770
tgagtcgttatay

SEQ ID NO: 111200 - DNA, 13 bp, Artificial Sequence
  Oligonucleotide for detection of SNP TSC0027770
rtataacgactca

SEQ ID NO: 111201 - DNA, 13 bp, Artificial Sequence
  Oligonucleotide for detection of SNP TSC0027771
agatgaagtttty

SEQ ID NO: 111202 - DNA, 13 bp, Artificial Sequence
  Oligonucleotide for detection of SNP TSC0027771
raaaacttcatct

SEQ ID NO: 111203 - DNA, 13 bp, Artificial Sequence
  Oligonucleotide for detection of SNP TSC0027772
tagagatgaggtt

SEQ ID NO: 111204 - DNA, 13 bp, Artificial Sequence
  Oligonucleotide for detection of SNP TSC0027772
aacctcatctcta

SEQ ID NO: 111205 - DNA, 13 bp, Artificial Sequence
  Oligonucleotide for detection of SNP TSC0027772
tagagacgaggtt

SEQ ID NO: 111206 - DNA, 13 bp, Artificial Sequence
  Oligonucleotide for detection of SNP TSC0027772
aacctcgtctcta

SEQ ID NO: 111207 - DNA, 13 bp, Artificial Sequence
  Oligonucleotide for detection of SNP TSC0027773
ataggataattgy

SEQ ID NO: 111208 - DNA, 13 bp, Artificial Sequence
  Oligonucleotide for detection of SNP TSC0027773
rcaattatcctat

SEQ ID NO: 111209 - DNA, 13 bp, Artificial Sequence
  Oligonucleotide for detection of SNP TSC0027773
gtaattgttttgt

SEQ ID NO: 111210 - DNA, 13 bp, Artificial Sequence
  Oligonucleotide for detection of SNP TSC0027773
acaaaacaattac

SEQ ID NO: 111211 - DNA, 13 bp, Artificial Sequence
  Oligonucleotide for detection of SNP TSC0027773
gtaatttttttgt

SEQ ID NO: 111212 - DNA, 13 bp, Artificial Sequence
  Oligonucleotide for detection of SNP TSC0027773
acaaaaaaattac

SEQ ID NO: 111213 - DNA, 13 bp, Artificial Sequence
  Oligonucleotide for detection of SNP TSC0027777
tggtagtgtttay

SEQ ID NO: 111214 - DNA, 13 bp, Artificial Sequence
  Oligonucleotide for detection of SNP TSC0027777
rtaaacactacca

SEQ ID NO: 111215 - DNA, 13 bp, Artificial Sequence
  Oligonucleotide for detection of SNP TSC0027777
tggtagcgtttay

SEQ ID NO: 111216 - DNA, 13 bp, Artificial Sequence
  Oligonucleotide for detection of SNP TSC0027777
rtaaacgctacca

SEQ ID NO: 111217 - DNA, 13 bp, Artificial Sequence
  Oligonucleotide for detection of SNP TSC0027777
gtgagtgttatta

SEQ ID NO: 111218 - DNA, 13 bp, Artificial Sequence
  Oligonucleotide for detection of SNP TSC0027777
taataacactcac

SEQ ID NO: 111219 - DNA, 13 bp, Artificial Sequence
  Oligonucleotide for detection of SNP TSC0027777
gtgagtattatta

SEQ ID NO: 111220 - DNA, 13 bp, Artificial Sequence
  Oligonucleotide for detection of SNP TSC0027777
taataatactcac

SEQ ID NO: 111221 - DNA, 13 bp, Artificial Sequence
  Oligonucleotide for detection of SNP TSC0027777
gtgagcgttatta

SEQ ID NO: 111222 - DNA, 13 bp, Artificial Sequence
  Oligonucleotide for detection of SNP TSC0027777
taataacgctcac

SEQ ID NO: 111223 - DNA, 13 bp, Artificial Sequence
  Oligonucleotide for detection of SNP TSC0027782
tgtttaataggtt

SEQ ID NO: 111224 - DNA, 13 bp, Artificial Sequence
  Oligonucleotide for detection of SNP TSC0027782
aacctattaaaca

SEQ ID NO: 111225 - DNA, 13 bp, Artificial Sequence
  Oligonucleotide for detection of SNP TSC0027782
tgtttagtaggtt

SEQ ID NO: 111226 - DNA, 13 bp, Artificial Sequence
  Oligonucleotide for detection of SNP TSC0027782
aacctactaaaca

SEQ ID NO: 111227 - DNA, 13 bp, Artificial Sequence
  Oligonucleotide for detection of SNP TSC0027782
cgtttaataggtt

SEQ ID NO: 111228 - DNA, 13 bp, Artificial Sequence
  Oligonucleotide for detection of SNP TSC0027782
aacctattaaacg

SEQ ID NO: 111229 - DNA, 13 bp, Artificial Sequence
  Oligonucleotide for detection of SNP TSC0027782
cgtttagtaggtt

SEQ ID NO: 111230 - DNA, 13 bp, Artificial Sequence
  Oligonucleotide for detection of SNP TSC0027782
aacctactaaacg

SEQ ID NO: 111231 - DNA, 13 bp, Artificial Sequence
  Oligonucleotide for detection of SNP TSC0027784
ggggttatggtty

SEQ ID NO: 111232 - DNA, 13 bp, Artificial Sequence
  Oligonucleotide for detection of SNP TSC0027784
raaccataacccc

SEQ ID NO: 111233 - DNA, 13 bp, Artificial Sequence
  Oligonucleotide for detection of SNP TSC0027784
ggggttgtggtty

SEQ ID NO: 111234 - DNA, 13 bp, Artificial Sequence
  Oligonucleotide for detection of SNP TSC0027784
raaccacaacccc

SEQ ID NO: 111235 - DNA, 13 bp, Artificial Sequence
  Oligonucleotide for detection of SNP TSC0027784
ggggtcgtggtty

SEQ ID NO: 111236 - DNA, 13 bp, Artificial Sequence
  Oligonucleotide for detection of SNP TSC0027784
raaccacgacccc

SEQ ID NO: 111237 - DNA, 13 bp, Artificial Sequence
  Oligonucleotide for detection of SNP TSC0027784
gagttatgattty

SEQ ID NO: 111238 - DNA, 13 bp, Artificial Sequence
  Oligonucleotide for detection of SNP TSC0027784
raaatcataactc

SEQ ID NO: 111239 - DNA, 13 bp, Artificial Sequence
  Oligonucleotide for detection of SNP TSC0027784
gagttacgattty

SEQ ID NO: 111240 - DNA, 13 bp, Artificial Sequence
  Oligonucleotide for detection of SNP TSC0027784
raaatcgtaactc

SEQ ID NO: 111241 - DNA, 13 bp, Artificial Sequence
  Oligonucleotide for detection of SNP TSC0027785
agttatggaaaat

SEQ ID NO: 111242 - DNA, 13 bp, Artificial Sequence
  Oligonucleotide for detection of SNP TSC0027785
attttccataact

SEQ ID NO: 111243 - DNA, 13 bp, Artificial Sequence
  Oligonucleotide for detection of SNP TSC0027785
agttatagaaaat

SEQ ID NO: 111244 - DNA, 13 bp, Artificial Sequence
  Oligonucleotide for detection of SNP TSC0027785
attttctataact

SEQ ID NO: 111245 - DNA, 13 bp, Artificial Sequence
  Oligonucleotide for detection of SNP TSC0027786
aaaagaatatagt

SEQ ID NO: 111246 - DNA, 13 bp, Artificial Sequence
  Oligonucleotide for detection of SNP TSC0027786
actatattctttt

SEQ ID NO: 111247 - DNA, 13 bp, Artificial Sequence
  Oligonucleotide for detection of SNP TSC0027786
aaaagagtatagt

SEQ ID NO: 111248 - DNA, 13 bp, Artificial Sequence
  Oligonucleotide for detection of SNP TSC0027786
actatactctttt

SEQ ID NO: 111249 - DNA, 13 bp, Artificial Sequence
  Oligonucleotide for detection of SNP TSC0027788
ataaaatgagaaa

SEQ ID NO: 111250 - DNA, 13 bp, Artificial Sequence
  Oligonucleotide for detection of SNP TSC0027788
tttctcattttat

SEQ ID NO: 111251 - DNA, 13 bp, Artificial Sequence
  Oligonucleotide for detection of SNP TSC0027788
ataaaacgagaaa

SEQ ID NO: 111252 - DNA, 13 bp, Artificial Sequence
  Oligonucleotide for detection of SNP TSC0027788
tttctcgttttat

SEQ ID NO: 111253 - DNA, 13 bp, Artificial Sequence
  Oligonucleotide for detection of SNP TSC0027798
agggagatatagg

SEQ ID NO: 111254 - DNA, 13 bp, Artificial Sequence
  Oligonucleotide for detection of SNP TSC0027798
cctatatctccct

SEQ ID NO: 111255 - DNA, 13 bp, Artificial Sequence
  Oligonucleotide for detection of SNP TSC0027798
agggagttatagg

SEQ ID NO: 111256 - DNA, 13 bp, Artificial Sequence
  Oligonucleotide for detection of SNP TSC0027798
cctataactccct

SEQ ID NO: 111257 - DNA, 13 bp, Artificial Sequence
  Oligonucleotide for detection of SNP TSC0027798
tttgtgttttttt

SEQ ID NO: 111258 - DNA, 13 bp, Artificial Sequence
  Oligonucleotide for detection of SNP TSC0027798
aaaaaaacacaaa

SEQ ID NO: 111259 - DNA, 13 bp, Artificial Sequence
  Oligonucleotide for detection of SNP TSC0027802
agtagtataaaaa

SEQ ID NO: 111260 - DNA, 13 bp, Artificial Sequence
  Oligonucleotide for detection of SNP TSC0027802
tttttatactact

SEQ ID NO: 111261 - DNA, 13 bp, Artificial Sequence
  Oligonucleotide for detection of SNP TSC0027802
agtagtgtaaaaa

SEQ ID NO: 111262 - DNA, 13 bp, Artificial Sequence
  Oligonucleotide for detection of SNP TSC0027802
tttttacactact

SEQ ID NO: 111263 - DNA, 13 bp, Artificial Sequence
  Oligonucleotide for detection of SNP TSC0027802
agtagcgtaaaaa

SEQ ID NO: 111264 - DNA, 13 bp, Artificial Sequence
  Oligonucleotide for detection of SNP TSC0027802
tttttacgctact

SEQ ID NO: 111265 - DNA, 13 bp, Artificial Sequence
  Oligonucleotide for detection of SNP TSC0027803
tgagaagtttttt

SEQ ID NO: 111266 - DNA, 13 bp, Artificial Sequence
  Oligonucleotide for detection of SNP TSC0027803
aaaaaacttctca

SEQ ID NO: 111267 - DNA, 13 bp, Artificial Sequence
  Oligonucleotide for detection of SNP TSC0027803
tgagaaatttttt

SEQ ID NO: 111268 - DNA, 13 bp, Artificial Sequence
  Oligonucleotide for detection of SNP TSC0027803
aaaaaatttctca

SEQ ID NO: 111269 - DNA, 13 bp, Artificial Sequence
  Oligonucleotide for detection of SNP TSC0027804
gaaaatagattty

SEQ ID NO: 111270 - DNA, 13 bp, Artificial Sequence
  Oligonucleotide for detection of SNP TSC0027804
raaatctattttc

SEQ ID NO: 111271 - DNA, 13 bp, Artificial Sequence
  Oligonucleotide for detection of SNP TSC0027804
gaaaattgattty

SEQ ID NO: 111272 - DNA, 13 bp, Artificial Sequence
  Oligonucleotide for detection of SNP TSC0027804
raaatcaattttc

SEQ ID NO: 111273 - DNA, 13 bp, Artificial Sequence
  Oligonucleotide for detection of SNP TSC0027804
gagatttgtttty

SEQ ID NO: 111274 - DNA, 13 bp, Artificial Sequence
  Oligonucleotide for detection of SNP TSC0027804
raaaacaaatctc

SEQ ID NO: 111275 - DNA, 13 bp, Artificial Sequence
  Oligonucleotide for detection of SNP TSC0027804
gagattagtttty

SEQ ID NO: 111276 - DNA, 13 bp, Artificial Sequence
  Oligonucleotide for detection of SNP TSC0027804
raaaactaatctc

SEQ ID NO: 111277 - DNA, 13 bp, Artificial Sequence
  Oligonucleotide for detection of SNP TSC0027805
agattttggggcg

SEQ ID NO: 111278 - DNA, 13 bp, Artificial Sequence
  Oligonucleotide for detection of SNP TSC0027805
cgccccaaaatct

SEQ ID NO: 111279 - DNA, 13 bp, Artificial Sequence
  Oligonucleotide for detection of SNP TSC0027805
agatttcggggcg

SEQ ID NO: 111280 - DNA, 13 bp, Artificial Sequence
  Oligonucleotide for detection of SNP TSC0027805
cgccccgaaatct

SEQ ID NO: 111281 - DNA, 13 bp, Artificial Sequence
  Oligonucleotide for detection of SNP TSC0027805
tgttttgagattt

SEQ ID NO: 111282 - DNA, 13 bp, Artificial Sequence
  Oligonucleotide for detection of SNP TSC0027805
aaatctcaaaaca

SEQ ID NO: 111283 - DNA, 13 bp, Artificial Sequence
  Oligonucleotide for detection of SNP TSC0027805
tgttttaagattt

SEQ ID NO: 111284 - DNA, 13 bp, Artificial Sequence
  Oligonucleotide for detection of SNP TSC0027805
aaatcttaaaaca

SEQ ID NO: 111285 - DNA, 13 bp, Artificial Sequence
  Oligonucleotide for detection of SNP TSC0027805
cgttttgagattt

SEQ ID NO: 111286 - DNA, 13 bp, Artificial Sequence
  Oligonucleotide for detection of SNP TSC0027805
aaatctcaaaacg

SEQ ID NO: 111287 - DNA, 13 bp, Artificial Sequence
  Oligonucleotide for detection of SNP TSC0027805
cgttttaagattt

SEQ ID NO: 111288 - DNA, 13 bp, Artificial Sequence
  Oligonucleotide for detection of SNP TSC0027805
aaatcttaaaacg

SEQ ID NO: 111289 - DNA, 13 bp, Artificial Sequence
  Oligonucleotide for detection of SNP TSC0027805
tgtttcgagattt

SEQ ID NO: 111290 - DNA, 13 bp, Artificial Sequence
  Oligonucleotide for detection of SNP TSC0027805
aaatctcgaaaca

SEQ ID NO: 111291 - DNA, 13 bp, Artificial Sequence
  Oligonucleotide for detection of SNP TSC0027805
cgtttcgagattt

SEQ ID NO: 111292 - DNA, 13 bp, Artificial Sequence
  Oligonucleotide for detection of SNP TSC0027805
aaatctcgaaacg

SEQ ID NO: 111293 - DNA, 13 bp, Artificial Sequence
  Oligonucleotide for detection of SNP TSC0027806
ggtgagagggtgg

SEQ ID NO: 111294 - DNA, 13 bp, Artificial Sequence
  Oligonucleotide for detection of SNP TSC0027806
ccaccctctcacc

SEQ ID NO: 111295 - DNA, 13 bp, Artificial Sequence
  Oligonucleotide for detection of SNP TSC0027806
ggtgagtgggtgg

SEQ ID NO: 111296 - DNA, 13 bp, Artificial Sequence
  Oligonucleotide for detection of SNP TSC0027806
ccacccactcacc

SEQ ID NO: 111297 - DNA, 13 bp, Artificial Sequence
  Oligonucleotide for detection of SNP TSC0027806
ggcgagagggtgg

SEQ ID NO: 111298 - DNA, 13 bp, Artificial Sequence
  Oligonucleotide for detection of SNP TSC0027806
ccaccctctcgcc

SEQ ID NO: 111299 - DNA, 13 bp, Artificial Sequence
  Oligonucleotide for detection of SNP TSC0027806
ggcgagtgggtgg

SEQ ID NO: 111300 - DNA, 13 bp, Artificial Sequence
  Oligonucleotide for detection of SNP TSC0027806
ccacccactcgcc

SEQ ID NO: 111301 - DNA, 13 bp, Artificial Sequence
  Oligonucleotide for detection of SNP TSC0027806
ggtgagcgggtgg

SEQ ID NO: 111302 - DNA, 13 bp, Artificial Sequence
  Oligonucleotide for detection of SNP TSC0027806
ccacccgctcacc

SEQ ID NO: 111303 - DNA, 13 bp, Artificial Sequence
  Oligonucleotide for detection of SNP TSC0027806
ggcgagcgggtgg

SEQ ID NO: 111304 - DNA, 13 bp, Artificial Sequence
  Oligonucleotide for detection of SNP TSC0027806
ccacccgctcgcc

SEQ ID NO: 111305 - DNA, 13 bp, Artificial Sequence
  Oligonucleotide for detection of SNP TSC0027806
ttatttttttgty

SEQ ID NO: 111306 - DNA, 13 bp, Artificial Sequence
  Oligonucleotide for detection of SNP TSC0027806
racaaaaaaataa

SEQ ID NO: 111307 - DNA, 13 bp, Artificial Sequence
  Oligonucleotide for detection of SNP TSC0027806
ttatttgtttgty

SEQ ID NO: 111308 - DNA, 13 bp, Artificial Sequence
  Oligonucleotide for detection of SNP TSC0027806
racaaacaaataa

SEQ ID NO: 111309 - DNA, 13 bp, Artificial Sequence
  Oligonucleotide for detection of SNP TSC0027806
ttattttttcgty

SEQ ID NO: 111310 - DNA, 13 bp, Artificial Sequence
  Oligonucleotide for detection of SNP TSC0027806
racgaaaaaataa

SEQ ID NO: 111311 - DNA, 13 bp, Artificial Sequence
  Oligonucleotide for detection of SNP TSC0027806
ttattcgtttgty

SEQ ID NO: 111312 - DNA, 13 bp, Artificial Sequence
  Oligonucleotide for detection of SNP TSC0027806
racaaacgaataa

SEQ ID NO: 111313 - DNA, 13 bp, Artificial Sequence
  Oligonucleotide for detection of SNP TSC0027806
ttatttgttcgty

SEQ ID NO: 111314 - DNA, 13 bp, Artificial Sequence
  Oligonucleotide for detection of SNP TSC0027806
racgaacaaataa

SEQ ID NO: 111315 - DNA, 13 bp, Artificial Sequence
  Oligonucleotide for detection of SNP TSC0027806
ttattcgttcgty

SEQ ID NO: 111316 - DNA, 13 bp, Artificial Sequence
  Oligonucleotide for detection of SNP TSC0027806
racgaacgaataa

SEQ ID NO: 111317 - DNA, 13 bp, Artificial Sequence
  Oligonucleotide for detection of SNP TSC0027807
gtaaggaggggta

SEQ ID NO: 111318 - DNA, 13 bp, Artificial Sequence
  Oligonucleotide for detection of SNP TSC0027807
tacccctccttac

SEQ ID NO: 111319 - DNA, 13 bp, Artificial Sequence
  Oligonucleotide for detection of SNP TSC0027807
gtaagggggggta

SEQ ID NO: 111320 - DNA, 13 bp, Artificial Sequence
  Oligonucleotide for detection of SNP TSC0027807
tacccccccttac

SEQ ID NO: 111321 - DNA, 13 bp, Artificial Sequence
  Oligonucleotide for detection of SNP TSC0027809
ttagttgtagttg

SEQ ID NO: 111322 - DNA, 13 bp, Artificial Sequence
  Oligonucleotide for detection of SNP TSC0027809
caactacaactaa

SEQ ID NO: 111323 - DNA, 13 bp, Artificial Sequence
  Oligonucleotide for detection of SNP TSC0027809
ttagttatagttg

SEQ ID NO: 111324 - DNA, 13 bp, Artificial Sequence
  Oligonucleotide for detection of SNP TSC0027809
caactataactaa

SEQ ID NO: 111325 - DNA, 13 bp, Artificial Sequence
  Oligonucleotide for detection of SNP TSC0027809
ttagttgtagtcg

SEQ ID NO: 111326 - DNA, 13 bp, Artificial Sequence
  Oligonucleotide for detection of SNP TSC0027809
cgactacaactaa

SEQ ID NO: 111327 - DNA, 13 bp, Artificial Sequence
  Oligonucleotide for detection of SNP TSC0027809
ttagttatagtcg

SEQ ID NO: 111328 - DNA, 13 bp, Artificial Sequence
  Oligonucleotide for detection of SNP TSC0027809
cgactataactaa

SEQ ID NO: 111329 - DNA, 13 bp, Artificial Sequence
  Oligonucleotide for detection of SNP TSC0027810
aagggtatttagy

SEQ ID NO: 111330 - DNA, 13 bp, Artificial Sequence
  Oligonucleotide for detection of SNP TSC0027810
rctaaataccctt

SEQ ID NO: 111331 - DNA, 13 bp, Artificial Sequence
  Oligonucleotide for detection of SNP TSC0027810
aagggtgtttagy

SEQ ID NO: 111332 - DNA, 13 bp, Artificial Sequence
  Oligonucleotide for detection of SNP TSC0027810
rctaaacaccctt

SEQ ID NO: 111333 - DNA, 13 bp, Artificial Sequence
  Oligonucleotide for detection of SNP TSC0027810
aagggcgtttagy

SEQ ID NO: 111334 - DNA, 13 bp, Artificial Sequence
  Oligonucleotide for detection of SNP TSC0027810
rctaaacgccctt

SEQ ID NO: 111335 - DNA, 13 bp, Artificial Sequence
  Oligonucleotide for detection of SNP TSC0027810
gttaggtgttttt

SEQ ID NO: 111336 - DNA, 13 bp, Artificial Sequence
  Oligonucleotide for detection of SNP TSC0027810
aaaaacacctaac

SEQ ID NO: 111337 - DNA, 13 bp, Artificial Sequence
  Oligonucleotide for detection of SNP TSC0027810
gttaggcgttttt

SEQ ID NO: 111338 - DNA, 13 bp, Artificial Sequence
  Oligonucleotide for detection of SNP TSC0027810
aaaaacgcctaac

SEQ ID NO: 111339 - DNA, 13 bp, Artificial Sequence
  Oligonucleotide for detection of SNP TSC0027811
agtaagatagaaa

SEQ ID NO: 111340 - DNA, 13 bp, Artificial Sequence
  Oligonucleotide for detection of SNP TSC0027811
tttctatcttact

SEQ ID NO: 111341 - DNA, 13 bp, Artificial Sequence
  Oligonucleotide for detection of SNP TSC0027811
agtaaggtagaaa

SEQ ID NO: 111342 - DNA, 13 bp, Artificial Sequence
  Oligonucleotide for detection of SNP TSC0027811
tttctaccttact

SEQ ID NO: 111343 - DNA, 13 bp, Artificial Sequence
  Oligonucleotide for detection of SNP TSC0027813
gtttgatgttaay

SEQ ID NO: 111344 - DNA, 13 bp, Artificial Sequence
  Oligonucleotide for detection of SNP TSC0027813
rttaacatcaaac

SEQ ID NO: 111345 - DNA, 13 bp, Artificial Sequence
  Oligonucleotide for detection of SNP TSC0027813
gtttgacgttaay

SEQ ID NO: 111346 - DNA, 13 bp, Artificial Sequence
  Oligonucleotide for detection of SNP TSC0027813
rttaacgtcaaac

SEQ ID NO: 111347 - DNA, 13 bp, Artificial Sequence
  Oligonucleotide for detection of SNP TSC0027813
gttggtgttaagy

SEQ ID NO: 111348 - DNA, 13 bp, Artificial Sequence
  Oligonucleotide for detection of SNP TSC0027813
rcttaacaccaac

SEQ ID NO: 111349 - DNA, 13 bp, Artificial Sequence
  Oligonucleotide for detection of SNP TSC0027813
gttggtattaagy

SEQ ID NO: 111350 - DNA, 13 bp, Artificial Sequence
  Oligonucleotide for detection of SNP TSC0027813
rcttaataccaac

SEQ ID NO: 111351 - DNA, 13 bp, Artificial Sequence
  Oligonucleotide for detection of SNP TSC0027813
gttggcgttaagy

SEQ ID NO: 111352 - DNA, 13 bp, Artificial Sequence
  Oligonucleotide for detection of SNP TSC0027813
rcttaacgccaac

SEQ ID NO: 111353 - DNA, 13 bp, Artificial Sequence
  Oligonucleotide for detection of SNP TSC0027815
tagtttggggaga

SEQ ID NO: 111354 - DNA, 13 bp, Artificial Sequence
  Oligonucleotide for detection of SNP TSC0027815
tctccccaaacta

SEQ ID NO: 111355 - DNA, 13 bp, Artificial Sequence
  Oligonucleotide for detection of SNP TSC0027815
tagtttagggaga

SEQ ID NO: 111356 - DNA, 13 bp, Artificial Sequence
  Oligonucleotide for detection of SNP TSC0027815
tctccctaaacta

SEQ ID NO: 111357 - DNA, 13 bp, Artificial Sequence
  Oligonucleotide for detection of SNP TSC0027815
tagttcggggaga

SEQ ID NO: 111358 - DNA, 13 bp, Artificial Sequence
  Oligonucleotide for detection of SNP TSC0027815
tctccccgaacta

SEQ ID NO: 111359 - DNA, 13 bp, Artificial Sequence
  Oligonucleotide for detection of SNP TSC0027816
ttatggtgtttag

SEQ ID NO: 111360 - DNA, 13 bp, Artificial Sequence
  Oligonucleotide for detection of SNP TSC0027816
ctaaacaccataa

SEQ ID NO: 111361 - DNA, 13 bp, Artificial Sequence
  Oligonucleotide for detection of SNP TSC0027816
ttatggagtttag

SEQ ID NO: 111362 - DNA, 13 bp, Artificial Sequence
  Oligonucleotide for detection of SNP TSC0027816
ctaaactccataa

SEQ ID NO: 111363 - DNA, 13 bp, Artificial Sequence
  Oligonucleotide for detection of SNP TSC0027816
ttatggcgtttag

SEQ ID NO: 111364 - DNA, 13 bp, Artificial Sequence
  Oligonucleotide for detection of SNP TSC0027816
ctaaacgccataa

SEQ ID NO: 111365 - DNA, 13 bp, Artificial Sequence
  Oligonucleotide for detection of SNP TSC0027817
ggtggtatttgty

SEQ ID NO: 111366 - DNA, 13 bp, Artificial Sequence
  Oligonucleotide for detection of SNP TSC0027817
racaaataccacc

SEQ ID NO: 111367 - DNA, 13 bp, Artificial Sequence
  Oligonucleotide for detection of SNP TSC0027817
ggtggtgtttgty

SEQ ID NO: 111368 - DNA, 13 bp, Artificial Sequence
  Oligonucleotide for detection of SNP TSC0027817
racaaacaccacc

SEQ ID NO: 111369 - DNA, 13 bp, Artificial Sequence
  Oligonucleotide for detection of SNP TSC0027817
ggtggcgtttgty

SEQ ID NO: 111370 - DNA, 13 bp, Artificial Sequence
  Oligonucleotide for detection of SNP TSC0027817
racaaacgccacc

SEQ ID NO: 111371 - DNA, 13 bp, Artificial Sequence
  Oligonucleotide for detection of SNP TSC0027817
ggtaggtgttaty

SEQ ID NO: 111372 - DNA, 13 bp, Artificial Sequence
  Oligonucleotide for detection of SNP TSC0027817
rataacacctacc

SEQ ID NO: 111373 - DNA, 13 bp, Artificial Sequence
  Oligonucleotide for detection of SNP TSC0027817
ggtaggcgttaty

SEQ ID NO: 111374 - DNA, 13 bp, Artificial Sequence
  Oligonucleotide for detection of SNP TSC0027817
rataacgcctacc

SEQ ID NO: 111375 - DNA, 13 bp, Artificial Sequence
  Oligonucleotide for detection of SNP TSC0027818
aaatttaaggtgg

SEQ ID NO: 111376 - DNA, 13 bp, Artificial Sequence
  Oligonucleotide for detection of SNP TSC0027818
ccaccttaaattt

SEQ ID NO: 111377 - DNA, 13 bp, Artificial Sequence
  Oligonucleotide for detection of SNP TSC0027818
aaatttgaggtgg

SEQ ID NO: 111378 - DNA, 13 bp, Artificial Sequence
  Oligonucleotide for detection of SNP TSC0027818
ccacctcaaattt

SEQ ID NO: 111379 - DNA, 13 bp, Artificial Sequence
  Oligonucleotide for detection of SNP TSC0027820
taggaaattaagg

SEQ ID NO: 111380 - DNA, 13 bp, Artificial Sequence
  Oligonucleotide for detection of SNP TSC0027820
ccttaatttccta

SEQ ID NO: 111381 - DNA, 13 bp, Artificial Sequence
  Oligonucleotide for detection of SNP TSC0027820
taggaagttaagg

SEQ ID NO: 111382 - DNA, 13 bp, Artificial Sequence
  Oligonucleotide for detection of SNP TSC0027820
ccttaacttccta

SEQ ID NO: 111383 - DNA, 13 bp, Artificial Sequence
  Oligonucleotide for detection of SNP TSC0027821
tttgtaaattgty

SEQ ID NO: 111384 - DNA, 13 bp, Artificial Sequence
  Oligonucleotide for detection of SNP TSC0027821
racaatttacaaa

SEQ ID NO: 111385 - DNA, 13 bp, Artificial Sequence
  Oligonucleotide for detection of SNP TSC0027821
tttgtatattgty

SEQ ID NO: 111386 - DNA, 13 bp, Artificial Sequence
  Oligonucleotide for detection of SNP TSC0027821
racaatatacaaa

SEQ ID NO: 111387 - DNA, 13 bp, Artificial Sequence
  Oligonucleotide for detection of SNP TSC0027821
ttcgtaaattgty

SEQ ID NO: 111388 - DNA, 13 bp, Artificial Sequence
  Oligonucleotide for detection of SNP TSC0027821
racaatttacgaa

SEQ ID NO: 111389 - DNA, 13 bp, Artificial Sequence
  Oligonucleotide for detection of SNP TSC0027821
ttcgtatattgty

SEQ ID NO: 111390 - DNA, 13 bp, Artificial Sequence
  Oligonucleotide for detection of SNP TSC0027821
racaatatacgaa

SEQ ID NO: 111391 - DNA, 13 bp, Artificial Sequence
  Oligonucleotide for detection of SNP TSC0027821
ggtagtttgtgga

SEQ ID NO: 111392 - DNA, 13 bp, Artificial Sequence
  Oligonucleotide for detection of SNP TSC0027821
tccacaaactacc

SEQ ID NO: 111393 - DNA, 13 bp, Artificial Sequence
  Oligonucleotide for detection of SNP TSC0027821
ggtagtgtgtgga

SEQ ID NO: 111394 - DNA, 13 bp, Artificial Sequence
  Oligonucleotide for detection of SNP TSC0027821
tccacacactacc

SEQ ID NO: 111395 - DNA, 13 bp, Artificial Sequence
  Oligonucleotide for detection of SNP TSC0027821
ggtagtttgcgga

SEQ ID NO: 111396 - DNA, 13 bp, Artificial Sequence
  Oligonucleotide for detection of SNP TSC0027821
tccgcaaactacc

SEQ ID NO: 111397 - DNA, 13 bp, Artificial Sequence
  Oligonucleotide for detection of SNP TSC0027821
ggtagtgtgcgga

SEQ ID NO: 111398 - DNA, 13 bp, Artificial Sequence
  Oligonucleotide for detection of SNP TSC0027821
tccgcacactacc

SEQ ID NO: 111399 - DNA, 13 bp, Artificial Sequence
  Oligonucleotide for detection of SNP TSC0027822
ttaagtagggagg

SEQ ID NO: 111400 - DNA, 13 bp, Artificial Sequence
  Oligonucleotide for detection of SNP TSC0027822
cctccctacttaa

SEQ ID NO: 111401 - DNA, 13 bp, Artificial Sequence
  Oligonucleotide for detection of SNP TSC0027822
ttaagttgggagg

SEQ ID NO: 111402 - DNA, 13 bp, Artificial Sequence
  Oligonucleotide for detection of SNP TSC0027822
cctcccaacttaa

SEQ ID NO: 111403 - DNA, 13 bp, Artificial Sequence
  Oligonucleotide for detection of SNP TSC0027822
tttttttgtttgg

SEQ ID NO: 111404 - DNA, 13 bp, Artificial Sequence
  Oligonucleotide for detection of SNP TSC0027822
ccaaacaaaaaaa

SEQ ID NO: 111405 - DNA, 13 bp, Artificial Sequence
  Oligonucleotide for detection of SNP TSC0027822
ttttttagtttgg

SEQ ID NO: 111406 - DNA, 13 bp, Artificial Sequence
  Oligonucleotide for detection of SNP TSC0027822
ccaaactaaaaaa

SEQ ID NO: 111407 - DNA, 13 bp, Artificial Sequence
  Oligonucleotide for detection of SNP TSC0027825
ataggtgggggtt

SEQ ID NO: 111408 - DNA, 13 bp, Artificial Sequence
  Oligonucleotide for detection of SNP TSC0027825
aacccccacctat

SEQ ID NO: 111409 - DNA, 13 bp, Artificial Sequence
  Oligonucleotide for detection of SNP TSC0027825
ataggttggggtt

SEQ ID NO: 111410 - DNA, 13 bp, Artificial Sequence
  Oligonucleotide for detection of SNP TSC0027825
aaccccaacctat

SEQ ID NO: 111411 - DNA, 13 bp, Artificial Sequence
  Oligonucleotide for detection of SNP TSC0027825
agtttttatttgt

SEQ ID NO: 111412 - DNA, 13 bp, Artificial Sequence
  Oligonucleotide for detection of SNP TSC0027825
acaaataaaaact

SEQ ID NO: 111413 - DNA, 13 bp, Artificial Sequence
  Oligonucleotide for detection of SNP TSC0027825
agttttaatttgt

SEQ ID NO: 111414 - DNA, 13 bp, Artificial Sequence
  Oligonucleotide for detection of SNP TSC0027825
acaaattaaaact

SEQ ID NO: 111415 - DNA, 13 bp, Artificial Sequence
  Oligonucleotide for detection of SNP TSC0027828
atttatattggta

SEQ ID NO: 111416 - DNA, 13 bp, Artificial Sequence
  Oligonucleotide for detection of SNP TSC0027828
taccaatataaat

SEQ ID NO: 111417 - DNA, 13 bp, Artificial Sequence
  Oligonucleotide for detection of SNP TSC0027828
atttatgttggta

SEQ ID NO: 111418 - DNA, 13 bp, Artificial Sequence
  Oligonucleotide for detection of SNP TSC0027828
taccaacataaat

SEQ ID NO: 111419 - DNA, 13 bp, Artificial Sequence
  Oligonucleotide for detection of SNP TSC0027828
atttatatcggta

SEQ ID NO: 111420 - DNA, 13 bp, Artificial Sequence
  Oligonucleotide for detection of SNP TSC0027828
taccgatataaat

SEQ ID NO: 111421 - DNA, 13 bp, Artificial Sequence
  Oligonucleotide for detection of SNP TSC0027828
atttacgttggta

SEQ ID NO: 111422 - DNA, 13 bp, Artificial Sequence
  Oligonucleotide for detection of SNP TSC0027828
taccaacgtaaat

SEQ ID NO: 111423 - DNA, 13 bp, Artificial Sequence
  Oligonucleotide for detection of SNP TSC0027828
atttatgtcggta

SEQ ID NO: 111424 - DNA, 13 bp, Artificial Sequence
  Oligonucleotide for detection of SNP TSC0027828
taccgacataaat

SEQ ID NO: 111425 - DNA, 13 bp, Artificial Sequence
  Oligonucleotide for detection of SNP TSC0027828
atttacgtcggta

SEQ ID NO: 111426 - DNA, 13 bp, Artificial Sequence
  Oligonucleotide for detection of SNP TSC0027828
taccgacgtaaat

SEQ ID NO: 111427 - DNA, 13 bp, Artificial Sequence
  Oligonucleotide for detection of SNP TSC0027828
tgttggtgtgggt

SEQ ID NO: 111428 - DNA, 13 bp, Artificial Sequence
  Oligonucleotide for detection of SNP TSC0027828
acccacaccaaca

SEQ ID NO: 111429 - DNA, 13 bp, Artificial Sequence
  Oligonucleotide for detection of SNP TSC0027828
tgtcggtgtgggt

SEQ ID NO: 111430 - DNA, 13 bp, Artificial Sequence
  Oligonucleotide for detection of SNP TSC0027828
acccacaccgaca

SEQ ID NO: 111431 - DNA, 13 bp, Artificial Sequence
  Oligonucleotide for detection of SNP TSC0027828
tgttggcgtgggt

SEQ ID NO: 111432 - DNA, 13 bp, Artificial Sequence
  Oligonucleotide for detection of SNP TSC0027828
acccacgccaaca

SEQ ID NO: 111433 - DNA, 13 bp, Artificial Sequence
  Oligonucleotide for detection of SNP TSC0027828
tgtcggcgtgggt

SEQ ID NO: 111434 - DNA, 13 bp, Artificial Sequence
  Oligonucleotide for detection of SNP TSC0027828
acccacgccgaca

SEQ ID NO: 111435 - DNA, 13 bp, Artificial Sequence
  Oligonucleotide for detection of SNP TSC0027829
tttattaagtaty

SEQ ID NO: 111436 - DNA, 13 bp, Artificial Sequence
  Oligonucleotide for detection of SNP TSC0027829
ratacttaataaa

SEQ ID NO: 111437 - DNA, 13 bp, Artificial Sequence
  Oligonucleotide for detection of SNP TSC0027829
tttatcgagtaty

SEQ ID NO: 111438 - DNA, 13 bp, Artificial Sequence
  Oligonucleotide for detection of SNP TSC0027829
ratactcgataaa

SEQ ID NO: 111439 - DNA, 13 bp, Artificial Sequence
  Oligonucleotide for detection of SNP TSC0027829
ggtgtttggtgga

SEQ ID NO: 111440 - DNA, 13 bp, Artificial Sequence
  Oligonucleotide for detection of SNP TSC0027829
tccaccaaacacc

SEQ ID NO: 111441 - DNA, 13 bp, Artificial Sequence
  Oligonucleotide for detection of SNP TSC0027829
ggtgttcggtgga

SEQ ID NO: 111442 - DNA, 13 bp, Artificial Sequence
  Oligonucleotide for detection of SNP TSC0027829
tccaccgaacacc

SEQ ID NO: 111443 - DNA, 13 bp, Artificial Sequence
  Oligonucleotide for detection of SNP TSC0027830
gtttatatatttg

SEQ ID NO: 111444 - DNA, 13 bp, Artificial Sequence
  Oligonucleotide for detection of SNP TSC0027830
caaatatataaac

SEQ ID NO: 111445 - DNA, 13 bp, Artificial Sequence
  Oligonucleotide for detection of SNP TSC0027830
gtttatgtatttg

SEQ ID NO: 111446 - DNA, 13 bp, Artificial Sequence
  Oligonucleotide for detection of SNP TSC0027830
caaatacataaac

SEQ ID NO: 111447 - DNA, 13 bp, Artificial Sequence
  Oligonucleotide for detection of SNP TSC0027831
ggaaattatgtag

SEQ ID NO: 111448 - DNA, 13 bp, Artificial Sequence
  Oligonucleotide for detection of SNP TSC0027831
ctacataatttcc

SEQ ID NO: 111449 - DNA, 13 bp, Artificial Sequence
  Oligonucleotide for detection of SNP TSC0027831
ggaaatgatgtag

SEQ ID NO: 111450 - DNA, 13 bp, Artificial Sequence
  Oligonucleotide for detection of SNP TSC0027831
ctacatcatttcc

SEQ ID NO: 111451 - DNA, 13 bp, Artificial Sequence
  Oligonucleotide for detection of SNP TSC0027831
ggaaattacgtag

SEQ ID NO: 111452 - DNA, 13 bp, Artificial Sequence
  Oligonucleotide for detection of SNP TSC0027831
ctacgtaatttcc

SEQ ID NO: 111453 - DNA, 13 bp, Artificial Sequence
  Oligonucleotide for detection of SNP TSC0027831
ggaaatgacgtag

SEQ ID NO: 111454 - DNA, 13 bp, Artificial Sequence
  Oligonucleotide for detection of SNP TSC0027831
ctacgtcatttcc

SEQ ID NO: 111455 - DNA, 13 bp, Artificial Sequence
  Oligonucleotide for detection of SNP TSC0027831
ttatgtgatttty

SEQ ID NO: 111456 - DNA, 13 bp, Artificial Sequence
  Oligonucleotide for detection of SNP TSC0027831
raaaatcacataa

SEQ ID NO: 111457 - DNA, 13 bp, Artificial Sequence
  Oligonucleotide for detection of SNP TSC0027831
ttatgttatttty

SEQ ID NO: 111458 - DNA, 13 bp, Artificial Sequence
  Oligonucleotide for detection of SNP TSC0027831
raaaataacataa

SEQ ID NO: 111459 - DNA, 13 bp, Artificial Sequence
  Oligonucleotide for detection of SNP TSC0027831
ttacgtgatttty

SEQ ID NO: 111460 - DNA, 13 bp, Artificial Sequence
  Oligonucleotide for detection of SNP TSC0027831
raaaatcacgtaa

SEQ ID NO: 111461 - DNA, 13 bp, Artificial Sequence
  Oligonucleotide for detection of SNP TSC0027831
ttacgttatttty

SEQ ID NO: 111462 - DNA, 13 bp, Artificial Sequence
  Oligonucleotide for detection of SNP TSC0027831
raaaataacgtaa

SEQ ID NO: 111463 - DNA, 13 bp, Artificial Sequence
  Oligonucleotide for detection of SNP TSC0027833
atttttgtagttt

SEQ ID NO: 111464 - DNA, 13 bp, Artificial Sequence
  Oligonucleotide for detection of SNP TSC0027833
aaactacaaaaat

SEQ ID NO: 111465 - DNA, 13 bp, Artificial Sequence
  Oligonucleotide for detection of SNP TSC0027834
ttattatgtatgg

SEQ ID NO: 111466 - DNA, 13 bp, Artificial Sequence
  Oligonucleotide for detection of SNP TSC0027834
ccatacataataa

SEQ ID NO: 111467 - DNA, 13 bp, Artificial Sequence
  Oligonucleotide for detection of SNP TSC0027834
ttattacgtatgg

SEQ ID NO: 111468 - DNA, 13 bp, Artificial Sequence
  Oligonucleotide for detection of SNP TSC0027834
ccatacgtaataa

SEQ ID NO: 111469 - DNA, 13 bp, Artificial Sequence
  Oligonucleotide for detection of SNP TSC0027834
ttatgtgtaatga

SEQ ID NO: 111470 - DNA, 13 bp, Artificial Sequence
  Oligonucleotide for detection of SNP TSC0027834
tcattacacataa

SEQ ID NO: 111471 - DNA, 13 bp, Artificial Sequence
  Oligonucleotide for detection of SNP TSC0027834
ttatgtataatga

SEQ ID NO: 111472 - DNA, 13 bp, Artificial Sequence
  Oligonucleotide for detection of SNP TSC0027834
tcattatacataa

SEQ ID NO: 111473 - DNA, 13 bp, Artificial Sequence
  Oligonucleotide for detection of SNP TSC0027834
ttatgcgtaatga

SEQ ID NO: 111474 - DNA, 13 bp, Artificial Sequence
  Oligonucleotide for detection of SNP TSC0027834
tcattacgcataa

SEQ ID NO: 111475 - DNA, 13 bp, Artificial Sequence
  Oligonucleotide for detection of SNP TSC0027835
taggagatttaaa

SEQ ID NO: 111476 - DNA, 13 bp, Artificial Sequence
  Oligonucleotide for detection of SNP TSC0027835
tttaaatctccta

SEQ ID NO: 111477 - DNA, 13 bp, Artificial Sequence
  Oligonucleotide for detection of SNP TSC0027835
taggaggtttaaa

SEQ ID NO: 111478 - DNA, 13 bp, Artificial Sequence
  Oligonucleotide for detection of SNP TSC0027835
tttaaacctccta

SEQ ID NO: 111479 - DNA, 13 bp, Artificial Sequence
  Oligonucleotide for detection of SNP TSC0027837
aattttgagttty

SEQ ID NO: 111480 - DNA, 13 bp, Artificial Sequence
  Oligonucleotide for detection of SNP TSC0027837
raaactcaaaatt

SEQ ID NO: 111481 - DNA, 13 bp, Artificial Sequence
  Oligonucleotide for detection of SNP TSC0027837
aatttttagttty

SEQ ID NO: 111482 - DNA, 13 bp, Artificial Sequence
  Oligonucleotide for detection of SNP TSC0027837
raaactaaaaatt

SEQ ID NO: 111483 - DNA, 13 bp, Artificial Sequence
  Oligonucleotide for detection of SNP TSC0027837
gaggtttagggtt

SEQ ID NO: 111484 - DNA, 13 bp, Artificial Sequence
  Oligonucleotide for detection of SNP TSC0027837
aaccctaaacctc

SEQ ID NO: 111485 - DNA, 13 bp, Artificial Sequence
  Oligonucleotide for detection of SNP TSC0027837
gaggttaagggtt

SEQ ID NO: 111486 - DNA, 13 bp, Artificial Sequence
  Oligonucleotide for detection of SNP TSC0027837
aacccttaacctc

SEQ ID NO: 111487 - DNA, 13 bp, Artificial Sequence
  Oligonucleotide for detection of SNP TSC0027841
ggaaaagaaaaty

SEQ ID NO: 111488 - DNA, 13 bp, Artificial Sequence
  Oligonucleotide for detection of SNP TSC0027841
rattttcttttcc

SEQ ID NO: 111489 - DNA, 13 bp, Artificial Sequence
  Oligonucleotide for detection of SNP TSC0027841
ggaaaaaaaaaty

SEQ ID NO: 111490 - DNA, 13 bp, Artificial Sequence
  Oligonucleotide for detection of SNP TSC0027841
ratttttttttcc

SEQ ID NO: 111491 - DNA, 13 bp, Artificial Sequence
  Oligonucleotide for detection of SNP TSC0027851
attgtttggatty

SEQ ID NO: 111492 - DNA, 13 bp, Artificial Sequence
  Oligonucleotide for detection of SNP TSC0027851
raatccaaacaat

SEQ ID NO: 111493 - DNA, 13 bp, Artificial Sequence
  Oligonucleotide for detection of SNP TSC0027851
attgttcggatty

SEQ ID NO: 111494 - DNA, 13 bp, Artificial Sequence
  Oligonucleotide for detection of SNP TSC0027851
raatccgaacaat

SEQ ID NO: 111495 - DNA, 13 bp, Artificial Sequence
  Oligonucleotide for detection of SNP TSC0027851
gggtttgggtagt

SEQ ID NO: 111496 - DNA, 13 bp, Artificial Sequence
  Oligonucleotide for detection of SNP TSC0027851
actacccaaaccc

SEQ ID NO: 111497 - DNA, 13 bp, Artificial Sequence
  Oligonucleotide for detection of SNP TSC0027851
gggtttaggtagt

SEQ ID NO: 111498 - DNA, 13 bp, Artificial Sequence
  Oligonucleotide for detection of SNP TSC0027851
actacctaaaccc

SEQ ID NO: 111499 - DNA, 13 bp, Artificial Sequence
  Oligonucleotide for detection of SNP TSC0027851
gggttcgggtagt

SEQ ID NO: 111500 - DNA, 13 bp, Artificial Sequence
  Oligonucleotide for detection of SNP TSC0027851
actacccgaaccc

SEQ ID NO: 111501 - DNA, 13 bp, Artificial Sequence
  Oligonucleotide for detection of SNP TSC0027852
ggagttaggttaa

SEQ ID NO: 111502 - DNA, 13 bp, Artificial Sequence
  Oligonucleotide for detection of SNP TSC0027852
ttaacctaactcc

SEQ ID NO: 111503 - DNA, 13 bp, Artificial Sequence
  Oligonucleotide for detection of SNP TSC0027852
ggagttgggttaa

SEQ ID NO: 111504 - DNA, 13 bp, Artificial Sequence
  Oligonucleotide for detection of SNP TSC0027852
ttaacccaactcc

SEQ ID NO: 111505 - DNA, 13 bp, Artificial Sequence
  Oligonucleotide for detection of SNP TSC0027852
ggagtcgggttaa

SEQ ID NO: 111506 - DNA, 13 bp, Artificial Sequence
  Oligonucleotide for detection of SNP TSC0027852
ttaacccgactcc

SEQ ID NO: 111507 - DNA, 13 bp, Artificial Sequence
  Oligonucleotide for detection of SNP TSC0027852
ttggtttggttty

SEQ ID NO: 111508 - DNA, 13 bp, Artificial Sequence
  Oligonucleotide for detection of SNP TSC0027852
raaaccaaaccaa

SEQ ID NO: 111509 - DNA, 13 bp, Artificial Sequence
  Oligonucleotide for detection of SNP TSC0027852
ttggttcggttty

SEQ ID NO: 111510 - DNA, 13 bp, Artificial Sequence
  Oligonucleotide for detection of SNP TSC0027852
raaaccgaaccaa

SEQ ID NO: 111511 - DNA, 13 bp, Artificial Sequence
  Oligonucleotide for detection of SNP TSC0027855
tttattgggatta

SEQ ID NO: 111512 - DNA, 13 bp, Artificial Sequence
  Oligonucleotide for detection of SNP TSC0027855
taatcccaataaa

SEQ ID NO: 111513 - DNA, 13 bp, Artificial Sequence
  Oligonucleotide for detection of SNP TSC0027855
tttattaggatta

SEQ ID NO: 111514 - DNA, 13 bp, Artificial Sequence
  Oligonucleotide for detection of SNP TSC0027855
taatcctaataaa

SEQ ID NO: 111515 - DNA, 13 bp, Artificial Sequence
  Oligonucleotide for detection of SNP TSC0027856
tgattatgttgga

SEQ ID NO: 111516 - DNA, 13 bp, Artificial Sequence
  Oligonucleotide for detection of SNP TSC0027856
tccaacataatca

SEQ ID NO: 111517 - DNA, 13 bp, Artificial Sequence
  Oligonucleotide for detection of SNP TSC0027856
tgattacgttgga

SEQ ID NO: 111518 - DNA, 13 bp, Artificial Sequence
  Oligonucleotide for detection of SNP TSC0027856
tccaacgtaatca

SEQ ID NO: 111519 - DNA, 13 bp, Artificial Sequence
  Oligonucleotide for detection of SNP TSC0027857
ggatgtagggtty

SEQ ID NO: 111520 - DNA, 13 bp, Artificial Sequence
  Oligonucleotide for detection of SNP TSC0027857
raaccctacatcc

SEQ ID NO: 111521 - DNA, 13 bp, Artificial Sequence
  Oligonucleotide for detection of SNP TSC0027857
ggatgtggggtty

SEQ ID NO: 111522 - DNA, 13 bp, Artificial Sequence
  Oligonucleotide for detection of SNP TSC0027857
raaccccacatcc

SEQ ID NO: 111523 - DNA, 13 bp, Artificial Sequence
  Oligonucleotide for detection of SNP TSC0027857
ggatgcggggtty

SEQ ID NO: 111524 - DNA, 13 bp, Artificial Sequence
  Oligonucleotide for detection of SNP TSC0027857
raaccccgcatcc

SEQ ID NO: 111525 - DNA, 13 bp, Artificial Sequence
  Oligonucleotide for detection of SNP TSC0027857
ggattttgtatty

SEQ ID NO: 111526 - DNA, 13 bp, Artificial Sequence
  Oligonucleotide for detection of SNP TSC0027857
raatacaaaatcc

SEQ ID NO: 111527 - DNA, 13 bp, Artificial Sequence
  Oligonucleotide for detection of SNP TSC0027857
ggatttcgtatty

SEQ ID NO: 111528 - DNA, 13 bp, Artificial Sequence
  Oligonucleotide for detection of SNP TSC0027857
raatacgaaatcc

SEQ ID NO: 111529 - DNA, 13 bp, Artificial Sequence
  Oligonucleotide for detection of SNP TSC0027858
ggggaaatgtgaa

SEQ ID NO: 111530 - DNA, 13 bp, Artificial Sequence
  Oligonucleotide for detection of SNP TSC0027858
ttcacatttcccc

SEQ ID NO: 111531 - DNA, 13 bp, Artificial Sequence
  Oligonucleotide for detection of SNP TSC0027858
ggggaagtgtgaa

SEQ ID NO: 111532 - DNA, 13 bp, Artificial Sequence
  Oligonucleotide for detection of SNP TSC0027858
ttcacacttcccc

SEQ ID NO: 111533 - DNA, 13 bp, Artificial Sequence
  Oligonucleotide for detection of SNP TSC0027858
ggggaaacgtgaa

SEQ ID NO: 111534 - DNA, 13 bp, Artificial Sequence
  Oligonucleotide for detection of SNP TSC0027858
ttcacgtttcccc

SEQ ID NO: 111535 - DNA, 13 bp, Artificial Sequence
  Oligonucleotide for detection of SNP TSC0027858
ggggaagcgtgaa

SEQ ID NO: 111536 - DNA, 13 bp, Artificial Sequence
  Oligonucleotide for detection of SNP TSC0027858
ttcacgcttcccc

SEQ ID NO: 111537 - DNA, 13 bp, Artificial Sequence
  Oligonucleotide for detection of SNP TSC0027859
atttattttagag

SEQ ID NO: 111538 - DNA, 13 bp, Artificial Sequence
  Oligonucleotide for detection of SNP TSC0027859
ctctaaaataaat

SEQ ID NO: 111539 - DNA, 13 bp, Artificial Sequence
  Oligonucleotide for detection of SNP TSC0027859
atttatgttagag

SEQ ID NO: 111540 - DNA, 13 bp, Artificial Sequence
  Oligonucleotide for detection of SNP TSC0027859
ctctaacataaat

SEQ ID NO: 111541 - DNA, 13 bp, Artificial Sequence
  Oligonucleotide for detection of SNP TSC0027859
ttttgggataaat

SEQ ID NO: 111542 - DNA, 13 bp, Artificial Sequence
  Oligonucleotide for detection of SNP TSC0027859
atttatcccaaaa

SEQ ID NO: 111543 - DNA, 13 bp, Artificial Sequence
  Oligonucleotide for detection of SNP TSC0027859
ttttggtataaat

SEQ ID NO: 111544 - DNA, 13 bp, Artificial Sequence
  Oligonucleotide for detection of SNP TSC0027859
atttataccaaaa

SEQ ID NO: 111545 - DNA, 13 bp, Artificial Sequence
  Oligonucleotide for detection of SNP TSC0027860
tttttaagggtgt

SEQ ID NO: 111546 - DNA, 13 bp, Artificial Sequence
  Oligonucleotide for detection of SNP TSC0027860
acacccttaaaaa

SEQ ID NO: 111547 - DNA, 13 bp, Artificial Sequence
  Oligonucleotide for detection of SNP TSC0027860
tttttaggggtgt

SEQ ID NO: 111548 - DNA, 13 bp, Artificial Sequence
  Oligonucleotide for detection of SNP TSC0027860
acacccctaaaaa

SEQ ID NO: 111549 - DNA, 13 bp, Artificial Sequence
  Oligonucleotide for detection of SNP TSC0027861
tgttatatgatta

SEQ ID NO: 111550 - DNA, 13 bp, Artificial Sequence
  Oligonucleotide for detection of SNP TSC0027861
taatcatataaca

SEQ ID NO: 111551 - DNA, 13 bp, Artificial Sequence
  Oligonucleotide for detection of SNP TSC0027861
tgttatgtgatta

SEQ ID NO: 111552 - DNA, 13 bp, Artificial Sequence
  Oligonucleotide for detection of SNP TSC0027861
taatcacataaca

SEQ ID NO: 111553 - DNA, 13 bp, Artificial Sequence
  Oligonucleotide for detection of SNP TSC0027861
cgttatatgatta

SEQ ID NO: 111554 - DNA, 13 bp, Artificial Sequence
  Oligonucleotide for detection of SNP TSC0027861
taatcatataacg

SEQ ID NO: 111555 - DNA, 13 bp, Artificial Sequence
  Oligonucleotide for detection of SNP TSC0027861
cgttatgtgatta

SEQ ID NO: 111556 - DNA, 13 bp, Artificial Sequence
  Oligonucleotide for detection of SNP TSC0027861
taatcacataacg

SEQ ID NO: 111557 - DNA, 13 bp, Artificial Sequence
  Oligonucleotide for detection of SNP TSC0027861
tgttacgtgatta

SEQ ID NO: 111558 - DNA, 13 bp, Artificial Sequence
  Oligonucleotide for detection of SNP TSC0027861
taatcacgtaaca

SEQ ID NO: 111559 - DNA, 13 bp, Artificial Sequence
  Oligonucleotide for detection of SNP TSC0027861
cgttacgtgatta

SEQ ID NO: 111560 - DNA, 13 bp, Artificial Sequence
  Oligonucleotide for detection of SNP TSC0027861
taatcacgtaacg

SEQ ID NO: 111561 - DNA, 13 bp, Artificial Sequence
  Oligonucleotide for detection of SNP TSC0027861
tgattatgtgatg

SEQ ID NO: 111562 - DNA, 13 bp, Artificial Sequence
  Oligonucleotide for detection of SNP TSC0027861
catcacataatca

SEQ ID NO: 111563 - DNA, 13 bp, Artificial Sequence
  Oligonucleotide for detection of SNP TSC0027861
tgattatgtgacg

SEQ ID NO: 111564 - DNA, 13 bp, Artificial Sequence
  Oligonucleotide for detection of SNP TSC0027861
cgtcacataatca

SEQ ID NO: 111565 - DNA, 13 bp, Artificial Sequence
  Oligonucleotide for detection of SNP TSC0027861
tgattacgtgatg

SEQ ID NO: 111566 - DNA, 13 bp, Artificial Sequence
  Oligonucleotide for detection of SNP TSC0027861
catcacgtaatca

SEQ ID NO: 111567 - DNA, 13 bp, Artificial Sequence
  Oligonucleotide for detection of SNP TSC0027861
tgattacgtgacg

SEQ ID NO: 111568 - DNA, 13 bp, Artificial Sequence
  Oligonucleotide for detection of SNP TSC0027861
cgtcacgtaatca

SEQ ID NO: 111569 - DNA, 13 bp, Artificial Sequence
  Oligonucleotide for detection of SNP TSC0027863
ttatgtataatgg

SEQ ID NO: 111570 - DNA, 13 bp, Artificial Sequence
  Oligonucleotide for detection of SNP TSC0027863
ccattatacataa

SEQ ID NO: 111571 - DNA, 13 bp, Artificial Sequence
  Oligonucleotide for detection of SNP TSC0027863
ttatgtgtaatgg

SEQ ID NO: 111572 - DNA, 13 bp, Artificial Sequence
  Oligonucleotide for detection of SNP TSC0027863
ccattacacataa

SEQ ID NO: 111573 - DNA, 13 bp, Artificial Sequence
  Oligonucleotide for detection of SNP TSC0027863
ttatgtataacgg

SEQ ID NO: 111574 - DNA, 13 bp, Artificial Sequence
  Oligonucleotide for detection of SNP TSC0027863
ccgttatacataa

SEQ ID NO: 111575 - DNA, 13 bp, Artificial Sequence
  Oligonucleotide for detection of SNP TSC0027863
ttatgcgtaatgg

SEQ ID NO: 111576 - DNA, 13 bp, Artificial Sequence
  Oligonucleotide for detection of SNP TSC0027863
ccattacgcataa

SEQ ID NO: 111577 - DNA, 13 bp, Artificial Sequence
  Oligonucleotide for detection of SNP TSC0027863
ttatgtgtaacgg

SEQ ID NO: 111578 - DNA, 13 bp, Artificial Sequence
  Oligonucleotide for detection of SNP TSC0027863
ccgttacacataa

SEQ ID NO: 111579 - DNA, 13 bp, Artificial Sequence
  Oligonucleotide for detection of SNP TSC0027863
ttatgcgtaacgg

SEQ ID NO: 111580 - DNA, 13 bp, Artificial Sequence
  Oligonucleotide for detection of SNP TSC0027863
ccgttacgcataa

SEQ ID NO: 111581 - DNA, 13 bp, Artificial Sequence
  Oligonucleotide for detection of SNP TSC0027863
ttgttatgtatga

SEQ ID NO: 111582 - DNA, 13 bp, Artificial Sequence
  Oligonucleotide for detection of SNP TSC0027863
tcatacataacaa

SEQ ID NO: 111583 - DNA, 13 bp, Artificial Sequence
  Oligonucleotide for detection of SNP TSC0027863
tcgttatgtatga

SEQ ID NO: 111584 - DNA, 13 bp, Artificial Sequence
  Oligonucleotide for detection of SNP TSC0027863
tcatacataacga

SEQ ID NO: 111585 - DNA, 13 bp, Artificial Sequence
  Oligonucleotide for detection of SNP TSC0027863
ttgttacgtatga

SEQ ID NO: 111586 - DNA, 13 bp, Artificial Sequence
  Oligonucleotide for detection of SNP TSC0027863
tcatacgtaacaa

SEQ ID NO: 111587 - DNA, 13 bp, Artificial Sequence
  Oligonucleotide for detection of SNP TSC0027863
tcgttacgtatga

SEQ ID NO: 111588 - DNA, 13 bp, Artificial Sequence
  Oligonucleotide for detection of SNP TSC0027863
tcatacgtaacga

SEQ ID NO: 111589 - DNA, 13 bp, Artificial Sequence
  Oligonucleotide for detection of SNP TSC0027866
taaaagatttttg

SEQ ID NO: 111590 - DNA, 13 bp, Artificial Sequence
  Oligonucleotide for detection of SNP TSC0027866
caaaaatctttta

SEQ ID NO: 111591 - DNA, 13 bp, Artificial Sequence
  Oligonucleotide for detection of SNP TSC0027866
taaaaggtttttg

SEQ ID NO: 111592 - DNA, 13 bp, Artificial Sequence
  Oligonucleotide for detection of SNP TSC0027866
caaaaacctttta

SEQ ID NO: 111593 - DNA, 13 bp, Artificial Sequence
  Oligonucleotide for detection of SNP TSC0027867
tttttagataatt

SEQ ID NO: 111594 - DNA, 13 bp, Artificial Sequence
  Oligonucleotide for detection of SNP TSC0027867
aattatctaaaaa

SEQ ID NO: 111595 - DNA, 13 bp, Artificial Sequence
  Oligonucleotide for detection of SNP TSC0027867
tttttaaataatt

SEQ ID NO: 111596 - DNA, 13 bp, Artificial Sequence
  Oligonucleotide for detection of SNP TSC0027867
aattatttaaaaa

SEQ ID NO: 111597 - DNA, 13 bp, Artificial Sequence
  Oligonucleotide for detection of SNP TSC0027868
tttatagaggggy

SEQ ID NO: 111598 - DNA, 13 bp, Artificial Sequence
  Oligonucleotide for detection of SNP TSC0027868
rcccctctataaa

SEQ ID NO: 111599 - DNA, 13 bp, Artificial Sequence
  Oligonucleotide for detection of SNP TSC0027868
tttataaaggggy

SEQ ID NO: 111600 - DNA, 13 bp, Artificial Sequence
  Oligonucleotide for detection of SNP TSC0027868
rcccctttataaa

SEQ ID NO: 111601 - DNA, 13 bp, Artificial Sequence
  Oligonucleotide for detection of SNP TSC0027869
ttgtttatgggga

SEQ ID NO: 111602 - DNA, 13 bp, Artificial Sequence
  Oligonucleotide for detection of SNP TSC0027869
tccccataaacaa

SEQ ID NO: 111603 - DNA, 13 bp, Artificial Sequence
  Oligonucleotide for detection of SNP TSC0027869
ttgtttgtgggga

SEQ ID NO: 111604 - DNA, 13 bp, Artificial Sequence
  Oligonucleotide for detection of SNP TSC0027869
tccccacaaacaa

SEQ ID NO: 111605 - DNA, 13 bp, Artificial Sequence
  Oligonucleotide for detection of SNP TSC0027869
ttgttcgtgggga

SEQ ID NO: 111606 - DNA, 13 bp, Artificial Sequence
  Oligonucleotide for detection of SNP TSC0027869
tccccacgaacaa

SEQ ID NO: 111607 - DNA, 13 bp, Artificial Sequence
  Oligonucleotide for detection of SNP TSC0027869
tttttatgggtag

SEQ ID NO: 111608 - DNA, 13 bp, Artificial Sequence
  Oligonucleotide for detection of SNP TSC0027869
ctacccataaaaa

SEQ ID NO: 111609 - DNA, 13 bp, Artificial Sequence
  Oligonucleotide for detection of SNP TSC0027869
tttttacgggtag

SEQ ID NO: 111610 - DNA, 13 bp, Artificial Sequence
  Oligonucleotide for detection of SNP TSC0027869
ctacccgtaaaaa

SEQ ID NO: 111611 - DNA, 13 bp, Artificial Sequence
  Oligonucleotide for detection of SNP TSC0027870
gggaagtattaty

SEQ ID NO: 111612 - DNA, 13 bp, Artificial Sequence
  Oligonucleotide for detection of SNP TSC0027870
rataatacttccc

SEQ ID NO: 111613 - DNA, 13 bp, Artificial Sequence
  Oligonucleotide for detection of SNP TSC0027870
gggaaggattaty

SEQ ID NO: 111614 - DNA, 13 bp, Artificial Sequence
  Oligonucleotide for detection of SNP TSC0027870
rataatccttccc

SEQ ID NO: 111615 - DNA, 13 bp, Artificial Sequence
  Oligonucleotide for detection of SNP TSC0027870
gatgatgttttty

SEQ ID NO: 111616 - DNA, 13 bp, Artificial Sequence
  Oligonucleotide for detection of SNP TSC0027870
raaaaacatcatc

SEQ ID NO: 111617 - DNA, 13 bp, Artificial Sequence
  Oligonucleotide for detection of SNP TSC0027870
gatgattttttty

SEQ ID NO: 111618 - DNA, 13 bp, Artificial Sequence
  Oligonucleotide for detection of SNP TSC0027870
raaaaaaatcatc

SEQ ID NO: 111619 - DNA, 13 bp, Artificial Sequence
  Oligonucleotide for detection of SNP TSC0027871
attatggaaaata

SEQ ID NO: 111620 - DNA, 13 bp, Artificial Sequence
  Oligonucleotide for detection of SNP TSC0027871
tattttccataat

SEQ ID NO: 111621 - DNA, 13 bp, Artificial Sequence
  Oligonucleotide for detection of SNP TSC0027871
attatgaaaaata

SEQ ID NO: 111622 - DNA, 13 bp, Artificial Sequence
  Oligonucleotide for detection of SNP TSC0027871
tatttttcataat

SEQ ID NO: 111623 - DNA, 13 bp, Artificial Sequence
  Oligonucleotide for detection of SNP TSC0027874
ataaggtgtagag

SEQ ID NO: 111624 - DNA, 13 bp, Artificial Sequence
  Oligonucleotide for detection of SNP TSC0027874
ctctacaccttat

SEQ ID NO: 111625 - DNA, 13 bp, Artificial Sequence
  Oligonucleotide for detection of SNP TSC0027874
ataaggcgtagag

SEQ ID NO: 111626 - DNA, 13 bp, Artificial Sequence
  Oligonucleotide for detection of SNP TSC0027874
ctctacgccttat

SEQ ID NO: 111627 - DNA, 13 bp, Artificial Sequence
  Oligonucleotide for detection of SNP TSC0027874
ttttgcgttttat

SEQ ID NO: 111628 - DNA, 13 bp, Artificial Sequence
  Oligonucleotide for detection of SNP TSC0027874
ataaaacgcaaaa

SEQ ID NO: 111629 - DNA, 13 bp, Artificial Sequence
  Oligonucleotide for detection of SNP TSC0027877
tttttatgtatta

SEQ ID NO: 111630 - DNA, 13 bp, Artificial Sequence
  Oligonucleotide for detection of SNP TSC0027877
taatacataaaaa

SEQ ID NO: 111631 - DNA, 13 bp, Artificial Sequence
  Oligonucleotide for detection of SNP TSC0027877
tttttacgtatta

SEQ ID NO: 111632 - DNA, 13 bp, Artificial Sequence
  Oligonucleotide for detection of SNP TSC0027877
taatacgtaaaaa

SEQ ID NO: 111633 - DNA, 13 bp, Artificial Sequence
  Oligonucleotide for detection of SNP TSC0027877
tgatatgtaaggg

SEQ ID NO: 111634 - DNA, 13 bp, Artificial Sequence
  Oligonucleotide for detection of SNP TSC0027877
cccttacatatca

SEQ ID NO: 111635 - DNA, 13 bp, Artificial Sequence
  Oligonucleotide for detection of SNP TSC0027877
tgatatataaggg

SEQ ID NO: 111636 - DNA, 13 bp, Artificial Sequence
  Oligonucleotide for detection of SNP TSC0027877
cccttatatatca

SEQ ID NO: 111637 - DNA, 13 bp, Artificial Sequence
  Oligonucleotide for detection of SNP TSC0027877
tgatacgtaaggg

SEQ ID NO: 111638 - DNA, 13 bp, Artificial Sequence
  Oligonucleotide for detection of SNP TSC0027877
cccttacgtatca

SEQ ID NO: 111639 - DNA, 13 bp, Artificial Sequence
  Oligonucleotide for detection of SNP TSC0027881
attattagaagta

SEQ ID NO: 111640 - DNA, 13 bp, Artificial Sequence
  Oligonucleotide for detection of SNP TSC0027881
tacttctaataat

SEQ ID NO: 111641 - DNA, 13 bp, Artificial Sequence
  Oligonucleotide for detection of SNP TSC0027881
attattggaagta

SEQ ID NO: 111642 - DNA, 13 bp, Artificial Sequence
  Oligonucleotide for detection of SNP TSC0027881
tacttccaataat

SEQ ID NO: 111643 - DNA, 13 bp, Artificial Sequence
  Oligonucleotide for detection of SNP TSC0027882
ttgggggtttgtt

SEQ ID NO: 111644 - DNA, 13 bp, Artificial Sequence
  Oligonucleotide for detection of SNP TSC0027882
aacaaacccccaa

SEQ ID NO: 111645 - DNA, 13 bp, Artificial Sequence
  Oligonucleotide for detection of SNP TSC0027882
ttggggatttgtt

SEQ ID NO: 111646 - DNA, 13 bp, Artificial Sequence
  Oligonucleotide for detection of SNP TSC0027882
aacaaatccccaa

SEQ ID NO: 111647 - DNA, 13 bp, Artificial Sequence
  Oligonucleotide for detection of SNP TSC0027882
tcgggggtttgtt

SEQ ID NO: 111648 - DNA, 13 bp, Artificial Sequence
  Oligonucleotide for detection of SNP TSC0027882
aacaaacccccga

SEQ ID NO: 111649 - DNA, 13 bp, Artificial Sequence
  Oligonucleotide for detection of SNP TSC0027882
tcggggatttgtt

SEQ ID NO: 111650 - DNA, 13 bp, Artificial Sequence
  Oligonucleotide for detection of SNP TSC0027882
aacaaatccccga

SEQ ID NO: 111651 - DNA, 13 bp, Artificial Sequence
  Oligonucleotide for detection of SNP TSC0027882
ttgggggttcgtt

SEQ ID NO: 111652 - DNA, 13 bp, Artificial Sequence
  Oligonucleotide for detection of SNP TSC0027882
aacgaacccccaa

SEQ ID NO: 111653 - DNA, 13 bp, Artificial Sequence
  Oligonucleotide for detection of SNP TSC0027882
ttggggattcgtt

SEQ ID NO: 111654 - DNA, 13 bp, Artificial Sequence
  Oligonucleotide for detection of SNP TSC0027882
aacgaatccccaa

SEQ ID NO: 111655 - DNA, 13 bp, Artificial Sequence
  Oligonucleotide for detection of SNP TSC0027882
tcgggggttcgtt

SEQ ID NO: 111656 - DNA, 13 bp, Artificial Sequence
  Oligonucleotide for detection of SNP TSC0027882
aacgaacccccga

SEQ ID NO: 111657 - DNA, 13 bp, Artificial Sequence
  Oligonucleotide for detection of SNP TSC0027882
tcggggattcgtt

SEQ ID NO: 111658 - DNA, 13 bp, Artificial Sequence
  Oligonucleotide for detection of SNP TSC0027882
aacgaatccccga

SEQ ID NO: 111659 - DNA, 13 bp, Artificial Sequence
  Oligonucleotide for detection of SNP TSC0027883
atatttatgtttg

SEQ ID NO: 111660 - DNA, 13 bp, Artificial Sequence
  Oligonucleotide for detection of SNP TSC0027883
caaacataaatat

SEQ ID NO: 111661 - DNA, 13 bp, Artificial Sequence
  Oligonucleotide for detection of SNP TSC0027883
atatttgtgtttg

SEQ ID NO: 111662 - DNA, 13 bp, Artificial Sequence
  Oligonucleotide for detection of SNP TSC0027883
caaacacaaatat

SEQ ID NO: 111663 - DNA, 13 bp, Artificial Sequence
  Oligonucleotide for detection of SNP TSC0027883
atattcgtgtttg

SEQ ID NO: 111664 - DNA, 13 bp, Artificial Sequence
  Oligonucleotide for detection of SNP TSC0027883
caaacacgaatat

SEQ ID NO: 111665 - DNA, 13 bp, Artificial Sequence
  Oligonucleotide for detection of SNP TSC0027883
taagtatgggtgt

SEQ ID NO: 111666 - DNA, 13 bp, Artificial Sequence
  Oligonucleotide for detection of SNP TSC0027883
acacccatactta

SEQ ID NO: 111667 - DNA, 13 bp, Artificial Sequence
  Oligonucleotide for detection of SNP TSC0027883
taagtacgggtgt

SEQ ID NO: 111668 - DNA, 13 bp, Artificial Sequence
  Oligonucleotide for detection of SNP TSC0027883
acacccgtactta

SEQ ID NO: 111669 - DNA, 13 bp, Artificial Sequence
  Oligonucleotide for detection of SNP TSC0027884
tggggttggtgty

SEQ ID NO: 111670 - DNA, 13 bp, Artificial Sequence
  Oligonucleotide for detection of SNP TSC0027884
racaccaacccca

SEQ ID NO: 111671 - DNA, 13 bp, Artificial Sequence
  Oligonucleotide for detection of SNP TSC0027884
tggggtcggtgty

SEQ ID NO: 111672 - DNA, 13 bp, Artificial Sequence
  Oligonucleotide for detection of SNP TSC0027884
racaccgacccca

SEQ ID NO: 111673 - DNA, 13 bp, Artificial Sequence
  Oligonucleotide for detection of SNP TSC0027884
tggggttggcgty

SEQ ID NO: 111674 - DNA, 13 bp, Artificial Sequence
  Oligonucleotide for detection of SNP TSC0027884
racgccaacccca

SEQ ID NO: 111675 - DNA, 13 bp, Artificial Sequence
  Oligonucleotide for detection of SNP TSC0027884
tggggtcggcgty

SEQ ID NO: 111676 - DNA, 13 bp, Artificial Sequence
  Oligonucleotide for detection of SNP TSC0027884
racgccgacccca

SEQ ID NO: 111677 - DNA, 13 bp, Artificial Sequence
  Oligonucleotide for detection of SNP TSC0027884
ggtgttggtttta

SEQ ID NO: 111678 - DNA, 13 bp, Artificial Sequence
  Oligonucleotide for detection of SNP TSC0027884
taaaaccaacacc

SEQ ID NO: 111679 - DNA, 13 bp, Artificial Sequence
  Oligonucleotide for detection of SNP TSC0027884
ggtgttagtttta

SEQ ID NO: 111680 - DNA, 13 bp, Artificial Sequence
  Oligonucleotide for detection of SNP TSC0027884
taaaactaacacc

SEQ ID NO: 111681 - DNA, 13 bp, Artificial Sequence
  Oligonucleotide for detection of SNP TSC0027884
ggcgttggtttta

SEQ ID NO: 111682 - DNA, 13 bp, Artificial Sequence
  Oligonucleotide for detection of SNP TSC0027884
taaaaccaacgcc

SEQ ID NO: 111683 - DNA, 13 bp, Artificial Sequence
  Oligonucleotide for detection of SNP TSC0027884
ggcgttagtttta

SEQ ID NO: 111684 - DNA, 13 bp, Artificial Sequence
  Oligonucleotide for detection of SNP TSC0027884
taaaactaacgcc

SEQ ID NO: 111685 - DNA, 13 bp, Artificial Sequence
  Oligonucleotide for detection of SNP TSC0027884
ggtgtcggtttta

SEQ ID NO: 111686 - DNA, 13 bp, Artificial Sequence
  Oligonucleotide for detection of SNP TSC0027884
taaaaccgacacc

SEQ ID NO: 111687 - DNA, 13 bp, Artificial Sequence
  Oligonucleotide for detection of SNP TSC0027884
ggcgtcggtttta

SEQ ID NO: 111688 - DNA, 13 bp, Artificial Sequence
  Oligonucleotide for detection of SNP TSC0027884
taaaaccgacgcc

SEQ ID NO: 111689 - DNA, 13 bp, Artificial Sequence
  Oligonucleotide for detection of SNP TSC0027885
tgggttggtttty

SEQ ID NO: 111690 - DNA, 13 bp, Artificial Sequence
  Oligonucleotide for detection of SNP TSC0027885
raaaaccaaccca

SEQ ID NO: 111691 - DNA, 13 bp, Artificial Sequence
  Oligonucleotide for detection of SNP TSC0027885
ggaagttagttta

SEQ ID NO: 111692 - DNA, 13 bp, Artificial Sequence
  Oligonucleotide for detection of SNP TSC0027885
taaactaacttcc

SEQ ID NO: 111693 - DNA, 13 bp, Artificial Sequence
  Oligonucleotide for detection of SNP TSC0027885
ggaagtaagttta

SEQ ID NO: 111694 - DNA, 13 bp, Artificial Sequence
  Oligonucleotide for detection of SNP TSC0027885
taaacttacttcc

SEQ ID NO: 111695 - DNA, 13 bp, Artificial Sequence
  Oligonucleotide for detection of SNP TSC0027886
taggttgtttgta

SEQ ID NO: 111696 - DNA, 13 bp, Artificial Sequence
  Oligonucleotide for detection of SNP TSC0027886
tacaaacaaccta

SEQ ID NO: 111697 - DNA, 13 bp, Artificial Sequence
  Oligonucleotide for detection of SNP TSC0027886
taggttatttgta

SEQ ID NO: 111698 - DNA, 13 bp, Artificial Sequence
  Oligonucleotide for detection of SNP TSC0027886
tacaaataaccta

SEQ ID NO: 111699 - DNA, 13 bp, Artificial Sequence
  Oligonucleotide for detection of SNP TSC0027888
gtttttgtatttt

SEQ ID NO: 111700 - DNA, 13 bp, Artificial Sequence
  Oligonucleotide for detection of SNP TSC0027888
aaaatacaaaaac

SEQ ID NO: 111701 - DNA, 13 bp, Artificial Sequence
  Oligonucleotide for detection of SNP TSC0027888
gttttcgtatttt

SEQ ID NO: 111702 - DNA, 13 bp, Artificial Sequence
  Oligonucleotide for detection of SNP TSC0027888
aaaatacgaaaac

SEQ ID NO: 111703 - DNA, 13 bp, Artificial Sequence
  Oligonucleotide for detection of SNP TSC0027888
aaaatgtgagagy

SEQ ID NO: 111704 - DNA, 13 bp, Artificial Sequence
  Oligonucleotide for detection of SNP TSC0027888
rctctcacatttt

SEQ ID NO: 111705 - DNA, 13 bp, Artificial Sequence
  Oligonucleotide for detection of SNP TSC0027888
aaaatgcgagagy

SEQ ID NO: 111706 - DNA, 13 bp, Artificial Sequence
  Oligonucleotide for detection of SNP TSC0027888
rctctcgcatttt

SEQ ID NO: 111707 - DNA, 13 bp, Artificial Sequence
  Oligonucleotide for detection of SNP TSC0027890
aagtatatataga

SEQ ID NO: 111708 - DNA, 13 bp, Artificial Sequence
  Oligonucleotide for detection of SNP TSC0027890
tctatatatactt

SEQ ID NO: 111709 - DNA, 13 bp, Artificial Sequence
  Oligonucleotide for detection of SNP TSC0027890
aagtatgtataga

SEQ ID NO: 111710 - DNA, 13 bp, Artificial Sequence
  Oligonucleotide for detection of SNP TSC0027890
tctatacatactt

SEQ ID NO: 111711 - DNA, 13 bp, Artificial Sequence
  Oligonucleotide for detection of SNP TSC0027891
tagtttagttgtt

SEQ ID NO: 111712 - DNA, 13 bp, Artificial Sequence
  Oligonucleotide for detection of SNP TSC0027891
aacaactaaacta

SEQ ID NO: 111713 - DNA, 13 bp, Artificial Sequence
  Oligonucleotide for detection of SNP TSC0027891
tagtttggttgtt

SEQ ID NO: 111714 - DNA, 13 bp, Artificial Sequence
  Oligonucleotide for detection of SNP TSC0027891
aacaaccaaacta

SEQ ID NO: 111715 - DNA, 13 bp, Artificial Sequence
  Oligonucleotide for detection of SNP TSC0027891
tagttcggttgtt

SEQ ID NO: 111716 - DNA, 13 bp, Artificial Sequence
  Oligonucleotide for detection of SNP TSC0027891
aacaaccgaacta

SEQ ID NO: 111717 - DNA, 13 bp, Artificial Sequence
  Oligonucleotide for detection of SNP TSC0027891
aataattggattg

SEQ ID NO: 111718 - DNA, 13 bp, Artificial Sequence
  Oligonucleotide for detection of SNP TSC0027891
caatccaattatt

SEQ ID NO: 111719 - DNA, 13 bp, Artificial Sequence
  Oligonucleotide for detection of SNP TSC0027891
aataatcggattg

SEQ ID NO: 111720 - DNA, 13 bp, Artificial Sequence
  Oligonucleotide for detection of SNP TSC0027891
caatccgattatt

SEQ ID NO: 111721 - DNA, 13 bp, Artificial Sequence
  Oligonucleotide for detection of SNP TSC0027894
tttgatgggtggg

SEQ ID NO: 111722 - DNA, 13 bp, Artificial Sequence
  Oligonucleotide for detection of SNP TSC0027894
cccacccatcaaa

SEQ ID NO: 111723 - DNA, 13 bp, Artificial Sequence
  Oligonucleotide for detection of SNP TSC0027894
tttgattggtggg

SEQ ID NO: 111724 - DNA, 13 bp, Artificial Sequence
  Oligonucleotide for detection of SNP TSC0027894
cccaccaatcaaa

SEQ ID NO: 111725 - DNA, 13 bp, Artificial Sequence
  Oligonucleotide for detection of SNP TSC0027894
tttatttattaaa

SEQ ID NO: 111726 - DNA, 13 bp, Artificial Sequence
  Oligonucleotide for detection of SNP TSC0027894
tttaataaataaa

SEQ ID NO: 111727 - DNA, 13 bp, Artificial Sequence
  Oligonucleotide for detection of SNP TSC0027896
tttattggtaaga

SEQ ID NO: 111728 - DNA, 13 bp, Artificial Sequence
  Oligonucleotide for detection of SNP TSC0027896
tcttaccaataaa

SEQ ID NO: 111729 - DNA, 13 bp, Artificial Sequence
  Oligonucleotide for detection of SNP TSC0027896
tttattagtaaga

SEQ ID NO: 111730 - DNA, 13 bp, Artificial Sequence
  Oligonucleotide for detection of SNP TSC0027896
tcttactaataaa

SEQ ID NO: 111731 - DNA, 13 bp, Artificial Sequence
  Oligonucleotide for detection of SNP TSC0027897
ttatttgaaaatt

SEQ ID NO: 111732 - DNA, 13 bp, Artificial Sequence
  Oligonucleotide for detection of SNP TSC0027897
aattttcaaataa

SEQ ID NO: 111733 - DNA, 13 bp, Artificial Sequence
  Oligonucleotide for detection of SNP TSC0027897
ttatttaaaaatt

SEQ ID NO: 111734 - DNA, 13 bp, Artificial Sequence
  Oligonucleotide for detection of SNP TSC0027897
aatttttaaataa

SEQ ID NO: 111735 - DNA, 13 bp, Artificial Sequence
  Oligonucleotide for detection of SNP TSC0027898
ttatatatattta

SEQ ID NO: 111736 - DNA, 13 bp, Artificial Sequence
  Oligonucleotide for detection of SNP TSC0027898
taaatatatataa

SEQ ID NO: 111737 - DNA, 13 bp, Artificial Sequence
  Oligonucleotide for detection of SNP TSC0027898
ttatatgtattta

SEQ ID NO: 111738 - DNA, 13 bp, Artificial Sequence
  Oligonucleotide for detection of SNP TSC0027898
taaatacatataa

SEQ ID NO: 111739 - DNA, 13 bp, Artificial Sequence
  Oligonucleotide for detection of SNP TSC0027898
ttatacgtattta

SEQ ID NO: 111740 - DNA, 13 bp, Artificial Sequence
  Oligonucleotide for detection of SNP TSC0027898
taaatacgtataa

SEQ ID NO: 111741 - DNA, 13 bp, Artificial Sequence
  Oligonucleotide for detection of SNP TSC0027898
taaatatgtatgg

SEQ ID NO: 111742 - DNA, 13 bp, Artificial Sequence
  Oligonucleotide for detection of SNP TSC0027898
ccatacatattta

SEQ ID NO: 111743 - DNA, 13 bp, Artificial Sequence
  Oligonucleotide for detection of SNP TSC0027898
taaatacgtatgg

SEQ ID NO: 111744 - DNA, 13 bp, Artificial Sequence
  Oligonucleotide for detection of SNP TSC0027898
ccatacgtattta

SEQ ID NO: 111745 - DNA, 13 bp, Artificial Sequence
  Oligonucleotide for detection of SNP TSC0027899
tataagatagttt

SEQ ID NO: 111746 - DNA, 13 bp, Artificial Sequence
  Oligonucleotide for detection of SNP TSC0027899
aaactatcttata

SEQ ID NO: 111747 - DNA, 13 bp, Artificial Sequence
  Oligonucleotide for detection of SNP TSC0027899
tataaggtagttt

SEQ ID NO: 111748 - DNA, 13 bp, Artificial Sequence
  Oligonucleotide for detection of SNP TSC0027899
aaactaccttata

SEQ ID NO: 111749 - DNA, 13 bp, Artificial Sequence
  Oligonucleotide for detection of SNP TSC0027901
aaaaaagttattt

SEQ ID NO: 111750 - DNA, 13 bp, Artificial Sequence
  Oligonucleotide for detection of SNP TSC0027901
aaataactttttt

SEQ ID NO: 111751 - DNA, 13 bp, Artificial Sequence
  Oligonucleotide for detection of SNP TSC0027902
tatgttatttata

SEQ ID NO: 111752 - DNA, 13 bp, Artificial Sequence
  Oligonucleotide for detection of SNP TSC0027902
tataaataacata

SEQ ID NO: 111753 - DNA, 13 bp, Artificial Sequence
  Oligonucleotide for detection of SNP TSC0027902
tatgttgtttata

SEQ ID NO: 111754 - DNA, 13 bp, Artificial Sequence
  Oligonucleotide for detection of SNP TSC0027902
tataaacaacata

SEQ ID NO: 111755 - DNA, 13 bp, Artificial Sequence
  Oligonucleotide for detection of SNP TSC0027902
tatgtcgtttata

SEQ ID NO: 111756 - DNA, 13 bp, Artificial Sequence
  Oligonucleotide for detection of SNP TSC0027902
tataaacgacata

SEQ ID NO: 111757 - DNA, 13 bp, Artificial Sequence
  Oligonucleotide for detection of SNP TSC0027902
tgtgaatggtata

SEQ ID NO: 111758 - DNA, 13 bp, Artificial Sequence
  Oligonucleotide for detection of SNP TSC0027902
tataccattcaca

SEQ ID NO: 111759 - DNA, 13 bp, Artificial Sequence
  Oligonucleotide for detection of SNP TSC0027902
tgtgaacggtata

SEQ ID NO: 111760 - DNA, 13 bp, Artificial Sequence
  Oligonucleotide for detection of SNP TSC0027902
tataccgttcaca

SEQ ID NO: 111761 - DNA, 13 bp, Artificial Sequence
  Oligonucleotide for detection of SNP TSC0027903
aggtttattttta

SEQ ID NO: 111762 - DNA, 13 bp, Artificial Sequence
  Oligonucleotide for detection of SNP TSC0027903
taaaaataaacct

SEQ ID NO: 111763 - DNA, 13 bp, Artificial Sequence
  Oligonucleotide for detection of SNP TSC0027903
aggtttgttttta

SEQ ID NO: 111764 - DNA, 13 bp, Artificial Sequence
  Oligonucleotide for detection of SNP TSC0027903
taaaaacaaacct

SEQ ID NO: 111765 - DNA, 13 bp, Artificial Sequence
  Oligonucleotide for detection of SNP TSC0027903
aggttcgttttta

SEQ ID NO: 111766 - DNA, 13 bp, Artificial Sequence
  Oligonucleotide for detection of SNP TSC0027903
taaaaacgaacct

SEQ ID NO: 111767 - DNA, 13 bp, Artificial Sequence
  Oligonucleotide for detection of SNP TSC0027903
tgagaatgagttt

SEQ ID NO: 111768 - DNA, 13 bp, Artificial Sequence
  Oligonucleotide for detection of SNP TSC0027903
aaactcattctca

SEQ ID NO: 111769 - DNA, 13 bp, Artificial Sequence
  Oligonucleotide for detection of SNP TSC0027903
tgagaacgagttt

SEQ ID NO: 111770 - DNA, 13 bp, Artificial Sequence
  Oligonucleotide for detection of SNP TSC0027903
aaactcgttctca

SEQ ID NO: 111771 - DNA, 13 bp, Artificial Sequence
  Oligonucleotide for detection of SNP TSC0027904
gtgttgtgggtta

SEQ ID NO: 111772 - DNA, 13 bp, Artificial Sequence
  Oligonucleotide for detection of SNP TSC0027904
taacccacaacac

SEQ ID NO: 111773 - DNA, 13 bp, Artificial Sequence
  Oligonucleotide for detection of SNP TSC0027904
gcgttgtgggtta

SEQ ID NO: 111774 - DNA, 13 bp, Artificial Sequence
  Oligonucleotide for detection of SNP TSC0027904
taacccacaacgc

SEQ ID NO: 111775 - DNA, 13 bp, Artificial Sequence
  Oligonucleotide for detection of SNP TSC0027904
gtgttgcgggtta

SEQ ID NO: 111776 - DNA, 13 bp, Artificial Sequence
  Oligonucleotide for detection of SNP TSC0027904
taacccgcaacac

SEQ ID NO: 111777 - DNA, 13 bp, Artificial Sequence
  Oligonucleotide for detection of SNP TSC0027904
gcgttgcgggtta

SEQ ID NO: 111778 - DNA, 13 bp, Artificial Sequence
  Oligonucleotide for detection of SNP TSC0027904
taacccgcaacgc

SEQ ID NO: 111779 - DNA, 13 bp, Artificial Sequence
  Oligonucleotide for detection of SNP TSC0027904
tgatttgtagtgy

SEQ ID NO: 111780 - DNA, 13 bp, Artificial Sequence
  Oligonucleotide for detection of SNP TSC0027904
rcactacaaatca

SEQ ID NO: 111781 - DNA, 13 bp, Artificial Sequence
  Oligonucleotide for detection of SNP TSC0027904
tgatttatagtgy

SEQ ID NO: 111782 - DNA, 13 bp, Artificial Sequence
  Oligonucleotide for detection of SNP TSC0027904
rcactataaatca

SEQ ID NO: 111783 - DNA, 13 bp, Artificial Sequence
  Oligonucleotide for detection of SNP TSC0027904
tgattcgtagtgy

SEQ ID NO: 111784 - DNA, 13 bp, Artificial Sequence
  Oligonucleotide for detection of SNP TSC0027904
rcactacgaatca

SEQ ID NO: 111785 - DNA, 13 bp, Artificial Sequence
  Oligonucleotide for detection of SNP TSC0027904
tgatttatagcgy

SEQ ID NO: 111786 - DNA, 13 bp, Artificial Sequence
  Oligonucleotide for detection of SNP TSC0027904
rcgctataaatca

SEQ ID NO: 111787 - DNA, 13 bp, Artificial Sequence
  Oligonucleotide for detection of SNP TSC0027904
tgatttgtagcgy

SEQ ID NO: 111788 - DNA, 13 bp, Artificial Sequence
  Oligonucleotide for detection of SNP TSC0027904
rcgctacaaatca

SEQ ID NO: 111789 - DNA, 13 bp, Artificial Sequence
  Oligonucleotide for detection of SNP TSC0027904
tgattcgtagcgy

SEQ ID NO: 111790 - DNA, 13 bp, Artificial Sequence
  Oligonucleotide for detection of SNP TSC0027904
rcgctacgaatca

SEQ ID NO: 111791 - DNA, 13 bp, Artificial Sequence
  Oligonucleotide for detection of SNP TSC0027905
ttatgggttgagg

SEQ ID NO: 111792 - DNA, 13 bp, Artificial Sequence
  Oligonucleotide for detection of SNP TSC0027905
cctcaacccataa

SEQ ID NO: 111793 - DNA, 13 bp, Artificial Sequence
  Oligonucleotide for detection of SNP TSC0027905
ttatggtttgagg

SEQ ID NO: 111794 - DNA, 13 bp, Artificial Sequence
  Oligonucleotide for detection of SNP TSC0027905
cctcaaaccataa

SEQ ID NO: 111795 - DNA, 13 bp, Artificial Sequence
  Oligonucleotide for detection of SNP TSC0027905
ttacgggttgagg

SEQ ID NO: 111796 - DNA, 13 bp, Artificial Sequence
  Oligonucleotide for detection of SNP TSC0027905
cctcaacccgtaa

SEQ ID NO: 111797 - DNA, 13 bp, Artificial Sequence
  Oligonucleotide for detection of SNP TSC0027905
ttacggtttgagg

SEQ ID NO: 111798 - DNA, 13 bp, Artificial Sequence
  Oligonucleotide for detection of SNP TSC0027905
cctcaaaccgtaa

SEQ ID NO: 111799 - DNA, 13 bp, Artificial Sequence
  Oligonucleotide for detection of SNP TSC0027905
ttttagtttgtga

SEQ ID NO: 111800 - DNA, 13 bp, Artificial Sequence
  Oligonucleotide for detection of SNP TSC0027905
tcacaaactaaaa

SEQ ID NO: 111801 - DNA, 13 bp, Artificial Sequence
  Oligonucleotide for detection of SNP TSC0027905
ttttagattgtga

SEQ ID NO: 111802 - DNA, 13 bp, Artificial Sequence
  Oligonucleotide for detection of SNP TSC0027905
tcacaatctaaaa

SEQ ID NO: 111803 - DNA, 13 bp, Artificial Sequence
  Oligonucleotide for detection of SNP TSC0027905
ttttagttcgtga

SEQ ID NO: 111804 - DNA, 13 bp, Artificial Sequence
  Oligonucleotide for detection of SNP TSC0027905
tcacgaactaaaa

SEQ ID NO: 111805 - DNA, 13 bp, Artificial Sequence
  Oligonucleotide for detection of SNP TSC0027905
ttttagatcgtga

SEQ ID NO: 111806 - DNA, 13 bp, Artificial Sequence
  Oligonucleotide for detection of SNP TSC0027905
tcacgatctaaaa

SEQ ID NO: 111807 - DNA, 13 bp, Artificial Sequence
  Oligonucleotide for detection of SNP TSC0027906
ttaggtgtgttga

SEQ ID NO: 111808 - DNA, 13 bp, Artificial Sequence
  Oligonucleotide for detection of SNP TSC0027906
tcaacacacctaa

SEQ ID NO: 111809 - DNA, 13 bp, Artificial Sequence
  Oligonucleotide for detection of SNP TSC0027906
ttaggtatgttga

SEQ ID NO: 111810 - DNA, 13 bp, Artificial Sequence
  Oligonucleotide for detection of SNP TSC0027906
tcaacatacctaa

SEQ ID NO: 111811 - DNA, 13 bp, Artificial Sequence
  Oligonucleotide for detection of SNP TSC0027907
gattggtttgtgg

SEQ ID NO: 111812 - DNA, 13 bp, Artificial Sequence
  Oligonucleotide for detection of SNP TSC0027907
ccacaaaccaatc

SEQ ID NO: 111813 - DNA, 13 bp, Artificial Sequence
  Oligonucleotide for detection of SNP TSC0027907
gattgggttgtgg

SEQ ID NO: 111814 - DNA, 13 bp, Artificial Sequence
  Oligonucleotide for detection of SNP TSC0027907
ccacaacccaatc

SEQ ID NO: 111815 - DNA, 13 bp, Artificial Sequence
  Oligonucleotide for detection of SNP TSC0027907
ttataggttagty

SEQ ID NO: 111816 - DNA, 13 bp, Artificial Sequence
  Oligonucleotide for detection of SNP TSC0027907
ractaacctataa

SEQ ID NO: 111817 - DNA, 13 bp, Artificial Sequence
  Oligonucleotide for detection of SNP TSC0027907
ttatagtttagty

SEQ ID NO: 111818 - DNA, 13 bp, Artificial Sequence
  Oligonucleotide for detection of SNP TSC0027907
ractaaactataa

SEQ ID NO: 111819 - DNA, 13 bp, Artificial Sequence
  Oligonucleotide for detection of SNP TSC0027908
gggaagggaaaty

SEQ ID NO: 111820 - DNA, 13 bp, Artificial Sequence
  Oligonucleotide for detection of SNP TSC0027908
ratttcccttccc

SEQ ID NO: 111821 - DNA, 13 bp, Artificial Sequence
  Oligonucleotide for detection of SNP TSC0027908
gggaagtgaaaty

SEQ ID NO: 111822 - DNA, 13 bp, Artificial Sequence
  Oligonucleotide for detection of SNP TSC0027908
ratttcacttccc

SEQ ID NO: 111823 - DNA, 13 bp, Artificial Sequence
  Oligonucleotide for detection of SNP TSC0027908
gatttttttttty

SEQ ID NO: 111824 - DNA, 13 bp, Artificial Sequence
  Oligonucleotide for detection of SNP TSC0027908
raaaaaaaaaatc

SEQ ID NO: 111825 - DNA, 13 bp, Artificial Sequence
  Oligonucleotide for detection of SNP TSC0027908
gattttattttty

SEQ ID NO: 111826 - DNA, 13 bp, Artificial Sequence
  Oligonucleotide for detection of SNP TSC0027908
raaaaataaaatc

SEQ ID NO: 111827 - DNA, 13 bp, Artificial Sequence
  Oligonucleotide for detection of SNP TSC0027912
tttgttatagtgg

SEQ ID NO: 111828 - DNA, 13 bp, Artificial Sequence
  Oligonucleotide for detection of SNP TSC0027912
ccactataacaaa

SEQ ID NO: 111829 - DNA, 13 bp, Artificial Sequence
  Oligonucleotide for detection of SNP TSC0027912
tttgttttagtgg

SEQ ID NO: 111830 - DNA, 13 bp, Artificial Sequence
  Oligonucleotide for detection of SNP TSC0027912
ccactaaaacaaa

SEQ ID NO: 111831 - DNA, 13 bp, Artificial Sequence
  Oligonucleotide for detection of SNP TSC0027912
ttattgtggtaag

SEQ ID NO: 111832 - DNA, 13 bp, Artificial Sequence
  Oligonucleotide for detection of SNP TSC0027912
cttaccacaataa

SEQ ID NO: 111833 - DNA, 13 bp, Artificial Sequence
  Oligonucleotide for detection of SNP TSC0027912
ttattgaggtaag

SEQ ID NO: 111834 - DNA, 13 bp, Artificial Sequence
  Oligonucleotide for detection of SNP TSC0027912
cttacctcaataa

SEQ ID NO: 111835 - DNA, 13 bp, Artificial Sequence
  Oligonucleotide for detection of SNP TSC0027916
attttgaggatgg

SEQ ID NO: 111836 - DNA, 13 bp, Artificial Sequence
  Oligonucleotide for detection of SNP TSC0027916
ccatcctcaaaat

SEQ ID NO: 111837 - DNA, 13 bp, Artificial Sequence
  Oligonucleotide for detection of SNP TSC0027916
attttggggatgg

SEQ ID NO: 111838 - DNA, 13 bp, Artificial Sequence
  Oligonucleotide for detection of SNP TSC0027916
ccatccccaaaat

SEQ ID NO: 111839 - DNA, 13 bp, Artificial Sequence
  Oligonucleotide for detection of SNP TSC0027916
attttgaggacgg

SEQ ID NO: 111840 - DNA, 13 bp, Artificial Sequence
  Oligonucleotide for detection of SNP TSC0027916
ccgtcctcaaaat

SEQ ID NO: 111841 - DNA, 13 bp, Artificial Sequence
  Oligonucleotide for detection of SNP TSC0027916
attttggggacgg

SEQ ID NO: 111842 - DNA, 13 bp, Artificial Sequence
  Oligonucleotide for detection of SNP TSC0027916
ccgtccccaaaat

SEQ ID NO: 111843 - DNA, 13 bp, Artificial Sequence
  Oligonucleotide for detection of SNP TSC0027917
tgaggatgggggy

SEQ ID NO: 111844 - DNA, 13 bp, Artificial Sequence
  Oligonucleotide for detection of SNP TSC0027917
rcccccatcctca

SEQ ID NO: 111845 - DNA, 13 bp, Artificial Sequence
  Oligonucleotide for detection of SNP TSC0027917
tgaggacgggggy

SEQ ID NO: 111846 - DNA, 13 bp, Artificial Sequence
  Oligonucleotide for detection of SNP TSC0027917
rcccccgtcctca

SEQ ID NO: 111847 - DNA, 13 bp, Artificial Sequence
  Oligonucleotide for detection of SNP TSC0027919
gtgttatggtgty

SEQ ID NO: 111848 - DNA, 13 bp, Artificial Sequence
  Oligonucleotide for detection of SNP TSC0027919
racaccataacac

SEQ ID NO: 111849 - DNA, 13 bp, Artificial Sequence
  Oligonucleotide for detection of SNP TSC0027919
gtgttacggtgty

SEQ ID NO: 111850 - DNA, 13 bp, Artificial Sequence
  Oligonucleotide for detection of SNP TSC0027919
racaccgtaacac

SEQ ID NO: 111851 - DNA, 13 bp, Artificial Sequence
  Oligonucleotide for detection of SNP TSC0027919
gatattgtagtay

SEQ ID NO: 111852 - DNA, 13 bp, Artificial Sequence
  Oligonucleotide for detection of SNP TSC0027919
rtactacaatatc

SEQ ID NO: 111853 - DNA, 13 bp, Artificial Sequence
  Oligonucleotide for detection of SNP TSC0027919
gatattatagtay

SEQ ID NO: 111854 - DNA, 13 bp, Artificial Sequence
  Oligonucleotide for detection of SNP TSC0027919
rtactataatatc

SEQ ID NO: 111855 - DNA, 13 bp, Artificial Sequence
  Oligonucleotide for detection of SNP TSC0027919
gatatcgtagtay

SEQ ID NO: 111856 - DNA, 13 bp, Artificial Sequence
  Oligonucleotide for detection of SNP TSC0027919
rtactacgatatc

SEQ ID NO: 111857 - DNA, 13 bp, Artificial Sequence
  Oligonucleotide for detection of SNP TSC0027920
ttaggtggggggg

SEQ ID NO: 111858 - DNA, 13 bp, Artificial Sequence
  Oligonucleotide for detection of SNP TSC0027920
cccccccacctaa

SEQ ID NO: 111859 - DNA, 13 bp, Artificial Sequence
  Oligonucleotide for detection of SNP TSC0027920
ttaggtagggggg

SEQ ID NO: 111860 - DNA, 13 bp, Artificial Sequence
  Oligonucleotide for detection of SNP TSC0027920
cccccctacctaa

SEQ ID NO: 111861 - DNA, 13 bp, Artificial Sequence
  Oligonucleotide for detection of SNP TSC0027922
ataaatattttgy

SEQ ID NO: 111862 - DNA, 13 bp, Artificial Sequence
  Oligonucleotide for detection of SNP TSC0027922
rcaaaatatttat

SEQ ID NO: 111863 - DNA, 13 bp, Artificial Sequence
  Oligonucleotide for detection of SNP TSC0027922
ataaattttttgy

SEQ ID NO: 111864 - DNA, 13 bp, Artificial Sequence
  Oligonucleotide for detection of SNP TSC0027922
rcaaaaaatttat

SEQ ID NO: 111865 - DNA, 13 bp, Artificial Sequence
  Oligonucleotide for detection of SNP TSC0027922
gtaagatgtttat

SEQ ID NO: 111866 - DNA, 13 bp, Artificial Sequence
  Oligonucleotide for detection of SNP TSC0027922
ataaacatcttac

SEQ ID NO: 111867 - DNA, 13 bp, Artificial Sequence
  Oligonucleotide for detection of SNP TSC0027922
gtaagaagtttat

SEQ ID NO: 111868 - DNA, 13 bp, Artificial Sequence
  Oligonucleotide for detection of SNP TSC0027922
ataaacttcttac

SEQ ID NO: 111869 - DNA, 13 bp, Artificial Sequence
  Oligonucleotide for detection of SNP TSC0027923
agatattgttatg

SEQ ID NO: 111870 - DNA, 13 bp, Artificial Sequence
  Oligonucleotide for detection of SNP TSC0027923
cataacaatatct

SEQ ID NO: 111871 - DNA, 13 bp, Artificial Sequence
  Oligonucleotide for detection of SNP TSC0027923
agatatcgttatg

SEQ ID NO: 111872 - DNA, 13 bp, Artificial Sequence
  Oligonucleotide for detection of SNP TSC0027923
cataacgatatct

SEQ ID NO: 111873 - DNA, 13 bp, Artificial Sequence
  Oligonucleotide for detection of SNP TSC0027923
agatattgttacg

SEQ ID NO: 111874 - DNA, 13 bp, Artificial Sequence
  Oligonucleotide for detection of SNP TSC0027923
cgtaacaatatct

SEQ ID NO: 111875 - DNA, 13 bp, Artificial Sequence
  Oligonucleotide for detection of SNP TSC0027923
agatatcgttacg

SEQ ID NO: 111876 - DNA, 13 bp, Artificial Sequence
  Oligonucleotide for detection of SNP TSC0027923
cgtaacgatatct

SEQ ID NO: 111877 - DNA, 13 bp, Artificial Sequence
  Oligonucleotide for detection of SNP TSC0027923
tgtagtggtgttt

SEQ ID NO: 111878 - DNA, 13 bp, Artificial Sequence
  Oligonucleotide for detection of SNP TSC0027923
aaacaccactaca

SEQ ID NO: 111879 - DNA, 13 bp, Artificial Sequence
  Oligonucleotide for detection of SNP TSC0027923
tgtagtagtgttt

SEQ ID NO: 111880 - DNA, 13 bp, Artificial Sequence
  Oligonucleotide for detection of SNP TSC0027923
aaacactactaca

SEQ ID NO: 111881 - DNA, 13 bp, Artificial Sequence
  Oligonucleotide for detection of SNP TSC0027923
cgtagtggtgttt

SEQ ID NO: 111882 - DNA, 13 bp, Artificial Sequence
  Oligonucleotide for detection of SNP TSC0027923
aaacaccactacg

SEQ ID NO: 111883 - DNA, 13 bp, Artificial Sequence
  Oligonucleotide for detection of SNP TSC0027923
cgtagtagtgttt

SEQ ID NO: 111884 - DNA, 13 bp, Artificial Sequence
  Oligonucleotide for detection of SNP TSC0027923
aaacactactacg

SEQ ID NO: 111885 - DNA, 13 bp, Artificial Sequence
  Oligonucleotide for detection of SNP TSC0027923
tgtagcggtgttt

SEQ ID NO: 111886 - DNA, 13 bp, Artificial Sequence
  Oligonucleotide for detection of SNP TSC0027923
aaacaccgctaca

SEQ ID NO: 111887 - DNA, 13 bp, Artificial Sequence
  Oligonucleotide for detection of SNP TSC0027923
cgtagcggtgttt

SEQ ID NO: 111888 - DNA, 13 bp, Artificial Sequence
  Oligonucleotide for detection of SNP TSC0027923
aaacaccgctacg

SEQ ID NO: 111889 - DNA, 13 bp, Artificial Sequence
  Oligonucleotide for detection of SNP TSC0027929
tttttaagaaaga

SEQ ID NO: 111890 - DNA, 13 bp, Artificial Sequence
  Oligonucleotide for detection of SNP TSC0027929
tctttcttaaaaa

SEQ ID NO: 111891 - DNA, 13 bp, Artificial Sequence
  Oligonucleotide for detection of SNP TSC0027929
tttttaggaaaga

SEQ ID NO: 111892 - DNA, 13 bp, Artificial Sequence
  Oligonucleotide for detection of SNP TSC0027929
tctttcctaaaaa

SEQ ID NO: 111893 - DNA, 13 bp, Artificial Sequence
  Oligonucleotide for detection of SNP TSC0027930
aaaattagaagag

SEQ ID NO: 111894 - DNA, 13 bp, Artificial Sequence
  Oligonucleotide for detection of SNP TSC0027930
ctcttctaatttt

SEQ ID NO: 111895 - DNA, 13 bp, Artificial Sequence
  Oligonucleotide for detection of SNP TSC0027930
aaaatttgaagag

SEQ ID NO: 111896 - DNA, 13 bp, Artificial Sequence
  Oligonucleotide for detection of SNP TSC0027930
ctcttcaaatttt

SEQ ID NO: 111897 - DNA, 13 bp, Artificial Sequence
  Oligonucleotide for detection of SNP TSC0027931
ataaatattagaa

SEQ ID NO: 111898 - DNA, 13 bp, Artificial Sequence
  Oligonucleotide for detection of SNP TSC0027931
ttctaatatttat

SEQ ID NO: 111899 - DNA, 13 bp, Artificial Sequence
  Oligonucleotide for detection of SNP TSC0027931
ataaatgttagaa

SEQ ID NO: 111900 - DNA, 13 bp, Artificial Sequence
  Oligonucleotide for detection of SNP TSC0027931
ttctaacatttat

SEQ ID NO: 111901 - DNA, 13 bp, Artificial Sequence
  Oligonucleotide for detection of SNP TSC0027931
ataaacgttagaa

SEQ ID NO: 111902 - DNA, 13 bp, Artificial Sequence
  Oligonucleotide for detection of SNP TSC0027931
ttctaacgtttat

SEQ ID NO: 111903 - DNA, 13 bp, Artificial Sequence
  Oligonucleotide for detection of SNP TSC0027931
ttttgatgtttat

SEQ ID NO: 111904 - DNA, 13 bp, Artificial Sequence
  Oligonucleotide for detection of SNP TSC0027931
ataaacatcaaaa

SEQ ID NO: 111905 - DNA, 13 bp, Artificial Sequence
  Oligonucleotide for detection of SNP TSC0027931
ttttgacgtttat

SEQ ID NO: 111906 - DNA, 13 bp, Artificial Sequence
  Oligonucleotide for detection of SNP TSC0027931
ataaacgtcaaaa

SEQ ID NO: 111907 - DNA, 13 bp, Artificial Sequence
  Oligonucleotide for detection of SNP TSC0027932
ggtttaaaataat

SEQ ID NO: 111908 - DNA, 13 bp, Artificial Sequence
  Oligonucleotide for detection of SNP TSC0027932
attattttaaacc

SEQ ID NO: 111909 - DNA, 13 bp, Artificial Sequence
  Oligonucleotide for detection of SNP TSC0027932
ggtttagaataat

SEQ ID NO: 111910 - DNA, 13 bp, Artificial Sequence
  Oligonucleotide for detection of SNP TSC0027932
attattctaaacc

SEQ ID NO: 111911 - DNA, 13 bp, Artificial Sequence
  Oligonucleotide for detection of SNP TSC0027933
agttaaaaatttt

SEQ ID NO: 111912 - DNA, 13 bp, Artificial Sequence
  Oligonucleotide for detection of SNP TSC0027933
aaaatttttaact

SEQ ID NO: 111913 - DNA, 13 bp, Artificial Sequence
  Oligonucleotide for detection of SNP TSC0027933
agttaagaatttt

SEQ ID NO: 111914 - DNA, 13 bp, Artificial Sequence
  Oligonucleotide for detection of SNP TSC0027933
aaaattcttaact

SEQ ID NO: 111915 - DNA, 13 bp, Artificial Sequence
  Oligonucleotide for detection of SNP TSC0027934
gggttggtagtta

SEQ ID NO: 111916 - DNA, 13 bp, Artificial Sequence
  Oligonucleotide for detection of SNP TSC0027934
taactaccaaccc

SEQ ID NO: 111917 - DNA, 13 bp, Artificial Sequence
  Oligonucleotide for detection of SNP TSC0027934
gggttgttagtta

SEQ ID NO: 111918 - DNA, 13 bp, Artificial Sequence
  Oligonucleotide for detection of SNP TSC0027934
taactaacaaccc

SEQ ID NO: 111919 - DNA, 13 bp, Artificial Sequence
  Oligonucleotide for detection of SNP TSC0027934
gggtcggtagtta

SEQ ID NO: 111920 - DNA, 13 bp, Artificial Sequence
  Oligonucleotide for detection of SNP TSC0027934
taactaccgaccc

SEQ ID NO: 111921 - DNA, 13 bp, Artificial Sequence
  Oligonucleotide for detection of SNP TSC0027934
gggtcgttagtta

SEQ ID NO: 111922 - DNA, 13 bp, Artificial Sequence
  Oligonucleotide for detection of SNP TSC0027934
taactaacgaccc

SEQ ID NO: 111923 - DNA, 13 bp, Artificial Sequence
  Oligonucleotide for detection of SNP TSC0027934
tagttattggtty

SEQ ID NO: 111924 - DNA, 13 bp, Artificial Sequence
  Oligonucleotide for detection of SNP TSC0027934
raaccaataacta

SEQ ID NO: 111925 - DNA, 13 bp, Artificial Sequence
  Oligonucleotide for detection of SNP TSC0027934
tagttaatggtty

SEQ ID NO: 111926 - DNA, 13 bp, Artificial Sequence
  Oligonucleotide for detection of SNP TSC0027934
raaccattaacta

SEQ ID NO: 111927 - DNA, 13 bp, Artificial Sequence
  Oligonucleotide for detection of SNP TSC0027934
tagttatcggtty

SEQ ID NO: 111928 - DNA, 13 bp, Artificial Sequence
  Oligonucleotide for detection of SNP TSC0027934
raaccgataacta

SEQ ID NO: 111929 - DNA, 13 bp, Artificial Sequence
  Oligonucleotide for detection of SNP TSC0027934
tagttaacggtty

SEQ ID NO: 111930 - DNA, 13 bp, Artificial Sequence
  Oligonucleotide for detection of SNP TSC0027934
raaccgttaacta

SEQ ID NO: 111931 - DNA, 13 bp, Artificial Sequence
  Oligonucleotide for detection of SNP TSC0027935
agtatgatattty

SEQ ID NO: 111932 - DNA, 13 bp, Artificial Sequence
  Oligonucleotide for detection of SNP TSC0027935
raaatatcatact

SEQ ID NO: 111933 - DNA, 13 bp, Artificial Sequence
  Oligonucleotide for detection of SNP TSC0027935
agtatggtattty

SEQ ID NO: 111934 - DNA, 13 bp, Artificial Sequence
  Oligonucleotide for detection of SNP TSC0027935
raaataccatact

SEQ ID NO: 111935 - DNA, 13 bp, Artificial Sequence
  Oligonucleotide for detection of SNP TSC0027936
ggatgttgaggta

SEQ ID NO: 111936 - DNA, 13 bp, Artificial Sequence
  Oligonucleotide for detection of SNP TSC0027936
tacctcaacatcc

SEQ ID NO: 111937 - DNA, 13 bp, Artificial Sequence
  Oligonucleotide for detection of SNP TSC0027936
ggatgtcgaggta

SEQ ID NO: 111938 - DNA, 13 bp, Artificial Sequence
  Oligonucleotide for detection of SNP TSC0027936
tacctcgacatcc

SEQ ID NO: 111939 - DNA, 13 bp, Artificial Sequence
  Oligonucleotide for detection of SNP TSC0027936
tgttttggtatty

SEQ ID NO: 111940 - DNA, 13 bp, Artificial Sequence
  Oligonucleotide for detection of SNP TSC0027936
raataccaaaaca

SEQ ID NO: 111941 - DNA, 13 bp, Artificial Sequence
  Oligonucleotide for detection of SNP TSC0027936
tgttttagtatty

SEQ ID NO: 111942 - DNA, 13 bp, Artificial Sequence
  Oligonucleotide for detection of SNP TSC0027936
raatactaaaaca

SEQ ID NO: 111943 - DNA, 13 bp, Artificial Sequence
  Oligonucleotide for detection of SNP TSC0027936
tgtttcggtatty

SEQ ID NO: 111944 - DNA, 13 bp, Artificial Sequence
  Oligonucleotide for detection of SNP TSC0027936
raataccgaaaca

SEQ ID NO: 111945 - DNA, 13 bp, Artificial Sequence
  Oligonucleotide for detection of SNP TSC0027942
tgttggggattay

SEQ ID NO: 111946 - DNA, 13 bp, Artificial Sequence
  Oligonucleotide for detection of SNP TSC0027942
rtaatccccaaca

SEQ ID NO: 111947 - DNA, 13 bp, Artificial Sequence
  Oligonucleotide for detection of SNP TSC0027942
tgttggagattay

SEQ ID NO: 111948 - DNA, 13 bp, Artificial Sequence
  Oligonucleotide for detection of SNP TSC0027942
rtaatctccaaca

SEQ ID NO: 111949 - DNA, 13 bp, Artificial Sequence
  Oligonucleotide for detection of SNP TSC0027943
agtttagaagaga

SEQ ID NO: 111950 - DNA, 13 bp, Artificial Sequence
  Oligonucleotide for detection of SNP TSC0027943
tctcttctaaact

SEQ ID NO: 111951 - DNA, 13 bp, Artificial Sequence
  Oligonucleotide for detection of SNP TSC0027943
agtttataagaga

SEQ ID NO: 111952 - DNA, 13 bp, Artificial Sequence
  Oligonucleotide for detection of SNP TSC0027943
tctcttataaact

SEQ ID NO: 111953 - DNA, 13 bp, Artificial Sequence
  Oligonucleotide for detection of SNP TSC0027943
ttttttttgagtt

SEQ ID NO: 111954 - DNA, 13 bp, Artificial Sequence
  Oligonucleotide for detection of SNP TSC0027943
aactcaaaaaaaa

SEQ ID NO: 111955 - DNA, 13 bp, Artificial Sequence
  Oligonucleotide for detection of SNP TSC0027944
ttttatgtgttay

SEQ ID NO: 111956 - DNA, 13 bp, Artificial Sequence
  Oligonucleotide for detection of SNP TSC0027944
rtaacacataaaa

SEQ ID NO: 111957 - DNA, 13 bp, Artificial Sequence
  Oligonucleotide for detection of SNP TSC0027944
ttttatttgttay

SEQ ID NO: 111958 - DNA, 13 bp, Artificial Sequence
  Oligonucleotide for detection of SNP TSC0027944
rtaacaaataaaa

SEQ ID NO: 111959 - DNA, 13 bp, Artificial Sequence
  Oligonucleotide for detection of SNP TSC0027944
gtagtatataaga

SEQ ID NO: 111960 - DNA, 13 bp, Artificial Sequence
  Oligonucleotide for detection of SNP TSC0027944
tcttatatactac

SEQ ID NO: 111961 - DNA, 13 bp, Artificial Sequence
  Oligonucleotide for detection of SNP TSC0027944
gtagtaaataaga

SEQ ID NO: 111962 - DNA, 13 bp, Artificial Sequence
  Oligonucleotide for detection of SNP TSC0027944
tcttatttactac

SEQ ID NO: 111963 - DNA, 13 bp, Artificial Sequence
  Oligonucleotide for detection of SNP TSC0027945
ggtaggtatatga

SEQ ID NO: 111964 - DNA, 13 bp, Artificial Sequence
  Oligonucleotide for detection of SNP TSC0027945
tcatatacctacc

SEQ ID NO: 111965 - DNA, 13 bp, Artificial Sequence
  Oligonucleotide for detection of SNP TSC0027945
ggtagggatatga

SEQ ID NO: 111966 - DNA, 13 bp, Artificial Sequence
  Oligonucleotide for detection of SNP TSC0027945
tcatatccctacc

SEQ ID NO: 111967 - DNA, 13 bp, Artificial Sequence
  Oligonucleotide for detection of SNP TSC0027945
ttatgtgtttgty

SEQ ID NO: 111968 - DNA, 13 bp, Artificial Sequence
  Oligonucleotide for detection of SNP TSC0027945
racaaacacataa

SEQ ID NO: 111969 - DNA, 13 bp, Artificial Sequence
  Oligonucleotide for detection of SNP TSC0027945
ttatgtttttgty

SEQ ID NO: 111970 - DNA, 13 bp, Artificial Sequence
  Oligonucleotide for detection of SNP TSC0027945
racaaaaacataa

SEQ ID NO: 111971 - DNA, 13 bp, Artificial Sequence
  Oligonucleotide for detection of SNP TSC0027949
gggattgtaattt

SEQ ID NO: 111972 - DNA, 13 bp, Artificial Sequence
  Oligonucleotide for detection of SNP TSC0027949
aaattacaatccc

SEQ ID NO: 111973 - DNA, 13 bp, Artificial Sequence
  Oligonucleotide for detection of SNP TSC0027949
gggattttaattt

SEQ ID NO: 111974 - DNA, 13 bp, Artificial Sequence
  Oligonucleotide for detection of SNP TSC0027949
aaattaaaatccc

SEQ ID NO: 111975 - DNA, 13 bp, Artificial Sequence
  Oligonucleotide for detection of SNP TSC0027949
aagttatagttty

SEQ ID NO: 111976 - DNA, 13 bp, Artificial Sequence
  Oligonucleotide for detection of SNP TSC0027949
raaactataactt

SEQ ID NO: 111977 - DNA, 13 bp, Artificial Sequence
  Oligonucleotide for detection of SNP TSC0027952
aaatttatttatt

SEQ ID NO: 111978 - DNA, 13 bp, Artificial Sequence
  Oligonucleotide for detection of SNP TSC0027952
aataaataaattt

SEQ ID NO: 111979 - DNA, 13 bp, Artificial Sequence
  Oligonucleotide for detection of SNP TSC0027952
aaatttgtttatt

SEQ ID NO: 111980 - DNA, 13 bp, Artificial Sequence
  Oligonucleotide for detection of SNP TSC0027952
aataaacaaattt

SEQ ID NO: 111981 - DNA, 13 bp, Artificial Sequence
  Oligonucleotide for detection of SNP TSC0027952
aaattcgtttatt

SEQ ID NO: 111982 - DNA, 13 bp, Artificial Sequence
  Oligonucleotide for detection of SNP TSC0027952
aataaacgaattt

SEQ ID NO: 111983 - DNA, 13 bp, Artificial Sequence
  Oligonucleotide for detection of SNP TSC0027952
aatgaatgaattt

SEQ ID NO: 111984 - DNA, 13 bp, Artificial Sequence
  Oligonucleotide for detection of SNP TSC0027952
aaattcattcatt

SEQ ID NO: 111985 - DNA, 13 bp, Artificial Sequence
  Oligonucleotide for detection of SNP TSC0027952
aatgaacgaattt

SEQ ID NO: 111986 - DNA, 13 bp, Artificial Sequence
  Oligonucleotide for detection of SNP TSC0027952
aaattcgttcatt

SEQ ID NO: 111987 - DNA, 13 bp, Artificial Sequence
  Oligonucleotide for detection of SNP TSC0027953
gaatttaatgtta

SEQ ID NO: 111988 - DNA, 13 bp, Artificial Sequence
  Oligonucleotide for detection of SNP TSC0027953
taacattaaattc

SEQ ID NO: 111989 - DNA, 13 bp, Artificial Sequence
  Oligonucleotide for detection of SNP TSC0027953
gaattttatgtta

SEQ ID NO: 111990 - DNA, 13 bp, Artificial Sequence
  Oligonucleotide for detection of SNP TSC0027953
taacataaaattc

SEQ ID NO: 111991 - DNA, 13 bp, Artificial Sequence
  Oligonucleotide for detection of SNP TSC0027953
taatattgagtty

SEQ ID NO: 111992 - DNA, 13 bp, Artificial Sequence
  Oligonucleotide for detection of SNP TSC0027953
raactcaatatta

SEQ ID NO: 111993 - DNA, 13 bp, Artificial Sequence
  Oligonucleotide for detection of SNP TSC0027953
taatatagagtty

SEQ ID NO: 111994 - DNA, 13 bp, Artificial Sequence
  Oligonucleotide for detection of SNP TSC0027953
raactctatatta

SEQ ID NO: 111995 - DNA, 13 bp, Artificial Sequence
  Oligonucleotide for detection of SNP TSC0027954
gttaaggattagt

SEQ ID NO: 111996 - DNA, 13 bp, Artificial Sequence
  Oligonucleotide for detection of SNP TSC0027954
actaatccttaac

SEQ ID NO: 111997 - DNA, 13 bp, Artificial Sequence
  Oligonucleotide for detection of SNP TSC0027954
gttaagtattagt

SEQ ID NO: 111998 - DNA, 13 bp, Artificial Sequence
  Oligonucleotide for detection of SNP TSC0027954
actaatacttaac

SEQ ID NO: 111999 - DNA, 13 bp, Artificial Sequence
  Oligonucleotide for detection of SNP TSC0027954
attgatttttggy

SEQ ID NO: 112000 - DNA, 13 bp, Artificial Sequence
  Oligonucleotide for detection of SNP TSC0027954
rccaaaaatcaat

SEQ ID NO: 112001 - DNA, 13 bp, Artificial Sequence
  Oligonucleotide for detection of SNP TSC0027954
attgatatttggy

SEQ ID NO: 112002 - DNA, 13 bp, Artificial Sequence
  Oligonucleotide for detection of SNP TSC0027954
rccaaatatcaat

SEQ ID NO: 112003 - DNA, 13 bp, Artificial Sequence
  Oligonucleotide for detection of SNP TSC0027956
ggaaggtagtgag

SEQ ID NO: 112004 - DNA, 13 bp, Artificial Sequence
  Oligonucleotide for detection of SNP TSC0027956
ctcactaccttcc

SEQ ID NO: 112005 - DNA, 13 bp, Artificial Sequence
  Oligonucleotide for detection of SNP TSC0027956
ggaagggagtgag

SEQ ID NO: 112006 - DNA, 13 bp, Artificial Sequence
  Oligonucleotide for detection of SNP TSC0027956
ctcactcccttcc

SEQ ID NO: 112007 - DNA, 13 bp, Artificial Sequence
  Oligonucleotide for detection of SNP TSC0027957
tatgaaggtttag

SEQ ID NO: 112008 - DNA, 13 bp, Artificial Sequence
  Oligonucleotide for detection of SNP TSC0027957
ctaaaccttcata

SEQ ID NO: 112009 - DNA, 13 bp, Artificial Sequence
  Oligonucleotide for detection of SNP TSC0027957
tatgaaagtttag

SEQ ID NO: 112010 - DNA, 13 bp, Artificial Sequence
  Oligonucleotide for detection of SNP TSC0027957
ctaaactttcata

SEQ ID NO: 112011 - DNA, 13 bp, Artificial Sequence
  Oligonucleotide for detection of SNP TSC0027958
ttagtttgttgaa

SEQ ID NO: 112012 - DNA, 13 bp, Artificial Sequence
  Oligonucleotide for detection of SNP TSC0027958
ttcaacaaactaa

SEQ ID NO: 112013 - DNA, 13 bp, Artificial Sequence
  Oligonucleotide for detection of SNP TSC0027958
ttagttcgttgaa

SEQ ID NO: 112014 - DNA, 13 bp, Artificial Sequence
  Oligonucleotide for detection of SNP TSC0027958
ttcaacgaactaa

SEQ ID NO: 112015 - DNA, 13 bp, Artificial Sequence
  Oligonucleotide for detection of SNP TSC0027958
tttaatgaattgg

SEQ ID NO: 112016 - DNA, 13 bp, Artificial Sequence
  Oligonucleotide for detection of SNP TSC0027958
ccaattcattaaa

SEQ ID NO: 112017 - DNA, 13 bp, Artificial Sequence
  Oligonucleotide for detection of SNP TSC0027958
tttaataaattgg

SEQ ID NO: 112018 - DNA, 13 bp, Artificial Sequence
  Oligonucleotide for detection of SNP TSC0027958
ccaatttattaaa

SEQ ID NO: 112019 - DNA, 13 bp, Artificial Sequence
  Oligonucleotide for detection of SNP TSC0027958
tttaacgaattgg

SEQ ID NO: 112020 - DNA, 13 bp, Artificial Sequence
  Oligonucleotide for detection of SNP TSC0027958
ccaattcgttaaa

SEQ ID NO: 112021 - DNA, 13 bp, Artificial Sequence
  Oligonucleotide for detection of SNP TSC0027959
taattaattttgg

SEQ ID NO: 112022 - DNA, 13 bp, Artificial Sequence
  Oligonucleotide for detection of SNP TSC0027959
ccaaaattaatta

SEQ ID NO: 112023 - DNA, 13 bp, Artificial Sequence
  Oligonucleotide for detection of SNP TSC0027959
taattatttttgg

SEQ ID NO: 112024 - DNA, 13 bp, Artificial Sequence
  Oligonucleotide for detection of SNP TSC0027959
ccaaaaataatta

SEQ ID NO: 112025 - DNA, 13 bp, Artificial Sequence
  Oligonucleotide for detection of SNP TSC0027959
ttaaaattaatta

SEQ ID NO: 112026 - DNA, 13 bp, Artificial Sequence
  Oligonucleotide for detection of SNP TSC0027959
taattaattttaa

SEQ ID NO: 112027 - DNA, 13 bp, Artificial Sequence
  Oligonucleotide for detection of SNP TSC0027959
ttaaaagtaatta

SEQ ID NO: 112028 - DNA, 13 bp, Artificial Sequence
  Oligonucleotide for detection of SNP TSC0027959
taattacttttaa

SEQ ID NO: 112029 - DNA, 13 bp, Artificial Sequence
  Oligonucleotide for detection of SNP TSC0027961
tttttttaagaty

SEQ ID NO: 112030 - DNA, 13 bp, Artificial Sequence
  Oligonucleotide for detection of SNP TSC0027961
ratcttaaaaaaa

SEQ ID NO: 112031 - DNA, 13 bp, Artificial Sequence
  Oligonucleotide for detection of SNP TSC0027961
ggtttttagagga

SEQ ID NO: 112032 - DNA, 13 bp, Artificial Sequence
  Oligonucleotide for detection of SNP TSC0027961
tcctctaaaaacc

SEQ ID NO: 112033 - DNA, 13 bp, Artificial Sequence
  Oligonucleotide for detection of SNP TSC0027961
ggttttaagagga

SEQ ID NO: 112034 - DNA, 13 bp, Artificial Sequence
  Oligonucleotide for detection of SNP TSC0027961
tcctcttaaaacc

SEQ ID NO: 112035 - DNA, 13 bp, Artificial Sequence
  Oligonucleotide for detection of SNP TSC0027962
tttaagggatttt

SEQ ID NO: 112036 - DNA, 13 bp, Artificial Sequence
  Oligonucleotide for detection of SNP TSC0027962
aaaatcccttaaa

SEQ ID NO: 112037 - DNA, 13 bp, Artificial Sequence
  Oligonucleotide for detection of SNP TSC0027963
atgtttataggtt

SEQ ID NO: 112038 - DNA, 13 bp, Artificial Sequence
  Oligonucleotide for detection of SNP TSC0027963
aacctataaacat

SEQ ID NO: 112039 - DNA, 13 bp, Artificial Sequence
  Oligonucleotide for detection of SNP TSC0027963
atgtttgtaggtt

SEQ ID NO: 112040 - DNA, 13 bp, Artificial Sequence
  Oligonucleotide for detection of SNP TSC0027963
aacctacaaacat

SEQ ID NO: 112041 - DNA, 13 bp, Artificial Sequence
  Oligonucleotide for detection of SNP TSC0027964
gtttatagttttt

SEQ ID NO: 112042 - DNA, 13 bp, Artificial Sequence
  Oligonucleotide for detection of SNP TSC0027964
aaaaactataaac

SEQ ID NO: 112043 - DNA, 13 bp, Artificial Sequence
  Oligonucleotide for detection of SNP TSC0027964
gtttatggttttt

SEQ ID NO: 112044 - DNA, 13 bp, Artificial Sequence
  Oligonucleotide for detection of SNP TSC0027964
aaaaaccataaac

SEQ ID NO: 112045 - DNA, 13 bp, Artificial Sequence
  Oligonucleotide for detection of SNP TSC0027964
gtttacggttttt

SEQ ID NO: 112046 - DNA, 13 bp, Artificial Sequence
  Oligonucleotide for detection of SNP TSC0027964
aaaaaccgtaaac

SEQ ID NO: 112047 - DNA, 13 bp, Artificial Sequence
  Oligonucleotide for detection of SNP TSC0027964
aaaaattgtaagy

SEQ ID NO: 112048 - DNA, 13 bp, Artificial Sequence
  Oligonucleotide for detection of SNP TSC0027964
rcttacaattttt

SEQ ID NO: 112049 - DNA, 13 bp, Artificial Sequence
  Oligonucleotide for detection of SNP TSC0027964
aaaaatcgtaagy

SEQ ID NO: 112050 - DNA, 13 bp, Artificial Sequence
  Oligonucleotide for detection of SNP TSC0027964
rcttacgattttt

SEQ ID NO: 112051 - DNA, 13 bp, Artificial Sequence
  Oligonucleotide for detection of SNP TSC0027965
attattagtttty

SEQ ID NO: 112052 - DNA, 13 bp, Artificial Sequence
  Oligonucleotide for detection of SNP TSC0027965
raaaactaataat

SEQ ID NO: 112053 - DNA, 13 bp, Artificial Sequence
  Oligonucleotide for detection of SNP TSC0027965
attattggtttty

SEQ ID NO: 112054 - DNA, 13 bp, Artificial Sequence
  Oligonucleotide for detection of SNP TSC0027965
raaaaccaataat

SEQ ID NO: 112055 - DNA, 13 bp, Artificial Sequence
  Oligonucleotide for detection of SNP TSC0027969
agtttagtatttt

SEQ ID NO: 112056 - DNA, 13 bp, Artificial Sequence
  Oligonucleotide for detection of SNP TSC0027969
aaaatactaaact

SEQ ID NO: 112057 - DNA, 13 bp, Artificial Sequence
  Oligonucleotide for detection of SNP TSC0027969
agtttaatatttt

SEQ ID NO: 112058 - DNA, 13 bp, Artificial Sequence
  Oligonucleotide for detection of SNP TSC0027969
aaaatattaaact

SEQ ID NO: 112059 - DNA, 13 bp, Artificial Sequence
  Oligonucleotide for detection of SNP TSC0027970
gtgtgaattatta

SEQ ID NO: 112060 - DNA, 13 bp, Artificial Sequence
  Oligonucleotide for detection of SNP TSC0027970
taataattcacac

SEQ ID NO: 112061 - DNA, 13 bp, Artificial Sequence
  Oligonucleotide for detection of SNP TSC0027970
gtgtgagttatta

SEQ ID NO: 112062 - DNA, 13 bp, Artificial Sequence
  Oligonucleotide for detection of SNP TSC0027970
taataactcacac

SEQ ID NO: 112063 - DNA, 13 bp, Artificial Sequence
  Oligonucleotide for detection of SNP TSC0027970
gcgtgaattatta

SEQ ID NO: 112064 - DNA, 13 bp, Artificial Sequence
  Oligonucleotide for detection of SNP TSC0027970
taataattcacgc

SEQ ID NO: 112065 - DNA, 13 bp, Artificial Sequence
  Oligonucleotide for detection of SNP TSC0027970
gcgtgagttatta

SEQ ID NO: 112066 - DNA, 13 bp, Artificial Sequence
  Oligonucleotide for detection of SNP TSC0027970
taataactcacgc

SEQ ID NO: 112067 - DNA, 13 bp, Artificial Sequence
  Oligonucleotide for detection of SNP TSC0027971
ttttagattattt

SEQ ID NO: 112068 - DNA, 13 bp, Artificial Sequence
  Oligonucleotide for detection of SNP TSC0027971
aaataatctaaaa

SEQ ID NO: 112069 - DNA, 13 bp, Artificial Sequence
  Oligonucleotide for detection of SNP TSC0027971
ttttagtttattt

SEQ ID NO: 112070 - DNA, 13 bp, Artificial Sequence
  Oligonucleotide for detection of SNP TSC0027971
aaataaactaaaa

SEQ ID NO: 112071 - DNA, 13 bp, Artificial Sequence
  Oligonucleotide for detection of SNP TSC0027971
aagtggtttgggg

SEQ ID NO: 112072 - DNA, 13 bp, Artificial Sequence
  Oligonucleotide for detection of SNP TSC0027971
ccccaaaccactt

SEQ ID NO: 112073 - DNA, 13 bp, Artificial Sequence
  Oligonucleotide for detection of SNP TSC0027971
aagtgggttgggg

SEQ ID NO: 112074 - DNA, 13 bp, Artificial Sequence
  Oligonucleotide for detection of SNP TSC0027971
ccccaacccactt

SEQ ID NO: 112075 - DNA, 13 bp, Artificial Sequence
  Oligonucleotide for detection of SNP TSC0027972
ggttagggaaata

SEQ ID NO: 112076 - DNA, 13 bp, Artificial Sequence
  Oligonucleotide for detection of SNP TSC0027972
tatttccctaacc

SEQ ID NO: 112077 - DNA, 13 bp, Artificial Sequence
  Oligonucleotide for detection of SNP TSC0027972
ggttagagaaata

SEQ ID NO: 112078 - DNA, 13 bp, Artificial Sequence
  Oligonucleotide for detection of SNP TSC0027972
tatttctctaacc

SEQ ID NO: 112079 - DNA, 13 bp, Artificial Sequence
  Oligonucleotide for detection of SNP TSC0027974
gagggtgtgtata

SEQ ID NO: 112080 - DNA, 13 bp, Artificial Sequence
  Oligonucleotide for detection of SNP TSC0027974
tatacacaccctc

SEQ ID NO: 112081 - DNA, 13 bp, Artificial Sequence
  Oligonucleotide for detection of SNP TSC0027974
gagggtatgtata

SEQ ID NO: 112082 - DNA, 13 bp, Artificial Sequence
  Oligonucleotide for detection of SNP TSC0027974
tatacataccctc

SEQ ID NO: 112083 - DNA, 13 bp, Artificial Sequence
  Oligonucleotide for detection of SNP TSC0027982
tttggaatttatt

SEQ ID NO: 112084 - DNA, 13 bp, Artificial Sequence
  Oligonucleotide for detection of SNP TSC0027982
aataaattccaaa

SEQ ID NO: 112085 - DNA, 13 bp, Artificial Sequence
  Oligonucleotide for detection of SNP TSC0027982
tttggattttatt

SEQ ID NO: 112086 - DNA, 13 bp, Artificial Sequence
  Oligonucleotide for detection of SNP TSC0027982
aataaaatccaaa

SEQ ID NO: 112087 - DNA, 13 bp, Artificial Sequence
  Oligonucleotide for detection of SNP TSC0027982
ttcggaatttatt

SEQ ID NO: 112088 - DNA, 13 bp, Artificial Sequence
  Oligonucleotide for detection of SNP TSC0027982
aataaattccgaa

SEQ ID NO: 112089 - DNA, 13 bp, Artificial Sequence
  Oligonucleotide for detection of SNP TSC0027982
ttcggattttatt

SEQ ID NO: 112090 - DNA, 13 bp, Artificial Sequence
  Oligonucleotide for detection of SNP TSC0027982
aataaaatccgaa

SEQ ID NO: 112091 - DNA, 13 bp, Artificial Sequence
  Oligonucleotide for detection of SNP TSC0027982
agtaagttttgga

SEQ ID NO: 112092 - DNA, 13 bp, Artificial Sequence
  Oligonucleotide for detection of SNP TSC0027982
tccaaaacttact

SEQ ID NO: 112093 - DNA, 13 bp, Artificial Sequence
  Oligonucleotide for detection of SNP TSC0027982
agtaagatttgga

SEQ ID NO: 112094 - DNA, 13 bp, Artificial Sequence
  Oligonucleotide for detection of SNP TSC0027982
tccaaatcttact

SEQ ID NO: 112095 - DNA, 13 bp, Artificial Sequence
  Oligonucleotide for detection of SNP TSC0027982
agtaagtttcgga

SEQ ID NO: 112096 - DNA, 13 bp, Artificial Sequence
  Oligonucleotide for detection of SNP TSC0027982
tccgaaacttact

SEQ ID NO: 112097 - DNA, 13 bp, Artificial Sequence
  Oligonucleotide for detection of SNP TSC0027982
agtaagattcgga

SEQ ID NO: 112098 - DNA, 13 bp, Artificial Sequence
  Oligonucleotide for detection of SNP TSC0027982
tccgaatcttact

SEQ ID NO: 112099 - DNA, 13 bp, Artificial Sequence
  Oligonucleotide for detection of SNP TSC0027985
tagagagtttata

SEQ ID NO: 112100 - DNA, 13 bp, Artificial Sequence
  Oligonucleotide for detection of SNP TSC0027985
tataaactctcta

SEQ ID NO: 112101 - DNA, 13 bp, Artificial Sequence
  Oligonucleotide for detection of SNP TSC0027985
tagagaatttata

SEQ ID NO: 112102 - DNA, 13 bp, Artificial Sequence
  Oligonucleotide for detection of SNP TSC0027985
tataaattctcta

SEQ ID NO: 112103 - DNA, 13 bp, Artificial Sequence
  Oligonucleotide for detection of SNP TSC0027986
attttttgttgtg

SEQ ID NO: 112104 - DNA, 13 bp, Artificial Sequence
  Oligonucleotide for detection of SNP TSC0027986
cacaacaaaaaat

SEQ ID NO: 112105 - DNA, 13 bp, Artificial Sequence
  Oligonucleotide for detection of SNP TSC0027986
atttttcgttgtg

SEQ ID NO: 112106 - DNA, 13 bp, Artificial Sequence
  Oligonucleotide for detection of SNP TSC0027986
cacaacgaaaaat

SEQ ID NO: 112107 - DNA, 13 bp, Artificial Sequence
  Oligonucleotide for detection of SNP TSC0027986
tataatgggaaat

SEQ ID NO: 112108 - DNA, 13 bp, Artificial Sequence
  Oligonucleotide for detection of SNP TSC0027986
atttcccattata

SEQ ID NO: 112109 - DNA, 13 bp, Artificial Sequence
  Oligonucleotide for detection of SNP TSC0027986
tataataggaaat

SEQ ID NO: 112110 - DNA, 13 bp, Artificial Sequence
  Oligonucleotide for detection of SNP TSC0027986
atttcctattata

SEQ ID NO: 112111 - DNA, 13 bp, Artificial Sequence
  Oligonucleotide for detection of SNP TSC0027986
tataacgggaaat

SEQ ID NO: 112112 - DNA, 13 bp, Artificial Sequence
  Oligonucleotide for detection of SNP TSC0027986
atttcccgttata

SEQ ID NO: 112113 - DNA, 13 bp, Artificial Sequence
  Oligonucleotide for detection of SNP TSC0027988
ttgggtaaaataa

SEQ ID NO: 112114 - DNA, 13 bp, Artificial Sequence
  Oligonucleotide for detection of SNP TSC0027988
ttattttacccaa

SEQ ID NO: 112115 - DNA, 13 bp, Artificial Sequence
  Oligonucleotide for detection of SNP TSC0027988
ttgggttaaataa

SEQ ID NO: 112116 - DNA, 13 bp, Artificial Sequence
  Oligonucleotide for detection of SNP TSC0027988
ttatttaacccaa

SEQ ID NO: 112117 - DNA, 13 bp, Artificial Sequence
  Oligonucleotide for detection of SNP TSC0027988
ttattttgtttaa

SEQ ID NO: 112118 - DNA, 13 bp, Artificial Sequence
  Oligonucleotide for detection of SNP TSC0027988
ttaaacaaaataa

SEQ ID NO: 112119 - DNA, 13 bp, Artificial Sequence
  Oligonucleotide for detection of SNP TSC0027988
ttatttggtttaa

SEQ ID NO: 112120 - DNA, 13 bp, Artificial Sequence
  Oligonucleotide for detection of SNP TSC0027988
ttaaaccaaataa

SEQ ID NO: 112121 - DNA, 13 bp, Artificial Sequence
  Oligonucleotide for detection of SNP TSC0027991
aaagtggtttagt

SEQ ID NO: 112122 - DNA, 13 bp, Artificial Sequence
  Oligonucleotide for detection of SNP TSC0027991
actaaaccacttt

SEQ ID NO: 112123 - DNA, 13 bp, Artificial Sequence
  Oligonucleotide for detection of SNP TSC0027991
aaagtgatttagt

SEQ ID NO: 112124 - DNA, 13 bp, Artificial Sequence
  Oligonucleotide for detection of SNP TSC0027991
actaaatcacttt

SEQ ID NO: 112125 - DNA, 13 bp, Artificial Sequence
  Oligonucleotide for detection of SNP TSC0027992
gtaagtaattaag

SEQ ID NO: 112126 - DNA, 13 bp, Artificial Sequence
  Oligonucleotide for detection of SNP TSC0027992
cttaattacttac

SEQ ID NO: 112127 - DNA, 13 bp, Artificial Sequence
  Oligonucleotide for detection of SNP TSC0027992
gtaagtgattaag

SEQ ID NO: 112128 - DNA, 13 bp, Artificial Sequence
  Oligonucleotide for detection of SNP TSC0027992
cttaatcacttac

SEQ ID NO: 112129 - DNA, 13 bp, Artificial Sequence
  Oligonucleotide for detection of SNP TSC0028000
taaatagaataag

SEQ ID NO: 112130 - DNA, 13 bp, Artificial Sequence
  Oligonucleotide for detection of SNP TSC0028000
cttattctattta

SEQ ID NO: 112131 - DNA, 13 bp, Artificial Sequence
  Oligonucleotide for detection of SNP TSC0028000
taaataaaataag

SEQ ID NO: 112132 - DNA, 13 bp, Artificial Sequence
  Oligonucleotide for detection of SNP TSC0028000
cttattttattta

SEQ ID NO: 112133 - DNA, 13 bp, Artificial Sequence
  Oligonucleotide for detection of SNP TSC0028002
ttgaagggtaaga

SEQ ID NO: 112134 - DNA, 13 bp, Artificial Sequence
  Oligonucleotide for detection of SNP TSC0028002
tcttacccttcaa

SEQ ID NO: 112135 - DNA, 13 bp, Artificial Sequence
  Oligonucleotide for detection of SNP TSC0028002
ttgaagtgtaaga

SEQ ID NO: 112136 - DNA, 13 bp, Artificial Sequence
  Oligonucleotide for detection of SNP TSC0028002
tcttacacttcaa

SEQ ID NO: 112137 - DNA, 13 bp, Artificial Sequence
  Oligonucleotide for detection of SNP TSC0028003
taaaaataaaaty

SEQ ID NO: 112138 - DNA, 13 bp, Artificial Sequence
  Oligonucleotide for detection of SNP TSC0028003
rattttattttta

SEQ ID NO: 112139 - DNA, 13 bp, Artificial Sequence
  Oligonucleotide for detection of SNP TSC0028003
taaaaaaaaaaty

SEQ ID NO: 112140 - DNA, 13 bp, Artificial Sequence
  Oligonucleotide for detection of SNP TSC0028003
ratttttttttta

SEQ ID NO: 112141 - DNA, 13 bp, Artificial Sequence
  Oligonucleotide for detection of SNP TSC0028004
aatttttgggggy

SEQ ID NO: 112142 - DNA, 13 bp, Artificial Sequence
  Oligonucleotide for detection of SNP TSC0028004
rcccccaaaaatt

SEQ ID NO: 112143 - DNA, 13 bp, Artificial Sequence
  Oligonucleotide for detection of SNP TSC0028004
aattttcgggggy

SEQ ID NO: 112144 - DNA, 13 bp, Artificial Sequence
  Oligonucleotide for detection of SNP TSC0028004
rcccccgaaaatt

SEQ ID NO: 112145 - DNA, 13 bp, Artificial Sequence
  Oligonucleotide for detection of SNP TSC0028004
gtttttgaaggtt

SEQ ID NO: 112146 - DNA, 13 bp, Artificial Sequence
  Oligonucleotide for detection of SNP TSC0028004
aaccttcaaaaac

SEQ ID NO: 112147 - DNA, 13 bp, Artificial Sequence
  Oligonucleotide for detection of SNP TSC0028004
gtttttaaaggtt

SEQ ID NO: 112148 - DNA, 13 bp, Artificial Sequence
  Oligonucleotide for detection of SNP TSC0028004
aacctttaaaaac

SEQ ID NO: 112149 - DNA, 13 bp, Artificial Sequence
  Oligonucleotide for detection of SNP TSC0028004
gttttcgaaggtt

SEQ ID NO: 112150 - DNA, 13 bp, Artificial Sequence
  Oligonucleotide for detection of SNP TSC0028004
aaccttcgaaaac

SEQ ID NO: 112151 - DNA, 13 bp, Artificial Sequence
  Oligonucleotide for detection of SNP TSC0028006
ggggatttgggtt

SEQ ID NO: 112152 - DNA, 13 bp, Artificial Sequence
  Oligonucleotide for detection of SNP TSC0028006
aacccaaatcccc

SEQ ID NO: 112153 - DNA, 13 bp, Artificial Sequence
  Oligonucleotide for detection of SNP TSC0028006
ggggatgtgggtt

SEQ ID NO: 112154 - DNA, 13 bp, Artificial Sequence
  Oligonucleotide for detection of SNP TSC0028006
aacccacatcccc

SEQ ID NO: 112155 - DNA, 13 bp, Artificial Sequence
  Oligonucleotide for detection of SNP TSC0028006
agtttatatttty

SEQ ID NO: 112156 - DNA, 13 bp, Artificial Sequence
  Oligonucleotide for detection of SNP TSC0028006
raaaatataaact

SEQ ID NO: 112157 - DNA, 13 bp, Artificial Sequence
  Oligonucleotide for detection of SNP TSC0028010
tattttaggaaty

SEQ ID NO: 112158 - DNA, 13 bp, Artificial Sequence
  Oligonucleotide for detection of SNP TSC0028010
rattcctaaaata

SEQ ID NO: 112159 - DNA, 13 bp, Artificial Sequence
  Oligonucleotide for detection of SNP TSC0028010
tattttgggaaty

SEQ ID NO: 112160 - DNA, 13 bp, Artificial Sequence
  Oligonucleotide for detection of SNP TSC0028010
rattcccaaaata

SEQ ID NO: 112161 - DNA, 13 bp, Artificial Sequence
  Oligonucleotide for detection of SNP TSC0028015
atatggtgaatty

SEQ ID NO: 112162 - DNA, 13 bp, Artificial Sequence
  Oligonucleotide for detection of SNP TSC0028015
raattcaccatat

SEQ ID NO: 112163 - DNA, 13 bp, Artificial Sequence
  Oligonucleotide for detection of SNP TSC0028015
atatggggaatty

SEQ ID NO: 112164 - DNA, 13 bp, Artificial Sequence
  Oligonucleotide for detection of SNP TSC0028015
raattccccatat

SEQ ID NO: 112165 - DNA, 13 bp, Artificial Sequence
  Oligonucleotide for detection of SNP TSC0028015
atacggtgaatty

SEQ ID NO: 112166 - DNA, 13 bp, Artificial Sequence
  Oligonucleotide for detection of SNP TSC0028015
raattcaccgtat

SEQ ID NO: 112167 - DNA, 13 bp, Artificial Sequence
  Oligonucleotide for detection of SNP TSC0028015
atacggggaatty

SEQ ID NO: 112168 - DNA, 13 bp, Artificial Sequence
  Oligonucleotide for detection of SNP TSC0028015
raattccccgtat

SEQ ID NO: 112169 - DNA, 13 bp, Artificial Sequence
  Oligonucleotide for detection of SNP TSC0028015
atatggcgaatty

SEQ ID NO: 112170 - DNA, 13 bp, Artificial Sequence
  Oligonucleotide for detection of SNP TSC0028015
raattcgccatat

SEQ ID NO: 112171 - DNA, 13 bp, Artificial Sequence
  Oligonucleotide for detection of SNP TSC0028015
atacggcgaatty

SEQ ID NO: 112172 - DNA, 13 bp, Artificial Sequence
  Oligonucleotide for detection of SNP TSC0028015
raattcgccgtat

SEQ ID NO: 112173 - DNA, 13 bp, Artificial Sequence
  Oligonucleotide for detection of SNP TSC0028015
gggtttgttgtgt

SEQ ID NO: 112174 - DNA, 13 bp, Artificial Sequence
  Oligonucleotide for detection of SNP TSC0028015
acacaacaaaccc

SEQ ID NO: 112175 - DNA, 13 bp, Artificial Sequence
  Oligonucleotide for detection of SNP TSC0028015
gggttttttgtgt

SEQ ID NO: 112176 - DNA, 13 bp, Artificial Sequence
  Oligonucleotide for detection of SNP TSC0028015
acacaaaaaaccc

SEQ ID NO: 112177 - DNA, 13 bp, Artificial Sequence
  Oligonucleotide for detection of SNP TSC0028015
gggttcgttgtgt

SEQ ID NO: 112178 - DNA, 13 bp, Artificial Sequence
  Oligonucleotide for detection of SNP TSC0028015
acacaacgaaccc

SEQ ID NO: 112179 - DNA, 13 bp, Artificial Sequence
  Oligonucleotide for detection of SNP TSC0028015
gggtttttcgtgt

SEQ ID NO: 112180 - DNA, 13 bp, Artificial Sequence
  Oligonucleotide for detection of SNP TSC0028015
acacgaaaaaccc

SEQ ID NO: 112181 - DNA, 13 bp, Artificial Sequence
  Oligonucleotide for detection of SNP TSC0028015
gggtttgtcgtgt

SEQ ID NO: 112182 - DNA, 13 bp, Artificial Sequence
  Oligonucleotide for detection of SNP TSC0028015
acacgacaaaccc

SEQ ID NO: 112183 - DNA, 13 bp, Artificial Sequence
  Oligonucleotide for detection of SNP TSC0028015
gggttcgtcgtgt

SEQ ID NO: 112184 - DNA, 13 bp, Artificial Sequence
  Oligonucleotide for detection of SNP TSC0028015
acacgacgaaccc

SEQ ID NO: 112185 - DNA, 13 bp, Artificial Sequence
  Oligonucleotide for detection of SNP TSC0028020
attaaagagttag

SEQ ID NO: 112186 - DNA, 13 bp, Artificial Sequence
  Oligonucleotide for detection of SNP TSC0028020
ctaactctttaat

SEQ ID NO: 112187 - DNA, 13 bp, Artificial Sequence
  Oligonucleotide for detection of SNP TSC0028020
attaaaaagttag

SEQ ID NO: 112188 - DNA, 13 bp, Artificial Sequence
  Oligonucleotide for detection of SNP TSC0028020
ctaactttttaat

SEQ ID NO: 112189 - DNA, 13 bp, Artificial Sequence
  Oligonucleotide for detection of SNP TSC0028021
gagagatatattt

SEQ ID NO: 112190 - DNA, 13 bp, Artificial Sequence
  Oligonucleotide for detection of SNP TSC0028021
aaatatatctctc

SEQ ID NO: 112191 - DNA, 13 bp, Artificial Sequence
  Oligonucleotide for detection of SNP TSC0028021
gagagagatattt

SEQ ID NO: 112192 - DNA, 13 bp, Artificial Sequence
  Oligonucleotide for detection of SNP TSC0028021
aaatatctctctc

SEQ ID NO: 112193 - DNA, 13 bp, Artificial Sequence
  Oligonucleotide for detection of SNP TSC0028021
aaatgtgttttty

SEQ ID NO: 112194 - DNA, 13 bp, Artificial Sequence
  Oligonucleotide for detection of SNP TSC0028021
raaaaacacattt

SEQ ID NO: 112195 - DNA, 13 bp, Artificial Sequence
  Oligonucleotide for detection of SNP TSC0028021
aaatgttttttty

SEQ ID NO: 112196 - DNA, 13 bp, Artificial Sequence
  Oligonucleotide for detection of SNP TSC0028021
raaaaaaacattt

SEQ ID NO: 112197 - DNA, 13 bp, Artificial Sequence
  Oligonucleotide for detection of SNP TSC0028023
agatttaggaaaa

SEQ ID NO: 112198 - DNA, 13 bp, Artificial Sequence
  Oligonucleotide for detection of SNP TSC0028023
ttttcctaaatct

SEQ ID NO: 112199 - DNA, 13 bp, Artificial Sequence
  Oligonucleotide for detection of SNP TSC0028023
agattttggaaaa

SEQ ID NO: 112200 - DNA, 13 bp, Artificial Sequence
  Oligonucleotide for detection of SNP TSC0028023
ttttccaaaatct

SEQ ID NO: 112201 - DNA, 13 bp, Artificial Sequence
  Oligonucleotide for detection of SNP TSC0028024
atttggggtggtg

SEQ ID NO: 112202 - DNA, 13 bp, Artificial Sequence
  Oligonucleotide for detection of SNP TSC0028024
caccaccccaaat

SEQ ID NO: 112203 - DNA, 13 bp, Artificial Sequence
  Oligonucleotide for detection of SNP TSC0028024
atttggagtggtg

SEQ ID NO: 112204 - DNA, 13 bp, Artificial Sequence
  Oligonucleotide for detection of SNP TSC0028024
caccactccaaat

SEQ ID NO: 112205 - DNA, 13 bp, Artificial Sequence
  Oligonucleotide for detection of SNP TSC0028024
attcggggtggtg

SEQ ID NO: 112206 - DNA, 13 bp, Artificial Sequence
  Oligonucleotide for detection of SNP TSC0028024
caccaccccgaat

SEQ ID NO: 112207 - DNA, 13 bp, Artificial Sequence
  Oligonucleotide for detection of SNP TSC0028024
attcggagtggtg

SEQ ID NO: 112208 - DNA, 13 bp, Artificial Sequence
  Oligonucleotide for detection of SNP TSC0028024
caccactccgaat

SEQ ID NO: 112209 - DNA, 13 bp, Artificial Sequence
  Oligonucleotide for detection of SNP TSC0028024
atttggggcggtg

SEQ ID NO: 112210 - DNA, 13 bp, Artificial Sequence
  Oligonucleotide for detection of SNP TSC0028024
caccgccccaaat

SEQ ID NO: 112211 - DNA, 13 bp, Artificial Sequence
  Oligonucleotide for detection of SNP TSC0028024
atttggagcggtg

SEQ ID NO: 112212 - DNA, 13 bp, Artificial Sequence
  Oligonucleotide for detection of SNP TSC0028024
caccgctccaaat

SEQ ID NO: 112213 - DNA, 13 bp, Artificial Sequence
  Oligonucleotide for detection of SNP TSC0028024
attcggggcggtg

SEQ ID NO: 112214 - DNA, 13 bp, Artificial Sequence
  Oligonucleotide for detection of SNP TSC0028024
caccgccccgaat

SEQ ID NO: 112215 - DNA, 13 bp, Artificial Sequence
  Oligonucleotide for detection of SNP TSC0028024
attcggagcggtg

SEQ ID NO: 112216 - DNA, 13 bp, Artificial Sequence
  Oligonucleotide for detection of SNP TSC0028024
caccgctccgaat

SEQ ID NO: 112217 - DNA, 13 bp, Artificial Sequence
  Oligonucleotide for detection of SNP TSC0028026
aggaagtgggggy

SEQ ID NO: 112218 - DNA, 13 bp, Artificial Sequence
  Oligonucleotide for detection of SNP TSC0028026
rcccccacttcct

SEQ ID NO: 112219 - DNA, 13 bp, Artificial Sequence
  Oligonucleotide for detection of SNP TSC0028026
aggaagcgggggy

SEQ ID NO: 112220 - DNA, 13 bp, Artificial Sequence
  Oligonucleotide for detection of SNP TSC0028026
rcccccgcttcct

SEQ ID NO: 112221 - DNA, 13 bp, Artificial Sequence
  Oligonucleotide for detection of SNP TSC0028027
ggggtatgagata

SEQ ID NO: 112222 - DNA, 13 bp, Artificial Sequence
  Oligonucleotide for detection of SNP TSC0028027
tatctcatacccc

SEQ ID NO: 112223 - DNA, 13 bp, Artificial Sequence
  Oligonucleotide for detection of SNP TSC0028027
ggggtacgagata

SEQ ID NO: 112224 - DNA, 13 bp, Artificial Sequence
  Oligonucleotide for detection of SNP TSC0028027
tatctcgtacccc

SEQ ID NO: 112225 - DNA, 13 bp, Artificial Sequence
  Oligonucleotide for detection of SNP TSC0028027
tattttgtgttty

SEQ ID NO: 112226 - DNA, 13 bp, Artificial Sequence
  Oligonucleotide for detection of SNP TSC0028027
raaacacaaaata

SEQ ID NO: 112227 - DNA, 13 bp, Artificial Sequence
  Oligonucleotide for detection of SNP TSC0028027
tattttatgttty

SEQ ID NO: 112228 - DNA, 13 bp, Artificial Sequence
  Oligonucleotide for detection of SNP TSC0028027
raaacataaaata

SEQ ID NO: 112229 - DNA, 13 bp, Artificial Sequence
  Oligonucleotide for detection of SNP TSC0028027
tatttcgtgttty

SEQ ID NO: 112230 - DNA, 13 bp, Artificial Sequence
  Oligonucleotide for detection of SNP TSC0028027
raaacacgaaata

SEQ ID NO: 112231 - DNA, 13 bp, Artificial Sequence
  Oligonucleotide for detection of SNP TSC0028035
tagtgagtagggt

SEQ ID NO: 112232 - DNA, 13 bp, Artificial Sequence
  Oligonucleotide for detection of SNP TSC0028035
accctactcacta

SEQ ID NO: 112233 - DNA, 13 bp, Artificial Sequence
  Oligonucleotide for detection of SNP TSC0028035
tagtgattagggt

SEQ ID NO: 112234 - DNA, 13 bp, Artificial Sequence
  Oligonucleotide for detection of SNP TSC0028035
accctaatcacta

SEQ ID NO: 112235 - DNA, 13 bp, Artificial Sequence
  Oligonucleotide for detection of SNP TSC0028035
attttgattattg

SEQ ID NO: 112236 - DNA, 13 bp, Artificial Sequence
  Oligonucleotide for detection of SNP TSC0028035
caataatcaaaat

SEQ ID NO: 112237 - DNA, 13 bp, Artificial Sequence
  Oligonucleotide for detection of SNP TSC0028036
agtattagttttg

SEQ ID NO: 112238 - DNA, 13 bp, Artificial Sequence
  Oligonucleotide for detection of SNP TSC0028036
caaaactaatact

SEQ ID NO: 112239 - DNA, 13 bp, Artificial Sequence
  Oligonucleotide for detection of SNP TSC0028036
agtattggttttg

SEQ ID NO: 112240 - DNA, 13 bp, Artificial Sequence
  Oligonucleotide for detection of SNP TSC0028036
caaaaccaatact

SEQ ID NO: 112241 - DNA, 13 bp, Artificial Sequence
  Oligonucleotide for detection of SNP TSC0028037
tttgttaatttay

SEQ ID NO: 112242 - DNA, 13 bp, Artificial Sequence
  Oligonucleotide for detection of SNP TSC0028037
rtaaattaacaaa

SEQ ID NO: 112243 - DNA, 13 bp, Artificial Sequence
  Oligonucleotide for detection of SNP TSC0028037
tttgtttatttay

SEQ ID NO: 112244 - DNA, 13 bp, Artificial Sequence
  Oligonucleotide for detection of SNP TSC0028037
rtaaataaacaaa

SEQ ID NO: 112245 - DNA, 13 bp, Artificial Sequence
  Oligonucleotide for detection of SNP TSC0028037
gtaaattgataga

SEQ ID NO: 112246 - DNA, 13 bp, Artificial Sequence
  Oligonucleotide for detection of SNP TSC0028037
tctatcaatttac

SEQ ID NO: 112247 - DNA, 13 bp, Artificial Sequence
  Oligonucleotide for detection of SNP TSC0028037
gtaaatagataga

SEQ ID NO: 112248 - DNA, 13 bp, Artificial Sequence
  Oligonucleotide for detection of SNP TSC0028037
tctatctatttac

SEQ ID NO: 112249 - DNA, 13 bp, Artificial Sequence
  Oligonucleotide for detection of SNP TSC0028039
gttaagtttttay

SEQ ID NO: 112250 - DNA, 13 bp, Artificial Sequence
  Oligonucleotide for detection of SNP TSC0028039
rtaaaaacttaac

SEQ ID NO: 112251 - DNA, 13 bp, Artificial Sequence
  Oligonucleotide for detection of SNP TSC0028039
gttaaggttttay

SEQ ID NO: 112252 - DNA, 13 bp, Artificial Sequence
  Oligonucleotide for detection of SNP TSC0028039
rtaaaaccttaac

SEQ ID NO: 112253 - DNA, 13 bp, Artificial Sequence
  Oligonucleotide for detection of SNP TSC0028039
gtgagggtttagy

SEQ ID NO: 112254 - DNA, 13 bp, Artificial Sequence
  Oligonucleotide for detection of SNP TSC0028039
rctaaaccctcac

SEQ ID NO: 112255 - DNA, 13 bp, Artificial Sequence
  Oligonucleotide for detection of SNP TSC0028039
gtgaggttttagy

SEQ ID NO: 112256 - DNA, 13 bp, Artificial Sequence
  Oligonucleotide for detection of SNP TSC0028039
rctaaaacctcac

SEQ ID NO: 112257 - DNA, 13 bp, Artificial Sequence
  Oligonucleotide for detection of SNP TSC0028043
tttatcgttagta

SEQ ID NO: 112258 - DNA, 13 bp, Artificial Sequence
  Oligonucleotide for detection of SNP TSC0028043
tactaacgataaa

SEQ ID NO: 112259 - DNA, 13 bp, Artificial Sequence
  Oligonucleotide for detection of SNP TSC0028043
tgttagtgatgaa

SEQ ID NO: 112260 - DNA, 13 bp, Artificial Sequence
  Oligonucleotide for detection of SNP TSC0028043
ttcatcactaaca

SEQ ID NO: 112261 - DNA, 13 bp, Artificial Sequence
  Oligonucleotide for detection of SNP TSC0028043
tgttagcgatgaa

SEQ ID NO: 112262 - DNA, 13 bp, Artificial Sequence
  Oligonucleotide for detection of SNP TSC0028043
ttcatcgctaaca

SEQ ID NO: 112263 - DNA, 13 bp, Artificial Sequence
  Oligonucleotide for detection of SNP TSC0028045
aaggtatatgaag

SEQ ID NO: 112264 - DNA, 13 bp, Artificial Sequence
  Oligonucleotide for detection of SNP TSC0028045
cttcatatacctt

SEQ ID NO: 112265 - DNA, 13 bp, Artificial Sequence
  Oligonucleotide for detection of SNP TSC0028045
aaggtagatgaag

SEQ ID NO: 112266 - DNA, 13 bp, Artificial Sequence
  Oligonucleotide for detection of SNP TSC0028045
cttcatctacctt

SEQ ID NO: 112267 - DNA, 13 bp, Artificial Sequence
  Oligonucleotide for detection of SNP TSC0028046
gttaaaatatgtt

SEQ ID NO: 112268 - DNA, 13 bp, Artificial Sequence
  Oligonucleotide for detection of SNP TSC0028046
aacatattttaac

SEQ ID NO: 112269 - DNA, 13 bp, Artificial Sequence
  Oligonucleotide for detection of SNP TSC0028046
gttaaagtatgtt

SEQ ID NO: 112270 - DNA, 13 bp, Artificial Sequence
  Oligonucleotide for detection of SNP TSC0028046
aacatactttaac

SEQ ID NO: 112271 - DNA, 13 bp, Artificial Sequence
  Oligonucleotide for detection of SNP TSC0028049
agtatttaaaaaa

SEQ ID NO: 112272 - DNA, 13 bp, Artificial Sequence
  Oligonucleotide for detection of SNP TSC0028049
ttttttaaatact

SEQ ID NO: 112273 - DNA, 13 bp, Artificial Sequence
  Oligonucleotide for detection of SNP TSC0028049
agtattaaaaaaa

SEQ ID NO: 112274 - DNA, 13 bp, Artificial Sequence
  Oligonucleotide for detection of SNP TSC0028049
tttttttaatact

SEQ ID NO: 112275 - DNA, 13 bp, Artificial Sequence
  Oligonucleotide for detection of SNP TSC0028053
gaagtgagaatag

SEQ ID NO: 112276 - DNA, 13 bp, Artificial Sequence
  Oligonucleotide for detection of SNP TSC0028053
ctattctcacttc

SEQ ID NO: 112277 - DNA, 13 bp, Artificial Sequence
  Oligonucleotide for detection of SNP TSC0028053
gaagtgggaatag

SEQ ID NO: 112278 - DNA, 13 bp, Artificial Sequence
  Oligonucleotide for detection of SNP TSC0028053
ctattcccacttc

SEQ ID NO: 112279 - DNA, 13 bp, Artificial Sequence
  Oligonucleotide for detection of SNP TSC0028054
gttttagtagtta

SEQ ID NO: 112280 - DNA, 13 bp, Artificial Sequence
  Oligonucleotide for detection of SNP TSC0028054
taactactaaaac

SEQ ID NO: 112281 - DNA, 13 bp, Artificial Sequence
  Oligonucleotide for detection of SNP TSC0028054
gttttaatagtta

SEQ ID NO: 112282 - DNA, 13 bp, Artificial Sequence
  Oligonucleotide for detection of SNP TSC0028054
taactattaaaac

SEQ ID NO: 112283 - DNA, 13 bp, Artificial Sequence
  Oligonucleotide for detection of SNP TSC0028055
tggtttagttttt

SEQ ID NO: 112284 - DNA, 13 bp, Artificial Sequence
  Oligonucleotide for detection of SNP TSC0028055
aaaaactaaacca

SEQ ID NO: 112285 - DNA, 13 bp, Artificial Sequence
  Oligonucleotide for detection of SNP TSC0028055
tggtttggttttt

SEQ ID NO: 112286 - DNA, 13 bp, Artificial Sequence
  Oligonucleotide for detection of SNP TSC0028055
aaaaaccaaacca

SEQ ID NO: 112287 - DNA, 13 bp, Artificial Sequence
  Oligonucleotide for detection of SNP TSC0028056
atttagaagttta

SEQ ID NO: 112288 - DNA, 13 bp, Artificial Sequence
  Oligonucleotide for detection of SNP TSC0028056
taaacttctaaat

SEQ ID NO: 112289 - DNA, 13 bp, Artificial Sequence
  Oligonucleotide for detection of SNP TSC0028056
atttaggagttta

SEQ ID NO: 112290 - DNA, 13 bp, Artificial Sequence
  Oligonucleotide for detection of SNP TSC0028056
taaactcctaaat

SEQ ID NO: 112291 - DNA, 13 bp, Artificial Sequence
  Oligonucleotide for detection of SNP TSC0028061
tttaaaatggaaa

SEQ ID NO: 112292 - DNA, 13 bp, Artificial Sequence
  Oligonucleotide for detection of SNP TSC0028061
tttccattttaaa

SEQ ID NO: 112293 - DNA, 13 bp, Artificial Sequence
  Oligonucleotide for detection of SNP TSC0028061
tttaaagtggaaa

SEQ ID NO: 112294 - DNA, 13 bp, Artificial Sequence
  Oligonucleotide for detection of SNP TSC0028061
tttccactttaaa

SEQ ID NO: 112295 - DNA, 13 bp, Artificial Sequence
  Oligonucleotide for detection of SNP TSC0028062
taatttggtggta

SEQ ID NO: 112296 - DNA, 13 bp, Artificial Sequence
  Oligonucleotide for detection of SNP TSC0028062
taccaccaaatta

SEQ ID NO: 112297 - DNA, 13 bp, Artificial Sequence
  Oligonucleotide for detection of SNP TSC0028062
taatttagtggta

SEQ ID NO: 112298 - DNA, 13 bp, Artificial Sequence
  Oligonucleotide for detection of SNP TSC0028062
taccactaaatta

SEQ ID NO: 112299 - DNA, 13 bp, Artificial Sequence
  Oligonucleotide for detection of SNP TSC0028065
gggttaatggtag

SEQ ID NO: 112300 - DNA, 13 bp, Artificial Sequence
  Oligonucleotide for detection of SNP TSC0028065
ctaccattaaccc

SEQ ID NO: 112301 - DNA, 13 bp, Artificial Sequence
  Oligonucleotide for detection of SNP TSC0028065
gggttagtggtag

SEQ ID NO: 112302 - DNA, 13 bp, Artificial Sequence
  Oligonucleotide for detection of SNP TSC0028065
ctaccactaaccc

SEQ ID NO: 112303 - DNA, 13 bp, Artificial Sequence
  Oligonucleotide for detection of SNP TSC0028066
gttataatgtaty

SEQ ID NO: 112304 - DNA, 13 bp, Artificial Sequence
  Oligonucleotide for detection of SNP TSC0028066
ratacattataac

SEQ ID NO: 112305 - DNA, 13 bp, Artificial Sequence
  Oligonucleotide for detection of SNP TSC0028066
gttatagtgtaty

SEQ ID NO: 112306 - DNA, 13 bp, Artificial Sequence
  Oligonucleotide for detection of SNP TSC0028066
ratacactataac

SEQ ID NO: 112307 - DNA, 13 bp, Artificial Sequence
  Oligonucleotide for detection of SNP TSC0028067
tgggggatgtttt

SEQ ID NO: 112308 - DNA, 13 bp, Artificial Sequence
  Oligonucleotide for detection of SNP TSC0028067
aaaacatccccca

SEQ ID NO: 112309 - DNA, 13 bp, Artificial Sequence
  Oligonucleotide for detection of SNP TSC0028067
tggggggtgtttt

SEQ ID NO: 112310 - DNA, 13 bp, Artificial Sequence
  Oligonucleotide for detection of SNP TSC0028067
aaaacacccccca

SEQ ID NO: 112311 - DNA, 13 bp, Artificial Sequence
  Oligonucleotide for detection of SNP TSC0028071
gaaggagtagaga

SEQ ID NO: 112312 - DNA, 13 bp, Artificial Sequence
  Oligonucleotide for detection of SNP TSC0028071
tctctactccttc

SEQ ID NO: 112313 - DNA, 13 bp, Artificial Sequence
  Oligonucleotide for detection of SNP TSC0028071
gaaggattagaga

SEQ ID NO: 112314 - DNA, 13 bp, Artificial Sequence
  Oligonucleotide for detection of SNP TSC0028071
tctctaatccttc

SEQ ID NO: 112315 - DNA, 13 bp, Artificial Sequence
  Oligonucleotide for detection of SNP TSC0028072
aagggtagtttaa

SEQ ID NO: 112316 - DNA, 13 bp, Artificial Sequence
  Oligonucleotide for detection of SNP TSC0028072
ttaaactaccctt

SEQ ID NO: 112317 - DNA, 13 bp, Artificial Sequence
  Oligonucleotide for detection of SNP TSC0028072
aagggtggtttaa

SEQ ID NO: 112318 - DNA, 13 bp, Artificial Sequence
  Oligonucleotide for detection of SNP TSC0028072
ttaaaccaccctt

SEQ ID NO: 112319 - DNA, 13 bp, Artificial Sequence
  Oligonucleotide for detection of SNP TSC0028072
aagggcggtttaa

SEQ ID NO: 112320 - DNA, 13 bp, Artificial Sequence
  Oligonucleotide for detection of SNP TSC0028072
ttaaaccgccctt

SEQ ID NO: 112321 - DNA, 13 bp, Artificial Sequence
  Oligonucleotide for detection of SNP TSC0028072
ttaggttgttttt

SEQ ID NO: 112322 - DNA, 13 bp, Artificial Sequence
  Oligonucleotide for detection of SNP TSC0028072
aaaaacaacctaa

SEQ ID NO: 112323 - DNA, 13 bp, Artificial Sequence
  Oligonucleotide for detection of SNP TSC0028072
ttaggtcgttttt

SEQ ID NO: 112324 - DNA, 13 bp, Artificial Sequence
  Oligonucleotide for detection of SNP TSC0028072
aaaaacgacctaa

SEQ ID NO: 112325 - DNA, 13 bp, Artificial Sequence
  Oligonucleotide for detection of SNP TSC0028073
taaaataggtgtt

SEQ ID NO: 112326 - DNA, 13 bp, Artificial Sequence
  Oligonucleotide for detection of SNP TSC0028073
aacacctatttta

SEQ ID NO: 112327 - DNA, 13 bp, Artificial Sequence
  Oligonucleotide for detection of SNP TSC0028073
taaaattggtgtt

SEQ ID NO: 112328 - DNA, 13 bp, Artificial Sequence
  Oligonucleotide for detection of SNP TSC0028073
aacaccaatttta

SEQ ID NO: 112329 - DNA, 13 bp, Artificial Sequence
  Oligonucleotide for detection of SNP TSC0028073
taaaatcggtgtt

SEQ ID NO: 112330 - DNA, 13 bp, Artificial Sequence
  Oligonucleotide for detection of SNP TSC0028073
aacaccgatttta

SEQ ID NO: 112331 - DNA, 13 bp, Artificial Sequence
  Oligonucleotide for detection of SNP TSC0028073
aatatttgtttta

SEQ ID NO: 112332 - DNA, 13 bp, Artificial Sequence
  Oligonucleotide for detection of SNP TSC0028073
taaaacaaatatt

SEQ ID NO: 112333 - DNA, 13 bp, Artificial Sequence
  Oligonucleotide for detection of SNP TSC0028073
aatattggtttta

SEQ ID NO: 112334 - DNA, 13 bp, Artificial Sequence
  Oligonucleotide for detection of SNP TSC0028073
taaaaccaatatt

SEQ ID NO: 112335 - DNA, 13 bp, Artificial Sequence
  Oligonucleotide for detection of SNP TSC0028073
aatatcggtttta

SEQ ID NO: 112336 - DNA, 13 bp, Artificial Sequence
  Oligonucleotide for detection of SNP TSC0028073
taaaaccgatatt

SEQ ID NO: 112337 - DNA, 13 bp, Artificial Sequence
  Oligonucleotide for detection of SNP TSC0028075
tttttttggaggg

SEQ ID NO: 112338 - DNA, 13 bp, Artificial Sequence
  Oligonucleotide for detection of SNP TSC0028075
ccctccaaaaaaa

SEQ ID NO: 112339 - DNA, 13 bp, Artificial Sequence
  Oligonucleotide for detection of SNP TSC0028075
ttttttcggaggg

SEQ ID NO: 112340 - DNA, 13 bp, Artificial Sequence
  Oligonucleotide for detection of SNP TSC0028075
ccctccgaaaaaa

SEQ ID NO: 112341 - DNA, 13 bp, Artificial Sequence
  Oligonucleotide for detection of SNP TSC0028075
ttttttagaggag

SEQ ID NO: 112342 - DNA, 13 bp, Artificial Sequence
  Oligonucleotide for detection of SNP TSC0028075
ctcctctaaaaaa

SEQ ID NO: 112343 - DNA, 13 bp, Artificial Sequence
  Oligonucleotide for detection of SNP TSC0028075
tttttcggaggag

SEQ ID NO: 112344 - DNA, 13 bp, Artificial Sequence
  Oligonucleotide for detection of SNP TSC0028075
ctcctccgaaaaa

SEQ ID NO: 112345 - DNA, 13 bp, Artificial Sequence
  Oligonucleotide for detection of SNP TSC0028079
gattttagtatag

SEQ ID NO: 112346 - DNA, 13 bp, Artificial Sequence
  Oligonucleotide for detection of SNP TSC0028079
ctatactaaaatc

SEQ ID NO: 112347 - DNA, 13 bp, Artificial Sequence
  Oligonucleotide for detection of SNP TSC0028079
gatttttgtatag

SEQ ID NO: 112348 - DNA, 13 bp, Artificial Sequence
  Oligonucleotide for detection of SNP TSC0028079
ctatacaaaaatc

SEQ ID NO: 112349 - DNA, 13 bp, Artificial Sequence
  Oligonucleotide for detection of SNP TSC0028079
ttgtgttgaaaty

SEQ ID NO: 112350 - DNA, 13 bp, Artificial Sequence
  Oligonucleotide for detection of SNP TSC0028079
ratttcaacacaa

SEQ ID NO: 112351 - DNA, 13 bp, Artificial Sequence
  Oligonucleotide for detection of SNP TSC0028079
ttgtgtagaaaty

SEQ ID NO: 112352 - DNA, 13 bp, Artificial Sequence
  Oligonucleotide for detection of SNP TSC0028079
ratttctacacaa

SEQ ID NO: 112353 - DNA, 13 bp, Artificial Sequence
  Oligonucleotide for detection of SNP TSC0028080
ttttaattttgtt

SEQ ID NO: 112354 - DNA, 13 bp, Artificial Sequence
  Oligonucleotide for detection of SNP TSC0028080
aacaaaattaaaa

SEQ ID NO: 112355 - DNA, 13 bp, Artificial Sequence
  Oligonucleotide for detection of SNP TSC0028080
ttttaagtttgtt

SEQ ID NO: 112356 - DNA, 13 bp, Artificial Sequence
  Oligonucleotide for detection of SNP TSC0028080
aacaaacttaaaa

SEQ ID NO: 112357 - DNA, 13 bp, Artificial Sequence
  Oligonucleotide for detection of SNP TSC0028080
aataaggttgggg

SEQ ID NO: 112358 - DNA, 13 bp, Artificial Sequence
  Oligonucleotide for detection of SNP TSC0028080
ccccaaccttatt

SEQ ID NO: 112359 - DNA, 13 bp, Artificial Sequence
  Oligonucleotide for detection of SNP TSC0028080
aataagtttgggg

SEQ ID NO: 112360 - DNA, 13 bp, Artificial Sequence
  Oligonucleotide for detection of SNP TSC0028080
ccccaaacttatt

SEQ ID NO: 112361 - DNA, 13 bp, Artificial Sequence
  Oligonucleotide for detection of SNP TSC0028081
gagggagagttta

SEQ ID NO: 112362 - DNA, 13 bp, Artificial Sequence
  Oligonucleotide for detection of SNP TSC0028081
taaactctccctc

SEQ ID NO: 112363 - DNA, 13 bp, Artificial Sequence
  Oligonucleotide for detection of SNP TSC0028081
gagggaaagttta

SEQ ID NO: 112364 - DNA, 13 bp, Artificial Sequence
  Oligonucleotide for detection of SNP TSC0028081
taaactttccctc

SEQ ID NO: 112365 - DNA, 13 bp, Artificial Sequence
  Oligonucleotide for detection of SNP TSC0028084
aaattcgttattt

SEQ ID NO: 112366 - DNA, 13 bp, Artificial Sequence
  Oligonucleotide for detection of SNP TSC0028084
aaataacgaattt

SEQ ID NO: 112367 - DNA, 13 bp, Artificial Sequence
  Oligonucleotide for detection of SNP TSC0028084
agatgatgagttt

SEQ ID NO: 112368 - DNA, 13 bp, Artificial Sequence
  Oligonucleotide for detection of SNP TSC0028084
aaactcatcatct

SEQ ID NO: 112369 - DNA, 13 bp, Artificial Sequence
  Oligonucleotide for detection of SNP TSC0028084
agatgacgagttt

SEQ ID NO: 112370 - DNA, 13 bp, Artificial Sequence
  Oligonucleotide for detection of SNP TSC0028084
aaactcgtcatct

SEQ ID NO: 112371 - DNA, 13 bp, Artificial Sequence
  Oligonucleotide for detection of SNP TSC0028086
ttgtgaaaatggy

SEQ ID NO: 112372 - DNA, 13 bp, Artificial Sequence
  Oligonucleotide for detection of SNP TSC0028086
rccattttcacaa

SEQ ID NO: 112373 - DNA, 13 bp, Artificial Sequence
  Oligonucleotide for detection of SNP TSC0028086
ttgtgataatggy

SEQ ID NO: 112374 - DNA, 13 bp, Artificial Sequence
  Oligonucleotide for detection of SNP TSC0028086
rccattatcacaa

SEQ ID NO: 112375 - DNA, 13 bp, Artificial Sequence
  Oligonucleotide for detection of SNP TSC0028086
gttatttttatag

SEQ ID NO: 112376 - DNA, 13 bp, Artificial Sequence
  Oligonucleotide for detection of SNP TSC0028086
ctataaaaataac

SEQ ID NO: 112377 - DNA, 13 bp, Artificial Sequence
  Oligonucleotide for detection of SNP TSC0028086
gttattattatag

SEQ ID NO: 112378 - DNA, 13 bp, Artificial Sequence
  Oligonucleotide for detection of SNP TSC0028086
ctataataataac

SEQ ID NO: 112379 - DNA, 13 bp, Artificial Sequence
  Oligonucleotide for detection of SNP TSC0028087
attttagtgtggg

SEQ ID NO: 112380 - DNA, 13 bp, Artificial Sequence
  Oligonucleotide for detection of SNP TSC0028087
cccacactaaaat

SEQ ID NO: 112381 - DNA, 13 bp, Artificial Sequence
  Oligonucleotide for detection of SNP TSC0028087
attttaatgtggg

SEQ ID NO: 112382 - DNA, 13 bp, Artificial Sequence
  Oligonucleotide for detection of SNP TSC0028087
cccacattaaaat

SEQ ID NO: 112383 - DNA, 13 bp, Artificial Sequence
  Oligonucleotide for detection of SNP TSC0028089
tgggaatggatgy

SEQ ID NO: 112384 - DNA, 13 bp, Artificial Sequence
  Oligonucleotide for detection of SNP TSC0028089
rcatccattccca

SEQ ID NO: 112385 - DNA, 13 bp, Artificial Sequence
  Oligonucleotide for detection of SNP TSC0028089
tgggaacggatgy

SEQ ID NO: 112386 - DNA, 13 bp, Artificial Sequence
  Oligonucleotide for detection of SNP TSC0028089
rcatccgttccca

SEQ ID NO: 112387 - DNA, 13 bp, Artificial Sequence
  Oligonucleotide for detection of SNP TSC0028089
gtatttgttttta

SEQ ID NO: 112388 - DNA, 13 bp, Artificial Sequence
  Oligonucleotide for detection of SNP TSC0028089
taaaaacaaatac

SEQ ID NO: 112389 - DNA, 13 bp, Artificial Sequence
  Oligonucleotide for detection of SNP TSC0028089
gtatttattttta

SEQ ID NO: 112390 - DNA, 13 bp, Artificial Sequence
  Oligonucleotide for detection of SNP TSC0028089
taaaaataaatac

SEQ ID NO: 112391 - DNA, 13 bp, Artificial Sequence
  Oligonucleotide for detection of SNP TSC0028089
gtattcgttttta

SEQ ID NO: 112392 - DNA, 13 bp, Artificial Sequence
  Oligonucleotide for detection of SNP TSC0028089
taaaaacgaatac

SEQ ID NO: 112393 - DNA, 13 bp, Artificial Sequence
  Oligonucleotide for detection of SNP TSC0028092
agaagaggtttty

SEQ ID NO: 112394 - DNA, 13 bp, Artificial Sequence
  Oligonucleotide for detection of SNP TSC0028092
raaaacctcttct

SEQ ID NO: 112395 - DNA, 13 bp, Artificial Sequence
  Oligonucleotide for detection of SNP TSC0028092
agaagaagtttty

SEQ ID NO: 112396 - DNA, 13 bp, Artificial Sequence
  Oligonucleotide for detection of SNP TSC0028092
raaaacttcttct

SEQ ID NO: 112397 - DNA, 13 bp, Artificial Sequence
  Oligonucleotide for detection of SNP TSC0028093
attgtgggaaggt

SEQ ID NO: 112398 - DNA, 13 bp, Artificial Sequence
  Oligonucleotide for detection of SNP TSC0028093
accttcccacaat

SEQ ID NO: 112399 - DNA, 13 bp, Artificial Sequence
  Oligonucleotide for detection of SNP TSC0028093
attgtgtgaaggt

SEQ ID NO: 112400 - DNA, 13 bp, Artificial Sequence
  Oligonucleotide for detection of SNP TSC0028093
accttcacacaat

SEQ ID NO: 112401 - DNA, 13 bp, Artificial Sequence
  Oligonucleotide for detection of SNP TSC0028093
atttttttatagt

SEQ ID NO: 112402 - DNA, 13 bp, Artificial Sequence
  Oligonucleotide for detection of SNP TSC0028093
actataaaaaaat

SEQ ID NO: 112403 - DNA, 13 bp, Artificial Sequence
  Oligonucleotide for detection of SNP TSC0028093
atttttatatagt

SEQ ID NO: 112404 - DNA, 13 bp, Artificial Sequence
  Oligonucleotide for detection of SNP TSC0028093
actatataaaaat

SEQ ID NO: 112405 - DNA, 13 bp, Artificial Sequence
  Oligonucleotide for detection of SNP TSC0028094
gttgttagttaty

SEQ ID NO: 112406 - DNA, 13 bp, Artificial Sequence
  Oligonucleotide for detection of SNP TSC0028094
rataactaacaac

SEQ ID NO: 112407 - DNA, 13 bp, Artificial Sequence
  Oligonucleotide for detection of SNP TSC0028094
gttgttggttaty

SEQ ID NO: 112408 - DNA, 13 bp, Artificial Sequence
  Oligonucleotide for detection of SNP TSC0028094
rataaccaacaac

SEQ ID NO: 112409 - DNA, 13 bp, Artificial Sequence
  Oligonucleotide for detection of SNP TSC0028096
ttaggttgagaag

SEQ ID NO: 112410 - DNA, 13 bp, Artificial Sequence
  Oligonucleotide for detection of SNP TSC0028096
cttctcaacctaa

SEQ ID NO: 112411 - DNA, 13 bp, Artificial Sequence
  Oligonucleotide for detection of SNP TSC0028096
ttaggtcgagaag

SEQ ID NO: 112412 - DNA, 13 bp, Artificial Sequence
  Oligonucleotide for detection of SNP TSC0028096
cttctcgacctaa

SEQ ID NO: 112413 - DNA, 13 bp, Artificial Sequence
  Oligonucleotide for detection of SNP TSC0028096
ttttttggtttgg

SEQ ID NO: 112414 - DNA, 13 bp, Artificial Sequence
  Oligonucleotide for detection of SNP TSC0028096
ccaaaccaaaaaa

SEQ ID NO: 112415 - DNA, 13 bp, Artificial Sequence
  Oligonucleotide for detection of SNP TSC0028096
tttttcggtttgg

SEQ ID NO: 112416 - DNA, 13 bp, Artificial Sequence
  Oligonucleotide for detection of SNP TSC0028096
ccaaaccgaaaaa

SEQ ID NO: 112417 - DNA, 13 bp, Artificial Sequence
  Oligonucleotide for detection of SNP TSC0028100
ggtataaaaaggt

SEQ ID NO: 112418 - DNA, 13 bp, Artificial Sequence
  Oligonucleotide for detection of SNP TSC0028100
acctttttatacc

SEQ ID NO: 112419 - DNA, 13 bp, Artificial Sequence
  Oligonucleotide for detection of SNP TSC0028100
ggtatagaaaggt

SEQ ID NO: 112420 - DNA, 13 bp, Artificial Sequence
  Oligonucleotide for detection of SNP TSC0028100
acctttctatacc

SEQ ID NO: 112421 - DNA, 13 bp, Artificial Sequence
  Oligonucleotide for detection of SNP TSC0028104
agaagagatggaa

SEQ ID NO: 112422 - DNA, 13 bp, Artificial Sequence
  Oligonucleotide for detection of SNP TSC0028104
ttccatctcttct

SEQ ID NO: 112423 - DNA, 13 bp, Artificial Sequence
  Oligonucleotide for detection of SNP TSC0028104
agaagaaatggaa

SEQ ID NO: 112424 - DNA, 13 bp, Artificial Sequence
  Oligonucleotide for detection of SNP TSC0028104
ttccatttcttct

SEQ ID NO: 112425 - DNA, 13 bp, Artificial Sequence
  Oligonucleotide for detection of SNP TSC0028107
ttttaggatttgy

SEQ ID NO: 112426 - DNA, 13 bp, Artificial Sequence
  Oligonucleotide for detection of SNP TSC0028107
rcaaatcctaaaa

SEQ ID NO: 112427 - DNA, 13 bp, Artificial Sequence
  Oligonucleotide for detection of SNP TSC0028108
tgggttaggtttg

SEQ ID NO: 112428 - DNA, 13 bp, Artificial Sequence
  Oligonucleotide for detection of SNP TSC0028108
caaacctaaccca

SEQ ID NO: 112429 - DNA, 13 bp, Artificial Sequence
  Oligonucleotide for detection of SNP TSC0028108
tgggttgggtttg

SEQ ID NO: 112430 - DNA, 13 bp, Artificial Sequence
  Oligonucleotide for detection of SNP TSC0028108
caaacccaaccca

SEQ ID NO: 112431 - DNA, 13 bp, Artificial Sequence
  Oligonucleotide for detection of SNP TSC0028109
ttgagagtgggtt

SEQ ID NO: 112432 - DNA, 13 bp, Artificial Sequence
  Oligonucleotide for detection of SNP TSC0028109
aacccactctcaa

SEQ ID NO: 112433 - DNA, 13 bp, Artificial Sequence
  Oligonucleotide for detection of SNP TSC0028109
ttgagaatgggtt

SEQ ID NO: 112434 - DNA, 13 bp, Artificial Sequence
  Oligonucleotide for detection of SNP TSC0028109
aacccattctcaa

SEQ ID NO: 112435 - DNA, 13 bp, Artificial Sequence
  Oligonucleotide for detection of SNP TSC0028115
aaaaagaagaaga

SEQ ID NO: 112436 - DNA, 13 bp, Artificial Sequence
  Oligonucleotide for detection of SNP TSC0028115
tcttcttcttttt

SEQ ID NO: 112437 - DNA, 13 bp, Artificial Sequence
  Oligonucleotide for detection of SNP TSC0028115
aaaaagtagaaga

SEQ ID NO: 112438 - DNA, 13 bp, Artificial Sequence
  Oligonucleotide for detection of SNP TSC0028115
tcttctacttttt

SEQ ID NO: 112439 - DNA, 13 bp, Artificial Sequence
  Oligonucleotide for detection of SNP TSC0028116
tttttagtagttt

SEQ ID NO: 112440 - DNA, 13 bp, Artificial Sequence
  Oligonucleotide for detection of SNP TSC0028116
aaactactaaaaa

SEQ ID NO: 112441 - DNA, 13 bp, Artificial Sequence
  Oligonucleotide for detection of SNP TSC0028116
tttttaatagttt

SEQ ID NO: 112442 - DNA, 13 bp, Artificial Sequence
  Oligonucleotide for detection of SNP TSC0028116
aaactattaaaaa

SEQ ID NO: 112443 - DNA, 13 bp, Artificial Sequence
  Oligonucleotide for detection of SNP TSC0028117
tgggaagtggatt

SEQ ID NO: 112444 - DNA, 13 bp, Artificial Sequence
  Oligonucleotide for detection of SNP TSC0028117
aatccacttccca

SEQ ID NO: 112445 - DNA, 13 bp, Artificial Sequence
  Oligonucleotide for detection of SNP TSC0028117
tgggaaatggatt

SEQ ID NO: 112446 - DNA, 13 bp, Artificial Sequence
  Oligonucleotide for detection of SNP TSC0028117
aatccatttccca

SEQ ID NO: 112447 - DNA, 13 bp, Artificial Sequence
  Oligonucleotide for detection of SNP TSC0028118
tggagatgatgta

SEQ ID NO: 112448 - DNA, 13 bp, Artificial Sequence
  Oligonucleotide for detection of SNP TSC0028118
tacatcatctcca

SEQ ID NO: 112449 - DNA, 13 bp, Artificial Sequence
  Oligonucleotide for detection of SNP TSC0028118
tggagacgatgta

SEQ ID NO: 112450 - DNA, 13 bp, Artificial Sequence
  Oligonucleotide for detection of SNP TSC0028118
tacatcgtctcca

SEQ ID NO: 112451 - DNA, 13 bp, Artificial Sequence
  Oligonucleotide for detection of SNP TSC0028119
aagagataagtty

SEQ ID NO: 112452 - DNA, 13 bp, Artificial Sequence
  Oligonucleotide for detection of SNP TSC0028119
raacttatctctt

SEQ ID NO: 112453 - DNA, 13 bp, Artificial Sequence
  Oligonucleotide for detection of SNP TSC0028119
aagagagaagtty

SEQ ID NO: 112454 - DNA, 13 bp, Artificial Sequence
  Oligonucleotide for detection of SNP TSC0028119
raacttctctctt

SEQ ID NO: 112455 - DNA, 13 bp, Artificial Sequence
  Oligonucleotide for detection of SNP TSC0028121
agtttatgtttty

SEQ ID NO: 112456 - DNA, 13 bp, Artificial Sequence
  Oligonucleotide for detection of SNP TSC0028121
raaaacataaact

SEQ ID NO: 112457 - DNA, 13 bp, Artificial Sequence
  Oligonucleotide for detection of SNP TSC0028121
agtttacgtttty

SEQ ID NO: 112458 - DNA, 13 bp, Artificial Sequence
  Oligonucleotide for detection of SNP TSC0028121
raaaacgtaaact

SEQ ID NO: 112459 - DNA, 13 bp, Artificial Sequence
  Oligonucleotide for detection of SNP TSC0028121
gagggtgtgaatt

SEQ ID NO: 112460 - DNA, 13 bp, Artificial Sequence
  Oligonucleotide for detection of SNP TSC0028121
aattcacaccctc

SEQ ID NO: 112461 - DNA, 13 bp, Artificial Sequence
  Oligonucleotide for detection of SNP TSC0028121
gagggtatgaatt

SEQ ID NO: 112462 - DNA, 13 bp, Artificial Sequence
  Oligonucleotide for detection of SNP TSC0028121
aattcataccctc

SEQ ID NO: 112463 - DNA, 13 bp, Artificial Sequence
  Oligonucleotide for detection of SNP TSC0028121
gagggcgtgaatt

SEQ ID NO: 112464 - DNA, 13 bp, Artificial Sequence
  Oligonucleotide for detection of SNP TSC0028121
aattcacgccctc

SEQ ID NO: 112465 - DNA, 13 bp, Artificial Sequence
  Oligonucleotide for detection of SNP TSC0028124
ttttggggtgtat

SEQ ID NO: 112466 - DNA, 13 bp, Artificial Sequence
  Oligonucleotide for detection of SNP TSC0028124
atacaccccaaaa

SEQ ID NO: 112467 - DNA, 13 bp, Artificial Sequence
  Oligonucleotide for detection of SNP TSC0028124
ttttggagtgtat

SEQ ID NO: 112468 - DNA, 13 bp, Artificial Sequence
  Oligonucleotide for detection of SNP TSC0028124
atacactccaaaa

SEQ ID NO: 112469 - DNA, 13 bp, Artificial Sequence
  Oligonucleotide for detection of SNP TSC0028125
aggtgggttgggg

SEQ ID NO: 112470 - DNA, 13 bp, Artificial Sequence
  Oligonucleotide for detection of SNP TSC0028125
ccccaacccacct

SEQ ID NO: 112471 - DNA, 13 bp, Artificial Sequence
  Oligonucleotide for detection of SNP TSC0028125
aggtggtttgggg

SEQ ID NO: 112472 - DNA, 13 bp, Artificial Sequence
  Oligonucleotide for detection of SNP TSC0028125
ccccaaaccacct

SEQ ID NO: 112473 - DNA, 13 bp, Artificial Sequence
  Oligonucleotide for detection of SNP TSC0028130
ttgtttgttgtta

SEQ ID NO: 112474 - DNA, 13 bp, Artificial Sequence
  Oligonucleotide for detection of SNP TSC0028130
taacaacaaacaa

SEQ ID NO: 112475 - DNA, 13 bp, Artificial Sequence
  Oligonucleotide for detection of SNP TSC0028130
tcgtttattgtta

SEQ ID NO: 112476 - DNA, 13 bp, Artificial Sequence
  Oligonucleotide for detection of SNP TSC0028130
taacaataaacga

SEQ ID NO: 112477 - DNA, 13 bp, Artificial Sequence
  Oligonucleotide for detection of SNP TSC0028130
tcgtttgttgtta

SEQ ID NO: 112478 - DNA, 13 bp, Artificial Sequence
  Oligonucleotide for detection of SNP TSC0028130
taacaacaaacga

SEQ ID NO: 112479 - DNA, 13 bp, Artificial Sequence
  Oligonucleotide for detection of SNP TSC0028130
ttgttcgttgtta

SEQ ID NO: 112480 - DNA, 13 bp, Artificial Sequence
  Oligonucleotide for detection of SNP TSC0028130
taacaacgaacaa

SEQ ID NO: 112481 - DNA, 13 bp, Artificial Sequence
  Oligonucleotide for detection of SNP TSC0028130
tcgttcgttgtta

SEQ ID NO: 112482 - DNA, 13 bp, Artificial Sequence
  Oligonucleotide for detection of SNP TSC0028130
taacaacgaacga

SEQ ID NO: 112483 - DNA, 13 bp, Artificial Sequence
  Oligonucleotide for detection of SNP TSC0028130
tggtagtgaatga

SEQ ID NO: 112484 - DNA, 13 bp, Artificial Sequence
  Oligonucleotide for detection of SNP TSC0028130
tcattcactacca

SEQ ID NO: 112485 - DNA, 13 bp, Artificial Sequence
  Oligonucleotide for detection of SNP TSC0028130
tggtagtgaacga

SEQ ID NO: 112486 - DNA, 13 bp, Artificial Sequence
  Oligonucleotide for detection of SNP TSC0028130
tcgttcactacca

SEQ ID NO: 112487 - DNA, 13 bp, Artificial Sequence
  Oligonucleotide for detection of SNP TSC0028130
tggtagcgaatga

SEQ ID NO: 112488 - DNA, 13 bp, Artificial Sequence
  Oligonucleotide for detection of SNP TSC0028130
tcattcgctacca

SEQ ID NO: 112489 - DNA, 13 bp, Artificial Sequence
  Oligonucleotide for detection of SNP TSC0028130
tggtagcgaacga

SEQ ID NO: 112490 - DNA, 13 bp, Artificial Sequence
  Oligonucleotide for detection of SNP TSC0028130
tcgttcgctacca

SEQ ID NO: 112491 - DNA, 13 bp, Artificial Sequence
  Oligonucleotide for detection of SNP TSC0028131
gatagagtttagg

SEQ ID NO: 112492 - DNA, 13 bp, Artificial Sequence
  Oligonucleotide for detection of SNP TSC0028131
cctaaactctatc

SEQ ID NO: 112493 - DNA, 13 bp, Artificial Sequence
  Oligonucleotide for detection of SNP TSC0028131
gatagaatttagg

SEQ ID NO: 112494 - DNA, 13 bp, Artificial Sequence
  Oligonucleotide for detection of SNP TSC0028131
cctaaattctatc

SEQ ID NO: 112495 - DNA, 13 bp, Artificial Sequence
  Oligonucleotide for detection of SNP TSC0028132
gttttttggatgy

SEQ ID NO: 112496 - DNA, 13 bp, Artificial Sequence
  Oligonucleotide for detection of SNP TSC0028132
rcatccaaaaaac

SEQ ID NO: 112497 - DNA, 13 bp, Artificial Sequence
  Oligonucleotide for detection of SNP TSC0028132
gtttttcggatgy

SEQ ID NO: 112498 - DNA, 13 bp, Artificial Sequence
  Oligonucleotide for detection of SNP TSC0028132
rcatccgaaaaac

SEQ ID NO: 112499 - DNA, 13 bp, Artificial Sequence
  Oligonucleotide for detection of SNP TSC0028132
gtatttggggagy

SEQ ID NO: 112500 - DNA, 13 bp, Artificial Sequence
  Oligonucleotide for detection of SNP TSC0028132
rctccccaaatac

SEQ ID NO: 112501 - DNA, 13 bp, Artificial Sequence
  Oligonucleotide for detection of SNP TSC0028132
gtatttagggagy

SEQ ID NO: 112502 - DNA, 13 bp, Artificial Sequence
  Oligonucleotide for detection of SNP TSC0028132
rctccctaaatac

SEQ ID NO: 112503 - DNA, 13 bp, Artificial Sequence
  Oligonucleotide for detection of SNP TSC0028132
gtattcggggagy

SEQ ID NO: 112504 - DNA, 13 bp, Artificial Sequence
  Oligonucleotide for detection of SNP TSC0028132
rctccccgaatac

SEQ ID NO: 112505 - DNA, 13 bp, Artificial Sequence
  Oligonucleotide for detection of SNP TSC0028133
gattaatgaggat

SEQ ID NO: 112506 - DNA, 13 bp, Artificial Sequence
  Oligonucleotide for detection of SNP TSC0028133
atcctcattaatc

SEQ ID NO: 112507 - DNA, 13 bp, Artificial Sequence
  Oligonucleotide for detection of SNP TSC0028133
gattaacgaggat

SEQ ID NO: 112508 - DNA, 13 bp, Artificial Sequence
  Oligonucleotide for detection of SNP TSC0028133
atcctcgttaatc

SEQ ID NO: 112509 - DNA, 13 bp, Artificial Sequence
  Oligonucleotide for detection of SNP TSC0028133
atttttgttaaty

SEQ ID NO: 112510 - DNA, 13 bp, Artificial Sequence
  Oligonucleotide for detection of SNP TSC0028133
rattaacaaaaat

SEQ ID NO: 112511 - DNA, 13 bp, Artificial Sequence
  Oligonucleotide for detection of SNP TSC0028133
atttttattaaty

SEQ ID NO: 112512 - DNA, 13 bp, Artificial Sequence
  Oligonucleotide for detection of SNP TSC0028133
rattaataaaaat

SEQ ID NO: 112513 - DNA, 13 bp, Artificial Sequence
  Oligonucleotide for detection of SNP TSC0028133
attttcgttaaty

SEQ ID NO: 112514 - DNA, 13 bp, Artificial Sequence
  Oligonucleotide for detection of SNP TSC0028133
rattaacgaaaat

SEQ ID NO: 112515 - DNA, 13 bp, Artificial Sequence
  Oligonucleotide for detection of SNP TSC0028134
atttaagtaataa

SEQ ID NO: 112516 - DNA, 13 bp, Artificial Sequence
  Oligonucleotide for detection of SNP TSC0028134
ttattacttaaat

SEQ ID NO: 112517 - DNA, 13 bp, Artificial Sequence
  Oligonucleotide for detection of SNP TSC0028134
atttaaataataa

SEQ ID NO: 112518 - DNA, 13 bp, Artificial Sequence
  Oligonucleotide for detection of SNP TSC0028134
ttattatttaaat

SEQ ID NO: 112519 - DNA, 13 bp, Artificial Sequence
  Oligonucleotide for detection of SNP TSC0028135
tttaatgagataa

SEQ ID NO: 112520 - DNA, 13 bp, Artificial Sequence
  Oligonucleotide for detection of SNP TSC0028135
ttatctcattaaa

SEQ ID NO: 112521 - DNA, 13 bp, Artificial Sequence
  Oligonucleotide for detection of SNP TSC0028135
tttaataagataa

SEQ ID NO: 112522 - DNA, 13 bp, Artificial Sequence
  Oligonucleotide for detection of SNP TSC0028135
ttatcttattaaa

SEQ ID NO: 112523 - DNA, 13 bp, Artificial Sequence
  Oligonucleotide for detection of SNP TSC0028137
tgagttgattttg

SEQ ID NO: 112524 - DNA, 13 bp, Artificial Sequence
  Oligonucleotide for detection of SNP TSC0028137
caaaatcaactca

SEQ ID NO: 112525 - DNA, 13 bp, Artificial Sequence
  Oligonucleotide for detection of SNP TSC0028137
tgagtttattttg

SEQ ID NO: 112526 - DNA, 13 bp, Artificial Sequence
  Oligonucleotide for detection of SNP TSC0028137
caaaataaactca

SEQ ID NO: 112527 - DNA, 13 bp, Artificial Sequence
  Oligonucleotide for detection of SNP TSC0028137
taaaattaattta

SEQ ID NO: 112528 - DNA, 13 bp, Artificial Sequence
  Oligonucleotide for detection of SNP TSC0028137
taaattaatttta

SEQ ID NO: 112529 - DNA, 13 bp, Artificial Sequence
  Oligonucleotide for detection of SNP TSC0028137
taaaataaattta

SEQ ID NO: 112530 - DNA, 13 bp, Artificial Sequence
  Oligonucleotide for detection of SNP TSC0028137
taaatttatttta

SEQ ID NO: 112531 - DNA, 13 bp, Artificial Sequence
  Oligonucleotide for detection of SNP TSC0028138
tttttagaatatg

SEQ ID NO: 112532 - DNA, 13 bp, Artificial Sequence
  Oligonucleotide for detection of SNP TSC0028138
catattctaaaaa

SEQ ID NO: 112533 - DNA, 13 bp, Artificial Sequence
  Oligonucleotide for detection of SNP TSC0028138
tttttataatatg

SEQ ID NO: 112534 - DNA, 13 bp, Artificial Sequence
  Oligonucleotide for detection of SNP TSC0028138
catattataaaaa

SEQ ID NO: 112535 - DNA, 13 bp, Artificial Sequence
  Oligonucleotide for detection of SNP TSC0028138
tatattttgaaaa

SEQ ID NO: 112536 - DNA, 13 bp, Artificial Sequence
  Oligonucleotide for detection of SNP TSC0028138
ttttcaaaatata

SEQ ID NO: 112537 - DNA, 13 bp, Artificial Sequence
  Oligonucleotide for detection of SNP TSC0028138
tatattatgaaaa

SEQ ID NO: 112538 - DNA, 13 bp, Artificial Sequence
  Oligonucleotide for detection of SNP TSC0028138
ttttcataatata

SEQ ID NO: 112539 - DNA, 13 bp, Artificial Sequence
  Oligonucleotide for detection of SNP TSC0028140
attgtttggttay

SEQ ID NO: 112540 - DNA, 13 bp, Artificial Sequence
  Oligonucleotide for detection of SNP TSC0028140
rtaaccaaacaat

SEQ ID NO: 112541 - DNA, 13 bp, Artificial Sequence
  Oligonucleotide for detection of SNP TSC0028140
attgttcggttay

SEQ ID NO: 112542 - DNA, 13 bp, Artificial Sequence
  Oligonucleotide for detection of SNP TSC0028140
rtaaccgaacaat

SEQ ID NO: 112543 - DNA, 13 bp, Artificial Sequence
  Oligonucleotide for detection of SNP TSC0028140
gtggttgggtagt

SEQ ID NO: 112544 - DNA, 13 bp, Artificial Sequence
  Oligonucleotide for detection of SNP TSC0028140
actacccaaccac

SEQ ID NO: 112545 - DNA, 13 bp, Artificial Sequence
  Oligonucleotide for detection of SNP TSC0028140
gtggttaggtagt

SEQ ID NO: 112546 - DNA, 13 bp, Artificial Sequence
  Oligonucleotide for detection of SNP TSC0028140
actacctaaccac

SEQ ID NO: 112547 - DNA, 13 bp, Artificial Sequence
  Oligonucleotide for detection of SNP TSC0028140
gtggtcgggtagt

SEQ ID NO: 112548 - DNA, 13 bp, Artificial Sequence
  Oligonucleotide for detection of SNP TSC0028140
actacccgaccac

SEQ ID NO: 112549 - DNA, 13 bp, Artificial Sequence
  Oligonucleotide for detection of SNP TSC0028141
ttatatatttttt

SEQ ID NO: 112550 - DNA, 13 bp, Artificial Sequence
  Oligonucleotide for detection of SNP TSC0028141
aaaaaatatataa

SEQ ID NO: 112551 - DNA, 13 bp, Artificial Sequence
  Oligonucleotide for detection of SNP TSC0028141
ttatatttttttt

SEQ ID NO: 112552 - DNA, 13 bp, Artificial Sequence
  Oligonucleotide for detection of SNP TSC0028141
aaaaaaaatataa

SEQ ID NO: 112553 - DNA, 13 bp, Artificial Sequence
  Oligonucleotide for detection of SNP TSC0028141
aaagagtgtgtaa

SEQ ID NO: 112554 - DNA, 13 bp, Artificial Sequence
  Oligonucleotide for detection of SNP TSC0028141
ttacacactcttt

SEQ ID NO: 112555 - DNA, 13 bp, Artificial Sequence
  Oligonucleotide for detection of SNP TSC0028141
aaagagggtgtaa

SEQ ID NO: 112556 - DNA, 13 bp, Artificial Sequence
  Oligonucleotide for detection of SNP TSC0028141
ttacaccctcttt

SEQ ID NO: 112557 - DNA, 13 bp, Artificial Sequence
  Oligonucleotide for detection of SNP TSC0028142
tgttgaggaataa

SEQ ID NO: 112558 - DNA, 13 bp, Artificial Sequence
  Oligonucleotide for detection of SNP TSC0028142
ttattcctcaaca

SEQ ID NO: 112559 - DNA, 13 bp, Artificial Sequence
  Oligonucleotide for detection of SNP TSC0028142
tgttgatgaataa

SEQ ID NO: 112560 - DNA, 13 bp, Artificial Sequence
  Oligonucleotide for detection of SNP TSC0028142
ttattcatcaaca

SEQ ID NO: 112561 - DNA, 13 bp, Artificial Sequence
  Oligonucleotide for detection of SNP TSC0028142
ttattttttaata

SEQ ID NO: 112562 - DNA, 13 bp, Artificial Sequence
  Oligonucleotide for detection of SNP TSC0028142
tattaaaaaataa

SEQ ID NO: 112563 - DNA, 13 bp, Artificial Sequence
  Oligonucleotide for detection of SNP TSC0028142
ttatttattaata

SEQ ID NO: 112564 - DNA, 13 bp, Artificial Sequence
  Oligonucleotide for detection of SNP TSC0028142
tattaataaataa

SEQ ID NO: 112565 - DNA, 13 bp, Artificial Sequence
  Oligonucleotide for detection of SNP TSC0028143
atagattaggaaa

SEQ ID NO: 112566 - DNA, 13 bp, Artificial Sequence
  Oligonucleotide for detection of SNP TSC0028143
tttcctaatctat

SEQ ID NO: 112567 - DNA, 13 bp, Artificial Sequence
  Oligonucleotide for detection of SNP TSC0028143
atagatgaggaaa

SEQ ID NO: 112568 - DNA, 13 bp, Artificial Sequence
  Oligonucleotide for detection of SNP TSC0028143
tttcctcatctat

SEQ ID NO: 112569 - DNA, 13 bp, Artificial Sequence
  Oligonucleotide for detection of SNP TSC0028143
ttttttgatttgt

SEQ ID NO: 112570 - DNA, 13 bp, Artificial Sequence
  Oligonucleotide for detection of SNP TSC0028143
acaaatcaaaaaa

SEQ ID NO: 112571 - DNA, 13 bp, Artificial Sequence
  Oligonucleotide for detection of SNP TSC0028143
tttttttatttgt

SEQ ID NO: 112572 - DNA, 13 bp, Artificial Sequence
  Oligonucleotide for detection of SNP TSC0028143
acaaataaaaaaa

SEQ ID NO: 112573 - DNA, 13 bp, Artificial Sequence
  Oligonucleotide for detection of SNP TSC0028144
tttttaggtagtt

SEQ ID NO: 112574 - DNA, 13 bp, Artificial Sequence
  Oligonucleotide for detection of SNP TSC0028144
aactacctaaaaa

SEQ ID NO: 112575 - DNA, 13 bp, Artificial Sequence
  Oligonucleotide for detection of SNP TSC0028145
atttaaaaggtgy

SEQ ID NO: 112576 - DNA, 13 bp, Artificial Sequence
  Oligonucleotide for detection of SNP TSC0028145
rcaccttttaaat

SEQ ID NO: 112577 - DNA, 13 bp, Artificial Sequence
  Oligonucleotide for detection of SNP TSC0028145
atttaagaggtgy

SEQ ID NO: 112578 - DNA, 13 bp, Artificial Sequence
  Oligonucleotide for detection of SNP TSC0028145
rcacctcttaaat

SEQ ID NO: 112579 - DNA, 13 bp, Artificial Sequence
  Oligonucleotide for detection of SNP TSC0028145
atttaaaaggcgy

SEQ ID NO: 112580 - DNA, 13 bp, Artificial Sequence
  Oligonucleotide for detection of SNP TSC0028145
rcgccttttaaat

SEQ ID NO: 112581 - DNA, 13 bp, Artificial Sequence
  Oligonucleotide for detection of SNP TSC0028145
atttaagaggcgy

SEQ ID NO: 112582 - DNA, 13 bp, Artificial Sequence
  Oligonucleotide for detection of SNP TSC0028145
rcgcctcttaaat

SEQ ID NO: 112583 - DNA, 13 bp, Artificial Sequence
  Oligonucleotide for detection of SNP TSC0028146
aaagtagtatgty

SEQ ID NO: 112584 - DNA, 13 bp, Artificial Sequence
  Oligonucleotide for detection of SNP TSC0028146
racatactacttt

SEQ ID NO: 112585 - DNA, 13 bp, Artificial Sequence
  Oligonucleotide for detection of SNP TSC0028146
aaagtaatatgty

SEQ ID NO: 112586 - DNA, 13 bp, Artificial Sequence
  Oligonucleotide for detection of SNP TSC0028146
racatattacttt

SEQ ID NO: 112587 - DNA, 13 bp, Artificial Sequence
  Oligonucleotide for detection of SNP TSC0028147
agtaggagttaga

SEQ ID NO: 112588 - DNA, 13 bp, Artificial Sequence
  Oligonucleotide for detection of SNP TSC0028147
tctaactcctact

SEQ ID NO: 112589 - DNA, 13 bp, Artificial Sequence
  Oligonucleotide for detection of SNP TSC0028147
agtaggggttaga

SEQ ID NO: 112590 - DNA, 13 bp, Artificial Sequence
  Oligonucleotide for detection of SNP TSC0028147
tctaacccctact

SEQ ID NO: 112591 - DNA, 13 bp, Artificial Sequence
  Oligonucleotide for detection of SNP TSC0028148
gaaattaggtttt

SEQ ID NO: 112592 - DNA, 13 bp, Artificial Sequence
  Oligonucleotide for detection of SNP TSC0028148
aaaacctaatttc

SEQ ID NO: 112593 - DNA, 13 bp, Artificial Sequence
  Oligonucleotide for detection of SNP TSC0028148
gaaattgggtttt

SEQ ID NO: 112594 - DNA, 13 bp, Artificial Sequence
  Oligonucleotide for detection of SNP TSC0028148
aaaacccaatttc

SEQ ID NO: 112595 - DNA, 13 bp, Artificial Sequence
  Oligonucleotide for detection of SNP TSC0028148
gaaatcgggtttt

SEQ ID NO: 112596 - DNA, 13 bp, Artificial Sequence
  Oligonucleotide for detection of SNP TSC0028148
aaaacccgatttc

SEQ ID NO: 112597 - DNA, 13 bp, Artificial Sequence
  Oligonucleotide for detection of SNP TSC0028148
aaggtttgattty

SEQ ID NO: 112598 - DNA, 13 bp, Artificial Sequence
  Oligonucleotide for detection of SNP TSC0028148
raaatcaaacctt

SEQ ID NO: 112599 - DNA, 13 bp, Artificial Sequence
  Oligonucleotide for detection of SNP TSC0028148
aaggttcgattty

SEQ ID NO: 112600 - DNA, 13 bp, Artificial Sequence
  Oligonucleotide for detection of SNP TSC0028148
raaatcgaacctt

SEQ ID NO: 112601 - DNA, 13 bp, Artificial Sequence
  Oligonucleotide for detection of SNP TSC0028151
gtatatagtgata

SEQ ID NO: 112602 - DNA, 13 bp, Artificial Sequence
  Oligonucleotide for detection of SNP TSC0028151
tatcactatatac

SEQ ID NO: 112603 - DNA, 13 bp, Artificial Sequence
  Oligonucleotide for detection of SNP TSC0028151
gtatatggtgata

SEQ ID NO: 112604 - DNA, 13 bp, Artificial Sequence
  Oligonucleotide for detection of SNP TSC0028151
tatcaccatatac

SEQ ID NO: 112605 - DNA, 13 bp, Artificial Sequence
  Oligonucleotide for detection of SNP TSC0028151
gtatacggtgata

SEQ ID NO: 112606 - DNA, 13 bp, Artificial Sequence
  Oligonucleotide for detection of SNP TSC0028151
tatcaccgtatac

SEQ ID NO: 112607 - DNA, 13 bp, Artificial Sequence
  Oligonucleotide for detection of SNP TSC0028151
tgttattgtgtgy

SEQ ID NO: 112608 - DNA, 13 bp, Artificial Sequence
  Oligonucleotide for detection of SNP TSC0028151
rcacacaataaca

SEQ ID NO: 112609 - DNA, 13 bp, Artificial Sequence
  Oligonucleotide for detection of SNP TSC0028151
tgttatcgtgtgy

SEQ ID NO: 112610 - DNA, 13 bp, Artificial Sequence
  Oligonucleotide for detection of SNP TSC0028151
rcacacgataaca

SEQ ID NO: 112611 - DNA, 13 bp, Artificial Sequence
  Oligonucleotide for detection of SNP TSC0028152
tgttatatttaaa

SEQ ID NO: 112612 - DNA, 13 bp, Artificial Sequence
  Oligonucleotide for detection of SNP TSC0028152
tttaaatataaca

SEQ ID NO: 112613 - DNA, 13 bp, Artificial Sequence
  Oligonucleotide for detection of SNP TSC0028152
tgttatgtttaaa

SEQ ID NO: 112614 - DNA, 13 bp, Artificial Sequence
  Oligonucleotide for detection of SNP TSC0028152
tttaaacataaca

SEQ ID NO: 112615 - DNA, 13 bp, Artificial Sequence
  Oligonucleotide for detection of SNP TSC0028152
tgttacgtttaaa

SEQ ID NO: 112616 - DNA, 13 bp, Artificial Sequence
  Oligonucleotide for detection of SNP TSC0028152
tttaaacgtaaca

SEQ ID NO: 112617 - DNA, 13 bp, Artificial Sequence
  Oligonucleotide for detection of SNP TSC0028152
tttaaatgtaata

SEQ ID NO: 112618 - DNA, 13 bp, Artificial Sequence
  Oligonucleotide for detection of SNP TSC0028152
tattacatttaaa

SEQ ID NO: 112619 - DNA, 13 bp, Artificial Sequence
  Oligonucleotide for detection of SNP TSC0028152
tttaaacgtaata

SEQ ID NO: 112620 - DNA, 13 bp, Artificial Sequence
  Oligonucleotide for detection of SNP TSC0028152
tattacgtttaaa

SEQ ID NO: 112621 - DNA, 13 bp, Artificial Sequence
  Oligonucleotide for detection of SNP TSC0028153
tggaagttgaaty

SEQ ID NO: 112622 - DNA, 13 bp, Artificial Sequence
  Oligonucleotide for detection of SNP TSC0028153
rattcaacttcca

SEQ ID NO: 112623 - DNA, 13 bp, Artificial Sequence
  Oligonucleotide for detection of SNP TSC0028153
tggaaggtgaaty

SEQ ID NO: 112624 - DNA, 13 bp, Artificial Sequence
  Oligonucleotide for detection of SNP TSC0028153
rattcaccttcca

SEQ ID NO: 112625 - DNA, 13 bp, Artificial Sequence
  Oligonucleotide for detection of SNP TSC0028153
tggaagtcgaaty

SEQ ID NO: 112626 - DNA, 13 bp, Artificial Sequence
  Oligonucleotide for detection of SNP TSC0028153
rattcgacttcca

SEQ ID NO: 112627 - DNA, 13 bp, Artificial Sequence
  Oligonucleotide for detection of SNP TSC0028153
tggaaggcgaaty

SEQ ID NO: 112628 - DNA, 13 bp, Artificial Sequence
  Oligonucleotide for detection of SNP TSC0028153
rattcgccttcca

SEQ ID NO: 112629 - DNA, 13 bp, Artificial Sequence
  Oligonucleotide for detection of SNP TSC0028153
ggtttggttttta

SEQ ID NO: 112630 - DNA, 13 bp, Artificial Sequence
  Oligonucleotide for detection of SNP TSC0028153
taaaaaccaaacc

SEQ ID NO: 112631 - DNA, 13 bp, Artificial Sequence
  Oligonucleotide for detection of SNP TSC0028153
ggttcggttttta

SEQ ID NO: 112632 - DNA, 13 bp, Artificial Sequence
  Oligonucleotide for detection of SNP TSC0028153
taaaaaccgaacc

SEQ ID NO: 112633 - DNA, 13 bp, Artificial Sequence
  Oligonucleotide for detection of SNP TSC0028153
ggttcgtttttta

SEQ ID NO: 112634 - DNA, 13 bp, Artificial Sequence
  Oligonucleotide for detection of SNP TSC0028153
taaaaaacgaacc

SEQ ID NO: 112635 - DNA, 13 bp, Artificial Sequence
  Oligonucleotide for detection of SNP TSC0028154
tttgggatagttt

SEQ ID NO: 112636 - DNA, 13 bp, Artificial Sequence
  Oligonucleotide for detection of SNP TSC0028154
aaactatcccaaa

SEQ ID NO: 112637 - DNA, 13 bp, Artificial Sequence
  Oligonucleotide for detection of SNP TSC0028154
tttggggtagttt

SEQ ID NO: 112638 - DNA, 13 bp, Artificial Sequence
  Oligonucleotide for detection of SNP TSC0028154
aaactaccccaaa

SEQ ID NO: 112639 - DNA, 13 bp, Artificial Sequence
  Oligonucleotide for detection of SNP TSC0028155
tttgtgtggagtg

SEQ ID NO: 112640 - DNA, 13 bp, Artificial Sequence
  Oligonucleotide for detection of SNP TSC0028155
cactccacacaaa

SEQ ID NO: 112641 - DNA, 13 bp, Artificial Sequence
  Oligonucleotide for detection of SNP TSC0028155
tttgtggggagtg

SEQ ID NO: 112642 - DNA, 13 bp, Artificial Sequence
  Oligonucleotide for detection of SNP TSC0028155
cactccccacaaa

SEQ ID NO: 112643 - DNA, 13 bp, Artificial Sequence
  Oligonucleotide for detection of SNP TSC0028155
tttgtgcggagtg

SEQ ID NO: 112644 - DNA, 13 bp, Artificial Sequence
  Oligonucleotide for detection of SNP TSC0028155
cactccgcacaaa

SEQ ID NO: 112645 - DNA, 13 bp, Artificial Sequence
  Oligonucleotide for detection of SNP TSC0028155
tattttgtatagg

SEQ ID NO: 112646 - DNA, 13 bp, Artificial Sequence
  Oligonucleotide for detection of SNP TSC0028155
cctatacaaaata

SEQ ID NO: 112647 - DNA, 13 bp, Artificial Sequence
  Oligonucleotide for detection of SNP TSC0028155
tattttttatagg

SEQ ID NO: 112648 - DNA, 13 bp, Artificial Sequence
  Oligonucleotide for detection of SNP TSC0028155
cctataaaaaata

SEQ ID NO: 112649 - DNA, 13 bp, Artificial Sequence
  Oligonucleotide for detection of SNP TSC0028155
tatttcgtatagg

SEQ ID NO: 112650 - DNA, 13 bp, Artificial Sequence
  Oligonucleotide for detection of SNP TSC0028155
cctatacgaaata

SEQ ID NO: 112651 - DNA, 13 bp, Artificial Sequence
  Oligonucleotide for detection of SNP TSC0028156
gtgatgttgttty

SEQ ID NO: 112652 - DNA, 13 bp, Artificial Sequence
  Oligonucleotide for detection of SNP TSC0028156
raaacaacatcac

SEQ ID NO: 112653 - DNA, 13 bp, Artificial Sequence
  Oligonucleotide for detection of SNP TSC0028156
gtgatggtgttty

SEQ ID NO: 112654 - DNA, 13 bp, Artificial Sequence
  Oligonucleotide for detection of SNP TSC0028156
raaacaccatcac

SEQ ID NO: 112655 - DNA, 13 bp, Artificial Sequence
  Oligonucleotide for detection of SNP TSC0028156
ggggtagtattay

SEQ ID NO: 112656 - DNA, 13 bp, Artificial Sequence
  Oligonucleotide for detection of SNP TSC0028156
rtaatactacccc

SEQ ID NO: 112657 - DNA, 13 bp, Artificial Sequence
  Oligonucleotide for detection of SNP TSC0028156
ggggtattattay

SEQ ID NO: 112658 - DNA, 13 bp, Artificial Sequence
  Oligonucleotide for detection of SNP TSC0028156
rtaataatacccc

SEQ ID NO: 112659 - DNA, 13 bp, Artificial Sequence
  Oligonucleotide for detection of SNP TSC0028157
tttggtagttagt

SEQ ID NO: 112660 - DNA, 13 bp, Artificial Sequence
  Oligonucleotide for detection of SNP TSC0028157
actaactaccaaa

SEQ ID NO: 112661 - DNA, 13 bp, Artificial Sequence
  Oligonucleotide for detection of SNP TSC0028157
tttggttgttagt

SEQ ID NO: 112662 - DNA, 13 bp, Artificial Sequence
  Oligonucleotide for detection of SNP TSC0028157
actaacaaccaaa

SEQ ID NO: 112663 - DNA, 13 bp, Artificial Sequence
  Oligonucleotide for detection of SNP TSC0028157
ttcggtagttagt

SEQ ID NO: 112664 - DNA, 13 bp, Artificial Sequence
  Oligonucleotide for detection of SNP TSC0028157
actaactaccgaa

SEQ ID NO: 112665 - DNA, 13 bp, Artificial Sequence
  Oligonucleotide for detection of SNP TSC0028157
ttcggttgttagt

SEQ ID NO: 112666 - DNA, 13 bp, Artificial Sequence
  Oligonucleotide for detection of SNP TSC0028157
actaacaaccgaa

SEQ ID NO: 112667 - DNA, 13 bp, Artificial Sequence
  Oligonucleotide for detection of SNP TSC0028157
tttggtcgttagt

SEQ ID NO: 112668 - DNA, 13 bp, Artificial Sequence
  Oligonucleotide for detection of SNP TSC0028157
actaacgaccaaa

SEQ ID NO: 112669 - DNA, 13 bp, Artificial Sequence
  Oligonucleotide for detection of SNP TSC0028157
ttcggtcgttagt

SEQ ID NO: 112670 - DNA, 13 bp, Artificial Sequence
  Oligonucleotide for detection of SNP TSC0028157
actaacgaccgaa

SEQ ID NO: 112671 - DNA, 13 bp, Artificial Sequence
  Oligonucleotide for detection of SNP TSC0028157
attaattgttggg

SEQ ID NO: 112672 - DNA, 13 bp, Artificial Sequence
  Oligonucleotide for detection of SNP TSC0028157
cccaacaattaat

SEQ ID NO: 112673 - DNA, 13 bp, Artificial Sequence
  Oligonucleotide for detection of SNP TSC0028157
attaatggttggg

SEQ ID NO: 112674 - DNA, 13 bp, Artificial Sequence
  Oligonucleotide for detection of SNP TSC0028157
cccaaccattaat

SEQ ID NO: 112675 - DNA, 13 bp, Artificial Sequence
  Oligonucleotide for detection of SNP TSC0028157
attaattgtcggg

SEQ ID NO: 112676 - DNA, 13 bp, Artificial Sequence
  Oligonucleotide for detection of SNP TSC0028157
cccgacaattaat

SEQ ID NO: 112677 - DNA, 13 bp, Artificial Sequence
  Oligonucleotide for detection of SNP TSC0028157
attaacggttggg

SEQ ID NO: 112678 - DNA, 13 bp, Artificial Sequence
  Oligonucleotide for detection of SNP TSC0028157
cccaaccgttaat

SEQ ID NO: 112679 - DNA, 13 bp, Artificial Sequence
  Oligonucleotide for detection of SNP TSC0028157
attaatggtcggg

SEQ ID NO: 112680 - DNA, 13 bp, Artificial Sequence
  Oligonucleotide for detection of SNP TSC0028157
cccgaccattaat

SEQ ID NO: 112681 - DNA, 13 bp, Artificial Sequence
  Oligonucleotide for detection of SNP TSC0028157
attaacggtcggg

SEQ ID NO: 112682 - DNA, 13 bp, Artificial Sequence
  Oligonucleotide for detection of SNP TSC0028157
cccgaccgttaat

SEQ ID NO: 112683 - DNA, 13 bp, Artificial Sequence
  Oligonucleotide for detection of SNP TSC0028158
atattgagtgtgt

SEQ ID NO: 112684 - DNA, 13 bp, Artificial Sequence
  Oligonucleotide for detection of SNP TSC0028158
acacactcaatat

SEQ ID NO: 112685 - DNA, 13 bp, Artificial Sequence
  Oligonucleotide for detection of SNP TSC0028158
atattgggtgtgt

SEQ ID NO: 112686 - DNA, 13 bp, Artificial Sequence
  Oligonucleotide for detection of SNP TSC0028158
acacacccaatat

SEQ ID NO: 112687 - DNA, 13 bp, Artificial Sequence
  Oligonucleotide for detection of SNP TSC0028161
tgtgtaatatagy

SEQ ID NO: 112688 - DNA, 13 bp, Artificial Sequence
  Oligonucleotide for detection of SNP TSC0028161
rctatattacaca

SEQ ID NO: 112689 - DNA, 13 bp, Artificial Sequence
  Oligonucleotide for detection of SNP TSC0028161
tgtgtagtatagy

SEQ ID NO: 112690 - DNA, 13 bp, Artificial Sequence
  Oligonucleotide for detection of SNP TSC0028161
rctatactacaca

SEQ ID NO: 112691 - DNA, 13 bp, Artificial Sequence
  Oligonucleotide for detection of SNP TSC0028161
cgtgtaatatagy

SEQ ID NO: 112692 - DNA, 13 bp, Artificial Sequence
  Oligonucleotide for detection of SNP TSC0028161
rctatattacacg

SEQ ID NO: 112693 - DNA, 13 bp, Artificial Sequence
  Oligonucleotide for detection of SNP TSC0028161
cgtgtagtatagy

SEQ ID NO: 112694 - DNA, 13 bp, Artificial Sequence
  Oligonucleotide for detection of SNP TSC0028161
rctatactacacg

SEQ ID NO: 112695 - DNA, 13 bp, Artificial Sequence
  Oligonucleotide for detection of SNP TSC0028164
tttgagtgttggy

SEQ ID NO: 112696 - DNA, 13 bp, Artificial Sequence
  Oligonucleotide for detection of SNP TSC0028164
rccaacactcaaa

SEQ ID NO: 112697 - DNA, 13 bp, Artificial Sequence
  Oligonucleotide for detection of SNP TSC0028164
tttgagcgttggy

SEQ ID NO: 112698 - DNA, 13 bp, Artificial Sequence
  Oligonucleotide for detection of SNP TSC0028164
rccaacgctcaaa

SEQ ID NO: 112699 - DNA, 13 bp, Artificial Sequence
  Oligonucleotide for detection of SNP TSC0028164
gttagtgtttaga

SEQ ID NO: 112700 - DNA, 13 bp, Artificial Sequence
  Oligonucleotide for detection of SNP TSC0028164
tctaaacactaac

SEQ ID NO: 112701 - DNA, 13 bp, Artificial Sequence
  Oligonucleotide for detection of SNP TSC0028164
gttagtatttaga

SEQ ID NO: 112702 - DNA, 13 bp, Artificial Sequence
  Oligonucleotide for detection of SNP TSC0028164
tctaaatactaac

SEQ ID NO: 112703 - DNA, 13 bp, Artificial Sequence
  Oligonucleotide for detection of SNP TSC0028164
gttagcgtttaga

SEQ ID NO: 112704 - DNA, 13 bp, Artificial Sequence
  Oligonucleotide for detection of SNP TSC0028164
tctaaacgctaac

SEQ ID NO: 112705 - DNA, 13 bp, Artificial Sequence
  Oligonucleotide for detection of SNP TSC0028166
tgtttttgaagga

SEQ ID NO: 112706 - DNA, 13 bp, Artificial Sequence
  Oligonucleotide for detection of SNP TSC0028166
tccttcaaaaaca

SEQ ID NO: 112707 - DNA, 13 bp, Artificial Sequence
  Oligonucleotide for detection of SNP TSC0028166
tgttttcgaagga

SEQ ID NO: 112708 - DNA, 13 bp, Artificial Sequence
  Oligonucleotide for detection of SNP TSC0028166
tccttcgaaaaca

SEQ ID NO: 112709 - DNA, 13 bp, Artificial Sequence
  Oligonucleotide for detection of SNP TSC0028166
ttttttggaaata

SEQ ID NO: 112710 - DNA, 13 bp, Artificial Sequence
  Oligonucleotide for detection of SNP TSC0028166
tatttccaaaaaa

SEQ ID NO: 112711 - DNA, 13 bp, Artificial Sequence
  Oligonucleotide for detection of SNP TSC0028166
ttttttagaaata

SEQ ID NO: 112712 - DNA, 13 bp, Artificial Sequence
  Oligonucleotide for detection of SNP TSC0028166
tatttctaaaaaa

SEQ ID NO: 112713 - DNA, 13 bp, Artificial Sequence
  Oligonucleotide for detection of SNP TSC0028166
tttttcggaaata

SEQ ID NO: 112714 - DNA, 13 bp, Artificial Sequence
  Oligonucleotide for detection of SNP TSC0028166
tatttccgaaaaa

SEQ ID NO: 112715 - DNA, 13 bp, Artificial Sequence
  Oligonucleotide for detection of SNP TSC0028167
gaaaaggaagaaa

SEQ ID NO: 112716 - DNA, 13 bp, Artificial Sequence
  Oligonucleotide for detection of SNP TSC0028167
tttcttccttttc

SEQ ID NO: 112717 - DNA, 13 bp, Artificial Sequence
  Oligonucleotide for detection of SNP TSC0028167
gaaaagaaagaaa

SEQ ID NO: 112718 - DNA, 13 bp, Artificial Sequence
  Oligonucleotide for detection of SNP TSC0028167
tttctttcttttc

SEQ ID NO: 112719 - DNA, 13 bp, Artificial Sequence
  Oligonucleotide for detection of SNP TSC0028168
atttatatggttt

SEQ ID NO: 112720 - DNA, 13 bp, Artificial Sequence
  Oligonucleotide for detection of SNP TSC0028168
aaaccatataaat

SEQ ID NO: 112721 - DNA, 13 bp, Artificial Sequence
  Oligonucleotide for detection of SNP TSC0028168
atttatttggttt

SEQ ID NO: 112722 - DNA, 13 bp, Artificial Sequence
  Oligonucleotide for detection of SNP TSC0028168
aaaccaaataaat

SEQ ID NO: 112723 - DNA, 13 bp, Artificial Sequence
  Oligonucleotide for detection of SNP TSC0028168
agattatgtgggt

SEQ ID NO: 112724 - DNA, 13 bp, Artificial Sequence
  Oligonucleotide for detection of SNP TSC0028168
acccacataatct

SEQ ID NO: 112725 - DNA, 13 bp, Artificial Sequence
  Oligonucleotide for detection of SNP TSC0028168
agattaagtgggt

SEQ ID NO: 112726 - DNA, 13 bp, Artificial Sequence
  Oligonucleotide for detection of SNP TSC0028168
acccacttaatct

SEQ ID NO: 112727 - DNA, 13 bp, Artificial Sequence
  Oligonucleotide for detection of SNP TSC0028169
tggggagtttttt

SEQ ID NO: 112728 - DNA, 13 bp, Artificial Sequence
  Oligonucleotide for detection of SNP TSC0028169
aaaaaactcccca

SEQ ID NO: 112729 - DNA, 13 bp, Artificial Sequence
  Oligonucleotide for detection of SNP TSC0028169
tggggaatttttt

SEQ ID NO: 112730 - DNA, 13 bp, Artificial Sequence
  Oligonucleotide for detection of SNP TSC0028169
aaaaaattcccca

SEQ ID NO: 112731 - DNA, 13 bp, Artificial Sequence
  Oligonucleotide for detection of SNP TSC0028170
gttaagatagaag

SEQ ID NO: 112732 - DNA, 13 bp, Artificial Sequence
  Oligonucleotide for detection of SNP TSC0028170
cttctatcttaac

SEQ ID NO: 112733 - DNA, 13 bp, Artificial Sequence
  Oligonucleotide for detection of SNP TSC0028170
gttaagttagaag

SEQ ID NO: 112734 - DNA, 13 bp, Artificial Sequence
  Oligonucleotide for detection of SNP TSC0028170
cttctaacttaac

SEQ ID NO: 112735 - DNA, 13 bp, Artificial Sequence
  Oligonucleotide for detection of SNP TSC0028170
tttttggtttgay

SEQ ID NO: 112736 - DNA, 13 bp, Artificial Sequence
  Oligonucleotide for detection of SNP TSC0028170
rtcaaaccaaaaa

SEQ ID NO: 112737 - DNA, 13 bp, Artificial Sequence
  Oligonucleotide for detection of SNP TSC0028171
tttgtagtttgat

SEQ ID NO: 112738 - DNA, 13 bp, Artificial Sequence
  Oligonucleotide for detection of SNP TSC0028171
atcaaactacaaa

SEQ ID NO: 112739 - DNA, 13 bp, Artificial Sequence
  Oligonucleotide for detection of SNP TSC0028172
tttttatgaaagy

SEQ ID NO: 112740 - DNA, 13 bp, Artificial Sequence
  Oligonucleotide for detection of SNP TSC0028172
rctttcataaaaa

SEQ ID NO: 112741 - DNA, 13 bp, Artificial Sequence
  Oligonucleotide for detection of SNP TSC0028172
tttttacgaaagy

SEQ ID NO: 112742 - DNA, 13 bp, Artificial Sequence
  Oligonucleotide for detection of SNP TSC0028172
rctttcgtaaaaa

SEQ ID NO: 112743 - DNA, 13 bp, Artificial Sequence
  Oligonucleotide for detection of SNP TSC0028172
gtttttgtggaga

SEQ ID NO: 112744 - DNA, 13 bp, Artificial Sequence
  Oligonucleotide for detection of SNP TSC0028172
tctccacaaaaac

SEQ ID NO: 112745 - DNA, 13 bp, Artificial Sequence
  Oligonucleotide for detection of SNP TSC0028172
gtttttatggaga

SEQ ID NO: 112746 - DNA, 13 bp, Artificial Sequence
  Oligonucleotide for detection of SNP TSC0028172
tctccataaaaac

SEQ ID NO: 112747 - DNA, 13 bp, Artificial Sequence
  Oligonucleotide for detection of SNP TSC0028172
gttttcgtggaga

SEQ ID NO: 112748 - DNA, 13 bp, Artificial Sequence
  Oligonucleotide for detection of SNP TSC0028172
tctccacgaaaac

SEQ ID NO: 112749 - DNA, 13 bp, Artificial Sequence
  Oligonucleotide for detection of SNP TSC0028173
ttattagtttggt

SEQ ID NO: 112750 - DNA, 13 bp, Artificial Sequence
  Oligonucleotide for detection of SNP TSC0028173
accaaactaataa

SEQ ID NO: 112751 - DNA, 13 bp, Artificial Sequence
  Oligonucleotide for detection of SNP TSC0028173
ttattaatttggt

SEQ ID NO: 112752 - DNA, 13 bp, Artificial Sequence
  Oligonucleotide for detection of SNP TSC0028173
accaaattaataa

SEQ ID NO: 112753 - DNA, 13 bp, Artificial Sequence
  Oligonucleotide for detection of SNP TSC0028174
tataatatgagta

SEQ ID NO: 112754 - DNA, 13 bp, Artificial Sequence
  Oligonucleotide for detection of SNP TSC0028174
tactcatattata

SEQ ID NO: 112755 - DNA, 13 bp, Artificial Sequence
  Oligonucleotide for detection of SNP TSC0028174
tataatttgagta

SEQ ID NO: 112756 - DNA, 13 bp, Artificial Sequence
  Oligonucleotide for detection of SNP TSC0028174
tactcaaattata

SEQ ID NO: 112757 - DNA, 13 bp, Artificial Sequence
  Oligonucleotide for detection of SNP TSC0028174
tatttaggttgta

SEQ ID NO: 112758 - DNA, 13 bp, Artificial Sequence
  Oligonucleotide for detection of SNP TSC0028174
tacaacctaaata

SEQ ID NO: 112759 - DNA, 13 bp, Artificial Sequence
  Oligonucleotide for detection of SNP TSC0028175
gaggtaatattta

SEQ ID NO: 112760 - DNA, 13 bp, Artificial Sequence
  Oligonucleotide for detection of SNP TSC0028175
taaatattacctc

SEQ ID NO: 112761 - DNA, 13 bp, Artificial Sequence
  Oligonucleotide for detection of SNP TSC0028175
gaggtagtattta

SEQ ID NO: 112762 - DNA, 13 bp, Artificial Sequence
  Oligonucleotide for detection of SNP TSC0028175
taaatactacctc

SEQ ID NO: 112763 - DNA, 13 bp, Artificial Sequence
  Oligonucleotide for detection of SNP TSC0028181
taaggtatagtag

SEQ ID NO: 112764 - DNA, 13 bp, Artificial Sequence
  Oligonucleotide for detection of SNP TSC0028181
ctactatacctta

SEQ ID NO: 112765 - DNA, 13 bp, Artificial Sequence
  Oligonucleotide for detection of SNP TSC0028181
taaggtgtagtag

SEQ ID NO: 112766 - DNA, 13 bp, Artificial Sequence
  Oligonucleotide for detection of SNP TSC0028181
ctactacacctta

SEQ ID NO: 112767 - DNA, 13 bp, Artificial Sequence
  Oligonucleotide for detection of SNP TSC0028181
taaggcgtagtag

SEQ ID NO: 112768 - DNA, 13 bp, Artificial Sequence
  Oligonucleotide for detection of SNP TSC0028181
ctactacgcctta

SEQ ID NO: 112769 - DNA, 13 bp, Artificial Sequence
  Oligonucleotide for detection of SNP TSC0028181
ttgttgtgttttg

SEQ ID NO: 112770 - DNA, 13 bp, Artificial Sequence
  Oligonucleotide for detection of SNP TSC0028181
caaaacacaacaa

SEQ ID NO: 112771 - DNA, 13 bp, Artificial Sequence
  Oligonucleotide for detection of SNP TSC0028181
ttgttgcgttttg

SEQ ID NO: 112772 - DNA, 13 bp, Artificial Sequence
  Oligonucleotide for detection of SNP TSC0028181
caaaacgcaacaa

SEQ ID NO: 112773 - DNA, 13 bp, Artificial Sequence
  Oligonucleotide for detection of SNP TSC0028182
tttaggaaggtgg

SEQ ID NO: 112774 - DNA, 13 bp, Artificial Sequence
  Oligonucleotide for detection of SNP TSC0028182
ccaccttcctaaa

SEQ ID NO: 112775 - DNA, 13 bp, Artificial Sequence
  Oligonucleotide for detection of SNP TSC0028182
tttagggaggtgg

SEQ ID NO: 112776 - DNA, 13 bp, Artificial Sequence
  Oligonucleotide for detection of SNP TSC0028182
ccacctccctaaa

SEQ ID NO: 112777 - DNA, 13 bp, Artificial Sequence
  Oligonucleotide for detection of SNP TSC0028184
tttttttgtgatg

SEQ ID NO: 112778 - DNA, 13 bp, Artificial Sequence
  Oligonucleotide for detection of SNP TSC0028184
catcacaaaaaaa

SEQ ID NO: 112779 - DNA, 13 bp, Artificial Sequence
  Oligonucleotide for detection of SNP TSC0028184
ttttttcgtgatg

SEQ ID NO: 112780 - DNA, 13 bp, Artificial Sequence
  Oligonucleotide for detection of SNP TSC0028184
catcacgaaaaaa

SEQ ID NO: 112781 - DNA, 13 bp, Artificial Sequence
  Oligonucleotide for detection of SNP TSC0028184
tattatggagaag

SEQ ID NO: 112782 - DNA, 13 bp, Artificial Sequence
  Oligonucleotide for detection of SNP TSC0028184
cttctccataata

SEQ ID NO: 112783 - DNA, 13 bp, Artificial Sequence
  Oligonucleotide for detection of SNP TSC0028184
tattatagagaag

SEQ ID NO: 112784 - DNA, 13 bp, Artificial Sequence
  Oligonucleotide for detection of SNP TSC0028184
cttctctataata

SEQ ID NO: 112785 - DNA, 13 bp, Artificial Sequence
  Oligonucleotide for detection of SNP TSC0028184
tattacggagaag

SEQ ID NO: 112786 - DNA, 13 bp, Artificial Sequence
  Oligonucleotide for detection of SNP TSC0028184
cttctccgtaata

SEQ ID NO: 112787 - DNA, 13 bp, Artificial Sequence
  Oligonucleotide for detection of SNP TSC0028185
tttgggtggggta

SEQ ID NO: 112788 - DNA, 13 bp, Artificial Sequence
  Oligonucleotide for detection of SNP TSC0028185
taccccacccaaa

SEQ ID NO: 112789 - DNA, 13 bp, Artificial Sequence
  Oligonucleotide for detection of SNP TSC0028185
tttgggcggggta

SEQ ID NO: 112790 - DNA, 13 bp, Artificial Sequence
  Oligonucleotide for detection of SNP TSC0028185
taccccgcccaaa

SEQ ID NO: 112791 - DNA, 13 bp, Artificial Sequence
  Oligonucleotide for detection of SNP TSC0028185
tgttttgtttaga

SEQ ID NO: 112792 - DNA, 13 bp, Artificial Sequence
  Oligonucleotide for detection of SNP TSC0028185
tctaaacaaaaca

SEQ ID NO: 112793 - DNA, 13 bp, Artificial Sequence
  Oligonucleotide for detection of SNP TSC0028185
tgttttatttaga

SEQ ID NO: 112794 - DNA, 13 bp, Artificial Sequence
  Oligonucleotide for detection of SNP TSC0028185
tctaaataaaaca

SEQ ID NO: 112795 - DNA, 13 bp, Artificial Sequence
  Oligonucleotide for detection of SNP TSC0028185
tgtttcgtttaga

SEQ ID NO: 112796 - DNA, 13 bp, Artificial Sequence
  Oligonucleotide for detection of SNP TSC0028185
tctaaacgaaaca

SEQ ID NO: 112797 - DNA, 13 bp, Artificial Sequence
  Oligonucleotide for detection of SNP TSC0028196
gtgtgtattttgg

SEQ ID NO: 112798 - DNA, 13 bp, Artificial Sequence
  Oligonucleotide for detection of SNP TSC0028196
ccaaaatacacac

SEQ ID NO: 112799 - DNA, 13 bp, Artificial Sequence
  Oligonucleotide for detection of SNP TSC0028196
gtgtgttttttgg

SEQ ID NO: 112800 - DNA, 13 bp, Artificial Sequence
  Oligonucleotide for detection of SNP TSC0028196
ccaaaaaacacac

SEQ ID NO: 112801 - DNA, 13 bp, Artificial Sequence
  Oligonucleotide for detection of SNP TSC0028196
gtgtgtatttcgg

SEQ ID NO: 112802 - DNA, 13 bp, Artificial Sequence
  Oligonucleotide for detection of SNP TSC0028196
ccgaaatacacac

SEQ ID NO: 112803 - DNA, 13 bp, Artificial Sequence
  Oligonucleotide for detection of SNP TSC0028196
gtgtgtttttcgg

SEQ ID NO: 112804 - DNA, 13 bp, Artificial Sequence
  Oligonucleotide for detection of SNP TSC0028196
ccgaaaaacacac

SEQ ID NO: 112805 - DNA, 13 bp, Artificial Sequence
  Oligonucleotide for detection of SNP TSC0028196
ttgggatatatay

SEQ ID NO: 112806 - DNA, 13 bp, Artificial Sequence
  Oligonucleotide for detection of SNP TSC0028196
rtatatatcccaa

SEQ ID NO: 112807 - DNA, 13 bp, Artificial Sequence
  Oligonucleotide for detection of SNP TSC0028196
ttgggaaatatay

SEQ ID NO: 112808 - DNA, 13 bp, Artificial Sequence
  Oligonucleotide for detection of SNP TSC0028196
rtatatttcccaa

SEQ ID NO: 112809 - DNA, 13 bp, Artificial Sequence
  Oligonucleotide for detection of SNP TSC0028196
tcgggatatatay

SEQ ID NO: 112810 - DNA, 13 bp, Artificial Sequence
  Oligonucleotide for detection of SNP TSC0028196
rtatatatcccga

SEQ ID NO: 112811 - DNA, 13 bp, Artificial Sequence
  Oligonucleotide for detection of SNP TSC0028196
tcgggaaatatay

SEQ ID NO: 112812 - DNA, 13 bp, Artificial Sequence
  Oligonucleotide for detection of SNP TSC0028196
rtatatttcccga

SEQ ID NO: 112813 - DNA, 13 bp, Artificial Sequence
  Oligonucleotide for detection of SNP TSC0028207
gtttttatgaaty

SEQ ID NO: 112814 - DNA, 13 bp, Artificial Sequence
  Oligonucleotide for detection of SNP TSC0028207
rattcataaaaac

SEQ ID NO: 112815 - DNA, 13 bp, Artificial Sequence
  Oligonucleotide for detection of SNP TSC0028207
gtttttgtgaaty

SEQ ID NO: 112816 - DNA, 13 bp, Artificial Sequence
  Oligonucleotide for detection of SNP TSC0028207
rattcacaaaaac

SEQ ID NO: 112817 - DNA, 13 bp, Artificial Sequence
  Oligonucleotide for detection of SNP TSC0028207
gttttcgtgaaty

SEQ ID NO: 112818 - DNA, 13 bp, Artificial Sequence
  Oligonucleotide for detection of SNP TSC0028207
rattcacgaaaac

SEQ ID NO: 112819 - DNA, 13 bp, Artificial Sequence
  Oligonucleotide for detection of SNP TSC0028207
ggtttatgggggy

SEQ ID NO: 112820 - DNA, 13 bp, Artificial Sequence
  Oligonucleotide for detection of SNP TSC0028207
rcccccataaacc

SEQ ID NO: 112821 - DNA, 13 bp, Artificial Sequence
  Oligonucleotide for detection of SNP TSC0028207
ggtttacgggggy

SEQ ID NO: 112822 - DNA, 13 bp, Artificial Sequence
  Oligonucleotide for detection of SNP TSC0028207
rcccccgtaaacc

SEQ ID NO: 112823 - DNA, 13 bp, Artificial Sequence
  Oligonucleotide for detection of SNP TSC0028208
tgggttttggttg

SEQ ID NO: 112824 - DNA, 13 bp, Artificial Sequence
  Oligonucleotide for detection of SNP TSC0028208
caaccaaaaccca

SEQ ID NO: 112825 - DNA, 13 bp, Artificial Sequence
  Oligonucleotide for detection of SNP TSC0028208
tgggttgtggttg

SEQ ID NO: 112826 - DNA, 13 bp, Artificial Sequence
  Oligonucleotide for detection of SNP TSC0028208
caaccacaaccca

SEQ ID NO: 112827 - DNA, 13 bp, Artificial Sequence
  Oligonucleotide for detection of SNP TSC0028208
tgggttttggtcg

SEQ ID NO: 112828 - DNA, 13 bp, Artificial Sequence
  Oligonucleotide for detection of SNP TSC0028208
cgaccaaaaccca

SEQ ID NO: 112829 - DNA, 13 bp, Artificial Sequence
  Oligonucleotide for detection of SNP TSC0028208
tgggttgtggtcg

SEQ ID NO: 112830 - DNA, 13 bp, Artificial Sequence
  Oligonucleotide for detection of SNP TSC0028208
cgaccacaaccca

SEQ ID NO: 112831 - DNA, 13 bp, Artificial Sequence
  Oligonucleotide for detection of SNP TSC0028208
tgattagaattta

SEQ ID NO: 112832 - DNA, 13 bp, Artificial Sequence
  Oligonucleotide for detection of SNP TSC0028208
taaattctaatca

SEQ ID NO: 112833 - DNA, 13 bp, Artificial Sequence
  Oligonucleotide for detection of SNP TSC0028208
tgattataattta

SEQ ID NO: 112834 - DNA, 13 bp, Artificial Sequence
  Oligonucleotide for detection of SNP TSC0028208
taaattataatca

SEQ ID NO: 112835 - DNA, 13 bp, Artificial Sequence
  Oligonucleotide for detection of SNP TSC0028208
cgattagaattta

SEQ ID NO: 112836 - DNA, 13 bp, Artificial Sequence
  Oligonucleotide for detection of SNP TSC0028208
taaattctaatcg

SEQ ID NO: 112837 - DNA, 13 bp, Artificial Sequence
  Oligonucleotide for detection of SNP TSC0028208
cgattataattta

SEQ ID NO: 112838 - DNA, 13 bp, Artificial Sequence
  Oligonucleotide for detection of SNP TSC0028208
taaattataatcg

SEQ ID NO: 112839 - DNA, 13 bp, Artificial Sequence
  Oligonucleotide for detection of SNP TSC0028210
gtttacgtttttt

SEQ ID NO: 112840 - DNA, 13 bp, Artificial Sequence
  Oligonucleotide for detection of SNP TSC0028210
aaaaaacgtaaac

SEQ ID NO: 112841 - DNA, 13 bp, Artificial Sequence
  Oligonucleotide for detection of SNP TSC0028210
agaaaatgtaagy

SEQ ID NO: 112842 - DNA, 13 bp, Artificial Sequence
  Oligonucleotide for detection of SNP TSC0028210
rcttacattttct

SEQ ID NO: 112843 - DNA, 13 bp, Artificial Sequence
  Oligonucleotide for detection of SNP TSC0028210
agaaaacgtaagy

SEQ ID NO: 112844 - DNA, 13 bp, Artificial Sequence
  Oligonucleotide for detection of SNP TSC0028210
rcttacgttttct

SEQ ID NO: 112845 - DNA, 13 bp, Artificial Sequence
  Oligonucleotide for detection of SNP TSC0028216
tatatagtagttg

SEQ ID NO: 112846 - DNA, 13 bp, Artificial Sequence
  Oligonucleotide for detection of SNP TSC0028216
caactactatata

SEQ ID NO: 112847 - DNA, 13 bp, Artificial Sequence
  Oligonucleotide for detection of SNP TSC0028216
tatatattagttg

SEQ ID NO: 112848 - DNA, 13 bp, Artificial Sequence
  Oligonucleotide for detection of SNP TSC0028216
caactaatatata

SEQ ID NO: 112849 - DNA, 13 bp, Artificial Sequence
  Oligonucleotide for detection of SNP TSC0028216
tatatagtagtcg

SEQ ID NO: 112850 - DNA, 13 bp, Artificial Sequence
  Oligonucleotide for detection of SNP TSC0028216
cgactactatata

SEQ ID NO: 112851 - DNA, 13 bp, Artificial Sequence
  Oligonucleotide for detection of SNP TSC0028216
tatatattagtcg

SEQ ID NO: 112852 - DNA, 13 bp, Artificial Sequence
  Oligonucleotide for detection of SNP TSC0028216
cgactaatatata

SEQ ID NO: 112853 - DNA, 13 bp, Artificial Sequence
  Oligonucleotide for detection of SNP TSC0028216
tggttattatgtg

SEQ ID NO: 112854 - DNA, 13 bp, Artificial Sequence
  Oligonucleotide for detection of SNP TSC0028216
cacataataacca

SEQ ID NO: 112855 - DNA, 13 bp, Artificial Sequence
  Oligonucleotide for detection of SNP TSC0028216
tggttaatatgtg

SEQ ID NO: 112856 - DNA, 13 bp, Artificial Sequence
  Oligonucleotide for detection of SNP TSC0028216
cacatattaacca

SEQ ID NO: 112857 - DNA, 13 bp, Artificial Sequence
  Oligonucleotide for detection of SNP TSC0028216
cggttattatgtg

SEQ ID NO: 112858 - DNA, 13 bp, Artificial Sequence
  Oligonucleotide for detection of SNP TSC0028216
cacataataaccg

SEQ ID NO: 112859 - DNA, 13 bp, Artificial Sequence
  Oligonucleotide for detection of SNP TSC0028216
cggttaatatgtg

SEQ ID NO: 112860 - DNA, 13 bp, Artificial Sequence
  Oligonucleotide for detection of SNP TSC0028216
cacatattaaccg

SEQ ID NO: 112861 - DNA, 13 bp, Artificial Sequence
  Oligonucleotide for detection of SNP TSC0028217
gggtatatatatt

SEQ ID NO: 112862 - DNA, 13 bp, Artificial Sequence
  Oligonucleotide for detection of SNP TSC0028217
aatatatataccc

SEQ ID NO: 112863 - DNA, 13 bp, Artificial Sequence
  Oligonucleotide for detection of SNP TSC0028217
gggtatgtatatt

SEQ ID NO: 112864 - DNA, 13 bp, Artificial Sequence
  Oligonucleotide for detection of SNP TSC0028217
aatatacataccc

SEQ ID NO: 112865 - DNA, 13 bp, Artificial Sequence
  Oligonucleotide for detection of SNP TSC0028218
tgtgggaaaaata

SEQ ID NO: 112866 - DNA, 13 bp, Artificial Sequence
  Oligonucleotide for detection of SNP TSC0028218
tatttttcccaca

SEQ ID NO: 112867 - DNA, 13 bp, Artificial Sequence
  Oligonucleotide for detection of SNP TSC0028218
tgtggggaaaata

SEQ ID NO: 112868 - DNA, 13 bp, Artificial Sequence
  Oligonucleotide for detection of SNP TSC0028218
tattttccccaca

SEQ ID NO: 112869 - DNA, 13 bp, Artificial Sequence
  Oligonucleotide for detection of SNP TSC0028225
aggggtaaattat

SEQ ID NO: 112870 - DNA, 13 bp, Artificial Sequence
  Oligonucleotide for detection of SNP TSC0028225
ataatttacccct

SEQ ID NO: 112871 - DNA, 13 bp, Artificial Sequence
  Oligonucleotide for detection of SNP TSC0028225
aggggtgaattat

SEQ ID NO: 112872 - DNA, 13 bp, Artificial Sequence
  Oligonucleotide for detection of SNP TSC0028225
ataattcacccct

SEQ ID NO: 112873 - DNA, 13 bp, Artificial Sequence
  Oligonucleotide for detection of SNP TSC0028225
aggggcgaattat

SEQ ID NO: 112874 - DNA, 13 bp, Artificial Sequence
  Oligonucleotide for detection of SNP TSC0028225
ataattcgcccct

SEQ ID NO: 112875 - DNA, 13 bp, Artificial Sequence
  Oligonucleotide for detection of SNP TSC0028225
atgatttgttttt

SEQ ID NO: 112876 - DNA, 13 bp, Artificial Sequence
  Oligonucleotide for detection of SNP TSC0028225
aaaaacaaatcat

SEQ ID NO: 112877 - DNA, 13 bp, Artificial Sequence
  Oligonucleotide for detection of SNP TSC0028225
atgattcgttttt

SEQ ID NO: 112878 - DNA, 13 bp, Artificial Sequence
  Oligonucleotide for detection of SNP TSC0028225
aaaaacgaatcat

SEQ ID NO: 112879 - DNA, 13 bp, Artificial Sequence
  Oligonucleotide for detection of SNP TSC0028226
tggaaagaattat

SEQ ID NO: 112880 - DNA, 13 bp, Artificial Sequence
  Oligonucleotide for detection of SNP TSC0028226
ataattctttcca

SEQ ID NO: 112881 - DNA, 13 bp, Artificial Sequence
  Oligonucleotide for detection of SNP TSC0028226
tggaaaaaattat

SEQ ID NO: 112882 - DNA, 13 bp, Artificial Sequence
  Oligonucleotide for detection of SNP TSC0028226
ataattttttcca

SEQ ID NO: 112883 - DNA, 13 bp, Artificial Sequence
  Oligonucleotide for detection of SNP TSC0028229
aggtggatggaty

SEQ ID NO: 112884 - DNA, 13 bp, Artificial Sequence
  Oligonucleotide for detection of SNP TSC0028229
ratccatccacct

SEQ ID NO: 112885 - DNA, 13 bp, Artificial Sequence
  Oligonucleotide for detection of SNP TSC0028229
aggcggatggaty

SEQ ID NO: 112886 - DNA, 13 bp, Artificial Sequence
  Oligonucleotide for detection of SNP TSC0028229
ratccatccgcct

SEQ ID NO: 112887 - DNA, 13 bp, Artificial Sequence
  Oligonucleotide for detection of SNP TSC0028229
aggcgggtggaty

SEQ ID NO: 112888 - DNA, 13 bp, Artificial Sequence
  Oligonucleotide for detection of SNP TSC0028229
ratccacccgcct

SEQ ID NO: 112889 - DNA, 13 bp, Artificial Sequence
  Oligonucleotide for detection of SNP TSC0028233
gtaaaggggagga

SEQ ID NO: 112890 - DNA, 13 bp, Artificial Sequence
  Oligonucleotide for detection of SNP TSC0028233
tcctcccctttac

SEQ ID NO: 112891 - DNA, 13 bp, Artificial Sequence
  Oligonucleotide for detection of SNP TSC0028233
gtaaagtggagga

SEQ ID NO: 112892 - DNA, 13 bp, Artificial Sequence
  Oligonucleotide for detection of SNP TSC0028233
tcctccactttac

SEQ ID NO: 112893 - DNA, 13 bp, Artificial Sequence
  Oligonucleotide for detection of SNP TSC0028234
attggtattaaty

SEQ ID NO: 112894 - DNA, 13 bp, Artificial Sequence
  Oligonucleotide for detection of SNP TSC0028234
rattaataccaat

SEQ ID NO: 112895 - DNA, 13 bp, Artificial Sequence
  Oligonucleotide for detection of SNP TSC0028234
attggtgttaaty

SEQ ID NO: 112896 - DNA, 13 bp, Artificial Sequence
  Oligonucleotide for detection of SNP TSC0028234
rattaacaccaat

SEQ ID NO: 112897 - DNA, 13 bp, Artificial Sequence
  Oligonucleotide for detection of SNP TSC0028234
attggcgttaaty

SEQ ID NO: 112898 - DNA, 13 bp, Artificial Sequence
  Oligonucleotide for detection of SNP TSC0028234
rattaacgccaat

SEQ ID NO: 112899 - DNA, 13 bp, Artificial Sequence
  Oligonucleotide for detection of SNP TSC0028234
gattagtgttaat

SEQ ID NO: 112900 - DNA, 13 bp, Artificial Sequence
  Oligonucleotide for detection of SNP TSC0028234
attaacactaatc

SEQ ID NO: 112901 - DNA, 13 bp, Artificial Sequence
  Oligonucleotide for detection of SNP TSC0028234
gattagcgttaat

SEQ ID NO: 112902 - DNA, 13 bp, Artificial Sequence
  Oligonucleotide for detection of SNP TSC0028234
attaacgctaatc

SEQ ID NO: 112903 - DNA, 13 bp, Artificial Sequence
  Oligonucleotide for detection of SNP TSC0028236
aaaatggggataa

SEQ ID NO: 112904 - DNA, 13 bp, Artificial Sequence
  Oligonucleotide for detection of SNP TSC0028236
ttatccccatttt

SEQ ID NO: 112905 - DNA, 13 bp, Artificial Sequence
  Oligonucleotide for detection of SNP TSC0028236
aaaatgaggataa

SEQ ID NO: 112906 - DNA, 13 bp, Artificial Sequence
  Oligonucleotide for detection of SNP TSC0028236
ttatcctcatttt

SEQ ID NO: 112907 - DNA, 13 bp, Artificial Sequence
  Oligonucleotide for detection of SNP TSC0028237
ttttggatttatt

SEQ ID NO: 112908 - DNA, 13 bp, Artificial Sequence
  Oligonucleotide for detection of SNP TSC0028237
aataaatccaaaa

SEQ ID NO: 112909 - DNA, 13 bp, Artificial Sequence
  Oligonucleotide for detection of SNP TSC0028237
ttttgggtttatt

SEQ ID NO: 112910 - DNA, 13 bp, Artificial Sequence
  Oligonucleotide for detection of SNP TSC0028237
aataaacccaaaa

SEQ ID NO: 112911 - DNA, 13 bp, Artificial Sequence
  Oligonucleotide for detection of SNP TSC0028247
ttttaaagaattt

SEQ ID NO: 112912 - DNA, 13 bp, Artificial Sequence
  Oligonucleotide for detection of SNP TSC0028247
aaattctttaaaa

SEQ ID NO: 112913 - DNA, 13 bp, Artificial Sequence
  Oligonucleotide for detection of SNP TSC0028247
ttttaaggaattt

SEQ ID NO: 112914 - DNA, 13 bp, Artificial Sequence
  Oligonucleotide for detection of SNP TSC0028247
aaattccttaaaa

SEQ ID NO: 112915 - DNA, 13 bp, Artificial Sequence
  Oligonucleotide for detection of SNP TSC0028248
agattggtagggg

SEQ ID NO: 112916 - DNA, 13 bp, Artificial Sequence
  Oligonucleotide for detection of SNP TSC0028248
cccctaccaatct

SEQ ID NO: 112917 - DNA, 13 bp, Artificial Sequence
  Oligonucleotide for detection of SNP TSC0028248
agattgttagggg

SEQ ID NO: 112918 - DNA, 13 bp, Artificial Sequence
  Oligonucleotide for detection of SNP TSC0028248
cccctaacaatct

SEQ ID NO: 112919 - DNA, 13 bp, Artificial Sequence
  Oligonucleotide for detection of SNP TSC0028248
tttttgttaattt

SEQ ID NO: 112920 - DNA, 13 bp, Artificial Sequence
  Oligonucleotide for detection of SNP TSC0028248
aaattaacaaaaa

SEQ ID NO: 112921 - DNA, 13 bp, Artificial Sequence
  Oligonucleotide for detection of SNP TSC0028248
tttttgataattt

SEQ ID NO: 112922 - DNA, 13 bp, Artificial Sequence
  Oligonucleotide for detection of SNP TSC0028248
aaattatcaaaaa

SEQ ID NO: 112923 - DNA, 13 bp, Artificial Sequence
  Oligonucleotide for detection of SNP TSC0028254
agagtagttattg

SEQ ID NO: 112924 - DNA, 13 bp, Artificial Sequence
  Oligonucleotide for detection of SNP TSC0028254
caataactactct

SEQ ID NO: 112925 - DNA, 13 bp, Artificial Sequence
  Oligonucleotide for detection of SNP TSC0028254
agagtaattattg

SEQ ID NO: 112926 - DNA, 13 bp, Artificial Sequence
  Oligonucleotide for detection of SNP TSC0028254
caataattactct

SEQ ID NO: 112927 - DNA, 13 bp, Artificial Sequence
  Oligonucleotide for detection of SNP TSC0028254
agagtagttatcg

SEQ ID NO: 112928 - DNA, 13 bp, Artificial Sequence
  Oligonucleotide for detection of SNP TSC0028254
cgataactactct

SEQ ID NO: 112929 - DNA, 13 bp, Artificial Sequence
  Oligonucleotide for detection of SNP TSC0028254
agagtaattatcg

SEQ ID NO: 112930 - DNA, 13 bp, Artificial Sequence
  Oligonucleotide for detection of SNP TSC0028254
cgataattactct

SEQ ID NO: 112931 - DNA, 13 bp, Artificial Sequence
  Oligonucleotide for detection of SNP TSC0028265
ttaatggtgggtt

SEQ ID NO: 112932 - DNA, 13 bp, Artificial Sequence
  Oligonucleotide for detection of SNP TSC0028265
aacccaccattaa

SEQ ID NO: 112933 - DNA, 13 bp, Artificial Sequence
  Oligonucleotide for detection of SNP TSC0028265
ttaatgatgggtt

SEQ ID NO: 112934 - DNA, 13 bp, Artificial Sequence
  Oligonucleotide for detection of SNP TSC0028265
aacccatcattaa

SEQ ID NO: 112935 - DNA, 13 bp, Artificial Sequence
  Oligonucleotide for detection of SNP TSC0028266
tttatgattttgy

SEQ ID NO: 112936 - DNA, 13 bp, Artificial Sequence
  Oligonucleotide for detection of SNP TSC0028266
rcaaaatcataaa

SEQ ID NO: 112937 - DNA, 13 bp, Artificial Sequence
  Oligonucleotide for detection of SNP TSC0028266
tttatgtttttgy

SEQ ID NO: 112938 - DNA, 13 bp, Artificial Sequence
  Oligonucleotide for detection of SNP TSC0028266
rcaaaaacataaa

SEQ ID NO: 112939 - DNA, 13 bp, Artificial Sequence
  Oligonucleotide for detection of SNP TSC0028266
gtaaagttatgga

SEQ ID NO: 112940 - DNA, 13 bp, Artificial Sequence
  Oligonucleotide for detection of SNP TSC0028266
tccataactttac

SEQ ID NO: 112941 - DNA, 13 bp, Artificial Sequence
  Oligonucleotide for detection of SNP TSC0028266
gtaaagatatgga

SEQ ID NO: 112942 - DNA, 13 bp, Artificial Sequence
  Oligonucleotide for detection of SNP TSC0028266
tccatatctttac

SEQ ID NO: 112943 - DNA, 13 bp, Artificial Sequence
  Oligonucleotide for detection of SNP TSC0028270
tgattttggagtt

SEQ ID NO: 112944 - DNA, 13 bp, Artificial Sequence
  Oligonucleotide for detection of SNP TSC0028270
aactccaaaatca

SEQ ID NO: 112945 - DNA, 13 bp, Artificial Sequence
  Oligonucleotide for detection of SNP TSC0028270
cgattttggagtt

SEQ ID NO: 112946 - DNA, 13 bp, Artificial Sequence
  Oligonucleotide for detection of SNP TSC0028270
aactccaaaatcg

SEQ ID NO: 112947 - DNA, 13 bp, Artificial Sequence
  Oligonucleotide for detection of SNP TSC0028270
tgatttcggagtt

SEQ ID NO: 112948 - DNA, 13 bp, Artificial Sequence
  Oligonucleotide for detection of SNP TSC0028270
aactccgaaatca

SEQ ID NO: 112949 - DNA, 13 bp, Artificial Sequence
  Oligonucleotide for detection of SNP TSC0028270
cgatttcggagtt

SEQ ID NO: 112950 - DNA, 13 bp, Artificial Sequence
  Oligonucleotide for detection of SNP TSC0028270
aactccgaaatcg

SEQ ID NO: 112951 - DNA, 13 bp, Artificial Sequence
  Oligonucleotide for detection of SNP TSC0028270
agttttggggttg

SEQ ID NO: 112952 - DNA, 13 bp, Artificial Sequence
  Oligonucleotide for detection of SNP TSC0028270
caaccccaaaact

SEQ ID NO: 112953 - DNA, 13 bp, Artificial Sequence
  Oligonucleotide for detection of SNP TSC0028270
agttttagggttg

SEQ ID NO: 112954 - DNA, 13 bp, Artificial Sequence
  Oligonucleotide for detection of SNP TSC0028270
caaccctaaaact

SEQ ID NO: 112955 - DNA, 13 bp, Artificial Sequence
  Oligonucleotide for detection of SNP TSC0028270
agtttcggggttg

SEQ ID NO: 112956 - DNA, 13 bp, Artificial Sequence
  Oligonucleotide for detection of SNP TSC0028270
caaccccgaaact

SEQ ID NO: 112957 - DNA, 13 bp, Artificial Sequence
  Oligonucleotide for detection of SNP TSC0028270
agttttagggtcg

SEQ ID NO: 112958 - DNA, 13 bp, Artificial Sequence
  Oligonucleotide for detection of SNP TSC0028270
cgaccctaaaact

SEQ ID NO: 112959 - DNA, 13 bp, Artificial Sequence
  Oligonucleotide for detection of SNP TSC0028270
agttttggggtcg

SEQ ID NO: 112960 - DNA, 13 bp, Artificial Sequence
  Oligonucleotide for detection of SNP TSC0028270
cgaccccaaaact

SEQ ID NO: 112961 - DNA, 13 bp, Artificial Sequence
  Oligonucleotide for detection of SNP TSC0028270
agtttcggggtcg

SEQ ID NO: 112962 - DNA, 13 bp, Artificial Sequence
  Oligonucleotide for detection of SNP TSC0028270
cgaccccgaaact

SEQ ID NO: 112963 - DNA, 13 bp, Artificial Sequence
  Oligonucleotide for detection of SNP TSC0028271
tggggtatgtaaa

SEQ ID NO: 112964 - DNA, 13 bp, Artificial Sequence
  Oligonucleotide for detection of SNP TSC0028271
tttacatacccca

SEQ ID NO: 112965 - DNA, 13 bp, Artificial Sequence
  Oligonucleotide for detection of SNP TSC0028271
tggggtgtgtaaa

SEQ ID NO: 112966 - DNA, 13 bp, Artificial Sequence
  Oligonucleotide for detection of SNP TSC0028271
tttacacacccca

SEQ ID NO: 112967 - DNA, 13 bp, Artificial Sequence
  Oligonucleotide for detection of SNP TSC0028271
tggggcgtgtaaa

SEQ ID NO: 112968 - DNA, 13 bp, Artificial Sequence
  Oligonucleotide for detection of SNP TSC0028271
tttacacgcccca

SEQ ID NO: 112969 - DNA, 13 bp, Artificial Sequence
  Oligonucleotide for detection of SNP TSC0028272
aggagattaggaa

SEQ ID NO: 112970 - DNA, 13 bp, Artificial Sequence
  Oligonucleotide for detection of SNP TSC0028272
ttcctaatctcct

SEQ ID NO: 112971 - DNA, 13 bp, Artificial Sequence
  Oligonucleotide for detection of SNP TSC0028272
aggagagtaggaa

SEQ ID NO: 112972 - DNA, 13 bp, Artificial Sequence
  Oligonucleotide for detection of SNP TSC0028272
ttcctactctcct

SEQ ID NO: 112973 - DNA, 13 bp, Artificial Sequence
  Oligonucleotide for detection of SNP TSC0028274
tgaaggggggaga

SEQ ID NO: 112974 - DNA, 13 bp, Artificial Sequence
  Oligonucleotide for detection of SNP TSC0028274
tctccccccttca

SEQ ID NO: 112975 - DNA, 13 bp, Artificial Sequence
  Oligonucleotide for detection of SNP TSC0028274
tgaaggagggaga

SEQ ID NO: 112976 - DNA, 13 bp, Artificial Sequence
  Oligonucleotide for detection of SNP TSC0028274
tctccctccttca

SEQ ID NO: 112977 - DNA, 13 bp, Artificial Sequence
  Oligonucleotide for detection of SNP TSC0028275
tattagagttgtt

SEQ ID NO: 112978 - DNA, 13 bp, Artificial Sequence
  Oligonucleotide for detection of SNP TSC0028275
aacaactctaata

SEQ ID NO: 112979 - DNA, 13 bp, Artificial Sequence
  Oligonucleotide for detection of SNP TSC0028275
tattagggttgtt

SEQ ID NO: 112980 - DNA, 13 bp, Artificial Sequence
  Oligonucleotide for detection of SNP TSC0028275
aacaaccctaata

SEQ ID NO: 112981 - DNA, 13 bp, Artificial Sequence
  Oligonucleotide for detection of SNP TSC0028282
attagtattatay

SEQ ID NO: 112982 - DNA, 13 bp, Artificial Sequence
  Oligonucleotide for detection of SNP TSC0028282
rtataatactaat

SEQ ID NO: 112983 - DNA, 13 bp, Artificial Sequence
  Oligonucleotide for detection of SNP TSC0028282
attagtgttatay

SEQ ID NO: 112984 - DNA, 13 bp, Artificial Sequence
  Oligonucleotide for detection of SNP TSC0028282
rtataacactaat

SEQ ID NO: 112985 - DNA, 13 bp, Artificial Sequence
  Oligonucleotide for detection of SNP TSC0028282
attagcgttatay

SEQ ID NO: 112986 - DNA, 13 bp, Artificial Sequence
  Oligonucleotide for detection of SNP TSC0028282
rtataacgctaat

SEQ ID NO: 112987 - DNA, 13 bp, Artificial Sequence
  Oligonucleotide for detection of SNP TSC0028282
gtgtggtgttggt

SEQ ID NO: 112988 - DNA, 13 bp, Artificial Sequence
  Oligonucleotide for detection of SNP TSC0028282
accaacaccacac

SEQ ID NO: 112989 - DNA, 13 bp, Artificial Sequence
  Oligonucleotide for detection of SNP TSC0028282
gtgtggcgttggt

SEQ ID NO: 112990 - DNA, 13 bp, Artificial Sequence
  Oligonucleotide for detection of SNP TSC0028282
accaacgccacac

SEQ ID NO: 112991 - DNA, 13 bp, Artificial Sequence
  Oligonucleotide for detection of SNP TSC0028283
atgtgtatgtgtg

SEQ ID NO: 112992 - DNA, 13 bp, Artificial Sequence
  Oligonucleotide for detection of SNP TSC0028283
cacacatacacat

SEQ ID NO: 112993 - DNA, 13 bp, Artificial Sequence
  Oligonucleotide for detection of SNP TSC0028283
atgtgtgtgtgtg

SEQ ID NO: 112994 - DNA, 13 bp, Artificial Sequence
  Oligonucleotide for detection of SNP TSC0028283
cacacacacacat

SEQ ID NO: 112995 - DNA, 13 bp, Artificial Sequence
  Oligonucleotide for detection of SNP TSC0028283
atgtgtatgcgtg

SEQ ID NO: 112996 - DNA, 13 bp, Artificial Sequence
  Oligonucleotide for detection of SNP TSC0028283
cacgcatacacat

SEQ ID NO: 112997 - DNA, 13 bp, Artificial Sequence
  Oligonucleotide for detection of SNP TSC0028283
atgtgcgtgtgtg

SEQ ID NO: 112998 - DNA, 13 bp, Artificial Sequence
  Oligonucleotide for detection of SNP TSC0028283
cacacacgcacat

SEQ ID NO: 112999 - DNA, 13 bp, Artificial Sequence
  Oligonucleotide for detection of SNP TSC0028283
atgtgtatgtgcg

SEQ ID NO: 113000 - DNA, 13 bp, Artificial Sequence
  Oligonucleotide for detection of SNP TSC0028283
cgcacatacacat

SEQ ID NO: 113001 - DNA, 13 bp, Artificial Sequence
  Oligonucleotide for detection of SNP TSC0028283
atgtgtgtgcgtg

SEQ ID NO: 113002 - DNA, 13 bp, Artificial Sequence
  Oligonucleotide for detection of SNP TSC0028283
cacgcacacacat

SEQ ID NO: 113003 - DNA, 13 bp, Artificial Sequence
  Oligonucleotide for detection of SNP TSC0028283
atgtgtatgcgcg

SEQ ID NO: 113004 - DNA, 13 bp, Artificial Sequence
  Oligonucleotide for detection of SNP TSC0028283
cgcgcatacacat

SEQ ID NO: 113005 - DNA, 13 bp, Artificial Sequence
  Oligonucleotide for detection of SNP TSC0028283
atgtgtgtgtgcg

SEQ ID NO: 113006 - DNA, 13 bp, Artificial Sequence
  Oligonucleotide for detection of SNP TSC0028283
cgcacacacacat

SEQ ID NO: 113007 - DNA, 13 bp, Artificial Sequence
  Oligonucleotide for detection of SNP TSC0028283
atgtgcgtgcgtg

SEQ ID NO: 113008 - DNA, 13 bp, Artificial Sequence
  Oligonucleotide for detection of SNP TSC0028283
cacgcacgcacat

SEQ ID NO: 113009 - DNA, 13 bp, Artificial Sequence
  Oligonucleotide for detection of SNP TSC0028283
atgtgcgtgtgcg

SEQ ID NO: 113010 - DNA, 13 bp, Artificial Sequence
  Oligonucleotide for detection of SNP TSC0028283
cgcacacgcacat

SEQ ID NO: 113011 - DNA, 13 bp, Artificial Sequence
  Oligonucleotide for detection of SNP TSC0028283
atgtgtgtgcgcg

SEQ ID NO: 113012 - DNA, 13 bp, Artificial Sequence
  Oligonucleotide for detection of SNP TSC0028283
cgcgcacacacat

SEQ ID NO: 113013 - DNA, 13 bp, Artificial Sequence
  Oligonucleotide for detection of SNP TSC0028283
atgtgcgtgcgcg

SEQ ID NO: 113014 - DNA, 13 bp, Artificial Sequence
  Oligonucleotide for detection of SNP TSC0028283
cgcgcacgcacat

SEQ ID NO: 113015 - DNA, 13 bp, Artificial Sequence
  Oligonucleotide for detection of SNP TSC0028283
tgtgtatgtatat

SEQ ID NO: 113016 - DNA, 13 bp, Artificial Sequence
  Oligonucleotide for detection of SNP TSC0028283
atatacatacaca

SEQ ID NO: 113017 - DNA, 13 bp, Artificial Sequence
  Oligonucleotide for detection of SNP TSC0028283
cgtgtatgtatat

SEQ ID NO: 113018 - DNA, 13 bp, Artificial Sequence
  Oligonucleotide for detection of SNP TSC0028283
atatacatacacg

SEQ ID NO: 113019 - DNA, 13 bp, Artificial Sequence
  Oligonucleotide for detection of SNP TSC0028283
tgcgtatgtatat

SEQ ID NO: 113020 - DNA, 13 bp, Artificial Sequence
  Oligonucleotide for detection of SNP TSC0028283
atatacatacgca

SEQ ID NO: 113021 - DNA, 13 bp, Artificial Sequence
  Oligonucleotide for detection of SNP TSC0028283
cgcgtatgtatat

SEQ ID NO: 113022 - DNA, 13 bp, Artificial Sequence
  Oligonucleotide for detection of SNP TSC0028283
atatacatacgcg

SEQ ID NO: 113023 - DNA, 13 bp, Artificial Sequence
  Oligonucleotide for detection of SNP TSC0028283
tgtgtacgtatat

SEQ ID NO: 113024 - DNA, 13 bp, Artificial Sequence
  Oligonucleotide for detection of SNP TSC0028283
atatacgtacaca

SEQ ID NO: 113025 - DNA, 13 bp, Artificial Sequence
  Oligonucleotide for detection of SNP TSC0028283
cgtgtacgtatat

SEQ ID NO: 113026 - DNA, 13 bp, Artificial Sequence
  Oligonucleotide for detection of SNP TSC0028283
atatacgtacacg

SEQ ID NO: 113027 - DNA, 13 bp, Artificial Sequence
  Oligonucleotide for detection of SNP TSC0028283
tgcgtacgtatat

SEQ ID NO: 113028 - DNA, 13 bp, Artificial Sequence
  Oligonucleotide for detection of SNP TSC0028283
atatacgtacgca

SEQ ID NO: 113029 - DNA, 13 bp, Artificial Sequence
  Oligonucleotide for detection of SNP TSC0028285
tttgaatgttaaa

SEQ ID NO: 113030 - DNA, 13 bp, Artificial Sequence
  Oligonucleotide for detection of SNP TSC0028285
tttaacattcaaa

SEQ ID NO: 113031 - DNA, 13 bp, Artificial Sequence
  Oligonucleotide for detection of SNP TSC0028285
tttgaacgttaaa

SEQ ID NO: 113032 - DNA, 13 bp, Artificial Sequence
  Oligonucleotide for detection of SNP TSC0028285
tttaacgttcaaa

SEQ ID NO: 113033 - DNA, 13 bp, Artificial Sequence
  Oligonucleotide for detection of SNP TSC0028285
tttgatgtttaaa

SEQ ID NO: 113034 - DNA, 13 bp, Artificial Sequence
  Oligonucleotide for detection of SNP TSC0028285
tttaaacatcaaa

SEQ ID NO: 113035 - DNA, 13 bp, Artificial Sequence
  Oligonucleotide for detection of SNP TSC0028285
tttgatatttaaa

SEQ ID NO: 113036 - DNA, 13 bp, Artificial Sequence
  Oligonucleotide for detection of SNP TSC0028285
tttaaatatcaaa

SEQ ID NO: 113037 - DNA, 13 bp, Artificial Sequence
  Oligonucleotide for detection of SNP TSC0028285
tttgacgtttaaa

SEQ ID NO: 113038 - DNA, 13 bp, Artificial Sequence
  Oligonucleotide for detection of SNP TSC0028285
tttaaacgtcaaa

SEQ ID NO: 113039 - DNA, 13 bp, Artificial Sequence
  Oligonucleotide for detection of SNP TSC0028286
tttttgcgttagt

SEQ ID NO: 113040 - DNA, 13 bp, Artificial Sequence
  Oligonucleotide for detection of SNP TSC0028286
actaacgcaaaaa

SEQ ID NO: 113041 - DNA, 13 bp, Artificial Sequence
  Oligonucleotide for detection of SNP TSC0028286
attaatgtaagaa

SEQ ID NO: 113042 - DNA, 13 bp, Artificial Sequence
  Oligonucleotide for detection of SNP TSC0028286
ttcttacattaat

SEQ ID NO: 113043 - DNA, 13 bp, Artificial Sequence
  Oligonucleotide for detection of SNP TSC0028286
attaacgtaagaa

SEQ ID NO: 113044 - DNA, 13 bp, Artificial Sequence
  Oligonucleotide for detection of SNP TSC0028286
ttcttacgttaat

SEQ ID NO: 113045 - DNA, 13 bp, Artificial Sequence
  Oligonucleotide for detection of SNP TSC0028287
tatatagtttgta

SEQ ID NO: 113046 - DNA, 13 bp, Artificial Sequence
  Oligonucleotide for detection of SNP TSC0028287
tacaaactatata

SEQ ID NO: 113047 - DNA, 13 bp, Artificial Sequence
  Oligonucleotide for detection of SNP TSC0028287
tatataatttgta

SEQ ID NO: 113048 - DNA, 13 bp, Artificial Sequence
  Oligonucleotide for detection of SNP TSC0028287
tacaaattatata

SEQ ID NO: 113049 - DNA, 13 bp, Artificial Sequence
  Oligonucleotide for detection of SNP TSC0028293
gttgttattggtt

SEQ ID NO: 113050 - DNA, 13 bp, Artificial Sequence
  Oligonucleotide for detection of SNP TSC0028293
aaccaataacaac

SEQ ID NO: 113051 - DNA, 13 bp, Artificial Sequence
  Oligonucleotide for detection of SNP TSC0028293
gttgttgttggtt

SEQ ID NO: 113052 - DNA, 13 bp, Artificial Sequence
  Oligonucleotide for detection of SNP TSC0028293
aaccaacaacaac

SEQ ID NO: 113053 - DNA, 13 bp, Artificial Sequence
  Oligonucleotide for detection of SNP TSC0028296
tattgggaggtgy

SEQ ID NO: 113054 - DNA, 13 bp, Artificial Sequence
  Oligonucleotide for detection of SNP TSC0028296
rcacctcccaata

SEQ ID NO: 113055 - DNA, 13 bp, Artificial Sequence
  Oligonucleotide for detection of SNP TSC0028296
tattggaaggtgy

SEQ ID NO: 113056 - DNA, 13 bp, Artificial Sequence
  Oligonucleotide for detection of SNP TSC0028296
rcaccttccaata

SEQ ID NO: 113057 - DNA, 13 bp, Artificial Sequence
  Oligonucleotide for detection of SNP TSC0028296
tatcgggaggtgy

SEQ ID NO: 113058 - DNA, 13 bp, Artificial Sequence
  Oligonucleotide for detection of SNP TSC0028296
rcacctcccgata

SEQ ID NO: 113059 - DNA, 13 bp, Artificial Sequence
  Oligonucleotide for detection of SNP TSC0028296
tatcggaaggtgy

SEQ ID NO: 113060 - DNA, 13 bp, Artificial Sequence
  Oligonucleotide for detection of SNP TSC0028296
rcaccttccgata

SEQ ID NO: 113061 - DNA, 13 bp, Artificial Sequence
  Oligonucleotide for detection of SNP TSC0028298
aagttatgggaag

SEQ ID NO: 113062 - DNA, 13 bp, Artificial Sequence
  Oligonucleotide for detection of SNP TSC0028298
cttcccataactt

SEQ ID NO: 113063 - DNA, 13 bp, Artificial Sequence
  Oligonucleotide for detection of SNP TSC0028298
aagttacgggaag

SEQ ID NO: 113064 - DNA, 13 bp, Artificial Sequence
  Oligonucleotide for detection of SNP TSC0028298
cttcccgtaactt

SEQ ID NO: 113065 - DNA, 13 bp, Artificial Sequence
  Oligonucleotide for detection of SNP TSC0028303
tttggtattagty

SEQ ID NO: 113066 - DNA, 13 bp, Artificial Sequence
  Oligonucleotide for detection of SNP TSC0028303
ractaataccaaa

SEQ ID NO: 113067 - DNA, 13 bp, Artificial Sequence
  Oligonucleotide for detection of SNP TSC0028303
tttggtgttagty

SEQ ID NO: 113068 - DNA, 13 bp, Artificial Sequence
  Oligonucleotide for detection of SNP TSC0028303
ractaacaccaaa

SEQ ID NO: 113069 - DNA, 13 bp, Artificial Sequence
  Oligonucleotide for detection of SNP TSC0028303
ttcggtattagty

SEQ ID NO: 113070 - DNA, 13 bp, Artificial Sequence
  Oligonucleotide for detection of SNP TSC0028303
ractaataccgaa

SEQ ID NO: 113071 - DNA, 13 bp, Artificial Sequence
  Oligonucleotide for detection of SNP TSC0028303
ttcggtgttagty

SEQ ID NO: 113072 - DNA, 13 bp, Artificial Sequence
  Oligonucleotide for detection of SNP TSC0028303
ractaacaccgaa

SEQ ID NO: 113073 - DNA, 13 bp, Artificial Sequence
  Oligonucleotide for detection of SNP TSC0028305
gttttaattgtty

SEQ ID NO: 113074 - DNA, 13 bp, Artificial Sequence
  Oligonucleotide for detection of SNP TSC0028305
raacaattaaaac

SEQ ID NO: 113075 - DNA, 13 bp, Artificial Sequence
  Oligonucleotide for detection of SNP TSC0028305
gttttagttgtty

SEQ ID NO: 113076 - DNA, 13 bp, Artificial Sequence
  Oligonucleotide for detection of SNP TSC0028305
raacaactaaaac

SEQ ID NO: 113077 - DNA, 13 bp, Artificial Sequence
  Oligonucleotide for detection of SNP TSC0028308
tattttaggagay

SEQ ID NO: 113078 - DNA, 13 bp, Artificial Sequence
  Oligonucleotide for detection of SNP TSC0028308
rtctcctaaaata

SEQ ID NO: 113079 - DNA, 13 bp, Artificial Sequence
  Oligonucleotide for detection of SNP TSC0028308
tattttgggagay

SEQ ID NO: 113080 - DNA, 13 bp, Artificial Sequence
  Oligonucleotide for detection of SNP TSC0028308
rtctcccaaaata

SEQ ID NO: 113081 - DNA, 13 bp, Artificial Sequence
  Oligonucleotide for detection of SNP TSC0028308
tatttcgggagay

SEQ ID NO: 113082 - DNA, 13 bp, Artificial Sequence
  Oligonucleotide for detection of SNP TSC0028308
rtctcccgaaata

SEQ ID NO: 113083 - DNA, 13 bp, Artificial Sequence
  Oligonucleotide for detection of SNP TSC0028308
gttttttggaatg

SEQ ID NO: 113084 - DNA, 13 bp, Artificial Sequence
  Oligonucleotide for detection of SNP TSC0028308
cattccaaaaaac

SEQ ID NO: 113085 - DNA, 13 bp, Artificial Sequence
  Oligonucleotide for detection of SNP TSC0028308
gtttttcggaatg

SEQ ID NO: 113086 - DNA, 13 bp, Artificial Sequence
  Oligonucleotide for detection of SNP TSC0028308
cattccgaaaaac

SEQ ID NO: 113087 - DNA, 13 bp, Artificial Sequence
  Oligonucleotide for detection of SNP TSC0028309
ttggattttattt

SEQ ID NO: 113088 - DNA, 13 bp, Artificial Sequence
  Oligonucleotide for detection of SNP TSC0028309
aaataaaatccaa

SEQ ID NO: 113089 - DNA, 13 bp, Artificial Sequence
  Oligonucleotide for detection of SNP TSC0028309
ttggatgttattt

SEQ ID NO: 113090 - DNA, 13 bp, Artificial Sequence
  Oligonucleotide for detection of SNP TSC0028309
aaataacatccaa

SEQ ID NO: 113091 - DNA, 13 bp, Artificial Sequence
  Oligonucleotide for detection of SNP TSC0028309
aaataggatttaa

SEQ ID NO: 113092 - DNA, 13 bp, Artificial Sequence
  Oligonucleotide for detection of SNP TSC0028309
ttaaatcctattt

SEQ ID NO: 113093 - DNA, 13 bp, Artificial Sequence
  Oligonucleotide for detection of SNP TSC0028309
aaatagtatttaa

SEQ ID NO: 113094 - DNA, 13 bp, Artificial Sequence
  Oligonucleotide for detection of SNP TSC0028309
ttaaatactattt

SEQ ID NO: 113095 - DNA, 13 bp, Artificial Sequence
  Oligonucleotide for detection of SNP TSC0028310
aatagggttatgg

SEQ ID NO: 113096 - DNA, 13 bp, Artificial Sequence
  Oligonucleotide for detection of SNP TSC0028310
ccataaccctatt

SEQ ID NO: 113097 - DNA, 13 bp, Artificial Sequence
  Oligonucleotide for detection of SNP TSC0028310
aataggtttatgg

SEQ ID NO: 113098 - DNA, 13 bp, Artificial Sequence
  Oligonucleotide for detection of SNP TSC0028310
ccataaacctatt

SEQ ID NO: 113099 - DNA, 13 bp, Artificial Sequence
  Oligonucleotide for detection of SNP TSC0028310
ttatggttttatt

SEQ ID NO: 113100 - DNA, 13 bp, Artificial Sequence
  Oligonucleotide for detection of SNP TSC0028310
aataaaaccataa

SEQ ID NO: 113101 - DNA, 13 bp, Artificial Sequence
  Oligonucleotide for detection of SNP TSC0028310
ttatggatttatt

SEQ ID NO: 113102 - DNA, 13 bp, Artificial Sequence
  Oligonucleotide for detection of SNP TSC0028310
aataaatccataa

SEQ ID NO: 113103 - DNA, 13 bp, Artificial Sequence
  Oligonucleotide for detection of SNP TSC0028311
ttatggatatttg

SEQ ID NO: 113104 - DNA, 13 bp, Artificial Sequence
  Oligonucleotide for detection of SNP TSC0028311
caaatatccataa

SEQ ID NO: 113105 - DNA, 13 bp, Artificial Sequence
  Oligonucleotide for detection of SNP TSC0028311
ttatggttatttg

SEQ ID NO: 113106 - DNA, 13 bp, Artificial Sequence
  Oligonucleotide for detection of SNP TSC0028311
caaataaccataa

SEQ ID NO: 113107 - DNA, 13 bp, Artificial Sequence
  Oligonucleotide for detection of SNP TSC0028311
tagatatttatgg

SEQ ID NO: 113108 - DNA, 13 bp, Artificial Sequence
  Oligonucleotide for detection of SNP TSC0028311
ccataaatatcta

SEQ ID NO: 113109 - DNA, 13 bp, Artificial Sequence
  Oligonucleotide for detection of SNP TSC0028311
tagatagttatgg

SEQ ID NO: 113110 - DNA, 13 bp, Artificial Sequence
  Oligonucleotide for detection of SNP TSC0028311
ccataactatcta

SEQ ID NO: 113111 - DNA, 13 bp, Artificial Sequence
  Oligonucleotide for detection of SNP TSC0028313
ataggtgttagta

SEQ ID NO: 113112 - DNA, 13 bp, Artificial Sequence
  Oligonucleotide for detection of SNP TSC0028313
tactaacacctat

SEQ ID NO: 113113 - DNA, 13 bp, Artificial Sequence
  Oligonucleotide for detection of SNP TSC0028313
ataggtattagta

SEQ ID NO: 113114 - DNA, 13 bp, Artificial Sequence
  Oligonucleotide for detection of SNP TSC0028313
tactaatacctat

SEQ ID NO: 113115 - DNA, 13 bp, Artificial Sequence
  Oligonucleotide for detection of SNP TSC0028314
gttggtatttgta

SEQ ID NO: 113116 - DNA, 13 bp, Artificial Sequence
  Oligonucleotide for detection of SNP TSC0028314
tacaaataccaac

SEQ ID NO: 113117 - DNA, 13 bp, Artificial Sequence
  Oligonucleotide for detection of SNP TSC0028314
gttggtgtttgta

SEQ ID NO: 113118 - DNA, 13 bp, Artificial Sequence
  Oligonucleotide for detection of SNP TSC0028314
tacaaacaccaac

SEQ ID NO: 113119 - DNA, 13 bp, Artificial Sequence
  Oligonucleotide for detection of SNP TSC0028314
gttggcgtttgta

SEQ ID NO: 113120 - DNA, 13 bp, Artificial Sequence
  Oligonucleotide for detection of SNP TSC0028314
tacaaacgccaac

SEQ ID NO: 113121 - DNA, 13 bp, Artificial Sequence
  Oligonucleotide for detection of SNP TSC0028314
tataggtgttagy

SEQ ID NO: 113122 - DNA, 13 bp, Artificial Sequence
  Oligonucleotide for detection of SNP TSC0028314
rctaacacctata

SEQ ID NO: 113123 - DNA, 13 bp, Artificial Sequence
  Oligonucleotide for detection of SNP TSC0028314
tataggcgttagy

SEQ ID NO: 113124 - DNA, 13 bp, Artificial Sequence
  Oligonucleotide for detection of SNP TSC0028314
rctaacgcctata

SEQ ID NO: 113125 - DNA, 13 bp, Artificial Sequence
  Oligonucleotide for detection of SNP TSC0028318
tagttttggggaa

SEQ ID NO: 113126 - DNA, 13 bp, Artificial Sequence
  Oligonucleotide for detection of SNP TSC0028318
ttccccaaaacta

SEQ ID NO: 113127 - DNA, 13 bp, Artificial Sequence
  Oligonucleotide for detection of SNP TSC0028318
tagtttgggggaa

SEQ ID NO: 113128 - DNA, 13 bp, Artificial Sequence
  Oligonucleotide for detection of SNP TSC0028318
ttcccccaaacta

SEQ ID NO: 113129 - DNA, 13 bp, Artificial Sequence
  Oligonucleotide for detection of SNP TSC0028320
tttaaggtgtaga

SEQ ID NO: 113130 - DNA, 13 bp, Artificial Sequence
  Oligonucleotide for detection of SNP TSC0028320
tctacaccttaaa

SEQ ID NO: 113131 - DNA, 13 bp, Artificial Sequence
  Oligonucleotide for detection of SNP TSC0028320
tttaagatgtaga

SEQ ID NO: 113132 - DNA, 13 bp, Artificial Sequence
  Oligonucleotide for detection of SNP TSC0028320
tctacatcttaaa

SEQ ID NO: 113133 - DNA, 13 bp, Artificial Sequence
  Oligonucleotide for detection of SNP TSC0028322
ggtatgatggtgy

SEQ ID NO: 113134 - DNA, 13 bp, Artificial Sequence
  Oligonucleotide for detection of SNP TSC0028322
rcaccatcatacc

SEQ ID NO: 113135 - DNA, 13 bp, Artificial Sequence
  Oligonucleotide for detection of SNP TSC0028322
ggtatggtggtgy

SEQ ID NO: 113136 - DNA, 13 bp, Artificial Sequence
  Oligonucleotide for detection of SNP TSC0028322
rcaccaccatacc

SEQ ID NO: 113137 - DNA, 13 bp, Artificial Sequence
  Oligonucleotide for detection of SNP TSC0028322
ggtatgatggcgy

SEQ ID NO: 113138 - DNA, 13 bp, Artificial Sequence
  Oligonucleotide for detection of SNP TSC0028322
rcgccatcatacc

SEQ ID NO: 113139 - DNA, 13 bp, Artificial Sequence
  Oligonucleotide for detection of SNP TSC0028322
ggtatggtggcgy

SEQ ID NO: 113140 - DNA, 13 bp, Artificial Sequence
  Oligonucleotide for detection of SNP TSC0028322
rcgccaccatacc

SEQ ID NO: 113141 - DNA, 13 bp, Artificial Sequence
  Oligonucleotide for detection of SNP TSC0028328
gtatttattttty

SEQ ID NO: 113142 - DNA, 13 bp, Artificial Sequence
  Oligonucleotide for detection of SNP TSC0028328
raaaaataaatac

SEQ ID NO: 113143 - DNA, 13 bp, Artificial Sequence
  Oligonucleotide for detection of SNP TSC0028328
gtatttgttttty

SEQ ID NO: 113144 - DNA, 13 bp, Artificial Sequence
  Oligonucleotide for detection of SNP TSC0028328
raaaaacaaatac

SEQ ID NO: 113145 - DNA, 13 bp, Artificial Sequence
  Oligonucleotide for detection of SNP TSC0028328
gtattcgttttty

SEQ ID NO: 113146 - DNA, 13 bp, Artificial Sequence
  Oligonucleotide for detection of SNP TSC0028328
raaaaacgaatac

SEQ ID NO: 113147 - DNA, 13 bp, Artificial Sequence
  Oligonucleotide for detection of SNP TSC0028328
ggggaatgaatay

SEQ ID NO: 113148 - DNA, 13 bp, Artificial Sequence
  Oligonucleotide for detection of SNP TSC0028328
rtattcattcccc

SEQ ID NO: 113149 - DNA, 13 bp, Artificial Sequence
  Oligonucleotide for detection of SNP TSC0028328
ggggaacgaatay

SEQ ID NO: 113150 - DNA, 13 bp, Artificial Sequence
  Oligonucleotide for detection of SNP TSC0028328
rtattcgttcccc

SEQ ID NO: 113151 - DNA, 13 bp, Artificial Sequence
  Oligonucleotide for detection of SNP TSC0028330
aagggaaagaaay

SEQ ID NO: 113152 - DNA, 13 bp, Artificial Sequence
  Oligonucleotide for detection of SNP TSC0028330
rtttctttccctt

SEQ ID NO: 113153 - DNA, 13 bp, Artificial Sequence
  Oligonucleotide for detection of SNP TSC0028330
aagggatagaaay

SEQ ID NO: 113154 - DNA, 13 bp, Artificial Sequence
  Oligonucleotide for detection of SNP TSC0028330
rtttctatccctt

SEQ ID NO: 113155 - DNA, 13 bp, Artificial Sequence
  Oligonucleotide for detection of SNP TSC0028332
gtaattattggag

SEQ ID NO: 113156 - DNA, 13 bp, Artificial Sequence
  Oligonucleotide for detection of SNP TSC0028332
ctccaataattac

SEQ ID NO: 113157 - DNA, 13 bp, Artificial Sequence
  Oligonucleotide for detection of SNP TSC0028332
gtaatttttggag

SEQ ID NO: 113158 - DNA, 13 bp, Artificial Sequence
  Oligonucleotide for detection of SNP TSC0028332
ctccaaaaattac

SEQ ID NO: 113159 - DNA, 13 bp, Artificial Sequence
  Oligonucleotide for detection of SNP TSC0028332
ttttagtgattgy

SEQ ID NO: 113160 - DNA, 13 bp, Artificial Sequence
  Oligonucleotide for detection of SNP TSC0028332
rcaatcactaaaa

SEQ ID NO: 113161 - DNA, 13 bp, Artificial Sequence
  Oligonucleotide for detection of SNP TSC0028332
ttttagagattgy

SEQ ID NO: 113162 - DNA, 13 bp, Artificial Sequence
  Oligonucleotide for detection of SNP TSC0028332
rcaatctctaaaa

SEQ ID NO: 113163 - DNA, 13 bp, Artificial Sequence
  Oligonucleotide for detection of SNP TSC0028333
ttgttttgtttta

SEQ ID NO: 113164 - DNA, 13 bp, Artificial Sequence
  Oligonucleotide for detection of SNP TSC0028333
taaaacaaaacaa

SEQ ID NO: 113165 - DNA, 13 bp, Artificial Sequence
  Oligonucleotide for detection of SNP TSC0028333
ttgtttcgtttta

SEQ ID NO: 113166 - DNA, 13 bp, Artificial Sequence
  Oligonucleotide for detection of SNP TSC0028333
taaaacgaaacaa

SEQ ID NO: 113167 - DNA, 13 bp, Artificial Sequence
  Oligonucleotide for detection of SNP TSC0028333
taaaatgaaataa

SEQ ID NO: 113168 - DNA, 13 bp, Artificial Sequence
  Oligonucleotide for detection of SNP TSC0028333
ttatttcatttta

SEQ ID NO: 113169 - DNA, 13 bp, Artificial Sequence
  Oligonucleotide for detection of SNP TSC0028334
atggttgatgaga

SEQ ID NO: 113170 - DNA, 13 bp, Artificial Sequence
  Oligonucleotide for detection of SNP TSC0028334
tctcatcaaccat

SEQ ID NO: 113171 - DNA, 13 bp, Artificial Sequence
  Oligonucleotide for detection of SNP TSC0028334
atggttaatgaga

SEQ ID NO: 113172 - DNA, 13 bp, Artificial Sequence
  Oligonucleotide for detection of SNP TSC0028334
tctcattaaccat

SEQ ID NO: 113173 - DNA, 13 bp, Artificial Sequence
  Oligonucleotide for detection of SNP TSC0028336
aaaaaaaaggtta

SEQ ID NO: 113174 - DNA, 13 bp, Artificial Sequence
  Oligonucleotide for detection of SNP TSC0028336
taacctttttttt

SEQ ID NO: 113175 - DNA, 13 bp, Artificial Sequence
  Oligonucleotide for detection of SNP TSC0028336
aaaaaagaggtta

SEQ ID NO: 113176 - DNA, 13 bp, Artificial Sequence
  Oligonucleotide for detection of SNP TSC0028336
taacctctttttt

SEQ ID NO: 113177 - DNA, 13 bp, Artificial Sequence
  Oligonucleotide for detection of SNP TSC0028337
tttgggggtgtgg

SEQ ID NO: 113178 - DNA, 13 bp, Artificial Sequence
  Oligonucleotide for detection of SNP TSC0028337
ccacacccccaaa

SEQ ID NO: 113179 - DNA, 13 bp, Artificial Sequence
  Oligonucleotide for detection of SNP TSC0028337
tttgggagtgtgg

SEQ ID NO: 113180 - DNA, 13 bp, Artificial Sequence
  Oligonucleotide for detection of SNP TSC0028337
ccacactcccaaa

SEQ ID NO: 113181 - DNA, 13 bp, Artificial Sequence
  Oligonucleotide for detection of SNP TSC0028338
aagggatggttaa

SEQ ID NO: 113182 - DNA, 13 bp, Artificial Sequence
  Oligonucleotide for detection of SNP TSC0028338
ttaaccatccctt

SEQ ID NO: 113183 - DNA, 13 bp, Artificial Sequence
  Oligonucleotide for detection of SNP TSC0028338
aagggacggttaa

SEQ ID NO: 113184 - DNA, 13 bp, Artificial Sequence
  Oligonucleotide for detection of SNP TSC0028338
ttaaccgtccctt

SEQ ID NO: 113185 - DNA, 13 bp, Artificial Sequence
  Oligonucleotide for detection of SNP TSC0028339
atatatataattg

SEQ ID NO: 113186 - DNA, 13 bp, Artificial Sequence
  Oligonucleotide for detection of SNP TSC0028339
caattatatatat

SEQ ID NO: 113187 - DNA, 13 bp, Artificial Sequence
  Oligonucleotide for detection of SNP TSC0028340
tttgatttttgta

SEQ ID NO: 113188 - DNA, 13 bp, Artificial Sequence
  Oligonucleotide for detection of SNP TSC0028340
tacaaaaatcaaa

SEQ ID NO: 113189 - DNA, 13 bp, Artificial Sequence
  Oligonucleotide for detection of SNP TSC0028340
ttcgatttttgta

SEQ ID NO: 113190 - DNA, 13 bp, Artificial Sequence
  Oligonucleotide for detection of SNP TSC0028340
tacaaaaatcgaa

SEQ ID NO: 113191 - DNA, 13 bp, Artificial Sequence
  Oligonucleotide for detection of SNP TSC0028340
ttcgatgtttgta

SEQ ID NO: 113192 - DNA, 13 bp, Artificial Sequence
  Oligonucleotide for detection of SNP TSC0028340
tacaaacatcgaa

SEQ ID NO: 113193 - DNA, 13 bp, Artificial Sequence
  Oligonucleotide for detection of SNP TSC0028340
tttgacgtttgta

SEQ ID NO: 113194 - DNA, 13 bp, Artificial Sequence
  Oligonucleotide for detection of SNP TSC0028340
tacaaacgtcaaa

SEQ ID NO: 113195 - DNA, 13 bp, Artificial Sequence
  Oligonucleotide for detection of SNP TSC0028340
ttcgacgtttgta

SEQ ID NO: 113196 - DNA, 13 bp, Artificial Sequence
  Oligonucleotide for detection of SNP TSC0028340
tacaaacgtcgaa

SEQ ID NO: 113197 - DNA, 13 bp, Artificial Sequence
  Oligonucleotide for detection of SNP TSC0028340
tgtagaggttggg

SEQ ID NO: 113198 - DNA, 13 bp, Artificial Sequence
  Oligonucleotide for detection of SNP TSC0028340
cccaacctctaca

SEQ ID NO: 113199 - DNA, 13 bp, Artificial Sequence
  Oligonucleotide for detection of SNP TSC0028340
tgtagatgttggg

SEQ ID NO: 113200 - DNA, 13 bp, Artificial Sequence
  Oligonucleotide for detection of SNP TSC0028340
cccaacatctaca

SEQ ID NO: 113201 - DNA, 13 bp, Artificial Sequence
  Oligonucleotide for detection of SNP TSC0028340
tgtagaggtcggg

SEQ ID NO: 113202 - DNA, 13 bp, Artificial Sequence
  Oligonucleotide for detection of SNP TSC0028340
cccgacctctaca

SEQ ID NO: 113203 - DNA, 13 bp, Artificial Sequence
  Oligonucleotide for detection of SNP TSC0028340
tgtagacgttggg

SEQ ID NO: 113204 - DNA, 13 bp, Artificial Sequence
  Oligonucleotide for detection of SNP TSC0028340
cccaacgtctaca

SEQ ID NO: 113205 - DNA, 13 bp, Artificial Sequence
  Oligonucleotide for detection of SNP TSC0028340
tgtagatgtcggg

SEQ ID NO: 113206 - DNA, 13 bp, Artificial Sequence
  Oligonucleotide for detection of SNP TSC0028340
cccgacatctaca

SEQ ID NO: 113207 - DNA, 13 bp, Artificial Sequence
  Oligonucleotide for detection of SNP TSC0028340
tgtagacgtcggg

SEQ ID NO: 113208 - DNA, 13 bp, Artificial Sequence
  Oligonucleotide for detection of SNP TSC0028340
cccgacgtctaca

SEQ ID NO: 113209 - DNA, 13 bp, Artificial Sequence
  Oligonucleotide for detection of SNP TSC0028341
gtttaagttttat

SEQ ID NO: 113210 - DNA, 13 bp, Artificial Sequence
  Oligonucleotide for detection of SNP TSC0028341
ataaaacttaaac

SEQ ID NO: 113211 - DNA, 13 bp, Artificial Sequence
  Oligonucleotide for detection of SNP TSC0028341
gtttaaattttat

SEQ ID NO: 113212 - DNA, 13 bp, Artificial Sequence
  Oligonucleotide for detection of SNP TSC0028341
ataaaatttaaac

SEQ ID NO: 113213 - DNA, 13 bp, Artificial Sequence
  Oligonucleotide for detection of SNP TSC0028342
ttaagtgttattg

SEQ ID NO: 113214 - DNA, 13 bp, Artificial Sequence
  Oligonucleotide for detection of SNP TSC0028342
caataacacttaa

SEQ ID NO: 113215 - DNA, 13 bp, Artificial Sequence
  Oligonucleotide for detection of SNP TSC0028342
ttaagtattattg

SEQ ID NO: 113216 - DNA, 13 bp, Artificial Sequence
  Oligonucleotide for detection of SNP TSC0028342
caataatacttaa

SEQ ID NO: 113217 - DNA, 13 bp, Artificial Sequence
  Oligonucleotide for detection of SNP TSC0028343
aggtttaagattg

SEQ ID NO: 113218 - DNA, 13 bp, Artificial Sequence
  Oligonucleotide for detection of SNP TSC0028343
caatcttaaacct

SEQ ID NO: 113219 - DNA, 13 bp, Artificial Sequence
  Oligonucleotide for detection of SNP TSC0028343
aggttttagattg

SEQ ID NO: 113220 - DNA, 13 bp, Artificial Sequence
  Oligonucleotide for detection of SNP TSC0028343
caatctaaaacct

SEQ ID NO: 113221 - DNA, 13 bp, Artificial Sequence
  Oligonucleotide for detection of SNP TSC0028343
taattttagattt

SEQ ID NO: 113222 - DNA, 13 bp, Artificial Sequence
  Oligonucleotide for detection of SNP TSC0028343
aaatctaaaatta

SEQ ID NO: 113223 - DNA, 13 bp, Artificial Sequence
  Oligonucleotide for detection of SNP TSC0028343
taatttgagattt

SEQ ID NO: 113224 - DNA, 13 bp, Artificial Sequence
  Oligonucleotide for detection of SNP TSC0028343
aaatctcaaatta

SEQ ID NO: 113225 - DNA, 13 bp, Artificial Sequence
  Oligonucleotide for detection of SNP TSC0028344
aaatattattttt

SEQ ID NO: 113226 - DNA, 13 bp, Artificial Sequence
  Oligonucleotide for detection of SNP TSC0028344
aaaaataatattt

SEQ ID NO: 113227 - DNA, 13 bp, Artificial Sequence
  Oligonucleotide for detection of SNP TSC0028344
aaatatgattttt

SEQ ID NO: 113228 - DNA, 13 bp, Artificial Sequence
  Oligonucleotide for detection of SNP TSC0028344
aaaaatcatattt

SEQ ID NO: 113229 - DNA, 13 bp, Artificial Sequence
  Oligonucleotide for detection of SNP TSC0028344
aaaggtgatattt

SEQ ID NO: 113230 - DNA, 13 bp, Artificial Sequence
  Oligonucleotide for detection of SNP TSC0028344
aaatatcaccttt

SEQ ID NO: 113231 - DNA, 13 bp, Artificial Sequence
  Oligonucleotide for detection of SNP TSC0028344
aaaggttatattt

SEQ ID NO: 113232 - DNA, 13 bp, Artificial Sequence
  Oligonucleotide for detection of SNP TSC0028344
aaatataaccttt

SEQ ID NO: 113233 - DNA, 13 bp, Artificial Sequence
  Oligonucleotide for detection of SNP TSC0028345
atattttagtaaa

SEQ ID NO: 113234 - DNA, 13 bp, Artificial Sequence
  Oligonucleotide for detection of SNP TSC0028345
tttactaaaatat

SEQ ID NO: 113235 - DNA, 13 bp, Artificial Sequence
  Oligonucleotide for detection of SNP TSC0028345
atatttgagtaaa

SEQ ID NO: 113236 - DNA, 13 bp, Artificial Sequence
  Oligonucleotide for detection of SNP TSC0028345
tttactcaaatat

SEQ ID NO: 113237 - DNA, 13 bp, Artificial Sequence
  Oligonucleotide for detection of SNP TSC0028345
tttattgaaatgt

SEQ ID NO: 113238 - DNA, 13 bp, Artificial Sequence
  Oligonucleotide for detection of SNP TSC0028345
acatttcaataaa

SEQ ID NO: 113239 - DNA, 13 bp, Artificial Sequence
  Oligonucleotide for detection of SNP TSC0028345
tttatttaaatgt

SEQ ID NO: 113240 - DNA, 13 bp, Artificial Sequence
  Oligonucleotide for detection of SNP TSC0028345
acatttaaataaa

SEQ ID NO: 113241 - DNA, 13 bp, Artificial Sequence
  Oligonucleotide for detection of SNP TSC0028347
gtgtagtggagga

SEQ ID NO: 113242 - DNA, 13 bp, Artificial Sequence
  Oligonucleotide for detection of SNP TSC0028347
tcctccactacac

SEQ ID NO: 113243 - DNA, 13 bp, Artificial Sequence
  Oligonucleotide for detection of SNP TSC0028347
gtgtagcggagga

SEQ ID NO: 113244 - DNA, 13 bp, Artificial Sequence
  Oligonucleotide for detection of SNP TSC0028347
tcctccgctacac

SEQ ID NO: 113245 - DNA, 13 bp, Artificial Sequence
  Oligonucleotide for detection of SNP TSC0028348
ataagtatgttaa

SEQ ID NO: 113246 - DNA, 13 bp, Artificial Sequence
  Oligonucleotide for detection of SNP TSC0028348
ttaacatacttat

SEQ ID NO: 113247 - DNA, 13 bp, Artificial Sequence
  Oligonucleotide for detection of SNP TSC0028348
ataagtgtgttaa

SEQ ID NO: 113248 - DNA, 13 bp, Artificial Sequence
  Oligonucleotide for detection of SNP TSC0028348
ttaacacacttat

SEQ ID NO: 113249 - DNA, 13 bp, Artificial Sequence
  Oligonucleotide for detection of SNP TSC0028348
ataagtacgttaa

SEQ ID NO: 113250 - DNA, 13 bp, Artificial Sequence
  Oligonucleotide for detection of SNP TSC0028348
ttaacgtacttat

SEQ ID NO: 113251 - DNA, 13 bp, Artificial Sequence
  Oligonucleotide for detection of SNP TSC0028348
ataagcgtgttaa

SEQ ID NO: 113252 - DNA, 13 bp, Artificial Sequence
  Oligonucleotide for detection of SNP TSC0028348
ttaacacgcttat

SEQ ID NO: 113253 - DNA, 13 bp, Artificial Sequence
  Oligonucleotide for detection of SNP TSC0028348
ataagtgcgttaa

SEQ ID NO: 113254 - DNA, 13 bp, Artificial Sequence
  Oligonucleotide for detection of SNP TSC0028348
ttaacgcacttat

SEQ ID NO: 113255 - DNA, 13 bp, Artificial Sequence
  Oligonucleotide for detection of SNP TSC0028348
ataagcgcgttaa

SEQ ID NO: 113256 - DNA, 13 bp, Artificial Sequence
  Oligonucleotide for detection of SNP TSC0028348
ttaacgcgcttat

SEQ ID NO: 113257 - DNA, 13 bp, Artificial Sequence
  Oligonucleotide for detection of SNP TSC0028348
ttggtgtgtttgt

SEQ ID NO: 113258 - DNA, 13 bp, Artificial Sequence
  Oligonucleotide for detection of SNP TSC0028348
acaaacacaccaa

SEQ ID NO: 113259 - DNA, 13 bp, Artificial Sequence
  Oligonucleotide for detection of SNP TSC0028348
ttggcgtgtttgt

SEQ ID NO: 113260 - DNA, 13 bp, Artificial Sequence
  Oligonucleotide for detection of SNP TSC0028348
acaaacacgccaa

SEQ ID NO: 113261 - DNA, 13 bp, Artificial Sequence
  Oligonucleotide for detection of SNP TSC0028348
ttggtgcgtttgt

SEQ ID NO: 113262 - DNA, 13 bp, Artificial Sequence
  Oligonucleotide for detection of SNP TSC0028348
acaaacgcaccaa

SEQ ID NO: 113263 - DNA, 13 bp, Artificial Sequence
  Oligonucleotide for detection of SNP TSC0028348
ttggcgcgtttgt

SEQ ID NO: 113264 - DNA, 13 bp, Artificial Sequence
  Oligonucleotide for detection of SNP TSC0028348
acaaacgcgccaa

SEQ ID NO: 113265 - DNA, 13 bp, Artificial Sequence
  Oligonucleotide for detection of SNP TSC0028349
ggtagaggtggty

SEQ ID NO: 113266 - DNA, 13 bp, Artificial Sequence
  Oligonucleotide for detection of SNP TSC0028349
raccacctctacc

SEQ ID NO: 113267 - DNA, 13 bp, Artificial Sequence
  Oligonucleotide for detection of SNP TSC0028349
ggtagaagtggty

SEQ ID NO: 113268 - DNA, 13 bp, Artificial Sequence
  Oligonucleotide for detection of SNP TSC0028349
raccacttctacc

SEQ ID NO: 113269 - DNA, 13 bp, Artificial Sequence
  Oligonucleotide for detection of SNP TSC0028350
gttgttattggat

SEQ ID NO: 113270 - DNA, 13 bp, Artificial Sequence
  Oligonucleotide for detection of SNP TSC0028350
atccaataacaac

SEQ ID NO: 113271 - DNA, 13 bp, Artificial Sequence
  Oligonucleotide for detection of SNP TSC0028350
gttgttgttggat

SEQ ID NO: 113272 - DNA, 13 bp, Artificial Sequence
  Oligonucleotide for detection of SNP TSC0028350
atccaacaacaac

SEQ ID NO: 113273 - DNA, 13 bp, Artificial Sequence
  Oligonucleotide for detection of SNP TSC0028351
agggttatggagg

SEQ ID NO: 113274 - DNA, 13 bp, Artificial Sequence
  Oligonucleotide for detection of SNP TSC0028351
cctccataaccct

SEQ ID NO: 113275 - DNA, 13 bp, Artificial Sequence
  Oligonucleotide for detection of SNP TSC0028351
agggttgtggagg

SEQ ID NO: 113276 - DNA, 13 bp, Artificial Sequence
  Oligonucleotide for detection of SNP TSC0028351
cctccacaaccct

SEQ ID NO: 113277 - DNA, 13 bp, Artificial Sequence
  Oligonucleotide for detection of SNP TSC0028352
tataaagtttggg

SEQ ID NO: 113278 - DNA, 13 bp, Artificial Sequence
  Oligonucleotide for detection of SNP TSC0028352
cccaaactttata

SEQ ID NO: 113279 - DNA, 13 bp, Artificial Sequence
  Oligonucleotide for detection of SNP TSC0028352
tataaaatttggg

SEQ ID NO: 113280 - DNA, 13 bp, Artificial Sequence
  Oligonucleotide for detection of SNP TSC0028352
cccaaattttata

SEQ ID NO: 113281 - DNA, 13 bp, Artificial Sequence
  Oligonucleotide for detection of SNP TSC0028353
ttggaaagtttgg

SEQ ID NO: 113282 - DNA, 13 bp, Artificial Sequence
  Oligonucleotide for detection of SNP TSC0028353
ccaaactttccaa

SEQ ID NO: 113283 - DNA, 13 bp, Artificial Sequence
  Oligonucleotide for detection of SNP TSC0028353
ttggaaggtttgg

SEQ ID NO: 113284 - DNA, 13 bp, Artificial Sequence
  Oligonucleotide for detection of SNP TSC0028353
ccaaaccttccaa

SEQ ID NO: 113285 - DNA, 13 bp, Artificial Sequence
  Oligonucleotide for detection of SNP TSC0028353
tcggaaagtttgg

SEQ ID NO: 113286 - DNA, 13 bp, Artificial Sequence
  Oligonucleotide for detection of SNP TSC0028353
ccaaactttccga

SEQ ID NO: 113287 - DNA, 13 bp, Artificial Sequence
  Oligonucleotide for detection of SNP TSC0028353
tcggaaggtttgg

SEQ ID NO: 113288 - DNA, 13 bp, Artificial Sequence
  Oligonucleotide for detection of SNP TSC0028353
ccaaaccttccga

SEQ ID NO: 113289 - DNA, 13 bp, Artificial Sequence
  Oligonucleotide for detection of SNP TSC0028355
tatagatttgtaa

SEQ ID NO: 113290 - DNA, 13 bp, Artificial Sequence
  Oligonucleotide for detection of SNP TSC0028355
ttacaaatctata

SEQ ID NO: 113291 - DNA, 13 bp, Artificial Sequence
  Oligonucleotide for detection of SNP TSC0028355
tatagagttgtaa

SEQ ID NO: 113292 - DNA, 13 bp, Artificial Sequence
  Oligonucleotide for detection of SNP TSC0028355
ttacaactctata

SEQ ID NO: 113293 - DNA, 13 bp, Artificial Sequence
  Oligonucleotide for detection of SNP TSC0028355
ttataggtttgtg

SEQ ID NO: 113294 - DNA, 13 bp, Artificial Sequence
  Oligonucleotide for detection of SNP TSC0028355
cacaaacctataa

SEQ ID NO: 113295 - DNA, 13 bp, Artificial Sequence
  Oligonucleotide for detection of SNP TSC0028355
ttatagttttgtg

SEQ ID NO: 113296 - DNA, 13 bp, Artificial Sequence
  Oligonucleotide for detection of SNP TSC0028355
cacaaaactataa

SEQ ID NO: 113297 - DNA, 13 bp, Artificial Sequence
  Oligonucleotide for detection of SNP TSC0028356
taggtatgtgagg

SEQ ID NO: 113298 - DNA, 13 bp, Artificial Sequence
  Oligonucleotide for detection of SNP TSC0028356
cctcacataccta

SEQ ID NO: 113299 - DNA, 13 bp, Artificial Sequence
  Oligonucleotide for detection of SNP TSC0028356
taggtaggtgagg

SEQ ID NO: 113300 - DNA, 13 bp, Artificial Sequence
  Oligonucleotide for detection of SNP TSC0028356
cctcacctaccta

SEQ ID NO: 113301 - DNA, 13 bp, Artificial Sequence
  Oligonucleotide for detection of SNP TSC0028356
taggtacgtgagg

SEQ ID NO: 113302 - DNA, 13 bp, Artificial Sequence
  Oligonucleotide for detection of SNP TSC0028356
cctcacgtaccta

SEQ ID NO: 113303 - DNA, 13 bp, Artificial Sequence
  Oligonucleotide for detection of SNP TSC0028356
ttttatttatttg

SEQ ID NO: 113304 - DNA, 13 bp, Artificial Sequence
  Oligonucleotide for detection of SNP TSC0028356
caaataaataaaa

SEQ ID NO: 113305 - DNA, 13 bp, Artificial Sequence
  Oligonucleotide for detection of SNP TSC0028356
ttttacgtatttg

SEQ ID NO: 113306 - DNA, 13 bp, Artificial Sequence
  Oligonucleotide for detection of SNP TSC0028356
caaatacgtaaaa

SEQ ID NO: 113307 - DNA, 13 bp, Artificial Sequence
  Oligonucleotide for detection of SNP TSC0028357
atagatgggaagt

SEQ ID NO: 113308 - DNA, 13 bp, Artificial Sequence
  Oligonucleotide for detection of SNP TSC0028357
acttcccatctat

SEQ ID NO: 113309 - DNA, 13 bp, Artificial Sequence
  Oligonucleotide for detection of SNP TSC0028357
atagataggaagt

SEQ ID NO: 113310 - DNA, 13 bp, Artificial Sequence
  Oligonucleotide for detection of SNP TSC0028357
acttcctatctat

SEQ ID NO: 113311 - DNA, 13 bp, Artificial Sequence
  Oligonucleotide for detection of SNP TSC0028357
atagacgggaagt

SEQ ID NO: 113312 - DNA, 13 bp, Artificial Sequence
  Oligonucleotide for detection of SNP TSC0028357
acttcccgtctat

SEQ ID NO: 113313 - DNA, 13 bp, Artificial Sequence
  Oligonucleotide for detection of SNP TSC0028358
gtggttagggttg

SEQ ID NO: 113314 - DNA, 13 bp, Artificial Sequence
  Oligonucleotide for detection of SNP TSC0028358
caaccctaaccac

SEQ ID NO: 113315 - DNA, 13 bp, Artificial Sequence
  Oligonucleotide for detection of SNP TSC0028358
gtggttggggttg

SEQ ID NO: 113316 - DNA, 13 bp, Artificial Sequence
  Oligonucleotide for detection of SNP TSC0028358
caaccccaaccac

SEQ ID NO: 113317 - DNA, 13 bp, Artificial Sequence
  Oligonucleotide for detection of SNP TSC0028358
gtggtcggggttg

SEQ ID NO: 113318 - DNA, 13 bp, Artificial Sequence
  Oligonucleotide for detection of SNP TSC0028358
caaccccgaccac

SEQ ID NO: 113319 - DNA, 13 bp, Artificial Sequence
  Oligonucleotide for detection of SNP TSC0028358
tagttttgattay

SEQ ID NO: 113320 - DNA, 13 bp, Artificial Sequence
  Oligonucleotide for detection of SNP TSC0028358
rtaatcaaaacta

SEQ ID NO: 113321 - DNA, 13 bp, Artificial Sequence
  Oligonucleotide for detection of SNP TSC0028358
tagtttcgattay

SEQ ID NO: 113322 - DNA, 13 bp, Artificial Sequence
  Oligonucleotide for detection of SNP TSC0028358
rtaatcgaaacta

SEQ ID NO: 113323 - DNA, 13 bp, Artificial Sequence
  Oligonucleotide for detection of SNP TSC0028359
gaatttattttgt

SEQ ID NO: 113324 - DNA, 13 bp, Artificial Sequence
  Oligonucleotide for detection of SNP TSC0028359
acaaaataaattc

SEQ ID NO: 113325 - DNA, 13 bp, Artificial Sequence
  Oligonucleotide for detection of SNP TSC0028359
gaatttgttttgt

SEQ ID NO: 113326 - DNA, 13 bp, Artificial Sequence
  Oligonucleotide for detection of SNP TSC0028359
acaaaacaaattc

SEQ ID NO: 113327 - DNA, 13 bp, Artificial Sequence
  Oligonucleotide for detection of SNP TSC0028359
gaattcgttttgt

SEQ ID NO: 113328 - DNA, 13 bp, Artificial Sequence
  Oligonucleotide for detection of SNP TSC0028359
acaaaacgaattc

SEQ ID NO: 113329 - DNA, 13 bp, Artificial Sequence
  Oligonucleotide for detection of SNP TSC0028359
atagggtgaatty

SEQ ID NO: 113330 - DNA, 13 bp, Artificial Sequence
  Oligonucleotide for detection of SNP TSC0028359
raattcaccctat

SEQ ID NO: 113331 - DNA, 13 bp, Artificial Sequence
  Oligonucleotide for detection of SNP TSC0028359
atagggcgaatty

SEQ ID NO: 113332 - DNA, 13 bp, Artificial Sequence
  Oligonucleotide for detection of SNP TSC0028359
raattcgccctat

SEQ ID NO: 113333 - DNA, 13 bp, Artificial Sequence
  Oligonucleotide for detection of SNP TSC0028360
tgtttgagtgtga

SEQ ID NO: 113334 - DNA, 13 bp, Artificial Sequence
  Oligonucleotide for detection of SNP TSC0028360
tcacactcaaaca

SEQ ID NO: 113335 - DNA, 13 bp, Artificial Sequence
  Oligonucleotide for detection of SNP TSC0028360
tgtttgggtgtga

SEQ ID NO: 113336 - DNA, 13 bp, Artificial Sequence
  Oligonucleotide for detection of SNP TSC0028360
tcacacccaaaca

SEQ ID NO: 113337 - DNA, 13 bp, Artificial Sequence
  Oligonucleotide for detection of SNP TSC0028360
cgtttgagtgtga

SEQ ID NO: 113338 - DNA, 13 bp, Artificial Sequence
  Oligonucleotide for detection of SNP TSC0028360
tcacactcaaacg

SEQ ID NO: 113339 - DNA, 13 bp, Artificial Sequence
  Oligonucleotide for detection of SNP TSC0028360
cgtttgggtgtga

SEQ ID NO: 113340 - DNA, 13 bp, Artificial Sequence
  Oligonucleotide for detection of SNP TSC0028360
tcacacccaaacg

SEQ ID NO: 113341 - DNA, 13 bp, Artificial Sequence
  Oligonucleotide for detection of SNP TSC0028364
gggttgtttttta

SEQ ID NO: 113342 - DNA, 13 bp, Artificial Sequence
  Oligonucleotide for detection of SNP TSC0028364
taaaaaacaaccc

SEQ ID NO: 113343 - DNA, 13 bp, Artificial Sequence
  Oligonucleotide for detection of SNP TSC0028364
gggttggttttta

SEQ ID NO: 113344 - DNA, 13 bp, Artificial Sequence
  Oligonucleotide for detection of SNP TSC0028364
taaaaaccaaccc

SEQ ID NO: 113345 - DNA, 13 bp, Artificial Sequence
  Oligonucleotide for detection of SNP TSC0028364
gggtcgtttttta

SEQ ID NO: 113346 - DNA, 13 bp, Artificial Sequence
  Oligonucleotide for detection of SNP TSC0028364
taaaaaacgaccc

SEQ ID NO: 113347 - DNA, 13 bp, Artificial Sequence
  Oligonucleotide for detection of SNP TSC0028364
gggtcggttttta

SEQ ID NO: 113348 - DNA, 13 bp, Artificial Sequence
  Oligonucleotide for detection of SNP TSC0028364
taaaaaccgaccc

SEQ ID NO: 113349 - DNA, 13 bp, Artificial Sequence
  Oligonucleotide for detection of SNP TSC0028364
tggagggtggtty

SEQ ID NO: 113350 - DNA, 13 bp, Artificial Sequence
  Oligonucleotide for detection of SNP TSC0028364
raaccaccctcca

SEQ ID NO: 113351 - DNA, 13 bp, Artificial Sequence
  Oligonucleotide for detection of SNP TSC0028364
tggaggttggtty

SEQ ID NO: 113352 - DNA, 13 bp, Artificial Sequence
  Oligonucleotide for detection of SNP TSC0028364
raaccaacctcca

SEQ ID NO: 113353 - DNA, 13 bp, Artificial Sequence
  Oligonucleotide for detection of SNP TSC0028364
tggagggcggtty

SEQ ID NO: 113354 - DNA, 13 bp, Artificial Sequence
  Oligonucleotide for detection of SNP TSC0028364
raaccgccctcca

SEQ ID NO: 113355 - DNA, 13 bp, Artificial Sequence
  Oligonucleotide for detection of SNP TSC0028364
tggaggtcggtty

SEQ ID NO: 113356 - DNA, 13 bp, Artificial Sequence
  Oligonucleotide for detection of SNP TSC0028364
raaccgacctcca

SEQ ID NO: 113357 - DNA, 13 bp, Artificial Sequence
  Oligonucleotide for detection of SNP TSC0028365
ttggggtttgtaa

SEQ ID NO: 113358 - DNA, 13 bp, Artificial Sequence
  Oligonucleotide for detection of SNP TSC0028365
ttacaaaccccaa

SEQ ID NO: 113359 - DNA, 13 bp, Artificial Sequence
  Oligonucleotide for detection of SNP TSC0028365
ttgggggttgtaa

SEQ ID NO: 113360 - DNA, 13 bp, Artificial Sequence
  Oligonucleotide for detection of SNP TSC0028365
ttacaacccccaa

SEQ ID NO: 113361 - DNA, 13 bp, Artificial Sequence
  Oligonucleotide for detection of SNP TSC0028366
gaggtttgaattt

SEQ ID NO: 113362 - DNA, 13 bp, Artificial Sequence
  Oligonucleotide for detection of SNP TSC0028366
aaattcaaacctc

SEQ ID NO: 113363 - DNA, 13 bp, Artificial Sequence
  Oligonucleotide for detection of SNP TSC0028366
gaggttcgaattt

SEQ ID NO: 113364 - DNA, 13 bp, Artificial Sequence
  Oligonucleotide for detection of SNP TSC0028366
aaattcgaacctc

SEQ ID NO: 113365 - DNA, 13 bp, Artificial Sequence
  Oligonucleotide for detection of SNP TSC0028366
aagtttgaattty

SEQ ID NO: 113366 - DNA, 13 bp, Artificial Sequence
  Oligonucleotide for detection of SNP TSC0028366
raaattcaaactt

SEQ ID NO: 113367 - DNA, 13 bp, Artificial Sequence
  Oligonucleotide for detection of SNP TSC0028366
aagtttaaattty

SEQ ID NO: 113368 - DNA, 13 bp, Artificial Sequence
  Oligonucleotide for detection of SNP TSC0028366
raaatttaaactt

SEQ ID NO: 113369 - DNA, 13 bp, Artificial Sequence
  Oligonucleotide for detection of SNP TSC0028366
aagttcgaattty

SEQ ID NO: 113370 - DNA, 13 bp, Artificial Sequence
  Oligonucleotide for detection of SNP TSC0028366
raaattcgaactt

SEQ ID NO: 113371 - DNA, 13 bp, Artificial Sequence
  Oligonucleotide for detection of SNP TSC0028367
gtattttgtgtaa

SEQ ID NO: 113372 - DNA, 13 bp, Artificial Sequence
  Oligonucleotide for detection of SNP TSC0028367
ttacacaaaatac

SEQ ID NO: 113373 - DNA, 13 bp, Artificial Sequence
  Oligonucleotide for detection of SNP TSC0028367
gtatttcgtgtaa

SEQ ID NO: 113374 - DNA, 13 bp, Artificial Sequence
  Oligonucleotide for detection of SNP TSC0028367
ttacacgaaatac

SEQ ID NO: 113375 - DNA, 13 bp, Artificial Sequence
  Oligonucleotide for detection of SNP TSC0028367
ttatatgagatgy

SEQ ID NO: 113376 - DNA, 13 bp, Artificial Sequence
  Oligonucleotide for detection of SNP TSC0028367
rcatctcatataa

SEQ ID NO: 113377 - DNA, 13 bp, Artificial Sequence
  Oligonucleotide for detection of SNP TSC0028367
ttatataagatgy

SEQ ID NO: 113378 - DNA, 13 bp, Artificial Sequence
  Oligonucleotide for detection of SNP TSC0028367
rcatcttatataa

SEQ ID NO: 113379 - DNA, 13 bp, Artificial Sequence
  Oligonucleotide for detection of SNP TSC0028367
ttatacgagatgy

SEQ ID NO: 113380 - DNA, 13 bp, Artificial Sequence
  Oligonucleotide for detection of SNP TSC0028367
rcatctcgtataa

SEQ ID NO: 113381 - DNA, 13 bp, Artificial Sequence
  Oligonucleotide for detection of SNP TSC0028368
agaggggaagagg

SEQ ID NO: 113382 - DNA, 13 bp, Artificial Sequence
  Oligonucleotide for detection of SNP TSC0028368
cctcttcccctct

SEQ ID NO: 113383 - DNA, 13 bp, Artificial Sequence
  Oligonucleotide for detection of SNP TSC0028368
agagggaaagagg

SEQ ID NO: 113384 - DNA, 13 bp, Artificial Sequence
  Oligonucleotide for detection of SNP TSC0028368
cctctttccctct

SEQ ID NO: 113385 - DNA, 13 bp, Artificial Sequence
  Oligonucleotide for detection of SNP TSC0028369
tatagtgtgtgtg

SEQ ID NO: 113386 - DNA, 13 bp, Artificial Sequence
  Oligonucleotide for detection of SNP TSC0028369
cacacacactata

SEQ ID NO: 113387 - DNA, 13 bp, Artificial Sequence
  Oligonucleotide for detection of SNP TSC0028369
tatagcgtgtgtg

SEQ ID NO: 113388 - DNA, 13 bp, Artificial Sequence
  Oligonucleotide for detection of SNP TSC0028369
cacacacgctata

SEQ ID NO: 113389 - DNA, 13 bp, Artificial Sequence
  Oligonucleotide for detection of SNP TSC0028369
tatagtgtgcgtg

SEQ ID NO: 113390 - DNA, 13 bp, Artificial Sequence
  Oligonucleotide for detection of SNP TSC0028369
cacgcacactata

SEQ ID NO: 113391 - DNA, 13 bp, Artificial Sequence
  Oligonucleotide for detection of SNP TSC0028369
tatagcgtgcgtg

SEQ ID NO: 113392 - DNA, 13 bp, Artificial Sequence
  Oligonucleotide for detection of SNP TSC0028369
cacgcacgctata

SEQ ID NO: 113393 - DNA, 13 bp, Artificial Sequence
  Oligonucleotide for detection of SNP TSC0028369
tatgtatgttatg

SEQ ID NO: 113394 - DNA, 13 bp, Artificial Sequence
  Oligonucleotide for detection of SNP TSC0028369
cataacatacata

SEQ ID NO: 113395 - DNA, 13 bp, Artificial Sequence
  Oligonucleotide for detection of SNP TSC0028369
tacgtatgttatg

SEQ ID NO: 113396 - DNA, 13 bp, Artificial Sequence
  Oligonucleotide for detection of SNP TSC0028369
cataacatacgta

SEQ ID NO: 113397 - DNA, 13 bp, Artificial Sequence
  Oligonucleotide for detection of SNP TSC0028369
tatgtacgttatg

SEQ ID NO: 113398 - DNA, 13 bp, Artificial Sequence
  Oligonucleotide for detection of SNP TSC0028369
cataacgtacata

SEQ ID NO: 113399 - DNA, 13 bp, Artificial Sequence
  Oligonucleotide for detection of SNP TSC0028369
tacgtacgttatg

SEQ ID NO: 113400 - DNA, 13 bp, Artificial Sequence
  Oligonucleotide for detection of SNP TSC0028369
cataacgtacgta

SEQ ID NO: 113401 - DNA, 13 bp, Artificial Sequence
  Oligonucleotide for detection of SNP TSC0028370
attttagttttgy

SEQ ID NO: 113402 - DNA, 13 bp, Artificial Sequence
  Oligonucleotide for detection of SNP TSC0028370
rcaaaactaaaat

SEQ ID NO: 113403 - DNA, 13 bp, Artificial Sequence
  Oligonucleotide for detection of SNP TSC0028371
aaatatgtgttty

SEQ ID NO: 113404 - DNA, 13 bp, Artificial Sequence
  Oligonucleotide for detection of SNP TSC0028371
raaacacatattt

SEQ ID NO: 113405 - DNA, 13 bp, Artificial Sequence
  Oligonucleotide for detection of SNP TSC0028371
aaatatatgttty

SEQ ID NO: 113406 - DNA, 13 bp, Artificial Sequence
  Oligonucleotide for detection of SNP TSC0028371
raaacatatattt

SEQ ID NO: 113407 - DNA, 13 bp, Artificial Sequence
  Oligonucleotide for detection of SNP TSC0028372
taatgtatgtgtg

SEQ ID NO: 113408 - DNA, 13 bp, Artificial Sequence
  Oligonucleotide for detection of SNP TSC0028372
cacacatacatta

SEQ ID NO: 113409 - DNA, 13 bp, Artificial Sequence
  Oligonucleotide for detection of SNP TSC0028372
taatgtgtgtgtg

SEQ ID NO: 113410 - DNA, 13 bp, Artificial Sequence
  Oligonucleotide for detection of SNP TSC0028372
cacacacacatta

SEQ ID NO: 113411 - DNA, 13 bp, Artificial Sequence
  Oligonucleotide for detection of SNP TSC0028372
taatgcgtgtgtg

SEQ ID NO: 113412 - DNA, 13 bp, Artificial Sequence
  Oligonucleotide for detection of SNP TSC0028372
cacacacgcatta

SEQ ID NO: 113413 - DNA, 13 bp, Artificial Sequence
  Oligonucleotide for detection of SNP TSC0028372
tatatatgtattg

SEQ ID NO: 113414 - DNA, 13 bp, Artificial Sequence
  Oligonucleotide for detection of SNP TSC0028372
caatacatatata

SEQ ID NO: 113415 - DNA, 13 bp, Artificial Sequence
  Oligonucleotide for detection of SNP TSC0028372
tatatacgtattg

SEQ ID NO: 113416 - DNA, 13 bp, Artificial Sequence
  Oligonucleotide for detection of SNP TSC0028372
caatacgtatata

SEQ ID NO: 113417 - DNA, 13 bp, Artificial Sequence
  Oligonucleotide for detection of SNP TSC0028375
aaaaaaattttta

SEQ ID NO: 113418 - DNA, 13 bp, Artificial Sequence
  Oligonucleotide for detection of SNP TSC0028375
taaaaattttttt

SEQ ID NO: 113419 - DNA, 13 bp, Artificial Sequence
  Oligonucleotide for detection of SNP TSC0028377
gatgagatttgtg

SEQ ID NO: 113420 - DNA, 13 bp, Artificial Sequence
  Oligonucleotide for detection of SNP TSC0028377
cacaaatctcatc

SEQ ID NO: 113421 - DNA, 13 bp, Artificial Sequence
  Oligonucleotide for detection of SNP TSC0028377
gatgagttttgtg

SEQ ID NO: 113422 - DNA, 13 bp, Artificial Sequence
  Oligonucleotide for detection of SNP TSC0028377
cacaaaactcatc

SEQ ID NO: 113423 - DNA, 13 bp, Artificial Sequence
  Oligonucleotide for detection of SNP TSC0028377
tataagttttaty

SEQ ID NO: 113424 - DNA, 13 bp, Artificial Sequence
  Oligonucleotide for detection of SNP TSC0028377
rataaaacttata

SEQ ID NO: 113425 - DNA, 13 bp, Artificial Sequence
  Oligonucleotide for detection of SNP TSC0028377
tataaggtttaty

SEQ ID NO: 113426 - DNA, 13 bp, Artificial Sequence
  Oligonucleotide for detection of SNP TSC0028377
rataaaccttata

SEQ ID NO: 113427 - DNA, 13 bp, Artificial Sequence
  Oligonucleotide for detection of SNP TSC0028378
agggtttagaggg

SEQ ID NO: 113428 - DNA, 13 bp, Artificial Sequence
  Oligonucleotide for detection of SNP TSC0028378
ccctctaaaccct

SEQ ID NO: 113429 - DNA, 13 bp, Artificial Sequence
  Oligonucleotide for detection of SNP TSC0028378
agggttaagaggg

SEQ ID NO: 113430 - DNA, 13 bp, Artificial Sequence
  Oligonucleotide for detection of SNP TSC0028378
ccctcttaaccct

SEQ ID NO: 113431 - DNA, 13 bp, Artificial Sequence
  Oligonucleotide for detection of SNP TSC0028387
tttgatgtgtaga

SEQ ID NO: 113432 - DNA, 13 bp, Artificial Sequence
  Oligonucleotide for detection of SNP TSC0028387
tctacacatcaaa

SEQ ID NO: 113433 - DNA, 13 bp, Artificial Sequence
  Oligonucleotide for detection of SNP TSC0028387
tttgatttgtaga

SEQ ID NO: 113434 - DNA, 13 bp, Artificial Sequence
  Oligonucleotide for detection of SNP TSC0028387
tctacaaatcaaa

SEQ ID NO: 113435 - DNA, 13 bp, Artificial Sequence
  Oligonucleotide for detection of SNP TSC0028387
tttgacgtgtaga

SEQ ID NO: 113436 - DNA, 13 bp, Artificial Sequence
  Oligonucleotide for detection of SNP TSC0028387
tctacacgtcaaa

SEQ ID NO: 113437 - DNA, 13 bp, Artificial Sequence
  Oligonucleotide for detection of SNP TSC0028387
tttgtatgttaaa

SEQ ID NO: 113438 - DNA, 13 bp, Artificial Sequence
  Oligonucleotide for detection of SNP TSC0028387
tttaacatacaaa

SEQ ID NO: 113439 - DNA, 13 bp, Artificial Sequence
  Oligonucleotide for detection of SNP TSC0028387
tttgtaagttaaa

SEQ ID NO: 113440 - DNA, 13 bp, Artificial Sequence
  Oligonucleotide for detection of SNP TSC0028387
tttaacttacaaa

SEQ ID NO: 113441 - DNA, 13 bp, Artificial Sequence
  Oligonucleotide for detection of SNP TSC0028387
tttgtacgttaaa

SEQ ID NO: 113442 - DNA, 13 bp, Artificial Sequence
  Oligonucleotide for detection of SNP TSC0028387
tttaacgtacaaa

SEQ ID NO: 113443 - DNA, 13 bp, Artificial Sequence
  Oligonucleotide for detection of SNP TSC0028388
taattgttattty

SEQ ID NO: 113444 - DNA, 13 bp, Artificial Sequence
  Oligonucleotide for detection of SNP TSC0028388
raaataacaatta

SEQ ID NO: 113445 - DNA, 13 bp, Artificial Sequence
  Oligonucleotide for detection of SNP TSC0028388
taattggtattty

SEQ ID NO: 113446 - DNA, 13 bp, Artificial Sequence
  Oligonucleotide for detection of SNP TSC0028388
raaataccaatta

SEQ ID NO: 113447 - DNA, 13 bp, Artificial Sequence
  Oligonucleotide for detection of SNP TSC0028388
taatcgttattty

SEQ ID NO: 113448 - DNA, 13 bp, Artificial Sequence
  Oligonucleotide for detection of SNP TSC0028388
raaataacgatta

SEQ ID NO: 113449 - DNA, 13 bp, Artificial Sequence
  Oligonucleotide for detection of SNP TSC0028388
taatcggtattty

SEQ ID NO: 113450 - DNA, 13 bp, Artificial Sequence
  Oligonucleotide for detection of SNP TSC0028388
raaataccgatta

SEQ ID NO: 113451 - DNA, 13 bp, Artificial Sequence
  Oligonucleotide for detection of SNP TSC0028388
ggggtggtggttg

SEQ ID NO: 113452 - DNA, 13 bp, Artificial Sequence
  Oligonucleotide for detection of SNP TSC0028388
caaccaccacccc

SEQ ID NO: 113453 - DNA, 13 bp, Artificial Sequence
  Oligonucleotide for detection of SNP TSC0028388
ggggtgttggttg

SEQ ID NO: 113454 - DNA, 13 bp, Artificial Sequence
  Oligonucleotide for detection of SNP TSC0028388
caaccaacacccc

SEQ ID NO: 113455 - DNA, 13 bp, Artificial Sequence
  Oligonucleotide for detection of SNP TSC0028388
ggggtggcggttg

SEQ ID NO: 113456 - DNA, 13 bp, Artificial Sequence
  Oligonucleotide for detection of SNP TSC0028388
caaccgccacccc

SEQ ID NO: 113457 - DNA, 13 bp, Artificial Sequence
  Oligonucleotide for detection of SNP TSC0028388
ggggtgtcggttg

SEQ ID NO: 113458 - DNA, 13 bp, Artificial Sequence
  Oligonucleotide for detection of SNP TSC0028388
caaccgacacccc

SEQ ID NO: 113459 - DNA, 13 bp, Artificial Sequence
  Oligonucleotide for detection of SNP TSC0028389
tttttttgagtty

SEQ ID NO: 113460 - DNA, 13 bp, Artificial Sequence
  Oligonucleotide for detection of SNP TSC0028389
raactcaaaaaaa

SEQ ID NO: 113461 - DNA, 13 bp, Artificial Sequence
  Oligonucleotide for detection of SNP TSC0028389
gggttttgggaag

SEQ ID NO: 113462 - DNA, 13 bp, Artificial Sequence
  Oligonucleotide for detection of SNP TSC0028389
cttcccaaaaccc

SEQ ID NO: 113463 - DNA, 13 bp, Artificial Sequence
  Oligonucleotide for detection of SNP TSC0028389
gggtttagggaag

SEQ ID NO: 113464 - DNA, 13 bp, Artificial Sequence
  Oligonucleotide for detection of SNP TSC0028389
cttccctaaaccc

SEQ ID NO: 113465 - DNA, 13 bp, Artificial Sequence
  Oligonucleotide for detection of SNP TSC0028389
gggtttcgggaag

SEQ ID NO: 113466 - DNA, 13 bp, Artificial Sequence
  Oligonucleotide for detection of SNP TSC0028389
cttcccgaaaccc

SEQ ID NO: 113467 - DNA, 13 bp, Artificial Sequence
  Oligonucleotide for detection of SNP TSC0028397
ttaggggatatgy

SEQ ID NO: 113468 - DNA, 13 bp, Artificial Sequence
  Oligonucleotide for detection of SNP TSC0028397
rcatatcccctaa

SEQ ID NO: 113469 - DNA, 13 bp, Artificial Sequence
  Oligonucleotide for detection of SNP TSC0028397
ttagggaatatgy

SEQ ID NO: 113470 - DNA, 13 bp, Artificial Sequence
  Oligonucleotide for detection of SNP TSC0028397
rcatattccctaa

SEQ ID NO: 113471 - DNA, 13 bp, Artificial Sequence
  Oligonucleotide for detection of SNP TSC0028398
taattttggataa

SEQ ID NO: 113472 - DNA, 13 bp, Artificial Sequence
  Oligonucleotide for detection of SNP TSC0028398
ttatccaaaatta

SEQ ID NO: 113473 - DNA, 13 bp, Artificial Sequence
  Oligonucleotide for detection of SNP TSC0028398
taatttcggataa

SEQ ID NO: 113474 - DNA, 13 bp, Artificial Sequence
  Oligonucleotide for detection of SNP TSC0028398
ttatccgaaatta

SEQ ID NO: 113475 - DNA, 13 bp, Artificial Sequence
  Oligonucleotide for detection of SNP TSC0028398
ttatttggagtta

SEQ ID NO: 113476 - DNA, 13 bp, Artificial Sequence
  Oligonucleotide for detection of SNP TSC0028398
taactccaaataa

SEQ ID NO: 113477 - DNA, 13 bp, Artificial Sequence
  Oligonucleotide for detection of SNP TSC0028398
ttatttagagtta

SEQ ID NO: 113478 - DNA, 13 bp, Artificial Sequence
  Oligonucleotide for detection of SNP TSC0028398
taactctaaataa

SEQ ID NO: 113479 - DNA, 13 bp, Artificial Sequence
  Oligonucleotide for detection of SNP TSC0028398
ttattcggagtta

SEQ ID NO: 113480 - DNA, 13 bp, Artificial Sequence
  Oligonucleotide for detection of SNP TSC0028398
taactccgaataa

SEQ ID NO: 113481 - DNA, 13 bp, Artificial Sequence
  Oligonucleotide for detection of SNP TSC0028402
tatttgggtttgt

SEQ ID NO: 113482 - DNA, 13 bp, Artificial Sequence
  Oligonucleotide for detection of SNP TSC0028402
acaaacccaaata

SEQ ID NO: 113483 - DNA, 13 bp, Artificial Sequence
  Oligonucleotide for detection of SNP TSC0028402
tatttgtgtttgt

SEQ ID NO: 113484 - DNA, 13 bp, Artificial Sequence
  Oligonucleotide for detection of SNP TSC0028402
acaaacacaaata

SEQ ID NO: 113485 - DNA, 13 bp, Artificial Sequence
  Oligonucleotide for detection of SNP TSC0028402
atagatttaaata

SEQ ID NO: 113486 - DNA, 13 bp, Artificial Sequence
  Oligonucleotide for detection of SNP TSC0028402
tatttaaatctat

SEQ ID NO: 113487 - DNA, 13 bp, Artificial Sequence
  Oligonucleotide for detection of SNP TSC0028402
atagatataaata

SEQ ID NO: 113488 - DNA, 13 bp, Artificial Sequence
  Oligonucleotide for detection of SNP TSC0028402
tatttatatctat

SEQ ID NO: 113489 - DNA, 13 bp, Artificial Sequence
  Oligonucleotide for detection of SNP TSC0028403
gttttaggtgtat

SEQ ID NO: 113490 - DNA, 13 bp, Artificial Sequence
  Oligonucleotide for detection of SNP TSC0028403
atacacctaaaac

SEQ ID NO: 113491 - DNA, 13 bp, Artificial Sequence
  Oligonucleotide for detection of SNP TSC0028403
gttttaagtgtat

SEQ ID NO: 113492 - DNA, 13 bp, Artificial Sequence
  Oligonucleotide for detection of SNP TSC0028403
atacacttaaaac

SEQ ID NO: 113493 - DNA, 13 bp, Artificial Sequence
  Oligonucleotide for detection of SNP TSC0028406
tgggatgtagggt

SEQ ID NO: 113494 - DNA, 13 bp, Artificial Sequence
  Oligonucleotide for detection of SNP TSC0028406
accctacatccca

SEQ ID NO: 113495 - DNA, 13 bp, Artificial Sequence
  Oligonucleotide for detection of SNP TSC0028406
tgggatatagggt

SEQ ID NO: 113496 - DNA, 13 bp, Artificial Sequence
  Oligonucleotide for detection of SNP TSC0028406
accctatatccca

SEQ ID NO: 113497 - DNA, 13 bp, Artificial Sequence
  Oligonucleotide for detection of SNP TSC0028406
tgggacgtagggt

SEQ ID NO: 113498 - DNA, 13 bp, Artificial Sequence
  Oligonucleotide for detection of SNP TSC0028406
accctacgtccca

SEQ ID NO: 113499 - DNA, 13 bp, Artificial Sequence
  Oligonucleotide for detection of SNP TSC0028408
tgagtaggttttg

SEQ ID NO: 113500 - DNA, 13 bp, Artificial Sequence
  Oligonucleotide for detection of SNP TSC0028408
caaaacctactca

SEQ ID NO: 113501 - DNA, 13 bp, Artificial Sequence
  Oligonucleotide for detection of SNP TSC0028408
tgagtaagttttg

SEQ ID NO: 113502 - DNA, 13 bp, Artificial Sequence
  Oligonucleotide for detection of SNP TSC0028408
caaaacttactca

SEQ ID NO: 113503 - DNA, 13 bp, Artificial Sequence
  Oligonucleotide for detection of SNP TSC0028409
atattaagaaaaa

SEQ ID NO: 113504 - DNA, 13 bp, Artificial Sequence
  Oligonucleotide for detection of SNP TSC0028409
tttttcttaatat

SEQ ID NO: 113505 - DNA, 13 bp, Artificial Sequence
  Oligonucleotide for detection of SNP TSC0028409
atattaggaaaaa

SEQ ID NO: 113506 - DNA, 13 bp, Artificial Sequence
  Oligonucleotide for detection of SNP TSC0028409
tttttcctaatat

SEQ ID NO: 113507 - DNA, 13 bp, Artificial Sequence
  Oligonucleotide for detection of SNP TSC0028410
ttattaaaggttt

SEQ ID NO: 113508 - DNA, 13 bp, Artificial Sequence
  Oligonucleotide for detection of SNP TSC0028410
aaacctttaataa

SEQ ID NO: 113509 - DNA, 13 bp, Artificial Sequence
  Oligonucleotide for detection of SNP TSC0028410
ttattagaggttt

SEQ ID NO: 113510 - DNA, 13 bp, Artificial Sequence
  Oligonucleotide for detection of SNP TSC0028410
aaacctctaataa

SEQ ID NO: 113511 - DNA, 13 bp, Artificial Sequence
  Oligonucleotide for detection of SNP TSC0028412
ggttttggttaty

SEQ ID NO: 113512 - DNA, 13 bp, Artificial Sequence
  Oligonucleotide for detection of SNP TSC0028412
rataaccaaaacc

SEQ ID NO: 113513 - DNA, 13 bp, Artificial Sequence
  Oligonucleotide for detection of SNP TSC0028412
ggtttcggttaty

SEQ ID NO: 113514 - DNA, 13 bp, Artificial Sequence
  Oligonucleotide for detection of SNP TSC0028412
rataaccgaaacc

SEQ ID NO: 113515 - DNA, 13 bp, Artificial Sequence
  Oligonucleotide for detection of SNP TSC0028412
ggtggtggggaty

SEQ ID NO: 113516 - DNA, 13 bp, Artificial Sequence
  Oligonucleotide for detection of SNP TSC0028412
ratccccaccacc

SEQ ID NO: 113517 - DNA, 13 bp, Artificial Sequence
  Oligonucleotide for detection of SNP TSC0028412
ggtggttgggaty

SEQ ID NO: 113518 - DNA, 13 bp, Artificial Sequence
  Oligonucleotide for detection of SNP TSC0028412
ratcccaaccacc

SEQ ID NO: 113519 - DNA, 13 bp, Artificial Sequence
  Oligonucleotide for detection of SNP TSC0028412
ggtggcggggaty

SEQ ID NO: 113520 - DNA, 13 bp, Artificial Sequence
  Oligonucleotide for detection of SNP TSC0028412
ratccccgccacc

SEQ ID NO: 113521 - DNA, 13 bp, Artificial Sequence
  Oligonucleotide for detection of SNP TSC0028412
ggtggtcgggaty

SEQ ID NO: 113522 - DNA, 13 bp, Artificial Sequence
  Oligonucleotide for detection of SNP TSC0028412
ratcccgaccacc

SEQ ID NO: 113523 - DNA, 13 bp, Artificial Sequence
  Oligonucleotide for detection of SNP TSC0028413
tgaagtattaatt

SEQ ID NO: 113524 - DNA, 13 bp, Artificial Sequence
  Oligonucleotide for detection of SNP TSC0028413
aattaatacttca

SEQ ID NO: 113525 - DNA, 13 bp, Artificial Sequence
  Oligonucleotide for detection of SNP TSC0028413
tgaagtgttaatt

SEQ ID NO: 113526 - DNA, 13 bp, Artificial Sequence
  Oligonucleotide for detection of SNP TSC0028413
aattaacacttca

SEQ ID NO: 113527 - DNA, 13 bp, Artificial Sequence
  Oligonucleotide for detection of SNP TSC0028415
gagggggtgtttt

SEQ ID NO: 113528 - DNA, 13 bp, Artificial Sequence
  Oligonucleotide for detection of SNP TSC0028415
aaaacaccccctc

SEQ ID NO: 113529 - DNA, 13 bp, Artificial Sequence
  Oligonucleotide for detection of SNP TSC0028415
gaggggttgtttt

SEQ ID NO: 113530 - DNA, 13 bp, Artificial Sequence
  Oligonucleotide for detection of SNP TSC0028415
aaaacaacccctc

SEQ ID NO: 113531 - DNA, 13 bp, Artificial Sequence
  Oligonucleotide for detection of SNP TSC0028415
agaatatttttty

SEQ ID NO: 113532 - DNA, 13 bp, Artificial Sequence
  Oligonucleotide for detection of SNP TSC0028415
raaaaaatattct

SEQ ID NO: 113533 - DNA, 13 bp, Artificial Sequence
  Oligonucleotide for detection of SNP TSC0028415
agaataattttty

SEQ ID NO: 113534 - DNA, 13 bp, Artificial Sequence
  Oligonucleotide for detection of SNP TSC0028415
raaaaattattct

SEQ ID NO: 113535 - DNA, 13 bp, Artificial Sequence
  Oligonucleotide for detection of SNP TSC0028416
tgtgtttggtaty

SEQ ID NO: 113536 - DNA, 13 bp, Artificial Sequence
  Oligonucleotide for detection of SNP TSC0028416
rataccaaacaca

SEQ ID NO: 113537 - DNA, 13 bp, Artificial Sequence
  Oligonucleotide for detection of SNP TSC0028416
tgcgtttggtaty

SEQ ID NO: 113538 - DNA, 13 bp, Artificial Sequence
  Oligonucleotide for detection of SNP TSC0028416
rataccaaacgca

SEQ ID NO: 113539 - DNA, 13 bp, Artificial Sequence
  Oligonucleotide for detection of SNP TSC0028416
tgtgttcggtaty

SEQ ID NO: 113540 - DNA, 13 bp, Artificial Sequence
  Oligonucleotide for detection of SNP TSC0028416
rataccgaacaca

SEQ ID NO: 113541 - DNA, 13 bp, Artificial Sequence
  Oligonucleotide for detection of SNP TSC0028416
tgcgttcggtaty

SEQ ID NO: 113542 - DNA, 13 bp, Artificial Sequence
  Oligonucleotide for detection of SNP TSC0028416
rataccgaacgca

SEQ ID NO: 113543 - DNA, 13 bp, Artificial Sequence
  Oligonucleotide for detection of SNP TSC0028416
ggtgttgagtgta

SEQ ID NO: 113544 - DNA, 13 bp, Artificial Sequence
  Oligonucleotide for detection of SNP TSC0028416
tacactcaacacc

SEQ ID NO: 113545 - DNA, 13 bp, Artificial Sequence
  Oligonucleotide for detection of SNP TSC0028416
ggtgttaagtgta

SEQ ID NO: 113546 - DNA, 13 bp, Artificial Sequence
  Oligonucleotide for detection of SNP TSC0028416
tacacttaacacc

SEQ ID NO: 113547 - DNA, 13 bp, Artificial Sequence
  Oligonucleotide for detection of SNP TSC0028416
ggtgtcgagtgta

SEQ ID NO: 113548 - DNA, 13 bp, Artificial Sequence
  Oligonucleotide for detection of SNP TSC0028416
tacactcgacacc

SEQ ID NO: 113549 - DNA, 13 bp, Artificial Sequence
  Oligonucleotide for detection of SNP TSC0028416
ggtgttaagcgta

SEQ ID NO: 113550 - DNA, 13 bp, Artificial Sequence
  Oligonucleotide for detection of SNP TSC0028416
tacgcttaacacc

SEQ ID NO: 113551 - DNA, 13 bp, Artificial Sequence
  Oligonucleotide for detection of SNP TSC0028416
ggtgttgagcgta

SEQ ID NO: 113552 - DNA, 13 bp, Artificial Sequence
  Oligonucleotide for detection of SNP TSC0028416
tacgctcaacacc

SEQ ID NO: 113553 - DNA, 13 bp, Artificial Sequence
  Oligonucleotide for detection of SNP TSC0028416
ggtgtcgagcgta

SEQ ID NO: 113554 - DNA, 13 bp, Artificial Sequence
  Oligonucleotide for detection of SNP TSC0028416
tacgctcgacacc

SEQ ID NO: 113555 - DNA, 13 bp, Artificial Sequence
  Oligonucleotide for detection of SNP TSC0028419
taggggtgggttg

SEQ ID NO: 113556 - DNA, 13 bp, Artificial Sequence
  Oligonucleotide for detection of SNP TSC0028419
caacccaccccta

SEQ ID NO: 113557 - DNA, 13 bp, Artificial Sequence
  Oligonucleotide for detection of SNP TSC0028419
taggggcgggttg

SEQ ID NO: 113558 - DNA, 13 bp, Artificial Sequence
  Oligonucleotide for detection of SNP TSC0028419
caacccgccccta

SEQ ID NO: 113559 - DNA, 13 bp, Artificial Sequence
  Oligonucleotide for detection of SNP TSC0028419
tagtttgtttttg

SEQ ID NO: 113560 - DNA, 13 bp, Artificial Sequence
  Oligonucleotide for detection of SNP TSC0028419
caaaaacaaacta

SEQ ID NO: 113561 - DNA, 13 bp, Artificial Sequence
  Oligonucleotide for detection of SNP TSC0028419
tagtttatttttg

SEQ ID NO: 113562 - DNA, 13 bp, Artificial Sequence
  Oligonucleotide for detection of SNP TSC0028419
caaaaataaacta

SEQ ID NO: 113563 - DNA, 13 bp, Artificial Sequence
  Oligonucleotide for detection of SNP TSC0028419
tagttcgtttttg

SEQ ID NO: 113564 - DNA, 13 bp, Artificial Sequence
  Oligonucleotide for detection of SNP TSC0028419
caaaaacgaacta

SEQ ID NO: 113565 - DNA, 13 bp, Artificial Sequence
  Oligonucleotide for detection of SNP TSC0028420
tttttagaggaag

SEQ ID NO: 113566 - DNA, 13 bp, Artificial Sequence
  Oligonucleotide for detection of SNP TSC0028420
cttcctctaaaaa

SEQ ID NO: 113567 - DNA, 13 bp, Artificial Sequence
  Oligonucleotide for detection of SNP TSC0028420
tttttaaaggaag

SEQ ID NO: 113568 - DNA, 13 bp, Artificial Sequence
  Oligonucleotide for detection of SNP TSC0028420
cttcctttaaaaa

SEQ ID NO: 113569 - DNA, 13 bp, Artificial Sequence
  Oligonucleotide for detection of SNP TSC0028421
tatggtatatgty

SEQ ID NO: 113570 - DNA, 13 bp, Artificial Sequence
  Oligonucleotide for detection of SNP TSC0028421
racatataccata

SEQ ID NO: 113571 - DNA, 13 bp, Artificial Sequence
  Oligonucleotide for detection of SNP TSC0028421
tatggtgtatgty

SEQ ID NO: 113572 - DNA, 13 bp, Artificial Sequence
  Oligonucleotide for detection of SNP TSC0028421
racatacaccata

SEQ ID NO: 113573 - DNA, 13 bp, Artificial Sequence
  Oligonucleotide for detection of SNP TSC0028421
tatggcgtatgty

SEQ ID NO: 113574 - DNA, 13 bp, Artificial Sequence
  Oligonucleotide for detection of SNP TSC0028421
racatacgccata

SEQ ID NO: 113575 - DNA, 13 bp, Artificial Sequence
  Oligonucleotide for detection of SNP TSC0028421
ggtatgtgttatg

SEQ ID NO: 113576 - DNA, 13 bp, Artificial Sequence
  Oligonucleotide for detection of SNP TSC0028421
cataacacatacc

SEQ ID NO: 113577 - DNA, 13 bp, Artificial Sequence
  Oligonucleotide for detection of SNP TSC0028421
ggtatgcgttatg

SEQ ID NO: 113578 - DNA, 13 bp, Artificial Sequence
  Oligonucleotide for detection of SNP TSC0028421
cataacgcatacc

SEQ ID NO: 113579 - DNA, 13 bp, Artificial Sequence
  Oligonucleotide for detection of SNP TSC0028422
agttatgaatgaa

SEQ ID NO: 113580 - DNA, 13 bp, Artificial Sequence
  Oligonucleotide for detection of SNP TSC0028422
ttcattcataact

SEQ ID NO: 113581 - DNA, 13 bp, Artificial Sequence
  Oligonucleotide for detection of SNP TSC0028422
agttattaatgaa

SEQ ID NO: 113582 - DNA, 13 bp, Artificial Sequence
  Oligonucleotide for detection of SNP TSC0028422
ttcattaataact

SEQ ID NO: 113583 - DNA, 13 bp, Artificial Sequence
  Oligonucleotide for detection of SNP TSC0028422
tttatttatggtt

SEQ ID NO: 113584 - DNA, 13 bp, Artificial Sequence
  Oligonucleotide for detection of SNP TSC0028422
aaccataaataaa

SEQ ID NO: 113585 - DNA, 13 bp, Artificial Sequence
  Oligonucleotide for detection of SNP TSC0028422
tttattaatggtt

SEQ ID NO: 113586 - DNA, 13 bp, Artificial Sequence
  Oligonucleotide for detection of SNP TSC0028422
aaccattaataaa

SEQ ID NO: 113587 - DNA, 13 bp, Artificial Sequence
  Oligonucleotide for detection of SNP TSC0028423
gaatgaaattgty

SEQ ID NO: 113588 - DNA, 13 bp, Artificial Sequence
  Oligonucleotide for detection of SNP TSC0028423
racaatttcattc

SEQ ID NO: 113589 - DNA, 13 bp, Artificial Sequence
  Oligonucleotide for detection of SNP TSC0028423
gaatgagattgty

SEQ ID NO: 113590 - DNA, 13 bp, Artificial Sequence
  Oligonucleotide for detection of SNP TSC0028423
racaatctcattc

SEQ ID NO: 113591 - DNA, 13 bp, Artificial Sequence
  Oligonucleotide for detection of SNP TSC0028424
ttttaggagggtt

SEQ ID NO: 113592 - DNA, 13 bp, Artificial Sequence
  Oligonucleotide for detection of SNP TSC0028424
aaccctcctaaaa

SEQ ID NO: 113593 - DNA, 13 bp, Artificial Sequence
  Oligonucleotide for detection of SNP TSC0028424
ttttagaagggtt

SEQ ID NO: 113594 - DNA, 13 bp, Artificial Sequence
  Oligonucleotide for detection of SNP TSC0028424
aacccttctaaaa

SEQ ID NO: 113595 - DNA, 13 bp, Artificial Sequence
  Oligonucleotide for detection of SNP TSC0028428
taaatgagtgtgg

SEQ ID NO: 113596 - DNA, 13 bp, Artificial Sequence
  Oligonucleotide for detection of SNP TSC0028428
ccacactcattta

SEQ ID NO: 113597 - DNA, 13 bp, Artificial Sequence
  Oligonucleotide for detection of SNP TSC0028428
taaatgggtgtgg

SEQ ID NO: 113598 - DNA, 13 bp, Artificial Sequence
  Oligonucleotide for detection of SNP TSC0028428
ccacacccattta

SEQ ID NO: 113599 - DNA, 13 bp, Artificial Sequence
  Oligonucleotide for detection of SNP TSC0028431
gaataatgtatty

SEQ ID NO: 113600 - DNA, 13 bp, Artificial Sequence
  Oligonucleotide for detection of SNP TSC0028431
raatacattattc

SEQ ID NO: 113601 - DNA, 13 bp, Artificial Sequence
  Oligonucleotide for detection of SNP TSC0028431
gaataacgtatty

SEQ ID NO: 113602 - DNA, 13 bp, Artificial Sequence
  Oligonucleotide for detection of SNP TSC0028431
raatacgttattc

SEQ ID NO: 113603 - DNA, 13 bp, Artificial Sequence
  Oligonucleotide for detection of SNP TSC0028431
ggatgcgttatty

SEQ ID NO: 113604 - DNA, 13 bp, Artificial Sequence
  Oligonucleotide for detection of SNP TSC0028431
raataacgcatcc

SEQ ID NO: 113605 - DNA, 13 bp, Artificial Sequence
  Oligonucleotide for detection of SNP TSC0028433
atagtttgtttta

SEQ ID NO: 113606 - DNA, 13 bp, Artificial Sequence
  Oligonucleotide for detection of SNP TSC0028433
taaaacaaactat

SEQ ID NO: 113607 - DNA, 13 bp, Artificial Sequence
  Oligonucleotide for detection of SNP TSC0028433
atagttcgtttta

SEQ ID NO: 113608 - DNA, 13 bp, Artificial Sequence
  Oligonucleotide for detection of SNP TSC0028433
taaaacgaactat

SEQ ID NO: 113609 - DNA, 13 bp, Artificial Sequence
  Oligonucleotide for detection of SNP TSC0028433
tgggatggattgt

SEQ ID NO: 113610 - DNA, 13 bp, Artificial Sequence
  Oligonucleotide for detection of SNP TSC0028433
acaatccatccca

SEQ ID NO: 113611 - DNA, 13 bp, Artificial Sequence
  Oligonucleotide for detection of SNP TSC0028433
tgggatagattgt

SEQ ID NO: 113612 - DNA, 13 bp, Artificial Sequence
  Oligonucleotide for detection of SNP TSC0028433
acaatctatccca

SEQ ID NO: 113613 - DNA, 13 bp, Artificial Sequence
  Oligonucleotide for detection of SNP TSC0028433
tgggacggattgt

SEQ ID NO: 113614 - DNA, 13 bp, Artificial Sequence
  Oligonucleotide for detection of SNP TSC0028433
acaatccgtccca

SEQ ID NO: 113615 - DNA, 13 bp, Artificial Sequence
  Oligonucleotide for detection of SNP TSC0028435
ttatgagaattta

SEQ ID NO: 113616 - DNA, 13 bp, Artificial Sequence
  Oligonucleotide for detection of SNP TSC0028435
taaattctcataa

SEQ ID NO: 113617 - DNA, 13 bp, Artificial Sequence
  Oligonucleotide for detection of SNP TSC0028435
ttatgaaaattta

SEQ ID NO: 113618 - DNA, 13 bp, Artificial Sequence
  Oligonucleotide for detection of SNP TSC0028435
taaattttcataa

SEQ ID NO: 113619 - DNA, 13 bp, Artificial Sequence
  Oligonucleotide for detection of SNP TSC0028436
atttttataggag

SEQ ID NO: 113620 - DNA, 13 bp, Artificial Sequence
  Oligonucleotide for detection of SNP TSC0028436
ctcctataaaaat

SEQ ID NO: 113621 - DNA, 13 bp, Artificial Sequence
  Oligonucleotide for detection of SNP TSC0028436
atttttttaggag

SEQ ID NO: 113622 - DNA, 13 bp, Artificial Sequence
  Oligonucleotide for detection of SNP TSC0028436
ctcctaaaaaaat

SEQ ID NO: 113623 - DNA, 13 bp, Artificial Sequence
  Oligonucleotide for detection of SNP TSC0028436
tttttatgagaat

SEQ ID NO: 113624 - DNA, 13 bp, Artificial Sequence
  Oligonucleotide for detection of SNP TSC0028436
attctcataaaaa

SEQ ID NO: 113625 - DNA, 13 bp, Artificial Sequence
  Oligonucleotide for detection of SNP TSC0028436
tttttaggagaat

SEQ ID NO: 113626 - DNA, 13 bp, Artificial Sequence
  Oligonucleotide for detection of SNP TSC0028436
attctcctaaaaa

SEQ ID NO: 113627 - DNA, 13 bp, Artificial Sequence
  Oligonucleotide for detection of SNP TSC0028438
tgttattgtgagy

SEQ ID NO: 113628 - DNA, 13 bp, Artificial Sequence
  Oligonucleotide for detection of SNP TSC0028438
rctcacaataaca

SEQ ID NO: 113629 - DNA, 13 bp, Artificial Sequence
  Oligonucleotide for detection of SNP TSC0028438
tgttatcgtgagy

SEQ ID NO: 113630 - DNA, 13 bp, Artificial Sequence
  Oligonucleotide for detection of SNP TSC0028438
rctcacgataaca

SEQ ID NO: 113631 - DNA, 13 bp, Artificial Sequence
  Oligonucleotide for detection of SNP TSC0028438
gtttatggtggta

SEQ ID NO: 113632 - DNA, 13 bp, Artificial Sequence
  Oligonucleotide for detection of SNP TSC0028438
taccaccataaac

SEQ ID NO: 113633 - DNA, 13 bp, Artificial Sequence
  Oligonucleotide for detection of SNP TSC0028438
gtttatagtggta

SEQ ID NO: 113634 - DNA, 13 bp, Artificial Sequence
  Oligonucleotide for detection of SNP TSC0028438
taccactataaac

SEQ ID NO: 113635 - DNA, 13 bp, Artificial Sequence
  Oligonucleotide for detection of SNP TSC0028438
gtttacggtggta

SEQ ID NO: 113636 - DNA, 13 bp, Artificial Sequence
  Oligonucleotide for detection of SNP TSC0028438
taccaccgtaaac

SEQ ID NO: 113637 - DNA, 13 bp, Artificial Sequence
  Oligonucleotide for detection of SNP TSC0028440
tttattgaagaag

SEQ ID NO: 113638 - DNA, 13 bp, Artificial Sequence
  Oligonucleotide for detection of SNP TSC0028440
cttcttcaataaa

SEQ ID NO: 113639 - DNA, 13 bp, Artificial Sequence
  Oligonucleotide for detection of SNP TSC0028440
tttattaaagaag

SEQ ID NO: 113640 - DNA, 13 bp, Artificial Sequence
  Oligonucleotide for detection of SNP TSC0028440
cttctttaataaa

SEQ ID NO: 113641 - DNA, 13 bp, Artificial Sequence
  Oligonucleotide for detection of SNP TSC0028444
attttaatagaat

SEQ ID NO: 113642 - DNA, 13 bp, Artificial Sequence
  Oligonucleotide for detection of SNP TSC0028444
attctattaaaat

SEQ ID NO: 113643 - DNA, 13 bp, Artificial Sequence
  Oligonucleotide for detection of SNP TSC0028444
attttattagaat

SEQ ID NO: 113644 - DNA, 13 bp, Artificial Sequence
  Oligonucleotide for detection of SNP TSC0028444
attctaataaaat

SEQ ID NO: 113645 - DNA, 13 bp, Artificial Sequence
  Oligonucleotide for detection of SNP TSC0028444
attttgttaaaat

SEQ ID NO: 113646 - DNA, 13 bp, Artificial Sequence
  Oligonucleotide for detection of SNP TSC0028444
attttaacaaaat

SEQ ID NO: 113647 - DNA, 13 bp, Artificial Sequence
  Oligonucleotide for detection of SNP TSC0028444
attttggtaaaat

SEQ ID NO: 113648 - DNA, 13 bp, Artificial Sequence
  Oligonucleotide for detection of SNP TSC0028444
attttaccaaaat

SEQ ID NO: 113649 - DNA, 13 bp, Artificial Sequence
  Oligonucleotide for detection of SNP TSC0028445
ttaggggggggga

SEQ ID NO: 113650 - DNA, 13 bp, Artificial Sequence
  Oligonucleotide for detection of SNP TSC0028445
tccccccccctaa

SEQ ID NO: 113651 - DNA, 13 bp, Artificial Sequence
  Oligonucleotide for detection of SNP TSC0028445
ttagggtggggga

SEQ ID NO: 113652 - DNA, 13 bp, Artificial Sequence
  Oligonucleotide for detection of SNP TSC0028445
tcccccaccctaa

SEQ ID NO: 113653 - DNA, 13 bp, Artificial Sequence
  Oligonucleotide for detection of SNP TSC0028447
tttataagtaaaa

SEQ ID NO: 113654 - DNA, 13 bp, Artificial Sequence
  Oligonucleotide for detection of SNP TSC0028447
ttttacttataaa

SEQ ID NO: 113655 - DNA, 13 bp, Artificial Sequence
  Oligonucleotide for detection of SNP TSC0028447
tttataggtaaaa

SEQ ID NO: 113656 - DNA, 13 bp, Artificial Sequence
  Oligonucleotide for detection of SNP TSC0028447
ttttacctataaa

SEQ ID NO: 113657 - DNA, 13 bp, Artificial Sequence
  Oligonucleotide for detection of SNP TSC0028448
ttattaataaagg

SEQ ID NO: 113658 - DNA, 13 bp, Artificial Sequence
  Oligonucleotide for detection of SNP TSC0028448
cctttattaataa

SEQ ID NO: 113659 - DNA, 13 bp, Artificial Sequence
  Oligonucleotide for detection of SNP TSC0028448
ttattattaaagg

SEQ ID NO: 113660 - DNA, 13 bp, Artificial Sequence
  Oligonucleotide for detection of SNP TSC0028448
cctttaataataa

SEQ ID NO: 113661 - DNA, 13 bp, Artificial Sequence
  Oligonucleotide for detection of SNP TSC0028448
tttttgttaatag

SEQ ID NO: 113662 - DNA, 13 bp, Artificial Sequence
  Oligonucleotide for detection of SNP TSC0028448
ctattaacaaaaa

SEQ ID NO: 113663 - DNA, 13 bp, Artificial Sequence
  Oligonucleotide for detection of SNP TSC0028448
tttttggtaatag

SEQ ID NO: 113664 - DNA, 13 bp, Artificial Sequence
  Oligonucleotide for detection of SNP TSC0028448
ctattaccaaaaa

SEQ ID NO: 113665 - DNA, 13 bp, Artificial Sequence
  Oligonucleotide for detection of SNP TSC0028449
ttagaagaatgtt

SEQ ID NO: 113666 - DNA, 13 bp, Artificial Sequence
  Oligonucleotide for detection of SNP TSC0028449
aacattcttctaa

SEQ ID NO: 113667 - DNA, 13 bp, Artificial Sequence
  Oligonucleotide for detection of SNP TSC0028449
ttagaataatgtt

SEQ ID NO: 113668 - DNA, 13 bp, Artificial Sequence
  Oligonucleotide for detection of SNP TSC0028449
aacattattctaa

SEQ ID NO: 113669 - DNA, 13 bp, Artificial Sequence
  Oligonucleotide for detection of SNP TSC0028449
aatatttttttga

SEQ ID NO: 113670 - DNA, 13 bp, Artificial Sequence
  Oligonucleotide for detection of SNP TSC0028449
tcaaaaaaatatt

SEQ ID NO: 113671 - DNA, 13 bp, Artificial Sequence
  Oligonucleotide for detection of SNP TSC0028449
aatattattttga

SEQ ID NO: 113672 - DNA, 13 bp, Artificial Sequence
  Oligonucleotide for detection of SNP TSC0028449
tcaaaataatatt

SEQ ID NO: 113673 - DNA, 13 bp, Artificial Sequence
  Oligonucleotide for detection of SNP TSC0028450
gagaaatgtagaa

SEQ ID NO: 113674 - DNA, 13 bp, Artificial Sequence
  Oligonucleotide for detection of SNP TSC0028450
ttctacatttctc

SEQ ID NO: 113675 - DNA, 13 bp, Artificial Sequence
  Oligonucleotide for detection of SNP TSC0028450
gagaaaggtagaa

SEQ ID NO: 113676 - DNA, 13 bp, Artificial Sequence
  Oligonucleotide for detection of SNP TSC0028450
ttctacctttctc

SEQ ID NO: 113677 - DNA, 13 bp, Artificial Sequence
  Oligonucleotide for detection of SNP TSC0028452
ggtaggagttgag

SEQ ID NO: 113678 - DNA, 13 bp, Artificial Sequence
  Oligonucleotide for detection of SNP TSC0028452
ctcaactcctacc

SEQ ID NO: 113679 - DNA, 13 bp, Artificial Sequence
  Oligonucleotide for detection of SNP TSC0028452
ggtaggtgttgag

SEQ ID NO: 113680 - DNA, 13 bp, Artificial Sequence
  Oligonucleotide for detection of SNP TSC0028452
ctcaacacctacc

SEQ ID NO: 113681 - DNA, 13 bp, Artificial Sequence
  Oligonucleotide for detection of SNP TSC0028452
tttagtatttgty

SEQ ID NO: 113682 - DNA, 13 bp, Artificial Sequence
  Oligonucleotide for detection of SNP TSC0028452
racaaatactaaa

SEQ ID NO: 113683 - DNA, 13 bp, Artificial Sequence
  Oligonucleotide for detection of SNP TSC0028453
ttatttatttgga

SEQ ID NO: 113684 - DNA, 13 bp, Artificial Sequence
  Oligonucleotide for detection of SNP TSC0028453
tccaaataaataa

SEQ ID NO: 113685 - DNA, 13 bp, Artificial Sequence
  Oligonucleotide for detection of SNP TSC0028453
ttatttttttgga

SEQ ID NO: 113686 - DNA, 13 bp, Artificial Sequence
  Oligonucleotide for detection of SNP TSC0028453
tccaaaaaaataa

SEQ ID NO: 113687 - DNA, 13 bp, Artificial Sequence
  Oligonucleotide for detection of SNP TSC0028453
tttagatagatga

SEQ ID NO: 113688 - DNA, 13 bp, Artificial Sequence
  Oligonucleotide for detection of SNP TSC0028453
tcatctatctaaa

SEQ ID NO: 113689 - DNA, 13 bp, Artificial Sequence
  Oligonucleotide for detection of SNP TSC0028453
tttagaaagatga

SEQ ID NO: 113690 - DNA, 13 bp, Artificial Sequence
  Oligonucleotide for detection of SNP TSC0028453
tcatctttctaaa

SEQ ID NO: 113691 - DNA, 13 bp, Artificial Sequence
  Oligonucleotide for detection of SNP TSC0028454
ttatatgtttgtt

SEQ ID NO: 113692 - DNA, 13 bp, Artificial Sequence
  Oligonucleotide for detection of SNP TSC0028454
aacaaacatataa

SEQ ID NO: 113693 - DNA, 13 bp, Artificial Sequence
  Oligonucleotide for detection of SNP TSC0028455
tagagtagggatt

SEQ ID NO: 113694 - DNA, 13 bp, Artificial Sequence
  Oligonucleotide for detection of SNP TSC0028455
aatccctactcta

SEQ ID NO: 113695 - DNA, 13 bp, Artificial Sequence
  Oligonucleotide for detection of SNP TSC0028455
tagagtggggatt

SEQ ID NO: 113696 - DNA, 13 bp, Artificial Sequence
  Oligonucleotide for detection of SNP TSC0028455
aatccccactcta

SEQ ID NO: 113697 - DNA, 13 bp, Artificial Sequence
  Oligonucleotide for detection of SNP TSC0028456
gagttttagatta

SEQ ID NO: 113698 - DNA, 13 bp, Artificial Sequence
  Oligonucleotide for detection of SNP TSC0028456
taatctaaaactc

SEQ ID NO: 113699 - DNA, 13 bp, Artificial Sequence
  Oligonucleotide for detection of SNP TSC0028456
tggtttggaatty

SEQ ID NO: 113700 - DNA, 13 bp, Artificial Sequence
  Oligonucleotide for detection of SNP TSC0028456
raattccaaacca

SEQ ID NO: 113701 - DNA, 13 bp, Artificial Sequence
  Oligonucleotide for detection of SNP TSC0028457
gttgttgtttggt

SEQ ID NO: 113702 - DNA, 13 bp, Artificial Sequence
  Oligonucleotide for detection of SNP TSC0028457
accaaacaacaac

SEQ ID NO: 113703 - DNA, 13 bp, Artificial Sequence
  Oligonucleotide for detection of SNP TSC0028457
gttgttttttggt

SEQ ID NO: 113704 - DNA, 13 bp, Artificial Sequence
  Oligonucleotide for detection of SNP TSC0028457
accaaaaaacaac

SEQ ID NO: 113705 - DNA, 13 bp, Artificial Sequence
  Oligonucleotide for detection of SNP TSC0028457
attaagtagtagy

SEQ ID NO: 113706 - DNA, 13 bp, Artificial Sequence
  Oligonucleotide for detection of SNP TSC0028457
rctactacttaat

SEQ ID NO: 113707 - DNA, 13 bp, Artificial Sequence
  Oligonucleotide for detection of SNP TSC0028457
attaagaagtagy

SEQ ID NO: 113708 - DNA, 13 bp, Artificial Sequence
  Oligonucleotide for detection of SNP TSC0028457
rctacttcttaat

SEQ ID NO: 113709 - DNA, 13 bp, Artificial Sequence
  Oligonucleotide for detection of SNP TSC0028459
tagattggaaatt

SEQ ID NO: 113710 - DNA, 13 bp, Artificial Sequence
  Oligonucleotide for detection of SNP TSC0028459
aatttccaatcta

SEQ ID NO: 113711 - DNA, 13 bp, Artificial Sequence
  Oligonucleotide for detection of SNP TSC0028459
tagatttgaaatt

SEQ ID NO: 113712 - DNA, 13 bp, Artificial Sequence
  Oligonucleotide for detection of SNP TSC0028459
aatttcaaatcta

SEQ ID NO: 113713 - DNA, 13 bp, Artificial Sequence
  Oligonucleotide for detection of SNP TSC0028459
aatttttagttta

SEQ ID NO: 113714 - DNA, 13 bp, Artificial Sequence
  Oligonucleotide for detection of SNP TSC0028459
taaactaaaaatt

SEQ ID NO: 113715 - DNA, 13 bp, Artificial Sequence
  Oligonucleotide for detection of SNP TSC0028459
aattttaagttta

SEQ ID NO: 113716 - DNA, 13 bp, Artificial Sequence
  Oligonucleotide for detection of SNP TSC0028459
taaacttaaaatt

SEQ ID NO: 113717 - DNA, 13 bp, Artificial Sequence
  Oligonucleotide for detection of SNP TSC0028460
tttgtggtgttta

SEQ ID NO: 113718 - DNA, 13 bp, Artificial Sequence
  Oligonucleotide for detection of SNP TSC0028460
taaacaccacaaa

SEQ ID NO: 113719 - DNA, 13 bp, Artificial Sequence
  Oligonucleotide for detection of SNP TSC0028460
tttgtgatgttta

SEQ ID NO: 113720 - DNA, 13 bp, Artificial Sequence
  Oligonucleotide for detection of SNP TSC0028460
taaacatcacaaa

SEQ ID NO: 113721 - DNA, 13 bp, Artificial Sequence
  Oligonucleotide for detection of SNP TSC0028461
tagaatatgtatg

SEQ ID NO: 113722 - DNA, 13 bp, Artificial Sequence
  Oligonucleotide for detection of SNP TSC0028461
catacatattcta

SEQ ID NO: 113723 - DNA, 13 bp, Artificial Sequence
  Oligonucleotide for detection of SNP TSC0028461
tagaatgtgtatg

SEQ ID NO: 113724 - DNA, 13 bp, Artificial Sequence
  Oligonucleotide for detection of SNP TSC0028461
catacacattcta

SEQ ID NO: 113725 - DNA, 13 bp, Artificial Sequence
  Oligonucleotide for detection of SNP TSC0028461
tagaacgtgtatg

SEQ ID NO: 113726 - DNA, 13 bp, Artificial Sequence
  Oligonucleotide for detection of SNP TSC0028461
catacacgttcta

SEQ ID NO: 113727 - DNA, 13 bp, Artificial Sequence
  Oligonucleotide for detection of SNP TSC0028461
tatgtatgttttg

SEQ ID NO: 113728 - DNA, 13 bp, Artificial Sequence
  Oligonucleotide for detection of SNP TSC0028461
caaaacatacata

SEQ ID NO: 113729 - DNA, 13 bp, Artificial Sequence
  Oligonucleotide for detection of SNP TSC0028461
tatgtacgttttg

SEQ ID NO: 113730 - DNA, 13 bp, Artificial Sequence
  Oligonucleotide for detection of SNP TSC0028461
caaaacgtacata

SEQ ID NO: 113731 - DNA, 13 bp, Artificial Sequence
  Oligonucleotide for detection of SNP TSC0028462
tatggtgggggat

SEQ ID NO: 113732 - DNA, 13 bp, Artificial Sequence
  Oligonucleotide for detection of SNP TSC0028462
atcccccaccata

SEQ ID NO: 113733 - DNA, 13 bp, Artificial Sequence
  Oligonucleotide for detection of SNP TSC0028462
tatggtaggggat

SEQ ID NO: 113734 - DNA, 13 bp, Artificial Sequence
  Oligonucleotide for detection of SNP TSC0028462
atcccctaccata

SEQ ID NO: 113735 - DNA, 13 bp, Artificial Sequence
  Oligonucleotide for detection of SNP TSC0028462
tatggcgggggat

SEQ ID NO: 113736 - DNA, 13 bp, Artificial Sequence
  Oligonucleotide for detection of SNP TSC0028462
atcccccgccata

SEQ ID NO: 113737 - DNA, 13 bp, Artificial Sequence
  Oligonucleotide for detection of SNP TSC0028463
tagtaaggtagay

SEQ ID NO: 113738 - DNA, 13 bp, Artificial Sequence
  Oligonucleotide for detection of SNP TSC0028463
rtctaccttacta

SEQ ID NO: 113739 - DNA, 13 bp, Artificial Sequence
  Oligonucleotide for detection of SNP TSC0028463
tagtaaagtagay

SEQ ID NO: 113740 - DNA, 13 bp, Artificial Sequence
  Oligonucleotide for detection of SNP TSC0028463
rtctactttacta

SEQ ID NO: 113741 - DNA, 13 bp, Artificial Sequence
  Oligonucleotide for detection of SNP TSC0028464
agaagaggtatay

SEQ ID NO: 113742 - DNA, 13 bp, Artificial Sequence
  Oligonucleotide for detection of SNP TSC0028464
rtatacctcttct

SEQ ID NO: 113743 - DNA, 13 bp, Artificial Sequence
  Oligonucleotide for detection of SNP TSC0028464
agaagaagtatay

SEQ ID NO: 113744 - DNA, 13 bp, Artificial Sequence
  Oligonucleotide for detection of SNP TSC0028464
rtatacttcttct

SEQ ID NO: 113745 - DNA, 13 bp, Artificial Sequence
  Oligonucleotide for detection of SNP TSC0028473
tagttgtgtgttt

SEQ ID NO: 113746 - DNA, 13 bp, Artificial Sequence
  Oligonucleotide for detection of SNP TSC0028473
aaacacacaacta

SEQ ID NO: 113747 - DNA, 13 bp, Artificial Sequence
  Oligonucleotide for detection of SNP TSC0028473
tagttgcgtgttt

SEQ ID NO: 113748 - DNA, 13 bp, Artificial Sequence
  Oligonucleotide for detection of SNP TSC0028473
aaacacgcaacta

SEQ ID NO: 113749 - DNA, 13 bp, Artificial Sequence
  Oligonucleotide for detection of SNP TSC0028473
agatatgtaattg

SEQ ID NO: 113750 - DNA, 13 bp, Artificial Sequence
  Oligonucleotide for detection of SNP TSC0028473
caattacatatct

SEQ ID NO: 113751 - DNA, 13 bp, Artificial Sequence
  Oligonucleotide for detection of SNP TSC0028473
agatatataattg

SEQ ID NO: 113752 - DNA, 13 bp, Artificial Sequence
  Oligonucleotide for detection of SNP TSC0028473
caattatatatct

SEQ ID NO: 113753 - DNA, 13 bp, Artificial Sequence
  Oligonucleotide for detection of SNP TSC0028473
agatacgtaattg

SEQ ID NO: 113754 - DNA, 13 bp, Artificial Sequence
  Oligonucleotide for detection of SNP TSC0028473
caattacgtatct

SEQ ID NO: 113755 - DNA, 13 bp, Artificial Sequence
  Oligonucleotide for detection of SNP TSC0028478
agaagaattaaag

SEQ ID NO: 113756 - DNA, 13 bp, Artificial Sequence
  Oligonucleotide for detection of SNP TSC0028478
ctttaattcttct

SEQ ID NO: 113757 - DNA, 13 bp, Artificial Sequence
  Oligonucleotide for detection of SNP TSC0028478
agaagagttaaag

SEQ ID NO: 113758 - DNA, 13 bp, Artificial Sequence
  Oligonucleotide for detection of SNP TSC0028478
ctttaactcttct

SEQ ID NO: 113759 - DNA, 13 bp, Artificial Sequence
  Oligonucleotide for detection of SNP TSC0028479
tttaatagaaatg

SEQ ID NO: 113760 - DNA, 13 bp, Artificial Sequence
  Oligonucleotide for detection of SNP TSC0028479
catttctattaaa

SEQ ID NO: 113761 - DNA, 13 bp, Artificial Sequence
  Oligonucleotide for detection of SNP TSC0028479
tttaatggaaatg

SEQ ID NO: 113762 - DNA, 13 bp, Artificial Sequence
  Oligonucleotide for detection of SNP TSC0028479
catttccattaaa

SEQ ID NO: 113763 - DNA, 13 bp, Artificial Sequence
  Oligonucleotide for detection of SNP TSC0028479
tttaacggaaatg

SEQ ID NO: 113764 - DNA, 13 bp, Artificial Sequence
  Oligonucleotide for detection of SNP TSC0028479
catttccgttaaa

SEQ ID NO: 113765 - DNA, 13 bp, Artificial Sequence
  Oligonucleotide for detection of SNP TSC0028479
tatttttgttggg

SEQ ID NO: 113766 - DNA, 13 bp, Artificial Sequence
  Oligonucleotide for detection of SNP TSC0028479
cccaacaaaaata

SEQ ID NO: 113767 - DNA, 13 bp, Artificial Sequence
  Oligonucleotide for detection of SNP TSC0028479
tattttcgttggg

SEQ ID NO: 113768 - DNA, 13 bp, Artificial Sequence
  Oligonucleotide for detection of SNP TSC0028479
cccaacgaaaata

SEQ ID NO: 113769 - DNA, 13 bp, Artificial Sequence
  Oligonucleotide for detection of SNP TSC0028480
gtattaattatta

SEQ ID NO: 113770 - DNA, 13 bp, Artificial Sequence
  Oligonucleotide for detection of SNP TSC0028480
taataattaatac

SEQ ID NO: 113771 - DNA, 13 bp, Artificial Sequence
  Oligonucleotide for detection of SNP TSC0028480
gtattagttatta

SEQ ID NO: 113772 - DNA, 13 bp, Artificial Sequence
  Oligonucleotide for detection of SNP TSC0028480
taataactaatac

SEQ ID NO: 113773 - DNA, 13 bp, Artificial Sequence
  Oligonucleotide for detection of SNP TSC0028481
aggaggggaattg

SEQ ID NO: 113774 - DNA, 13 bp, Artificial Sequence
  Oligonucleotide for detection of SNP TSC0028481
caattcccctcct

SEQ ID NO: 113775 - DNA, 13 bp, Artificial Sequence
  Oligonucleotide for detection of SNP TSC0028481
aggaggagaattg

SEQ ID NO: 113776 - DNA, 13 bp, Artificial Sequence
  Oligonucleotide for detection of SNP TSC0028481
caattctcctcct

SEQ ID NO: 113777 - DNA, 13 bp, Artificial Sequence
  Oligonucleotide for detection of SNP TSC0028481
aggaggggaatcg

SEQ ID NO: 113778 - DNA, 13 bp, Artificial Sequence
  Oligonucleotide for detection of SNP TSC0028481
cgattcccctcct

SEQ ID NO: 113779 - DNA, 13 bp, Artificial Sequence
  Oligonucleotide for detection of SNP TSC0028481
aggaggagaatcg

SEQ ID NO: 113780 - DNA, 13 bp, Artificial Sequence
  Oligonucleotide for detection of SNP TSC0028481
cgattctcctcct

SEQ ID NO: 113781 - DNA, 13 bp, Artificial Sequence
  Oligonucleotide for detection of SNP TSC0028482
gttaggagtatta

SEQ ID NO: 113782 - DNA, 13 bp, Artificial Sequence
  Oligonucleotide for detection of SNP TSC0028482
taatactcctaac

SEQ ID NO: 113783 - DNA, 13 bp, Artificial Sequence
  Oligonucleotide for detection of SNP TSC0028482
gttaggggtatta

SEQ ID NO: 113784 - DNA, 13 bp, Artificial Sequence
  Oligonucleotide for detection of SNP TSC0028482
taatacccctaac

SEQ ID NO: 113785 - DNA, 13 bp, Artificial Sequence
  Oligonucleotide for detection of SNP TSC0028483
tttttggtgttty

SEQ ID NO: 113786 - DNA, 13 bp, Artificial Sequence
  Oligonucleotide for detection of SNP TSC0028483
raaacaccaaaaa

SEQ ID NO: 113787 - DNA, 13 bp, Artificial Sequence
  Oligonucleotide for detection of SNP TSC0028484
ttgtggtgttgga

SEQ ID NO: 113788 - DNA, 13 bp, Artificial Sequence
  Oligonucleotide for detection of SNP TSC0028484
tccaacaccacaa

SEQ ID NO: 113789 - DNA, 13 bp, Artificial Sequence
  Oligonucleotide for detection of SNP TSC0028484
ttgtggcgttgga

SEQ ID NO: 113790 - DNA, 13 bp, Artificial Sequence
  Oligonucleotide for detection of SNP TSC0028484
tccaacgccacaa

SEQ ID NO: 113791 - DNA, 13 bp, Artificial Sequence
  Oligonucleotide for detection of SNP TSC0028484
tttaatgttatag

SEQ ID NO: 113792 - DNA, 13 bp, Artificial Sequence
  Oligonucleotide for detection of SNP TSC0028484
ctataacattaaa

SEQ ID NO: 113793 - DNA, 13 bp, Artificial Sequence
  Oligonucleotide for detection of SNP TSC0028484
tttaattttatag

SEQ ID NO: 113794 - DNA, 13 bp, Artificial Sequence
  Oligonucleotide for detection of SNP TSC0028484
ctataaaattaaa

SEQ ID NO: 113795 - DNA, 13 bp, Artificial Sequence
  Oligonucleotide for detection of SNP TSC0028484
tttaacgttatag

SEQ ID NO: 113796 - DNA, 13 bp, Artificial Sequence
  Oligonucleotide for detection of SNP TSC0028484
ctataacgttaaa

SEQ ID NO: 113797 - DNA, 13 bp, Artificial Sequence
  Oligonucleotide for detection of SNP TSC0028485
atttagggtagag

SEQ ID NO: 113798 - DNA, 13 bp, Artificial Sequence
  Oligonucleotide for detection of SNP TSC0028485
ctctaccctaaat

SEQ ID NO: 113799 - DNA, 13 bp, Artificial Sequence
  Oligonucleotide for detection of SNP TSC0028485
atttagagtagag

SEQ ID NO: 113800 - DNA, 13 bp, Artificial Sequence
  Oligonucleotide for detection of SNP TSC0028485
ctctactctaaat

SEQ ID NO: 113801 - DNA, 13 bp, Artificial Sequence
  Oligonucleotide for detection of SNP TSC0028486
ttaagtaatttgt

SEQ ID NO: 113802 - DNA, 13 bp, Artificial Sequence
  Oligonucleotide for detection of SNP TSC0028486
acaaattacttaa

SEQ ID NO: 113803 - DNA, 13 bp, Artificial Sequence
  Oligonucleotide for detection of SNP TSC0028486
ttaagtgatttgt

SEQ ID NO: 113804 - DNA, 13 bp, Artificial Sequence
  Oligonucleotide for detection of SNP TSC0028486
acaaatcacttaa

SEQ ID NO: 113805 - DNA, 13 bp, Artificial Sequence
  Oligonucleotide for detection of SNP TSC0028489
ttataaaaaattg

SEQ ID NO: 113806 - DNA, 13 bp, Artificial Sequence
  Oligonucleotide for detection of SNP TSC0028489
caattttttataa

SEQ ID NO: 113807 - DNA, 13 bp, Artificial Sequence
  Oligonucleotide for detection of SNP TSC0028489
ttataagaaattg

SEQ ID NO: 113808 - DNA, 13 bp, Artificial Sequence
  Oligonucleotide for detection of SNP TSC0028489
caatttcttataa

SEQ ID NO: 113809 - DNA, 13 bp, Artificial Sequence
  Oligonucleotide for detection of SNP TSC0028490
ggagtttggaaaa

SEQ ID NO: 113810 - DNA, 13 bp, Artificial Sequence
  Oligonucleotide for detection of SNP TSC0028490
ttttccaaactcc

SEQ ID NO: 113811 - DNA, 13 bp, Artificial Sequence
  Oligonucleotide for detection of SNP TSC0028490
ggagttgggaaaa

SEQ ID NO: 113812 - DNA, 13 bp, Artificial Sequence
  Oligonucleotide for detection of SNP TSC0028490
ttttcccaactcc

SEQ ID NO: 113813 - DNA, 13 bp, Artificial Sequence
  Oligonucleotide for detection of SNP TSC0028491
gatatggtttatt

SEQ ID NO: 113814 - DNA, 13 bp, Artificial Sequence
  Oligonucleotide for detection of SNP TSC0028491
aataaaccatatc

SEQ ID NO: 113815 - DNA, 13 bp, Artificial Sequence
  Oligonucleotide for detection of SNP TSC0028491
gatatgttttatt

SEQ ID NO: 113816 - DNA, 13 bp, Artificial Sequence
  Oligonucleotide for detection of SNP TSC0028491
aataaaacatatc

SEQ ID NO: 113817 - DNA, 13 bp, Artificial Sequence
  Oligonucleotide for detection of SNP TSC0028491
aatgggttatgty

SEQ ID NO: 113818 - DNA, 13 bp, Artificial Sequence
  Oligonucleotide for detection of SNP TSC0028491
racataacccatt

SEQ ID NO: 113819 - DNA, 13 bp, Artificial Sequence
  Oligonucleotide for detection of SNP TSC0028491
aatgggatatgty

SEQ ID NO: 113820 - DNA, 13 bp, Artificial Sequence
  Oligonucleotide for detection of SNP TSC0028491
racatatcccatt

SEQ ID NO: 113821 - DNA, 13 bp, Artificial Sequence
  Oligonucleotide for detection of SNP TSC0028492
agttttatttatt

SEQ ID NO: 113822 - DNA, 13 bp, Artificial Sequence
  Oligonucleotide for detection of SNP TSC0028492
aataaataaaact

SEQ ID NO: 113823 - DNA, 13 bp, Artificial Sequence
  Oligonucleotide for detection of SNP TSC0028492
agttttgtttatt

SEQ ID NO: 113824 - DNA, 13 bp, Artificial Sequence
  Oligonucleotide for detection of SNP TSC0028492
aataaacaaaact

SEQ ID NO: 113825 - DNA, 13 bp, Artificial Sequence
  Oligonucleotide for detection of SNP TSC0028503
ggttagggtaggy

SEQ ID NO: 113826 - DNA, 13 bp, Artificial Sequence
  Oligonucleotide for detection of SNP TSC0028503
rcctaccctaacc

SEQ ID NO: 113827 - DNA, 13 bp, Artificial Sequence
  Oligonucleotide for detection of SNP TSC0028503
ggttagagtaggy

SEQ ID NO: 113828 - DNA, 13 bp, Artificial Sequence
  Oligonucleotide for detection of SNP TSC0028503
rcctactctaacc

SEQ ID NO: 113829 - DNA, 13 bp, Artificial Sequence
  Oligonucleotide for detection of SNP TSC0028504
cgggataataggy

SEQ ID NO: 113830 - DNA, 13 bp, Artificial Sequence
  Oligonucleotide for detection of SNP TSC0028504
rcctattatcccg

SEQ ID NO: 113831 - DNA, 13 bp, Artificial Sequence
  Oligonucleotide for detection of SNP TSC0028504
cgggattataggy

SEQ ID NO: 113832 - DNA, 13 bp, Artificial Sequence
  Oligonucleotide for detection of SNP TSC0028504
rcctataatcccg

SEQ ID NO: 113833 - DNA, 13 bp, Artificial Sequence
  Oligonucleotide for detection of SNP TSC0028504
gtttgttattttg

SEQ ID NO: 113834 - DNA, 13 bp, Artificial Sequence
  Oligonucleotide for detection of SNP TSC0028504
caaaataacaaac

SEQ ID NO: 113835 - DNA, 13 bp, Artificial Sequence
  Oligonucleotide for detection of SNP TSC0028504
gtttgtaattttg

SEQ ID NO: 113836 - DNA, 13 bp, Artificial Sequence
  Oligonucleotide for detection of SNP TSC0028504
caaaattacaaac

SEQ ID NO: 113837 - DNA, 13 bp, Artificial Sequence
  Oligonucleotide for detection of SNP TSC0028504
gtttgttatttcg

SEQ ID NO: 113838 - DNA, 13 bp, Artificial Sequence
  Oligonucleotide for detection of SNP TSC0028504
cgaaataacaaac

SEQ ID NO: 113839 - DNA, 13 bp, Artificial Sequence
  Oligonucleotide for detection of SNP TSC0028504
gtttgtaatttcg

SEQ ID NO: 113840 - DNA, 13 bp, Artificial Sequence
  Oligonucleotide for detection of SNP TSC0028504
cgaaattacaaac

SEQ ID NO: 113841 - DNA, 13 bp, Artificial Sequence
  Oligonucleotide for detection of SNP TSC0028506
tagtgatagttay

SEQ ID NO: 113842 - DNA, 13 bp, Artificial Sequence
  Oligonucleotide for detection of SNP TSC0028506
rtaactatcacta

SEQ ID NO: 113843 - DNA, 13 bp, Artificial Sequence
  Oligonucleotide for detection of SNP TSC0028506
tagtgagagttay

SEQ ID NO: 113844 - DNA, 13 bp, Artificial Sequence
  Oligonucleotide for detection of SNP TSC0028506
rtaactctcacta

SEQ ID NO: 113845 - DNA, 13 bp, Artificial Sequence
  Oligonucleotide for detection of SNP TSC0028506
tagcgatagttay

SEQ ID NO: 113846 - DNA, 13 bp, Artificial Sequence
  Oligonucleotide for detection of SNP TSC0028506
rtaactatcgcta

SEQ ID NO: 113847 - DNA, 13 bp, Artificial Sequence
  Oligonucleotide for detection of SNP TSC0028506
tagcgagagttay

SEQ ID NO: 113848 - DNA, 13 bp, Artificial Sequence
  Oligonucleotide for detection of SNP TSC0028506
rtaactctcgcta

SEQ ID NO: 113849 - DNA, 13 bp, Artificial Sequence
  Oligonucleotide for detection of SNP TSC0028506
gtggttgttgttg

SEQ ID NO: 113850 - DNA, 13 bp, Artificial Sequence
  Oligonucleotide for detection of SNP TSC0028506
caacaacaaccac

SEQ ID NO: 113851 - DNA, 13 bp, Artificial Sequence
  Oligonucleotide for detection of SNP TSC0028506
gtggtttttgttg

SEQ ID NO: 113852 - DNA, 13 bp, Artificial Sequence
  Oligonucleotide for detection of SNP TSC0028506
caacaaaaaccac

SEQ ID NO: 113853 - DNA, 13 bp, Artificial Sequence
  Oligonucleotide for detection of SNP TSC0028506
gtggttgtcgttg

SEQ ID NO: 113854 - DNA, 13 bp, Artificial Sequence
  Oligonucleotide for detection of SNP TSC0028506
caacgacaaccac

SEQ ID NO: 113855 - DNA, 13 bp, Artificial Sequence
  Oligonucleotide for detection of SNP TSC0028506
gtggttttcgttg

SEQ ID NO: 113856 - DNA, 13 bp, Artificial Sequence
  Oligonucleotide for detection of SNP TSC0028506
caacgaaaaccac

SEQ ID NO: 113857 - DNA, 13 bp, Artificial Sequence
  Oligonucleotide for detection of SNP TSC0028510
gatggtgggtggg

SEQ ID NO: 113858 - DNA, 13 bp, Artificial Sequence
  Oligonucleotide for detection of SNP TSC0028510
cccacccaccatc

SEQ ID NO: 113859 - DNA, 13 bp, Artificial Sequence
  Oligonucleotide for detection of SNP TSC0028510
gatggtaggtggg

SEQ ID NO: 113860 - DNA, 13 bp, Artificial Sequence
  Oligonucleotide for detection of SNP TSC0028510
cccacctaccatc

SEQ ID NO: 113861 - DNA, 13 bp, Artificial Sequence
  Oligonucleotide for detection of SNP TSC0028511
ttaggtttggagt

SEQ ID NO: 113862 - DNA, 13 bp, Artificial Sequence
  Oligonucleotide for detection of SNP TSC0028511
actccaaacctaa

SEQ ID NO: 113863 - DNA, 13 bp, Artificial Sequence
  Oligonucleotide for detection of SNP TSC0028511
ttaggtgtggagt

SEQ ID NO: 113864 - DNA, 13 bp, Artificial Sequence
  Oligonucleotide for detection of SNP TSC0028511
actccacacctaa

SEQ ID NO: 113865 - DNA, 13 bp, Artificial Sequence
  Oligonucleotide for detection of SNP TSC0028511
ttaggcgtggagt

SEQ ID NO: 113866 - DNA, 13 bp, Artificial Sequence
  Oligonucleotide for detection of SNP TSC0028511
actccacgcctaa

SEQ ID NO: 113867 - DNA, 13 bp, Artificial Sequence
  Oligonucleotide for detection of SNP TSC0028511
attttaggtttgg

SEQ ID NO: 113868 - DNA, 13 bp, Artificial Sequence
  Oligonucleotide for detection of SNP TSC0028511
ccaaacctaaaat

SEQ ID NO: 113869 - DNA, 13 bp, Artificial Sequence
  Oligonucleotide for detection of SNP TSC0028511
attttatgtttgg

SEQ ID NO: 113870 - DNA, 13 bp, Artificial Sequence
  Oligonucleotide for detection of SNP TSC0028511
ccaaacataaaat

SEQ ID NO: 113871 - DNA, 13 bp, Artificial Sequence
  Oligonucleotide for detection of SNP TSC0028511
attttacgtttgg

SEQ ID NO: 113872 - DNA, 13 bp, Artificial Sequence
  Oligonucleotide for detection of SNP TSC0028511
ccaaacgtaaaat

SEQ ID NO: 113873 - DNA, 13 bp, Artificial Sequence
  Oligonucleotide for detection of SNP TSC0028514
tgggaaatatggy

SEQ ID NO: 113874 - DNA, 13 bp, Artificial Sequence
  Oligonucleotide for detection of SNP TSC0028514
rccatatttccca

SEQ ID NO: 113875 - DNA, 13 bp, Artificial Sequence
  Oligonucleotide for detection of SNP TSC0028514
tgggaagtatggy

SEQ ID NO: 113876 - DNA, 13 bp, Artificial Sequence
  Oligonucleotide for detection of SNP TSC0028514
rccatacttccca

SEQ ID NO: 113877 - DNA, 13 bp, Artificial Sequence
  Oligonucleotide for detection of SNP TSC0028515
gatgtaaatatgg

SEQ ID NO: 113878 - DNA, 13 bp, Artificial Sequence
  Oligonucleotide for detection of SNP TSC0028515
ccatatttacatc

SEQ ID NO: 113879 - DNA, 13 bp, Artificial Sequence
  Oligonucleotide for detection of SNP TSC0028515
gatgtagatatgg

SEQ ID NO: 113880 - DNA, 13 bp, Artificial Sequence
  Oligonucleotide for detection of SNP TSC0028515
ccatatctacatc

SEQ ID NO: 113881 - DNA, 13 bp, Artificial Sequence
  Oligonucleotide for detection of SNP TSC0028515
gacgtaaatatgg

SEQ ID NO: 113882 - DNA, 13 bp, Artificial Sequence
  Oligonucleotide for detection of SNP TSC0028515
ccatatttacgtc

SEQ ID NO: 113883 - DNA, 13 bp, Artificial Sequence
  Oligonucleotide for detection of SNP TSC0028515
gacgtagatatgg

SEQ ID NO: 113884 - DNA, 13 bp, Artificial Sequence
  Oligonucleotide for detection of SNP TSC0028515
ccatatctacgtc

SEQ ID NO: 113885 - DNA, 13 bp, Artificial Sequence
  Oligonucleotide for detection of SNP TSC0028516
gtttgggtaagaa

SEQ ID NO: 113886 - DNA, 13 bp, Artificial Sequence
  Oligonucleotide for detection of SNP TSC0028516
ttcttacccaaac

SEQ ID NO: 113887 - DNA, 13 bp, Artificial Sequence
  Oligonucleotide for detection of SNP TSC0028516
gtttggataagaa

SEQ ID NO: 113888 - DNA, 13 bp, Artificial Sequence
  Oligonucleotide for detection of SNP TSC0028516
ttcttatccaaac

SEQ ID NO: 113889 - DNA, 13 bp, Artificial Sequence
  Oligonucleotide for detection of SNP TSC0028517
taaaatatggtty

SEQ ID NO: 113890 - DNA, 13 bp, Artificial Sequence
  Oligonucleotide for detection of SNP TSC0028517
raaccatatttta

SEQ ID NO: 113891 - DNA, 13 bp, Artificial Sequence
  Oligonucleotide for detection of SNP TSC0028517
taaaatgtggtty

SEQ ID NO: 113892 - DNA, 13 bp, Artificial Sequence
  Oligonucleotide for detection of SNP TSC0028517
raaccacatttta

SEQ ID NO: 113893 - DNA, 13 bp, Artificial Sequence
  Oligonucleotide for detection of SNP TSC0028518
ggatgggtatttt

SEQ ID NO: 113894 - DNA, 13 bp, Artificial Sequence
  Oligonucleotide for detection of SNP TSC0028518
aaaatacccatcc

SEQ ID NO: 113895 - DNA, 13 bp, Artificial Sequence
  Oligonucleotide for detection of SNP TSC0028518
ggatggttatttt

SEQ ID NO: 113896 - DNA, 13 bp, Artificial Sequence
  Oligonucleotide for detection of SNP TSC0028518
aaaataaccatcc

SEQ ID NO: 113897 - DNA, 13 bp, Artificial Sequence
  Oligonucleotide for detection of SNP TSC0028518
aaaatgtttatty

SEQ ID NO: 113898 - DNA, 13 bp, Artificial Sequence
  Oligonucleotide for detection of SNP TSC0028518
raataaacatttt

SEQ ID NO: 113899 - DNA, 13 bp, Artificial Sequence
  Oligonucleotide for detection of SNP TSC0028518
aaaatgattatty

SEQ ID NO: 113900 - DNA, 13 bp, Artificial Sequence
  Oligonucleotide for detection of SNP TSC0028518
raataatcatttt

SEQ ID NO: 113901 - DNA, 13 bp, Artificial Sequence
  Oligonucleotide for detection of SNP TSC0028520
aagaattttgggg

SEQ ID NO: 113902 - DNA, 13 bp, Artificial Sequence
  Oligonucleotide for detection of SNP TSC0028520
ccccaaaattctt

SEQ ID NO: 113903 - DNA, 13 bp, Artificial Sequence
  Oligonucleotide for detection of SNP TSC0028520
aagaatgttgggg

SEQ ID NO: 113904 - DNA, 13 bp, Artificial Sequence
  Oligonucleotide for detection of SNP TSC0028520
ccccaacattctt

SEQ ID NO: 113905 - DNA, 13 bp, Artificial Sequence
  Oligonucleotide for detection of SNP TSC0028520
ttttaggattttt

SEQ ID NO: 113906 - DNA, 13 bp, Artificial Sequence
  Oligonucleotide for detection of SNP TSC0028520
aaaaatcctaaaa

SEQ ID NO: 113907 - DNA, 13 bp, Artificial Sequence
  Oligonucleotide for detection of SNP TSC0028520
ttttagtattttt

SEQ ID NO: 113908 - DNA, 13 bp, Artificial Sequence
  Oligonucleotide for detection of SNP TSC0028520
aaaaatactaaaa

SEQ ID NO: 113909 - DNA, 13 bp, Artificial Sequence
  Oligonucleotide for detection of SNP TSC0028521
gggaataggtagg

SEQ ID NO: 113910 - DNA, 13 bp, Artificial Sequence
  Oligonucleotide for detection of SNP TSC0028521
cctacctattccc

SEQ ID NO: 113911 - DNA, 13 bp, Artificial Sequence
  Oligonucleotide for detection of SNP TSC0028521
gggaatgggtagg

SEQ ID NO: 113912 - DNA, 13 bp, Artificial Sequence
  Oligonucleotide for detection of SNP TSC0028521
cctacccattccc

SEQ ID NO: 113913 - DNA, 13 bp, Artificial Sequence
  Oligonucleotide for detection of SNP TSC0028521
gggaacgggtagg

SEQ ID NO: 113914 - DNA, 13 bp, Artificial Sequence
  Oligonucleotide for detection of SNP TSC0028521
cctacccgttccc

SEQ ID NO: 113915 - DNA, 13 bp, Artificial Sequence
  Oligonucleotide for detection of SNP TSC0028521
tttgtttgtttty

SEQ ID NO: 113916 - DNA, 13 bp, Artificial Sequence
  Oligonucleotide for detection of SNP TSC0028521
raaaacaaacaaa

SEQ ID NO: 113917 - DNA, 13 bp, Artificial Sequence
  Oligonucleotide for detection of SNP TSC0028521
tttgttcgtttty

SEQ ID NO: 113918 - DNA, 13 bp, Artificial Sequence
  Oligonucleotide for detection of SNP TSC0028521
raaaacgaacaaa

SEQ ID NO: 113919 - DNA, 13 bp, Artificial Sequence
  Oligonucleotide for detection of SNP TSC0028522
tggtatattatty

SEQ ID NO: 113920 - DNA, 13 bp, Artificial Sequence
  Oligonucleotide for detection of SNP TSC0028522
raataatatacca

SEQ ID NO: 113921 - DNA, 13 bp, Artificial Sequence
  Oligonucleotide for detection of SNP TSC0028522
tggtatgttatty

SEQ ID NO: 113922 - DNA, 13 bp, Artificial Sequence
  Oligonucleotide for detection of SNP TSC0028522
raataacatacca

SEQ ID NO: 113923 - DNA, 13 bp, Artificial Sequence
  Oligonucleotide for detection of SNP TSC0028522
tggtacgttatty

SEQ ID NO: 113924 - DNA, 13 bp, Artificial Sequence
  Oligonucleotide for detection of SNP TSC0028522
raataacgtacca

SEQ ID NO: 113925 - DNA, 13 bp, Artificial Sequence
  Oligonucleotide for detection of SNP TSC0028522
gggtggtgtgtta

SEQ ID NO: 113926 - DNA, 13 bp, Artificial Sequence
  Oligonucleotide for detection of SNP TSC0028522
taacacaccaccc

SEQ ID NO: 113927 - DNA, 13 bp, Artificial Sequence
  Oligonucleotide for detection of SNP TSC0028522
gggtggcgtgtta

SEQ ID NO: 113928 - DNA, 13 bp, Artificial Sequence
  Oligonucleotide for detection of SNP TSC0028522
taacacgccaccc

SEQ ID NO: 113929 - DNA, 13 bp, Artificial Sequence
  Oligonucleotide for detection of SNP TSC0028523
tatttataaaaag

SEQ ID NO: 113930 - DNA, 13 bp, Artificial Sequence
  Oligonucleotide for detection of SNP TSC0028523
ctttttataaata

SEQ ID NO: 113931 - DNA, 13 bp, Artificial Sequence
  Oligonucleotide for detection of SNP TSC0028523
ttttttataagta

SEQ ID NO: 113932 - DNA, 13 bp, Artificial Sequence
  Oligonucleotide for detection of SNP TSC0028523
tacttataaaaaa

SEQ ID NO: 113933 - DNA, 13 bp, Artificial Sequence
  Oligonucleotide for detection of SNP TSC0028524
tattggatgtggt

SEQ ID NO: 113934 - DNA, 13 bp, Artificial Sequence
  Oligonucleotide for detection of SNP TSC0028524
accacatccaata

SEQ ID NO: 113935 - DNA, 13 bp, Artificial Sequence
  Oligonucleotide for detection of SNP TSC0028524
tattgggtgtggt

SEQ ID NO: 113936 - DNA, 13 bp, Artificial Sequence
  Oligonucleotide for detection of SNP TSC0028524
accacacccaata

SEQ ID NO: 113937 - DNA, 13 bp, Artificial Sequence
  Oligonucleotide for detection of SNP TSC0028527
tttaggataatty

SEQ ID NO: 113938 - DNA, 13 bp, Artificial Sequence
  Oligonucleotide for detection of SNP TSC0028527
raattatcctaaa

SEQ ID NO: 113939 - DNA, 13 bp, Artificial Sequence
  Oligonucleotide for detection of SNP TSC0028527
tttaggttaatty

SEQ ID NO: 113940 - DNA, 13 bp, Artificial Sequence
  Oligonucleotide for detection of SNP TSC0028527
raattaacctaaa

SEQ ID NO: 113941 - DNA, 13 bp, Artificial Sequence
  Oligonucleotide for detection of SNP TSC0028527
ggattgttttaaa

SEQ ID NO: 113942 - DNA, 13 bp, Artificial Sequence
  Oligonucleotide for detection of SNP TSC0028527
tttaaaacaatcc

SEQ ID NO: 113943 - DNA, 13 bp, Artificial Sequence
  Oligonucleotide for detection of SNP TSC0028527
ggattgatttaaa

SEQ ID NO: 113944 - DNA, 13 bp, Artificial Sequence
  Oligonucleotide for detection of SNP TSC0028527
tttaaatcaatcc

SEQ ID NO: 113945 - DNA, 13 bp, Artificial Sequence
  Oligonucleotide for detection of SNP TSC0028528
ttatttagttttg

SEQ ID NO: 113946 - DNA, 13 bp, Artificial Sequence
  Oligonucleotide for detection of SNP TSC0028528
caaaactaaataa

SEQ ID NO: 113947 - DNA, 13 bp, Artificial Sequence
  Oligonucleotide for detection of SNP TSC0028528
ttattcggttttg

SEQ ID NO: 113948 - DNA, 13 bp, Artificial Sequence
  Oligonucleotide for detection of SNP TSC0028528
caaaaccgaataa

SEQ ID NO: 113949 - DNA, 13 bp, Artificial Sequence
  Oligonucleotide for detection of SNP TSC0028528
taaagttgaatag

SEQ ID NO: 113950 - DNA, 13 bp, Artificial Sequence
  Oligonucleotide for detection of SNP TSC0028528
ctattcaacttta

SEQ ID NO: 113951 - DNA, 13 bp, Artificial Sequence
  Oligonucleotide for detection of SNP TSC0028528
taaagtcgaatag

SEQ ID NO: 113952 - DNA, 13 bp, Artificial Sequence
  Oligonucleotide for detection of SNP TSC0028528
ctattcgacttta

SEQ ID NO: 113953 - DNA, 13 bp, Artificial Sequence
  Oligonucleotide for detection of SNP TSC0028531
agtgttaggtagy

SEQ ID NO: 113954 - DNA, 13 bp, Artificial Sequence
  Oligonucleotide for detection of SNP TSC0028531
rctacctaacact

SEQ ID NO: 113955 - DNA, 13 bp, Artificial Sequence
  Oligonucleotide for detection of SNP TSC0028531
agtgtttggtagy

SEQ ID NO: 113956 - DNA, 13 bp, Artificial Sequence
  Oligonucleotide for detection of SNP TSC0028531
rctaccaaacact

SEQ ID NO: 113957 - DNA, 13 bp, Artificial Sequence
  Oligonucleotide for detection of SNP TSC0028531
agcgttaggtagy

SEQ ID NO: 113958 - DNA, 13 bp, Artificial Sequence
  Oligonucleotide for detection of SNP TSC0028531
rctacctaacgct

SEQ ID NO: 113959 - DNA, 13 bp, Artificial Sequence
  Oligonucleotide for detection of SNP TSC0028531
agcgtttggtagy

SEQ ID NO: 113960 - DNA, 13 bp, Artificial Sequence
  Oligonucleotide for detection of SNP TSC0028531
rctaccaaacgct

SEQ ID NO: 113961 - DNA, 13 bp, Artificial Sequence
  Oligonucleotide for detection of SNP TSC0028531
gttgtttggtgtt

SEQ ID NO: 113962 - DNA, 13 bp, Artificial Sequence
  Oligonucleotide for detection of SNP TSC0028531
aacaccaaacaac

SEQ ID NO: 113963 - DNA, 13 bp, Artificial Sequence
  Oligonucleotide for detection of SNP TSC0028531
gttgttaggtgtt

SEQ ID NO: 113964 - DNA, 13 bp, Artificial Sequence
  Oligonucleotide for detection of SNP TSC0028531
aacacctaacaac

SEQ ID NO: 113965 - DNA, 13 bp, Artificial Sequence
  Oligonucleotide for detection of SNP TSC0028531
gttgtttggcgtt

SEQ ID NO: 113966 - DNA, 13 bp, Artificial Sequence
  Oligonucleotide for detection of SNP TSC0028531
aacgccaaacaac

SEQ ID NO: 113967 - DNA, 13 bp, Artificial Sequence
  Oligonucleotide for detection of SNP TSC0028531
gttgttaggcgtt

SEQ ID NO: 113968 - DNA, 13 bp, Artificial Sequence
  Oligonucleotide for detection of SNP TSC0028531
aacgcctaacaac

SEQ ID NO: 113969 - DNA, 13 bp, Artificial Sequence
  Oligonucleotide for detection of SNP TSC0028532
ttttagtagttgt

SEQ ID NO: 113970 - DNA, 13 bp, Artificial Sequence
  Oligonucleotide for detection of SNP TSC0028532
acaactactaaaa

SEQ ID NO: 113971 - DNA, 13 bp, Artificial Sequence
  Oligonucleotide for detection of SNP TSC0028532
atagtttttggga

SEQ ID NO: 113972 - DNA, 13 bp, Artificial Sequence
  Oligonucleotide for detection of SNP TSC0028532
tcccaaaaactat

SEQ ID NO: 113973 - DNA, 13 bp, Artificial Sequence
  Oligonucleotide for detection of SNP TSC0028532
atagttattggga

SEQ ID NO: 113974 - DNA, 13 bp, Artificial Sequence
  Oligonucleotide for detection of SNP TSC0028532
tcccaataactat

SEQ ID NO: 113975 - DNA, 13 bp, Artificial Sequence
  Oligonucleotide for detection of SNP TSC0028533
aaaaatatgttaa

SEQ ID NO: 113976 - DNA, 13 bp, Artificial Sequence
  Oligonucleotide for detection of SNP TSC0028533
ttaacatattttt

SEQ ID NO: 113977 - DNA, 13 bp, Artificial Sequence
  Oligonucleotide for detection of SNP TSC0028533
aaaaatttgttaa

SEQ ID NO: 113978 - DNA, 13 bp, Artificial Sequence
  Oligonucleotide for detection of SNP TSC0028533
ttaacaaattttt

SEQ ID NO: 113979 - DNA, 13 bp, Artificial Sequence
  Oligonucleotide for detection of SNP TSC0028533
ttgatatattttt

SEQ ID NO: 113980 - DNA, 13 bp, Artificial Sequence
  Oligonucleotide for detection of SNP TSC0028533
aaaaatatatcaa

SEQ ID NO: 113981 - DNA, 13 bp, Artificial Sequence
  Oligonucleotide for detection of SNP TSC0028535
aataataataata

SEQ ID NO: 113982 - DNA, 13 bp, Artificial Sequence
  Oligonucleotide for detection of SNP TSC0028535
tattattattatt

SEQ ID NO: 113983 - DNA, 13 bp, Artificial Sequence
  Oligonucleotide for detection of SNP TSC0028535
aataattataata

SEQ ID NO: 113984 - DNA, 13 bp, Artificial Sequence
  Oligonucleotide for detection of SNP TSC0028535
tattataattatt

SEQ ID NO: 113985 - DNA, 13 bp, Artificial Sequence
  Oligonucleotide for detection of SNP TSC0028535
tgttattgttatt

SEQ ID NO: 113986 - DNA, 13 bp, Artificial Sequence
  Oligonucleotide for detection of SNP TSC0028535
aataacaataaca

SEQ ID NO: 113987 - DNA, 13 bp, Artificial Sequence
  Oligonucleotide for detection of SNP TSC0028535
tgttatagttatt

SEQ ID NO: 113988 - DNA, 13 bp, Artificial Sequence
  Oligonucleotide for detection of SNP TSC0028535
aataactataaca

SEQ ID NO: 113989 - DNA, 13 bp, Artificial Sequence
  Oligonucleotide for detection of SNP TSC0028536
aggtgtatttttg

SEQ ID NO: 113990 - DNA, 13 bp, Artificial Sequence
  Oligonucleotide for detection of SNP TSC0028536
caaaaatacacct

SEQ ID NO: 113991 - DNA, 13 bp, Artificial Sequence
  Oligonucleotide for detection of SNP TSC0028536
aggtgtgtttttg

SEQ ID NO: 113992 - DNA, 13 bp, Artificial Sequence
  Oligonucleotide for detection of SNP TSC0028536
caaaaacacacct

SEQ ID NO: 113993 - DNA, 13 bp, Artificial Sequence
  Oligonucleotide for detection of SNP TSC0028536
aggtgcgtttttg

SEQ ID NO: 113994 - DNA, 13 bp, Artificial Sequence
  Oligonucleotide for detection of SNP TSC0028536
caaaaacgcacct

SEQ ID NO: 113995 - DNA, 13 bp, Artificial Sequence
  Oligonucleotide for detection of SNP TSC0028536
tagagatgtattt

SEQ ID NO: 113996 - DNA, 13 bp, Artificial Sequence
  Oligonucleotide for detection of SNP TSC0028536
aaatacatctcta

SEQ ID NO: 113997 - DNA, 13 bp, Artificial Sequence
  Oligonucleotide for detection of SNP TSC0028536
tagagacgtattt

SEQ ID NO: 113998 - DNA, 13 bp, Artificial Sequence
  Oligonucleotide for detection of SNP TSC0028536
aaatacgtctcta

SEQ ID NO: 113999 - DNA, 13 bp, Artificial Sequence
  Oligonucleotide for detection of SNP TSC0028537
ttacgttggttty

SEQ ID NO: 114000 - DNA, 13 bp, Artificial Sequence
  Oligonucleotide for detection of SNP TSC0028537
raaaccaacgtaa

SEQ ID NO: 114001 - DNA, 13 bp, Artificial Sequence
  Oligonucleotide for detection of SNP TSC0028537
ttacgtcggttty

SEQ ID NO: 114002 - DNA, 13 bp, Artificial Sequence
  Oligonucleotide for detection of SNP TSC0028537
raaaccgacgtaa

SEQ ID NO: 114003 - DNA, 13 bp, Artificial Sequence
  Oligonucleotide for detection of SNP TSC0028537
gaaattgatgtgg

SEQ ID NO: 114004 - DNA, 13 bp, Artificial Sequence
  Oligonucleotide for detection of SNP TSC0028537
ccacatcaatttc

SEQ ID NO: 114005 - DNA, 13 bp, Artificial Sequence
  Oligonucleotide for detection of SNP TSC0028537
gaaattaatgtgg

SEQ ID NO: 114006 - DNA, 13 bp, Artificial Sequence
  Oligonucleotide for detection of SNP TSC0028537
ccacattaatttc

SEQ ID NO: 114007 - DNA, 13 bp, Artificial Sequence
  Oligonucleotide for detection of SNP TSC0028537
gaaatcgatgtgg

SEQ ID NO: 114008 - DNA, 13 bp, Artificial Sequence
  Oligonucleotide for detection of SNP TSC0028537
ccacatcgatttc

SEQ ID NO: 114009 - DNA, 13 bp, Artificial Sequence
  Oligonucleotide for detection of SNP TSC0028537
gaaattaacgtgg

SEQ ID NO: 114010 - DNA, 13 bp, Artificial Sequence
  Oligonucleotide for detection of SNP TSC0028537
ccacgttaatttc

SEQ ID NO: 114011 - DNA, 13 bp, Artificial Sequence
  Oligonucleotide for detection of SNP TSC0028537
gaaattgacgtgg

SEQ ID NO: 114012 - DNA, 13 bp, Artificial Sequence
  Oligonucleotide for detection of SNP TSC0028537
ccacgtcaatttc

SEQ ID NO: 114013 - DNA, 13 bp, Artificial Sequence
  Oligonucleotide for detection of SNP TSC0028537
gaaatcgacgtgg

SEQ ID NO: 114014 - DNA, 13 bp, Artificial Sequence
  Oligonucleotide for detection of SNP TSC0028537
ccacgtcgatttc

SEQ ID NO: 114015 - DNA, 13 bp, Artificial Sequence
  Oligonucleotide for detection of SNP TSC0028538
tattttagtgatt

SEQ ID NO: 114016 - DNA, 13 bp, Artificial Sequence
  Oligonucleotide for detection of SNP TSC0028538
aatcactaaaata

SEQ ID NO: 114017 - DNA, 13 bp, Artificial Sequence
  Oligonucleotide for detection of SNP TSC0028538
tattttggtgatt

SEQ ID NO: 114018 - DNA, 13 bp, Artificial Sequence
  Oligonucleotide for detection of SNP TSC0028538
aatcaccaaaata

SEQ ID NO: 114019 - DNA, 13 bp, Artificial Sequence
  Oligonucleotide for detection of SNP TSC0028538
tatttcggtgatt

SEQ ID NO: 114020 - DNA, 13 bp, Artificial Sequence
  Oligonucleotide for detection of SNP TSC0028538
aatcaccgaaata

SEQ ID NO: 114021 - DNA, 13 bp, Artificial Sequence
  Oligonucleotide for detection of SNP TSC0028538
agttattgaaata

SEQ ID NO: 114022 - DNA, 13 bp, Artificial Sequence
  Oligonucleotide for detection of SNP TSC0028538
tatttcaataact

SEQ ID NO: 114023 - DNA, 13 bp, Artificial Sequence
  Oligonucleotide for detection of SNP TSC0028538
agttatcgaaata

SEQ ID NO: 114024 - DNA, 13 bp, Artificial Sequence
  Oligonucleotide for detection of SNP TSC0028538
tatttcgataact

SEQ ID NO: 114025 - DNA, 13 bp, Artificial Sequence
  Oligonucleotide for detection of SNP TSC0028539
agtggaggtattt

SEQ ID NO: 114026 - DNA, 13 bp, Artificial Sequence
  Oligonucleotide for detection of SNP TSC0028539
aaatacctccact

SEQ ID NO: 114027 - DNA, 13 bp, Artificial Sequence
  Oligonucleotide for detection of SNP TSC0028539
agtggatgtattt

SEQ ID NO: 114028 - DNA, 13 bp, Artificial Sequence
  Oligonucleotide for detection of SNP TSC0028539
aaatacatccact

SEQ ID NO: 114029 - DNA, 13 bp, Artificial Sequence
  Oligonucleotide for detection of SNP TSC0028539
aaatatttttatt

SEQ ID NO: 114030 - DNA, 13 bp, Artificial Sequence
  Oligonucleotide for detection of SNP TSC0028539
aataaaaatattt

SEQ ID NO: 114031 - DNA, 13 bp, Artificial Sequence
  Oligonucleotide for detection of SNP TSC0028539
aaatatatttatt

SEQ ID NO: 114032 - DNA, 13 bp, Artificial Sequence
  Oligonucleotide for detection of SNP TSC0028539
aataaatatattt

SEQ ID NO: 114033 - DNA, 13 bp, Artificial Sequence
  Oligonucleotide for detection of SNP TSC0028544
tttatagattttg

SEQ ID NO: 114034 - DNA, 13 bp, Artificial Sequence
  Oligonucleotide for detection of SNP TSC0028544
caaaatctataaa

SEQ ID NO: 114035 - DNA, 13 bp, Artificial Sequence
  Oligonucleotide for detection of SNP TSC0028544
taggatttataaa

SEQ ID NO: 114036 - DNA, 13 bp, Artificial Sequence
  Oligonucleotide for detection of SNP TSC0028544
tttataaatccta

SEQ ID NO: 114037 - DNA, 13 bp, Artificial Sequence
  Oligonucleotide for detection of SNP TSC0028544
taggatatataaa

SEQ ID NO: 114038 - DNA, 13 bp, Artificial Sequence
  Oligonucleotide for detection of SNP TSC0028544
tttatatatccta

SEQ ID NO: 114039 - DNA, 13 bp, Artificial Sequence
  Oligonucleotide for detection of SNP TSC0028545
aatattatgttty

SEQ ID NO: 114040 - DNA, 13 bp, Artificial Sequence
  Oligonucleotide for detection of SNP TSC0028545
raaacataatatt

SEQ ID NO: 114041 - DNA, 13 bp, Artificial Sequence
  Oligonucleotide for detection of SNP TSC0028545
aatattgtgttty

SEQ ID NO: 114042 - DNA, 13 bp, Artificial Sequence
  Oligonucleotide for detection of SNP TSC0028545
raaacacaatatt

SEQ ID NO: 114043 - DNA, 13 bp, Artificial Sequence
  Oligonucleotide for detection of SNP TSC0028546
atggttatgtttg

SEQ ID NO: 114044 - DNA, 13 bp, Artificial Sequence
  Oligonucleotide for detection of SNP TSC0028546
caaacataaccat

SEQ ID NO: 114045 - DNA, 13 bp, Artificial Sequence
  Oligonucleotide for detection of SNP TSC0028546
atggttgtgtttg

SEQ ID NO: 114046 - DNA, 13 bp, Artificial Sequence
  Oligonucleotide for detection of SNP TSC0028546
caaacacaaccat

SEQ ID NO: 114047 - DNA, 13 bp, Artificial Sequence
  Oligonucleotide for detection of SNP TSC0028546
atggttacgtttg

SEQ ID NO: 114048 - DNA, 13 bp, Artificial Sequence
  Oligonucleotide for detection of SNP TSC0028546
caaacgtaaccat

SEQ ID NO: 114049 - DNA, 13 bp, Artificial Sequence
  Oligonucleotide for detection of SNP TSC0028546
atggttgcgtttg

SEQ ID NO: 114050 - DNA, 13 bp, Artificial Sequence
  Oligonucleotide for detection of SNP TSC0028546
caaacgcaaccat

SEQ ID NO: 114051 - DNA, 13 bp, Artificial Sequence
  Oligonucleotide for detection of SNP TSC0028548
tataattggtaty

SEQ ID NO: 114052 - DNA, 13 bp, Artificial Sequence
  Oligonucleotide for detection of SNP TSC0028548
rataccaattata

SEQ ID NO: 114053 - DNA, 13 bp, Artificial Sequence
  Oligonucleotide for detection of SNP TSC0028548
tataatcggtaty

SEQ ID NO: 114054 - DNA, 13 bp, Artificial Sequence
  Oligonucleotide for detection of SNP TSC0028548
rataccgattata

SEQ ID NO: 114055 - DNA, 13 bp, Artificial Sequence
  Oligonucleotide for detection of SNP TSC0028548
gatgttgattatg

SEQ ID NO: 114056 - DNA, 13 bp, Artificial Sequence
  Oligonucleotide for detection of SNP TSC0028548
cataatcaacatc

SEQ ID NO: 114057 - DNA, 13 bp, Artificial Sequence
  Oligonucleotide for detection of SNP TSC0028548
gatgttaattatg

SEQ ID NO: 114058 - DNA, 13 bp, Artificial Sequence
  Oligonucleotide for detection of SNP TSC0028548
cataattaacatc

SEQ ID NO: 114059 - DNA, 13 bp, Artificial Sequence
  Oligonucleotide for detection of SNP TSC0028548
gatgtcgattatg

SEQ ID NO: 114060 - DNA, 13 bp, Artificial Sequence
  Oligonucleotide for detection of SNP TSC0028548
cataatcgacatc

SEQ ID NO: 114061 - DNA, 13 bp, Artificial Sequence
  Oligonucleotide for detection of SNP TSC0028551
ttagatatgtggg

SEQ ID NO: 114062 - DNA, 13 bp, Artificial Sequence
  Oligonucleotide for detection of SNP TSC0028551
cccacatatctaa

SEQ ID NO: 114063 - DNA, 13 bp, Artificial Sequence
  Oligonucleotide for detection of SNP TSC0028551
ttagatgtgtggg

SEQ ID NO: 114064 - DNA, 13 bp, Artificial Sequence
  Oligonucleotide for detection of SNP TSC0028551
cccacacatctaa

SEQ ID NO: 114065 - DNA, 13 bp, Artificial Sequence
  Oligonucleotide for detection of SNP TSC0028552
tttagaagttata

SEQ ID NO: 114066 - DNA, 13 bp, Artificial Sequence
  Oligonucleotide for detection of SNP TSC0028552
tataacttctaaa

SEQ ID NO: 114067 - DNA, 13 bp, Artificial Sequence
  Oligonucleotide for detection of SNP TSC0028552
tttagatgttata

SEQ ID NO: 114068 - DNA, 13 bp, Artificial Sequence
  Oligonucleotide for detection of SNP TSC0028552
tataacatctaaa

SEQ ID NO: 114069 - DNA, 13 bp, Artificial Sequence
  Oligonucleotide for detection of SNP TSC0028552
tgtagtttttgga

SEQ ID NO: 114070 - DNA, 13 bp, Artificial Sequence
  Oligonucleotide for detection of SNP TSC0028552
tccaaaaactaca

SEQ ID NO: 114071 - DNA, 13 bp, Artificial Sequence
  Oligonucleotide for detection of SNP TSC0028552
tgtagtatttgga

SEQ ID NO: 114072 - DNA, 13 bp, Artificial Sequence
  Oligonucleotide for detection of SNP TSC0028552
tccaaatactaca

SEQ ID NO: 114073 - DNA, 13 bp, Artificial Sequence
  Oligonucleotide for detection of SNP TSC0028553
aaaatttaaaaga

SEQ ID NO: 114074 - DNA, 13 bp, Artificial Sequence
  Oligonucleotide for detection of SNP TSC0028553
tcttttaaatttt

SEQ ID NO: 114075 - DNA, 13 bp, Artificial Sequence
  Oligonucleotide for detection of SNP TSC0028553
aaaattaaaaaga

SEQ ID NO: 114076 - DNA, 13 bp, Artificial Sequence
  Oligonucleotide for detection of SNP TSC0028553
tctttttaatttt

SEQ ID NO: 114077 - DNA, 13 bp, Artificial Sequence
  Oligonucleotide for detection of SNP TSC0028554
agggttttatggg

SEQ ID NO: 114078 - DNA, 13 bp, Artificial Sequence
  Oligonucleotide for detection of SNP TSC0028554
cccataaaaccct

SEQ ID NO: 114079 - DNA, 13 bp, Artificial Sequence
  Oligonucleotide for detection of SNP TSC0028554
agggttgtatggg

SEQ ID NO: 114080 - DNA, 13 bp, Artificial Sequence
  Oligonucleotide for detection of SNP TSC0028554
cccatacaaccct

SEQ ID NO: 114081 - DNA, 13 bp, Artificial Sequence
  Oligonucleotide for detection of SNP TSC0028554
tttatagagtttt

SEQ ID NO: 114082 - DNA, 13 bp, Artificial Sequence
  Oligonucleotide for detection of SNP TSC0028554
aaaactctataaa

SEQ ID NO: 114083 - DNA, 13 bp, Artificial Sequence
  Oligonucleotide for detection of SNP TSC0028554
tttatatagtttt

SEQ ID NO: 114084 - DNA, 13 bp, Artificial Sequence
  Oligonucleotide for detection of SNP TSC0028554
aaaactatataaa

SEQ ID NO: 114085 - DNA, 13 bp, Artificial Sequence
  Oligonucleotide for detection of SNP TSC0028556
ttgttgtttggtg

SEQ ID NO: 114086 - DNA, 13 bp, Artificial Sequence
  Oligonucleotide for detection of SNP TSC0028556
caccaaacaacaa

SEQ ID NO: 114087 - DNA, 13 bp, Artificial Sequence
  Oligonucleotide for detection of SNP TSC0028556
ttgttggttggtg

SEQ ID NO: 114088 - DNA, 13 bp, Artificial Sequence
  Oligonucleotide for detection of SNP TSC0028556
caccaaccaacaa

SEQ ID NO: 114089 - DNA, 13 bp, Artificial Sequence
  Oligonucleotide for detection of SNP TSC0028556
tcgttgtttggtg

SEQ ID NO: 114090 - DNA, 13 bp, Artificial Sequence
  Oligonucleotide for detection of SNP TSC0028556
caccaaacaacga

SEQ ID NO: 114091 - DNA, 13 bp, Artificial Sequence
  Oligonucleotide for detection of SNP TSC0028556
tcgttggttggtg

SEQ ID NO: 114092 - DNA, 13 bp, Artificial Sequence
  Oligonucleotide for detection of SNP TSC0028556
caccaaccaacga

SEQ ID NO: 114093 - DNA, 13 bp, Artificial Sequence
  Oligonucleotide for detection of SNP TSC0028556
ttgtcgtttggtg

SEQ ID NO: 114094 - DNA, 13 bp, Artificial Sequence
  Oligonucleotide for detection of SNP TSC0028556
caccaaacgacaa

SEQ ID NO: 114095 - DNA, 13 bp, Artificial Sequence
  Oligonucleotide for detection of SNP TSC0028556
ttgtcggttggtg

SEQ ID NO: 114096 - DNA, 13 bp, Artificial Sequence
  Oligonucleotide for detection of SNP TSC0028556
caccaaccgacaa

SEQ ID NO: 114097 - DNA, 13 bp, Artificial Sequence
  Oligonucleotide for detection of SNP TSC0028556
tcgtcgtttggtg

SEQ ID NO: 114098 - DNA, 13 bp, Artificial Sequence
  Oligonucleotide for detection of SNP TSC0028556
caccaaacgacga

SEQ ID NO: 114099 - DNA, 13 bp, Artificial Sequence
  Oligonucleotide for detection of SNP TSC0028556
tcgtcggttggtg

SEQ ID NO: 114100 - DNA, 13 bp, Artificial Sequence
  Oligonucleotide for detection of SNP TSC0028556
caccaaccgacga

SEQ ID NO: 114101 - DNA, 13 bp, Artificial Sequence
  Oligonucleotide for detection of SNP TSC0028556
tattaggtggtgg

SEQ ID NO: 114102 - DNA, 13 bp, Artificial Sequence
  Oligonucleotide for detection of SNP TSC0028556
ccaccacctaata

SEQ ID NO: 114103 - DNA, 13 bp, Artificial Sequence
  Oligonucleotide for detection of SNP TSC0028556
tattagttggtgg

SEQ ID NO: 114104 - DNA, 13 bp, Artificial Sequence
  Oligonucleotide for detection of SNP TSC0028556
ccaccaactaata

SEQ ID NO: 114105 - DNA, 13 bp, Artificial Sequence
  Oligonucleotide for detection of SNP TSC0028556
tattaggcggtgg

SEQ ID NO: 114106 - DNA, 13 bp, Artificial Sequence
  Oligonucleotide for detection of SNP TSC0028556
ccaccgcctaata

SEQ ID NO: 114107 - DNA, 13 bp, Artificial Sequence
  Oligonucleotide for detection of SNP TSC0028556
tattagtcggtgg

SEQ ID NO: 114108 - DNA, 13 bp, Artificial Sequence
  Oligonucleotide for detection of SNP TSC0028556
ccaccgactaata

SEQ ID NO: 114109 - DNA, 13 bp, Artificial Sequence
  Oligonucleotide for detection of SNP TSC0028556
tattaggtggcgg

SEQ ID NO: 114110 - DNA, 13 bp, Artificial Sequence
  Oligonucleotide for detection of SNP TSC0028556
ccgccacctaata

SEQ ID NO: 114111 - DNA, 13 bp, Artificial Sequence
  Oligonucleotide for detection of SNP TSC0028556
tattagttggcgg

SEQ ID NO: 114112 - DNA, 13 bp, Artificial Sequence
  Oligonucleotide for detection of SNP TSC0028556
ccgccaactaata

SEQ ID NO: 114113 - DNA, 13 bp, Artificial Sequence
  Oligonucleotide for detection of SNP TSC0028556
tattaggcggcgg

SEQ ID NO: 114114 - DNA, 13 bp, Artificial Sequence
  Oligonucleotide for detection of SNP TSC0028556
ccgccgcctaata

SEQ ID NO: 114115 - DNA, 13 bp, Artificial Sequence
  Oligonucleotide for detection of SNP TSC0028556
tattagtcggcgg

SEQ ID NO: 114116 - DNA, 13 bp, Artificial Sequence
  Oligonucleotide for detection of SNP TSC0028556
ccgccgactaata

SEQ ID NO: 114117 - DNA, 13 bp, Artificial Sequence
  Oligonucleotide for detection of SNP TSC0028557
ttagtagagatgg

SEQ ID NO: 114118 - DNA, 13 bp, Artificial Sequence
  Oligonucleotide for detection of SNP TSC0028557
ccatctctactaa

SEQ ID NO: 114119 - DNA, 13 bp, Artificial Sequence
  Oligonucleotide for detection of SNP TSC0028557
ttagtaaagatgg

SEQ ID NO: 114120 - DNA, 13 bp, Artificial Sequence
  Oligonucleotide for detection of SNP TSC0028557
ccatctttactaa

SEQ ID NO: 114121 - DNA, 13 bp, Artificial Sequence
  Oligonucleotide for detection of SNP TSC0028557
ttagtagagacgg

SEQ ID NO: 114122 - DNA, 13 bp, Artificial Sequence
  Oligonucleotide for detection of SNP TSC0028557
ccgtctctactaa

SEQ ID NO: 114123 - DNA, 13 bp, Artificial Sequence
  Oligonucleotide for detection of SNP TSC0028557
ttagtaaagacgg

SEQ ID NO: 114124 - DNA, 13 bp, Artificial Sequence
  Oligonucleotide for detection of SNP TSC0028557
ccgtctttactaa

SEQ ID NO: 114125 - DNA, 13 bp, Artificial Sequence
  Oligonucleotide for detection of SNP TSC0028558
aagttgttaagtt

SEQ ID NO: 114126 - DNA, 13 bp, Artificial Sequence
  Oligonucleotide for detection of SNP TSC0028558
aacttaacaactt

SEQ ID NO: 114127 - DNA, 13 bp, Artificial Sequence
  Oligonucleotide for detection of SNP TSC0028558
aagttggtaagtt

SEQ ID NO: 114128 - DNA, 13 bp, Artificial Sequence
  Oligonucleotide for detection of SNP TSC0028558
aacttaccaactt

SEQ ID NO: 114129 - DNA, 13 bp, Artificial Sequence
  Oligonucleotide for detection of SNP TSC0028558
aatttggtagttt

SEQ ID NO: 114130 - DNA, 13 bp, Artificial Sequence
  Oligonucleotide for detection of SNP TSC0028558
aaactaccaaatt

SEQ ID NO: 114131 - DNA, 13 bp, Artificial Sequence
  Oligonucleotide for detection of SNP TSC0028558
aatttgttagttt

SEQ ID NO: 114132 - DNA, 13 bp, Artificial Sequence
  Oligonucleotide for detection of SNP TSC0028558
aaactaacaaatt

SEQ ID NO: 114133 - DNA, 13 bp, Artificial Sequence
  Oligonucleotide for detection of SNP TSC0028559
agatagtgtttta

SEQ ID NO: 114134 - DNA, 13 bp, Artificial Sequence
  Oligonucleotide for detection of SNP TSC0028559
taaaacactatct

SEQ ID NO: 114135 - DNA, 13 bp, Artificial Sequence
  Oligonucleotide for detection of SNP TSC0028559
agatagcgtttta

SEQ ID NO: 114136 - DNA, 13 bp, Artificial Sequence
  Oligonucleotide for detection of SNP TSC0028559
taaaacgctatct

SEQ ID NO: 114137 - DNA, 13 bp, Artificial Sequence
  Oligonucleotide for detection of SNP TSC0028559
tgaaatgttgttt

SEQ ID NO: 114138 - DNA, 13 bp, Artificial Sequence
  Oligonucleotide for detection of SNP TSC0028559
aaacaacatttca

SEQ ID NO: 114139 - DNA, 13 bp, Artificial Sequence
  Oligonucleotide for detection of SNP TSC0028559
tgaaattttgttt

SEQ ID NO: 114140 - DNA, 13 bp, Artificial Sequence
  Oligonucleotide for detection of SNP TSC0028559
aaacaaaatttca

SEQ ID NO: 114141 - DNA, 13 bp, Artificial Sequence
  Oligonucleotide for detection of SNP TSC0028559
tgaaacgttgttt

SEQ ID NO: 114142 - DNA, 13 bp, Artificial Sequence
  Oligonucleotide for detection of SNP TSC0028559
aaacaacgtttca

SEQ ID NO: 114143 - DNA, 13 bp, Artificial Sequence
  Oligonucleotide for detection of SNP TSC0028560
gagtttatttgag

SEQ ID NO: 114144 - DNA, 13 bp, Artificial Sequence
  Oligonucleotide for detection of SNP TSC0028560
ctcaaataaactc

SEQ ID NO: 114145 - DNA, 13 bp, Artificial Sequence
  Oligonucleotide for detection of SNP TSC0028560
gagtttttttgag

SEQ ID NO: 114146 - DNA, 13 bp, Artificial Sequence
  Oligonucleotide for detection of SNP TSC0028560
ctcaaaaaaactc

SEQ ID NO: 114147 - DNA, 13 bp, Artificial Sequence
  Oligonucleotide for detection of SNP TSC0028560
tttagaagggtty

SEQ ID NO: 114148 - DNA, 13 bp, Artificial Sequence
  Oligonucleotide for detection of SNP TSC0028560
raacccttctaaa

SEQ ID NO: 114149 - DNA, 13 bp, Artificial Sequence
  Oligonucleotide for detection of SNP TSC0028561
tattttggagtat

SEQ ID NO: 114150 - DNA, 13 bp, Artificial Sequence
  Oligonucleotide for detection of SNP TSC0028561
atactccaaaata

SEQ ID NO: 114151 - DNA, 13 bp, Artificial Sequence
  Oligonucleotide for detection of SNP TSC0028561
tatttttgagtat

SEQ ID NO: 114152 - DNA, 13 bp, Artificial Sequence
  Oligonucleotide for detection of SNP TSC0028561
atactcaaaaata

SEQ ID NO: 114153 - DNA, 13 bp, Artificial Sequence
  Oligonucleotide for detection of SNP TSC0028561
tatttcggagtat

SEQ ID NO: 114154 - DNA, 13 bp, Artificial Sequence
  Oligonucleotide for detection of SNP TSC0028561
atactccgaaata

SEQ ID NO: 114155 - DNA, 13 bp, Artificial Sequence
  Oligonucleotide for detection of SNP TSC0028561
atattttggggta

SEQ ID NO: 114156 - DNA, 13 bp, Artificial Sequence
  Oligonucleotide for detection of SNP TSC0028561
taccccaaaatat

SEQ ID NO: 114157 - DNA, 13 bp, Artificial Sequence
  Oligonucleotide for detection of SNP TSC0028561
atatttaggggta

SEQ ID NO: 114158 - DNA, 13 bp, Artificial Sequence
  Oligonucleotide for detection of SNP TSC0028561
tacccctaaatat

SEQ ID NO: 114159 - DNA, 13 bp, Artificial Sequence
  Oligonucleotide for detection of SNP TSC0028561
atatttcggggta

SEQ ID NO: 114160 - DNA, 13 bp, Artificial Sequence
  Oligonucleotide for detection of SNP TSC0028561
taccccgaaatat

SEQ ID NO: 114161 - DNA, 13 bp, Artificial Sequence
  Oligonucleotide for detection of SNP TSC0028562
ttttaagggaata

SEQ ID NO: 114162 - DNA, 13 bp, Artificial Sequence
  Oligonucleotide for detection of SNP TSC0028562
tattcccttaaaa

SEQ ID NO: 114163 - DNA, 13 bp, Artificial Sequence
  Oligonucleotide for detection of SNP TSC0028562
ttttaaaggaata

SEQ ID NO: 114164 - DNA, 13 bp, Artificial Sequence
  Oligonucleotide for detection of SNP TSC0028562
tattcctttaaaa

SEQ ID NO: 114165 - DNA, 13 bp, Artificial Sequence
  Oligonucleotide for detection of SNP TSC0028566
taatataaatatt

SEQ ID NO: 114166 - DNA, 13 bp, Artificial Sequence
  Oligonucleotide for detection of SNP TSC0028566
aatatttatatta

SEQ ID NO: 114167 - DNA, 13 bp, Artificial Sequence
  Oligonucleotide for detection of SNP TSC0028566
taatatgaatatt

SEQ ID NO: 114168 - DNA, 13 bp, Artificial Sequence
  Oligonucleotide for detection of SNP TSC0028566
aatattcatatta

SEQ ID NO: 114169 - DNA, 13 bp, Artificial Sequence
  Oligonucleotide for detection of SNP TSC0028567
tgatatgagtaga

SEQ ID NO: 114170 - DNA, 13 bp, Artificial Sequence
  Oligonucleotide for detection of SNP TSC0028567
tctactcatatca

SEQ ID NO: 114171 - DNA, 13 bp, Artificial Sequence
  Oligonucleotide for detection of SNP TSC0028567
tgatattagtaga

SEQ ID NO: 114172 - DNA, 13 bp, Artificial Sequence
  Oligonucleotide for detection of SNP TSC0028567
tctactaatatca

SEQ ID NO: 114173 - DNA, 13 bp, Artificial Sequence
  Oligonucleotide for detection of SNP TSC0028567
tttgtttatatta

SEQ ID NO: 114174 - DNA, 13 bp, Artificial Sequence
  Oligonucleotide for detection of SNP TSC0028567
taatataaacaaa

SEQ ID NO: 114175 - DNA, 13 bp, Artificial Sequence
  Oligonucleotide for detection of SNP TSC0028567
tttgttaatatta

SEQ ID NO: 114176 - DNA, 13 bp, Artificial Sequence
  Oligonucleotide for detection of SNP TSC0028567
taatattaacaaa

SEQ ID NO: 114177 - DNA, 13 bp, Artificial Sequence
  Oligonucleotide for detection of SNP TSC0028568
tttggaggtttty

SEQ ID NO: 114178 - DNA, 13 bp, Artificial Sequence
  Oligonucleotide for detection of SNP TSC0028568
raaaacctccaaa

SEQ ID NO: 114179 - DNA, 13 bp, Artificial Sequence
  Oligonucleotide for detection of SNP TSC0028568
tttggaagtttty

SEQ ID NO: 114180 - DNA, 13 bp, Artificial Sequence
  Oligonucleotide for detection of SNP TSC0028568
raaaacttccaaa

SEQ ID NO: 114181 - DNA, 13 bp, Artificial Sequence
  Oligonucleotide for detection of SNP TSC0028569
aaatattgatata

SEQ ID NO: 114182 - DNA, 13 bp, Artificial Sequence
  Oligonucleotide for detection of SNP TSC0028569
tatatcaatattt

SEQ ID NO: 114183 - DNA, 13 bp, Artificial Sequence
  Oligonucleotide for detection of SNP TSC0028569
aaatatcgatata

SEQ ID NO: 114184 - DNA, 13 bp, Artificial Sequence
  Oligonucleotide for detection of SNP TSC0028569
tatatcgatattt

SEQ ID NO: 114185 - DNA, 13 bp, Artificial Sequence
  Oligonucleotide for detection of SNP TSC0028569
tatattggtattt

SEQ ID NO: 114186 - DNA, 13 bp, Artificial Sequence
  Oligonucleotide for detection of SNP TSC0028569
aaataccaatata

SEQ ID NO: 114187 - DNA, 13 bp, Artificial Sequence
  Oligonucleotide for detection of SNP TSC0028569
tatattagtattt

SEQ ID NO: 114188 - DNA, 13 bp, Artificial Sequence
  Oligonucleotide for detection of SNP TSC0028569
aaatactaatata

SEQ ID NO: 114189 - DNA, 13 bp, Artificial Sequence
  Oligonucleotide for detection of SNP TSC0028569
tatatcggtattt

SEQ ID NO: 114190 - DNA, 13 bp, Artificial Sequence
  Oligonucleotide for detection of SNP TSC0028569
aaataccgatata

SEQ ID NO: 114191 - DNA, 13 bp, Artificial Sequence
  Oligonucleotide for detection of SNP TSC0028570
tttatggtgaaaa

SEQ ID NO: 114192 - DNA, 13 bp, Artificial Sequence
  Oligonucleotide for detection of SNP TSC0028570
ttttcaccataaa

SEQ ID NO: 114193 - DNA, 13 bp, Artificial Sequence
  Oligonucleotide for detection of SNP TSC0028570
tttatgatgaaaa

SEQ ID NO: 114194 - DNA, 13 bp, Artificial Sequence
  Oligonucleotide for detection of SNP TSC0028570
ttttcatcataaa

SEQ ID NO: 114195 - DNA, 13 bp, Artificial Sequence
  Oligonucleotide for detection of SNP TSC0028571
tgtgatatatata

SEQ ID NO: 114196 - DNA, 13 bp, Artificial Sequence
  Oligonucleotide for detection of SNP TSC0028571
tatatatatcaca

SEQ ID NO: 114197 - DNA, 13 bp, Artificial Sequence
  Oligonucleotide for detection of SNP TSC0028571
tgtgatgtatata

SEQ ID NO: 114198 - DNA, 13 bp, Artificial Sequence
  Oligonucleotide for detection of SNP TSC0028571
tatatacatcaca

SEQ ID NO: 114199 - DNA, 13 bp, Artificial Sequence
  Oligonucleotide for detection of SNP TSC0028575
agagaaagggtay

SEQ ID NO: 114200 - DNA, 13 bp, Artificial Sequence
  Oligonucleotide for detection of SNP TSC0028575
rtaccctttctct

SEQ ID NO: 114201 - DNA, 13 bp, Artificial Sequence
  Oligonucleotide for detection of SNP TSC0028575
agagaaggggtay

SEQ ID NO: 114202 - DNA, 13 bp, Artificial Sequence
  Oligonucleotide for detection of SNP TSC0028575
rtaccccttctct

SEQ ID NO: 114203 - DNA, 13 bp, Artificial Sequence
  Oligonucleotide for detection of SNP TSC0028576
tttagatgtttay

SEQ ID NO: 114204 - DNA, 13 bp, Artificial Sequence
  Oligonucleotide for detection of SNP TSC0028576
rtaaacatctaaa

SEQ ID NO: 114205 - DNA, 13 bp, Artificial Sequence
  Oligonucleotide for detection of SNP TSC0028576
tttagacgtttay

SEQ ID NO: 114206 - DNA, 13 bp, Artificial Sequence
  Oligonucleotide for detection of SNP TSC0028576
rtaaacgtctaaa

SEQ ID NO: 114207 - DNA, 13 bp, Artificial Sequence
  Oligonucleotide for detection of SNP TSC0028576
gtagatgtttgaa

SEQ ID NO: 114208 - DNA, 13 bp, Artificial Sequence
  Oligonucleotide for detection of SNP TSC0028576
ttcaaacatctac

SEQ ID NO: 114209 - DNA, 13 bp, Artificial Sequence
  Oligonucleotide for detection of SNP TSC0028576
gtagatatttgaa

SEQ ID NO: 114210 - DNA, 13 bp, Artificial Sequence
  Oligonucleotide for detection of SNP TSC0028576
ttcaaatatctac

SEQ ID NO: 114211 - DNA, 13 bp, Artificial Sequence
  Oligonucleotide for detection of SNP TSC0028576
gtagacgtttgaa

SEQ ID NO: 114212 - DNA, 13 bp, Artificial Sequence
  Oligonucleotide for detection of SNP TSC0028576
ttcaaacgtctac

SEQ ID NO: 114213 - DNA, 13 bp, Artificial Sequence
  Oligonucleotide for detection of SNP TSC0028589
gttattatgtttt

SEQ ID NO: 114214 - DNA, 13 bp, Artificial Sequence
  Oligonucleotide for detection of SNP TSC0028589
aaaacataataac

SEQ ID NO: 114215 - DNA, 13 bp, Artificial Sequence
  Oligonucleotide for detection of SNP TSC0028589
gttattgtgtttt

SEQ ID NO: 114216 - DNA, 13 bp, Artificial Sequence
  Oligonucleotide for detection of SNP TSC0028589
aaaacacaataac

SEQ ID NO: 114217 - DNA, 13 bp, Artificial Sequence
  Oligonucleotide for detection of SNP TSC0028592
ttttatagggtay

SEQ ID NO: 114218 - DNA, 13 bp, Artificial Sequence
  Oligonucleotide for detection of SNP TSC0028592
rtaccctataaaa

SEQ ID NO: 114219 - DNA, 13 bp, Artificial Sequence
  Oligonucleotide for detection of SNP TSC0028592
ttttatggggtay

SEQ ID NO: 114220 - DNA, 13 bp, Artificial Sequence
  Oligonucleotide for detection of SNP TSC0028592
rtaccccataaaa

SEQ ID NO: 114221 - DNA, 13 bp, Artificial Sequence
  Oligonucleotide for detection of SNP TSC0028592
ttttacggggtay

SEQ ID NO: 114222 - DNA, 13 bp, Artificial Sequence
  Oligonucleotide for detection of SNP TSC0028592
rtaccccgtaaaa

SEQ ID NO: 114223 - DNA, 13 bp, Artificial Sequence
  Oligonucleotide for detection of SNP TSC0028592
gtattttgtgaga

SEQ ID NO: 114224 - DNA, 13 bp, Artificial Sequence
  Oligonucleotide for detection of SNP TSC0028592
tctcacaaaatac

SEQ ID NO: 114225 - DNA, 13 bp, Artificial Sequence
  Oligonucleotide for detection of SNP TSC0028592
gtatttcgtgaga

SEQ ID NO: 114226 - DNA, 13 bp, Artificial Sequence
  Oligonucleotide for detection of SNP TSC0028592
tctcacgaaatac

SEQ ID NO: 114227 - DNA, 13 bp, Artificial Sequence
  Oligonucleotide for detection of SNP TSC0028594
gaattagttattt

SEQ ID NO: 114228 - DNA, 13 bp, Artificial Sequence
  Oligonucleotide for detection of SNP TSC0028594
aaataactaattc

SEQ ID NO: 114229 - DNA, 13 bp, Artificial Sequence
  Oligonucleotide for detection of SNP TSC0028594
gaattaattattt

SEQ ID NO: 114230 - DNA, 13 bp, Artificial Sequence
  Oligonucleotide for detection of SNP TSC0028594
aaataattaattc

SEQ ID NO: 114231 - DNA, 13 bp, Artificial Sequence
  Oligonucleotide for detection of SNP TSC0028595
aatttaaatttat

SEQ ID NO: 114232 - DNA, 13 bp, Artificial Sequence
  Oligonucleotide for detection of SNP TSC0028595
ataaatttaaatt

SEQ ID NO: 114233 - DNA, 13 bp, Artificial Sequence
  Oligonucleotide for detection of SNP TSC0028595
aatttagatttat

SEQ ID NO: 114234 - DNA, 13 bp, Artificial Sequence
  Oligonucleotide for detection of SNP TSC0028595
ataaatctaaatt

SEQ ID NO: 114235 - DNA, 13 bp, Artificial Sequence
  Oligonucleotide for detection of SNP TSC0028596
atatataatttty

SEQ ID NO: 114236 - DNA, 13 bp, Artificial Sequence
  Oligonucleotide for detection of SNP TSC0028596
raaaattatatat

SEQ ID NO: 114237 - DNA, 13 bp, Artificial Sequence
  Oligonucleotide for detection of SNP TSC0028596
atatattatttty

SEQ ID NO: 114238 - DNA, 13 bp, Artificial Sequence
  Oligonucleotide for detection of SNP TSC0028596
raaaataatatat

SEQ ID NO: 114239 - DNA, 13 bp, Artificial Sequence
  Oligonucleotide for detection of SNP TSC0028596
ggaagttgtatgt

SEQ ID NO: 114240 - DNA, 13 bp, Artificial Sequence
  Oligonucleotide for detection of SNP TSC0028596
acatacaacttcc

SEQ ID NO: 114241 - DNA, 13 bp, Artificial Sequence
  Oligonucleotide for detection of SNP TSC0028596
ggaagtggtatgt

SEQ ID NO: 114242 - DNA, 13 bp, Artificial Sequence
  Oligonucleotide for detection of SNP TSC0028596
acataccacttcc

SEQ ID NO: 114243 - DNA, 13 bp, Artificial Sequence
  Oligonucleotide for detection of SNP TSC0028599
atttaaggtggta

SEQ ID NO: 114244 - DNA, 13 bp, Artificial Sequence
  Oligonucleotide for detection of SNP TSC0028599
taccaccttaaat

SEQ ID NO: 114245 - DNA, 13 bp, Artificial Sequence
  Oligonucleotide for detection of SNP TSC0028599
atttaaagtggta

SEQ ID NO: 114246 - DNA, 13 bp, Artificial Sequence
  Oligonucleotide for detection of SNP TSC0028599
taccactttaaat

SEQ ID NO: 114247 - DNA, 13 bp, Artificial Sequence
  Oligonucleotide for detection of SNP TSC0028600
agaagaaagattt

SEQ ID NO: 114248 - DNA, 13 bp, Artificial Sequence
  Oligonucleotide for detection of SNP TSC0028600
aaatctttcttct

SEQ ID NO: 114249 - DNA, 13 bp, Artificial Sequence
  Oligonucleotide for detection of SNP TSC0028600
agaagagagattt

SEQ ID NO: 114250 - DNA, 13 bp, Artificial Sequence
  Oligonucleotide for detection of SNP TSC0028600
aaatctctcttct

SEQ ID NO: 114251 - DNA, 13 bp, Artificial Sequence
  Oligonucleotide for detection of SNP TSC0028601
gtatttttagttt

SEQ ID NO: 114252 - DNA, 13 bp, Artificial Sequence
  Oligonucleotide for detection of SNP TSC0028601
aaactaaaaatac

SEQ ID NO: 114253 - DNA, 13 bp, Artificial Sequence
  Oligonucleotide for detection of SNP TSC0028601
agattgtaaatay

SEQ ID NO: 114254 - DNA, 13 bp, Artificial Sequence
  Oligonucleotide for detection of SNP TSC0028601
rtatttacaatct

SEQ ID NO: 114255 - DNA, 13 bp, Artificial Sequence
  Oligonucleotide for detection of SNP TSC0028601
agattgaaaatay

SEQ ID NO: 114256 - DNA, 13 bp, Artificial Sequence
  Oligonucleotide for detection of SNP TSC0028601
rtattttcaatct

SEQ ID NO: 114257 - DNA, 13 bp, Artificial Sequence
  Oligonucleotide for detection of SNP TSC0028603
tgaagtgttgttt

SEQ ID NO: 114258 - DNA, 13 bp, Artificial Sequence
  Oligonucleotide for detection of SNP TSC0028603
aaacaacacttca

SEQ ID NO: 114259 - DNA, 13 bp, Artificial Sequence
  Oligonucleotide for detection of SNP TSC0028603
tgaagtattgttt

SEQ ID NO: 114260 - DNA, 13 bp, Artificial Sequence
  Oligonucleotide for detection of SNP TSC0028603
aaacaatacttca

SEQ ID NO: 114261 - DNA, 13 bp, Artificial Sequence
  Oligonucleotide for detection of SNP TSC0028603
tgaagcgttgttt

SEQ ID NO: 114262 - DNA, 13 bp, Artificial Sequence
  Oligonucleotide for detection of SNP TSC0028603
aaacaacgcttca

SEQ ID NO: 114263 - DNA, 13 bp, Artificial Sequence
  Oligonucleotide for detection of SNP TSC0028604
ttatagaaaataa

SEQ ID NO: 114264 - DNA, 13 bp, Artificial Sequence
  Oligonucleotide for detection of SNP TSC0028604
ttattttctataa

SEQ ID NO: 114265 - DNA, 13 bp, Artificial Sequence
  Oligonucleotide for detection of SNP TSC0028604
ttatagtaaataa

SEQ ID NO: 114266 - DNA, 13 bp, Artificial Sequence
  Oligonucleotide for detection of SNP TSC0028604
ttatttactataa

SEQ ID NO: 114267 - DNA, 13 bp, Artificial Sequence
  Oligonucleotide for detection of SNP TSC0028607
gaagaaattaaga

SEQ ID NO: 114268 - DNA, 13 bp, Artificial Sequence
  Oligonucleotide for detection of SNP TSC0028607
tcttaatttcttc

SEQ ID NO: 114269 - DNA, 13 bp, Artificial Sequence
  Oligonucleotide for detection of SNP TSC0028607
gaagaagttaaga

SEQ ID NO: 114270 - DNA, 13 bp, Artificial Sequence
  Oligonucleotide for detection of SNP TSC0028607
tcttaacttcttc

SEQ ID NO: 114271 - DNA, 13 bp, Artificial Sequence
  Oligonucleotide for detection of SNP TSC0028608
tgaatgaataaaa

SEQ ID NO: 114272 - DNA, 13 bp, Artificial Sequence
  Oligonucleotide for detection of SNP TSC0028608
ttttattcattca

SEQ ID NO: 114273 - DNA, 13 bp, Artificial Sequence
  Oligonucleotide for detection of SNP TSC0028608
tgaatgtataaaa

SEQ ID NO: 114274 - DNA, 13 bp, Artificial Sequence
  Oligonucleotide for detection of SNP TSC0028608
ttttatacattca

SEQ ID NO: 114275 - DNA, 13 bp, Artificial Sequence
  Oligonucleotide for detection of SNP TSC0028611
ttattgaggtagy

SEQ ID NO: 114276 - DNA, 13 bp, Artificial Sequence
  Oligonucleotide for detection of SNP TSC0028611
rctacctcaataa

SEQ ID NO: 114277 - DNA, 13 bp, Artificial Sequence
  Oligonucleotide for detection of SNP TSC0028611
ttattggggtagy

SEQ ID NO: 114278 - DNA, 13 bp, Artificial Sequence
  Oligonucleotide for detection of SNP TSC0028611
rctaccccaataa

SEQ ID NO: 114279 - DNA, 13 bp, Artificial Sequence
  Oligonucleotide for detection of SNP TSC0028612
aatagagaagatt

SEQ ID NO: 114280 - DNA, 13 bp, Artificial Sequence
  Oligonucleotide for detection of SNP TSC0028612
aatcttctctatt

SEQ ID NO: 114281 - DNA, 13 bp, Artificial Sequence
  Oligonucleotide for detection of SNP TSC0028612
aatagaaaagatt

SEQ ID NO: 114282 - DNA, 13 bp, Artificial Sequence
  Oligonucleotide for detection of SNP TSC0028612
aatcttttctatt

SEQ ID NO: 114283 - DNA, 13 bp, Artificial Sequence
  Oligonucleotide for detection of SNP TSC0028616
aggggtggatggt

SEQ ID NO: 114284 - DNA, 13 bp, Artificial Sequence
  Oligonucleotide for detection of SNP TSC0028616
accatccacccct

SEQ ID NO: 114285 - DNA, 13 bp, Artificial Sequence
  Oligonucleotide for detection of SNP TSC0028616
aggggtagatggt

SEQ ID NO: 114286 - DNA, 13 bp, Artificial Sequence
  Oligonucleotide for detection of SNP TSC0028616
accatctacccct

SEQ ID NO: 114287 - DNA, 13 bp, Artificial Sequence
  Oligonucleotide for detection of SNP TSC0028617
taaatgattggtt

SEQ ID NO: 114288 - DNA, 13 bp, Artificial Sequence
  Oligonucleotide for detection of SNP TSC0028617
aaccaatcattta

SEQ ID NO: 114289 - DNA, 13 bp, Artificial Sequence
  Oligonucleotide for detection of SNP TSC0028617
taaatgtttggtt

SEQ ID NO: 114290 - DNA, 13 bp, Artificial Sequence
  Oligonucleotide for detection of SNP TSC0028617
aaccaaacattta

SEQ ID NO: 114291 - DNA, 13 bp, Artificial Sequence
  Oligonucleotide for detection of SNP TSC0028617
agttaattatttg

SEQ ID NO: 114292 - DNA, 13 bp, Artificial Sequence
  Oligonucleotide for detection of SNP TSC0028617
caaataattaact

SEQ ID NO: 114293 - DNA, 13 bp, Artificial Sequence
  Oligonucleotide for detection of SNP TSC0028617
agttaaatatttg

SEQ ID NO: 114294 - DNA, 13 bp, Artificial Sequence
  Oligonucleotide for detection of SNP TSC0028617
caaatatttaact

SEQ ID NO: 114295 - DNA, 13 bp, Artificial Sequence
  Oligonucleotide for detection of SNP TSC0028618
taattaggtttta

SEQ ID NO: 114296 - DNA, 13 bp, Artificial Sequence
  Oligonucleotide for detection of SNP TSC0028618
taaaacctaatta

SEQ ID NO: 114297 - DNA, 13 bp, Artificial Sequence
  Oligonucleotide for detection of SNP TSC0028618
taattaagtttta

SEQ ID NO: 114298 - DNA, 13 bp, Artificial Sequence
  Oligonucleotide for detection of SNP TSC0028618
taaaacttaatta

SEQ ID NO: 114299 - DNA, 13 bp, Artificial Sequence
  Oligonucleotide for detection of SNP TSC0028620
aggttatgtgtag

SEQ ID NO: 114300 - DNA, 13 bp, Artificial Sequence
  Oligonucleotide for detection of SNP TSC0028620
ctacacataacct

SEQ ID NO: 114301 - DNA, 13 bp, Artificial Sequence
  Oligonucleotide for detection of SNP TSC0028620
aggttacgtgtag

SEQ ID NO: 114302 - DNA, 13 bp, Artificial Sequence
  Oligonucleotide for detection of SNP TSC0028620
ctacacgtaacct

SEQ ID NO: 114303 - DNA, 13 bp, Artificial Sequence
  Oligonucleotide for detection of SNP TSC0028620
ttgtacgtagttt

SEQ ID NO: 114304 - DNA, 13 bp, Artificial Sequence
  Oligonucleotide for detection of SNP TSC0028620
aaactacgtacaa

SEQ ID NO: 114305 - DNA, 13 bp, Artificial Sequence
  Oligonucleotide for detection of SNP TSC0028622
gaaaaaaaagttt

SEQ ID NO: 114306 - DNA, 13 bp, Artificial Sequence
  Oligonucleotide for detection of SNP TSC0028622
aaacttttttttc

SEQ ID NO: 114307 - DNA, 13 bp, Artificial Sequence
  Oligonucleotide for detection of SNP TSC0028622
gaaaaagaagttt

SEQ ID NO: 114308 - DNA, 13 bp, Artificial Sequence
  Oligonucleotide for detection of SNP TSC0028622
aaacttctttttc

SEQ ID NO: 114309 - DNA, 13 bp, Artificial Sequence
  Oligonucleotide for detection of SNP TSC0028624
tattaaaggagag

SEQ ID NO: 114310 - DNA, 13 bp, Artificial Sequence
  Oligonucleotide for detection of SNP TSC0028624
ctctcctttaata

SEQ ID NO: 114311 - DNA, 13 bp, Artificial Sequence
  Oligonucleotide for detection of SNP TSC0028624
tattaagggagag

SEQ ID NO: 114312 - DNA, 13 bp, Artificial Sequence
  Oligonucleotide for detection of SNP TSC0028624
ctctcccttaata

SEQ ID NO: 114313 - DNA, 13 bp, Artificial Sequence
  Oligonucleotide for detection of SNP TSC0028626
tgtggtagtgggt

SEQ ID NO: 114314 - DNA, 13 bp, Artificial Sequence
  Oligonucleotide for detection of SNP TSC0028626
acccactaccaca

SEQ ID NO: 114315 - DNA, 13 bp, Artificial Sequence
  Oligonucleotide for detection of SNP TSC0028626
tgtggtggtgggt

SEQ ID NO: 114316 - DNA, 13 bp, Artificial Sequence
  Oligonucleotide for detection of SNP TSC0028626
acccaccaccaca

SEQ ID NO: 114317 - DNA, 13 bp, Artificial Sequence
  Oligonucleotide for detection of SNP TSC0028626
cgtggtagtgggt

SEQ ID NO: 114318 - DNA, 13 bp, Artificial Sequence
  Oligonucleotide for detection of SNP TSC0028626
acccactaccacg

SEQ ID NO: 114319 - DNA, 13 bp, Artificial Sequence
  Oligonucleotide for detection of SNP TSC0028626
cgtggtggtgggt

SEQ ID NO: 114320 - DNA, 13 bp, Artificial Sequence
  Oligonucleotide for detection of SNP TSC0028626
acccaccaccacg

SEQ ID NO: 114321 - DNA, 13 bp, Artificial Sequence
  Oligonucleotide for detection of SNP TSC0028627
gtaaggggaaagg

SEQ ID NO: 114322 - DNA, 13 bp, Artificial Sequence
  Oligonucleotide for detection of SNP TSC0028627
cctttccccttac

SEQ ID NO: 114323 - DNA, 13 bp, Artificial Sequence
  Oligonucleotide for detection of SNP TSC0028627
gtaaggtgaaagg

SEQ ID NO: 114324 - DNA, 13 bp, Artificial Sequence
  Oligonucleotide for detection of SNP TSC0028627
cctttcaccttac

SEQ ID NO: 114325 - DNA, 13 bp, Artificial Sequence
  Oligonucleotide for detection of SNP TSC0028628
tttagtataaaat

SEQ ID NO: 114326 - DNA, 13 bp, Artificial Sequence
  Oligonucleotide for detection of SNP TSC0028628
attttatactaaa

SEQ ID NO: 114327 - DNA, 13 bp, Artificial Sequence
  Oligonucleotide for detection of SNP TSC0028628
tttagtgtaaaat

SEQ ID NO: 114328 - DNA, 13 bp, Artificial Sequence
  Oligonucleotide for detection of SNP TSC0028628
attttacactaaa

SEQ ID NO: 114329 - DNA, 13 bp, Artificial Sequence
  Oligonucleotide for detection of SNP TSC0028628
tttagcgtaaaat

SEQ ID NO: 114330 - DNA, 13 bp, Artificial Sequence
  Oligonucleotide for detection of SNP TSC0028628
attttacgctaaa

SEQ ID NO: 114331 - DNA, 13 bp, Artificial Sequence
  Oligonucleotide for detection of SNP TSC0028628
attttgtgttggg

SEQ ID NO: 114332 - DNA, 13 bp, Artificial Sequence
  Oligonucleotide for detection of SNP TSC0028628
cccaacacaaaat

SEQ ID NO: 114333 - DNA, 13 bp, Artificial Sequence
  Oligonucleotide for detection of SNP TSC0028628
attttgcgttggg

SEQ ID NO: 114334 - DNA, 13 bp, Artificial Sequence
  Oligonucleotide for detection of SNP TSC0028628
cccaacgcaaaat

SEQ ID NO: 114335 - DNA, 13 bp, Artificial Sequence
  Oligonucleotide for detection of SNP TSC0028629
ttgggatgaaaag

SEQ ID NO: 114336 - DNA, 13 bp, Artificial Sequence
  Oligonucleotide for detection of SNP TSC0028629
cttttcatcccaa

SEQ ID NO: 114337 - DNA, 13 bp, Artificial Sequence
  Oligonucleotide for detection of SNP TSC0028629
ttgggacgaaaag

SEQ ID NO: 114338 - DNA, 13 bp, Artificial Sequence
  Oligonucleotide for detection of SNP TSC0028629
cttttcgtcccaa

SEQ ID NO: 114339 - DNA, 13 bp, Artificial Sequence
  Oligonucleotide for detection of SNP TSC0028630
tgatttgttaaat

SEQ ID NO: 114340 - DNA, 13 bp, Artificial Sequence
  Oligonucleotide for detection of SNP TSC0028630
atttaacaaatca

SEQ ID NO: 114341 - DNA, 13 bp, Artificial Sequence
  Oligonucleotide for detection of SNP TSC0028630
tgatttattaaat

SEQ ID NO: 114342 - DNA, 13 bp, Artificial Sequence
  Oligonucleotide for detection of SNP TSC0028630
atttaataaatca

SEQ ID NO: 114343 - DNA, 13 bp, Artificial Sequence
  Oligonucleotide for detection of SNP TSC0028634
ttgattattagty

SEQ ID NO: 114344 - DNA, 13 bp, Artificial Sequence
  Oligonucleotide for detection of SNP TSC0028634
ractaataatcaa

SEQ ID NO: 114345 - DNA, 13 bp, Artificial Sequence
  Oligonucleotide for detection of SNP TSC0028634
ttgattgttagty

SEQ ID NO: 114346 - DNA, 13 bp, Artificial Sequence
  Oligonucleotide for detection of SNP TSC0028634
ractaacaatcaa

SEQ ID NO: 114347 - DNA, 13 bp, Artificial Sequence
  Oligonucleotide for detection of SNP TSC0028635
tttaataatagty

SEQ ID NO: 114348 - DNA, 13 bp, Artificial Sequence
  Oligonucleotide for detection of SNP TSC0028635
ractattattaaa

SEQ ID NO: 114349 - DNA, 13 bp, Artificial Sequence
  Oligonucleotide for detection of SNP TSC0028635
tttaatgatagty

SEQ ID NO: 114350 - DNA, 13 bp, Artificial Sequence
  Oligonucleotide for detection of SNP TSC0028635
ractatcattaaa

SEQ ID NO: 114351 - DNA, 13 bp, Artificial Sequence
  Oligonucleotide for detection of SNP TSC0028636
aagtattttttty

SEQ ID NO: 114352 - DNA, 13 bp, Artificial Sequence
  Oligonucleotide for detection of SNP TSC0028636
raaaaaaatactt

SEQ ID NO: 114353 - DNA, 13 bp, Artificial Sequence
  Oligonucleotide for detection of SNP TSC0028636
aagtatgttttty

SEQ ID NO: 114354 - DNA, 13 bp, Artificial Sequence
  Oligonucleotide for detection of SNP TSC0028636
raaaaacatactt

SEQ ID NO: 114355 - DNA, 13 bp, Artificial Sequence
  Oligonucleotide for detection of SNP TSC0028636
aagtacgttttty

SEQ ID NO: 114356 - DNA, 13 bp, Artificial Sequence
  Oligonucleotide for detection of SNP TSC0028636
raaaaacgtactt

SEQ ID NO: 114357 - DNA, 13 bp, Artificial Sequence
  Oligonucleotide for detection of SNP TSC0028636
gagaagggtgttt

SEQ ID NO: 114358 - DNA, 13 bp, Artificial Sequence
  Oligonucleotide for detection of SNP TSC0028636
aaacacccttctc

SEQ ID NO: 114359 - DNA, 13 bp, Artificial Sequence
  Oligonucleotide for detection of SNP TSC0028636
gagaagtgtgttt

SEQ ID NO: 114360 - DNA, 13 bp, Artificial Sequence
  Oligonucleotide for detection of SNP TSC0028636
aaacacacttctc

SEQ ID NO: 114361 - DNA, 13 bp, Artificial Sequence
  Oligonucleotide for detection of SNP TSC0028636
gagaagcgtgttt

SEQ ID NO: 114362 - DNA, 13 bp, Artificial Sequence
  Oligonucleotide for detection of SNP TSC0028636
aaacacgcttctc

SEQ ID NO: 114363 - DNA, 13 bp, Artificial Sequence
  Oligonucleotide for detection of SNP TSC0028637
gtggaaattggaa

SEQ ID NO: 114364 - DNA, 13 bp, Artificial Sequence
  Oligonucleotide for detection of SNP TSC0028637
ttccaatttccac

SEQ ID NO: 114365 - DNA, 13 bp, Artificial Sequence
  Oligonucleotide for detection of SNP TSC0028637
gtggaatttggaa

SEQ ID NO: 114366 - DNA, 13 bp, Artificial Sequence
  Oligonucleotide for detection of SNP TSC0028637
ttccaaattccac

SEQ ID NO: 114367 - DNA, 13 bp, Artificial Sequence
  Oligonucleotide for detection of SNP TSC0028637
ttttagtttttay

SEQ ID NO: 114368 - DNA, 13 bp, Artificial Sequence
  Oligonucleotide for detection of SNP TSC0028637
rtaaaaactaaaa

SEQ ID NO: 114369 - DNA, 13 bp, Artificial Sequence
  Oligonucleotide for detection of SNP TSC0028637
ttttaggttttay

SEQ ID NO: 114370 - DNA, 13 bp, Artificial Sequence
  Oligonucleotide for detection of SNP TSC0028637
rtaaaacctaaaa

SEQ ID NO: 114371 - DNA, 13 bp, Artificial Sequence
  Oligonucleotide for detection of SNP TSC0028638
tttagttgggtat

SEQ ID NO: 114372 - DNA, 13 bp, Artificial Sequence
  Oligonucleotide for detection of SNP TSC0028638
atacccaactaaa

SEQ ID NO: 114373 - DNA, 13 bp, Artificial Sequence
  Oligonucleotide for detection of SNP TSC0028638
tttagtcgggtat

SEQ ID NO: 114374 - DNA, 13 bp, Artificial Sequence
  Oligonucleotide for detection of SNP TSC0028638
atacccgactaaa

SEQ ID NO: 114375 - DNA, 13 bp, Artificial Sequence
  Oligonucleotide for detection of SNP TSC0028638
atatttgattaag

SEQ ID NO: 114376 - DNA, 13 bp, Artificial Sequence
  Oligonucleotide for detection of SNP TSC0028638
cttaatcaaatat

SEQ ID NO: 114377 - DNA, 13 bp, Artificial Sequence
  Oligonucleotide for detection of SNP TSC0028638
atatttaattaag

SEQ ID NO: 114378 - DNA, 13 bp, Artificial Sequence
  Oligonucleotide for detection of SNP TSC0028638
cttaattaaatat

SEQ ID NO: 114379 - DNA, 13 bp, Artificial Sequence
  Oligonucleotide for detection of SNP TSC0028638
atattcgattaag

SEQ ID NO: 114380 - DNA, 13 bp, Artificial Sequence
  Oligonucleotide for detection of SNP TSC0028638
cttaatcgaatat

SEQ ID NO: 114381 - DNA, 13 bp, Artificial Sequence
  Oligonucleotide for detection of SNP TSC0028642
gggttttgggtta

SEQ ID NO: 114382 - DNA, 13 bp, Artificial Sequence
  Oligonucleotide for detection of SNP TSC0028642
taacccaaaaccc

SEQ ID NO: 114383 - DNA, 13 bp, Artificial Sequence
  Oligonucleotide for detection of SNP TSC0028642
gggtttcgggtta

SEQ ID NO: 114384 - DNA, 13 bp, Artificial Sequence
  Oligonucleotide for detection of SNP TSC0028642
taacccgaaaccc

SEQ ID NO: 114385 - DNA, 13 bp, Artificial Sequence
  Oligonucleotide for detection of SNP TSC0028642
taatttggagtty

SEQ ID NO: 114386 - DNA, 13 bp, Artificial Sequence
  Oligonucleotide for detection of SNP TSC0028642
raactccaaatta

SEQ ID NO: 114387 - DNA, 13 bp, Artificial Sequence
  Oligonucleotide for detection of SNP TSC0028642
taatttagagtty

SEQ ID NO: 114388 - DNA, 13 bp, Artificial Sequence
  Oligonucleotide for detection of SNP TSC0028642
raactctaaatta

SEQ ID NO: 114389 - DNA, 13 bp, Artificial Sequence
  Oligonucleotide for detection of SNP TSC0028642
taattcggagtty

SEQ ID NO: 114390 - DNA, 13 bp, Artificial Sequence
  Oligonucleotide for detection of SNP TSC0028642
raactccgaatta

SEQ ID NO: 114391 - DNA, 13 bp, Artificial Sequence
  Oligonucleotide for detection of SNP TSC0028643
attttttttaggt

SEQ ID NO: 114392 - DNA, 13 bp, Artificial Sequence
  Oligonucleotide for detection of SNP TSC0028643
acctaaaaaaaat

SEQ ID NO: 114393 - DNA, 13 bp, Artificial Sequence
  Oligonucleotide for detection of SNP TSC0028643
atttttgttaggt

SEQ ID NO: 114394 - DNA, 13 bp, Artificial Sequence
  Oligonucleotide for detection of SNP TSC0028643
acctaacaaaaat

SEQ ID NO: 114395 - DNA, 13 bp, Artificial Sequence
  Oligonucleotide for detection of SNP TSC0028643
atttggtaggggt

SEQ ID NO: 114396 - DNA, 13 bp, Artificial Sequence
  Oligonucleotide for detection of SNP TSC0028643
acccctaccaaat

SEQ ID NO: 114397 - DNA, 13 bp, Artificial Sequence
  Oligonucleotide for detection of SNP TSC0028645
gtgtgtatgtagg

SEQ ID NO: 114398 - DNA, 13 bp, Artificial Sequence
  Oligonucleotide for detection of SNP TSC0028645
cctacatacacac

SEQ ID NO: 114399 - DNA, 13 bp, Artificial Sequence
  Oligonucleotide for detection of SNP TSC0028645
gtgtgtgtgtagg

SEQ ID NO: 114400 - DNA, 13 bp, Artificial Sequence
  Oligonucleotide for detection of SNP TSC0028645
cctacacacacac

SEQ ID NO: 114401 - DNA, 13 bp, Artificial Sequence
  Oligonucleotide for detection of SNP TSC0028646
gggaggttgaggt

SEQ ID NO: 114402 - DNA, 13 bp, Artificial Sequence
  Oligonucleotide for detection of SNP TSC0028646
acctcaacctccc

SEQ ID NO: 114403 - DNA, 13 bp, Artificial Sequence
  Oligonucleotide for detection of SNP TSC0028646
gggaggatgaggt

SEQ ID NO: 114404 - DNA, 13 bp, Artificial Sequence
  Oligonucleotide for detection of SNP TSC0028646
acctcatcctccc

SEQ ID NO: 114405 - DNA, 13 bp, Artificial Sequence
  Oligonucleotide for detection of SNP TSC0028648
gaataagtgataa

SEQ ID NO: 114406 - DNA, 13 bp, Artificial Sequence
  Oligonucleotide for detection of SNP TSC0028648
ttatcacttattc

SEQ ID NO: 114407 - DNA, 13 bp, Artificial Sequence
  Oligonucleotide for detection of SNP TSC0028648
gaataaatgataa

SEQ ID NO: 114408 - DNA, 13 bp, Artificial Sequence
  Oligonucleotide for detection of SNP TSC0028648
ttatcatttattc

SEQ ID NO: 114409 - DNA, 13 bp, Artificial Sequence
  Oligonucleotide for detection of SNP TSC0028649
ttttttgattaag

SEQ ID NO: 114410 - DNA, 13 bp, Artificial Sequence
  Oligonucleotide for detection of SNP TSC0028649
cttaatcaaaaaa

SEQ ID NO: 114411 - DNA, 13 bp, Artificial Sequence
  Oligonucleotide for detection of SNP TSC0028649
tttttttattaag

SEQ ID NO: 114412 - DNA, 13 bp, Artificial Sequence
  Oligonucleotide for detection of SNP TSC0028649
cttaataaaaaaa

SEQ ID NO: 114413 - DNA, 13 bp, Artificial Sequence
  Oligonucleotide for detection of SNP TSC0028649
tttttcgattaag

SEQ ID NO: 114414 - DNA, 13 bp, Artificial Sequence
  Oligonucleotide for detection of SNP TSC0028649
cttaatcgaaaaa

SEQ ID NO: 114415 - DNA, 13 bp, Artificial Sequence
  Oligonucleotide for detection of SNP TSC0028649
tttaattgaagag

SEQ ID NO: 114416 - DNA, 13 bp, Artificial Sequence
  Oligonucleotide for detection of SNP TSC0028649
ctcttcaattaaa

SEQ ID NO: 114417 - DNA, 13 bp, Artificial Sequence
  Oligonucleotide for detection of SNP TSC0028649
tttaatagaagag

SEQ ID NO: 114418 - DNA, 13 bp, Artificial Sequence
  Oligonucleotide for detection of SNP TSC0028649
ctcttctattaaa

SEQ ID NO: 114419 - DNA, 13 bp, Artificial Sequence
  Oligonucleotide for detection of SNP TSC0028649
tttaatcgaagag

SEQ ID NO: 114420 - DNA, 13 bp, Artificial Sequence
  Oligonucleotide for detection of SNP TSC0028649
ctcttcgattaaa

SEQ ID NO: 114421 - DNA, 13 bp, Artificial Sequence
  Oligonucleotide for detection of SNP TSC0028652
tttgtggttttaa

SEQ ID NO: 114422 - DNA, 13 bp, Artificial Sequence
  Oligonucleotide for detection of SNP TSC0028652
ttaaaaccacaaa

SEQ ID NO: 114423 - DNA, 13 bp, Artificial Sequence
  Oligonucleotide for detection of SNP TSC0028652
tttgtgattttaa

SEQ ID NO: 114424 - DNA, 13 bp, Artificial Sequence
  Oligonucleotide for detection of SNP TSC0028652
ttaaaatcacaaa

SEQ ID NO: 114425 - DNA, 13 bp, Artificial Sequence
  Oligonucleotide for detection of SNP TSC0028653
gaatatattagaa

SEQ ID NO: 114426 - DNA, 13 bp, Artificial Sequence
  Oligonucleotide for detection of SNP TSC0028653
ttctaatatattc

SEQ ID NO: 114427 - DNA, 13 bp, Artificial Sequence
  Oligonucleotide for detection of SNP TSC0028653
gaatatgttagaa

SEQ ID NO: 114428 - DNA, 13 bp, Artificial Sequence
  Oligonucleotide for detection of SNP TSC0028653
ttctaacatattc

SEQ ID NO: 114429 - DNA, 13 bp, Artificial Sequence
  Oligonucleotide for detection of SNP TSC0028654
gtaattatttatt

SEQ ID NO: 114430 - DNA, 13 bp, Artificial Sequence
  Oligonucleotide for detection of SNP TSC0028654
aataaataattac

SEQ ID NO: 114431 - DNA, 13 bp, Artificial Sequence
  Oligonucleotide for detection of SNP TSC0028654
gtaattgtttatt

SEQ ID NO: 114432 - DNA, 13 bp, Artificial Sequence
  Oligonucleotide for detection of SNP TSC0028654
aataaacaattac

SEQ ID NO: 114433 - DNA, 13 bp, Artificial Sequence
  Oligonucleotide for detection of SNP TSC0028654
gtaatcgtttatt

SEQ ID NO: 114434 - DNA, 13 bp, Artificial Sequence
  Oligonucleotide for detection of SNP TSC0028654
aataaacgattac

SEQ ID NO: 114435 - DNA, 13 bp, Artificial Sequence
  Oligonucleotide for detection of SNP TSC0028654
aatggatgattay

SEQ ID NO: 114436 - DNA, 13 bp, Artificial Sequence
  Oligonucleotide for detection of SNP TSC0028654
rtaatcatccatt

SEQ ID NO: 114437 - DNA, 13 bp, Artificial Sequence
  Oligonucleotide for detection of SNP TSC0028654
aatggacgattay

SEQ ID NO: 114438 - DNA, 13 bp, Artificial Sequence
  Oligonucleotide for detection of SNP TSC0028654
rtaatcgtccatt

SEQ ID NO: 114439 - DNA, 13 bp, Artificial Sequence
  Oligonucleotide for detection of SNP TSC0028655
ttaggtgataatg

SEQ ID NO: 114440 - DNA, 13 bp, Artificial Sequence
  Oligonucleotide for detection of SNP TSC0028655
cattatcacctaa

SEQ ID NO: 114441 - DNA, 13 bp, Artificial Sequence
  Oligonucleotide for detection of SNP TSC0028655
ttaggtaataatg

SEQ ID NO: 114442 - DNA, 13 bp, Artificial Sequence
  Oligonucleotide for detection of SNP TSC0028655
cattattacctaa

SEQ ID NO: 114443 - DNA, 13 bp, Artificial Sequence
  Oligonucleotide for detection of SNP TSC0028656
tttattgtgttay

SEQ ID NO: 114444 - DNA, 13 bp, Artificial Sequence
  Oligonucleotide for detection of SNP TSC0028656
rtaacacaataaa

SEQ ID NO: 114445 - DNA, 13 bp, Artificial Sequence
  Oligonucleotide for detection of SNP TSC0028656
tttattttgttay

SEQ ID NO: 114446 - DNA, 13 bp, Artificial Sequence
  Oligonucleotide for detection of SNP TSC0028656
rtaacaaaataaa

SEQ ID NO: 114447 - DNA, 13 bp, Artificial Sequence
  Oligonucleotide for detection of SNP TSC0028656
gtgatatagtgag

SEQ ID NO: 114448 - DNA, 13 bp, Artificial Sequence
  Oligonucleotide for detection of SNP TSC0028656
ctcactatatcac

SEQ ID NO: 114449 - DNA, 13 bp, Artificial Sequence
  Oligonucleotide for detection of SNP TSC0028656
gtgataaagtgag

SEQ ID NO: 114450 - DNA, 13 bp, Artificial Sequence
  Oligonucleotide for detection of SNP TSC0028656
ctcactttatcac

SEQ ID NO: 114451 - DNA, 13 bp, Artificial Sequence
  Oligonucleotide for detection of SNP TSC0028657
gttggaagattat

SEQ ID NO: 114452 - DNA, 13 bp, Artificial Sequence
  Oligonucleotide for detection of SNP TSC0028657
ataatcttccaac

SEQ ID NO: 114453 - DNA, 13 bp, Artificial Sequence
  Oligonucleotide for detection of SNP TSC0028657
gttggaggattat

SEQ ID NO: 114454 - DNA, 13 bp, Artificial Sequence
  Oligonucleotide for detection of SNP TSC0028657
ataatcctccaac

SEQ ID NO: 114455 - DNA, 13 bp, Artificial Sequence
  Oligonucleotide for detection of SNP TSC0028657
gtcggaagattat

SEQ ID NO: 114456 - DNA, 13 bp, Artificial Sequence
  Oligonucleotide for detection of SNP TSC0028657
ataatcttccgac

SEQ ID NO: 114457 - DNA, 13 bp, Artificial Sequence
  Oligonucleotide for detection of SNP TSC0028657
gtcggaggattat

SEQ ID NO: 114458 - DNA, 13 bp, Artificial Sequence
  Oligonucleotide for detection of SNP TSC0028657
ataatcctccgac

SEQ ID NO: 114459 - DNA, 13 bp, Artificial Sequence
  Oligonucleotide for detection of SNP TSC0028658
gtaaggggggtgg

SEQ ID NO: 114460 - DNA, 13 bp, Artificial Sequence
  Oligonucleotide for detection of SNP TSC0028658
ccaccccccttac

SEQ ID NO: 114461 - DNA, 13 bp, Artificial Sequence
  Oligonucleotide for detection of SNP TSC0028658
gtaaggtgggtgg

SEQ ID NO: 114462 - DNA, 13 bp, Artificial Sequence
  Oligonucleotide for detection of SNP TSC0028658
ccacccaccttac

SEQ ID NO: 114463 - DNA, 13 bp, Artificial Sequence
  Oligonucleotide for detection of SNP TSC0028658
gtaaggggggcgg

SEQ ID NO: 114464 - DNA, 13 bp, Artificial Sequence
  Oligonucleotide for detection of SNP TSC0028658
ccgccccccttac

SEQ ID NO: 114465 - DNA, 13 bp, Artificial Sequence
  Oligonucleotide for detection of SNP TSC0028658
gtaaggtgggcgg

SEQ ID NO: 114466 - DNA, 13 bp, Artificial Sequence
  Oligonucleotide for detection of SNP TSC0028658
ccgcccaccttac

SEQ ID NO: 114467 - DNA, 13 bp, Artificial Sequence
  Oligonucleotide for detection of SNP TSC0028658
ttgttttttttgy

SEQ ID NO: 114468 - DNA, 13 bp, Artificial Sequence
  Oligonucleotide for detection of SNP TSC0028658
rcaaaaaaaacaa

SEQ ID NO: 114469 - DNA, 13 bp, Artificial Sequence
  Oligonucleotide for detection of SNP TSC0028658
tcgttttttttgy

SEQ ID NO: 114470 - DNA, 13 bp, Artificial Sequence
  Oligonucleotide for detection of SNP TSC0028658
rcaaaaaaaacga

SEQ ID NO: 114471 - DNA, 13 bp, Artificial Sequence
  Oligonucleotide for detection of SNP TSC0028658
tcgtttattttgy

SEQ ID NO: 114472 - DNA, 13 bp, Artificial Sequence
  Oligonucleotide for detection of SNP TSC0028658
rcaaaataaacga

SEQ ID NO: 114473 - DNA, 13 bp, Artificial Sequence
  Oligonucleotide for detection of SNP TSC0028660
gtatatgttatta

SEQ ID NO: 114474 - DNA, 13 bp, Artificial Sequence
  Oligonucleotide for detection of SNP TSC0028660
taataacatatac

SEQ ID NO: 114475 - DNA, 13 bp, Artificial Sequence
  Oligonucleotide for detection of SNP TSC0028660
gtatatattatta

SEQ ID NO: 114476 - DNA, 13 bp, Artificial Sequence
  Oligonucleotide for detection of SNP TSC0028660
taataatatatac

SEQ ID NO: 114477 - DNA, 13 bp, Artificial Sequence
  Oligonucleotide for detection of SNP TSC0028663
ttgagatgaggga

SEQ ID NO: 114478 - DNA, 13 bp, Artificial Sequence
  Oligonucleotide for detection of SNP TSC0028663
tccctcatctcaa

SEQ ID NO: 114479 - DNA, 13 bp, Artificial Sequence
  Oligonucleotide for detection of SNP TSC0028663
ttgagacgaggga

SEQ ID NO: 114480 - DNA, 13 bp, Artificial Sequence
  Oligonucleotide for detection of SNP TSC0028663
tccctcgtctcaa

SEQ ID NO: 114481 - DNA, 13 bp, Artificial Sequence
  Oligonucleotide for detection of SNP TSC0028664
tgttggtgtttgg

SEQ ID NO: 114482 - DNA, 13 bp, Artificial Sequence
  Oligonucleotide for detection of SNP TSC0028664
ccaaacaccaaca

SEQ ID NO: 114483 - DNA, 13 bp, Artificial Sequence
  Oligonucleotide for detection of SNP TSC0028664
tgttggggtttgg

SEQ ID NO: 114484 - DNA, 13 bp, Artificial Sequence
  Oligonucleotide for detection of SNP TSC0028664
ccaaaccccaaca

SEQ ID NO: 114485 - DNA, 13 bp, Artificial Sequence
  Oligonucleotide for detection of SNP TSC0028664
tgtcggtgtttgg

SEQ ID NO: 114486 - DNA, 13 bp, Artificial Sequence
  Oligonucleotide for detection of SNP TSC0028664
ccaaacaccgaca

SEQ ID NO: 114487 - DNA, 13 bp, Artificial Sequence
  Oligonucleotide for detection of SNP TSC0028664
tgtcggggtttgg

SEQ ID NO: 114488 - DNA, 13 bp, Artificial Sequence
  Oligonucleotide for detection of SNP TSC0028664
ccaaaccccgaca

SEQ ID NO: 114489 - DNA, 13 bp, Artificial Sequence
  Oligonucleotide for detection of SNP TSC0028664
tgttggcgtttgg

SEQ ID NO: 114490 - DNA, 13 bp, Artificial Sequence
  Oligonucleotide for detection of SNP TSC0028664
ccaaacgccaaca

SEQ ID NO: 114491 - DNA, 13 bp, Artificial Sequence
  Oligonucleotide for detection of SNP TSC0028664
tgtcggcgtttgg

SEQ ID NO: 114492 - DNA, 13 bp, Artificial Sequence
  Oligonucleotide for detection of SNP TSC0028664
ccaaacgccgaca

SEQ ID NO: 114493 - DNA, 13 bp, Artificial Sequence
  Oligonucleotide for detection of SNP TSC0028664
ttaaatgttggta

SEQ ID NO: 114494 - DNA, 13 bp, Artificial Sequence
  Oligonucleotide for detection of SNP TSC0028664
taccaacatttaa

SEQ ID NO: 114495 - DNA, 13 bp, Artificial Sequence
  Oligonucleotide for detection of SNP TSC0028664
ttaaattttggta

SEQ ID NO: 114496 - DNA, 13 bp, Artificial Sequence
  Oligonucleotide for detection of SNP TSC0028664
taccaaaatttaa

SEQ ID NO: 114497 - DNA, 13 bp, Artificial Sequence
  Oligonucleotide for detection of SNP TSC0028664
ttaaacgttggta

SEQ ID NO: 114498 - DNA, 13 bp, Artificial Sequence
  Oligonucleotide for detection of SNP TSC0028664
taccaacgtttaa

SEQ ID NO: 114499 - DNA, 13 bp, Artificial Sequence
  Oligonucleotide for detection of SNP TSC0028664
ttaaatttcggta

SEQ ID NO: 114500 - DNA, 13 bp, Artificial Sequence
  Oligonucleotide for detection of SNP TSC0028664
taccgaaatttaa

SEQ ID NO: 114501 - DNA, 13 bp, Artificial Sequence
  Oligonucleotide for detection of SNP TSC0028664
ttaaatgtcggta

SEQ ID NO: 114502 - DNA, 13 bp, Artificial Sequence
  Oligonucleotide for detection of SNP TSC0028664
taccgacatttaa

SEQ ID NO: 114503 - DNA, 13 bp, Artificial Sequence
  Oligonucleotide for detection of SNP TSC0028664
ttaaacgtcggta

SEQ ID NO: 114504 - DNA, 13 bp, Artificial Sequence
  Oligonucleotide for detection of SNP TSC0028664
taccgacgtttaa

SEQ ID NO: 114505 - DNA, 13 bp, Artificial Sequence
  Oligonucleotide for detection of SNP TSC0028665
tatgttaggtatt

SEQ ID NO: 114506 - DNA, 13 bp, Artificial Sequence
  Oligonucleotide for detection of SNP TSC0028665
aatacctaacata

SEQ ID NO: 114507 - DNA, 13 bp, Artificial Sequence
  Oligonucleotide for detection of SNP TSC0028665
tatgttgggtatt

SEQ ID NO: 114508 - DNA, 13 bp, Artificial Sequence
  Oligonucleotide for detection of SNP TSC0028665
aatacccaacata

SEQ ID NO: 114509 - DNA, 13 bp, Artificial Sequence
  Oligonucleotide for detection of SNP TSC0028665
tatgtcgggtatt

SEQ ID NO: 114510 - DNA, 13 bp, Artificial Sequence
  Oligonucleotide for detection of SNP TSC0028665
aatacccgacata

SEQ ID NO: 114511 - DNA, 13 bp, Artificial Sequence
  Oligonucleotide for detection of SNP TSC0028665
agtgtttggtatg

SEQ ID NO: 114512 - DNA, 13 bp, Artificial Sequence
  Oligonucleotide for detection of SNP TSC0028665
cataccaaacact

SEQ ID NO: 114513 - DNA, 13 bp, Artificial Sequence
  Oligonucleotide for detection of SNP TSC0028665
agtgttcggtatg

SEQ ID NO: 114514 - DNA, 13 bp, Artificial Sequence
  Oligonucleotide for detection of SNP TSC0028665
cataccgaacact

SEQ ID NO: 114515 - DNA, 13 bp, Artificial Sequence
  Oligonucleotide for detection of SNP TSC0028666
tgttttaattatt

SEQ ID NO: 114516 - DNA, 13 bp, Artificial Sequence
  Oligonucleotide for detection of SNP TSC0028666
aataattaaaaca

SEQ ID NO: 114517 - DNA, 13 bp, Artificial Sequence
  Oligonucleotide for detection of SNP TSC0028666
tgtttttattatt

SEQ ID NO: 114518 - DNA, 13 bp, Artificial Sequence
  Oligonucleotide for detection of SNP TSC0028666
aataataaaaaca

SEQ ID NO: 114519 - DNA, 13 bp, Artificial Sequence
  Oligonucleotide for detection of SNP TSC0028666
agtagttaagata

SEQ ID NO: 114520 - DNA, 13 bp, Artificial Sequence
  Oligonucleotide for detection of SNP TSC0028666
tatcttaactact

SEQ ID NO: 114521 - DNA, 13 bp, Artificial Sequence
  Oligonucleotide for detection of SNP TSC0028666
agtagtaaagata

SEQ ID NO: 114522 - DNA, 13 bp, Artificial Sequence
  Oligonucleotide for detection of SNP TSC0028666
tatctttactact

SEQ ID NO: 114523 - DNA, 13 bp, Artificial Sequence
  Oligonucleotide for detection of SNP TSC0028667
gttttaattattg

SEQ ID NO: 114524 - DNA, 13 bp, Artificial Sequence
  Oligonucleotide for detection of SNP TSC0028667
caataattaaaac

SEQ ID NO: 114525 - DNA, 13 bp, Artificial Sequence
  Oligonucleotide for detection of SNP TSC0028668
ttgaggatggtgg

SEQ ID NO: 114526 - DNA, 13 bp, Artificial Sequence
  Oligonucleotide for detection of SNP TSC0028668
ccaccatcctcaa

SEQ ID NO: 114527 - DNA, 13 bp, Artificial Sequence
  Oligonucleotide for detection of SNP TSC0028668
ttgagggtggtgg

SEQ ID NO: 114528 - DNA, 13 bp, Artificial Sequence
  Oligonucleotide for detection of SNP TSC0028668
ccaccaccctcaa

SEQ ID NO: 114529 - DNA, 13 bp, Artificial Sequence
  Oligonucleotide for detection of SNP TSC0028669
gaaaggttaggag

SEQ ID NO: 114530 - DNA, 13 bp, Artificial Sequence
  Oligonucleotide for detection of SNP TSC0028669
ctcctaacctttc

SEQ ID NO: 114531 - DNA, 13 bp, Artificial Sequence
  Oligonucleotide for detection of SNP TSC0028669
gaaaggataggag

SEQ ID NO: 114532 - DNA, 13 bp, Artificial Sequence
  Oligonucleotide for detection of SNP TSC0028669
ctcctatcctttc

SEQ ID NO: 114533 - DNA, 13 bp, Artificial Sequence
  Oligonucleotide for detection of SNP TSC0028673
tatttagtatata

SEQ ID NO: 114534 - DNA, 13 bp, Artificial Sequence
  Oligonucleotide for detection of SNP TSC0028673
tatatactaaata

SEQ ID NO: 114535 - DNA, 13 bp, Artificial Sequence
  Oligonucleotide for detection of SNP TSC0028673
tatttaatatata

SEQ ID NO: 114536 - DNA, 13 bp, Artificial Sequence
  Oligonucleotide for detection of SNP TSC0028673
tatatattaaata

SEQ ID NO: 114537 - DNA, 13 bp, Artificial Sequence
  Oligonucleotide for detection of SNP TSC0028677
tgttttaggatty

SEQ ID NO: 114538 - DNA, 13 bp, Artificial Sequence
  Oligonucleotide for detection of SNP TSC0028677
raatcctaaaaca

SEQ ID NO: 114539 - DNA, 13 bp, Artificial Sequence
  Oligonucleotide for detection of SNP TSC0028677
tgttttgggatty

SEQ ID NO: 114540 - DNA, 13 bp, Artificial Sequence
  Oligonucleotide for detection of SNP TSC0028677
raatcccaaaaca

SEQ ID NO: 114541 - DNA, 13 bp, Artificial Sequence
  Oligonucleotide for detection of SNP TSC0028677
cgttttaggatty

SEQ ID NO: 114542 - DNA, 13 bp, Artificial Sequence
  Oligonucleotide for detection of SNP TSC0028677
raatcctaaaacg

SEQ ID NO: 114543 - DNA, 13 bp, Artificial Sequence
  Oligonucleotide for detection of SNP TSC0028677
cgttttgggatty

SEQ ID NO: 114544 - DNA, 13 bp, Artificial Sequence
  Oligonucleotide for detection of SNP TSC0028677
raatcccaaaacg

SEQ ID NO: 114545 - DNA, 13 bp, Artificial Sequence
  Oligonucleotide for detection of SNP TSC0028677
tgtttcgggatty

SEQ ID NO: 114546 - DNA, 13 bp, Artificial Sequence
  Oligonucleotide for detection of SNP TSC0028677
raatcccgaaaca

SEQ ID NO: 114547 - DNA, 13 bp, Artificial Sequence
  Oligonucleotide for detection of SNP TSC0028677
cgtttcgggatty

SEQ ID NO: 114548 - DNA, 13 bp, Artificial Sequence
  Oligonucleotide for detection of SNP TSC0028677
raatcccgaaacg

SEQ ID NO: 114549 - DNA, 13 bp, Artificial Sequence
  Oligonucleotide for detection of SNP TSC0028677
gaattttgggatg

SEQ ID NO: 114550 - DNA, 13 bp, Artificial Sequence
  Oligonucleotide for detection of SNP TSC0028677
catcccaaaattc

SEQ ID NO: 114551 - DNA, 13 bp, Artificial Sequence
  Oligonucleotide for detection of SNP TSC0028677
gaattttgggacg

SEQ ID NO: 114552 - DNA, 13 bp, Artificial Sequence
  Oligonucleotide for detection of SNP TSC0028677
cgtcccaaaattc

SEQ ID NO: 114553 - DNA, 13 bp, Artificial Sequence
  Oligonucleotide for detection of SNP TSC0028677
gaatttcgggatg

SEQ ID NO: 114554 - DNA, 13 bp, Artificial Sequence
  Oligonucleotide for detection of SNP TSC0028677
catcccgaaattc

SEQ ID NO: 114555 - DNA, 13 bp, Artificial Sequence
  Oligonucleotide for detection of SNP TSC0028677
gaatttcgggacg

SEQ ID NO: 114556 - DNA, 13 bp, Artificial Sequence
  Oligonucleotide for detection of SNP TSC0028677
cgtcccgaaattc

SEQ ID NO: 114557 - DNA, 13 bp, Artificial Sequence
  Oligonucleotide for detection of SNP TSC0028678
agtttatgtgggg

SEQ ID NO: 114558 - DNA, 13 bp, Artificial Sequence
  Oligonucleotide for detection of SNP TSC0028678
ccccacataaact

SEQ ID NO: 114559 - DNA, 13 bp, Artificial Sequence
  Oligonucleotide for detection of SNP TSC0028678
agtttacgtgggg

SEQ ID NO: 114560 - DNA, 13 bp, Artificial Sequence
  Oligonucleotide for detection of SNP TSC0028678
ccccacgtaaact

SEQ ID NO: 114561 - DNA, 13 bp, Artificial Sequence
  Oligonucleotide for detection of SNP TSC0028678
ttttatgtgaatt

SEQ ID NO: 114562 - DNA, 13 bp, Artificial Sequence
  Oligonucleotide for detection of SNP TSC0028678
aattcacataaaa

SEQ ID NO: 114563 - DNA, 13 bp, Artificial Sequence
  Oligonucleotide for detection of SNP TSC0028678
ttttatatgaatt

SEQ ID NO: 114564 - DNA, 13 bp, Artificial Sequence
  Oligonucleotide for detection of SNP TSC0028678
aattcatataaaa

SEQ ID NO: 114565 - DNA, 13 bp, Artificial Sequence
  Oligonucleotide for detection of SNP TSC0028678
ttttacgtgaatt

SEQ ID NO: 114566 - DNA, 13 bp, Artificial Sequence
  Oligonucleotide for detection of SNP TSC0028678
aattcacgtaaaa

SEQ ID NO: 114567 - DNA, 13 bp, Artificial Sequence
  Oligonucleotide for detection of SNP TSC0028679
ttattttggtgtt

SEQ ID NO: 114568 - DNA, 13 bp, Artificial Sequence
  Oligonucleotide for detection of SNP TSC0028679
aacaccaaaataa

SEQ ID NO: 114569 - DNA, 13 bp, Artificial Sequence
  Oligonucleotide for detection of SNP TSC0028679
ttatttcggtgtt

SEQ ID NO: 114570 - DNA, 13 bp, Artificial Sequence
  Oligonucleotide for detection of SNP TSC0028679
aacaccgaaataa

SEQ ID NO: 114571 - DNA, 13 bp, Artificial Sequence
  Oligonucleotide for detection of SNP TSC0028679
agtattgggatga

SEQ ID NO: 114572 - DNA, 13 bp, Artificial Sequence
  Oligonucleotide for detection of SNP TSC0028679
tcatcccaatact

SEQ ID NO: 114573 - DNA, 13 bp, Artificial Sequence
  Oligonucleotide for detection of SNP TSC0028679
agtattaggatga

SEQ ID NO: 114574 - DNA, 13 bp, Artificial Sequence
  Oligonucleotide for detection of SNP TSC0028679
tcatcctaatact

SEQ ID NO: 114575 - DNA, 13 bp, Artificial Sequence
  Oligonucleotide for detection of SNP TSC0028679
agtatcgggatga

SEQ ID NO: 114576 - DNA, 13 bp, Artificial Sequence
  Oligonucleotide for detection of SNP TSC0028679
tcatcccgatact

SEQ ID NO: 114577 - DNA, 13 bp, Artificial Sequence
  Oligonucleotide for detection of SNP TSC0028680
tttttgagttatt

SEQ ID NO: 114578 - DNA, 13 bp, Artificial Sequence
  Oligonucleotide for detection of SNP TSC0028680
aataactcaaaaa

SEQ ID NO: 114579 - DNA, 13 bp, Artificial Sequence
  Oligonucleotide for detection of SNP TSC0028680
aatgatttagaag

SEQ ID NO: 114580 - DNA, 13 bp, Artificial Sequence
  Oligonucleotide for detection of SNP TSC0028680
cttctaaatcatt

SEQ ID NO: 114581 - DNA, 13 bp, Artificial Sequence
  Oligonucleotide for detection of SNP TSC0028680
aatgatgtagaag

SEQ ID NO: 114582 - DNA, 13 bp, Artificial Sequence
  Oligonucleotide for detection of SNP TSC0028680
cttctacatcatt

SEQ ID NO: 114583 - DNA, 13 bp, Artificial Sequence
  Oligonucleotide for detection of SNP TSC0028680
aatgacgtagaag

SEQ ID NO: 114584 - DNA, 13 bp, Artificial Sequence
  Oligonucleotide for detection of SNP TSC0028680
cttctacgtcatt

SEQ ID NO: 114585 - DNA, 13 bp, Artificial Sequence
  Oligonucleotide for detection of SNP TSC0028684
tattaagggtgty

SEQ ID NO: 114586 - DNA, 13 bp, Artificial Sequence
  Oligonucleotide for detection of SNP TSC0028684
racacccttaata

SEQ ID NO: 114587 - DNA, 13 bp, Artificial Sequence
  Oligonucleotide for detection of SNP TSC0028684
tattaatggtgty

SEQ ID NO: 114588 - DNA, 13 bp, Artificial Sequence
  Oligonucleotide for detection of SNP TSC0028684
racaccattaata

SEQ ID NO: 114589 - DNA, 13 bp, Artificial Sequence
  Oligonucleotide for detection of SNP TSC0028684
gatatttttaatg

SEQ ID NO: 114590 - DNA, 13 bp, Artificial Sequence
  Oligonucleotide for detection of SNP TSC0028684
cattaaaaatatc

SEQ ID NO: 114591 - DNA, 13 bp, Artificial Sequence
  Oligonucleotide for detection of SNP TSC0028684
gatattattaatg

SEQ ID NO: 114592 - DNA, 13 bp, Artificial Sequence
  Oligonucleotide for detection of SNP TSC0028684
cattaataatatc

SEQ ID NO: 114593 - DNA, 13 bp, Artificial Sequence
  Oligonucleotide for detection of SNP TSC0028686
ataaagaatttgt

SEQ ID NO: 114594 - DNA, 13 bp, Artificial Sequence
  Oligonucleotide for detection of SNP TSC0028686
acaaattctttat

SEQ ID NO: 114595 - DNA, 13 bp, Artificial Sequence
  Oligonucleotide for detection of SNP TSC0028686
ataaaggatttgt

SEQ ID NO: 114596 - DNA, 13 bp, Artificial Sequence
  Oligonucleotide for detection of SNP TSC0028686
acaaatcctttat

SEQ ID NO: 114597 - DNA, 13 bp, Artificial Sequence
  Oligonucleotide for detection of SNP TSC0028692
tgggggaatgtay

SEQ ID NO: 114598 - DNA, 13 bp, Artificial Sequence
  Oligonucleotide for detection of SNP TSC0028692
rtacattccccca

SEQ ID NO: 114599 - DNA, 13 bp, Artificial Sequence
  Oligonucleotide for detection of SNP TSC0028692
tgggggtatgtay

SEQ ID NO: 114600 - DNA, 13 bp, Artificial Sequence
  Oligonucleotide for detection of SNP TSC0028692
rtacataccccca

SEQ ID NO: 114601 - DNA, 13 bp, Artificial Sequence
  Oligonucleotide for detection of SNP TSC0028692
tgggggaacgtay

SEQ ID NO: 114602 - DNA, 13 bp, Artificial Sequence
  Oligonucleotide for detection of SNP TSC0028692
rtacgttccccca

SEQ ID NO: 114603 - DNA, 13 bp, Artificial Sequence
  Oligonucleotide for detection of SNP TSC0028692
tgggggtacgtay

SEQ ID NO: 114604 - DNA, 13 bp, Artificial Sequence
  Oligonucleotide for detection of SNP TSC0028692
rtacgtaccccca

SEQ ID NO: 114605 - DNA, 13 bp, Artificial Sequence
  Oligonucleotide for detection of SNP TSC0028692
gtgtgttttttta

SEQ ID NO: 114606 - DNA, 13 bp, Artificial Sequence
  Oligonucleotide for detection of SNP TSC0028692
taaaaaaacacac

SEQ ID NO: 114607 - DNA, 13 bp, Artificial Sequence
  Oligonucleotide for detection of SNP TSC0028692
gtgtgtgttttta

SEQ ID NO: 114608 - DNA, 13 bp, Artificial Sequence
  Oligonucleotide for detection of SNP TSC0028692
taaaaacacacac

SEQ ID NO: 114609 - DNA, 13 bp, Artificial Sequence
  Oligonucleotide for detection of SNP TSC0028692
gtgcgttttttta

SEQ ID NO: 114610 - DNA, 13 bp, Artificial Sequence
  Oligonucleotide for detection of SNP TSC0028692
taaaaaaacgcac

SEQ ID NO: 114611 - DNA, 13 bp, Artificial Sequence
  Oligonucleotide for detection of SNP TSC0028692
gtgcgtgttttta

SEQ ID NO: 114612 - DNA, 13 bp, Artificial Sequence
  Oligonucleotide for detection of SNP TSC0028692
taaaaacacgcac

SEQ ID NO: 114613 - DNA, 13 bp, Artificial Sequence
  Oligonucleotide for detection of SNP TSC0028693
ggttattgtttag

SEQ ID NO: 114614 - DNA, 13 bp, Artificial Sequence
  Oligonucleotide for detection of SNP TSC0028693
ctaaacaataacc

SEQ ID NO: 114615 - DNA, 13 bp, Artificial Sequence
  Oligonucleotide for detection of SNP TSC0028693
ggttatcgtttag

SEQ ID NO: 114616 - DNA, 13 bp, Artificial Sequence
  Oligonucleotide for detection of SNP TSC0028693
ctaaacgataacc

SEQ ID NO: 114617 - DNA, 13 bp, Artificial Sequence
  Oligonucleotide for detection of SNP TSC0028693
ttgggtggtgaty

SEQ ID NO: 114618 - DNA, 13 bp, Artificial Sequence
  Oligonucleotide for detection of SNP TSC0028693
ratcaccacccaa

SEQ ID NO: 114619 - DNA, 13 bp, Artificial Sequence
  Oligonucleotide for detection of SNP TSC0028693
ttgggtagtgaty

SEQ ID NO: 114620 - DNA, 13 bp, Artificial Sequence
  Oligonucleotide for detection of SNP TSC0028693
ratcactacccaa

SEQ ID NO: 114621 - DNA, 13 bp, Artificial Sequence
  Oligonucleotide for detection of SNP TSC0028693
ttgggcggtgaty

SEQ ID NO: 114622 - DNA, 13 bp, Artificial Sequence
  Oligonucleotide for detection of SNP TSC0028693
ratcaccgcccaa

SEQ ID NO: 114623 - DNA, 13 bp, Artificial Sequence
  Oligonucleotide for detection of SNP TSC0028694
ttaaatgtagttt

SEQ ID NO: 114624 - DNA, 13 bp, Artificial Sequence
  Oligonucleotide for detection of SNP TSC0028694
aaactacatttaa

SEQ ID NO: 114625 - DNA, 13 bp, Artificial Sequence
  Oligonucleotide for detection of SNP TSC0028694
ttaaatatagttt

SEQ ID NO: 114626 - DNA, 13 bp, Artificial Sequence
  Oligonucleotide for detection of SNP TSC0028694
aaactatatttaa

SEQ ID NO: 114627 - DNA, 13 bp, Artificial Sequence
  Oligonucleotide for detection of SNP TSC0028696
agataaggtttta

SEQ ID NO: 114628 - DNA, 13 bp, Artificial Sequence
  Oligonucleotide for detection of SNP TSC0028696
taaaaccttatct

SEQ ID NO: 114629 - DNA, 13 bp, Artificial Sequence
  Oligonucleotide for detection of SNP TSC0028696
agataaagtttta

SEQ ID NO: 114630 - DNA, 13 bp, Artificial Sequence
  Oligonucleotide for detection of SNP TSC0028696
taaaactttatct

SEQ ID NO: 114631 - DNA, 13 bp, Artificial Sequence
  Oligonucleotide for detection of SNP TSC0028697
agttgggatgatt

SEQ ID NO: 114632 - DNA, 13 bp, Artificial Sequence
  Oligonucleotide for detection of SNP TSC0028697
aatcatcccaact

SEQ ID NO: 114633 - DNA, 13 bp, Artificial Sequence
  Oligonucleotide for detection of SNP TSC0028697
agttggaatgatt

SEQ ID NO: 114634 - DNA, 13 bp, Artificial Sequence
  Oligonucleotide for detection of SNP TSC0028697
aatcattccaact

SEQ ID NO: 114635 - DNA, 13 bp, Artificial Sequence
  Oligonucleotide for detection of SNP TSC0028699
tatggtggttgag

SEQ ID NO: 114636 - DNA, 13 bp, Artificial Sequence
  Oligonucleotide for detection of SNP TSC0028699
ctcaaccaccata

SEQ ID NO: 114637 - DNA, 13 bp, Artificial Sequence
  Oligonucleotide for detection of SNP TSC0028699
tatggtagttgag

SEQ ID NO: 114638 - DNA, 13 bp, Artificial Sequence
  Oligonucleotide for detection of SNP TSC0028699
ctcaactaccata

SEQ ID NO: 114639 - DNA, 13 bp, Artificial Sequence
  Oligonucleotide for detection of SNP TSC0028699
tatggtggtcgag

SEQ ID NO: 114640 - DNA, 13 bp, Artificial Sequence
  Oligonucleotide for detection of SNP TSC0028699
ctcgaccaccata

SEQ ID NO: 114641 - DNA, 13 bp, Artificial Sequence
  Oligonucleotide for detection of SNP TSC0028699
tatggtagtcgag

SEQ ID NO: 114642 - DNA, 13 bp, Artificial Sequence
  Oligonucleotide for detection of SNP TSC0028699
ctcgactaccata

SEQ ID NO: 114643 - DNA, 13 bp, Artificial Sequence
  Oligonucleotide for detection of SNP TSC0028700
gtgagtagggtgy

SEQ ID NO: 114644 - DNA, 13 bp, Artificial Sequence
  Oligonucleotide for detection of SNP TSC0028700
rcaccctactcac

SEQ ID NO: 114645 - DNA, 13 bp, Artificial Sequence
  Oligonucleotide for detection of SNP TSC0028700
gtgagtggggtgy

SEQ ID NO: 114646 - DNA, 13 bp, Artificial Sequence
  Oligonucleotide for detection of SNP TSC0028700
rcaccccactcac

SEQ ID NO: 114647 - DNA, 13 bp, Artificial Sequence
  Oligonucleotide for detection of SNP TSC0028702
tttgagataatta

SEQ ID NO: 114648 - DNA, 13 bp, Artificial Sequence
  Oligonucleotide for detection of SNP TSC0028702
taattatctcaaa

SEQ ID NO: 114649 - DNA, 13 bp, Artificial Sequence
  Oligonucleotide for detection of SNP TSC0028702
tagttgttttaaa

SEQ ID NO: 114650 - DNA, 13 bp, Artificial Sequence
  Oligonucleotide for detection of SNP TSC0028702
tttaaaacaacta

SEQ ID NO: 114651 - DNA, 13 bp, Artificial Sequence
  Oligonucleotide for detection of SNP TSC0028702
tagttggtttaaa

SEQ ID NO: 114652 - DNA, 13 bp, Artificial Sequence
  Oligonucleotide for detection of SNP TSC0028702
tttaaaccaacta

SEQ ID NO: 114653 - DNA, 13 bp, Artificial Sequence
  Oligonucleotide for detection of SNP TSC0028709
tatgatatttgty

SEQ ID NO: 114654 - DNA, 13 bp, Artificial Sequence
  Oligonucleotide for detection of SNP TSC0028709
racaaatatcata

SEQ ID NO: 114655 - DNA, 13 bp, Artificial Sequence
  Oligonucleotide for detection of SNP TSC0028709
tatgatgtttgty

SEQ ID NO: 114656 - DNA, 13 bp, Artificial Sequence
  Oligonucleotide for detection of SNP TSC0028709
racaaacatcata

SEQ ID NO: 114657 - DNA, 13 bp, Artificial Sequence
  Oligonucleotide for detection of SNP TSC0028709
tatgacgtttgty

SEQ ID NO: 114658 - DNA, 13 bp, Artificial Sequence
  Oligonucleotide for detection of SNP TSC0028709
racaaacgtcata

SEQ ID NO: 114659 - DNA, 13 bp, Artificial Sequence
  Oligonucleotide for detection of SNP TSC0028709
gatagatgttata

SEQ ID NO: 114660 - DNA, 13 bp, Artificial Sequence
  Oligonucleotide for detection of SNP TSC0028709
tataacatctatc

SEQ ID NO: 114661 - DNA, 13 bp, Artificial Sequence
  Oligonucleotide for detection of SNP TSC0028709
gatagacgttata

SEQ ID NO: 114662 - DNA, 13 bp, Artificial Sequence
  Oligonucleotide for detection of SNP TSC0028709
tataacgtctatc

SEQ ID NO: 114663 - DNA, 13 bp, Artificial Sequence
  Oligonucleotide for detection of SNP TSC0028713
agaaaggtgttgg

SEQ ID NO: 114664 - DNA, 13 bp, Artificial Sequence
  Oligonucleotide for detection of SNP TSC0028713
ccaacacctttct

SEQ ID NO: 114665 - DNA, 13 bp, Artificial Sequence
  Oligonucleotide for detection of SNP TSC0028713
agaaagttgttgg

SEQ ID NO: 114666 - DNA, 13 bp, Artificial Sequence
  Oligonucleotide for detection of SNP TSC0028713
ccaacaactttct

SEQ ID NO: 114667 - DNA, 13 bp, Artificial Sequence
  Oligonucleotide for detection of SNP TSC0028713
agaaaggcgttgg

SEQ ID NO: 114668 - DNA, 13 bp, Artificial Sequence
  Oligonucleotide for detection of SNP TSC0028713
ccaacgcctttct

SEQ ID NO: 114669 - DNA, 13 bp, Artificial Sequence
  Oligonucleotide for detection of SNP TSC0028713
agaaagtcgttgg

SEQ ID NO: 114670 - DNA, 13 bp, Artificial Sequence
  Oligonucleotide for detection of SNP TSC0028713
ccaacgactttct

SEQ ID NO: 114671 - DNA, 13 bp, Artificial Sequence
  Oligonucleotide for detection of SNP TSC0028713
ttaatgttttttt

SEQ ID NO: 114672 - DNA, 13 bp, Artificial Sequence
  Oligonucleotide for detection of SNP TSC0028713
aaaaaaacattaa

SEQ ID NO: 114673 - DNA, 13 bp, Artificial Sequence
  Oligonucleotide for detection of SNP TSC0028713
ttaatgatttttt

SEQ ID NO: 114674 - DNA, 13 bp, Artificial Sequence
  Oligonucleotide for detection of SNP TSC0028713
aaaaaatcattaa

SEQ ID NO: 114675 - DNA, 13 bp, Artificial Sequence
  Oligonucleotide for detection of SNP TSC0028713
ttaacgttttttt

SEQ ID NO: 114676 - DNA, 13 bp, Artificial Sequence
  Oligonucleotide for detection of SNP TSC0028713
aaaaaaacgttaa

SEQ ID NO: 114677 - DNA, 13 bp, Artificial Sequence
  Oligonucleotide for detection of SNP TSC0028713
ttaacgatttttt

SEQ ID NO: 114678 - DNA, 13 bp, Artificial Sequence
  Oligonucleotide for detection of SNP TSC0028713
aaaaaatcgttaa

SEQ ID NO: 114679 - DNA, 13 bp, Artificial Sequence
  Oligonucleotide for detection of SNP TSC0028714
ggatttgatgttt

SEQ ID NO: 114680 - DNA, 13 bp, Artificial Sequence
  Oligonucleotide for detection of SNP TSC0028714
aaacatcaaatcc

SEQ ID NO: 114681 - DNA, 13 bp, Artificial Sequence
  Oligonucleotide for detection of SNP TSC0028714
ggatttaatgttt

SEQ ID NO: 114682 - DNA, 13 bp, Artificial Sequence
  Oligonucleotide for detection of SNP TSC0028714
aaacattaaatcc

SEQ ID NO: 114683 - DNA, 13 bp, Artificial Sequence
  Oligonucleotide for detection of SNP TSC0028714
ggatttgacgttt

SEQ ID NO: 114684 - DNA, 13 bp, Artificial Sequence
  Oligonucleotide for detection of SNP TSC0028714
aaacgtcaaatcc

SEQ ID NO: 114685 - DNA, 13 bp, Artificial Sequence
  Oligonucleotide for detection of SNP TSC0028714
ggatttaacgttt

SEQ ID NO: 114686 - DNA, 13 bp, Artificial Sequence
  Oligonucleotide for detection of SNP TSC0028714
aaacgttaaatcc

SEQ ID NO: 114687 - DNA, 13 bp, Artificial Sequence
  Oligonucleotide for detection of SNP TSC0028715
aatggaggtgaay

SEQ ID NO: 114688 - DNA, 13 bp, Artificial Sequence
  Oligonucleotide for detection of SNP TSC0028715
rttcacctccatt

SEQ ID NO: 114689 - DNA, 13 bp, Artificial Sequence
  Oligonucleotide for detection of SNP TSC0028715
aatggaagtgaay

SEQ ID NO: 114690 - DNA, 13 bp, Artificial Sequence
  Oligonucleotide for detection of SNP TSC0028715
rttcacttccatt

SEQ ID NO: 114691 - DNA, 13 bp, Artificial Sequence
  Oligonucleotide for detection of SNP TSC0028716
aagatatgtttgy

SEQ ID NO: 114692 - DNA, 13 bp, Artificial Sequence
  Oligonucleotide for detection of SNP TSC0028716
rcaaacatatctt

SEQ ID NO: 114693 - DNA, 13 bp, Artificial Sequence
  Oligonucleotide for detection of SNP TSC0028716
aagatacgtttgy

SEQ ID NO: 114694 - DNA, 13 bp, Artificial Sequence
  Oligonucleotide for detection of SNP TSC0028716
rcaaacgtatctt

SEQ ID NO: 114695 - DNA, 13 bp, Artificial Sequence
  Oligonucleotide for detection of SNP TSC0028716
aagatatgttcgy

SEQ ID NO: 114696 - DNA, 13 bp, Artificial Sequence
  Oligonucleotide for detection of SNP TSC0028716
rcgaacatatctt

SEQ ID NO: 114697 - DNA, 13 bp, Artificial Sequence
  Oligonucleotide for detection of SNP TSC0028716
aagatacgttcgy

SEQ ID NO: 114698 - DNA, 13 bp, Artificial Sequence
  Oligonucleotide for detection of SNP TSC0028716
rcgaacgtatctt

SEQ ID NO: 114699 - DNA, 13 bp, Artificial Sequence
  Oligonucleotide for detection of SNP TSC0028716
gtgggtgtgtttt

SEQ ID NO: 114700 - DNA, 13 bp, Artificial Sequence
  Oligonucleotide for detection of SNP TSC0028716
aaaacacacccac

SEQ ID NO: 114701 - DNA, 13 bp, Artificial Sequence
  Oligonucleotide for detection of SNP TSC0028716
gtgggtatgtttt

SEQ ID NO: 114702 - DNA, 13 bp, Artificial Sequence
  Oligonucleotide for detection of SNP TSC0028716
aaaacatacccac

SEQ ID NO: 114703 - DNA, 13 bp, Artificial Sequence
  Oligonucleotide for detection of SNP TSC0028716
gcgggtgtgtttt

SEQ ID NO: 114704 - DNA, 13 bp, Artificial Sequence
  Oligonucleotide for detection of SNP TSC0028716
aaaacacacccgc

SEQ ID NO: 114705 - DNA, 13 bp, Artificial Sequence
  Oligonucleotide for detection of SNP TSC0028716
gcgggtatgtttt

SEQ ID NO: 114706 - DNA, 13 bp, Artificial Sequence
  Oligonucleotide for detection of SNP TSC0028716
aaaacatacccgc

SEQ ID NO: 114707 - DNA, 13 bp, Artificial Sequence
  Oligonucleotide for detection of SNP TSC0028716
gtgggcgtgtttt

SEQ ID NO: 114708 - DNA, 13 bp, Artificial Sequence
  Oligonucleotide for detection of SNP TSC0028716
aaaacacgcccac

SEQ ID NO: 114709 - DNA, 13 bp, Artificial Sequence
  Oligonucleotide for detection of SNP TSC0028716
gcgggcgtgtttt

SEQ ID NO: 114710 - DNA, 13 bp, Artificial Sequence
  Oligonucleotide for detection of SNP TSC0028716
aaaacacgcccgc

SEQ ID NO: 114711 - DNA, 13 bp, Artificial Sequence
  Oligonucleotide for detection of SNP TSC0028718
tgatatgggtagg

SEQ ID NO: 114712 - DNA, 13 bp, Artificial Sequence
  Oligonucleotide for detection of SNP TSC0028718
cctacccatatca

SEQ ID NO: 114713 - DNA, 13 bp, Artificial Sequence
  Oligonucleotide for detection of SNP TSC0028718
tgatataggtagg

SEQ ID NO: 114714 - DNA, 13 bp, Artificial Sequence
  Oligonucleotide for detection of SNP TSC0028718
cctacctatatca

SEQ ID NO: 114715 - DNA, 13 bp, Artificial Sequence
  Oligonucleotide for detection of SNP TSC0028718
cgatatgggtagg

SEQ ID NO: 114716 - DNA, 13 bp, Artificial Sequence
  Oligonucleotide for detection of SNP TSC0028718
cctacccatatcg

SEQ ID NO: 114717 - DNA, 13 bp, Artificial Sequence
  Oligonucleotide for detection of SNP TSC0028718
cgatataggtagg

SEQ ID NO: 114718 - DNA, 13 bp, Artificial Sequence
  Oligonucleotide for detection of SNP TSC0028718
cctacctatatcg

SEQ ID NO: 114719 - DNA, 13 bp, Artificial Sequence
  Oligonucleotide for detection of SNP TSC0028719
ttgtttatattta

SEQ ID NO: 114720 - DNA, 13 bp, Artificial Sequence
  Oligonucleotide for detection of SNP TSC0028719
taaatataaacaa

SEQ ID NO: 114721 - DNA, 13 bp, Artificial Sequence
  Oligonucleotide for detection of SNP TSC0028719
ttgtttgtattta

SEQ ID NO: 114722 - DNA, 13 bp, Artificial Sequence
  Oligonucleotide for detection of SNP TSC0028719
taaatacaaacaa

SEQ ID NO: 114723 - DNA, 13 bp, Artificial Sequence
  Oligonucleotide for detection of SNP TSC0028719
ttgttcgtattta

SEQ ID NO: 114724 - DNA, 13 bp, Artificial Sequence
  Oligonucleotide for detection of SNP TSC0028719
taaatacgaacaa

SEQ ID NO: 114725 - DNA, 13 bp, Artificial Sequence
  Oligonucleotide for detection of SNP TSC0028719
taaatgtggatag

SEQ ID NO: 114726 - DNA, 13 bp, Artificial Sequence
  Oligonucleotide for detection of SNP TSC0028719
ctatccacattta

SEQ ID NO: 114727 - DNA, 13 bp, Artificial Sequence
  Oligonucleotide for detection of SNP TSC0028719
taaatgcggatag

SEQ ID NO: 114728 - DNA, 13 bp, Artificial Sequence
  Oligonucleotide for detection of SNP TSC0028719
ctatccgcattta

SEQ ID NO: 114729 - DNA, 13 bp, Artificial Sequence
  Oligonucleotide for detection of SNP TSC0028722
gagaagagaggtg

SEQ ID NO: 114730 - DNA, 13 bp, Artificial Sequence
  Oligonucleotide for detection of SNP TSC0028722
cacctctcttctc

SEQ ID NO: 114731 - DNA, 13 bp, Artificial Sequence
  Oligonucleotide for detection of SNP TSC0028722
gagaagggaggtg

SEQ ID NO: 114732 - DNA, 13 bp, Artificial Sequence
  Oligonucleotide for detection of SNP TSC0028722
cacctcccttctc

SEQ ID NO: 114733 - DNA, 13 bp, Artificial Sequence
  Oligonucleotide for detection of SNP TSC0028727
taaattatagttt

SEQ ID NO: 114734 - DNA, 13 bp, Artificial Sequence
  Oligonucleotide for detection of SNP TSC0028727
aaactataattta

SEQ ID NO: 114735 - DNA, 13 bp, Artificial Sequence
  Oligonucleotide for detection of SNP TSC0028727
taaattttagttt

SEQ ID NO: 114736 - DNA, 13 bp, Artificial Sequence
  Oligonucleotide for detection of SNP TSC0028727
aaactaaaattta

SEQ ID NO: 114737 - DNA, 13 bp, Artificial Sequence
  Oligonucleotide for detection of SNP TSC0028727
agattgtaattta

SEQ ID NO: 114738 - DNA, 13 bp, Artificial Sequence
  Oligonucleotide for detection of SNP TSC0028727
taaattacaatct

SEQ ID NO: 114739 - DNA, 13 bp, Artificial Sequence
  Oligonucleotide for detection of SNP TSC0028727
agattgaaattta

SEQ ID NO: 114740 - DNA, 13 bp, Artificial Sequence
  Oligonucleotide for detection of SNP TSC0028727
taaatttcaatct

SEQ ID NO: 114741 - DNA, 13 bp, Artificial Sequence
  Oligonucleotide for detection of SNP TSC0028732
tgggtggggaatt

SEQ ID NO: 114742 - DNA, 13 bp, Artificial Sequence
  Oligonucleotide for detection of SNP TSC0028732
aattccccaccca

SEQ ID NO: 114743 - DNA, 13 bp, Artificial Sequence
  Oligonucleotide for detection of SNP TSC0028732
tgggtgaggaatt

SEQ ID NO: 114744 - DNA, 13 bp, Artificial Sequence
  Oligonucleotide for detection of SNP TSC0028732
aattcctcaccca

SEQ ID NO: 114745 - DNA, 13 bp, Artificial Sequence
  Oligonucleotide for detection of SNP TSC0028732
cgggtggggaatt

SEQ ID NO: 114746 - DNA, 13 bp, Artificial Sequence
  Oligonucleotide for detection of SNP TSC0028732
aattccccacccg

SEQ ID NO: 114747 - DNA, 13 bp, Artificial Sequence
  Oligonucleotide for detection of SNP TSC0028732
cgggtgaggaatt

SEQ ID NO: 114748 - DNA, 13 bp, Artificial Sequence
  Oligonucleotide for detection of SNP TSC0028732
aattcctcacccg

SEQ ID NO: 114749 - DNA, 13 bp, Artificial Sequence
  Oligonucleotide for detection of SNP TSC0028732
tgggcggggaatt

SEQ ID NO: 114750 - DNA, 13 bp, Artificial Sequence
  Oligonucleotide for detection of SNP TSC0028732
aattccccgccca

SEQ ID NO: 114751 - DNA, 13 bp, Artificial Sequence
  Oligonucleotide for detection of SNP TSC0028732
tgggcgaggaatt

SEQ ID NO: 114752 - DNA, 13 bp, Artificial Sequence
  Oligonucleotide for detection of SNP TSC0028732
aattcctcgccca

SEQ ID NO: 114753 - DNA, 13 bp, Artificial Sequence
  Oligonucleotide for detection of SNP TSC0028732
cgggcggggaatt

SEQ ID NO: 114754 - DNA, 13 bp, Artificial Sequence
  Oligonucleotide for detection of SNP TSC0028732
aattccccgcccg

SEQ ID NO: 114755 - DNA, 13 bp, Artificial Sequence
  Oligonucleotide for detection of SNP TSC0028732
cgggcgaggaatt

SEQ ID NO: 114756 - DNA, 13 bp, Artificial Sequence
  Oligonucleotide for detection of SNP TSC0028732
aattcctcgcccg

SEQ ID NO: 114757 - DNA, 13 bp, Artificial Sequence
  Oligonucleotide for detection of SNP TSC0028734
tagaagaggttag

SEQ ID NO: 114758 - DNA, 13 bp, Artificial Sequence
  Oligonucleotide for detection of SNP TSC0028734
ctaacctcttcta

SEQ ID NO: 114759 - DNA, 13 bp, Artificial Sequence
  Oligonucleotide for detection of SNP TSC0028734
tagaaggggttag

SEQ ID NO: 114760 - DNA, 13 bp, Artificial Sequence
  Oligonucleotide for detection of SNP TSC0028734
ctaaccccttcta

SEQ ID NO: 114761 - DNA, 13 bp, Artificial Sequence
  Oligonucleotide for detection of SNP TSC0028736
ttttttatttcgy

SEQ ID NO: 114762 - DNA, 13 bp, Artificial Sequence
  Oligonucleotide for detection of SNP TSC0028736
rcgaaataaaaaa

SEQ ID NO: 114763 - DNA, 13 bp, Artificial Sequence
  Oligonucleotide for detection of SNP TSC0028736
ttttttttttcgy

SEQ ID NO: 114764 - DNA, 13 bp, Artificial Sequence
  Oligonucleotide for detection of SNP TSC0028736
rcgaaaaaaaaaa

SEQ ID NO: 114765 - DNA, 13 bp, Artificial Sequence
  Oligonucleotide for detection of SNP TSC0028736
gtgaaatggagag

SEQ ID NO: 114766 - DNA, 13 bp, Artificial Sequence
  Oligonucleotide for detection of SNP TSC0028736
ctctccatttcac

SEQ ID NO: 114767 - DNA, 13 bp, Artificial Sequence
  Oligonucleotide for detection of SNP TSC0028736
gtgaaagggagag

SEQ ID NO: 114768 - DNA, 13 bp, Artificial Sequence
  Oligonucleotide for detection of SNP TSC0028736
ctctccctttcac

SEQ ID NO: 114769 - DNA, 13 bp, Artificial Sequence
  Oligonucleotide for detection of SNP TSC0028736
gcgaaatggagag

SEQ ID NO: 114770 - DNA, 13 bp, Artificial Sequence
  Oligonucleotide for detection of SNP TSC0028736
ctctccatttcgc

SEQ ID NO: 114771 - DNA, 13 bp, Artificial Sequence
  Oligonucleotide for detection of SNP TSC0028736
gcgaaagggagag

SEQ ID NO: 114772 - DNA, 13 bp, Artificial Sequence
  Oligonucleotide for detection of SNP TSC0028736
ctctccctttcgc

SEQ ID NO: 114773 - DNA, 13 bp, Artificial Sequence
  Oligonucleotide for detection of SNP TSC0028742
gtgggattgagta

SEQ ID NO: 114774 - DNA, 13 bp, Artificial Sequence
  Oligonucleotide for detection of SNP TSC0028742
tactcaatcccac

SEQ ID NO: 114775 - DNA, 13 bp, Artificial Sequence
  Oligonucleotide for detection of SNP TSC0028742
gtgggagtgagta

SEQ ID NO: 114776 - DNA, 13 bp, Artificial Sequence
  Oligonucleotide for detection of SNP TSC0028742
tactcactcccac

SEQ ID NO: 114777 - DNA, 13 bp, Artificial Sequence
  Oligonucleotide for detection of SNP TSC0028742
tatttagttttay

SEQ ID NO: 114778 - DNA, 13 bp, Artificial Sequence
  Oligonucleotide for detection of SNP TSC0028742
rtaaaactaaata

SEQ ID NO: 114779 - DNA, 13 bp, Artificial Sequence
  Oligonucleotide for detection of SNP TSC0028742
tatttatttttay

SEQ ID NO: 114780 - DNA, 13 bp, Artificial Sequence
  Oligonucleotide for detection of SNP TSC0028742
rtaaaaataaata

SEQ ID NO: 114781 - DNA, 13 bp, Artificial Sequence
  Oligonucleotide for detection of SNP TSC0028748
atttaataaataa

SEQ ID NO: 114782 - DNA, 13 bp, Artificial Sequence
  Oligonucleotide for detection of SNP TSC0028748
ttatttattaaat

SEQ ID NO: 114783 - DNA, 13 bp, Artificial Sequence
  Oligonucleotide for detection of SNP TSC0028748
atttaaaaaataa

SEQ ID NO: 114784 - DNA, 13 bp, Artificial Sequence
  Oligonucleotide for detection of SNP TSC0028748
ttattttttaaat

SEQ ID NO: 114785 - DNA, 13 bp, Artificial Sequence
  Oligonucleotide for detection of SNP TSC0028749
ataattatagata

SEQ ID NO: 114786 - DNA, 13 bp, Artificial Sequence
  Oligonucleotide for detection of SNP TSC0028749
tatctataattat

SEQ ID NO: 114787 - DNA, 13 bp, Artificial Sequence
  Oligonucleotide for detection of SNP TSC0028749
ataattgtagata

SEQ ID NO: 114788 - DNA, 13 bp, Artificial Sequence
  Oligonucleotide for detection of SNP TSC0028749
tatctacaattat

SEQ ID NO: 114789 - DNA, 13 bp, Artificial Sequence
  Oligonucleotide for detection of SNP TSC0028749
ataatcgtagata

SEQ ID NO: 114790 - DNA, 13 bp, Artificial Sequence
  Oligonucleotide for detection of SNP TSC0028749
tatctacgattat

SEQ ID NO: 114791 - DNA, 13 bp, Artificial Sequence
  Oligonucleotide for detection of SNP TSC0028749
tgtttgtggttgt

SEQ ID NO: 114792 - DNA, 13 bp, Artificial Sequence
  Oligonucleotide for detection of SNP TSC0028749
acaaccacaaaca

SEQ ID NO: 114793 - DNA, 13 bp, Artificial Sequence
  Oligonucleotide for detection of SNP TSC0028749
tgtttgcggttgt

SEQ ID NO: 114794 - DNA, 13 bp, Artificial Sequence
  Oligonucleotide for detection of SNP TSC0028749
acaaccgcaaaca

SEQ ID NO: 114795 - DNA, 13 bp, Artificial Sequence
  Oligonucleotide for detection of SNP TSC0028750
gttttaaattagt

SEQ ID NO: 114796 - DNA, 13 bp, Artificial Sequence
  Oligonucleotide for detection of SNP TSC0028750
actaatttaaaac

SEQ ID NO: 114797 - DNA, 13 bp, Artificial Sequence
  Oligonucleotide for detection of SNP TSC0028750
gttttagattagt

SEQ ID NO: 114798 - DNA, 13 bp, Artificial Sequence
  Oligonucleotide for detection of SNP TSC0028750
actaatctaaaac

SEQ ID NO: 114799 - DNA, 13 bp, Artificial Sequence
  Oligonucleotide for detection of SNP TSC0028753
gtatttaaagtat

SEQ ID NO: 114800 - DNA, 13 bp, Artificial Sequence
  Oligonucleotide for detection of SNP TSC0028753
atactttaaatac

SEQ ID NO: 114801 - DNA, 13 bp, Artificial Sequence
  Oligonucleotide for detection of SNP TSC0028753
gtatttgaagtat

SEQ ID NO: 114802 - DNA, 13 bp, Artificial Sequence
  Oligonucleotide for detection of SNP TSC0028753
atacttcaaatac

SEQ ID NO: 114803 - DNA, 13 bp, Artificial Sequence
  Oligonucleotide for detection of SNP TSC0028753
gtattcgaagtat

SEQ ID NO: 114804 - DNA, 13 bp, Artificial Sequence
  Oligonucleotide for detection of SNP TSC0028753
atacttcgaatac

SEQ ID NO: 114805 - DNA, 13 bp, Artificial Sequence
  Oligonucleotide for detection of SNP TSC0028753
atattttgaatgy

SEQ ID NO: 114806 - DNA, 13 bp, Artificial Sequence
  Oligonucleotide for detection of SNP TSC0028753
rcattcaaaatat

SEQ ID NO: 114807 - DNA, 13 bp, Artificial Sequence
  Oligonucleotide for detection of SNP TSC0028753
atatttcgaatgy

SEQ ID NO: 114808 - DNA, 13 bp, Artificial Sequence
  Oligonucleotide for detection of SNP TSC0028753
rcattcgaaatat

SEQ ID NO: 114809 - DNA, 13 bp, Artificial Sequence
  Oligonucleotide for detection of SNP TSC0028756
atttttggagggy

SEQ ID NO: 114810 - DNA, 13 bp, Artificial Sequence
  Oligonucleotide for detection of SNP TSC0028756
rccctccaaaaat

SEQ ID NO: 114811 - DNA, 13 bp, Artificial Sequence
  Oligonucleotide for detection of SNP TSC0028756
attttttgagggy

SEQ ID NO: 114812 - DNA, 13 bp, Artificial Sequence
  Oligonucleotide for detection of SNP TSC0028756
rccctcaaaaaat

SEQ ID NO: 114813 - DNA, 13 bp, Artificial Sequence
  Oligonucleotide for detection of SNP TSC0028756
attttcggagggy

SEQ ID NO: 114814 - DNA, 13 bp, Artificial Sequence
  Oligonucleotide for detection of SNP TSC0028756
rccctccgaaaat

SEQ ID NO: 114815 - DNA, 13 bp, Artificial Sequence
  Oligonucleotide for detection of SNP TSC0028756
gttttttgggaat

SEQ ID NO: 114816 - DNA, 13 bp, Artificial Sequence
  Oligonucleotide for detection of SNP TSC0028756
attcccaaaaaac

SEQ ID NO: 114817 - DNA, 13 bp, Artificial Sequence
  Oligonucleotide for detection of SNP TSC0028756
gtttttcgggaat

SEQ ID NO: 114818 - DNA, 13 bp, Artificial Sequence
  Oligonucleotide for detection of SNP TSC0028756
attcccgaaaaac

SEQ ID NO: 114819 - DNA, 13 bp, Artificial Sequence
  Oligonucleotide for detection of SNP TSC0028758
gtgatagttatga

SEQ ID NO: 114820 - DNA, 13 bp, Artificial Sequence
  Oligonucleotide for detection of SNP TSC0028758
tcataactatcac

SEQ ID NO: 114821 - DNA, 13 bp, Artificial Sequence
  Oligonucleotide for detection of SNP TSC0028758
gtgatatttatga

SEQ ID NO: 114822 - DNA, 13 bp, Artificial Sequence
  Oligonucleotide for detection of SNP TSC0028758
tcataaatatcac

SEQ ID NO: 114823 - DNA, 13 bp, Artificial Sequence
  Oligonucleotide for detection of SNP TSC0028758
ttataattgttay

SEQ ID NO: 114824 - DNA, 13 bp, Artificial Sequence
  Oligonucleotide for detection of SNP TSC0028758
rtaacaattataa

SEQ ID NO: 114825 - DNA, 13 bp, Artificial Sequence
  Oligonucleotide for detection of SNP TSC0028758
ttataaatgttay

SEQ ID NO: 114826 - DNA, 13 bp, Artificial Sequence
  Oligonucleotide for detection of SNP TSC0028758
rtaacatttataa

SEQ ID NO: 114827 - DNA, 13 bp, Artificial Sequence
  Oligonucleotide for detection of SNP TSC0028759
gtatttttggtta

SEQ ID NO: 114828 - DNA, 13 bp, Artificial Sequence
  Oligonucleotide for detection of SNP TSC0028759
taaccaaaaatac

SEQ ID NO: 114829 - DNA, 13 bp, Artificial Sequence
  Oligonucleotide for detection of SNP TSC0028759
gtattttcggtta

SEQ ID NO: 114830 - DNA, 13 bp, Artificial Sequence
  Oligonucleotide for detection of SNP TSC0028759
taaccgaaaatac

SEQ ID NO: 114831 - DNA, 13 bp, Artificial Sequence
  Oligonucleotide for detection of SNP TSC0028759
gtatttgcggtta

SEQ ID NO: 114832 - DNA, 13 bp, Artificial Sequence
  Oligonucleotide for detection of SNP TSC0028759
taaccgcaaatac

SEQ ID NO: 114833 - DNA, 13 bp, Artificial Sequence
  Oligonucleotide for detection of SNP TSC0028759
tggttggaggtgy

SEQ ID NO: 114834 - DNA, 13 bp, Artificial Sequence
  Oligonucleotide for detection of SNP TSC0028759
rcacctccaacca

SEQ ID NO: 114835 - DNA, 13 bp, Artificial Sequence
  Oligonucleotide for detection of SNP TSC0028759
tggttgtaggtgy

SEQ ID NO: 114836 - DNA, 13 bp, Artificial Sequence
  Oligonucleotide for detection of SNP TSC0028759
rcacctacaacca

SEQ ID NO: 114837 - DNA, 13 bp, Artificial Sequence
  Oligonucleotide for detection of SNP TSC0028759
tggtcggaggtgy

SEQ ID NO: 114838 - DNA, 13 bp, Artificial Sequence
  Oligonucleotide for detection of SNP TSC0028759
rcacctccgacca

SEQ ID NO: 114839 - DNA, 13 bp, Artificial Sequence
  Oligonucleotide for detection of SNP TSC0028759
tggtcgtaggtgy

SEQ ID NO: 114840 - DNA, 13 bp, Artificial Sequence
  Oligonucleotide for detection of SNP TSC0028759
rcacctacgacca

SEQ ID NO: 114841 - DNA, 13 bp, Artificial Sequence
  Oligonucleotide for detection of SNP TSC0028760
tgatgtattttta

SEQ ID NO: 114842 - DNA, 13 bp, Artificial Sequence
  Oligonucleotide for detection of SNP TSC0028760
taaaaatacatca

SEQ ID NO: 114843 - DNA, 13 bp, Artificial Sequence
  Oligonucleotide for detection of SNP TSC0028760
tgatgttttttta

SEQ ID NO: 114844 - DNA, 13 bp, Artificial Sequence
  Oligonucleotide for detection of SNP TSC0028760
taaaaaaacatca

SEQ ID NO: 114845 - DNA, 13 bp, Artificial Sequence
  Oligonucleotide for detection of SNP TSC0028760
tgggggtatatta

SEQ ID NO: 114846 - DNA, 13 bp, Artificial Sequence
  Oligonucleotide for detection of SNP TSC0028760
taatataccccca

SEQ ID NO: 114847 - DNA, 13 bp, Artificial Sequence
  Oligonucleotide for detection of SNP TSC0028760
tggggggatatta

SEQ ID NO: 114848 - DNA, 13 bp, Artificial Sequence
  Oligonucleotide for detection of SNP TSC0028760
taatatcccccca

SEQ ID NO: 114849 - DNA, 13 bp, Artificial Sequence
  Oligonucleotide for detection of SNP TSC0028762
ggtttaaattggy

SEQ ID NO: 114850 - DNA, 13 bp, Artificial Sequence
  Oligonucleotide for detection of SNP TSC0028762
rccaatttaaacc

SEQ ID NO: 114851 - DNA, 13 bp, Artificial Sequence
  Oligonucleotide for detection of SNP TSC0028762
ggtttagattggy

SEQ ID NO: 114852 - DNA, 13 bp, Artificial Sequence
  Oligonucleotide for detection of SNP TSC0028762
rccaatctaaacc

SEQ ID NO: 114853 - DNA, 13 bp, Artificial Sequence
  Oligonucleotide for detection of SNP TSC0028764
taatttattttgg

SEQ ID NO: 114854 - DNA, 13 bp, Artificial Sequence
  Oligonucleotide for detection of SNP TSC0028764
ccaaaataaatta

SEQ ID NO: 114855 - DNA, 13 bp, Artificial Sequence
  Oligonucleotide for detection of SNP TSC0028764
taattttttttgg

SEQ ID NO: 114856 - DNA, 13 bp, Artificial Sequence
  Oligonucleotide for detection of SNP TSC0028764
ccaaaaaaaatta

SEQ ID NO: 114857 - DNA, 13 bp, Artificial Sequence
  Oligonucleotide for detection of SNP TSC0028764
ttaaagtaaatta

SEQ ID NO: 114858 - DNA, 13 bp, Artificial Sequence
  Oligonucleotide for detection of SNP TSC0028764
taatttactttaa

SEQ ID NO: 114859 - DNA, 13 bp, Artificial Sequence
  Oligonucleotide for detection of SNP TSC0028764
ttaaaggaaatta

SEQ ID NO: 114860 - DNA, 13 bp, Artificial Sequence
  Oligonucleotide for detection of SNP TSC0028764
taatttcctttaa

SEQ ID NO: 114861 - DNA, 13 bp, Artificial Sequence
  Oligonucleotide for detection of SNP TSC0028768
taaaaagtttaaa

SEQ ID NO: 114862 - DNA, 13 bp, Artificial Sequence
  Oligonucleotide for detection of SNP TSC0028768
tttaaacttttta

SEQ ID NO: 114863 - DNA, 13 bp, Artificial Sequence
  Oligonucleotide for detection of SNP TSC0028770
tgttgtatgtgtt

SEQ ID NO: 114864 - DNA, 13 bp, Artificial Sequence
  Oligonucleotide for detection of SNP TSC0028770
aacacatacaaca

SEQ ID NO: 114865 - DNA, 13 bp, Artificial Sequence
  Oligonucleotide for detection of SNP TSC0028770
tgttgtgtgtgtt

SEQ ID NO: 114866 - DNA, 13 bp, Artificial Sequence
  Oligonucleotide for detection of SNP TSC0028770
aacacacacaaca

SEQ ID NO: 114867 - DNA, 13 bp, Artificial Sequence
  Oligonucleotide for detection of SNP TSC0028771
gttaagtggaggg

SEQ ID NO: 114868 - DNA, 13 bp, Artificial Sequence
  Oligonucleotide for detection of SNP TSC0028771
ccctccacttaac

SEQ ID NO: 114869 - DNA, 13 bp, Artificial Sequence
  Oligonucleotide for detection of SNP TSC0028771
gttaaggggaggg

SEQ ID NO: 114870 - DNA, 13 bp, Artificial Sequence
  Oligonucleotide for detection of SNP TSC0028771
ccctccccttaac

SEQ ID NO: 114871 - DNA, 13 bp, Artificial Sequence
  Oligonucleotide for detection of SNP TSC0028771
gttaagcggaggg

SEQ ID NO: 114872 - DNA, 13 bp, Artificial Sequence
  Oligonucleotide for detection of SNP TSC0028771
ccctccgcttaac

SEQ ID NO: 114873 - DNA, 13 bp, Artificial Sequence
  Oligonucleotide for detection of SNP TSC0028771
ttttttgtttaay

SEQ ID NO: 114874 - DNA, 13 bp, Artificial Sequence
  Oligonucleotide for detection of SNP TSC0028771
rttaaacaaaaaa

SEQ ID NO: 114875 - DNA, 13 bp, Artificial Sequence
  Oligonucleotide for detection of SNP TSC0028771
ttttttttttaay

SEQ ID NO: 114876 - DNA, 13 bp, Artificial Sequence
  Oligonucleotide for detection of SNP TSC0028771
rttaaaaaaaaaa

SEQ ID NO: 114877 - DNA, 13 bp, Artificial Sequence
  Oligonucleotide for detection of SNP TSC0028771
tttttcgtttaay

SEQ ID NO: 114878 - DNA, 13 bp, Artificial Sequence
  Oligonucleotide for detection of SNP TSC0028771
rttaaacgaaaaa

SEQ ID NO: 114879 - DNA, 13 bp, Artificial Sequence
  Oligonucleotide for detection of SNP TSC0028772
tttattgtaaaaa

SEQ ID NO: 114880 - DNA, 13 bp, Artificial Sequence
  Oligonucleotide for detection of SNP TSC0028772
tttttacaataaa

SEQ ID NO: 114881 - DNA, 13 bp, Artificial Sequence
  Oligonucleotide for detection of SNP TSC0028772
tttattataaaaa

SEQ ID NO: 114882 - DNA, 13 bp, Artificial Sequence
  Oligonucleotide for detection of SNP TSC0028772
tttttataataaa

SEQ ID NO: 114883 - DNA, 13 bp, Artificial Sequence
  Oligonucleotide for detection of SNP TSC0028774
ggggggatattat

SEQ ID NO: 114884 - DNA, 13 bp, Artificial Sequence
  Oligonucleotide for detection of SNP TSC0028774
ataatatcccccc

SEQ ID NO: 114885 - DNA, 13 bp, Artificial Sequence
  Oligonucleotide for detection of SNP TSC0028774
gggggggtattat

SEQ ID NO: 114886 - DNA, 13 bp, Artificial Sequence
  Oligonucleotide for detection of SNP TSC0028774
ataataccccccc

SEQ ID NO: 114887 - DNA, 13 bp, Artificial Sequence
  Oligonucleotide for detection of SNP TSC0028775
cgggggtatatta

SEQ ID NO: 114888 - DNA, 13 bp, Artificial Sequence
  Oligonucleotide for detection of SNP TSC0028775
taatatacccccg

SEQ ID NO: 114889 - DNA, 13 bp, Artificial Sequence
  Oligonucleotide for detection of SNP TSC0028775
cggggggatatta

SEQ ID NO: 114890 - DNA, 13 bp, Artificial Sequence
  Oligonucleotide for detection of SNP TSC0028775
taatatccccccg

SEQ ID NO: 114891 - DNA, 13 bp, Artificial Sequence
  Oligonucleotide for detection of SNP TSC0028775
tgatgtgtttttg

SEQ ID NO: 114892 - DNA, 13 bp, Artificial Sequence
  Oligonucleotide for detection of SNP TSC0028775
caaaaacacatca

SEQ ID NO: 114893 - DNA, 13 bp, Artificial Sequence
  Oligonucleotide for detection of SNP TSC0028775
tgatgtttttttg

SEQ ID NO: 114894 - DNA, 13 bp, Artificial Sequence
  Oligonucleotide for detection of SNP TSC0028775
caaaaaaacatca

SEQ ID NO: 114895 - DNA, 13 bp, Artificial Sequence
  Oligonucleotide for detection of SNP TSC0028775
tgatgtgttttcg

SEQ ID NO: 114896 - DNA, 13 bp, Artificial Sequence
  Oligonucleotide for detection of SNP TSC0028775
cgaaaacacatca

SEQ ID NO: 114897 - DNA, 13 bp, Artificial Sequence
  Oligonucleotide for detection of SNP TSC0028775
tgatgttttttcg

SEQ ID NO: 114898 - DNA, 13 bp, Artificial Sequence
  Oligonucleotide for detection of SNP TSC0028775
cgaaaaaacatca

SEQ ID NO: 114899 - DNA, 13 bp, Artificial Sequence
  Oligonucleotide for detection of SNP TSC0028776
ttggttagaggtg

SEQ ID NO: 114900 - DNA, 13 bp, Artificial Sequence
  Oligonucleotide for detection of SNP TSC0028776
cacctctaaccaa

SEQ ID NO: 114901 - DNA, 13 bp, Artificial Sequence
  Oligonucleotide for detection of SNP TSC0028776
ttggttggaggtg

SEQ ID NO: 114902 - DNA, 13 bp, Artificial Sequence
  Oligonucleotide for detection of SNP TSC0028776
cacctccaaccaa

SEQ ID NO: 114903 - DNA, 13 bp, Artificial Sequence
  Oligonucleotide for detection of SNP TSC0028776
ttggtcggaggtg

SEQ ID NO: 114904 - DNA, 13 bp, Artificial Sequence
  Oligonucleotide for detection of SNP TSC0028776
cacctccgaccaa

SEQ ID NO: 114905 - DNA, 13 bp, Artificial Sequence
  Oligonucleotide for detection of SNP TSC0028776
tatttttggttag

SEQ ID NO: 114906 - DNA, 13 bp, Artificial Sequence
  Oligonucleotide for detection of SNP TSC0028776
ctaaccaaaaata

SEQ ID NO: 114907 - DNA, 13 bp, Artificial Sequence
  Oligonucleotide for detection of SNP TSC0028776
tattttcggttag

SEQ ID NO: 114908 - DNA, 13 bp, Artificial Sequence
  Oligonucleotide for detection of SNP TSC0028776
ctaaccgaaaata

SEQ ID NO: 114909 - DNA, 13 bp, Artificial Sequence
  Oligonucleotide for detection of SNP TSC0028780
tttattgtttata

SEQ ID NO: 114910 - DNA, 13 bp, Artificial Sequence
  Oligonucleotide for detection of SNP TSC0028780
tataaacaataaa

SEQ ID NO: 114911 - DNA, 13 bp, Artificial Sequence
  Oligonucleotide for detection of SNP TSC0028780
tttattttttata

SEQ ID NO: 114912 - DNA, 13 bp, Artificial Sequence
  Oligonucleotide for detection of SNP TSC0028780
tataaaaaataaa

SEQ ID NO: 114913 - DNA, 13 bp, Artificial Sequence
  Oligonucleotide for detection of SNP TSC0028780
tttatcgtttata

SEQ ID NO: 114914 - DNA, 13 bp, Artificial Sequence
  Oligonucleotide for detection of SNP TSC0028780
tataaacgataaa

SEQ ID NO: 114915 - DNA, 13 bp, Artificial Sequence
  Oligonucleotide for detection of SNP TSC0028780
tgtgagtggtgga

SEQ ID NO: 114916 - DNA, 13 bp, Artificial Sequence
  Oligonucleotide for detection of SNP TSC0028780
tccaccactcaca

SEQ ID NO: 114917 - DNA, 13 bp, Artificial Sequence
  Oligonucleotide for detection of SNP TSC0028780
tgtgagaggtgga

SEQ ID NO: 114918 - DNA, 13 bp, Artificial Sequence
  Oligonucleotide for detection of SNP TSC0028780
tccacctctcaca

SEQ ID NO: 114919 - DNA, 13 bp, Artificial Sequence
  Oligonucleotide for detection of SNP TSC0028780
tgtgagcggtgga

SEQ ID NO: 114920 - DNA, 13 bp, Artificial Sequence
  Oligonucleotide for detection of SNP TSC0028780
tccaccgctcaca

SEQ ID NO: 114921 - DNA, 13 bp, Artificial Sequence
  Oligonucleotide for detection of SNP TSC0028781
gatagtgaagaga

SEQ ID NO: 114922 - DNA, 13 bp, Artificial Sequence
  Oligonucleotide for detection of SNP TSC0028781
tctcttcactatc

SEQ ID NO: 114923 - DNA, 13 bp, Artificial Sequence
  Oligonucleotide for detection of SNP TSC0028781
gatagtaaagaga

SEQ ID NO: 114924 - DNA, 13 bp, Artificial Sequence
  Oligonucleotide for detection of SNP TSC0028781
tctctttactatc

SEQ ID NO: 114925 - DNA, 13 bp, Artificial Sequence
  Oligonucleotide for detection of SNP TSC0028784
gagagagaagtta

SEQ ID NO: 114926 - DNA, 13 bp, Artificial Sequence
  Oligonucleotide for detection of SNP TSC0028784
taacttctctctc

SEQ ID NO: 114927 - DNA, 13 bp, Artificial Sequence
  Oligonucleotide for detection of SNP TSC0028784
gagagaaaagtta

SEQ ID NO: 114928 - DNA, 13 bp, Artificial Sequence
  Oligonucleotide for detection of SNP TSC0028784
taacttttctctc

SEQ ID NO: 114929 - DNA, 13 bp, Artificial Sequence
  Oligonucleotide for detection of SNP TSC0028785
tttttaatatttt

SEQ ID NO: 114930 - DNA, 13 bp, Artificial Sequence
  Oligonucleotide for detection of SNP TSC0028785
aaaatattaaaaa

SEQ ID NO: 114931 - DNA, 13 bp, Artificial Sequence
  Oligonucleotide for detection of SNP TSC0028785
tttttagtatttt

SEQ ID NO: 114932 - DNA, 13 bp, Artificial Sequence
  Oligonucleotide for detection of SNP TSC0028785
aaaatactaaaaa

SEQ ID NO: 114933 - DNA, 13 bp, Artificial Sequence
  Oligonucleotide for detection of SNP TSC0028786
attgttgagtagg

SEQ ID NO: 114934 - DNA, 13 bp, Artificial Sequence
  Oligonucleotide for detection of SNP TSC0028786
cctactcaacaat

SEQ ID NO: 114935 - DNA, 13 bp, Artificial Sequence
  Oligonucleotide for detection of SNP TSC0028786
attgttaagtagg

SEQ ID NO: 114936 - DNA, 13 bp, Artificial Sequence
  Oligonucleotide for detection of SNP TSC0028786
cctacttaacaat

SEQ ID NO: 114937 - DNA, 13 bp, Artificial Sequence
  Oligonucleotide for detection of SNP TSC0028787
taatgaaatggta

SEQ ID NO: 114938 - DNA, 13 bp, Artificial Sequence
  Oligonucleotide for detection of SNP TSC0028787
taccatttcatta

SEQ ID NO: 114939 - DNA, 13 bp, Artificial Sequence
  Oligonucleotide for detection of SNP TSC0028787
taatgagatggta

SEQ ID NO: 114940 - DNA, 13 bp, Artificial Sequence
  Oligonucleotide for detection of SNP TSC0028787
taccatctcatta

SEQ ID NO: 114941 - DNA, 13 bp, Artificial Sequence
  Oligonucleotide for detection of SNP TSC0028788
atttttaatatgg

SEQ ID NO: 114942 - DNA, 13 bp, Artificial Sequence
  Oligonucleotide for detection of SNP TSC0028788
ccatattaaaaat

SEQ ID NO: 114943 - DNA, 13 bp, Artificial Sequence
  Oligonucleotide for detection of SNP TSC0028788
atttttgatatgg

SEQ ID NO: 114944 - DNA, 13 bp, Artificial Sequence
  Oligonucleotide for detection of SNP TSC0028788
ccatatcaaaaat

SEQ ID NO: 114945 - DNA, 13 bp, Artificial Sequence
  Oligonucleotide for detection of SNP TSC0028788
atttttaatacgg

SEQ ID NO: 114946 - DNA, 13 bp, Artificial Sequence
  Oligonucleotide for detection of SNP TSC0028788
ccgtattaaaaat

SEQ ID NO: 114947 - DNA, 13 bp, Artificial Sequence
  Oligonucleotide for detection of SNP TSC0028788
atttttgatacgg

SEQ ID NO: 114948 - DNA, 13 bp, Artificial Sequence
  Oligonucleotide for detection of SNP TSC0028788
ccgtatcaaaaat

SEQ ID NO: 114949 - DNA, 13 bp, Artificial Sequence
  Oligonucleotide for detection of SNP TSC0028790
tgggaaggggtgg

SEQ ID NO: 114950 - DNA, 13 bp, Artificial Sequence
  Oligonucleotide for detection of SNP TSC0028790
ccaccccttccca

SEQ ID NO: 114951 - DNA, 13 bp, Artificial Sequence
  Oligonucleotide for detection of SNP TSC0028790
tgggaatgggtgg

SEQ ID NO: 114952 - DNA, 13 bp, Artificial Sequence
  Oligonucleotide for detection of SNP TSC0028790
ccacccattccca

SEQ ID NO: 114953 - DNA, 13 bp, Artificial Sequence
  Oligonucleotide for detection of SNP TSC0028791
ttatggagttggy

SEQ ID NO: 114954 - DNA, 13 bp, Artificial Sequence
  Oligonucleotide for detection of SNP TSC0028791
rccaactccataa

SEQ ID NO: 114955 - DNA, 13 bp, Artificial Sequence
  Oligonucleotide for detection of SNP TSC0028791
ttatggggttggy

SEQ ID NO: 114956 - DNA, 13 bp, Artificial Sequence
  Oligonucleotide for detection of SNP TSC0028791
rccaaccccataa

SEQ ID NO: 114957 - DNA, 13 bp, Artificial Sequence
  Oligonucleotide for detection of SNP TSC0028792
ttatggggagtga

SEQ ID NO: 114958 - DNA, 13 bp, Artificial Sequence
  Oligonucleotide for detection of SNP TSC0028792
tcactccccataa

SEQ ID NO: 114959 - DNA, 13 bp, Artificial Sequence
  Oligonucleotide for detection of SNP TSC0028792
ttatggtgagtga

SEQ ID NO: 114960 - DNA, 13 bp, Artificial Sequence
  Oligonucleotide for detection of SNP TSC0028792
tcactcaccataa

SEQ ID NO: 114961 - DNA, 13 bp, Artificial Sequence
  Oligonucleotide for detection of SNP TSC0028792
ttacggggagtga

SEQ ID NO: 114962 - DNA, 13 bp, Artificial Sequence
  Oligonucleotide for detection of SNP TSC0028792
tcactccccgtaa

SEQ ID NO: 114963 - DNA, 13 bp, Artificial Sequence
  Oligonucleotide for detection of SNP TSC0028792
ttacggtgagtga

SEQ ID NO: 114964 - DNA, 13 bp, Artificial Sequence
  Oligonucleotide for detection of SNP TSC0028792
tcactcaccgtaa

SEQ ID NO: 114965 - DNA, 13 bp, Artificial Sequence
  Oligonucleotide for detection of SNP TSC0028792
ttattttttgtga

SEQ ID NO: 114966 - DNA, 13 bp, Artificial Sequence
  Oligonucleotide for detection of SNP TSC0028792
tcacaaaaaataa

SEQ ID NO: 114967 - DNA, 13 bp, Artificial Sequence
  Oligonucleotide for detection of SNP TSC0028792
ttatttattgtga

SEQ ID NO: 114968 - DNA, 13 bp, Artificial Sequence
  Oligonucleotide for detection of SNP TSC0028792
tcacaataaataa

SEQ ID NO: 114969 - DNA, 13 bp, Artificial Sequence
  Oligonucleotide for detection of SNP TSC0028792
ttatttttcgtga

SEQ ID NO: 114970 - DNA, 13 bp, Artificial Sequence
  Oligonucleotide for detection of SNP TSC0028792
tcacgaaaaataa

SEQ ID NO: 114971 - DNA, 13 bp, Artificial Sequence
  Oligonucleotide for detection of SNP TSC0028792
ttatttatcgtga

SEQ ID NO: 114972 - DNA, 13 bp, Artificial Sequence
  Oligonucleotide for detection of SNP TSC0028792
tcacgataaataa

SEQ ID NO: 114973 - DNA, 13 bp, Artificial Sequence
  Oligonucleotide for detection of SNP TSC0028793
atagtaagaaggg

SEQ ID NO: 114974 - DNA, 13 bp, Artificial Sequence
  Oligonucleotide for detection of SNP TSC0028793
cccttcttactat

SEQ ID NO: 114975 - DNA, 13 bp, Artificial Sequence
  Oligonucleotide for detection of SNP TSC0028793
atagtaggaaggg

SEQ ID NO: 114976 - DNA, 13 bp, Artificial Sequence
  Oligonucleotide for detection of SNP TSC0028793
cccttcctactat

SEQ ID NO: 114977 - DNA, 13 bp, Artificial Sequence
  Oligonucleotide for detection of SNP TSC0028794
taaatatgggtta

SEQ ID NO: 114978 - DNA, 13 bp, Artificial Sequence
  Oligonucleotide for detection of SNP TSC0028794
taacccatattta

SEQ ID NO: 114979 - DNA, 13 bp, Artificial Sequence
  Oligonucleotide for detection of SNP TSC0028794
taaatacgggtta

SEQ ID NO: 114980 - DNA, 13 bp, Artificial Sequence
  Oligonucleotide for detection of SNP TSC0028794
taacccgtattta

SEQ ID NO: 114981 - DNA, 13 bp, Artificial Sequence
  Oligonucleotide for detection of SNP TSC0028799
aaatatataggaa

SEQ ID NO: 114982 - DNA, 13 bp, Artificial Sequence
  Oligonucleotide for detection of SNP TSC0028799
ttcctatatattt

SEQ ID NO: 114983 - DNA, 13 bp, Artificial Sequence
  Oligonucleotide for detection of SNP TSC0028799
aaatatttaggaa

SEQ ID NO: 114984 - DNA, 13 bp, Artificial Sequence
  Oligonucleotide for detection of SNP TSC0028799
ttcctaaatattt

SEQ ID NO: 114985 - DNA, 13 bp, Artificial Sequence
  Oligonucleotide for detection of SNP TSC0028800
aattttgttatag

SEQ ID NO: 114986 - DNA, 13 bp, Artificial Sequence
  Oligonucleotide for detection of SNP TSC0028800
ctataacaaaatt

SEQ ID NO: 114987 - DNA, 13 bp, Artificial Sequence
  Oligonucleotide for detection of SNP TSC0028800
aattttattatag

SEQ ID NO: 114988 - DNA, 13 bp, Artificial Sequence
  Oligonucleotide for detection of SNP TSC0028800
ctataataaaatt

SEQ ID NO: 114989 - DNA, 13 bp, Artificial Sequence
  Oligonucleotide for detection of SNP TSC0028801
tggaaatgattty

SEQ ID NO: 114990 - DNA, 13 bp, Artificial Sequence
  Oligonucleotide for detection of SNP TSC0028801
raaatcatttcca

SEQ ID NO: 114991 - DNA, 13 bp, Artificial Sequence
  Oligonucleotide for detection of SNP TSC0028801
tggaaacgattty

SEQ ID NO: 114992 - DNA, 13 bp, Artificial Sequence
  Oligonucleotide for detection of SNP TSC0028801
raaatcgtttcca

SEQ ID NO: 114993 - DNA, 13 bp, Artificial Sequence
  Oligonucleotide for detection of SNP TSC0028801
ggaattgttttta

SEQ ID NO: 114994 - DNA, 13 bp, Artificial Sequence
  Oligonucleotide for detection of SNP TSC0028801
taaaaacaattcc

SEQ ID NO: 114995 - DNA, 13 bp, Artificial Sequence
  Oligonucleotide for detection of SNP TSC0028801
ggaattattttta

SEQ ID NO: 114996 - DNA, 13 bp, Artificial Sequence
  Oligonucleotide for detection of SNP TSC0028801
taaaaataattcc

SEQ ID NO: 114997 - DNA, 13 bp, Artificial Sequence
  Oligonucleotide for detection of SNP TSC0028801
ggaatcgttttta

SEQ ID NO: 114998 - DNA, 13 bp, Artificial Sequence
  Oligonucleotide for detection of SNP TSC0028801
taaaaacgattcc

SEQ ID NO: 114999 - DNA, 13 bp, Artificial Sequence
  Oligonucleotide for detection of SNP TSC0028805
gggaagaagagty

SEQ ID NO: 115000 - DNA, 13 bp, Artificial Sequence
  Oligonucleotide for detection of SNP TSC0028805
ractcttcttccc

SEQ ID NO: 115001 - DNA, 13 bp, Artificial Sequence
  Oligonucleotide for detection of SNP TSC0028805
gggaaggagagty

SEQ ID NO: 115002 - DNA, 13 bp, Artificial Sequence
  Oligonucleotide for detection of SNP TSC0028805
ractctccttccc

SEQ ID NO: 115003 - DNA, 13 bp, Artificial Sequence
  Oligonucleotide for detection of SNP TSC0028806
taggaatgaataa

SEQ ID NO: 115004 - DNA, 13 bp, Artificial Sequence
  Oligonucleotide for detection of SNP TSC0028806
ttattcattccta

SEQ ID NO: 115005 - DNA, 13 bp, Artificial Sequence
  Oligonucleotide for detection of SNP TSC0028806
taggaacgaataa

SEQ ID NO: 115006 - DNA, 13 bp, Artificial Sequence
  Oligonucleotide for detection of SNP TSC0028806
ttattcgttccta

SEQ ID NO: 115007 - DNA, 13 bp, Artificial Sequence
  Oligonucleotide for detection of SNP TSC0028807
tattgtgggtgay

SEQ ID NO: 115008 - DNA, 13 bp, Artificial Sequence
  Oligonucleotide for detection of SNP TSC0028807
rtcacccacaata

SEQ ID NO: 115009 - DNA, 13 bp, Artificial Sequence
  Oligonucleotide for detection of SNP TSC0028807
tattgtaggtgay

SEQ ID NO: 115010 - DNA, 13 bp, Artificial Sequence
  Oligonucleotide for detection of SNP TSC0028807
rtcacctacaata

SEQ ID NO: 115011 - DNA, 13 bp, Artificial Sequence
  Oligonucleotide for detection of SNP TSC0028808
aaatatattatat

SEQ ID NO: 115012 - DNA, 13 bp, Artificial Sequence
  Oligonucleotide for detection of SNP TSC0028808
atataatatattt

SEQ ID NO: 115013 - DNA, 13 bp, Artificial Sequence
  Oligonucleotide for detection of SNP TSC0028808
aaatatgttatat

SEQ ID NO: 115014 - DNA, 13 bp, Artificial Sequence
  Oligonucleotide for detection of SNP TSC0028808
atataacatattt

SEQ ID NO: 115015 - DNA, 13 bp, Artificial Sequence
  Oligonucleotide for detection of SNP TSC0028815
gggaaaagtgttg

SEQ ID NO: 115016 - DNA, 13 bp, Artificial Sequence
  Oligonucleotide for detection of SNP TSC0028815
caacacttttccc

SEQ ID NO: 115017 - DNA, 13 bp, Artificial Sequence
  Oligonucleotide for detection of SNP TSC0028815
gggaaaggtgttg

SEQ ID NO: 115018 - DNA, 13 bp, Artificial Sequence
  Oligonucleotide for detection of SNP TSC0028815
caacacctttccc

SEQ ID NO: 115019 - DNA, 13 bp, Artificial Sequence
  Oligonucleotide for detection of SNP TSC0028816
aagttttgttaat

SEQ ID NO: 115020 - DNA, 13 bp, Artificial Sequence
  Oligonucleotide for detection of SNP TSC0028816
attaacaaaactt

SEQ ID NO: 115021 - DNA, 13 bp, Artificial Sequence
  Oligonucleotide for detection of SNP TSC0028816
aagtttcgttaat

SEQ ID NO: 115022 - DNA, 13 bp, Artificial Sequence
  Oligonucleotide for detection of SNP TSC0028816
attaacgaaactt

SEQ ID NO: 115023 - DNA, 13 bp, Artificial Sequence
  Oligonucleotide for detection of SNP TSC0028816
attgatgaagttt

SEQ ID NO: 115024 - DNA, 13 bp, Artificial Sequence
  Oligonucleotide for detection of SNP TSC0028816
aaacttcatcaat

SEQ ID NO: 115025 - DNA, 13 bp, Artificial Sequence
  Oligonucleotide for detection of SNP TSC0028816
attgataaagttt

SEQ ID NO: 115026 - DNA, 13 bp, Artificial Sequence
  Oligonucleotide for detection of SNP TSC0028816
aaactttatcaat

SEQ ID NO: 115027 - DNA, 13 bp, Artificial Sequence
  Oligonucleotide for detection of SNP TSC0028816
attgacgaagttt

SEQ ID NO: 115028 - DNA, 13 bp, Artificial Sequence
  Oligonucleotide for detection of SNP TSC0028816
aaacttcgtcaat

SEQ ID NO: 115029 - DNA, 13 bp, Artificial Sequence
  Oligonucleotide for detection of SNP TSC0028817
tttttgtgtatga

SEQ ID NO: 115030 - DNA, 13 bp, Artificial Sequence
  Oligonucleotide for detection of SNP TSC0028817
tcatacacaaaaa

SEQ ID NO: 115031 - DNA, 13 bp, Artificial Sequence
  Oligonucleotide for detection of SNP TSC0028817
tttttgcgtatga

SEQ ID NO: 115032 - DNA, 13 bp, Artificial Sequence
  Oligonucleotide for detection of SNP TSC0028817
tcatacgcaaaaa

SEQ ID NO: 115033 - DNA, 13 bp, Artificial Sequence
  Oligonucleotide for detection of SNP TSC0028817
ttatatgtagaga

SEQ ID NO: 115034 - DNA, 13 bp, Artificial Sequence
  Oligonucleotide for detection of SNP TSC0028817
tctctacatataa

SEQ ID NO: 115035 - DNA, 13 bp, Artificial Sequence
  Oligonucleotide for detection of SNP TSC0028817
ttatatatagaga

SEQ ID NO: 115036 - DNA, 13 bp, Artificial Sequence
  Oligonucleotide for detection of SNP TSC0028817
tctctatatataa

SEQ ID NO: 115037 - DNA, 13 bp, Artificial Sequence
  Oligonucleotide for detection of SNP TSC0028817
ttatacgtagaga

SEQ ID NO: 115038 - DNA, 13 bp, Artificial Sequence
  Oligonucleotide for detection of SNP TSC0028817
tctctacgtataa

SEQ ID NO: 115039 - DNA, 13 bp, Artificial Sequence
  Oligonucleotide for detection of SNP TSC0028821
tgttgaaggtagg

SEQ ID NO: 115040 - DNA, 13 bp, Artificial Sequence
  Oligonucleotide for detection of SNP TSC0028821
cctaccttcaaca

SEQ ID NO: 115041 - DNA, 13 bp, Artificial Sequence
  Oligonucleotide for detection of SNP TSC0028821
tgttgagggtagg

SEQ ID NO: 115042 - DNA, 13 bp, Artificial Sequence
  Oligonucleotide for detection of SNP TSC0028821
cctaccctcaaca

SEQ ID NO: 115043 - DNA, 13 bp, Artificial Sequence
  Oligonucleotide for detection of SNP TSC0028823
ttttttaattttg

SEQ ID NO: 115044 - DNA, 13 bp, Artificial Sequence
  Oligonucleotide for detection of SNP TSC0028823
caaaattaaaaaa

SEQ ID NO: 115045 - DNA, 13 bp, Artificial Sequence
  Oligonucleotide for detection of SNP TSC0028823
ttttttaatttcg

SEQ ID NO: 115046 - DNA, 13 bp, Artificial Sequence
  Oligonucleotide for detection of SNP TSC0028823
cgaaattaaaaaa

SEQ ID NO: 115047 - DNA, 13 bp, Artificial Sequence
  Oligonucleotide for detection of SNP TSC0028823
tttttttatttcg

SEQ ID NO: 115048 - DNA, 13 bp, Artificial Sequence
  Oligonucleotide for detection of SNP TSC0028823
cgaaataaaaaaa

SEQ ID NO: 115049 - DNA, 13 bp, Artificial Sequence
  Oligonucleotide for detection of SNP TSC0028823
tggggttgggggg

SEQ ID NO: 115050 - DNA, 13 bp, Artificial Sequence
  Oligonucleotide for detection of SNP TSC0028823
ccccccaacccca

SEQ ID NO: 115051 - DNA, 13 bp, Artificial Sequence
  Oligonucleotide for detection of SNP TSC0028823
tggggtggggggg

SEQ ID NO: 115052 - DNA, 13 bp, Artificial Sequence
  Oligonucleotide for detection of SNP TSC0028823
cccccccacccca

SEQ ID NO: 115053 - DNA, 13 bp, Artificial Sequence
  Oligonucleotide for detection of SNP TSC0028823
cggggttgggggg

SEQ ID NO: 115054 - DNA, 13 bp, Artificial Sequence
  Oligonucleotide for detection of SNP TSC0028823
ccccccaaccccg

SEQ ID NO: 115055 - DNA, 13 bp, Artificial Sequence
  Oligonucleotide for detection of SNP TSC0028823
cggggtggggggg

SEQ ID NO: 115056 - DNA, 13 bp, Artificial Sequence
  Oligonucleotide for detection of SNP TSC0028823
cccccccaccccg

SEQ ID NO: 115057 - DNA, 13 bp, Artificial Sequence
  Oligonucleotide for detection of SNP TSC0028824
ggtttttgggtty

SEQ ID NO: 115058 - DNA, 13 bp, Artificial Sequence
  Oligonucleotide for detection of SNP TSC0028824
raacccaaaaacc

SEQ ID NO: 115059 - DNA, 13 bp, Artificial Sequence
  Oligonucleotide for detection of SNP TSC0028824
ggttttcgggtty

SEQ ID NO: 115060 - DNA, 13 bp, Artificial Sequence
  Oligonucleotide for detection of SNP TSC0028824
raacccgaaaacc

SEQ ID NO: 115061 - DNA, 13 bp, Artificial Sequence
  Oligonucleotide for detection of SNP TSC0028824
gggtttgagagty

SEQ ID NO: 115062 - DNA, 13 bp, Artificial Sequence
  Oligonucleotide for detection of SNP TSC0028824
ractctcaaaccc

SEQ ID NO: 115063 - DNA, 13 bp, Artificial Sequence
  Oligonucleotide for detection of SNP TSC0028824
gggtttaagagty

SEQ ID NO: 115064 - DNA, 13 bp, Artificial Sequence
  Oligonucleotide for detection of SNP TSC0028824
ractcttaaaccc

SEQ ID NO: 115065 - DNA, 13 bp, Artificial Sequence
  Oligonucleotide for detection of SNP TSC0028824
gggttcgagagty

SEQ ID NO: 115066 - DNA, 13 bp, Artificial Sequence
  Oligonucleotide for detection of SNP TSC0028824
ractctcgaaccc

SEQ ID NO: 115067 - DNA, 13 bp, Artificial Sequence
  Oligonucleotide for detection of SNP TSC0028825
gggggatggtagg

SEQ ID NO: 115068 - DNA, 13 bp, Artificial Sequence
  Oligonucleotide for detection of SNP TSC0028825
cctaccatccccc

SEQ ID NO: 115069 - DNA, 13 bp, Artificial Sequence
  Oligonucleotide for detection of SNP TSC0028825
gggggacggtagg

SEQ ID NO: 115070 - DNA, 13 bp, Artificial Sequence
  Oligonucleotide for detection of SNP TSC0028825
cctaccgtccccc

SEQ ID NO: 115071 - DNA, 13 bp, Artificial Sequence
  Oligonucleotide for detection of SNP TSC0028826
ttatttgttagag

SEQ ID NO: 115072 - DNA, 13 bp, Artificial Sequence
  Oligonucleotide for detection of SNP TSC0028826
ctctaacaaataa

SEQ ID NO: 115073 - DNA, 13 bp, Artificial Sequence
  Oligonucleotide for detection of SNP TSC0028826
ttattttttagag

SEQ ID NO: 115074 - DNA, 13 bp, Artificial Sequence
  Oligonucleotide for detection of SNP TSC0028826
ctctaaaaaataa

SEQ ID NO: 115075 - DNA, 13 bp, Artificial Sequence
  Oligonucleotide for detection of SNP TSC0028826
ttattcgttagag

SEQ ID NO: 115076 - DNA, 13 bp, Artificial Sequence
  Oligonucleotide for detection of SNP TSC0028826
ctctaacgaataa

SEQ ID NO: 115077 - DNA, 13 bp, Artificial Sequence
  Oligonucleotide for detection of SNP TSC0028826
ttttagtgggtaa

SEQ ID NO: 115078 - DNA, 13 bp, Artificial Sequence
  Oligonucleotide for detection of SNP TSC0028826
ttacccactaaaa

SEQ ID NO: 115079 - DNA, 13 bp, Artificial Sequence
  Oligonucleotide for detection of SNP TSC0028826
ttttagagggtaa

SEQ ID NO: 115080 - DNA, 13 bp, Artificial Sequence
  Oligonucleotide for detection of SNP TSC0028826
ttaccctctaaaa

SEQ ID NO: 115081 - DNA, 13 bp, Artificial Sequence
  Oligonucleotide for detection of SNP TSC0028826
ttttagcgggtaa

SEQ ID NO: 115082 - DNA, 13 bp, Artificial Sequence
  Oligonucleotide for detection of SNP TSC0028826
ttacccgctaaaa

SEQ ID NO: 115083 - DNA, 13 bp, Artificial Sequence
  Oligonucleotide for detection of SNP TSC0028827
tattgtgttgaay

SEQ ID NO: 115084 - DNA, 13 bp, Artificial Sequence
  Oligonucleotide for detection of SNP TSC0028827
rttcaacacaata

SEQ ID NO: 115085 - DNA, 13 bp, Artificial Sequence
  Oligonucleotide for detection of SNP TSC0028827
tattgtattgaay

SEQ ID NO: 115086 - DNA, 13 bp, Artificial Sequence
  Oligonucleotide for detection of SNP TSC0028827
rttcaatacaata

SEQ ID NO: 115087 - DNA, 13 bp, Artificial Sequence
  Oligonucleotide for detection of SNP TSC0028827
tattgcgttgaay

SEQ ID NO: 115088 - DNA, 13 bp, Artificial Sequence
  Oligonucleotide for detection of SNP TSC0028827
rttcaacgcaata

SEQ ID NO: 115089 - DNA, 13 bp, Artificial Sequence
  Oligonucleotide for detection of SNP TSC0028828
tttttgggtttta

SEQ ID NO: 115090 - DNA, 13 bp, Artificial Sequence
  Oligonucleotide for detection of SNP TSC0028828
taaaacccaaaaa

SEQ ID NO: 115091 - DNA, 13 bp, Artificial Sequence
  Oligonucleotide for detection of SNP TSC0028828
tggagtttaaaga

SEQ ID NO: 115092 - DNA, 13 bp, Artificial Sequence
  Oligonucleotide for detection of SNP TSC0028828
tctttaaactcca

SEQ ID NO: 115093 - DNA, 13 bp, Artificial Sequence
  Oligonucleotide for detection of SNP TSC0028828
tggagtataaaga

SEQ ID NO: 115094 - DNA, 13 bp, Artificial Sequence
  Oligonucleotide for detection of SNP TSC0028828
tctttatactcca

SEQ ID NO: 115095 - DNA, 13 bp, Artificial Sequence
  Oligonucleotide for detection of SNP TSC0028829
gaggatattttga

SEQ ID NO: 115096 - DNA, 13 bp, Artificial Sequence
  Oligonucleotide for detection of SNP TSC0028829
tcaaaatatcctc

SEQ ID NO: 115097 - DNA, 13 bp, Artificial Sequence
  Oligonucleotide for detection of SNP TSC0028829
gaggattttttga

SEQ ID NO: 115098 - DNA, 13 bp, Artificial Sequence
  Oligonucleotide for detection of SNP TSC0028829
tcaaaaaatcctc

SEQ ID NO: 115099 - DNA, 13 bp, Artificial Sequence
  Oligonucleotide for detection of SNP TSC0028829
ttaaggtatttty

SEQ ID NO: 115100 - DNA, 13 bp, Artificial Sequence
  Oligonucleotide for detection of SNP TSC0028829
raaaataccttaa

SEQ ID NO: 115101 - DNA, 13 bp, Artificial Sequence
  Oligonucleotide for detection of SNP TSC0028829
ttaagggatttty

SEQ ID NO: 115102 - DNA, 13 bp, Artificial Sequence
  Oligonucleotide for detection of SNP TSC0028829
raaaatcccttaa

SEQ ID NO: 115103 - DNA, 13 bp, Artificial Sequence
  Oligonucleotide for detection of SNP TSC0028833
gttgggaggtggt

SEQ ID NO: 115104 - DNA, 13 bp, Artificial Sequence
  Oligonucleotide for detection of SNP TSC0028833
accacctcccaac

SEQ ID NO: 115105 - DNA, 13 bp, Artificial Sequence
  Oligonucleotide for detection of SNP TSC0028833
gttgggtggtggt

SEQ ID NO: 115106 - DNA, 13 bp, Artificial Sequence
  Oligonucleotide for detection of SNP TSC0028833
accaccacccaac

SEQ ID NO: 115107 - DNA, 13 bp, Artificial Sequence
  Oligonucleotide for detection of SNP TSC0028833
attattttttagy

SEQ ID NO: 115108 - DNA, 13 bp, Artificial Sequence
  Oligonucleotide for detection of SNP TSC0028833
rctaaaaaataat

SEQ ID NO: 115109 - DNA, 13 bp, Artificial Sequence
  Oligonucleotide for detection of SNP TSC0028833
attattatttagy

SEQ ID NO: 115110 - DNA, 13 bp, Artificial Sequence
  Oligonucleotide for detection of SNP TSC0028833
rctaaataataat

SEQ ID NO: 115111 - DNA, 13 bp, Artificial Sequence
  Oligonucleotide for detection of SNP TSC0028834
tagtggggtagga

SEQ ID NO: 115112 - DNA, 13 bp, Artificial Sequence
  Oligonucleotide for detection of SNP TSC0028834
tcctaccccacta

SEQ ID NO: 115113 - DNA, 13 bp, Artificial Sequence
  Oligonucleotide for detection of SNP TSC0028834
tagtggagtagga

SEQ ID NO: 115114 - DNA, 13 bp, Artificial Sequence
  Oligonucleotide for detection of SNP TSC0028834
tcctactccacta

SEQ ID NO: 115115 - DNA, 13 bp, Artificial Sequence
  Oligonucleotide for detection of SNP TSC0028837
gtttttattttaa

SEQ ID NO: 115116 - DNA, 13 bp, Artificial Sequence
  Oligonucleotide for detection of SNP TSC0028837
ttaaaataaaaac

SEQ ID NO: 115117 - DNA, 13 bp, Artificial Sequence
  Oligonucleotide for detection of SNP TSC0028840
gtttaagttgaag

SEQ ID NO: 115118 - DNA, 13 bp, Artificial Sequence
  Oligonucleotide for detection of SNP TSC0028840
cttcaacttaaac

SEQ ID NO: 115119 - DNA, 13 bp, Artificial Sequence
  Oligonucleotide for detection of SNP TSC0028840
gtttaaattgaag

SEQ ID NO: 115120 - DNA, 13 bp, Artificial Sequence
  Oligonucleotide for detection of SNP TSC0028840
cttcaatttaaac

SEQ ID NO: 115121 - DNA, 13 bp, Artificial Sequence
  Oligonucleotide for detection of SNP TSC0028841
gatggtatttgty

SEQ ID NO: 115122 - DNA, 13 bp, Artificial Sequence
  Oligonucleotide for detection of SNP TSC0028841
racaaataccatc

SEQ ID NO: 115123 - DNA, 13 bp, Artificial Sequence
  Oligonucleotide for detection of SNP TSC0028841
gatggtgtttgty

SEQ ID NO: 115124 - DNA, 13 bp, Artificial Sequence
  Oligonucleotide for detection of SNP TSC0028841
racaaacaccatc

SEQ ID NO: 115125 - DNA, 13 bp, Artificial Sequence
  Oligonucleotide for detection of SNP TSC0028841
gatggcgtttgty

SEQ ID NO: 115126 - DNA, 13 bp, Artificial Sequence
  Oligonucleotide for detection of SNP TSC0028841
racaaacgccatc

SEQ ID NO: 115127 - DNA, 13 bp, Artificial Sequence
  Oligonucleotide for detection of SNP TSC0028841
gataggtgttaty

SEQ ID NO: 115128 - DNA, 13 bp, Artificial Sequence
  Oligonucleotide for detection of SNP TSC0028841
rataacacctatc

SEQ ID NO: 115129 - DNA, 13 bp, Artificial Sequence
  Oligonucleotide for detection of SNP TSC0028841
gataggcgttaty

SEQ ID NO: 115130 - DNA, 13 bp, Artificial Sequence
  Oligonucleotide for detection of SNP TSC0028841
rataacgcctatc

SEQ ID NO: 115131 - DNA, 13 bp, Artificial Sequence
  Oligonucleotide for detection of SNP TSC0028843
tttttggggtgag

SEQ ID NO: 115132 - DNA, 13 bp, Artificial Sequence
  Oligonucleotide for detection of SNP TSC0028843
ctcaccccaaaaa

SEQ ID NO: 115133 - DNA, 13 bp, Artificial Sequence
  Oligonucleotide for detection of SNP TSC0028843
tttattttaaggg

SEQ ID NO: 115134 - DNA, 13 bp, Artificial Sequence
  Oligonucleotide for detection of SNP TSC0028843
cccttaaaataaa

SEQ ID NO: 115135 - DNA, 13 bp, Artificial Sequence
  Oligonucleotide for detection of SNP TSC0028843
tttattataaggg

SEQ ID NO: 115136 - DNA, 13 bp, Artificial Sequence
  Oligonucleotide for detection of SNP TSC0028843
cccttataataaa

SEQ ID NO: 115137 - DNA, 13 bp, Artificial Sequence
  Oligonucleotide for detection of SNP TSC0028844
atgattattttgy

SEQ ID NO: 115138 - DNA, 13 bp, Artificial Sequence
  Oligonucleotide for detection of SNP TSC0028844
rcaaaataatcat

SEQ ID NO: 115139 - DNA, 13 bp, Artificial Sequence
  Oligonucleotide for detection of SNP TSC0028844
atgattgttttgy

SEQ ID NO: 115140 - DNA, 13 bp, Artificial Sequence
  Oligonucleotide for detection of SNP TSC0028844
rcaaaacaatcat

SEQ ID NO: 115141 - DNA, 13 bp, Artificial Sequence
  Oligonucleotide for detection of SNP TSC0028844
atgatcgttttgy

SEQ ID NO: 115142 - DNA, 13 bp, Artificial Sequence
  Oligonucleotide for detection of SNP TSC0028844
rcaaaacgatcat

SEQ ID NO: 115143 - DNA, 13 bp, Artificial Sequence
  Oligonucleotide for detection of SNP TSC0028844
gtaaaatggttat

SEQ ID NO: 115144 - DNA, 13 bp, Artificial Sequence
  Oligonucleotide for detection of SNP TSC0028844
ataaccattttac

SEQ ID NO: 115145 - DNA, 13 bp, Artificial Sequence
  Oligonucleotide for detection of SNP TSC0028844
gtaaaacggttat

SEQ ID NO: 115146 - DNA, 13 bp, Artificial Sequence
  Oligonucleotide for detection of SNP TSC0028844
ataaccgttttac

SEQ ID NO: 115147 - DNA, 13 bp, Artificial Sequence
  Oligonucleotide for detection of SNP TSC0028845
ataaagggaaaag

SEQ ID NO: 115148 - DNA, 13 bp, Artificial Sequence
  Oligonucleotide for detection of SNP TSC0028845
cttttccctttat

SEQ ID NO: 115149 - DNA, 13 bp, Artificial Sequence
  Oligonucleotide for detection of SNP TSC0028845
ataaagagaaaag

SEQ ID NO: 115150 - DNA, 13 bp, Artificial Sequence
  Oligonucleotide for detection of SNP TSC0028845
cttttctctttat

SEQ ID NO: 115151 - DNA, 13 bp, Artificial Sequence
  Oligonucleotide for detection of SNP TSC0028850
ttttttatttggy

SEQ ID NO: 115152 - DNA, 13 bp, Artificial Sequence
  Oligonucleotide for detection of SNP TSC0028850
rccaaataaaaaa

SEQ ID NO: 115153 - DNA, 13 bp, Artificial Sequence
  Oligonucleotide for detection of SNP TSC0028850
ttttttgtttggy

SEQ ID NO: 115154 - DNA, 13 bp, Artificial Sequence
  Oligonucleotide for detection of SNP TSC0028850
rccaaacaaaaaa

SEQ ID NO: 115155 - DNA, 13 bp, Artificial Sequence
  Oligonucleotide for detection of SNP TSC0028851
ggttttaatttta

SEQ ID NO: 115156 - DNA, 13 bp, Artificial Sequence
  Oligonucleotide for detection of SNP TSC0028851
taaaattaaaacc

SEQ ID NO: 115157 - DNA, 13 bp, Artificial Sequence
  Oligonucleotide for detection of SNP TSC0028851
ggttttgatttta

SEQ ID NO: 115158 - DNA, 13 bp, Artificial Sequence
  Oligonucleotide for detection of SNP TSC0028851
taaaatcaaaacc

SEQ ID NO: 115159 - DNA, 13 bp, Artificial Sequence
  Oligonucleotide for detection of SNP TSC0028852
attttaagtttag

SEQ ID NO: 115160 - DNA, 13 bp, Artificial Sequence
  Oligonucleotide for detection of SNP TSC0028852
ctaaacttaaaat

SEQ ID NO: 115161 - DNA, 13 bp, Artificial Sequence
  Oligonucleotide for detection of SNP TSC0028852
attttaggtttag

SEQ ID NO: 115162 - DNA, 13 bp, Artificial Sequence
  Oligonucleotide for detection of SNP TSC0028852
ctaaacctaaaat

SEQ ID NO: 115163 - DNA, 13 bp, Artificial Sequence
  Oligonucleotide for detection of SNP TSC0028855
tgaatttgggtgg

SEQ ID NO: 115164 - DNA, 13 bp, Artificial Sequence
  Oligonucleotide for detection of SNP TSC0028855
ccacccaaattca

SEQ ID NO: 115165 - DNA, 13 bp, Artificial Sequence
  Oligonucleotide for detection of SNP TSC0028855
tgaattcgggtgg

SEQ ID NO: 115166 - DNA, 13 bp, Artificial Sequence
  Oligonucleotide for detection of SNP TSC0028855
ccacccgaattca

SEQ ID NO: 115167 - DNA, 13 bp, Artificial Sequence
  Oligonucleotide for detection of SNP TSC0028856
ttttatattggty

SEQ ID NO: 115168 - DNA, 13 bp, Artificial Sequence
  Oligonucleotide for detection of SNP TSC0028856
raccaatataaaa

SEQ ID NO: 115169 - DNA, 13 bp, Artificial Sequence
  Oligonucleotide for detection of SNP TSC0028856
ttttatgttggty

SEQ ID NO: 115170 - DNA, 13 bp, Artificial Sequence
  Oligonucleotide for detection of SNP TSC0028856
raccaacataaaa

SEQ ID NO: 115171 - DNA, 13 bp, Artificial Sequence
  Oligonucleotide for detection of SNP TSC0028857
taaattattggga

SEQ ID NO: 115172 - DNA, 13 bp, Artificial Sequence
  Oligonucleotide for detection of SNP TSC0028857
tcccaataattta

SEQ ID NO: 115173 - DNA, 13 bp, Artificial Sequence
  Oligonucleotide for detection of SNP TSC0028857
taaattgttggga

SEQ ID NO: 115174 - DNA, 13 bp, Artificial Sequence
  Oligonucleotide for detection of SNP TSC0028857
tcccaacaattta

SEQ ID NO: 115175 - DNA, 13 bp, Artificial Sequence
  Oligonucleotide for detection of SNP TSC0028862
gttggtagaagtt

SEQ ID NO: 115176 - DNA, 13 bp, Artificial Sequence
  Oligonucleotide for detection of SNP TSC0028862
aacttctaccaac

SEQ ID NO: 115177 - DNA, 13 bp, Artificial Sequence
  Oligonucleotide for detection of SNP TSC0028862
gttggtggaagtt

SEQ ID NO: 115178 - DNA, 13 bp, Artificial Sequence
  Oligonucleotide for detection of SNP TSC0028862
aacttccaccaac

SEQ ID NO: 115179 - DNA, 13 bp, Artificial Sequence
  Oligonucleotide for detection of SNP TSC0028875
aagtttataggag

SEQ ID NO: 115180 - DNA, 13 bp, Artificial Sequence
  Oligonucleotide for detection of SNP TSC0028875
ctcctataaactt

SEQ ID NO: 115181 - DNA, 13 bp, Artificial Sequence
  Oligonucleotide for detection of SNP TSC0028875
aagtttgtaggag

SEQ ID NO: 115182 - DNA, 13 bp, Artificial Sequence
  Oligonucleotide for detection of SNP TSC0028875
ctcctacaaactt

SEQ ID NO: 115183 - DNA, 13 bp, Artificial Sequence
  Oligonucleotide for detection of SNP TSC0028875
aagttcgtaggag

SEQ ID NO: 115184 - DNA, 13 bp, Artificial Sequence
  Oligonucleotide for detection of SNP TSC0028875
ctcctacgaactt

SEQ ID NO: 115185 - DNA, 13 bp, Artificial Sequence
  Oligonucleotide for detection of SNP TSC0028875
tttttatggattt

SEQ ID NO: 115186 - DNA, 13 bp, Artificial Sequence
  Oligonucleotide for detection of SNP TSC0028875
aaatccataaaaa

SEQ ID NO: 115187 - DNA, 13 bp, Artificial Sequence
  Oligonucleotide for detection of SNP TSC0028875
tttttacggattt

SEQ ID NO: 115188 - DNA, 13 bp, Artificial Sequence
  Oligonucleotide for detection of SNP TSC0028875
aaatccgtaaaaa

SEQ ID NO: 115189 - DNA, 13 bp, Artificial Sequence
  Oligonucleotide for detection of SNP TSC0028876
aggggttggttty

SEQ ID NO: 115190 - DNA, 13 bp, Artificial Sequence
  Oligonucleotide for detection of SNP TSC0028876
raaaccaacccct

SEQ ID NO: 115191 - DNA, 13 bp, Artificial Sequence
  Oligonucleotide for detection of SNP TSC0028876
aggggtcggttty

SEQ ID NO: 115192 - DNA, 13 bp, Artificial Sequence
  Oligonucleotide for detection of SNP TSC0028876
raaaccgacccct

SEQ ID NO: 115193 - DNA, 13 bp, Artificial Sequence
  Oligonucleotide for detection of SNP TSC0028876
gaggttgattttt

SEQ ID NO: 115194 - DNA, 13 bp, Artificial Sequence
  Oligonucleotide for detection of SNP TSC0028876
aaaaatcaacctc

SEQ ID NO: 115195 - DNA, 13 bp, Artificial Sequence
  Oligonucleotide for detection of SNP TSC0028876
gaggttaattttt

SEQ ID NO: 115196 - DNA, 13 bp, Artificial Sequence
  Oligonucleotide for detection of SNP TSC0028876
aaaaattaacctc

SEQ ID NO: 115197 - DNA, 13 bp, Artificial Sequence
  Oligonucleotide for detection of SNP TSC0028876
gaggtcgattttt

SEQ ID NO: 115198 - DNA, 13 bp, Artificial Sequence
  Oligonucleotide for detection of SNP TSC0028876
aaaaatcgacctc

SEQ ID NO: 115199 - DNA, 13 bp, Artificial Sequence
  Oligonucleotide for detection of SNP TSC0028877
gattggtttttaa

SEQ ID NO: 115200 - DNA, 13 bp, Artificial Sequence
  Oligonucleotide for detection of SNP TSC0028877
ttaaaaaccaatc

SEQ ID NO: 115201 - DNA, 13 bp, Artificial Sequence
  Oligonucleotide for detection of SNP TSC0028877
gattgggttttaa

SEQ ID NO: 115202 - DNA, 13 bp, Artificial Sequence
  Oligonucleotide for detection of SNP TSC0028877
ttaaaacccaatc

SEQ ID NO: 115203 - DNA, 13 bp, Artificial Sequence
  Oligonucleotide for detection of SNP TSC0028877
ttgggagttagty

SEQ ID NO: 115204 - DNA, 13 bp, Artificial Sequence
  Oligonucleotide for detection of SNP TSC0028877
ractaactcccaa

SEQ ID NO: 115205 - DNA, 13 bp, Artificial Sequence
  Oligonucleotide for detection of SNP TSC0028877
ttgggatttagty

SEQ ID NO: 115206 - DNA, 13 bp, Artificial Sequence
  Oligonucleotide for detection of SNP TSC0028877
ractaaatcccaa

SEQ ID NO: 115207 - DNA, 13 bp, Artificial Sequence
  Oligonucleotide for detection of SNP TSC0028878
ttaagtggggagy

SEQ ID NO: 115208 - DNA, 13 bp, Artificial Sequence
  Oligonucleotide for detection of SNP TSC0028878
rctccccacttaa

SEQ ID NO: 115209 - DNA, 13 bp, Artificial Sequence
  Oligonucleotide for detection of SNP TSC0028878
ttaagttgggagy

SEQ ID NO: 115210 - DNA, 13 bp, Artificial Sequence
  Oligonucleotide for detection of SNP TSC0028878
rctcccaacttaa

SEQ ID NO: 115211 - DNA, 13 bp, Artificial Sequence
  Oligonucleotide for detection of SNP TSC0028878
gttttttatttgg

SEQ ID NO: 115212 - DNA, 13 bp, Artificial Sequence
  Oligonucleotide for detection of SNP TSC0028878
ccaaataaaaaac

SEQ ID NO: 115213 - DNA, 13 bp, Artificial Sequence
  Oligonucleotide for detection of SNP TSC0028878
gtttttaatttgg

SEQ ID NO: 115214 - DNA, 13 bp, Artificial Sequence
  Oligonucleotide for detection of SNP TSC0028878
ccaaattaaaaac

SEQ ID NO: 115215 - DNA, 13 bp, Artificial Sequence
  Oligonucleotide for detection of SNP TSC0028882
tgaaaaatatttt

SEQ ID NO: 115216 - DNA, 13 bp, Artificial Sequence
  Oligonucleotide for detection of SNP TSC0028882
aaaatatttttca

SEQ ID NO: 115217 - DNA, 13 bp, Artificial Sequence
  Oligonucleotide for detection of SNP TSC0028882
tgaaaattatttt

SEQ ID NO: 115218 - DNA, 13 bp, Artificial Sequence
  Oligonucleotide for detection of SNP TSC0028882
aaaataattttca

SEQ ID NO: 115219 - DNA, 13 bp, Artificial Sequence
  Oligonucleotide for detection of SNP TSC0028882
agagtgtttttta

SEQ ID NO: 115220 - DNA, 13 bp, Artificial Sequence
  Oligonucleotide for detection of SNP TSC0028882
taaaaaacactct

SEQ ID NO: 115221 - DNA, 13 bp, Artificial Sequence
  Oligonucleotide for detection of SNP TSC0028882
agagtgattttta

SEQ ID NO: 115222 - DNA, 13 bp, Artificial Sequence
  Oligonucleotide for detection of SNP TSC0028882
taaaaatcactct

SEQ ID NO: 115223 - DNA, 13 bp, Artificial Sequence
  Oligonucleotide for detection of SNP TSC0028887
ggtaattgatttt

SEQ ID NO: 115224 - DNA, 13 bp, Artificial Sequence
  Oligonucleotide for detection of SNP TSC0028887
aaaatcaattacc

SEQ ID NO: 115225 - DNA, 13 bp, Artificial Sequence
  Oligonucleotide for detection of SNP TSC0028887
ggtaatcgatttt

SEQ ID NO: 115226 - DNA, 13 bp, Artificial Sequence
  Oligonucleotide for detection of SNP TSC0028887
aaaatcgattacc

SEQ ID NO: 115227 - DNA, 13 bp, Artificial Sequence
  Oligonucleotide for detection of SNP TSC0028887
agaattggttgty

SEQ ID NO: 115228 - DNA, 13 bp, Artificial Sequence
  Oligonucleotide for detection of SNP TSC0028887
racaaccaattct

SEQ ID NO: 115229 - DNA, 13 bp, Artificial Sequence
  Oligonucleotide for detection of SNP TSC0028887
agaattagttgty

SEQ ID NO: 115230 - DNA, 13 bp, Artificial Sequence
  Oligonucleotide for detection of SNP TSC0028887
racaactaattct

SEQ ID NO: 115231 - DNA, 13 bp, Artificial Sequence
  Oligonucleotide for detection of SNP TSC0028887
agaatcggttgty

SEQ ID NO: 115232 - DNA, 13 bp, Artificial Sequence
  Oligonucleotide for detection of SNP TSC0028887
racaaccgattct

SEQ ID NO: 115233 - DNA, 13 bp, Artificial Sequence
  Oligonucleotide for detection of SNP TSC0028888
ataatttgagtgy

SEQ ID NO: 115234 - DNA, 13 bp, Artificial Sequence
  Oligonucleotide for detection of SNP TSC0028888
rcactcaaattat

SEQ ID NO: 115235 - DNA, 13 bp, Artificial Sequence
  Oligonucleotide for detection of SNP TSC0028888
ataattcgagtgy

SEQ ID NO: 115236 - DNA, 13 bp, Artificial Sequence
  Oligonucleotide for detection of SNP TSC0028888
rcactcgaattat

SEQ ID NO: 115237 - DNA, 13 bp, Artificial Sequence
  Oligonucleotide for detection of SNP TSC0028888
gtatttgggttat

SEQ ID NO: 115238 - DNA, 13 bp, Artificial Sequence
  Oligonucleotide for detection of SNP TSC0028888
ataacccaaatac

SEQ ID NO: 115239 - DNA, 13 bp, Artificial Sequence
  Oligonucleotide for detection of SNP TSC0028888
gtatttaggttat

SEQ ID NO: 115240 - DNA, 13 bp, Artificial Sequence
  Oligonucleotide for detection of SNP TSC0028888
ataacctaaatac

SEQ ID NO: 115241 - DNA, 13 bp, Artificial Sequence
  Oligonucleotide for detection of SNP TSC0028888
gtattcgggttat

SEQ ID NO: 115242 - DNA, 13 bp, Artificial Sequence
  Oligonucleotide for detection of SNP TSC0028888
ataacccgaatac

SEQ ID NO: 115243 - DNA, 13 bp, Artificial Sequence
  Oligonucleotide for detection of SNP TSC0028892
tatgaggatttgt

SEQ ID NO: 115244 - DNA, 13 bp, Artificial Sequence
  Oligonucleotide for detection of SNP TSC0028892
acaaatcctcata

SEQ ID NO: 115245 - DNA, 13 bp, Artificial Sequence
  Oligonucleotide for detection of SNP TSC0028892
tatgagaatttgt

SEQ ID NO: 115246 - DNA, 13 bp, Artificial Sequence
  Oligonucleotide for detection of SNP TSC0028892
acaaattctcata

SEQ ID NO: 115247 - DNA, 13 bp, Artificial Sequence
  Oligonucleotide for detection of SNP TSC0028893
tagtaaaaattta

SEQ ID NO: 115248 - DNA, 13 bp, Artificial Sequence
  Oligonucleotide for detection of SNP TSC0028893
taaatttttacta

SEQ ID NO: 115249 - DNA, 13 bp, Artificial Sequence
  Oligonucleotide for detection of SNP TSC0028898
gttagagatagty

SEQ ID NO: 115250 - DNA, 13 bp, Artificial Sequence
  Oligonucleotide for detection of SNP TSC0028898
ractatctctaac

SEQ ID NO: 115251 - DNA, 13 bp, Artificial Sequence
  Oligonucleotide for detection of SNP TSC0028898
gttagaaatagty

SEQ ID NO: 115252 - DNA, 13 bp, Artificial Sequence
  Oligonucleotide for detection of SNP TSC0028898
ractatttctaac

SEQ ID NO: 115253 - DNA, 13 bp, Artificial Sequence
  Oligonucleotide for detection of SNP TSC0028899
ttttggtgggggg

SEQ ID NO: 115254 - DNA, 13 bp, Artificial Sequence
  Oligonucleotide for detection of SNP TSC0028899
ccccccaccaaaa

SEQ ID NO: 115255 - DNA, 13 bp, Artificial Sequence
  Oligonucleotide for detection of SNP TSC0028899
ttttggggggggg

SEQ ID NO: 115256 - DNA, 13 bp, Artificial Sequence
  Oligonucleotide for detection of SNP TSC0028899
cccccccccaaaa

SEQ ID NO: 115257 - DNA, 13 bp, Artificial Sequence
  Oligonucleotide for detection of SNP TSC0028899
ttttggcgggggg

SEQ ID NO: 115258 - DNA, 13 bp, Artificial Sequence
  Oligonucleotide for detection of SNP TSC0028899
ccccccgccaaaa

SEQ ID NO: 115259 - DNA, 13 bp, Artificial Sequence
  Oligonucleotide for detection of SNP TSC0028899
ttttttgttaaag

SEQ ID NO: 115260 - DNA, 13 bp, Artificial Sequence
  Oligonucleotide for detection of SNP TSC0028899
ctttaacaaaaaa

SEQ ID NO: 115261 - DNA, 13 bp, Artificial Sequence
  Oligonucleotide for detection of SNP TSC0028899
tttttttttaaag

SEQ ID NO: 115262 - DNA, 13 bp, Artificial Sequence
  Oligonucleotide for detection of SNP TSC0028899
ctttaaaaaaaaa

SEQ ID NO: 115263 - DNA, 13 bp, Artificial Sequence
  Oligonucleotide for detection of SNP TSC0028899
tttttcgttaaag

SEQ ID NO: 115264 - DNA, 13 bp, Artificial Sequence
  Oligonucleotide for detection of SNP TSC0028899
ctttaacgaaaaa

SEQ ID NO: 115265 - DNA, 13 bp, Artificial Sequence
  Oligonucleotide for detection of SNP TSC0028900
ttttttatgtatg

SEQ ID NO: 115266 - DNA, 13 bp, Artificial Sequence
  Oligonucleotide for detection of SNP TSC0028900
catacataaaaaa

SEQ ID NO: 115267 - DNA, 13 bp, Artificial Sequence
  Oligonucleotide for detection of SNP TSC0028900
ttttttgtgtatg

SEQ ID NO: 115268 - DNA, 13 bp, Artificial Sequence
  Oligonucleotide for detection of SNP TSC0028900
catacacaaaaaa

SEQ ID NO: 115269 - DNA, 13 bp, Artificial Sequence
  Oligonucleotide for detection of SNP TSC0028902
gaaaggtaatggt

SEQ ID NO: 115270 - DNA, 13 bp, Artificial Sequence
  Oligonucleotide for detection of SNP TSC0028902
accattacctttc

SEQ ID NO: 115271 - DNA, 13 bp, Artificial Sequence
  Oligonucleotide for detection of SNP TSC0028902
gaaagggaatggt

SEQ ID NO: 115272 - DNA, 13 bp, Artificial Sequence
  Oligonucleotide for detection of SNP TSC0028902
accattccctttc

SEQ ID NO: 115273 - DNA, 13 bp, Artificial Sequence
  Oligonucleotide for detection of SNP TSC0028902
attatttttttty

SEQ ID NO: 115274 - DNA, 13 bp, Artificial Sequence
  Oligonucleotide for detection of SNP TSC0028902
raaaaaaaataat

SEQ ID NO: 115275 - DNA, 13 bp, Artificial Sequence
  Oligonucleotide for detection of SNP TSC0028904
ttaggtatgagty

SEQ ID NO: 115276 - DNA, 13 bp, Artificial Sequence
  Oligonucleotide for detection of SNP TSC0028904
ractcatacctaa

SEQ ID NO: 115277 - DNA, 13 bp, Artificial Sequence
  Oligonucleotide for detection of SNP TSC0028904
ttaggtgtgagty

SEQ ID NO: 115278 - DNA, 13 bp, Artificial Sequence
  Oligonucleotide for detection of SNP TSC0028904
ractcacacctaa

SEQ ID NO: 115279 - DNA, 13 bp, Artificial Sequence
  Oligonucleotide for detection of SNP TSC0028904
ttaggcgtgagty

SEQ ID NO: 115280 - DNA, 13 bp, Artificial Sequence
  Oligonucleotide for detection of SNP TSC0028904
ractcacgcctaa

SEQ ID NO: 115281 - DNA, 13 bp, Artificial Sequence
  Oligonucleotide for detection of SNP TSC0028904
ggtttatgtttga

SEQ ID NO: 115282 - DNA, 13 bp, Artificial Sequence
  Oligonucleotide for detection of SNP TSC0028904
tcaaacataaacc

SEQ ID NO: 115283 - DNA, 13 bp, Artificial Sequence
  Oligonucleotide for detection of SNP TSC0028904
ggtttacgtttga

SEQ ID NO: 115284 - DNA, 13 bp, Artificial Sequence
  Oligonucleotide for detection of SNP TSC0028904
tcaaacgtaaacc

SEQ ID NO: 115285 - DNA, 13 bp, Artificial Sequence
  Oligonucleotide for detection of SNP TSC0028909
gttttggggttat

SEQ ID NO: 115286 - DNA, 13 bp, Artificial Sequence
  Oligonucleotide for detection of SNP TSC0028909
ataaccccaaaac

SEQ ID NO: 115287 - DNA, 13 bp, Artificial Sequence
  Oligonucleotide for detection of SNP TSC0028909
gttttgtggttat

SEQ ID NO: 115288 - DNA, 13 bp, Artificial Sequence
  Oligonucleotide for detection of SNP TSC0028909
ataaccacaaaac

SEQ ID NO: 115289 - DNA, 13 bp, Artificial Sequence
  Oligonucleotide for detection of SNP TSC0028909
atggttttagaay

SEQ ID NO: 115290 - DNA, 13 bp, Artificial Sequence
  Oligonucleotide for detection of SNP TSC0028909
rttctaaaaccat

SEQ ID NO: 115291 - DNA, 13 bp, Artificial Sequence
  Oligonucleotide for detection of SNP TSC0028909
atggttatagaay

SEQ ID NO: 115292 - DNA, 13 bp, Artificial Sequence
  Oligonucleotide for detection of SNP TSC0028909
rttctataaccat

SEQ ID NO: 115293 - DNA, 13 bp, Artificial Sequence
  Oligonucleotide for detection of SNP TSC0028910
gttaggggggtgg

SEQ ID NO: 115294 - DNA, 13 bp, Artificial Sequence
  Oligonucleotide for detection of SNP TSC0028910
ccacccccctaac

SEQ ID NO: 115295 - DNA, 13 bp, Artificial Sequence
  Oligonucleotide for detection of SNP TSC0028910
gttaggtgggtgg

SEQ ID NO: 115296 - DNA, 13 bp, Artificial Sequence
  Oligonucleotide for detection of SNP TSC0028910
ccacccacctaac

SEQ ID NO: 115297 - DNA, 13 bp, Artificial Sequence
  Oligonucleotide for detection of SNP TSC0028910
ttatttttttggy

SEQ ID NO: 115298 - DNA, 13 bp, Artificial Sequence
  Oligonucleotide for detection of SNP TSC0028910
rccaaaaaaataa

SEQ ID NO: 115299 - DNA, 13 bp, Artificial Sequence
  Oligonucleotide for detection of SNP TSC0028910
ttatttatttggy

SEQ ID NO: 115300 - DNA, 13 bp, Artificial Sequence
  Oligonucleotide for detection of SNP TSC0028910
rccaaataaataa

SEQ ID NO: 115301 - DNA, 13 bp, Artificial Sequence
  Oligonucleotide for detection of SNP TSC0028911
gggggtggggtat

SEQ ID NO: 115302 - DNA, 13 bp, Artificial Sequence
  Oligonucleotide for detection of SNP TSC0028911
ataccccaccccc

SEQ ID NO: 115303 - DNA, 13 bp, Artificial Sequence
  Oligonucleotide for detection of SNP TSC0028911
gggggttgggtat

SEQ ID NO: 115304 - DNA, 13 bp, Artificial Sequence
  Oligonucleotide for detection of SNP TSC0028911
atacccaaccccc

SEQ ID NO: 115305 - DNA, 13 bp, Artificial Sequence
  Oligonucleotide for detection of SNP TSC0028911
atgttttatttty

SEQ ID NO: 115306 - DNA, 13 bp, Artificial Sequence
  Oligonucleotide for detection of SNP TSC0028911
raaaataaaacat

SEQ ID NO: 115307 - DNA, 13 bp, Artificial Sequence
  Oligonucleotide for detection of SNP TSC0028911
atgtttaatttty

SEQ ID NO: 115308 - DNA, 13 bp, Artificial Sequence
  Oligonucleotide for detection of SNP TSC0028911
raaaattaaacat

SEQ ID NO: 115309 - DNA, 13 bp, Artificial Sequence
  Oligonucleotide for detection of SNP TSC0028912
taattagtgttta

SEQ ID NO: 115310 - DNA, 13 bp, Artificial Sequence
  Oligonucleotide for detection of SNP TSC0028912
taaacactaatta

SEQ ID NO: 115311 - DNA, 13 bp, Artificial Sequence
  Oligonucleotide for detection of SNP TSC0028912
taattaatgttta

SEQ ID NO: 115312 - DNA, 13 bp, Artificial Sequence
  Oligonucleotide for detection of SNP TSC0028912
taaacattaatta

SEQ ID NO: 115313 - DNA, 13 bp, Artificial Sequence
  Oligonucleotide for detection of SNP TSC0028915
ggtgggatgatay

SEQ ID NO: 115314 - DNA, 13 bp, Artificial Sequence
  Oligonucleotide for detection of SNP TSC0028915
rtatcatcccacc

SEQ ID NO: 115315 - DNA, 13 bp, Artificial Sequence
  Oligonucleotide for detection of SNP TSC0028915
ggtgggttgatay

SEQ ID NO: 115316 - DNA, 13 bp, Artificial Sequence
  Oligonucleotide for detection of SNP TSC0028915
rtatcaacccacc

SEQ ID NO: 115317 - DNA, 13 bp, Artificial Sequence
  Oligonucleotide for detection of SNP TSC0028915
gtgttattttaty

SEQ ID NO: 115318 - DNA, 13 bp, Artificial Sequence
  Oligonucleotide for detection of SNP TSC0028915
rataaaataacac

SEQ ID NO: 115319 - DNA, 13 bp, Artificial Sequence
  Oligonucleotide for detection of SNP TSC0028915
gtgttagtttaty

SEQ ID NO: 115320 - DNA, 13 bp, Artificial Sequence
  Oligonucleotide for detection of SNP TSC0028915
rataaactaacac

SEQ ID NO: 115321 - DNA, 13 bp, Artificial Sequence
  Oligonucleotide for detection of SNP TSC0028916
tttagtaaattaa

SEQ ID NO: 115322 - DNA, 13 bp, Artificial Sequence
  Oligonucleotide for detection of SNP TSC0028916
ttaatttactaaa

SEQ ID NO: 115323 - DNA, 13 bp, Artificial Sequence
  Oligonucleotide for detection of SNP TSC0028916
tttagtgaattaa

SEQ ID NO: 115324 - DNA, 13 bp, Artificial Sequence
  Oligonucleotide for detection of SNP TSC0028916
ttaattcactaaa

SEQ ID NO: 115325 - DNA, 13 bp, Artificial Sequence
  Oligonucleotide for detection of SNP TSC0028917
ttatgaagtaaag

SEQ ID NO: 115326 - DNA, 13 bp, Artificial Sequence
  Oligonucleotide for detection of SNP TSC0028917
ctttacttcataa

SEQ ID NO: 115327 - DNA, 13 bp, Artificial Sequence
  Oligonucleotide for detection of SNP TSC0028917
ttatgaggtaaag

SEQ ID NO: 115328 - DNA, 13 bp, Artificial Sequence
  Oligonucleotide for detection of SNP TSC0028917
ctttacctcataa

SEQ ID NO: 115329 - DNA, 13 bp, Artificial Sequence
  Oligonucleotide for detection of SNP TSC0028918
ttttttaattgag

SEQ ID NO: 115330 - DNA, 13 bp, Artificial Sequence
  Oligonucleotide for detection of SNP TSC0028918
ctcaattaaaaaa

SEQ ID NO: 115331 - DNA, 13 bp, Artificial Sequence
  Oligonucleotide for detection of SNP TSC0028918
ttttttgattgag

SEQ ID NO: 115332 - DNA, 13 bp, Artificial Sequence
  Oligonucleotide for detection of SNP TSC0028918
ctcaatcaaaaaa

SEQ ID NO: 115333 - DNA, 13 bp, Artificial Sequence
  Oligonucleotide for detection of SNP TSC0028918
tttttcgattgag

SEQ ID NO: 115334 - DNA, 13 bp, Artificial Sequence
  Oligonucleotide for detection of SNP TSC0028918
ctcaatcgaaaaa

SEQ ID NO: 115335 - DNA, 13 bp, Artificial Sequence
  Oligonucleotide for detection of SNP TSC0028918
tttagttgaaagg

SEQ ID NO: 115336 - DNA, 13 bp, Artificial Sequence
  Oligonucleotide for detection of SNP TSC0028918
cctttcaactaaa

SEQ ID NO: 115337 - DNA, 13 bp, Artificial Sequence
  Oligonucleotide for detection of SNP TSC0028918
tttagtcgaaagg

SEQ ID NO: 115338 - DNA, 13 bp, Artificial Sequence
  Oligonucleotide for detection of SNP TSC0028918
cctttcgactaaa

SEQ ID NO: 115339 - DNA, 13 bp, Artificial Sequence
  Oligonucleotide for detection of SNP TSC0028920
ttagtaatgtggy

SEQ ID NO: 115340 - DNA, 13 bp, Artificial Sequence
  Oligonucleotide for detection of SNP TSC0028920
rccacattactaa

SEQ ID NO: 115341 - DNA, 13 bp, Artificial Sequence
  Oligonucleotide for detection of SNP TSC0028920
ttagtagtgtggy

SEQ ID NO: 115342 - DNA, 13 bp, Artificial Sequence
  Oligonucleotide for detection of SNP TSC0028920
rccacactactaa

SEQ ID NO: 115343 - DNA, 13 bp, Artificial Sequence
  Oligonucleotide for detection of SNP TSC0028920
ttagtaacgtggy

SEQ ID NO: 115344 - DNA, 13 bp, Artificial Sequence
  Oligonucleotide for detection of SNP TSC0028920
rccacgttactaa

SEQ ID NO: 115345 - DNA, 13 bp, Artificial Sequence
  Oligonucleotide for detection of SNP TSC0028920
ttagtagcgtggy

SEQ ID NO: 115346 - DNA, 13 bp, Artificial Sequence
  Oligonucleotide for detection of SNP TSC0028920
rccacgctactaa

SEQ ID NO: 115347 - DNA, 13 bp, Artificial Sequence
  Oligonucleotide for detection of SNP TSC0028921
taatattggttga

SEQ ID NO: 115348 - DNA, 13 bp, Artificial Sequence
  Oligonucleotide for detection of SNP TSC0028921
tcaaccaatatta

SEQ ID NO: 115349 - DNA, 13 bp, Artificial Sequence
  Oligonucleotide for detection of SNP TSC0028921
taatatgggttga

SEQ ID NO: 115350 - DNA, 13 bp, Artificial Sequence
  Oligonucleotide for detection of SNP TSC0028921
tcaacccatatta

SEQ ID NO: 115351 - DNA, 13 bp, Artificial Sequence
  Oligonucleotide for detection of SNP TSC0028921
taatatcggttga

SEQ ID NO: 115352 - DNA, 13 bp, Artificial Sequence
  Oligonucleotide for detection of SNP TSC0028921
tcaaccgatatta

SEQ ID NO: 115353 - DNA, 13 bp, Artificial Sequence
  Oligonucleotide for detection of SNP TSC0028921
taatatgggtcga

SEQ ID NO: 115354 - DNA, 13 bp, Artificial Sequence
  Oligonucleotide for detection of SNP TSC0028921
tcgacccatatta

SEQ ID NO: 115355 - DNA, 13 bp, Artificial Sequence
  Oligonucleotide for detection of SNP TSC0028921
taatattggtcga

SEQ ID NO: 115356 - DNA, 13 bp, Artificial Sequence
  Oligonucleotide for detection of SNP TSC0028921
tcgaccaatatta

SEQ ID NO: 115357 - DNA, 13 bp, Artificial Sequence
  Oligonucleotide for detection of SNP TSC0028921
taatatcggtcga

SEQ ID NO: 115358 - DNA, 13 bp, Artificial Sequence
  Oligonucleotide for detection of SNP TSC0028921
tcgaccgatatta

SEQ ID NO: 115359 - DNA, 13 bp, Artificial Sequence
  Oligonucleotide for detection of SNP TSC0028921
ttgattgatatta

SEQ ID NO: 115360 - DNA, 13 bp, Artificial Sequence
  Oligonucleotide for detection of SNP TSC0028921
taatatcaatcaa

SEQ ID NO: 115361 - DNA, 13 bp, Artificial Sequence
  Oligonucleotide for detection of SNP TSC0028921
ttgatttatatta

SEQ ID NO: 115362 - DNA, 13 bp, Artificial Sequence
  Oligonucleotide for detection of SNP TSC0028921
taatataaatcaa

SEQ ID NO: 115363 - DNA, 13 bp, Artificial Sequence
  Oligonucleotide for detection of SNP TSC0028921
tcgattgatatta

SEQ ID NO: 115364 - DNA, 13 bp, Artificial Sequence
  Oligonucleotide for detection of SNP TSC0028921
taatatcaatcga

SEQ ID NO: 115365 - DNA, 13 bp, Artificial Sequence
  Oligonucleotide for detection of SNP TSC0028921
tcgatttatatta

SEQ ID NO: 115366 - DNA, 13 bp, Artificial Sequence
  Oligonucleotide for detection of SNP TSC0028921
taatataaatcga

SEQ ID NO: 115367 - DNA, 13 bp, Artificial Sequence
  Oligonucleotide for detection of SNP TSC0028921
ttgatcgatatta

SEQ ID NO: 115368 - DNA, 13 bp, Artificial Sequence
  Oligonucleotide for detection of SNP TSC0028921
taatatcgatcaa

SEQ ID NO: 115369 - DNA, 13 bp, Artificial Sequence
  Oligonucleotide for detection of SNP TSC0028921
tcgatcgatatta

SEQ ID NO: 115370 - DNA, 13 bp, Artificial Sequence
  Oligonucleotide for detection of SNP TSC0028921
taatatcgatcga

SEQ ID NO: 115371 - DNA, 13 bp, Artificial Sequence
  Oligonucleotide for detection of SNP TSC0028922
gttattagtataa

SEQ ID NO: 115372 - DNA, 13 bp, Artificial Sequence
  Oligonucleotide for detection of SNP TSC0028922
ttatactaataac

SEQ ID NO: 115373 - DNA, 13 bp, Artificial Sequence
  Oligonucleotide for detection of SNP TSC0028922
gttattggtataa

SEQ ID NO: 115374 - DNA, 13 bp, Artificial Sequence
  Oligonucleotide for detection of SNP TSC0028922
ttataccaataac

SEQ ID NO: 115375 - DNA, 13 bp, Artificial Sequence
  Oligonucleotide for detection of SNP TSC0028922
gttatcggtataa

SEQ ID NO: 115376 - DNA, 13 bp, Artificial Sequence
  Oligonucleotide for detection of SNP TSC0028922
ttataccgataac

SEQ ID NO: 115377 - DNA, 13 bp, Artificial Sequence
  Oligonucleotide for detection of SNP TSC0028922
ttatattggtgay

SEQ ID NO: 115378 - DNA, 13 bp, Artificial Sequence
  Oligonucleotide for detection of SNP TSC0028922
rtcaccaatataa

SEQ ID NO: 115379 - DNA, 13 bp, Artificial Sequence
  Oligonucleotide for detection of SNP TSC0028922
ttatatcggtgay

SEQ ID NO: 115380 - DNA, 13 bp, Artificial Sequence
  Oligonucleotide for detection of SNP TSC0028922
rtcaccgatataa

SEQ ID NO: 115381 - DNA, 13 bp, Artificial Sequence
  Oligonucleotide for detection of SNP TSC0028923
ttggtatgattag

SEQ ID NO: 115382 - DNA, 13 bp, Artificial Sequence
  Oligonucleotide for detection of SNP TSC0028923
ctaatcataccaa

SEQ ID NO: 115383 - DNA, 13 bp, Artificial Sequence
  Oligonucleotide for detection of SNP TSC0028923
ttggtacgattag

SEQ ID NO: 115384 - DNA, 13 bp, Artificial Sequence
  Oligonucleotide for detection of SNP TSC0028923
ctaatcgtaccaa

SEQ ID NO: 115385 - DNA, 13 bp, Artificial Sequence
  Oligonucleotide for detection of SNP TSC0028923
ttagttgtattaa

SEQ ID NO: 115386 - DNA, 13 bp, Artificial Sequence
  Oligonucleotide for detection of SNP TSC0028923
ttaatacaactaa

SEQ ID NO: 115387 - DNA, 13 bp, Artificial Sequence
  Oligonucleotide for detection of SNP TSC0028923
ttagttatattaa

SEQ ID NO: 115388 - DNA, 13 bp, Artificial Sequence
  Oligonucleotide for detection of SNP TSC0028923
ttaatataactaa

SEQ ID NO: 115389 - DNA, 13 bp, Artificial Sequence
  Oligonucleotide for detection of SNP TSC0028923
ttagtcgtattaa

SEQ ID NO: 115390 - DNA, 13 bp, Artificial Sequence
  Oligonucleotide for detection of SNP TSC0028923
ttaatacgactaa

SEQ ID NO: 115391 - DNA, 13 bp, Artificial Sequence
  Oligonucleotide for detection of SNP TSC0028924
ttttttatatgag

SEQ ID NO: 115392 - DNA, 13 bp, Artificial Sequence
  Oligonucleotide for detection of SNP TSC0028924
ctcatataaaaaa

SEQ ID NO: 115393 - DNA, 13 bp, Artificial Sequence
  Oligonucleotide for detection of SNP TSC0028924
ttttttgtatgag

SEQ ID NO: 115394 - DNA, 13 bp, Artificial Sequence
  Oligonucleotide for detection of SNP TSC0028924
ctcatacaaaaaa

SEQ ID NO: 115395 - DNA, 13 bp, Artificial Sequence
  Oligonucleotide for detection of SNP TSC0028924
ttttttatacgag

SEQ ID NO: 115396 - DNA, 13 bp, Artificial Sequence
  Oligonucleotide for detection of SNP TSC0028924
ctcgtataaaaaa

SEQ ID NO: 115397 - DNA, 13 bp, Artificial Sequence
  Oligonucleotide for detection of SNP TSC0028924
tttttcgtatgag

SEQ ID NO: 115398 - DNA, 13 bp, Artificial Sequence
  Oligonucleotide for detection of SNP TSC0028924
ctcatacgaaaaa

SEQ ID NO: 115399 - DNA, 13 bp, Artificial Sequence
  Oligonucleotide for detection of SNP TSC0028924
ttttttgtacgag

SEQ ID NO: 115400 - DNA, 13 bp, Artificial Sequence
  Oligonucleotide for detection of SNP TSC0028924
ctcgtacaaaaaa

SEQ ID NO: 115401 - DNA, 13 bp, Artificial Sequence
  Oligonucleotide for detection of SNP TSC0028924
tttttcgtacgag

SEQ ID NO: 115402 - DNA, 13 bp, Artificial Sequence
  Oligonucleotide for detection of SNP TSC0028924
ctcgtacgaaaaa

SEQ ID NO: 115403 - DNA, 13 bp, Artificial Sequence
  Oligonucleotide for detection of SNP TSC0028924
tttgtgtgaggag

SEQ ID NO: 115404 - DNA, 13 bp, Artificial Sequence
  Oligonucleotide for detection of SNP TSC0028924
ctcctcacacaaa

SEQ ID NO: 115405 - DNA, 13 bp, Artificial Sequence
  Oligonucleotide for detection of SNP TSC0028924
ttcgtgtgaggag

SEQ ID NO: 115406 - DNA, 13 bp, Artificial Sequence
  Oligonucleotide for detection of SNP TSC0028924
ctcctcacacgaa

SEQ ID NO: 115407 - DNA, 13 bp, Artificial Sequence
  Oligonucleotide for detection of SNP TSC0028924
tttgtgcgaggag

SEQ ID NO: 115408 - DNA, 13 bp, Artificial Sequence
  Oligonucleotide for detection of SNP TSC0028924
ctcctcgcacaaa

SEQ ID NO: 115409 - DNA, 13 bp, Artificial Sequence
  Oligonucleotide for detection of SNP TSC0028924
ttcgtgcgaggag

SEQ ID NO: 115410 - DNA, 13 bp, Artificial Sequence
  Oligonucleotide for detection of SNP TSC0028924
ctcctcgcacgaa

SEQ ID NO: 115411 - DNA, 13 bp, Artificial Sequence
  Oligonucleotide for detection of SNP TSC0028925
tttatagggttta

SEQ ID NO: 115412 - DNA, 13 bp, Artificial Sequence
  Oligonucleotide for detection of SNP TSC0028925
taaaccctataaa

SEQ ID NO: 115413 - DNA, 13 bp, Artificial Sequence
  Oligonucleotide for detection of SNP TSC0028925
tttataaggttta

SEQ ID NO: 115414 - DNA, 13 bp, Artificial Sequence
  Oligonucleotide for detection of SNP TSC0028925
taaaccttataaa

SEQ ID NO: 115415 - DNA, 13 bp, Artificial Sequence
  Oligonucleotide for detection of SNP TSC0028927
gtgtggtggaaay

SEQ ID NO: 115416 - DNA, 13 bp, Artificial Sequence
  Oligonucleotide for detection of SNP TSC0028927
rtttccaccacac

SEQ ID NO: 115417 - DNA, 13 bp, Artificial Sequence
  Oligonucleotide for detection of SNP TSC0028927
gcgtggtggaaay

SEQ ID NO: 115418 - DNA, 13 bp, Artificial Sequence
  Oligonucleotide for detection of SNP TSC0028927
rtttccaccacgc

SEQ ID NO: 115419 - DNA, 13 bp, Artificial Sequence
  Oligonucleotide for detection of SNP TSC0028927
gtgtggcggaaay

SEQ ID NO: 115420 - DNA, 13 bp, Artificial Sequence
  Oligonucleotide for detection of SNP TSC0028927
rtttccgccacac

SEQ ID NO: 115421 - DNA, 13 bp, Artificial Sequence
  Oligonucleotide for detection of SNP TSC0028927
gcgtggcggaaay

SEQ ID NO: 115422 - DNA, 13 bp, Artificial Sequence
  Oligonucleotide for detection of SNP TSC0028927
rtttccgccacgc

SEQ ID NO: 115423 - DNA, 13 bp, Artificial Sequence
  Oligonucleotide for detection of SNP TSC0028927
gtttttgttatgy

SEQ ID NO: 115424 - DNA, 13 bp, Artificial Sequence
  Oligonucleotide for detection of SNP TSC0028927
rcataacaaaaac

SEQ ID NO: 115425 - DNA, 13 bp, Artificial Sequence
  Oligonucleotide for detection of SNP TSC0028927
gtttttattatgy

SEQ ID NO: 115426 - DNA, 13 bp, Artificial Sequence
  Oligonucleotide for detection of SNP TSC0028927
rcataataaaaac

SEQ ID NO: 115427 - DNA, 13 bp, Artificial Sequence
  Oligonucleotide for detection of SNP TSC0028927
gttttcgttatgy

SEQ ID NO: 115428 - DNA, 13 bp, Artificial Sequence
  Oligonucleotide for detection of SNP TSC0028927
rcataacgaaaac

SEQ ID NO: 115429 - DNA, 13 bp, Artificial Sequence
  Oligonucleotide for detection of SNP TSC0028927
gtttttattacgy

SEQ ID NO: 115430 - DNA, 13 bp, Artificial Sequence
  Oligonucleotide for detection of SNP TSC0028927
rcgtaataaaaac

SEQ ID NO: 115431 - DNA, 13 bp, Artificial Sequence
  Oligonucleotide for detection of SNP TSC0028927
gtttttgttacgy

SEQ ID NO: 115432 - DNA, 13 bp, Artificial Sequence
  Oligonucleotide for detection of SNP TSC0028927
rcgtaacaaaaac

SEQ ID NO: 115433 - DNA, 13 bp, Artificial Sequence
  Oligonucleotide for detection of SNP TSC0028927
gttttcgttacgy

SEQ ID NO: 115434 - DNA, 13 bp, Artificial Sequence
  Oligonucleotide for detection of SNP TSC0028927
rcgtaacgaaaac

SEQ ID NO: 115435 - DNA, 13 bp, Artificial Sequence
  Oligonucleotide for detection of SNP TSC0028928
ggggattgaggaa

SEQ ID NO: 115436 - DNA, 13 bp, Artificial Sequence
  Oligonucleotide for detection of SNP TSC0028928
ttcctcaatcccc

SEQ ID NO: 115437 - DNA, 13 bp, Artificial Sequence
  Oligonucleotide for detection of SNP TSC0028928
ggggatggaggaa

SEQ ID NO: 115438 - DNA, 13 bp, Artificial Sequence
  Oligonucleotide for detection of SNP TSC0028928
ttcctccatcccc

SEQ ID NO: 115439 - DNA, 13 bp, Artificial Sequence
  Oligonucleotide for detection of SNP TSC0028928
ggggatcgaggaa

SEQ ID NO: 115440 - DNA, 13 bp, Artificial Sequence
  Oligonucleotide for detection of SNP TSC0028928
ttcctcgatcccc

SEQ ID NO: 115441 - DNA, 13 bp, Artificial Sequence
  Oligonucleotide for detection of SNP TSC0028928
ggggacggaggaa

SEQ ID NO: 115442 - DNA, 13 bp, Artificial Sequence
  Oligonucleotide for detection of SNP TSC0028928
ttcctccgtcccc

SEQ ID NO: 115443 - DNA, 13 bp, Artificial Sequence
  Oligonucleotide for detection of SNP TSC0028930
gtgatgagaggga

SEQ ID NO: 115444 - DNA, 13 bp, Artificial Sequence
  Oligonucleotide for detection of SNP TSC0028930
tccctctcatcac

SEQ ID NO: 115445 - DNA, 13 bp, Artificial Sequence
  Oligonucleotide for detection of SNP TSC0028930
gtgatgggaggga

SEQ ID NO: 115446 - DNA, 13 bp, Artificial Sequence
  Oligonucleotide for detection of SNP TSC0028930
tccctcccatcac

SEQ ID NO: 115447 - DNA, 13 bp, Artificial Sequence
  Oligonucleotide for detection of SNP TSC0028931
agggagaagtggg

SEQ ID NO: 115448 - DNA, 13 bp, Artificial Sequence
  Oligonucleotide for detection of SNP TSC0028931
cccacttctccct

SEQ ID NO: 115449 - DNA, 13 bp, Artificial Sequence
  Oligonucleotide for detection of SNP TSC0028931
agggaggagtggg

SEQ ID NO: 115450 - DNA, 13 bp, Artificial Sequence
  Oligonucleotide for detection of SNP TSC0028931
cccactcctccct

SEQ ID NO: 115451 - DNA, 13 bp, Artificial Sequence
  Oligonucleotide for detection of SNP TSC0028931
agggagaagcggg

SEQ ID NO: 115452 - DNA, 13 bp, Artificial Sequence
  Oligonucleotide for detection of SNP TSC0028931
cccgcttctccct

SEQ ID NO: 115453 - DNA, 13 bp, Artificial Sequence
  Oligonucleotide for detection of SNP TSC0028931
agggaggagcggg

SEQ ID NO: 115454 - DNA, 13 bp, Artificial Sequence
  Oligonucleotide for detection of SNP TSC0028931
cccgctcctccct

SEQ ID NO: 115455 - DNA, 13 bp, Artificial Sequence
  Oligonucleotide for detection of SNP TSC0028933
tgagaatgaaaga

SEQ ID NO: 115456 - DNA, 13 bp, Artificial Sequence
  Oligonucleotide for detection of SNP TSC0028933
tctttcattctca

SEQ ID NO: 115457 - DNA, 13 bp, Artificial Sequence
  Oligonucleotide for detection of SNP TSC0028933
tgagaacgaaaga

SEQ ID NO: 115458 - DNA, 13 bp, Artificial Sequence
  Oligonucleotide for detection of SNP TSC0028933
tctttcgttctca

SEQ ID NO: 115459 - DNA, 13 bp, Artificial Sequence
  Oligonucleotide for detection of SNP TSC0028934
tgagatatgaaty

SEQ ID NO: 115460 - DNA, 13 bp, Artificial Sequence
  Oligonucleotide for detection of SNP TSC0028934
rattcatatctca

SEQ ID NO: 115461 - DNA, 13 bp, Artificial Sequence
  Oligonucleotide for detection of SNP TSC0028934
tgagatgtgaaty

SEQ ID NO: 115462 - DNA, 13 bp, Artificial Sequence
  Oligonucleotide for detection of SNP TSC0028934
rattcacatctca

SEQ ID NO: 115463 - DNA, 13 bp, Artificial Sequence
  Oligonucleotide for detection of SNP TSC0028934
cgagatatgaaty

SEQ ID NO: 115464 - DNA, 13 bp, Artificial Sequence
  Oligonucleotide for detection of SNP TSC0028934
rattcatatctcg

SEQ ID NO: 115465 - DNA, 13 bp, Artificial Sequence
  Oligonucleotide for detection of SNP TSC0028934
cgagatgtgaaty

SEQ ID NO: 115466 - DNA, 13 bp, Artificial Sequence
  Oligonucleotide for detection of SNP TSC0028934
rattcacatctcg

SEQ ID NO: 115467 - DNA, 13 bp, Artificial Sequence
  Oligonucleotide for detection of SNP TSC0028934
tgagacgtgaaty

SEQ ID NO: 115468 - DNA, 13 bp, Artificial Sequence
  Oligonucleotide for detection of SNP TSC0028934
rattcacgtctca

SEQ ID NO: 115469 - DNA, 13 bp, Artificial Sequence
  Oligonucleotide for detection of SNP TSC0028934
cgagacgtgaaty

SEQ ID NO: 115470 - DNA, 13 bp, Artificial Sequence
  Oligonucleotide for detection of SNP TSC0028934
rattcacgtctcg

SEQ ID NO: 115471 - DNA, 13 bp, Artificial Sequence
  Oligonucleotide for detection of SNP TSC0028934
ggtttatgttttg

SEQ ID NO: 115472 - DNA, 13 bp, Artificial Sequence
  Oligonucleotide for detection of SNP TSC0028934
caaaacataaacc

SEQ ID NO: 115473 - DNA, 13 bp, Artificial Sequence
  Oligonucleotide for detection of SNP TSC0028934
ggtttatgtttcg

SEQ ID NO: 115474 - DNA, 13 bp, Artificial Sequence
  Oligonucleotide for detection of SNP TSC0028934
cgaaacataaacc

SEQ ID NO: 115475 - DNA, 13 bp, Artificial Sequence
  Oligonucleotide for detection of SNP TSC0028934
ggtttacgttttg

SEQ ID NO: 115476 - DNA, 13 bp, Artificial Sequence
  Oligonucleotide for detection of SNP TSC0028934
caaaacgtaaacc

SEQ ID NO: 115477 - DNA, 13 bp, Artificial Sequence
  Oligonucleotide for detection of SNP TSC0028934
ggtttacgtttcg

SEQ ID NO: 115478 - DNA, 13 bp, Artificial Sequence
  Oligonucleotide for detection of SNP TSC0028934
cgaaacgtaaacc

SEQ ID NO: 115479 - DNA, 13 bp, Artificial Sequence
  Oligonucleotide for detection of SNP TSC0028935
tgagggatttaag

SEQ ID NO: 115480 - DNA, 13 bp, Artificial Sequence
  Oligonucleotide for detection of SNP TSC0028935
cttaaatccctca

SEQ ID NO: 115481 - DNA, 13 bp, Artificial Sequence
  Oligonucleotide for detection of SNP TSC0028935
tgaggggtttaag

SEQ ID NO: 115482 - DNA, 13 bp, Artificial Sequence
  Oligonucleotide for detection of SNP TSC0028935
cttaaacccctca

SEQ ID NO: 115483 - DNA, 13 bp, Artificial Sequence
  Oligonucleotide for detection of SNP TSC0028936
aatattatatttt

SEQ ID NO: 115484 - DNA, 13 bp, Artificial Sequence
  Oligonucleotide for detection of SNP TSC0028936
aaaatataatatt

SEQ ID NO: 115485 - DNA, 13 bp, Artificial Sequence
  Oligonucleotide for detection of SNP TSC0028936
aatattgtatttt

SEQ ID NO: 115486 - DNA, 13 bp, Artificial Sequence
  Oligonucleotide for detection of SNP TSC0028936
aaaatacaatatt

SEQ ID NO: 115487 - DNA, 13 bp, Artificial Sequence
  Oligonucleotide for detection of SNP TSC0028936
aatatcgtatttt

SEQ ID NO: 115488 - DNA, 13 bp, Artificial Sequence
  Oligonucleotide for detection of SNP TSC0028936
aaaatacgatatt

SEQ ID NO: 115489 - DNA, 13 bp, Artificial Sequence
  Oligonucleotide for detection of SNP TSC0028936
agaatgtggtgtt

SEQ ID NO: 115490 - DNA, 13 bp, Artificial Sequence
  Oligonucleotide for detection of SNP TSC0028936
aacaccacattct

SEQ ID NO: 115491 - DNA, 13 bp, Artificial Sequence
  Oligonucleotide for detection of SNP TSC0028936
agaatgcggtgtt

SEQ ID NO: 115492 - DNA, 13 bp, Artificial Sequence
  Oligonucleotide for detection of SNP TSC0028936
aacaccgcattct

SEQ ID NO: 115493 - DNA, 13 bp, Artificial Sequence
  Oligonucleotide for detection of SNP TSC0028937
tttatagattagg

SEQ ID NO: 115494 - DNA, 13 bp, Artificial Sequence
  Oligonucleotide for detection of SNP TSC0028937
cctaatctataaa

SEQ ID NO: 115495 - DNA, 13 bp, Artificial Sequence
  Oligonucleotide for detection of SNP TSC0028937
tttataaattagg

SEQ ID NO: 115496 - DNA, 13 bp, Artificial Sequence
  Oligonucleotide for detection of SNP TSC0028937
cctaatttataaa

SEQ ID NO: 115497 - DNA, 13 bp, Artificial Sequence
  Oligonucleotide for detection of SNP TSC0028943
gaatttttatata

SEQ ID NO: 115498 - DNA, 13 bp, Artificial Sequence
  Oligonucleotide for detection of SNP TSC0028943
tatataaaaattc

SEQ ID NO: 115499 - DNA, 13 bp, Artificial Sequence
  Oligonucleotide for detection of SNP TSC0028943
gaatttgtatata

SEQ ID NO: 115500 - DNA, 13 bp, Artificial Sequence
  Oligonucleotide for detection of SNP TSC0028943
tatatacaaattc

SEQ ID NO: 115501 - DNA, 13 bp, Artificial Sequence
  Oligonucleotide for detection of SNP TSC0028943
tatatagaaatty

SEQ ID NO: 115502 - DNA, 13 bp, Artificial Sequence
  Oligonucleotide for detection of SNP TSC0028943
raatttctatata

SEQ ID NO: 115503 - DNA, 13 bp, Artificial Sequence
  Oligonucleotide for detection of SNP TSC0028943
tatatataaatty

SEQ ID NO: 115504 - DNA, 13 bp, Artificial Sequence
  Oligonucleotide for detection of SNP TSC0028943
raatttatatata

SEQ ID NO: 115505 - DNA, 13 bp, Artificial Sequence
  Oligonucleotide for detection of SNP TSC0028944
gttgatagatgty

SEQ ID NO: 115506 - DNA, 13 bp, Artificial Sequence
  Oligonucleotide for detection of SNP TSC0028944
racatctatcaac

SEQ ID NO: 115507 - DNA, 13 bp, Artificial Sequence
  Oligonucleotide for detection of SNP TSC0028944
gttgatggatgty

SEQ ID NO: 115508 - DNA, 13 bp, Artificial Sequence
  Oligonucleotide for detection of SNP TSC0028944
racatccatcaac

SEQ ID NO: 115509 - DNA, 13 bp, Artificial Sequence
  Oligonucleotide for detection of SNP TSC0028946
attagaggtaagt

SEQ ID NO: 115510 - DNA, 13 bp, Artificial Sequence
  Oligonucleotide for detection of SNP TSC0028946
acttacctctaat

SEQ ID NO: 115511 - DNA, 13 bp, Artificial Sequence
  Oligonucleotide for detection of SNP TSC0028946
attagatgtaagt

SEQ ID NO: 115512 - DNA, 13 bp, Artificial Sequence
  Oligonucleotide for detection of SNP TSC0028946
acttacatctaat

SEQ ID NO: 115513 - DNA, 13 bp, Artificial Sequence
  Oligonucleotide for detection of SNP TSC0028946
atttatatttagt

SEQ ID NO: 115514 - DNA, 13 bp, Artificial Sequence
  Oligonucleotide for detection of SNP TSC0028946
actaaatataaat

SEQ ID NO: 115515 - DNA, 13 bp, Artificial Sequence
  Oligonucleotide for detection of SNP TSC0028947
ttttaaaatgttt

SEQ ID NO: 115516 - DNA, 13 bp, Artificial Sequence
  Oligonucleotide for detection of SNP TSC0028947
aaacattttaaaa

SEQ ID NO: 115517 - DNA, 13 bp, Artificial Sequence
  Oligonucleotide for detection of SNP TSC0028947
ttttaatatgttt

SEQ ID NO: 115518 - DNA, 13 bp, Artificial Sequence
  Oligonucleotide for detection of SNP TSC0028947
aaacatattaaaa

SEQ ID NO: 115519 - DNA, 13 bp, Artificial Sequence
  Oligonucleotide for detection of SNP TSC0028947
aagtattttgaaa

SEQ ID NO: 115520 - DNA, 13 bp, Artificial Sequence
  Oligonucleotide for detection of SNP TSC0028947
tttcaaaatactt

SEQ ID NO: 115521 - DNA, 13 bp, Artificial Sequence
  Oligonucleotide for detection of SNP TSC0028947
aagtatgttgaaa

SEQ ID NO: 115522 - DNA, 13 bp, Artificial Sequence
  Oligonucleotide for detection of SNP TSC0028947
tttcaacatactt

SEQ ID NO: 115523 - DNA, 13 bp, Artificial Sequence
  Oligonucleotide for detection of SNP TSC0028948
gtttagtgagtag

SEQ ID NO: 115524 - DNA, 13 bp, Artificial Sequence
  Oligonucleotide for detection of SNP TSC0028948
ctactcactaaac

SEQ ID NO: 115525 - DNA, 13 bp, Artificial Sequence
  Oligonucleotide for detection of SNP TSC0028948
gtttagcgagtag

SEQ ID NO: 115526 - DNA, 13 bp, Artificial Sequence
  Oligonucleotide for detection of SNP TSC0028948
ctactcgctaaac

SEQ ID NO: 115527 - DNA, 13 bp, Artificial Sequence
  Oligonucleotide for detection of SNP TSC0028948
ttgtttgttgggy

SEQ ID NO: 115528 - DNA, 13 bp, Artificial Sequence
  Oligonucleotide for detection of SNP TSC0028948
rcccaacaaacaa

SEQ ID NO: 115529 - DNA, 13 bp, Artificial Sequence
  Oligonucleotide for detection of SNP TSC0028948
ttgtttattgggy

SEQ ID NO: 115530 - DNA, 13 bp, Artificial Sequence
  Oligonucleotide for detection of SNP TSC0028948
rcccaataaacaa

SEQ ID NO: 115531 - DNA, 13 bp, Artificial Sequence
  Oligonucleotide for detection of SNP TSC0028948
ttgttcgttgggy

SEQ ID NO: 115532 - DNA, 13 bp, Artificial Sequence
  Oligonucleotide for detection of SNP TSC0028948
rcccaacgaacaa

SEQ ID NO: 115533 - DNA, 13 bp, Artificial Sequence
  Oligonucleotide for detection of SNP TSC0028949
aaattatgtttta

SEQ ID NO: 115534 - DNA, 13 bp, Artificial Sequence
  Oligonucleotide for detection of SNP TSC0028949
taaaacataattt

SEQ ID NO: 115535 - DNA, 13 bp, Artificial Sequence
  Oligonucleotide for detection of SNP TSC0028949
aaattacgtttta

SEQ ID NO: 115536 - DNA, 13 bp, Artificial Sequence
  Oligonucleotide for detection of SNP TSC0028949
taaaacgtaattt

SEQ ID NO: 115537 - DNA, 13 bp, Artificial Sequence
  Oligonucleotide for detection of SNP TSC0028949
taaagtgtaattt

SEQ ID NO: 115538 - DNA, 13 bp, Artificial Sequence
  Oligonucleotide for detection of SNP TSC0028949
aaattacacttta

SEQ ID NO: 115539 - DNA, 13 bp, Artificial Sequence
  Oligonucleotide for detection of SNP TSC0028949
taaagtataattt

SEQ ID NO: 115540 - DNA, 13 bp, Artificial Sequence
  Oligonucleotide for detection of SNP TSC0028949
aaattatacttta

SEQ ID NO: 115541 - DNA, 13 bp, Artificial Sequence
  Oligonucleotide for detection of SNP TSC0028949
taaagcgtaattt

SEQ ID NO: 115542 - DNA, 13 bp, Artificial Sequence
  Oligonucleotide for detection of SNP TSC0028949
aaattacgcttta

SEQ ID NO: 115543 - DNA, 13 bp, Artificial Sequence
  Oligonucleotide for detection of SNP TSC0028951
ataaaagatggta

SEQ ID NO: 115544 - DNA, 13 bp, Artificial Sequence
  Oligonucleotide for detection of SNP TSC0028951
taccatcttttat

SEQ ID NO: 115545 - DNA, 13 bp, Artificial Sequence
  Oligonucleotide for detection of SNP TSC0028951
ataaaaaatggta

SEQ ID NO: 115546 - DNA, 13 bp, Artificial Sequence
  Oligonucleotide for detection of SNP TSC0028951
taccattttttat

SEQ ID NO: 115547 - DNA, 13 bp, Artificial Sequence
  Oligonucleotide for detection of SNP TSC0028953
ggatttagtttay

SEQ ID NO: 115548 - DNA, 13 bp, Artificial Sequence
  Oligonucleotide for detection of SNP TSC0028953
rtaaactaaatcc

SEQ ID NO: 115549 - DNA, 13 bp, Artificial Sequence
  Oligonucleotide for detection of SNP TSC0028953
ggatttggtttay

SEQ ID NO: 115550 - DNA, 13 bp, Artificial Sequence
  Oligonucleotide for detection of SNP TSC0028953
rtaaaccaaatcc

SEQ ID NO: 115551 - DNA, 13 bp, Artificial Sequence
  Oligonucleotide for detection of SNP TSC0028953
ggattcggtttay

SEQ ID NO: 115552 - DNA, 13 bp, Artificial Sequence
  Oligonucleotide for detection of SNP TSC0028953
rtaaaccgaatcc

SEQ ID NO: 115553 - DNA, 13 bp, Artificial Sequence
  Oligonucleotide for detection of SNP TSC0028953
gtgaattgaatty

SEQ ID NO: 115554 - DNA, 13 bp, Artificial Sequence
  Oligonucleotide for detection of SNP TSC0028953
raattcaattcac

SEQ ID NO: 115555 - DNA, 13 bp, Artificial Sequence
  Oligonucleotide for detection of SNP TSC0028953
gtgaatcgaatty

SEQ ID NO: 115556 - DNA, 13 bp, Artificial Sequence
  Oligonucleotide for detection of SNP TSC0028953
raattcgattcac

SEQ ID NO: 115557 - DNA, 13 bp, Artificial Sequence
  Oligonucleotide for detection of SNP TSC0028959
ggttaaggtgaga

SEQ ID NO: 115558 - DNA, 13 bp, Artificial Sequence
  Oligonucleotide for detection of SNP TSC0028959
tctcaccttaacc

SEQ ID NO: 115559 - DNA, 13 bp, Artificial Sequence
  Oligonucleotide for detection of SNP TSC0028959
ggttaaagtgaga

SEQ ID NO: 115560 - DNA, 13 bp, Artificial Sequence
  Oligonucleotide for detection of SNP TSC0028959
tctcactttaacc

SEQ ID NO: 115561 - DNA, 13 bp, Artificial Sequence
  Oligonucleotide for detection of SNP TSC0028961
ggtttttgagtta

SEQ ID NO: 115562 - DNA, 13 bp, Artificial Sequence
  Oligonucleotide for detection of SNP TSC0028961
taactcaaaaacc

SEQ ID NO: 115563 - DNA, 13 bp, Artificial Sequence
  Oligonucleotide for detection of SNP TSC0028961
ggttttcgagtta

SEQ ID NO: 115564 - DNA, 13 bp, Artificial Sequence
  Oligonucleotide for detection of SNP TSC0028961
taactcgaaaacc

SEQ ID NO: 115565 - DNA, 13 bp, Artificial Sequence
  Oligonucleotide for detection of SNP TSC0028961
tgatttggaaaty

SEQ ID NO: 115566 - DNA, 13 bp, Artificial Sequence
  Oligonucleotide for detection of SNP TSC0028961
ratttccaaatca

SEQ ID NO: 115567 - DNA, 13 bp, Artificial Sequence
  Oligonucleotide for detection of SNP TSC0028961
tgatttagaaaty

SEQ ID NO: 115568 - DNA, 13 bp, Artificial Sequence
  Oligonucleotide for detection of SNP TSC0028961
ratttctaaatca

SEQ ID NO: 115569 - DNA, 13 bp, Artificial Sequence
  Oligonucleotide for detection of SNP TSC0028961
tgattcggaaaty

SEQ ID NO: 115570 - DNA, 13 bp, Artificial Sequence
  Oligonucleotide for detection of SNP TSC0028961
ratttccgaatca

SEQ ID NO: 115571 - DNA, 13 bp, Artificial Sequence
  Oligonucleotide for detection of SNP TSC0028963
tttttatgtatat

SEQ ID NO: 115572 - DNA, 13 bp, Artificial Sequence
  Oligonucleotide for detection of SNP TSC0028963
atatacataaaaa

SEQ ID NO: 115573 - DNA, 13 bp, Artificial Sequence
  Oligonucleotide for detection of SNP TSC0028963
tttttacgtatat

SEQ ID NO: 115574 - DNA, 13 bp, Artificial Sequence
  Oligonucleotide for detection of SNP TSC0028963
atatacgtaaaaa

SEQ ID NO: 115575 - DNA, 13 bp, Artificial Sequence
  Oligonucleotide for detection of SNP TSC0028964
ttagatgtgttay

SEQ ID NO: 115576 - DNA, 13 bp, Artificial Sequence
  Oligonucleotide for detection of SNP TSC0028964
rtaacacatctaa

SEQ ID NO: 115577 - DNA, 13 bp, Artificial Sequence
  Oligonucleotide for detection of SNP TSC0028964
ttagatatgttay

SEQ ID NO: 115578 - DNA, 13 bp, Artificial Sequence
  Oligonucleotide for detection of SNP TSC0028964
rtaacatatctaa

SEQ ID NO: 115579 - DNA, 13 bp, Artificial Sequence
  Oligonucleotide for detection of SNP TSC0028965
ataatataaattt

SEQ ID NO: 115580 - DNA, 13 bp, Artificial Sequence
  Oligonucleotide for detection of SNP TSC0028965
aaatttatattat

SEQ ID NO: 115581 - DNA, 13 bp, Artificial Sequence
  Oligonucleotide for detection of SNP TSC0028965
ataatagaaattt

SEQ ID NO: 115582 - DNA, 13 bp, Artificial Sequence
  Oligonucleotide for detection of SNP TSC0028965
aaatttctattat

SEQ ID NO: 115583 - DNA, 13 bp, Artificial Sequence
  Oligonucleotide for detection of SNP TSC0028965
aaatttgtattgt

SEQ ID NO: 115584 - DNA, 13 bp, Artificial Sequence
  Oligonucleotide for detection of SNP TSC0028965
acaatacaaattt

SEQ ID NO: 115585 - DNA, 13 bp, Artificial Sequence
  Oligonucleotide for detection of SNP TSC0028965
aaatttttattgt

SEQ ID NO: 115586 - DNA, 13 bp, Artificial Sequence
  Oligonucleotide for detection of SNP TSC0028965
acaataaaaattt

SEQ ID NO: 115587 - DNA, 13 bp, Artificial Sequence
  Oligonucleotide for detection of SNP TSC0028966
aatataatttttt

SEQ ID NO: 115588 - DNA, 13 bp, Artificial Sequence
  Oligonucleotide for detection of SNP TSC0028966
aaaaaattatatt

SEQ ID NO: 115589 - DNA, 13 bp, Artificial Sequence
  Oligonucleotide for detection of SNP TSC0028967
attttttaaaaag

SEQ ID NO: 115590 - DNA, 13 bp, Artificial Sequence
  Oligonucleotide for detection of SNP TSC0028967
ctttttaaaaaat

SEQ ID NO: 115591 - DNA, 13 bp, Artificial Sequence
  Oligonucleotide for detection of SNP TSC0028967
atttttgaaaaag

SEQ ID NO: 115592 - DNA, 13 bp, Artificial Sequence
  Oligonucleotide for detection of SNP TSC0028967
ctttttcaaaaat

SEQ ID NO: 115593 - DNA, 13 bp, Artificial Sequence
  Oligonucleotide for detection of SNP TSC0028967
ttttttgaaaagt

SEQ ID NO: 115594 - DNA, 13 bp, Artificial Sequence
  Oligonucleotide for detection of SNP TSC0028967
acttttcaaaaaa

SEQ ID NO: 115595 - DNA, 13 bp, Artificial Sequence
  Oligonucleotide for detection of SNP TSC0028967
tttttttaaaagt

SEQ ID NO: 115596 - DNA, 13 bp, Artificial Sequence
  Oligonucleotide for detection of SNP TSC0028967
acttttaaaaaaa

SEQ ID NO: 115597 - DNA, 13 bp, Artificial Sequence
  Oligonucleotide for detection of SNP TSC0028968
gatgttgtaatgg

SEQ ID NO: 115598 - DNA, 13 bp, Artificial Sequence
  Oligonucleotide for detection of SNP TSC0028968
ccattacaacatc

SEQ ID NO: 115599 - DNA, 13 bp, Artificial Sequence
  Oligonucleotide for detection of SNP TSC0028968
gatgttataatgg

SEQ ID NO: 115600 - DNA, 13 bp, Artificial Sequence
  Oligonucleotide for detection of SNP TSC0028968
ccattataacatc

SEQ ID NO: 115601 - DNA, 13 bp, Artificial Sequence
  Oligonucleotide for detection of SNP TSC0028971
attataggtttat

SEQ ID NO: 115602 - DNA, 13 bp, Artificial Sequence
  Oligonucleotide for detection of SNP TSC0028971
ataaacctataat

SEQ ID NO: 115603 - DNA, 13 bp, Artificial Sequence
  Oligonucleotide for detection of SNP TSC0028971
attataagtttat

SEQ ID NO: 115604 - DNA, 13 bp, Artificial Sequence
  Oligonucleotide for detection of SNP TSC0028971
ataaacttataat

SEQ ID NO: 115605 - DNA, 13 bp, Artificial Sequence
  Oligonucleotide for detection of SNP TSC0028972
gtaggtattattg

SEQ ID NO: 115606 - DNA, 13 bp, Artificial Sequence
  Oligonucleotide for detection of SNP TSC0028972
caataatacctac

SEQ ID NO: 115607 - DNA, 13 bp, Artificial Sequence
  Oligonucleotide for detection of SNP TSC0028972
gtaggtgttattg

SEQ ID NO: 115608 - DNA, 13 bp, Artificial Sequence
  Oligonucleotide for detection of SNP TSC0028972
caataacacctac

SEQ ID NO: 115609 - DNA, 13 bp, Artificial Sequence
  Oligonucleotide for detection of SNP TSC0028972
gtaggcgttattg

SEQ ID NO: 115610 - DNA, 13 bp, Artificial Sequence
  Oligonucleotide for detection of SNP TSC0028972
caataacgcctac

SEQ ID NO: 115611 - DNA, 13 bp, Artificial Sequence
  Oligonucleotide for detection of SNP TSC0028972
tagtgatgtttgy

SEQ ID NO: 115612 - DNA, 13 bp, Artificial Sequence
  Oligonucleotide for detection of SNP TSC0028972
rcaaacatcacta

SEQ ID NO: 115613 - DNA, 13 bp, Artificial Sequence
  Oligonucleotide for detection of SNP TSC0028972
tagtgacgtttgy

SEQ ID NO: 115614 - DNA, 13 bp, Artificial Sequence
  Oligonucleotide for detection of SNP TSC0028972
rcaaacgtcacta

SEQ ID NO: 115615 - DNA, 13 bp, Artificial Sequence
  Oligonucleotide for detection of SNP TSC0028974
ttgtttattagga

SEQ ID NO: 115616 - DNA, 13 bp, Artificial Sequence
  Oligonucleotide for detection of SNP TSC0028974
tcctaataaacaa

SEQ ID NO: 115617 - DNA, 13 bp, Artificial Sequence
  Oligonucleotide for detection of SNP TSC0028974
ttgtttgttagga

SEQ ID NO: 115618 - DNA, 13 bp, Artificial Sequence
  Oligonucleotide for detection of SNP TSC0028974
tcctaacaaacaa

SEQ ID NO: 115619 - DNA, 13 bp, Artificial Sequence
  Oligonucleotide for detection of SNP TSC0028974
ttgttcgttagga

SEQ ID NO: 115620 - DNA, 13 bp, Artificial Sequence
  Oligonucleotide for detection of SNP TSC0028974
tcctaacgaacaa

SEQ ID NO: 115621 - DNA, 13 bp, Artificial Sequence
  Oligonucleotide for detection of SNP TSC0028974
ttttagtgaatag

SEQ ID NO: 115622 - DNA, 13 bp, Artificial Sequence
  Oligonucleotide for detection of SNP TSC0028974
ctattcactaaaa

SEQ ID NO: 115623 - DNA, 13 bp, Artificial Sequence
  Oligonucleotide for detection of SNP TSC0028974
ttttagcgaatag

SEQ ID NO: 115624 - DNA, 13 bp, Artificial Sequence
  Oligonucleotide for detection of SNP TSC0028974
ctattcgctaaaa

SEQ ID NO: 115625 - DNA, 13 bp, Artificial Sequence
  Oligonucleotide for detection of SNP TSC0028975
gtgtgttgttttt

SEQ ID NO: 115626 - DNA, 13 bp, Artificial Sequence
  Oligonucleotide for detection of SNP TSC0028975
aaaaacaacacac

SEQ ID NO: 115627 - DNA, 13 bp, Artificial Sequence
  Oligonucleotide for detection of SNP TSC0028975
gtgtgtcgttttt

SEQ ID NO: 115628 - DNA, 13 bp, Artificial Sequence
  Oligonucleotide for detection of SNP TSC0028975
aaaaacgacacac

SEQ ID NO: 115629 - DNA, 13 bp, Artificial Sequence
  Oligonucleotide for detection of SNP TSC0028975
agaggtgatatay

SEQ ID NO: 115630 - DNA, 13 bp, Artificial Sequence
  Oligonucleotide for detection of SNP TSC0028975
rtatatcacctct

SEQ ID NO: 115631 - DNA, 13 bp, Artificial Sequence
  Oligonucleotide for detection of SNP TSC0028975
agaggtaatatay

SEQ ID NO: 115632 - DNA, 13 bp, Artificial Sequence
  Oligonucleotide for detection of SNP TSC0028975
rtatattacctct

SEQ ID NO: 115633 - DNA, 13 bp, Artificial Sequence
  Oligonucleotide for detection of SNP TSC0028975
agaggcgatatay

SEQ ID NO: 115634 - DNA, 13 bp, Artificial Sequence
  Oligonucleotide for detection of SNP TSC0028975
rtatatcgcctct

SEQ ID NO: 115635 - DNA, 13 bp, Artificial Sequence
  Oligonucleotide for detection of SNP TSC0028976
ggtaataatttat

SEQ ID NO: 115636 - DNA, 13 bp, Artificial Sequence
  Oligonucleotide for detection of SNP TSC0028976
ataaattattacc

SEQ ID NO: 115637 - DNA, 13 bp, Artificial Sequence
  Oligonucleotide for detection of SNP TSC0028976
ggtaatgatttat

SEQ ID NO: 115638 - DNA, 13 bp, Artificial Sequence
  Oligonucleotide for detection of SNP TSC0028976
ataaatcattacc

SEQ ID NO: 115639 - DNA, 13 bp, Artificial Sequence
  Oligonucleotide for detection of SNP TSC0028979
aagttaatgttty

SEQ ID NO: 115640 - DNA, 13 bp, Artificial Sequence
  Oligonucleotide for detection of SNP TSC0028979
raaacattaactt

SEQ ID NO: 115641 - DNA, 13 bp, Artificial Sequence
  Oligonucleotide for detection of SNP TSC0028979
aagttagtgttty

SEQ ID NO: 115642 - DNA, 13 bp, Artificial Sequence
  Oligonucleotide for detection of SNP TSC0028979
raaacactaactt

SEQ ID NO: 115643 - DNA, 13 bp, Artificial Sequence
  Oligonucleotide for detection of SNP TSC0028980
ggtaatgtaggga

SEQ ID NO: 115644 - DNA, 13 bp, Artificial Sequence
  Oligonucleotide for detection of SNP TSC0028980
tccctacattacc

SEQ ID NO: 115645 - DNA, 13 bp, Artificial Sequence
  Oligonucleotide for detection of SNP TSC0028980
ggtaatataggga

SEQ ID NO: 115646 - DNA, 13 bp, Artificial Sequence
  Oligonucleotide for detection of SNP TSC0028980
tccctatattacc

SEQ ID NO: 115647 - DNA, 13 bp, Artificial Sequence
  Oligonucleotide for detection of SNP TSC0028980
ggtaacgtaggga

SEQ ID NO: 115648 - DNA, 13 bp, Artificial Sequence
  Oligonucleotide for detection of SNP TSC0028980
tccctacgttacc

SEQ ID NO: 115649 - DNA, 13 bp, Artificial Sequence
  Oligonucleotide for detection of SNP TSC0028982
aaaaatgaaagay

SEQ ID NO: 115650 - DNA, 13 bp, Artificial Sequence
  Oligonucleotide for detection of SNP TSC0028982
rtctttcattttt

SEQ ID NO: 115651 - DNA, 13 bp, Artificial Sequence
  Oligonucleotide for detection of SNP TSC0028982
aaaaataaaagay

SEQ ID NO: 115652 - DNA, 13 bp, Artificial Sequence
  Oligonucleotide for detection of SNP TSC0028982
rtcttttattttt

SEQ ID NO: 115653 - DNA, 13 bp, Artificial Sequence
  Oligonucleotide for detection of SNP TSC0028982
aaaaacgaaagay

SEQ ID NO: 115654 - DNA, 13 bp, Artificial Sequence
  Oligonucleotide for detection of SNP TSC0028982
rtctttcgttttt

SEQ ID NO: 115655 - DNA, 13 bp, Artificial Sequence
  Oligonucleotide for detection of SNP TSC0028988
atttgaaaaaaag

SEQ ID NO: 115656 - DNA, 13 bp, Artificial Sequence
  Oligonucleotide for detection of SNP TSC0028988
ctttttttcaaat

SEQ ID NO: 115657 - DNA, 13 bp, Artificial Sequence
  Oligonucleotide for detection of SNP TSC0028988
atttgataaaaag

SEQ ID NO: 115658 - DNA, 13 bp, Artificial Sequence
  Oligonucleotide for detection of SNP TSC0028988
ctttttatcaaat

SEQ ID NO: 115659 - DNA, 13 bp, Artificial Sequence
  Oligonucleotide for detection of SNP TSC0028988
tttttttttaagt

SEQ ID NO: 115660 - DNA, 13 bp, Artificial Sequence
  Oligonucleotide for detection of SNP TSC0028988
acttaaaaaaaaa

SEQ ID NO: 115661 - DNA, 13 bp, Artificial Sequence
  Oligonucleotide for detection of SNP TSC0028995
tttttaagtgaga

SEQ ID NO: 115662 - DNA, 13 bp, Artificial Sequence
  Oligonucleotide for detection of SNP TSC0028995
tctcacttaaaaa

SEQ ID NO: 115663 - DNA, 13 bp, Artificial Sequence
  Oligonucleotide for detection of SNP TSC0028995
tttttaggtgaga

SEQ ID NO: 115664 - DNA, 13 bp, Artificial Sequence
  Oligonucleotide for detection of SNP TSC0028995
tctcacctaaaaa

SEQ ID NO: 115665 - DNA, 13 bp, Artificial Sequence
  Oligonucleotide for detection of SNP TSC0028996
atatatggtgttt

SEQ ID NO: 115666 - DNA, 13 bp, Artificial Sequence
  Oligonucleotide for detection of SNP TSC0028996
aaacaccatatat

SEQ ID NO: 115667 - DNA, 13 bp, Artificial Sequence
  Oligonucleotide for detection of SNP TSC0028996
atatattgtgttt

SEQ ID NO: 115668 - DNA, 13 bp, Artificial Sequence
  Oligonucleotide for detection of SNP TSC0028996
aaacacaatatat

SEQ ID NO: 115669 - DNA, 13 bp, Artificial Sequence
  Oligonucleotide for detection of SNP TSC0028996
aaatattatgtat

SEQ ID NO: 115670 - DNA, 13 bp, Artificial Sequence
  Oligonucleotide for detection of SNP TSC0028996
atacataatattt

SEQ ID NO: 115671 - DNA, 13 bp, Artificial Sequence
  Oligonucleotide for detection of SNP TSC0028996
aaatataatgtat

SEQ ID NO: 115672 - DNA, 13 bp, Artificial Sequence
  Oligonucleotide for detection of SNP TSC0028996
atacattatattt

SEQ ID NO: 115673 - DNA, 13 bp, Artificial Sequence
  Oligonucleotide for detection of SNP TSC0028997
attaaatatataa

SEQ ID NO: 115674 - DNA, 13 bp, Artificial Sequence
  Oligonucleotide for detection of SNP TSC0028997
ttatatatttaat

SEQ ID NO: 115675 - DNA, 13 bp, Artificial Sequence
  Oligonucleotide for detection of SNP TSC0028997
ttgtatttttagt

SEQ ID NO: 115676 - DNA, 13 bp, Artificial Sequence
  Oligonucleotide for detection of SNP TSC0028997
actaaaaatacaa

SEQ ID NO: 115677 - DNA, 13 bp, Artificial Sequence
  Oligonucleotide for detection of SNP TSC0028997
ttgtatgtttagt

SEQ ID NO: 115678 - DNA, 13 bp, Artificial Sequence
  Oligonucleotide for detection of SNP TSC0028997
actaaacatacaa

SEQ ID NO: 115679 - DNA, 13 bp, Artificial Sequence
  Oligonucleotide for detection of SNP TSC0028998
tgtagtaagttga

SEQ ID NO: 115680 - DNA, 13 bp, Artificial Sequence
  Oligonucleotide for detection of SNP TSC0028998
tcaacttactaca

SEQ ID NO: 115681 - DNA, 13 bp, Artificial Sequence
  Oligonucleotide for detection of SNP TSC0028998
tgtagtgagttga

SEQ ID NO: 115682 - DNA, 13 bp, Artificial Sequence
  Oligonucleotide for detection of SNP TSC0028998
tcaactcactaca

SEQ ID NO: 115683 - DNA, 13 bp, Artificial Sequence
  Oligonucleotide for detection of SNP TSC0029002
tgtattaaattty

SEQ ID NO: 115684 - DNA, 13 bp, Artificial Sequence
  Oligonucleotide for detection of SNP TSC0029002
raaatttaataca

SEQ ID NO: 115685 - DNA, 13 bp, Artificial Sequence
  Oligonucleotide for detection of SNP TSC0029002
tgtattgaattty

SEQ ID NO: 115686 - DNA, 13 bp, Artificial Sequence
  Oligonucleotide for detection of SNP TSC0029002
raaattcaataca

SEQ ID NO: 115687 - DNA, 13 bp, Artificial Sequence
  Oligonucleotide for detection of SNP TSC0029002
cgtattaaattty

SEQ ID NO: 115688 - DNA, 13 bp, Artificial Sequence
  Oligonucleotide for detection of SNP TSC0029002
raaatttaatacg

SEQ ID NO: 115689 - DNA, 13 bp, Artificial Sequence
  Oligonucleotide for detection of SNP TSC0029002
cgtattgaattty

SEQ ID NO: 115690 - DNA, 13 bp, Artificial Sequence
  Oligonucleotide for detection of SNP TSC0029002
raaattcaatacg

SEQ ID NO: 115691 - DNA, 13 bp, Artificial Sequence
  Oligonucleotide for detection of SNP TSC0029002
tgtatcgaattty

SEQ ID NO: 115692 - DNA, 13 bp, Artificial Sequence
  Oligonucleotide for detection of SNP TSC0029002
raaattcgataca

SEQ ID NO: 115693 - DNA, 13 bp, Artificial Sequence
  Oligonucleotide for detection of SNP TSC0029002
cgtatcgaattty

SEQ ID NO: 115694 - DNA, 13 bp, Artificial Sequence
  Oligonucleotide for detection of SNP TSC0029002
raaattcgatacg

SEQ ID NO: 115695 - DNA, 13 bp, Artificial Sequence
  Oligonucleotide for detection of SNP TSC0029002
ggggtttggtgtg

SEQ ID NO: 115696 - DNA, 13 bp, Artificial Sequence
  Oligonucleotide for detection of SNP TSC0029002
cacaccaaacccc

SEQ ID NO: 115697 - DNA, 13 bp, Artificial Sequence
  Oligonucleotide for detection of SNP TSC0029002
ggggtttggtgcg

SEQ ID NO: 115698 - DNA, 13 bp, Artificial Sequence
  Oligonucleotide for detection of SNP TSC0029002
cgcaccaaacccc

SEQ ID NO: 115699 - DNA, 13 bp, Artificial Sequence
  Oligonucleotide for detection of SNP TSC0029002
ggggttcggtgtg

SEQ ID NO: 115700 - DNA, 13 bp, Artificial Sequence
  Oligonucleotide for detection of SNP TSC0029002
cacaccgaacccc

SEQ ID NO: 115701 - DNA, 13 bp, Artificial Sequence
  Oligonucleotide for detection of SNP TSC0029002
ggggttcggtgcg

SEQ ID NO: 115702 - DNA, 13 bp, Artificial Sequence
  Oligonucleotide for detection of SNP TSC0029002
cgcaccgaacccc

SEQ ID NO: 115703 - DNA, 13 bp, Artificial Sequence
  Oligonucleotide for detection of SNP TSC0029003
tttttgattatty

SEQ ID NO: 115704 - DNA, 13 bp, Artificial Sequence
  Oligonucleotide for detection of SNP TSC0029003
raataatcaaaaa

SEQ ID NO: 115705 - DNA, 13 bp, Artificial Sequence
  Oligonucleotide for detection of SNP TSC0029003
tttttggttatty

SEQ ID NO: 115706 - DNA, 13 bp, Artificial Sequence
  Oligonucleotide for detection of SNP TSC0029003
raataaccaaaaa

SEQ ID NO: 115707 - DNA, 13 bp, Artificial Sequence
  Oligonucleotide for detection of SNP TSC0029004
tggagtatgaggy

SEQ ID NO: 115708 - DNA, 13 bp, Artificial Sequence
  Oligonucleotide for detection of SNP TSC0029004
rcctcatactcca

SEQ ID NO: 115709 - DNA, 13 bp, Artificial Sequence
  Oligonucleotide for detection of SNP TSC0029004
tggagtgtgaggy

SEQ ID NO: 115710 - DNA, 13 bp, Artificial Sequence
  Oligonucleotide for detection of SNP TSC0029004
rcctcacactcca

SEQ ID NO: 115711 - DNA, 13 bp, Artificial Sequence
  Oligonucleotide for detection of SNP TSC0029004
tggagcgtgaggy

SEQ ID NO: 115712 - DNA, 13 bp, Artificial Sequence
  Oligonucleotide for detection of SNP TSC0029004
rcctcacgctcca

SEQ ID NO: 115713 - DNA, 13 bp, Artificial Sequence
  Oligonucleotide for detection of SNP TSC0029004
gttttatgtttta

SEQ ID NO: 115714 - DNA, 13 bp, Artificial Sequence
  Oligonucleotide for detection of SNP TSC0029004
taaaacataaaac

SEQ ID NO: 115715 - DNA, 13 bp, Artificial Sequence
  Oligonucleotide for detection of SNP TSC0029004
gttttacgtttta

SEQ ID NO: 115716 - DNA, 13 bp, Artificial Sequence
  Oligonucleotide for detection of SNP TSC0029004
taaaacgtaaaac

SEQ ID NO: 115717 - DNA, 13 bp, Artificial Sequence
  Oligonucleotide for detection of SNP TSC0029005
gttaaagttttty

SEQ ID NO: 115718 - DNA, 13 bp, Artificial Sequence
  Oligonucleotide for detection of SNP TSC0029005
raaaaactttaac

SEQ ID NO: 115719 - DNA, 13 bp, Artificial Sequence
  Oligonucleotide for detection of SNP TSC0029005
gttaaaattttty

SEQ ID NO: 115720 - DNA, 13 bp, Artificial Sequence
  Oligonucleotide for detection of SNP TSC0029005
raaaaattttaac

SEQ ID NO: 115721 - DNA, 13 bp, Artificial Sequence
  Oligonucleotide for detection of SNP TSC0029014
tttaggtttagty

SEQ ID NO: 115722 - DNA, 13 bp, Artificial Sequence
  Oligonucleotide for detection of SNP TSC0029014
ractaaacctaaa

SEQ ID NO: 115723 - DNA, 13 bp, Artificial Sequence
  Oligonucleotide for detection of SNP TSC0029014
tttagggttagty

SEQ ID NO: 115724 - DNA, 13 bp, Artificial Sequence
  Oligonucleotide for detection of SNP TSC0029014
ractaaccctaaa

SEQ ID NO: 115725 - DNA, 13 bp, Artificial Sequence
  Oligonucleotide for detection of SNP TSC0029014
ggttgggtttggg

SEQ ID NO: 115726 - DNA, 13 bp, Artificial Sequence
  Oligonucleotide for detection of SNP TSC0029014
cccaaacccaacc

SEQ ID NO: 115727 - DNA, 13 bp, Artificial Sequence
  Oligonucleotide for detection of SNP TSC0029014
ggttggttttggg

SEQ ID NO: 115728 - DNA, 13 bp, Artificial Sequence
  Oligonucleotide for detection of SNP TSC0029014
cccaaaaccaacc

SEQ ID NO: 115729 - DNA, 13 bp, Artificial Sequence
  Oligonucleotide for detection of SNP TSC0029015
gttatagtatatt

SEQ ID NO: 115730 - DNA, 13 bp, Artificial Sequence
  Oligonucleotide for detection of SNP TSC0029015
aatatactataac

SEQ ID NO: 115731 - DNA, 13 bp, Artificial Sequence
  Oligonucleotide for detection of SNP TSC0029015
gttataatatatt

SEQ ID NO: 115732 - DNA, 13 bp, Artificial Sequence
  Oligonucleotide for detection of SNP TSC0029015
aatatattataac

SEQ ID NO: 115733 - DNA, 13 bp, Artificial Sequence
  Oligonucleotide for detection of SNP TSC0029016
aagtaaaaaataa

SEQ ID NO: 115734 - DNA, 13 bp, Artificial Sequence
  Oligonucleotide for detection of SNP TSC0029016
ttattttttactt

SEQ ID NO: 115735 - DNA, 13 bp, Artificial Sequence
  Oligonucleotide for detection of SNP TSC0029016
aagtaataaataa

SEQ ID NO: 115736 - DNA, 13 bp, Artificial Sequence
  Oligonucleotide for detection of SNP TSC0029016
ttatttattactt

SEQ ID NO: 115737 - DNA, 13 bp, Artificial Sequence
  Oligonucleotide for detection of SNP TSC0029016
ttattttttgttt

SEQ ID NO: 115738 - DNA, 13 bp, Artificial Sequence
  Oligonucleotide for detection of SNP TSC0029016
aaacaaaaaataa

SEQ ID NO: 115739 - DNA, 13 bp, Artificial Sequence
  Oligonucleotide for detection of SNP TSC0029016
ttatttgttgttt

SEQ ID NO: 115740 - DNA, 13 bp, Artificial Sequence
  Oligonucleotide for detection of SNP TSC0029016
aaacaacaaataa

SEQ ID NO: 115741 - DNA, 13 bp, Artificial Sequence
  Oligonucleotide for detection of SNP TSC0029017
tatataatttaaa

SEQ ID NO: 115742 - DNA, 13 bp, Artificial Sequence
  Oligonucleotide for detection of SNP TSC0029017
tttaaattatata

SEQ ID NO: 115743 - DNA, 13 bp, Artificial Sequence
  Oligonucleotide for detection of SNP TSC0029017
tatatagtttaaa

SEQ ID NO: 115744 - DNA, 13 bp, Artificial Sequence
  Oligonucleotide for detection of SNP TSC0029017
tttaaactatata

SEQ ID NO: 115745 - DNA, 13 bp, Artificial Sequence
  Oligonucleotide for detection of SNP TSC0029020
tttttggttggtt

SEQ ID NO: 115746 - DNA, 13 bp, Artificial Sequence
  Oligonucleotide for detection of SNP TSC0029020
aaccaaccaaaaa

SEQ ID NO: 115747 - DNA, 13 bp, Artificial Sequence
  Oligonucleotide for detection of SNP TSC0029020
tttttgtttggtt

SEQ ID NO: 115748 - DNA, 13 bp, Artificial Sequence
  Oligonucleotide for detection of SNP TSC0029020
aaccaaacaaaaa

SEQ ID NO: 115749 - DNA, 13 bp, Artificial Sequence
  Oligonucleotide for detection of SNP TSC0029020
aattaattaaaaa

SEQ ID NO: 115750 - DNA, 13 bp, Artificial Sequence
  Oligonucleotide for detection of SNP TSC0029020
tttttaattaatt

SEQ ID NO: 115751 - DNA, 13 bp, Artificial Sequence
  Oligonucleotide for detection of SNP TSC0029020
aattaaataaaaa

SEQ ID NO: 115752 - DNA, 13 bp, Artificial Sequence
  Oligonucleotide for detection of SNP TSC0029020
tttttatttaatt

SEQ ID NO: 115753 - DNA, 13 bp, Artificial Sequence
  Oligonucleotide for detection of SNP TSC0029021
atttttgatttag

SEQ ID NO: 115754 - DNA, 13 bp, Artificial Sequence
  Oligonucleotide for detection of SNP TSC0029021
ctaaatcaaaaat

SEQ ID NO: 115755 - DNA, 13 bp, Artificial Sequence
  Oligonucleotide for detection of SNP TSC0029021
atttttaatttag

SEQ ID NO: 115756 - DNA, 13 bp, Artificial Sequence
  Oligonucleotide for detection of SNP TSC0029021
ctaaattaaaaat

SEQ ID NO: 115757 - DNA, 13 bp, Artificial Sequence
  Oligonucleotide for detection of SNP TSC0029022
tttagtatttttg

SEQ ID NO: 115758 - DNA, 13 bp, Artificial Sequence
  Oligonucleotide for detection of SNP TSC0029022
caaaaatactaaa

SEQ ID NO: 115759 - DNA, 13 bp, Artificial Sequence
  Oligonucleotide for detection of SNP TSC0029022
tttagtttttttg

SEQ ID NO: 115760 - DNA, 13 bp, Artificial Sequence
  Oligonucleotide for detection of SNP TSC0029022
caaaaaaactaaa

SEQ ID NO: 115761 - DNA, 13 bp, Artificial Sequence
  Oligonucleotide for detection of SNP TSC0029022
tagagatgttgag

SEQ ID NO: 115762 - DNA, 13 bp, Artificial Sequence
  Oligonucleotide for detection of SNP TSC0029022
ctcaacatctcta

SEQ ID NO: 115763 - DNA, 13 bp, Artificial Sequence
  Oligonucleotide for detection of SNP TSC0029022
tagagaagttgag

SEQ ID NO: 115764 - DNA, 13 bp, Artificial Sequence
  Oligonucleotide for detection of SNP TSC0029022
ctcaacttctcta

SEQ ID NO: 115765 - DNA, 13 bp, Artificial Sequence
  Oligonucleotide for detection of SNP TSC0029023
gtaagtaagggay

SEQ ID NO: 115766 - DNA, 13 bp, Artificial Sequence
  Oligonucleotide for detection of SNP TSC0029023
rtcccttacttac

SEQ ID NO: 115767 - DNA, 13 bp, Artificial Sequence
  Oligonucleotide for detection of SNP TSC0029023
gtaagtgagggay

SEQ ID NO: 115768 - DNA, 13 bp, Artificial Sequence
  Oligonucleotide for detection of SNP TSC0029023
rtccctcacttac

SEQ ID NO: 115769 - DNA, 13 bp, Artificial Sequence
  Oligonucleotide for detection of SNP TSC0029023
gtaagcgagggay

SEQ ID NO: 115770 - DNA, 13 bp, Artificial Sequence
  Oligonucleotide for detection of SNP TSC0029023
rtccctcgcttac

SEQ ID NO: 115771 - DNA, 13 bp, Artificial Sequence
  Oligonucleotide for detection of SNP TSC0029029
aatttttttagag

SEQ ID NO: 115772 - DNA, 13 bp, Artificial Sequence
  Oligonucleotide for detection of SNP TSC0029029
ctctaaaaaaatt

SEQ ID NO: 115773 - DNA, 13 bp, Artificial Sequence
  Oligonucleotide for detection of SNP TSC0029029
aattttgttagag

SEQ ID NO: 115774 - DNA, 13 bp, Artificial Sequence
  Oligonucleotide for detection of SNP TSC0029029
ctctaacaaaatt

SEQ ID NO: 115775 - DNA, 13 bp, Artificial Sequence
  Oligonucleotide for detection of SNP TSC0029029
aatttcgttagag

SEQ ID NO: 115776 - DNA, 13 bp, Artificial Sequence
  Oligonucleotide for detection of SNP TSC0029029
ctctaacgaaatt

SEQ ID NO: 115777 - DNA, 13 bp, Artificial Sequence
  Oligonucleotide for detection of SNP TSC0029029
ttttaaggaagtt

SEQ ID NO: 115778 - DNA, 13 bp, Artificial Sequence
  Oligonucleotide for detection of SNP TSC0029029
aacttccttaaaa

SEQ ID NO: 115779 - DNA, 13 bp, Artificial Sequence
  Oligonucleotide for detection of SNP TSC0029029
ttttaatgaagtt

SEQ ID NO: 115780 - DNA, 13 bp, Artificial Sequence
  Oligonucleotide for detection of SNP TSC0029029
aacttcattaaaa

SEQ ID NO: 115781 - DNA, 13 bp, Artificial Sequence
  Oligonucleotide for detection of SNP TSC0029029
ttttaacgaagtt

SEQ ID NO: 115782 - DNA, 13 bp, Artificial Sequence
  Oligonucleotide for detection of SNP TSC0029029
aacttcgttaaaa

SEQ ID NO: 115783 - DNA, 13 bp, Artificial Sequence
  Oligonucleotide for detection of SNP TSC0029030
tagggtagattag

SEQ ID NO: 115784 - DNA, 13 bp, Artificial Sequence
  Oligonucleotide for detection of SNP TSC0029030
ctaatctacccta

SEQ ID NO: 115785 - DNA, 13 bp, Artificial Sequence
  Oligonucleotide for detection of SNP TSC0029030
tagggtggattag

SEQ ID NO: 115786 - DNA, 13 bp, Artificial Sequence
  Oligonucleotide for detection of SNP TSC0029030
ctaatccacccta

SEQ ID NO: 115787 - DNA, 13 bp, Artificial Sequence
  Oligonucleotide for detection of SNP TSC0029031
gggaattgagggt

SEQ ID NO: 115788 - DNA, 13 bp, Artificial Sequence
  Oligonucleotide for detection of SNP TSC0029031
accctcaattccc

SEQ ID NO: 115789 - DNA, 13 bp, Artificial Sequence
  Oligonucleotide for detection of SNP TSC0029031
gggaatcgagggt

SEQ ID NO: 115790 - DNA, 13 bp, Artificial Sequence
  Oligonucleotide for detection of SNP TSC0029031
accctcgattccc

SEQ ID NO: 115791 - DNA, 13 bp, Artificial Sequence
  Oligonucleotide for detection of SNP TSC0029031
atttttggtttty

SEQ ID NO: 115792 - DNA, 13 bp, Artificial Sequence
  Oligonucleotide for detection of SNP TSC0029031
raaaaccaaaaat

SEQ ID NO: 115793 - DNA, 13 bp, Artificial Sequence
  Oligonucleotide for detection of SNP TSC0029031
atttttagtttty

SEQ ID NO: 115794 - DNA, 13 bp, Artificial Sequence
  Oligonucleotide for detection of SNP TSC0029031
raaaactaaaaat

SEQ ID NO: 115795 - DNA, 13 bp, Artificial Sequence
  Oligonucleotide for detection of SNP TSC0029031
attttcggtttty

SEQ ID NO: 115796 - DNA, 13 bp, Artificial Sequence
  Oligonucleotide for detection of SNP TSC0029031
raaaaccgaaaat

SEQ ID NO: 115797 - DNA, 13 bp, Artificial Sequence
  Oligonucleotide for detection of SNP TSC0029032
gtttttataaaat

SEQ ID NO: 115798 - DNA, 13 bp, Artificial Sequence
  Oligonucleotide for detection of SNP TSC0029032
attttataaaaac

SEQ ID NO: 115799 - DNA, 13 bp, Artificial Sequence
  Oligonucleotide for detection of SNP TSC0029032
gtttttttaaaat

SEQ ID NO: 115800 - DNA, 13 bp, Artificial Sequence
  Oligonucleotide for detection of SNP TSC0029032
attttaaaaaaac

SEQ ID NO: 115801 - DNA, 13 bp, Artificial Sequence
  Oligonucleotide for detection of SNP TSC0029032
attttataaaagy

SEQ ID NO: 115802 - DNA, 13 bp, Artificial Sequence
  Oligonucleotide for detection of SNP TSC0029032
rcttttataaaat

SEQ ID NO: 115803 - DNA, 13 bp, Artificial Sequence
  Oligonucleotide for detection of SNP TSC0029032
attttaaaaaagy

SEQ ID NO: 115804 - DNA, 13 bp, Artificial Sequence
  Oligonucleotide for detection of SNP TSC0029032
rcttttttaaaat

SEQ ID NO: 115805 - DNA, 13 bp, Artificial Sequence
  Oligonucleotide for detection of SNP TSC0029033
taattagttatty

SEQ ID NO: 115806 - DNA, 13 bp, Artificial Sequence
  Oligonucleotide for detection of SNP TSC0029033
raataactaatta

SEQ ID NO: 115807 - DNA, 13 bp, Artificial Sequence
  Oligonucleotide for detection of SNP TSC0029033
taattaattatty

SEQ ID NO: 115808 - DNA, 13 bp, Artificial Sequence
  Oligonucleotide for detection of SNP TSC0029033
raataattaatta

SEQ ID NO: 115809 - DNA, 13 bp, Artificial Sequence
  Oligonucleotide for detection of SNP TSC0029034
tggattgtaatta

SEQ ID NO: 115810 - DNA, 13 bp, Artificial Sequence
  Oligonucleotide for detection of SNP TSC0029034
taattacaatcca

SEQ ID NO: 115811 - DNA, 13 bp, Artificial Sequence
  Oligonucleotide for detection of SNP TSC0029034
tggattataatta

SEQ ID NO: 115812 - DNA, 13 bp, Artificial Sequence
  Oligonucleotide for detection of SNP TSC0029034
taattataatcca

SEQ ID NO: 115813 - DNA, 13 bp, Artificial Sequence
  Oligonucleotide for detection of SNP TSC0029035
gtagggtttttat

SEQ ID NO: 115814 - DNA, 13 bp, Artificial Sequence
  Oligonucleotide for detection of SNP TSC0029035
ataaaaaccctac

SEQ ID NO: 115815 - DNA, 13 bp, Artificial Sequence
  Oligonucleotide for detection of SNP TSC0029035
gtaggggttttat

SEQ ID NO: 115816 - DNA, 13 bp, Artificial Sequence
  Oligonucleotide for detection of SNP TSC0029035
ataaaacccctac

SEQ ID NO: 115817 - DNA, 13 bp, Artificial Sequence
  Oligonucleotide for detection of SNP TSC0029035
atagaggttttgy

SEQ ID NO: 115818 - DNA, 13 bp, Artificial Sequence
  Oligonucleotide for detection of SNP TSC0029035
rcaaaacctctat

SEQ ID NO: 115819 - DNA, 13 bp, Artificial Sequence
  Oligonucleotide for detection of SNP TSC0029035
atagagtttttgy

SEQ ID NO: 115820 - DNA, 13 bp, Artificial Sequence
  Oligonucleotide for detection of SNP TSC0029035
rcaaaaactctat

SEQ ID NO: 115821 - DNA, 13 bp, Artificial Sequence
  Oligonucleotide for detection of SNP TSC0029036
tggttaattttaa

SEQ ID NO: 115822 - DNA, 13 bp, Artificial Sequence
  Oligonucleotide for detection of SNP TSC0029036
ttaaaattaacca

SEQ ID NO: 115823 - DNA, 13 bp, Artificial Sequence
  Oligonucleotide for detection of SNP TSC0029036
tggttatttttaa

SEQ ID NO: 115824 - DNA, 13 bp, Artificial Sequence
  Oligonucleotide for detection of SNP TSC0029036
ttaaaaataacca

SEQ ID NO: 115825 - DNA, 13 bp, Artificial Sequence
  Oligonucleotide for detection of SNP TSC0029036
ttgaggttggtta

SEQ ID NO: 115826 - DNA, 13 bp, Artificial Sequence
  Oligonucleotide for detection of SNP TSC0029036
taaccaacctcaa

SEQ ID NO: 115827 - DNA, 13 bp, Artificial Sequence
  Oligonucleotide for detection of SNP TSC0029036
ttgaggatggtta

SEQ ID NO: 115828 - DNA, 13 bp, Artificial Sequence
  Oligonucleotide for detection of SNP TSC0029036
taaccatcctcaa

SEQ ID NO: 115829 - DNA, 13 bp, Artificial Sequence
  Oligonucleotide for detection of SNP TSC0029037
ttagtaagaggta

SEQ ID NO: 115830 - DNA, 13 bp, Artificial Sequence
  Oligonucleotide for detection of SNP TSC0029037
tacctcttactaa

SEQ ID NO: 115831 - DNA, 13 bp, Artificial Sequence
  Oligonucleotide for detection of SNP TSC0029037
ttagtaggaggta

SEQ ID NO: 115832 - DNA, 13 bp, Artificial Sequence
  Oligonucleotide for detection of SNP TSC0029037
tacctcctactaa

SEQ ID NO: 115833 - DNA, 13 bp, Artificial Sequence
  Oligonucleotide for detection of SNP TSC0029039
agagtagtggtta

SEQ ID NO: 115834 - DNA, 13 bp, Artificial Sequence
  Oligonucleotide for detection of SNP TSC0029039
taaccactactct

SEQ ID NO: 115835 - DNA, 13 bp, Artificial Sequence
  Oligonucleotide for detection of SNP TSC0029039
agagtattggtta

SEQ ID NO: 115836 - DNA, 13 bp, Artificial Sequence
  Oligonucleotide for detection of SNP TSC0029039
taaccaatactct

SEQ ID NO: 115837 - DNA, 13 bp, Artificial Sequence
  Oligonucleotide for detection of SNP TSC0029039
tagttattatttt

SEQ ID NO: 115838 - DNA, 13 bp, Artificial Sequence
  Oligonucleotide for detection of SNP TSC0029039
aaaataataacta

SEQ ID NO: 115839 - DNA, 13 bp, Artificial Sequence
  Oligonucleotide for detection of SNP TSC0029039
tagttaatatttt

SEQ ID NO: 115840 - DNA, 13 bp, Artificial Sequence
  Oligonucleotide for detection of SNP TSC0029039
aaaatattaacta

SEQ ID NO: 115841 - DNA, 13 bp, Artificial Sequence
  Oligonucleotide for detection of SNP TSC0029040
agtatgggagaaa

SEQ ID NO: 115842 - DNA, 13 bp, Artificial Sequence
  Oligonucleotide for detection of SNP TSC0029040
tttctcccatact

SEQ ID NO: 115843 - DNA, 13 bp, Artificial Sequence
  Oligonucleotide for detection of SNP TSC0029040
agtatgagagaaa

SEQ ID NO: 115844 - DNA, 13 bp, Artificial Sequence
  Oligonucleotide for detection of SNP TSC0029040
tttctctcatact

SEQ ID NO: 115845 - DNA, 13 bp, Artificial Sequence
  Oligonucleotide for detection of SNP TSC0029040
agtacgggagaaa

SEQ ID NO: 115846 - DNA, 13 bp, Artificial Sequence
  Oligonucleotide for detection of SNP TSC0029040
tttctcccgtact

SEQ ID NO: 115847 - DNA, 13 bp, Artificial Sequence
  Oligonucleotide for detection of SNP TSC0029040
agtacgagagaaa

SEQ ID NO: 115848 - DNA, 13 bp, Artificial Sequence
  Oligonucleotide for detection of SNP TSC0029040
tttctctcgtact

SEQ ID NO: 115849 - DNA, 13 bp, Artificial Sequence
  Oligonucleotide for detection of SNP TSC0029041
ttttatatgtgta

SEQ ID NO: 115850 - DNA, 13 bp, Artificial Sequence
  Oligonucleotide for detection of SNP TSC0029041
tacacatataaaa

SEQ ID NO: 115851 - DNA, 13 bp, Artificial Sequence
  Oligonucleotide for detection of SNP TSC0029041
ttttatgtgtgta

SEQ ID NO: 115852 - DNA, 13 bp, Artificial Sequence
  Oligonucleotide for detection of SNP TSC0029041
tacacacataaaa

SEQ ID NO: 115853 - DNA, 13 bp, Artificial Sequence
  Oligonucleotide for detection of SNP TSC0029046
tttagagaattaa

SEQ ID NO: 115854 - DNA, 13 bp, Artificial Sequence
  Oligonucleotide for detection of SNP TSC0029046
ttaattctctaaa

SEQ ID NO: 115855 - DNA, 13 bp, Artificial Sequence
  Oligonucleotide for detection of SNP TSC0029046
tttagataattaa

SEQ ID NO: 115856 - DNA, 13 bp, Artificial Sequence
  Oligonucleotide for detection of SNP TSC0029046
ttaattatctaaa

SEQ ID NO: 115857 - DNA, 13 bp, Artificial Sequence
  Oligonucleotide for detection of SNP TSC0029046
ttgattttttgga

SEQ ID NO: 115858 - DNA, 13 bp, Artificial Sequence
  Oligonucleotide for detection of SNP TSC0029046
tccaaaaaatcaa

SEQ ID NO: 115859 - DNA, 13 bp, Artificial Sequence
  Oligonucleotide for detection of SNP TSC0029046
ttgattatttgga

SEQ ID NO: 115860 - DNA, 13 bp, Artificial Sequence
  Oligonucleotide for detection of SNP TSC0029046
tccaaataatcaa

SEQ ID NO: 115861 - DNA, 13 bp, Artificial Sequence
  Oligonucleotide for detection of SNP TSC0029047
tataagataatat

SEQ ID NO: 115862 - DNA, 13 bp, Artificial Sequence
  Oligonucleotide for detection of SNP TSC0029047
atattatcttata

SEQ ID NO: 115863 - DNA, 13 bp, Artificial Sequence
  Oligonucleotide for detection of SNP TSC0029047
tataaggtaatat

SEQ ID NO: 115864 - DNA, 13 bp, Artificial Sequence
  Oligonucleotide for detection of SNP TSC0029047
atattaccttata

SEQ ID NO: 115865 - DNA, 13 bp, Artificial Sequence
  Oligonucleotide for detection of SNP TSC0029048
attttgtgtttay

SEQ ID NO: 115866 - DNA, 13 bp, Artificial Sequence
  Oligonucleotide for detection of SNP TSC0029048
rtaaacacaaaat

SEQ ID NO: 115867 - DNA, 13 bp, Artificial Sequence
  Oligonucleotide for detection of SNP TSC0029048
attttgcgtttay

SEQ ID NO: 115868 - DNA, 13 bp, Artificial Sequence
  Oligonucleotide for detection of SNP TSC0029048
rtaaacgcaaaat

SEQ ID NO: 115869 - DNA, 13 bp, Artificial Sequence
  Oligonucleotide for detection of SNP TSC0029048
gtgagtgtagggt

SEQ ID NO: 115870 - DNA, 13 bp, Artificial Sequence
  Oligonucleotide for detection of SNP TSC0029048
accctacactcac

SEQ ID NO: 115871 - DNA, 13 bp, Artificial Sequence
  Oligonucleotide for detection of SNP TSC0029048
gtgagtatagggt

SEQ ID NO: 115872 - DNA, 13 bp, Artificial Sequence
  Oligonucleotide for detection of SNP TSC0029048
accctatactcac

SEQ ID NO: 115873 - DNA, 13 bp, Artificial Sequence
  Oligonucleotide for detection of SNP TSC0029048
gtgagcgtagggt

SEQ ID NO: 115874 - DNA, 13 bp, Artificial Sequence
  Oligonucleotide for detection of SNP TSC0029048
accctacgctcac

SEQ ID NO: 115875 - DNA, 13 bp, Artificial Sequence
  Oligonucleotide for detection of SNP TSC0029049
gattgtaaagtta

SEQ ID NO: 115876 - DNA, 13 bp, Artificial Sequence
  Oligonucleotide for detection of SNP TSC0029049
taactttacaatc

SEQ ID NO: 115877 - DNA, 13 bp, Artificial Sequence
  Oligonucleotide for detection of SNP TSC0029049
gattgtgaagtta

SEQ ID NO: 115878 - DNA, 13 bp, Artificial Sequence
  Oligonucleotide for detection of SNP TSC0029049
taacttcacaatc

SEQ ID NO: 115879 - DNA, 13 bp, Artificial Sequence
  Oligonucleotide for detection of SNP TSC0029050
atgttgttgggty

SEQ ID NO: 115880 - DNA, 13 bp, Artificial Sequence
  Oligonucleotide for detection of SNP TSC0029050
racccaacaacat

SEQ ID NO: 115881 - DNA, 13 bp, Artificial Sequence
  Oligonucleotide for detection of SNP TSC0029050
atgttggtgggty

SEQ ID NO: 115882 - DNA, 13 bp, Artificial Sequence
  Oligonucleotide for detection of SNP TSC0029050
racccaccaacat

SEQ ID NO: 115883 - DNA, 13 bp, Artificial Sequence
  Oligonucleotide for detection of SNP TSC0029050
gatttagtagtat

SEQ ID NO: 115884 - DNA, 13 bp, Artificial Sequence
  Oligonucleotide for detection of SNP TSC0029050
atactactaaatc

SEQ ID NO: 115885 - DNA, 13 bp, Artificial Sequence
  Oligonucleotide for detection of SNP TSC0029050
gatttattagtat

SEQ ID NO: 115886 - DNA, 13 bp, Artificial Sequence
  Oligonucleotide for detection of SNP TSC0029050
atactaataaatc

SEQ ID NO: 115887 - DNA, 13 bp, Artificial Sequence
  Oligonucleotide for detection of SNP TSC0029053
tattgtttggagt

SEQ ID NO: 115888 - DNA, 13 bp, Artificial Sequence
  Oligonucleotide for detection of SNP TSC0029053
actccaaacaata

SEQ ID NO: 115889 - DNA, 13 bp, Artificial Sequence
  Oligonucleotide for detection of SNP TSC0029053
tattgtgtggagt

SEQ ID NO: 115890 - DNA, 13 bp, Artificial Sequence
  Oligonucleotide for detection of SNP TSC0029053
actccacacaata

SEQ ID NO: 115891 - DNA, 13 bp, Artificial Sequence
  Oligonucleotide for detection of SNP TSC0029053
tattgttcggagt

SEQ ID NO: 115892 - DNA, 13 bp, Artificial Sequence
  Oligonucleotide for detection of SNP TSC0029053
actccgaacaata

SEQ ID NO: 115893 - DNA, 13 bp, Artificial Sequence
  Oligonucleotide for detection of SNP TSC0029053
tattgcgtggagt

SEQ ID NO: 115894 - DNA, 13 bp, Artificial Sequence
  Oligonucleotide for detection of SNP TSC0029053
actccacgcaata

SEQ ID NO: 115895 - DNA, 13 bp, Artificial Sequence
  Oligonucleotide for detection of SNP TSC0029053
tattgtgcggagt

SEQ ID NO: 115896 - DNA, 13 bp, Artificial Sequence
  Oligonucleotide for detection of SNP TSC0029053
actccgcacaata

SEQ ID NO: 115897 - DNA, 13 bp, Artificial Sequence
  Oligonucleotide for detection of SNP TSC0029053
tattgcgcggagt

SEQ ID NO: 115898 - DNA, 13 bp, Artificial Sequence
  Oligonucleotide for detection of SNP TSC0029053
actccgcgcaata

SEQ ID NO: 115899 - DNA, 13 bp, Artificial Sequence
  Oligonucleotide for detection of SNP TSC0029053
attttgggtagtg

SEQ ID NO: 115900 - DNA, 13 bp, Artificial Sequence
  Oligonucleotide for detection of SNP TSC0029053
cactacccaaaat

SEQ ID NO: 115901 - DNA, 13 bp, Artificial Sequence
  Oligonucleotide for detection of SNP TSC0029053
attttgtgtagtg

SEQ ID NO: 115902 - DNA, 13 bp, Artificial Sequence
  Oligonucleotide for detection of SNP TSC0029053
cactacacaaaat

SEQ ID NO: 115903 - DNA, 13 bp, Artificial Sequence
  Oligonucleotide for detection of SNP TSC0029053
atttcgggtagtg

SEQ ID NO: 115904 - DNA, 13 bp, Artificial Sequence
  Oligonucleotide for detection of SNP TSC0029053
cactacccgaaat

SEQ ID NO: 115905 - DNA, 13 bp, Artificial Sequence
  Oligonucleotide for detection of SNP TSC0029053
atttcgtgtagtg

SEQ ID NO: 115906 - DNA, 13 bp, Artificial Sequence
  Oligonucleotide for detection of SNP TSC0029053
cactacacgaaat

SEQ ID NO: 115907 - DNA, 13 bp, Artificial Sequence
  Oligonucleotide for detection of SNP TSC0029053
attttgcgtagtg

SEQ ID NO: 115908 - DNA, 13 bp, Artificial Sequence
  Oligonucleotide for detection of SNP TSC0029053
cactacgcaaaat

SEQ ID NO: 115909 - DNA, 13 bp, Artificial Sequence
  Oligonucleotide for detection of SNP TSC0029053
atttcgcgtagtg

SEQ ID NO: 115910 - DNA, 13 bp, Artificial Sequence
  Oligonucleotide for detection of SNP TSC0029053
cactacgcgaaat

SEQ ID NO: 115911 - DNA, 13 bp, Artificial Sequence
  Oligonucleotide for detection of SNP TSC0029055
gatgggtgtaggg

SEQ ID NO: 115912 - DNA, 13 bp, Artificial Sequence
  Oligonucleotide for detection of SNP TSC0029055
ccctacacccatc

SEQ ID NO: 115913 - DNA, 13 bp, Artificial Sequence
  Oligonucleotide for detection of SNP TSC0029055
gatgggggtaggg

SEQ ID NO: 115914 - DNA, 13 bp, Artificial Sequence
  Oligonucleotide for detection of SNP TSC0029055
ccctacccccatc

SEQ ID NO: 115915 - DNA, 13 bp, Artificial Sequence
  Oligonucleotide for detection of SNP TSC0029056
ggatttattttag

SEQ ID NO: 115916 - DNA, 13 bp, Artificial Sequence
  Oligonucleotide for detection of SNP TSC0029056
ctaaaataaatcc

SEQ ID NO: 115917 - DNA, 13 bp, Artificial Sequence
  Oligonucleotide for detection of SNP TSC0029056
ggatttgttttag

SEQ ID NO: 115918 - DNA, 13 bp, Artificial Sequence
  Oligonucleotide for detection of SNP TSC0029056
ctaaaacaaatcc

SEQ ID NO: 115919 - DNA, 13 bp, Artificial Sequence
  Oligonucleotide for detection of SNP TSC0029056
ggattcgttttag

SEQ ID NO: 115920 - DNA, 13 bp, Artificial Sequence
  Oligonucleotide for detection of SNP TSC0029056
ctaaaacgaatcc

SEQ ID NO: 115921 - DNA, 13 bp, Artificial Sequence
  Oligonucleotide for detection of SNP TSC0029056
ttgaggtgagtty

SEQ ID NO: 115922 - DNA, 13 bp, Artificial Sequence
  Oligonucleotide for detection of SNP TSC0029056
raactcacctcaa

SEQ ID NO: 115923 - DNA, 13 bp, Artificial Sequence
  Oligonucleotide for detection of SNP TSC0029056
ttgaggcgagtty

SEQ ID NO: 115924 - DNA, 13 bp, Artificial Sequence
  Oligonucleotide for detection of SNP TSC0029056
raactcgcctcaa

SEQ ID NO: 115925 - DNA, 13 bp, Artificial Sequence
  Oligonucleotide for detection of SNP TSC0029057
agaatatgaatty

SEQ ID NO: 115926 - DNA, 13 bp, Artificial Sequence
  Oligonucleotide for detection of SNP TSC0029057
raattcatattct

SEQ ID NO: 115927 - DNA, 13 bp, Artificial Sequence
  Oligonucleotide for detection of SNP TSC0029057
agaatacgaatty

SEQ ID NO: 115928 - DNA, 13 bp, Artificial Sequence
  Oligonucleotide for detection of SNP TSC0029057
raattcgtattct

SEQ ID NO: 115929 - DNA, 13 bp, Artificial Sequence
  Oligonucleotide for detection of SNP TSC0029058
tagagtatttgag

SEQ ID NO: 115930 - DNA, 13 bp, Artificial Sequence
  Oligonucleotide for detection of SNP TSC0029058
ctcaaatactcta

SEQ ID NO: 115931 - DNA, 13 bp, Artificial Sequence
  Oligonucleotide for detection of SNP TSC0029058
tagagtgtttgag

SEQ ID NO: 115932 - DNA, 13 bp, Artificial Sequence
  Oligonucleotide for detection of SNP TSC0029058
ctcaaacactcta

SEQ ID NO: 115933 - DNA, 13 bp, Artificial Sequence
  Oligonucleotide for detection of SNP TSC0029058
tagagcgtttgag

SEQ ID NO: 115934 - DNA, 13 bp, Artificial Sequence
  Oligonucleotide for detection of SNP TSC0029058
ctcaaacgctcta

SEQ ID NO: 115935 - DNA, 13 bp, Artificial Sequence
  Oligonucleotide for detection of SNP TSC0029058
tttaaatgttttg

SEQ ID NO: 115936 - DNA, 13 bp, Artificial Sequence
  Oligonucleotide for detection of SNP TSC0029058
caaaacatttaaa

SEQ ID NO: 115937 - DNA, 13 bp, Artificial Sequence
  Oligonucleotide for detection of SNP TSC0029058
tttaaacgttttg

SEQ ID NO: 115938 - DNA, 13 bp, Artificial Sequence
  Oligonucleotide for detection of SNP TSC0029058
caaaacgtttaaa

SEQ ID NO: 115939 - DNA, 13 bp, Artificial Sequence
  Oligonucleotide for detection of SNP TSC0029059
atgtttaggagta

SEQ ID NO: 115940 - DNA, 13 bp, Artificial Sequence
  Oligonucleotide for detection of SNP TSC0029059
tactcctaaacat

SEQ ID NO: 115941 - DNA, 13 bp, Artificial Sequence
  Oligonucleotide for detection of SNP TSC0029059
atgttttggagta

SEQ ID NO: 115942 - DNA, 13 bp, Artificial Sequence
  Oligonucleotide for detection of SNP TSC0029059
tactccaaaacat

SEQ ID NO: 115943 - DNA, 13 bp, Artificial Sequence
  Oligonucleotide for detection of SNP TSC0029059
acgtttaggagta

SEQ ID NO: 115944 - DNA, 13 bp, Artificial Sequence
  Oligonucleotide for detection of SNP TSC0029059
tactcctaaacgt

SEQ ID NO: 115945 - DNA, 13 bp, Artificial Sequence
  Oligonucleotide for detection of SNP TSC0029059
acgttttggagta

SEQ ID NO: 115946 - DNA, 13 bp, Artificial Sequence
  Oligonucleotide for detection of SNP TSC0029059
tactccaaaacgt

SEQ ID NO: 115947 - DNA, 13 bp, Artificial Sequence
  Oligonucleotide for detection of SNP TSC0029059
atgtttcggagta

SEQ ID NO: 115948 - DNA, 13 bp, Artificial Sequence
  Oligonucleotide for detection of SNP TSC0029059
tactccgaaacat

SEQ ID NO: 115949 - DNA, 13 bp, Artificial Sequence
  Oligonucleotide for detection of SNP TSC0029059
acgtttcggagta

SEQ ID NO: 115950 - DNA, 13 bp, Artificial Sequence
  Oligonucleotide for detection of SNP TSC0029059
tactccgaaacgt

SEQ ID NO: 115951 - DNA, 13 bp, Artificial Sequence
  Oligonucleotide for detection of SNP TSC0029059
tgtttttaagtgt

SEQ ID NO: 115952 - DNA, 13 bp, Artificial Sequence
  Oligonucleotide for detection of SNP TSC0029059
acacttaaaaaca

SEQ ID NO: 115953 - DNA, 13 bp, Artificial Sequence
  Oligonucleotide for detection of SNP TSC0029059
tgtttttaagcgt

SEQ ID NO: 115954 - DNA, 13 bp, Artificial Sequence
  Oligonucleotide for detection of SNP TSC0029059
acgcttaaaaaca

SEQ ID NO: 115955 - DNA, 13 bp, Artificial Sequence
  Oligonucleotide for detection of SNP TSC0029059
tgtttcgaagtgt

SEQ ID NO: 115956 - DNA, 13 bp, Artificial Sequence
  Oligonucleotide for detection of SNP TSC0029059
acacttcgaaaca

SEQ ID NO: 115957 - DNA, 13 bp, Artificial Sequence
  Oligonucleotide for detection of SNP TSC0029059
tgttttgaagcgt

SEQ ID NO: 115958 - DNA, 13 bp, Artificial Sequence
  Oligonucleotide for detection of SNP TSC0029059
acgcttcaaaaca

SEQ ID NO: 115959 - DNA, 13 bp, Artificial Sequence
  Oligonucleotide for detection of SNP TSC0029059
tgtttcgaagcgt

SEQ ID NO: 115960 - DNA, 13 bp, Artificial Sequence
  Oligonucleotide for detection of SNP TSC0029059
acgcttcgaaaca

SEQ ID NO: 115961 - DNA, 13 bp, Artificial Sequence
  Oligonucleotide for detection of SNP TSC0029060
ttttttaatgggg

SEQ ID NO: 115962 - DNA, 13 bp, Artificial Sequence
  Oligonucleotide for detection of SNP TSC0029060
ccccattaaaaaa

SEQ ID NO: 115963 - DNA, 13 bp, Artificial Sequence
  Oligonucleotide for detection of SNP TSC0029060
tttttttatgggg

SEQ ID NO: 115964 - DNA, 13 bp, Artificial Sequence
  Oligonucleotide for detection of SNP TSC0029060
ccccataaaaaaa

SEQ ID NO: 115965 - DNA, 13 bp, Artificial Sequence
  Oligonucleotide for detection of SNP TSC0029061
tatttttttggty

SEQ ID NO: 115966 - DNA, 13 bp, Artificial Sequence
  Oligonucleotide for detection of SNP TSC0029061
raccaaaaaaata

SEQ ID NO: 115967 - DNA, 13 bp, Artificial Sequence
  Oligonucleotide for detection of SNP TSC0029061
ggttagtaaagtg

SEQ ID NO: 115968 - DNA, 13 bp, Artificial Sequence
  Oligonucleotide for detection of SNP TSC0029061
cactttactaacc

SEQ ID NO: 115969 - DNA, 13 bp, Artificial Sequence
  Oligonucleotide for detection of SNP TSC0029061
ggttagaaaagtg

SEQ ID NO: 115970 - DNA, 13 bp, Artificial Sequence
  Oligonucleotide for detection of SNP TSC0029061
cacttttctaacc

SEQ ID NO: 115971 - DNA, 13 bp, Artificial Sequence
  Oligonucleotide for detection of SNP TSC0029063
tggatgtgattay

SEQ ID NO: 115972 - DNA, 13 bp, Artificial Sequence
  Oligonucleotide for detection of SNP TSC0029063
rtaatcacatcca

SEQ ID NO: 115973 - DNA, 13 bp, Artificial Sequence
  Oligonucleotide for detection of SNP TSC0029063
tggatgcgattay

SEQ ID NO: 115974 - DNA, 13 bp, Artificial Sequence
  Oligonucleotide for detection of SNP TSC0029063
rtaatcgcatcca

SEQ ID NO: 115975 - DNA, 13 bp, Artificial Sequence
  Oligonucleotide for detection of SNP TSC0029067
tggttgtgttttt

SEQ ID NO: 115976 - DNA, 13 bp, Artificial Sequence
  Oligonucleotide for detection of SNP TSC0029067
aaaaacacaacca

SEQ ID NO: 115977 - DNA, 13 bp, Artificial Sequence
  Oligonucleotide for detection of SNP TSC0029067
tggttgcgttttt

SEQ ID NO: 115978 - DNA, 13 bp, Artificial Sequence
  Oligonucleotide for detection of SNP TSC0029067
aaaaacgcaacca

SEQ ID NO: 115979 - DNA, 13 bp, Artificial Sequence
  Oligonucleotide for detection of SNP TSC0029067
aggaatgtagtta

SEQ ID NO: 115980 - DNA, 13 bp, Artificial Sequence
  Oligonucleotide for detection of SNP TSC0029067
taactacattcct

SEQ ID NO: 115981 - DNA, 13 bp, Artificial Sequence
  Oligonucleotide for detection of SNP TSC0029067
aggaatatagtta

SEQ ID NO: 115982 - DNA, 13 bp, Artificial Sequence
  Oligonucleotide for detection of SNP TSC0029067
taactatattcct

SEQ ID NO: 115983 - DNA, 13 bp, Artificial Sequence
  Oligonucleotide for detection of SNP TSC0029067
aggaacgtagtta

SEQ ID NO: 115984 - DNA, 13 bp, Artificial Sequence
  Oligonucleotide for detection of SNP TSC0029067
taactacgttcct

SEQ ID NO: 115985 - DNA, 13 bp, Artificial Sequence
  Oligonucleotide for detection of SNP TSC0029068
agaaataaggttg

SEQ ID NO: 115986 - DNA, 13 bp, Artificial Sequence
  Oligonucleotide for detection of SNP TSC0029068
caaccttatttct

SEQ ID NO: 115987 - DNA, 13 bp, Artificial Sequence
  Oligonucleotide for detection of SNP TSC0029068
agaaatgaggttg

SEQ ID NO: 115988 - DNA, 13 bp, Artificial Sequence
  Oligonucleotide for detection of SNP TSC0029068
caacctcatttct

SEQ ID NO: 115989 - DNA, 13 bp, Artificial Sequence
  Oligonucleotide for detection of SNP TSC0029069
tatgtatgtagtt

SEQ ID NO: 115990 - DNA, 13 bp, Artificial Sequence
  Oligonucleotide for detection of SNP TSC0029069
aactacatacata

SEQ ID NO: 115991 - DNA, 13 bp, Artificial Sequence
  Oligonucleotide for detection of SNP TSC0029069
tatgtacgtagtt

SEQ ID NO: 115992 - DNA, 13 bp, Artificial Sequence
  Oligonucleotide for detection of SNP TSC0029069
aactacgtacata

SEQ ID NO: 115993 - DNA, 13 bp, Artificial Sequence
  Oligonucleotide for detection of SNP TSC0029069
agttgtgtgtatg

SEQ ID NO: 115994 - DNA, 13 bp, Artificial Sequence
  Oligonucleotide for detection of SNP TSC0029069
catacacacaact

SEQ ID NO: 115995 - DNA, 13 bp, Artificial Sequence
  Oligonucleotide for detection of SNP TSC0029069
agttgtatgtatg

SEQ ID NO: 115996 - DNA, 13 bp, Artificial Sequence
  Oligonucleotide for detection of SNP TSC0029069
catacatacaact

SEQ ID NO: 115997 - DNA, 13 bp, Artificial Sequence
  Oligonucleotide for detection of SNP TSC0029069
agttgcgtgtatg

SEQ ID NO: 115998 - DNA, 13 bp, Artificial Sequence
  Oligonucleotide for detection of SNP TSC0029069
catacacgcaact

SEQ ID NO: 115999 - DNA, 13 bp, Artificial Sequence
  Oligonucleotide for detection of SNP TSC0029077
gggggggggagga

SEQ ID NO: 116000 - DNA, 13 bp, Artificial Sequence
  Oligonucleotide for detection of SNP TSC0029077
tcctccccccccc

SEQ ID NO: 116001 - DNA, 13 bp, Artificial Sequence
  Oligonucleotide for detection of SNP TSC0029077
ggggggtggagga

SEQ ID NO: 116002 - DNA, 13 bp, Artificial Sequence
  Oligonucleotide for detection of SNP TSC0029077
tcctccacccccc

SEQ ID NO: 116003 - DNA, 13 bp, Artificial Sequence
  Oligonucleotide for detection of SNP TSC0029078
tattttagattgg

SEQ ID NO: 116004 - DNA, 13 bp, Artificial Sequence
  Oligonucleotide for detection of SNP TSC0029078
ccaatctaaaata

SEQ ID NO: 116005 - DNA, 13 bp, Artificial Sequence
  Oligonucleotide for detection of SNP TSC0029078
tattttggattgg

SEQ ID NO: 116006 - DNA, 13 bp, Artificial Sequence
  Oligonucleotide for detection of SNP TSC0029078
ccaatccaaaata

SEQ ID NO: 116007 - DNA, 13 bp, Artificial Sequence
  Oligonucleotide for detection of SNP TSC0029078
tatttcggattgg

SEQ ID NO: 116008 - DNA, 13 bp, Artificial Sequence
  Oligonucleotide for detection of SNP TSC0029078
ccaatccgaaata

SEQ ID NO: 116009 - DNA, 13 bp, Artificial Sequence
  Oligonucleotide for detection of SNP TSC0029078
ttaatttggagtg

SEQ ID NO: 116010 - DNA, 13 bp, Artificial Sequence
  Oligonucleotide for detection of SNP TSC0029078
cactccaaattaa

SEQ ID NO: 116011 - DNA, 13 bp, Artificial Sequence
  Oligonucleotide for detection of SNP TSC0029078
ttaattcggagtg

SEQ ID NO: 116012 - DNA, 13 bp, Artificial Sequence
  Oligonucleotide for detection of SNP TSC0029078
cactccgaattaa

SEQ ID NO: 116013 - DNA, 13 bp, Artificial Sequence
  Oligonucleotide for detection of SNP TSC0029080
agtaaaaattagg

SEQ ID NO: 116014 - DNA, 13 bp, Artificial Sequence
  Oligonucleotide for detection of SNP TSC0029080
cctaatttttact

SEQ ID NO: 116015 - DNA, 13 bp, Artificial Sequence
  Oligonucleotide for detection of SNP TSC0029080
agtaaagattagg

SEQ ID NO: 116016 - DNA, 13 bp, Artificial Sequence
  Oligonucleotide for detection of SNP TSC0029080
cctaatctttact

SEQ ID NO: 116017 - DNA, 13 bp, Artificial Sequence
  Oligonucleotide for detection of SNP TSC0029085
tttaagggtaggg

SEQ ID NO: 116018 - DNA, 13 bp, Artificial Sequence
  Oligonucleotide for detection of SNP TSC0029085
ccctacccttaaa

SEQ ID NO: 116019 - DNA, 13 bp, Artificial Sequence
  Oligonucleotide for detection of SNP TSC0029085
tttaagtgtaggg

SEQ ID NO: 116020 - DNA, 13 bp, Artificial Sequence
  Oligonucleotide for detection of SNP TSC0029085
ccctacacttaaa

SEQ ID NO: 116021 - DNA, 13 bp, Artificial Sequence
  Oligonucleotide for detection of SNP TSC0029085
ttttgtttttgaa

SEQ ID NO: 116022 - DNA, 13 bp, Artificial Sequence
  Oligonucleotide for detection of SNP TSC0029085
ttcaaaaacaaaa

SEQ ID NO: 116023 - DNA, 13 bp, Artificial Sequence
  Oligonucleotide for detection of SNP TSC0029085
ttttgtatttgaa

SEQ ID NO: 116024 - DNA, 13 bp, Artificial Sequence
  Oligonucleotide for detection of SNP TSC0029085
ttcaaatacaaaa

SEQ ID NO: 116025 - DNA, 13 bp, Artificial Sequence
  Oligonucleotide for detection of SNP TSC0029088
ttatttagattty

SEQ ID NO: 116026 - DNA, 13 bp, Artificial Sequence
  Oligonucleotide for detection of SNP TSC0029088
raaatctaaataa

SEQ ID NO: 116027 - DNA, 13 bp, Artificial Sequence
  Oligonucleotide for detection of SNP TSC0029088
ttatttggattty

SEQ ID NO: 116028 - DNA, 13 bp, Artificial Sequence
  Oligonucleotide for detection of SNP TSC0029088
raaatccaaataa

SEQ ID NO: 116029 - DNA, 13 bp, Artificial Sequence
  Oligonucleotide for detection of SNP TSC0029089
tattataggttta

SEQ ID NO: 116030 - DNA, 13 bp, Artificial Sequence
  Oligonucleotide for detection of SNP TSC0029089
taaacctataata

SEQ ID NO: 116031 - DNA, 13 bp, Artificial Sequence
  Oligonucleotide for detection of SNP TSC0029089
tattatgggttta

SEQ ID NO: 116032 - DNA, 13 bp, Artificial Sequence
  Oligonucleotide for detection of SNP TSC0029089
taaacccataata

SEQ ID NO: 116033 - DNA, 13 bp, Artificial Sequence
  Oligonucleotide for detection of SNP TSC0029090
tttgggagtattt

SEQ ID NO: 116034 - DNA, 13 bp, Artificial Sequence
  Oligonucleotide for detection of SNP TSC0029090
aaatactcccaaa

SEQ ID NO: 116035 - DNA, 13 bp, Artificial Sequence
  Oligonucleotide for detection of SNP TSC0029090
tttgggggtattt

SEQ ID NO: 116036 - DNA, 13 bp, Artificial Sequence
  Oligonucleotide for detection of SNP TSC0029090
aaatacccccaaa

SEQ ID NO: 116037 - DNA, 13 bp, Artificial Sequence
  Oligonucleotide for detection of SNP TSC0029091
gttttgtgtgggg

SEQ ID NO: 116038 - DNA, 13 bp, Artificial Sequence
  Oligonucleotide for detection of SNP TSC0029091
ccccacacaaaac

SEQ ID NO: 116039 - DNA, 13 bp, Artificial Sequence
  Oligonucleotide for detection of SNP TSC0029091
gttttgcgtgggg

SEQ ID NO: 116040 - DNA, 13 bp, Artificial Sequence
  Oligonucleotide for detection of SNP TSC0029091
ccccacgcaaaac

SEQ ID NO: 116041 - DNA, 13 bp, Artificial Sequence
  Oligonucleotide for detection of SNP TSC0029091
ttttatgtagagy

SEQ ID NO: 116042 - DNA, 13 bp, Artificial Sequence
  Oligonucleotide for detection of SNP TSC0029091
rctctacataaaa

SEQ ID NO: 116043 - DNA, 13 bp, Artificial Sequence
  Oligonucleotide for detection of SNP TSC0029091
ttttatatagagy

SEQ ID NO: 116044 - DNA, 13 bp, Artificial Sequence
  Oligonucleotide for detection of SNP TSC0029091
rctctatataaaa

SEQ ID NO: 116045 - DNA, 13 bp, Artificial Sequence
  Oligonucleotide for detection of SNP TSC0029091
ttttacgtagagy

SEQ ID NO: 116046 - DNA, 13 bp, Artificial Sequence
  Oligonucleotide for detection of SNP TSC0029091
rctctacgtaaaa

SEQ ID NO: 116047 - DNA, 13 bp, Artificial Sequence
  Oligonucleotide for detection of SNP TSC0029095
tgttttatgtttg

SEQ ID NO: 116048 - DNA, 13 bp, Artificial Sequence
  Oligonucleotide for detection of SNP TSC0029095
caaacataaaaca

SEQ ID NO: 116049 - DNA, 13 bp, Artificial Sequence
  Oligonucleotide for detection of SNP TSC0029095
tgttttgtgtttg

SEQ ID NO: 116050 - DNA, 13 bp, Artificial Sequence
  Oligonucleotide for detection of SNP TSC0029095
caaacacaaaaca

SEQ ID NO: 116051 - DNA, 13 bp, Artificial Sequence
  Oligonucleotide for detection of SNP TSC0029095
tgtttcgtgtttg

SEQ ID NO: 116052 - DNA, 13 bp, Artificial Sequence
  Oligonucleotide for detection of SNP TSC0029095
caaacacgaaaca

SEQ ID NO: 116053 - DNA, 13 bp, Artificial Sequence
  Oligonucleotide for detection of SNP TSC0029095
taggtatgggata

SEQ ID NO: 116054 - DNA, 13 bp, Artificial Sequence
  Oligonucleotide for detection of SNP TSC0029095
tatcccataccta

SEQ ID NO: 116055 - DNA, 13 bp, Artificial Sequence
  Oligonucleotide for detection of SNP TSC0029095
taggtacgggata

SEQ ID NO: 116056 - DNA, 13 bp, Artificial Sequence
  Oligonucleotide for detection of SNP TSC0029095
tatcccgtaccta

SEQ ID NO: 116057 - DNA, 13 bp, Artificial Sequence
  Oligonucleotide for detection of SNP TSC0029096
ttttgtaattgag

SEQ ID NO: 116058 - DNA, 13 bp, Artificial Sequence
  Oligonucleotide for detection of SNP TSC0029096
ctcaattacaaaa

SEQ ID NO: 116059 - DNA, 13 bp, Artificial Sequence
  Oligonucleotide for detection of SNP TSC0029096
ttttgtgattgag

SEQ ID NO: 116060 - DNA, 13 bp, Artificial Sequence
  Oligonucleotide for detection of SNP TSC0029096
ctcaatcacaaaa

SEQ ID NO: 116061 - DNA, 13 bp, Artificial Sequence
  Oligonucleotide for detection of SNP TSC0029096
tttcgtaattgag

SEQ ID NO: 116062 - DNA, 13 bp, Artificial Sequence
  Oligonucleotide for detection of SNP TSC0029096
ctcaattacgaaa

SEQ ID NO: 116063 - DNA, 13 bp, Artificial Sequence
  Oligonucleotide for detection of SNP TSC0029096
tttcgtgattgag

SEQ ID NO: 116064 - DNA, 13 bp, Artificial Sequence
  Oligonucleotide for detection of SNP TSC0029096
ctcaatcacgaaa

SEQ ID NO: 116065 - DNA, 13 bp, Artificial Sequence
  Oligonucleotide for detection of SNP TSC0029096
ttttgcgattgag

SEQ ID NO: 116066 - DNA, 13 bp, Artificial Sequence
  Oligonucleotide for detection of SNP TSC0029096
ctcaatcgcaaaa

SEQ ID NO: 116067 - DNA, 13 bp, Artificial Sequence
  Oligonucleotide for detection of SNP TSC0029096
tttcgcgattgag

SEQ ID NO: 116068 - DNA, 13 bp, Artificial Sequence
  Oligonucleotide for detection of SNP TSC0029096
ctcaatcgcgaaa

SEQ ID NO: 116069 - DNA, 13 bp, Artificial Sequence
  Oligonucleotide for detection of SNP TSC0029096
tttagttgtgggg

SEQ ID NO: 116070 - DNA, 13 bp, Artificial Sequence
  Oligonucleotide for detection of SNP TSC0029096
ccccacaactaaa

SEQ ID NO: 116071 - DNA, 13 bp, Artificial Sequence
  Oligonucleotide for detection of SNP TSC0029096
tttagttgcgggg

SEQ ID NO: 116072 - DNA, 13 bp, Artificial Sequence
  Oligonucleotide for detection of SNP TSC0029096
ccccgcaactaaa

SEQ ID NO: 116073 - DNA, 13 bp, Artificial Sequence
  Oligonucleotide for detection of SNP TSC0029096
tttagtcgtgggg

SEQ ID NO: 116074 - DNA, 13 bp, Artificial Sequence
  Oligonucleotide for detection of SNP TSC0029096
ccccacgactaaa

SEQ ID NO: 116075 - DNA, 13 bp, Artificial Sequence
  Oligonucleotide for detection of SNP TSC0029096
tttagtcgcgggg

SEQ ID NO: 116076 - DNA, 13 bp, Artificial Sequence
  Oligonucleotide for detection of SNP TSC0029096
ccccgcgactaaa

SEQ ID NO: 116077 - DNA, 13 bp, Artificial Sequence
  Oligonucleotide for detection of SNP TSC0029097
tttagtagaagta

SEQ ID NO: 116078 - DNA, 13 bp, Artificial Sequence
  Oligonucleotide for detection of SNP TSC0029097
tacttctactaaa

SEQ ID NO: 116079 - DNA, 13 bp, Artificial Sequence
  Oligonucleotide for detection of SNP TSC0029097
tttagtggaagta

SEQ ID NO: 116080 - DNA, 13 bp, Artificial Sequence
  Oligonucleotide for detection of SNP TSC0029097
tacttccactaaa

SEQ ID NO: 116081 - DNA, 13 bp, Artificial Sequence
  Oligonucleotide for detection of SNP TSC0029098
gtagtggtgggag

SEQ ID NO: 116082 - DNA, 13 bp, Artificial Sequence
  Oligonucleotide for detection of SNP TSC0029098
ctcccaccactac

SEQ ID NO: 116083 - DNA, 13 bp, Artificial Sequence
  Oligonucleotide for detection of SNP TSC0029098
gtagtgttgggag

SEQ ID NO: 116084 - DNA, 13 bp, Artificial Sequence
  Oligonucleotide for detection of SNP TSC0029098
ctcccaacactac

SEQ ID NO: 116085 - DNA, 13 bp, Artificial Sequence
  Oligonucleotide for detection of SNP TSC0029098
tttttattattgy

SEQ ID NO: 116086 - DNA, 13 bp, Artificial Sequence
  Oligonucleotide for detection of SNP TSC0029098
rcaataataaaaa

SEQ ID NO: 116087 - DNA, 13 bp, Artificial Sequence
  Oligonucleotide for detection of SNP TSC0029098
tttttaatattgy

SEQ ID NO: 116088 - DNA, 13 bp, Artificial Sequence
  Oligonucleotide for detection of SNP TSC0029098
rcaatattaaaaa

SEQ ID NO: 116089 - DNA, 13 bp, Artificial Sequence
  Oligonucleotide for detection of SNP TSC0029101
tgtaagggagaty

SEQ ID NO: 116090 - DNA, 13 bp, Artificial Sequence
  Oligonucleotide for detection of SNP TSC0029101
ratctcccttaca

SEQ ID NO: 116091 - DNA, 13 bp, Artificial Sequence
  Oligonucleotide for detection of SNP TSC0029101
tgtaagagagaty

SEQ ID NO: 116092 - DNA, 13 bp, Artificial Sequence
  Oligonucleotide for detection of SNP TSC0029101
ratctctcttaca

SEQ ID NO: 116093 - DNA, 13 bp, Artificial Sequence
  Oligonucleotide for detection of SNP TSC0029102
aaattagaaatta

SEQ ID NO: 116094 - DNA, 13 bp, Artificial Sequence
  Oligonucleotide for detection of SNP TSC0029102
taatttctaattt

SEQ ID NO: 116095 - DNA, 13 bp, Artificial Sequence
  Oligonucleotide for detection of SNP TSC0029102
aaattaaaaatta

SEQ ID NO: 116096 - DNA, 13 bp, Artificial Sequence
  Oligonucleotide for detection of SNP TSC0029102
taatttttaattt

SEQ ID NO: 116097 - DNA, 13 bp, Artificial Sequence
  Oligonucleotide for detection of SNP TSC0029103
aatgagattgaty

SEQ ID NO: 116098 - DNA, 13 bp, Artificial Sequence
  Oligonucleotide for detection of SNP TSC0029103
ratcaatctcatt

SEQ ID NO: 116099 - DNA, 13 bp, Artificial Sequence
  Oligonucleotide for detection of SNP TSC0029103
aatgaggttgaty

SEQ ID NO: 116100 - DNA, 13 bp, Artificial Sequence
  Oligonucleotide for detection of SNP TSC0029103
ratcaacctcatt

SEQ ID NO: 116101 - DNA, 13 bp, Artificial Sequence
  Oligonucleotide for detection of SNP TSC0029104
taagtaaaaattt

SEQ ID NO: 116102 - DNA, 13 bp, Artificial Sequence
  Oligonucleotide for detection of SNP TSC0029104
aaatttttactta

SEQ ID NO: 116103 - DNA, 13 bp, Artificial Sequence
  Oligonucleotide for detection of SNP TSC0029104
taagtataaattt

SEQ ID NO: 116104 - DNA, 13 bp, Artificial Sequence
  Oligonucleotide for detection of SNP TSC0029104
aaatttatactta

SEQ ID NO: 116105 - DNA, 13 bp, Artificial Sequence
  Oligonucleotide for detection of SNP TSC0029104
agatttttattta

SEQ ID NO: 116106 - DNA, 13 bp, Artificial Sequence
  Oligonucleotide for detection of SNP TSC0029104
taaataaaaatct

SEQ ID NO: 116107 - DNA, 13 bp, Artificial Sequence
  Oligonucleotide for detection of SNP TSC0029104
agatttatattta

SEQ ID NO: 116108 - DNA, 13 bp, Artificial Sequence
  Oligonucleotide for detection of SNP TSC0029104
taaatataaatct

SEQ ID NO: 116109 - DNA, 13 bp, Artificial Sequence
  Oligonucleotide for detection of SNP TSC0029105
ttgtggattgtgt

SEQ ID NO: 116110 - DNA, 13 bp, Artificial Sequence
  Oligonucleotide for detection of SNP TSC0029105
acacaatccacaa

SEQ ID NO: 116111 - DNA, 13 bp, Artificial Sequence
  Oligonucleotide for detection of SNP TSC0029105
ttgtgggttgtgt

SEQ ID NO: 116112 - DNA, 13 bp, Artificial Sequence
  Oligonucleotide for detection of SNP TSC0029105
acacaacccacaa

SEQ ID NO: 116113 - DNA, 13 bp, Artificial Sequence
  Oligonucleotide for detection of SNP TSC0029105
ttgtggatcgtgt

SEQ ID NO: 116114 - DNA, 13 bp, Artificial Sequence
  Oligonucleotide for detection of SNP TSC0029105
acacgatccacaa

SEQ ID NO: 116115 - DNA, 13 bp, Artificial Sequence
  Oligonucleotide for detection of SNP TSC0029105
ttgtgggtcgtgt

SEQ ID NO: 116116 - DNA, 13 bp, Artificial Sequence
  Oligonucleotide for detection of SNP TSC0029105
acacgacccacaa

SEQ ID NO: 116117 - DNA, 13 bp, Artificial Sequence
  Oligonucleotide for detection of SNP TSC0029106
tggatgtgatttg

SEQ ID NO: 116118 - DNA, 13 bp, Artificial Sequence
  Oligonucleotide for detection of SNP TSC0029106
caaatcacatcca

SEQ ID NO: 116119 - DNA, 13 bp, Artificial Sequence
  Oligonucleotide for detection of SNP TSC0029106
tggacgtgatttg

SEQ ID NO: 116120 - DNA, 13 bp, Artificial Sequence
  Oligonucleotide for detection of SNP TSC0029106
caaatcacgtcca

SEQ ID NO: 116121 - DNA, 13 bp, Artificial Sequence
  Oligonucleotide for detection of SNP TSC0029106
tggatgcgatttg

SEQ ID NO: 116122 - DNA, 13 bp, Artificial Sequence
  Oligonucleotide for detection of SNP TSC0029106
caaatcgcatcca

SEQ ID NO: 116123 - DNA, 13 bp, Artificial Sequence
  Oligonucleotide for detection of SNP TSC0029106
tggacgcgatttg

SEQ ID NO: 116124 - DNA, 13 bp, Artificial Sequence
  Oligonucleotide for detection of SNP TSC0029106
caaatcgcgtcca

SEQ ID NO: 116125 - DNA, 13 bp, Artificial Sequence
  Oligonucleotide for detection of SNP TSC0029106
tagattgtgttta

SEQ ID NO: 116126 - DNA, 13 bp, Artificial Sequence
  Oligonucleotide for detection of SNP TSC0029106
taaacacaatcta

SEQ ID NO: 116127 - DNA, 13 bp, Artificial Sequence
  Oligonucleotide for detection of SNP TSC0029106
tagattatgttta

SEQ ID NO: 116128 - DNA, 13 bp, Artificial Sequence
  Oligonucleotide for detection of SNP TSC0029106
taaacataatcta

SEQ ID NO: 116129 - DNA, 13 bp, Artificial Sequence
  Oligonucleotide for detection of SNP TSC0029106
tagatcgtgttta

SEQ ID NO: 116130 - DNA, 13 bp, Artificial Sequence
  Oligonucleotide for detection of SNP TSC0029106
taaacacgatcta

SEQ ID NO: 116131 - DNA, 13 bp, Artificial Sequence
  Oligonucleotide for detection of SNP TSC0029106
tagattacgttta

SEQ ID NO: 116132 - DNA, 13 bp, Artificial Sequence
  Oligonucleotide for detection of SNP TSC0029106
taaacgtaatcta

SEQ ID NO: 116133 - DNA, 13 bp, Artificial Sequence
  Oligonucleotide for detection of SNP TSC0029106
tagattgcgttta

SEQ ID NO: 116134 - DNA, 13 bp, Artificial Sequence
  Oligonucleotide for detection of SNP TSC0029106
taaacgcaatcta

SEQ ID NO: 116135 - DNA, 13 bp, Artificial Sequence
  Oligonucleotide for detection of SNP TSC0029106
tagatcgcgttta

SEQ ID NO: 116136 - DNA, 13 bp, Artificial Sequence
  Oligonucleotide for detection of SNP TSC0029106
taaacgcgatcta

SEQ ID NO: 116137 - DNA, 13 bp, Artificial Sequence
  Oligonucleotide for detection of SNP TSC0029107
agatattgatggt

SEQ ID NO: 116138 - DNA, 13 bp, Artificial Sequence
  Oligonucleotide for detection of SNP TSC0029107
accatcaatatct

SEQ ID NO: 116139 - DNA, 13 bp, Artificial Sequence
  Oligonucleotide for detection of SNP TSC0029107
agatatcgatggt

SEQ ID NO: 116140 - DNA, 13 bp, Artificial Sequence
  Oligonucleotide for detection of SNP TSC0029107
accatcgatatct

SEQ ID NO: 116141 - DNA, 13 bp, Artificial Sequence
  Oligonucleotide for detection of SNP TSC0029107
attattggtattt

SEQ ID NO: 116142 - DNA, 13 bp, Artificial Sequence
  Oligonucleotide for detection of SNP TSC0029107
aaataccaataat

SEQ ID NO: 116143 - DNA, 13 bp, Artificial Sequence
  Oligonucleotide for detection of SNP TSC0029107
attattagtattt

SEQ ID NO: 116144 - DNA, 13 bp, Artificial Sequence
  Oligonucleotide for detection of SNP TSC0029107
aaatactaataat

SEQ ID NO: 116145 - DNA, 13 bp, Artificial Sequence
  Oligonucleotide for detection of SNP TSC0029107
attatcggtattt

SEQ ID NO: 116146 - DNA, 13 bp, Artificial Sequence
  Oligonucleotide for detection of SNP TSC0029107
aaataccgataat

SEQ ID NO: 116147 - DNA, 13 bp, Artificial Sequence
  Oligonucleotide for detection of SNP TSC0029108
ttgtggtggaggg

SEQ ID NO: 116148 - DNA, 13 bp, Artificial Sequence
  Oligonucleotide for detection of SNP TSC0029108
ccctccaccacaa

SEQ ID NO: 116149 - DNA, 13 bp, Artificial Sequence
  Oligonucleotide for detection of SNP TSC0029108
ttgtgggggaggg

SEQ ID NO: 116150 - DNA, 13 bp, Artificial Sequence
  Oligonucleotide for detection of SNP TSC0029108
ccctcccccacaa

SEQ ID NO: 116151 - DNA, 13 bp, Artificial Sequence
  Oligonucleotide for detection of SNP TSC0029108
tcgtggtggaggg

SEQ ID NO: 116152 - DNA, 13 bp, Artificial Sequence
  Oligonucleotide for detection of SNP TSC0029108
ccctccaccacga

SEQ ID NO: 116153 - DNA, 13 bp, Artificial Sequence
  Oligonucleotide for detection of SNP TSC0029108
tcgtgggggaggg

SEQ ID NO: 116154 - DNA, 13 bp, Artificial Sequence
  Oligonucleotide for detection of SNP TSC0029108
ccctcccccacga

SEQ ID NO: 116155 - DNA, 13 bp, Artificial Sequence
  Oligonucleotide for detection of SNP TSC0029108
ttgcggtggaggg

SEQ ID NO: 116156 - DNA, 13 bp, Artificial Sequence
  Oligonucleotide for detection of SNP TSC0029108
ccctccaccgcaa

SEQ ID NO: 116157 - DNA, 13 bp, Artificial Sequence
  Oligonucleotide for detection of SNP TSC0029108
ttgcgggggaggg

SEQ ID NO: 116158 - DNA, 13 bp, Artificial Sequence
  Oligonucleotide for detection of SNP TSC0029108
ccctcccccgcaa

SEQ ID NO: 116159 - DNA, 13 bp, Artificial Sequence
  Oligonucleotide for detection of SNP TSC0029108
ttgtggcggaggg

SEQ ID NO: 116160 - DNA, 13 bp, Artificial Sequence
  Oligonucleotide for detection of SNP TSC0029108
ccctccgccacaa

SEQ ID NO: 116161 - DNA, 13 bp, Artificial Sequence
  Oligonucleotide for detection of SNP TSC0029108
tcgcgggggaggg

SEQ ID NO: 116162 - DNA, 13 bp, Artificial Sequence
  Oligonucleotide for detection of SNP TSC0029108
ccctcccccgcga

SEQ ID NO: 116163 - DNA, 13 bp, Artificial Sequence
  Oligonucleotide for detection of SNP TSC0029108
tcgcggtggaggg

SEQ ID NO: 116164 - DNA, 13 bp, Artificial Sequence
  Oligonucleotide for detection of SNP TSC0029108
ccctccaccgcga

SEQ ID NO: 116165 - DNA, 13 bp, Artificial Sequence
  Oligonucleotide for detection of SNP TSC0029108
tcgtggcggaggg

SEQ ID NO: 116166 - DNA, 13 bp, Artificial Sequence
  Oligonucleotide for detection of SNP TSC0029108
ccctccgccacga

SEQ ID NO: 116167 - DNA, 13 bp, Artificial Sequence
  Oligonucleotide for detection of SNP TSC0029108
ttgcggcggaggg

SEQ ID NO: 116168 - DNA, 13 bp, Artificial Sequence
  Oligonucleotide for detection of SNP TSC0029108
ccctccgccgcaa

SEQ ID NO: 116169 - DNA, 13 bp, Artificial Sequence
  Oligonucleotide for detection of SNP TSC0029108
tcgcggcggaggg

SEQ ID NO: 116170 - DNA, 13 bp, Artificial Sequence
  Oligonucleotide for detection of SNP TSC0029108
ccctccgccgcga

SEQ ID NO: 116171 - DNA, 13 bp, Artificial Sequence
  Oligonucleotide for detection of SNP TSC0029108
ttttttgttgtga

SEQ ID NO: 116172 - DNA, 13 bp, Artificial Sequence
  Oligonucleotide for detection of SNP TSC0029108
tcacaacaaaaaa

SEQ ID NO: 116173 - DNA, 13 bp, Artificial Sequence
  Oligonucleotide for detection of SNP TSC0029108
tttttcgttgtga

SEQ ID NO: 116174 - DNA, 13 bp, Artificial Sequence
  Oligonucleotide for detection of SNP TSC0029108
tcacaacgaaaaa

SEQ ID NO: 116175 - DNA, 13 bp, Artificial Sequence
  Oligonucleotide for detection of SNP TSC0029108
ttttttttcgtga

SEQ ID NO: 116176 - DNA, 13 bp, Artificial Sequence
  Oligonucleotide for detection of SNP TSC0029108
tcacgaaaaaaaa

SEQ ID NO: 116177 - DNA, 13 bp, Artificial Sequence
  Oligonucleotide for detection of SNP TSC0029108
ttttttgtcgtga

SEQ ID NO: 116178 - DNA, 13 bp, Artificial Sequence
  Oligonucleotide for detection of SNP TSC0029108
tcacgacaaaaaa

SEQ ID NO: 116179 - DNA, 13 bp, Artificial Sequence
  Oligonucleotide for detection of SNP TSC0029108
tttttttttgcga

SEQ ID NO: 116180 - DNA, 13 bp, Artificial Sequence
  Oligonucleotide for detection of SNP TSC0029108
tcgcaaaaaaaaa

SEQ ID NO: 116181 - DNA, 13 bp, Artificial Sequence
  Oligonucleotide for detection of SNP TSC0029108
ttttttgttgcga

SEQ ID NO: 116182 - DNA, 13 bp, Artificial Sequence
  Oligonucleotide for detection of SNP TSC0029108
tcgcaacaaaaaa

SEQ ID NO: 116183 - DNA, 13 bp, Artificial Sequence
  Oligonucleotide for detection of SNP TSC0029108
ttttttttcgcga

SEQ ID NO: 116184 - DNA, 13 bp, Artificial Sequence
  Oligonucleotide for detection of SNP TSC0029108
tcgcgaaaaaaaa

SEQ ID NO: 116185 - DNA, 13 bp, Artificial Sequence
  Oligonucleotide for detection of SNP TSC0029108
tttttcgtcgtga

SEQ ID NO: 116186 - DNA, 13 bp, Artificial Sequence
  Oligonucleotide for detection of SNP TSC0029108
tcacgacgaaaaa

SEQ ID NO: 116187 - DNA, 13 bp, Artificial Sequence
  Oligonucleotide for detection of SNP TSC0029108
tttttcgttgcga

SEQ ID NO: 116188 - DNA, 13 bp, Artificial Sequence
  Oligonucleotide for detection of SNP TSC0029108
tcgcaacgaaaaa

SEQ ID NO: 116189 - DNA, 13 bp, Artificial Sequence
  Oligonucleotide for detection of SNP TSC0029108
ttttttgtcgcga

SEQ ID NO: 116190 - DNA, 13 bp, Artificial Sequence
  Oligonucleotide for detection of SNP TSC0029108
tcgcgacaaaaaa

SEQ ID NO: 116191 - DNA, 13 bp, Artificial Sequence
  Oligonucleotide for detection of SNP TSC0029108
tttttcgtcgcga

SEQ ID NO: 116192 - DNA, 13 bp, Artificial Sequence
  Oligonucleotide for detection of SNP TSC0029108
tcgcgacgaaaaa

SEQ ID NO: 116193 - DNA, 13 bp, Artificial Sequence
  Oligonucleotide for detection of SNP TSC0029109
taggtgagtgttg

SEQ ID NO: 116194 - DNA, 13 bp, Artificial Sequence
  Oligonucleotide for detection of SNP TSC0029109
caacactcaccta

SEQ ID NO: 116195 - DNA, 13 bp, Artificial Sequence
  Oligonucleotide for detection of SNP TSC0029109
taggtgtgtgttg

SEQ ID NO: 116196 - DNA, 13 bp, Artificial Sequence
  Oligonucleotide for detection of SNP TSC0029109
caacacacaccta

SEQ ID NO: 116197 - DNA, 13 bp, Artificial Sequence
  Oligonucleotide for detection of SNP TSC0029109
taggtgagcgttg

SEQ ID NO: 116198 - DNA, 13 bp, Artificial Sequence
  Oligonucleotide for detection of SNP TSC0029109
caacgctcaccta

SEQ ID NO: 116199 - DNA, 13 bp, Artificial Sequence
  Oligonucleotide for detection of SNP TSC0029109
taggtgcgtgttg

SEQ ID NO: 116200 - DNA, 13 bp, Artificial Sequence
  Oligonucleotide for detection of SNP TSC0029109
caacacgcaccta

SEQ ID NO: 116201 - DNA, 13 bp, Artificial Sequence
  Oligonucleotide for detection of SNP TSC0029109
taggtgagtgtcg

SEQ ID NO: 116202 - DNA, 13 bp, Artificial Sequence
  Oligonucleotide for detection of SNP TSC0029109
cgacactcaccta

SEQ ID NO: 116203 - DNA, 13 bp, Artificial Sequence
  Oligonucleotide for detection of SNP TSC0029109
taggtgtgcgttg

SEQ ID NO: 116204 - DNA, 13 bp, Artificial Sequence
  Oligonucleotide for detection of SNP TSC0029109
caacgcacaccta

SEQ ID NO: 116205 - DNA, 13 bp, Artificial Sequence
  Oligonucleotide for detection of SNP TSC0029109
taggtgagcgtcg

SEQ ID NO: 116206 - DNA, 13 bp, Artificial Sequence
  Oligonucleotide for detection of SNP TSC0029109
cgacgctcaccta

SEQ ID NO: 116207 - DNA, 13 bp, Artificial Sequence
  Oligonucleotide for detection of SNP TSC0029109
taggtgtgtgtcg

SEQ ID NO: 116208 - DNA, 13 bp, Artificial Sequence
  Oligonucleotide for detection of SNP TSC0029109
cgacacacaccta

SEQ ID NO: 116209 - DNA, 13 bp, Artificial Sequence
  Oligonucleotide for detection of SNP TSC0029109
taggtgcgcgttg

SEQ ID NO: 116210 - DNA, 13 bp, Artificial Sequence
  Oligonucleotide for detection of SNP TSC0029109
caacgcgcaccta

SEQ ID NO: 116211 - DNA, 13 bp, Artificial Sequence
  Oligonucleotide for detection of SNP TSC0029109
taggtgcgtgtcg

SEQ ID NO: 116212 - DNA, 13 bp, Artificial Sequence
  Oligonucleotide for detection of SNP TSC0029109
cgacacgcaccta

SEQ ID NO: 116213 - DNA, 13 bp, Artificial Sequence
  Oligonucleotide for detection of SNP TSC0029109
taggtgtgcgtcg

SEQ ID NO: 116214 - DNA, 13 bp, Artificial Sequence
  Oligonucleotide for detection of SNP TSC0029109
cgacgcacaccta

SEQ ID NO: 116215 - DNA, 13 bp, Artificial Sequence
  Oligonucleotide for detection of SNP TSC0029109
taggtgcgcgtcg

SEQ ID NO: 116216 - DNA, 13 bp, Artificial Sequence
  Oligonucleotide for detection of SNP TSC0029109
cgacgcgcaccta

SEQ ID NO: 116217 - DNA, 13 bp, Artificial Sequence
  Oligonucleotide for detection of SNP TSC0029109
tggtgtttatttg

SEQ ID NO: 116218 - DNA, 13 bp, Artificial Sequence
  Oligonucleotide for detection of SNP TSC0029109
caaataaacacca

SEQ ID NO: 116219 - DNA, 13 bp, Artificial Sequence
  Oligonucleotide for detection of SNP TSC0029109
tggtgtgtatttg

SEQ ID NO: 116220 - DNA, 13 bp, Artificial Sequence
  Oligonucleotide for detection of SNP TSC0029109
caaatacacacca

SEQ ID NO: 116221 - DNA, 13 bp, Artificial Sequence
  Oligonucleotide for detection of SNP TSC0029109
cggtgtttatttg

SEQ ID NO: 116222 - DNA, 13 bp, Artificial Sequence
  Oligonucleotide for detection of SNP TSC0029109
caaataaacaccg

SEQ ID NO: 116223 - DNA, 13 bp, Artificial Sequence
  Oligonucleotide for detection of SNP TSC0029109
cggtgtgtatttg

SEQ ID NO: 116224 - DNA, 13 bp, Artificial Sequence
  Oligonucleotide for detection of SNP TSC0029109
caaatacacaccg

SEQ ID NO: 116225 - DNA, 13 bp, Artificial Sequence
  Oligonucleotide for detection of SNP TSC0029109
tggcgtttatttg

SEQ ID NO: 116226 - DNA, 13 bp, Artificial Sequence
  Oligonucleotide for detection of SNP TSC0029109
caaataaacgcca

SEQ ID NO: 116227 - DNA, 13 bp, Artificial Sequence
  Oligonucleotide for detection of SNP TSC0029109
tggcgtgtatttg

SEQ ID NO: 116228 - DNA, 13 bp, Artificial Sequence
  Oligonucleotide for detection of SNP TSC0029109
caaatacacgcca

SEQ ID NO: 116229 - DNA, 13 bp, Artificial Sequence
  Oligonucleotide for detection of SNP TSC0029109
cggcgtttatttg

SEQ ID NO: 116230 - DNA, 13 bp, Artificial Sequence
  Oligonucleotide for detection of SNP TSC0029109
caaataaacgccg

SEQ ID NO: 116231 - DNA, 13 bp, Artificial Sequence
  Oligonucleotide for detection of SNP TSC0029109
tggtgcgtatttg

SEQ ID NO: 116232 - DNA, 13 bp, Artificial Sequence
  Oligonucleotide for detection of SNP TSC0029109
caaatacgcacca

SEQ ID NO: 116233 - DNA, 13 bp, Artificial Sequence
  Oligonucleotide for detection of SNP TSC0029109
cggcgtgtatttg

SEQ ID NO: 116234 - DNA, 13 bp, Artificial Sequence
  Oligonucleotide for detection of SNP TSC0029109
caaatacacgccg

SEQ ID NO: 116235 - DNA, 13 bp, Artificial Sequence
  Oligonucleotide for detection of SNP TSC0029109
cggtgcgtatttg

SEQ ID NO: 116236 - DNA, 13 bp, Artificial Sequence
  Oligonucleotide for detection of SNP TSC0029109
caaatacgcaccg

SEQ ID NO: 116237 - DNA, 13 bp, Artificial Sequence
  Oligonucleotide for detection of SNP TSC0029109
tggcgcgtatttg

SEQ ID NO: 116238 - DNA, 13 bp, Artificial Sequence
  Oligonucleotide for detection of SNP TSC0029109
caaatacgcgcca

SEQ ID NO: 116239 - DNA, 13 bp, Artificial Sequence
  Oligonucleotide for detection of SNP TSC0029109
cggcgcgtatttg

SEQ ID NO: 116240 - DNA, 13 bp, Artificial Sequence
  Oligonucleotide for detection of SNP TSC0029109
caaatacgcgccg

SEQ ID NO: 116241 - DNA, 13 bp, Artificial Sequence
  Oligonucleotide for detection of SNP TSC0029111
atgtggtgaaggy

SEQ ID NO: 116242 - DNA, 13 bp, Artificial Sequence
  Oligonucleotide for detection of SNP TSC0029111
rccttcaccacat

SEQ ID NO: 116243 - DNA, 13 bp, Artificial Sequence
  Oligonucleotide for detection of SNP TSC0029111
atgtggcgaaggy

SEQ ID NO: 116244 - DNA, 13 bp, Artificial Sequence
  Oligonucleotide for detection of SNP TSC0029111
rccttcgccacat

SEQ ID NO: 116245 - DNA, 13 bp, Artificial Sequence
  Oligonucleotide for detection of SNP TSC0029111
gtttttgttatat

SEQ ID NO: 116246 - DNA, 13 bp, Artificial Sequence
  Oligonucleotide for detection of SNP TSC0029111
atataacaaaaac

SEQ ID NO: 116247 - DNA, 13 bp, Artificial Sequence
  Oligonucleotide for detection of SNP TSC0029111
gtttttattatat

SEQ ID NO: 116248 - DNA, 13 bp, Artificial Sequence
  Oligonucleotide for detection of SNP TSC0029111
atataataaaaac

SEQ ID NO: 116249 - DNA, 13 bp, Artificial Sequence
  Oligonucleotide for detection of SNP TSC0029111
gttttcgttatat

SEQ ID NO: 116250 - DNA, 13 bp, Artificial Sequence
  Oligonucleotide for detection of SNP TSC0029111
atataacgaaaac

SEQ ID NO: 116251 - DNA, 13 bp, Artificial Sequence
  Oligonucleotide for detection of SNP TSC0029112
ttagttttaatat

SEQ ID NO: 116252 - DNA, 13 bp, Artificial Sequence
  Oligonucleotide for detection of SNP TSC0029112
atattaaaactaa

SEQ ID NO: 116253 - DNA, 13 bp, Artificial Sequence
  Oligonucleotide for detection of SNP TSC0029112
ttagttgtaatat

SEQ ID NO: 116254 - DNA, 13 bp, Artificial Sequence
  Oligonucleotide for detection of SNP TSC0029112
atattacaactaa

SEQ ID NO: 116255 - DNA, 13 bp, Artificial Sequence
  Oligonucleotide for detection of SNP TSC0029112
ttagtcgtaatat

SEQ ID NO: 116256 - DNA, 13 bp, Artificial Sequence
  Oligonucleotide for detection of SNP TSC0029112
atattacgactaa

SEQ ID NO: 116257 - DNA, 13 bp, Artificial Sequence
  Oligonucleotide for detection of SNP TSC0029112
atgttaggattgg

SEQ ID NO: 116258 - DNA, 13 bp, Artificial Sequence
  Oligonucleotide for detection of SNP TSC0029112
ccaatcctaacat

SEQ ID NO: 116259 - DNA, 13 bp, Artificial Sequence
  Oligonucleotide for detection of SNP TSC0029112
atgttatgattgg

SEQ ID NO: 116260 - DNA, 13 bp, Artificial Sequence
  Oligonucleotide for detection of SNP TSC0029112
ccaatcataacat

SEQ ID NO: 116261 - DNA, 13 bp, Artificial Sequence
  Oligonucleotide for detection of SNP TSC0029112
atgttacgattgg

SEQ ID NO: 116262 - DNA, 13 bp, Artificial Sequence
  Oligonucleotide for detection of SNP TSC0029112
ccaatcgtaacat

SEQ ID NO: 116263 - DNA, 13 bp, Artificial Sequence
  Oligonucleotide for detection of SNP TSC0029113
tttggggttttga

SEQ ID NO: 116264 - DNA, 13 bp, Artificial Sequence
  Oligonucleotide for detection of SNP TSC0029113
tcaaaaccccaaa

SEQ ID NO: 116265 - DNA, 13 bp, Artificial Sequence
  Oligonucleotide for detection of SNP TSC0029113
tttgggtttttga

SEQ ID NO: 116266 - DNA, 13 bp, Artificial Sequence
  Oligonucleotide for detection of SNP TSC0029113
tcaaaaacccaaa

SEQ ID NO: 116267 - DNA, 13 bp, Artificial Sequence
  Oligonucleotide for detection of SNP TSC0029113
ttaaaattttaga

SEQ ID NO: 116268 - DNA, 13 bp, Artificial Sequence
  Oligonucleotide for detection of SNP TSC0029113
tctaaaattttaa

SEQ ID NO: 116269 - DNA, 13 bp, Artificial Sequence
  Oligonucleotide for detection of SNP TSC0029113
ttaaaaatttaga

SEQ ID NO: 116270 - DNA, 13 bp, Artificial Sequence
  Oligonucleotide for detection of SNP TSC0029113
tctaaatttttaa

SEQ ID NO: 116271 - DNA, 13 bp, Artificial Sequence
  Oligonucleotide for detection of SNP TSC0029114
agttagttaggga

SEQ ID NO: 116272 - DNA, 13 bp, Artificial Sequence
  Oligonucleotide for detection of SNP TSC0029114
tccctaactaact

SEQ ID NO: 116273 - DNA, 13 bp, Artificial Sequence
  Oligonucleotide for detection of SNP TSC0029114
agttaggtaggga

SEQ ID NO: 116274 - DNA, 13 bp, Artificial Sequence
  Oligonucleotide for detection of SNP TSC0029114
tccctacctaact

SEQ ID NO: 116275 - DNA, 13 bp, Artificial Sequence
  Oligonucleotide for detection of SNP TSC0029114
tttttggttgatt

SEQ ID NO: 116276 - DNA, 13 bp, Artificial Sequence
  Oligonucleotide for detection of SNP TSC0029114
aatcaaccaaaaa

SEQ ID NO: 116277 - DNA, 13 bp, Artificial Sequence
  Oligonucleotide for detection of SNP TSC0029114
tttttgtttgatt

SEQ ID NO: 116278 - DNA, 13 bp, Artificial Sequence
  Oligonucleotide for detection of SNP TSC0029114
aatcaaacaaaaa

SEQ ID NO: 116279 - DNA, 13 bp, Artificial Sequence
  Oligonucleotide for detection of SNP TSC0029115
aattatagaaaay

SEQ ID NO: 116280 - DNA, 13 bp, Artificial Sequence
  Oligonucleotide for detection of SNP TSC0029115
rttttctataatt

SEQ ID NO: 116281 - DNA, 13 bp, Artificial Sequence
  Oligonucleotide for detection of SNP TSC0029115
aattatggaaaay

SEQ ID NO: 116282 - DNA, 13 bp, Artificial Sequence
  Oligonucleotide for detection of SNP TSC0029115
rttttccataatt

SEQ ID NO: 116283 - DNA, 13 bp, Artificial Sequence
  Oligonucleotide for detection of SNP TSC0029115
aattacggaaaay

SEQ ID NO: 116284 - DNA, 13 bp, Artificial Sequence
  Oligonucleotide for detection of SNP TSC0029115
rttttccgtaatt

SEQ ID NO: 116285 - DNA, 13 bp, Artificial Sequence
  Oligonucleotide for detection of SNP TSC0029116
atttggataatgy

SEQ ID NO: 116286 - DNA, 13 bp, Artificial Sequence
  Oligonucleotide for detection of SNP TSC0029116
rcattatccaaat

SEQ ID NO: 116287 - DNA, 13 bp, Artificial Sequence
  Oligonucleotide for detection of SNP TSC0029116
atttgggtaatgy

SEQ ID NO: 116288 - DNA, 13 bp, Artificial Sequence
  Oligonucleotide for detection of SNP TSC0029116
rcattacccaaat

SEQ ID NO: 116289 - DNA, 13 bp, Artificial Sequence
  Oligonucleotide for detection of SNP TSC0029118
ttggttgggtatg

SEQ ID NO: 116290 - DNA, 13 bp, Artificial Sequence
  Oligonucleotide for detection of SNP TSC0029118
catacccaaccaa

SEQ ID NO: 116291 - DNA, 13 bp, Artificial Sequence
  Oligonucleotide for detection of SNP TSC0029118
ttggttaggtatg

SEQ ID NO: 116292 - DNA, 13 bp, Artificial Sequence
  Oligonucleotide for detection of SNP TSC0029118
catacctaaccaa

SEQ ID NO: 116293 - DNA, 13 bp, Artificial Sequence
  Oligonucleotide for detection of SNP TSC0029118
ttggtcgggtatg

SEQ ID NO: 116294 - DNA, 13 bp, Artificial Sequence
  Oligonucleotide for detection of SNP TSC0029118
catacccgaccaa

SEQ ID NO: 116295 - DNA, 13 bp, Artificial Sequence
  Oligonucleotide for detection of SNP TSC0029118
ttggttaggtacg

SEQ ID NO: 116296 - DNA, 13 bp, Artificial Sequence
  Oligonucleotide for detection of SNP TSC0029118
cgtacctaaccaa

SEQ ID NO: 116297 - DNA, 13 bp, Artificial Sequence
  Oligonucleotide for detection of SNP TSC0029118
ttggttgggtacg

SEQ ID NO: 116298 - DNA, 13 bp, Artificial Sequence
  Oligonucleotide for detection of SNP TSC0029118
cgtacccaaccaa

SEQ ID NO: 116299 - DNA, 13 bp, Artificial Sequence
  Oligonucleotide for detection of SNP TSC0029118
ttggtcgggtacg

SEQ ID NO: 116300 - DNA, 13 bp, Artificial Sequence
  Oligonucleotide for detection of SNP TSC0029118
cgtacccgaccaa

SEQ ID NO: 116301 - DNA, 13 bp, Artificial Sequence
  Oligonucleotide for detection of SNP TSC0029121
ttttttgtgttaa

SEQ ID NO: 116302 - DNA, 13 bp, Artificial Sequence
  Oligonucleotide for detection of SNP TSC0029121
ttaacacaaaaaa

SEQ ID NO: 116303 - DNA, 13 bp, Artificial Sequence
  Oligonucleotide for detection of SNP TSC0029122
ttttgaaaaatag

SEQ ID NO: 116304 - DNA, 13 bp, Artificial Sequence
  Oligonucleotide for detection of SNP TSC0029122
ctatttttcaaaa

SEQ ID NO: 116305 - DNA, 13 bp, Artificial Sequence
  Oligonucleotide for detection of SNP TSC0029122
ttttgataaatag

SEQ ID NO: 116306 - DNA, 13 bp, Artificial Sequence
  Oligonucleotide for detection of SNP TSC0029122
ctatttatcaaaa

SEQ ID NO: 116307 - DNA, 13 bp, Artificial Sequence
  Oligonucleotide for detection of SNP TSC0029122
ttgtttattagaa

SEQ ID NO: 116308 - DNA, 13 bp, Artificial Sequence
  Oligonucleotide for detection of SNP TSC0029122
ttctaataaacaa

SEQ ID NO: 116309 - DNA, 13 bp, Artificial Sequence
  Oligonucleotide for detection of SNP TSC0029123
gtttatataatgt

SEQ ID NO: 116310 - DNA, 13 bp, Artificial Sequence
  Oligonucleotide for detection of SNP TSC0029123
acattatataaac

SEQ ID NO: 116311 - DNA, 13 bp, Artificial Sequence
  Oligonucleotide for detection of SNP TSC0029123
gtttatgtaatgt

SEQ ID NO: 116312 - DNA, 13 bp, Artificial Sequence
  Oligonucleotide for detection of SNP TSC0029123
acattacataaac

SEQ ID NO: 116313 - DNA, 13 bp, Artificial Sequence
  Oligonucleotide for detection of SNP TSC0029124
aagggttgtaatg

SEQ ID NO: 116314 - DNA, 13 bp, Artificial Sequence
  Oligonucleotide for detection of SNP TSC0029124
cattacaaccctt

SEQ ID NO: 116315 - DNA, 13 bp, Artificial Sequence
  Oligonucleotide for detection of SNP TSC0029124
aagggtcgtaatg

SEQ ID NO: 116316 - DNA, 13 bp, Artificial Sequence
  Oligonucleotide for detection of SNP TSC0029124
cattacgaccctt

SEQ ID NO: 116317 - DNA, 13 bp, Artificial Sequence
  Oligonucleotide for detection of SNP TSC0029125
tttaatggtatga

SEQ ID NO: 116318 - DNA, 13 bp, Artificial Sequence
  Oligonucleotide for detection of SNP TSC0029125
tcataccattaaa

SEQ ID NO: 116319 - DNA, 13 bp, Artificial Sequence
  Oligonucleotide for detection of SNP TSC0029125
tttaattgtatga

SEQ ID NO: 116320 - DNA, 13 bp, Artificial Sequence
  Oligonucleotide for detection of SNP TSC0029125
tcatacaattaaa

SEQ ID NO: 116321 - DNA, 13 bp, Artificial Sequence
  Oligonucleotide for detection of SNP TSC0029125
tttaacggtatga

SEQ ID NO: 116322 - DNA, 13 bp, Artificial Sequence
  Oligonucleotide for detection of SNP TSC0029125
tcataccgttaaa

SEQ ID NO: 116323 - DNA, 13 bp, Artificial Sequence
  Oligonucleotide for detection of SNP TSC0029125
ttatgttgttaaa

SEQ ID NO: 116324 - DNA, 13 bp, Artificial Sequence
  Oligonucleotide for detection of SNP TSC0029125
tttaacaacataa

SEQ ID NO: 116325 - DNA, 13 bp, Artificial Sequence
  Oligonucleotide for detection of SNP TSC0029125
ttatgtagttaaa

SEQ ID NO: 116326 - DNA, 13 bp, Artificial Sequence
  Oligonucleotide for detection of SNP TSC0029125
tttaactacataa

SEQ ID NO: 116327 - DNA, 13 bp, Artificial Sequence
  Oligonucleotide for detection of SNP TSC0029125
ttatgtcgttaaa

SEQ ID NO: 116328 - DNA, 13 bp, Artificial Sequence
  Oligonucleotide for detection of SNP TSC0029125
tttaacgacataa

SEQ ID NO: 116329 - DNA, 13 bp, Artificial Sequence
  Oligonucleotide for detection of SNP TSC0029126
ttttatgaatgty

SEQ ID NO: 116330 - DNA, 13 bp, Artificial Sequence
  Oligonucleotide for detection of SNP TSC0029126
racattcataaaa

SEQ ID NO: 116331 - DNA, 13 bp, Artificial Sequence
  Oligonucleotide for detection of SNP TSC0029126
ttttataaatgty

SEQ ID NO: 116332 - DNA, 13 bp, Artificial Sequence
  Oligonucleotide for detection of SNP TSC0029126
racatttataaaa

SEQ ID NO: 116333 - DNA, 13 bp, Artificial Sequence
  Oligonucleotide for detection of SNP TSC0029126
ttttatgaacgty

SEQ ID NO: 116334 - DNA, 13 bp, Artificial Sequence
  Oligonucleotide for detection of SNP TSC0029126
racgttcataaaa

SEQ ID NO: 116335 - DNA, 13 bp, Artificial Sequence
  Oligonucleotide for detection of SNP TSC0029126
ttttataaacgty

SEQ ID NO: 116336 - DNA, 13 bp, Artificial Sequence
  Oligonucleotide for detection of SNP TSC0029126
racgtttataaaa

SEQ ID NO: 116337 - DNA, 13 bp, Artificial Sequence
  Oligonucleotide for detection of SNP TSC0029127
gtaagaattgata

SEQ ID NO: 116338 - DNA, 13 bp, Artificial Sequence
  Oligonucleotide for detection of SNP TSC0029127
tatcaattcttac

SEQ ID NO: 116339 - DNA, 13 bp, Artificial Sequence
  Oligonucleotide for detection of SNP TSC0029127
gtaagatttgata

SEQ ID NO: 116340 - DNA, 13 bp, Artificial Sequence
  Oligonucleotide for detection of SNP TSC0029127
tatcaaatcttac

SEQ ID NO: 116341 - DNA, 13 bp, Artificial Sequence
  Oligonucleotide for detection of SNP TSC0029127
tattagtttttgy

SEQ ID NO: 116342 - DNA, 13 bp, Artificial Sequence
  Oligonucleotide for detection of SNP TSC0029127
rcaaaaactaata

SEQ ID NO: 116343 - DNA, 13 bp, Artificial Sequence
  Oligonucleotide for detection of SNP TSC0029127
tattaggttttgy

SEQ ID NO: 116344 - DNA, 13 bp, Artificial Sequence
  Oligonucleotide for detection of SNP TSC0029127
rcaaaacctaata

SEQ ID NO: 116345 - DNA, 13 bp, Artificial Sequence
  Oligonucleotide for detection of SNP TSC0029130
ttttgtagttata

SEQ ID NO: 116346 - DNA, 13 bp, Artificial Sequence
  Oligonucleotide for detection of SNP TSC0029130
tataactacaaaa

SEQ ID NO: 116347 - DNA, 13 bp, Artificial Sequence
  Oligonucleotide for detection of SNP TSC0029130
ttttgtggttata

SEQ ID NO: 116348 - DNA, 13 bp, Artificial Sequence
  Oligonucleotide for detection of SNP TSC0029130
tataaccacaaaa

SEQ ID NO: 116349 - DNA, 13 bp, Artificial Sequence
  Oligonucleotide for detection of SNP TSC0029130
ttttgcggttata

SEQ ID NO: 116350 - DNA, 13 bp, Artificial Sequence
  Oligonucleotide for detection of SNP TSC0029130
tataaccgcaaaa

SEQ ID NO: 116351 - DNA, 13 bp, Artificial Sequence
  Oligonucleotide for detection of SNP TSC0029130
tatgattgtaaaa

SEQ ID NO: 116352 - DNA, 13 bp, Artificial Sequence
  Oligonucleotide for detection of SNP TSC0029130
ttttacaatcata

SEQ ID NO: 116353 - DNA, 13 bp, Artificial Sequence
  Oligonucleotide for detection of SNP TSC0029130
tatgatcgtaaaa

SEQ ID NO: 116354 - DNA, 13 bp, Artificial Sequence
  Oligonucleotide for detection of SNP TSC0029130
ttttacgatcata

SEQ ID NO: 116355 - DNA, 13 bp, Artificial Sequence
  Oligonucleotide for detection of SNP TSC0029131
ttgtgtatatgtg

SEQ ID NO: 116356 - DNA, 13 bp, Artificial Sequence
  Oligonucleotide for detection of SNP TSC0029131
cacatatacacaa

SEQ ID NO: 116357 - DNA, 13 bp, Artificial Sequence
  Oligonucleotide for detection of SNP TSC0029131
ttgtgtgtatgtg

SEQ ID NO: 116358 - DNA, 13 bp, Artificial Sequence
  Oligonucleotide for detection of SNP TSC0029131
cacatacacacaa

SEQ ID NO: 116359 - DNA, 13 bp, Artificial Sequence
  Oligonucleotide for detection of SNP TSC0029133
tatgtagttataa

SEQ ID NO: 116360 - DNA, 13 bp, Artificial Sequence
  Oligonucleotide for detection of SNP TSC0029133
ttataactacata

SEQ ID NO: 116361 - DNA, 13 bp, Artificial Sequence
  Oligonucleotide for detection of SNP TSC0029133
tatgtaattataa

SEQ ID NO: 116362 - DNA, 13 bp, Artificial Sequence
  Oligonucleotide for detection of SNP TSC0029133
ttataattacata

SEQ ID NO: 116363 - DNA, 13 bp, Artificial Sequence
  Oligonucleotide for detection of SNP TSC0029134
tatgggatgatta

SEQ ID NO: 116364 - DNA, 13 bp, Artificial Sequence
  Oligonucleotide for detection of SNP TSC0029134
taatcatcccata

SEQ ID NO: 116365 - DNA, 13 bp, Artificial Sequence
  Oligonucleotide for detection of SNP TSC0029134
tatgggttgatta

SEQ ID NO: 116366 - DNA, 13 bp, Artificial Sequence
  Oligonucleotide for detection of SNP TSC0029134
taatcaacccata

SEQ ID NO: 116367 - DNA, 13 bp, Artificial Sequence
  Oligonucleotide for detection of SNP TSC0029134
tggttattttata

SEQ ID NO: 116368 - DNA, 13 bp, Artificial Sequence
  Oligonucleotide for detection of SNP TSC0029134
tataaaataacca

SEQ ID NO: 116369 - DNA, 13 bp, Artificial Sequence
  Oligonucleotide for detection of SNP TSC0029135
tatttatttatga

SEQ ID NO: 116370 - DNA, 13 bp, Artificial Sequence
  Oligonucleotide for detection of SNP TSC0029135
tcataaataaata

SEQ ID NO: 116371 - DNA, 13 bp, Artificial Sequence
  Oligonucleotide for detection of SNP TSC0029135
tatttagttatga

SEQ ID NO: 116372 - DNA, 13 bp, Artificial Sequence
  Oligonucleotide for detection of SNP TSC0029135
tcataactaaata

SEQ ID NO: 116373 - DNA, 13 bp, Artificial Sequence
  Oligonucleotide for detection of SNP TSC0029135
ttatgggtgaata

SEQ ID NO: 116374 - DNA, 13 bp, Artificial Sequence
  Oligonucleotide for detection of SNP TSC0029135
tattcacccataa

SEQ ID NO: 116375 - DNA, 13 bp, Artificial Sequence
  Oligonucleotide for detection of SNP TSC0029135
ttatggttgaata

SEQ ID NO: 116376 - DNA, 13 bp, Artificial Sequence
  Oligonucleotide for detection of SNP TSC0029135
tattcaaccataa

SEQ ID NO: 116377 - DNA, 13 bp, Artificial Sequence
  Oligonucleotide for detection of SNP TSC0029136
taaaagttttgag

SEQ ID NO: 116378 - DNA, 13 bp, Artificial Sequence
  Oligonucleotide for detection of SNP TSC0029136
ctcaaaactttta

SEQ ID NO: 116379 - DNA, 13 bp, Artificial Sequence
  Oligonucleotide for detection of SNP TSC0029136
taaaaggtttgag

SEQ ID NO: 116380 - DNA, 13 bp, Artificial Sequence
  Oligonucleotide for detection of SNP TSC0029136
ctcaaacctttta

SEQ ID NO: 116381 - DNA, 13 bp, Artificial Sequence
  Oligonucleotide for detection of SNP TSC0029137
gtaagagttgtgg

SEQ ID NO: 116382 - DNA, 13 bp, Artificial Sequence
  Oligonucleotide for detection of SNP TSC0029137
ccacaactcttac

SEQ ID NO: 116383 - DNA, 13 bp, Artificial Sequence
  Oligonucleotide for detection of SNP TSC0029137
gtaagaattgtgg

SEQ ID NO: 116384 - DNA, 13 bp, Artificial Sequence
  Oligonucleotide for detection of SNP TSC0029137
ccacaattcttac

SEQ ID NO: 116385 - DNA, 13 bp, Artificial Sequence
  Oligonucleotide for detection of SNP TSC0029137
gtaagagttgcgg

SEQ ID NO: 116386 - DNA, 13 bp, Artificial Sequence
  Oligonucleotide for detection of SNP TSC0029137
ccgcaactcttac

SEQ ID NO: 116387 - DNA, 13 bp, Artificial Sequence
  Oligonucleotide for detection of SNP TSC0029137
gtaagaattgcgg

SEQ ID NO: 116388 - DNA, 13 bp, Artificial Sequence
  Oligonucleotide for detection of SNP TSC0029137
ccgcaattcttac

SEQ ID NO: 116389 - DNA, 13 bp, Artificial Sequence
  Oligonucleotide for detection of SNP TSC0029139
agattttgggatg

SEQ ID NO: 116390 - DNA, 13 bp, Artificial Sequence
  Oligonucleotide for detection of SNP TSC0029139
catcccaaaatct

SEQ ID NO: 116391 - DNA, 13 bp, Artificial Sequence
  Oligonucleotide for detection of SNP TSC0029139
agatttggggatg

SEQ ID NO: 116392 - DNA, 13 bp, Artificial Sequence
  Oligonucleotide for detection of SNP TSC0029139
catccccaaatct

SEQ ID NO: 116393 - DNA, 13 bp, Artificial Sequence
  Oligonucleotide for detection of SNP TSC0029139
agatttcgggatg

SEQ ID NO: 116394 - DNA, 13 bp, Artificial Sequence
  Oligonucleotide for detection of SNP TSC0029139
catcccgaaatct

SEQ ID NO: 116395 - DNA, 13 bp, Artificial Sequence
  Oligonucleotide for detection of SNP TSC0029139
tattttgaagttt

SEQ ID NO: 116396 - DNA, 13 bp, Artificial Sequence
  Oligonucleotide for detection of SNP TSC0029139
aaacttcaaaata

SEQ ID NO: 116397 - DNA, 13 bp, Artificial Sequence
  Oligonucleotide for detection of SNP TSC0029139
tatttttaagttt

SEQ ID NO: 116398 - DNA, 13 bp, Artificial Sequence
  Oligonucleotide for detection of SNP TSC0029139
aaacttaaaaata

SEQ ID NO: 116399 - DNA, 13 bp, Artificial Sequence
  Oligonucleotide for detection of SNP TSC0029139
tatttcgaagttt

SEQ ID NO: 116400 - DNA, 13 bp, Artificial Sequence
  Oligonucleotide for detection of SNP TSC0029139
aaacttcgaaata

SEQ ID NO: 116401 - DNA, 13 bp, Artificial Sequence
  Oligonucleotide for detection of SNP TSC0029142
tttaagagtaggt

SEQ ID NO: 116402 - DNA, 13 bp, Artificial Sequence
  Oligonucleotide for detection of SNP TSC0029142
acctactcttaaa

SEQ ID NO: 116403 - DNA, 13 bp, Artificial Sequence
  Oligonucleotide for detection of SNP TSC0029142
tttaagggtaggt

SEQ ID NO: 116404 - DNA, 13 bp, Artificial Sequence
  Oligonucleotide for detection of SNP TSC0029142
acctacccttaaa

SEQ ID NO: 116405 - DNA, 13 bp, Artificial Sequence
  Oligonucleotide for detection of SNP TSC0029143
gaaattgaaggtt

SEQ ID NO: 116406 - DNA, 13 bp, Artificial Sequence
  Oligonucleotide for detection of SNP TSC0029143
aaccttcaatttc

SEQ ID NO: 116407 - DNA, 13 bp, Artificial Sequence
  Oligonucleotide for detection of SNP TSC0029143
gaaatttaaggtt

SEQ ID NO: 116408 - DNA, 13 bp, Artificial Sequence
  Oligonucleotide for detection of SNP TSC0029143
aaccttaaatttc

SEQ ID NO: 116409 - DNA, 13 bp, Artificial Sequence
  Oligonucleotide for detection of SNP TSC0029143
gaaatcgaaggtt

SEQ ID NO: 116410 - DNA, 13 bp, Artificial Sequence
  Oligonucleotide for detection of SNP TSC0029143
aaccttcgatttc

SEQ ID NO: 116411 - DNA, 13 bp, Artificial Sequence
  Oligonucleotide for detection of SNP TSC0029143
agttttaggttty

SEQ ID NO: 116412 - DNA, 13 bp, Artificial Sequence
  Oligonucleotide for detection of SNP TSC0029143
raaacctaaaact

SEQ ID NO: 116413 - DNA, 13 bp, Artificial Sequence
  Oligonucleotide for detection of SNP TSC0029144
ttatttatgggaa

SEQ ID NO: 116414 - DNA, 13 bp, Artificial Sequence
  Oligonucleotide for detection of SNP TSC0029144
ttcccataaataa

SEQ ID NO: 116415 - DNA, 13 bp, Artificial Sequence
  Oligonucleotide for detection of SNP TSC0029144
ttatttgtgggaa

SEQ ID NO: 116416 - DNA, 13 bp, Artificial Sequence
  Oligonucleotide for detection of SNP TSC0029144
ttcccacaaataa

SEQ ID NO: 116417 - DNA, 13 bp, Artificial Sequence
  Oligonucleotide for detection of SNP TSC0029144
ttattcgtgggaa

SEQ ID NO: 116418 - DNA, 13 bp, Artificial Sequence
  Oligonucleotide for detection of SNP TSC0029144
ttcccacgaataa

SEQ ID NO: 116419 - DNA, 13 bp, Artificial Sequence
  Oligonucleotide for detection of SNP TSC0029144
tttttatgggtgg

SEQ ID NO: 116420 - DNA, 13 bp, Artificial Sequence
  Oligonucleotide for detection of SNP TSC0029144
ccacccataaaaa

SEQ ID NO: 116421 - DNA, 13 bp, Artificial Sequence
  Oligonucleotide for detection of SNP TSC0029144
tttttacgggtgg

SEQ ID NO: 116422 - DNA, 13 bp, Artificial Sequence
  Oligonucleotide for detection of SNP TSC0029144
ccacccgtaaaaa

SEQ ID NO: 116423 - DNA, 13 bp, Artificial Sequence
  Oligonucleotide for detection of SNP TSC0029145
tgtttgaggtgtt

SEQ ID NO: 116424 - DNA, 13 bp, Artificial Sequence
  Oligonucleotide for detection of SNP TSC0029145
aacacctcaaaca

SEQ ID NO: 116425 - DNA, 13 bp, Artificial Sequence
  Oligonucleotide for detection of SNP TSC0029145
tgtttggggtgtt

SEQ ID NO: 116426 - DNA, 13 bp, Artificial Sequence
  Oligonucleotide for detection of SNP TSC0029145
aacaccccaaaca

SEQ ID NO: 116427 - DNA, 13 bp, Artificial Sequence
  Oligonucleotide for detection of SNP TSC0029145
tgttcgaggtgtt

SEQ ID NO: 116428 - DNA, 13 bp, Artificial Sequence
  Oligonucleotide for detection of SNP TSC0029145
aacacctcgaaca

SEQ ID NO: 116429 - DNA, 13 bp, Artificial Sequence
  Oligonucleotide for detection of SNP TSC0029145
tgttcggggtgtt

SEQ ID NO: 116430 - DNA, 13 bp, Artificial Sequence
  Oligonucleotide for detection of SNP TSC0029145
aacaccccgaaca

SEQ ID NO: 116431 - DNA, 13 bp, Artificial Sequence
  Oligonucleotide for detection of SNP TSC0029145
tgtttgaggcgtt

SEQ ID NO: 116432 - DNA, 13 bp, Artificial Sequence
  Oligonucleotide for detection of SNP TSC0029145
aacgcctcaaaca

SEQ ID NO: 116433 - DNA, 13 bp, Artificial Sequence
  Oligonucleotide for detection of SNP TSC0029145
tgtttggggcgtt

SEQ ID NO: 116434 - DNA, 13 bp, Artificial Sequence
  Oligonucleotide for detection of SNP TSC0029145
aacgccccaaaca

SEQ ID NO: 116435 - DNA, 13 bp, Artificial Sequence
  Oligonucleotide for detection of SNP TSC0029145
tgttcgaggcgtt

SEQ ID NO: 116436 - DNA, 13 bp, Artificial Sequence
  Oligonucleotide for detection of SNP TSC0029145
aacgcctcgaaca

SEQ ID NO: 116437 - DNA, 13 bp, Artificial Sequence
  Oligonucleotide for detection of SNP TSC0029145
tgttcggggcgtt

SEQ ID NO: 116438 - DNA, 13 bp, Artificial Sequence
  Oligonucleotide for detection of SNP TSC0029145
aacgccccgaaca

SEQ ID NO: 116439 - DNA, 13 bp, Artificial Sequence
  Oligonucleotide for detection of SNP TSC0029146
gtttgtggtaaay

SEQ ID NO: 116440 - DNA, 13 bp, Artificial Sequence
  Oligonucleotide for detection of SNP TSC0029146
rtttaccacaaac

SEQ ID NO: 116441 - DNA, 13 bp, Artificial Sequence
  Oligonucleotide for detection of SNP TSC0029146
gtttgtagtaaay

SEQ ID NO: 116442 - DNA, 13 bp, Artificial Sequence
  Oligonucleotide for detection of SNP TSC0029146
rtttactacaaac

SEQ ID NO: 116443 - DNA, 13 bp, Artificial Sequence
  Oligonucleotide for detection of SNP TSC0029151
ataaatttatttt

SEQ ID NO: 116444 - DNA, 13 bp, Artificial Sequence
  Oligonucleotide for detection of SNP TSC0029151
aaaataaatttat

SEQ ID NO: 116445 - DNA, 13 bp, Artificial Sequence
  Oligonucleotide for detection of SNP TSC0029152
ttggggaatttag

SEQ ID NO: 116446 - DNA, 13 bp, Artificial Sequence
  Oligonucleotide for detection of SNP TSC0029152
ctaaattccccaa

SEQ ID NO: 116447 - DNA, 13 bp, Artificial Sequence
  Oligonucleotide for detection of SNP TSC0029154
ttgattgtggaat

SEQ ID NO: 116448 - DNA, 13 bp, Artificial Sequence
  Oligonucleotide for detection of SNP TSC0029154
attccacaatcaa

SEQ ID NO: 116449 - DNA, 13 bp, Artificial Sequence
  Oligonucleotide for detection of SNP TSC0029154
ttgattttggaat

SEQ ID NO: 116450 - DNA, 13 bp, Artificial Sequence
  Oligonucleotide for detection of SNP TSC0029154
attccaaaatcaa

SEQ ID NO: 116451 - DNA, 13 bp, Artificial Sequence
  Oligonucleotide for detection of SNP TSC0029154
ttgatcgtggaat

SEQ ID NO: 116452 - DNA, 13 bp, Artificial Sequence
  Oligonucleotide for detection of SNP TSC0029154
attccacgatcaa

SEQ ID NO: 116453 - DNA, 13 bp, Artificial Sequence
  Oligonucleotide for detection of SNP TSC0029154
attttatggttaa

SEQ ID NO: 116454 - DNA, 13 bp, Artificial Sequence
  Oligonucleotide for detection of SNP TSC0029154
ttaaccataaaat

SEQ ID NO: 116455 - DNA, 13 bp, Artificial Sequence
  Oligonucleotide for detection of SNP TSC0029154
attttaaggttaa

SEQ ID NO: 116456 - DNA, 13 bp, Artificial Sequence
  Oligonucleotide for detection of SNP TSC0029154
ttaaccttaaaat

SEQ ID NO: 116457 - DNA, 13 bp, Artificial Sequence
  Oligonucleotide for detection of SNP TSC0029154
attttacggttaa

SEQ ID NO: 116458 - DNA, 13 bp, Artificial Sequence
  Oligonucleotide for detection of SNP TSC0029154
ttaaccgtaaaat

SEQ ID NO: 116459 - DNA, 13 bp, Artificial Sequence
  Oligonucleotide for detection of SNP TSC0029155
ttgattatattgy

SEQ ID NO: 116460 - DNA, 13 bp, Artificial Sequence
  Oligonucleotide for detection of SNP TSC0029155
rcaatataatcaa

SEQ ID NO: 116461 - DNA, 13 bp, Artificial Sequence
  Oligonucleotide for detection of SNP TSC0029155
ttgattttattgy

SEQ ID NO: 116462 - DNA, 13 bp, Artificial Sequence
  Oligonucleotide for detection of SNP TSC0029155
rcaataaaatcaa

SEQ ID NO: 116463 - DNA, 13 bp, Artificial Sequence
  Oligonucleotide for detection of SNP TSC0029155
ttgattatatcgy

SEQ ID NO: 116464 - DNA, 13 bp, Artificial Sequence
  Oligonucleotide for detection of SNP TSC0029155
rcgatataatcaa

SEQ ID NO: 116465 - DNA, 13 bp, Artificial Sequence
  Oligonucleotide for detection of SNP TSC0029155
ttgattttatcgy

SEQ ID NO: 116466 - DNA, 13 bp, Artificial Sequence
  Oligonucleotide for detection of SNP TSC0029155
rcgataaaatcaa

SEQ ID NO: 116467 - DNA, 13 bp, Artificial Sequence
  Oligonucleotide for detection of SNP TSC0029155
gtgatgtagttag

SEQ ID NO: 116468 - DNA, 13 bp, Artificial Sequence
  Oligonucleotide for detection of SNP TSC0029155
ctaactacatcac

SEQ ID NO: 116469 - DNA, 13 bp, Artificial Sequence
  Oligonucleotide for detection of SNP TSC0029155
gtgatgaagttag

SEQ ID NO: 116470 - DNA, 13 bp, Artificial Sequence
  Oligonucleotide for detection of SNP TSC0029155
ctaacttcatcac

SEQ ID NO: 116471 - DNA, 13 bp, Artificial Sequence
  Oligonucleotide for detection of SNP TSC0029155
gcgatgtagttag

SEQ ID NO: 116472 - DNA, 13 bp, Artificial Sequence
  Oligonucleotide for detection of SNP TSC0029155
ctaactacatcgc

SEQ ID NO: 116473 - DNA, 13 bp, Artificial Sequence
  Oligonucleotide for detection of SNP TSC0029155
gcgatgaagttag

SEQ ID NO: 116474 - DNA, 13 bp, Artificial Sequence
  Oligonucleotide for detection of SNP TSC0029155
ctaacttcatcgc

SEQ ID NO: 116475 - DNA, 13 bp, Artificial Sequence
  Oligonucleotide for detection of SNP TSC0029156
gaaagtgtgtgga

SEQ ID NO: 116476 - DNA, 13 bp, Artificial Sequence
  Oligonucleotide for detection of SNP TSC0029156
tccacacactttc

SEQ ID NO: 116477 - DNA, 13 bp, Artificial Sequence
  Oligonucleotide for detection of SNP TSC0029156
gaaagtatgtgga

SEQ ID NO: 116478 - DNA, 13 bp, Artificial Sequence
  Oligonucleotide for detection of SNP TSC0029156
tccacatactttc

SEQ ID NO: 116479 - DNA, 13 bp, Artificial Sequence
  Oligonucleotide for detection of SNP TSC0029156
gaaagcgtgtgga

SEQ ID NO: 116480 - DNA, 13 bp, Artificial Sequence
  Oligonucleotide for detection of SNP TSC0029156
tccacacgctttc

SEQ ID NO: 116481 - DNA, 13 bp, Artificial Sequence
  Oligonucleotide for detection of SNP TSC0029157
gtttttttgttty

SEQ ID NO: 116482 - DNA, 13 bp, Artificial Sequence
  Oligonucleotide for detection of SNP TSC0029157
raaacaaaaaaac

SEQ ID NO: 116483 - DNA, 13 bp, Artificial Sequence
  Oligonucleotide for detection of SNP TSC0029157
gaggtagaaggay

SEQ ID NO: 116484 - DNA, 13 bp, Artificial Sequence
  Oligonucleotide for detection of SNP TSC0029157
rtccttctacctc

SEQ ID NO: 116485 - DNA, 13 bp, Artificial Sequence
  Oligonucleotide for detection of SNP TSC0029157
gaggtataaggay

SEQ ID NO: 116486 - DNA, 13 bp, Artificial Sequence
  Oligonucleotide for detection of SNP TSC0029157
rtccttatacctc

SEQ ID NO: 116487 - DNA, 13 bp, Artificial Sequence
  Oligonucleotide for detection of SNP TSC0029158
tttttgttatttt

SEQ ID NO: 116488 - DNA, 13 bp, Artificial Sequence
  Oligonucleotide for detection of SNP TSC0029158
aaaataacaaaaa

SEQ ID NO: 116489 - DNA, 13 bp, Artificial Sequence
  Oligonucleotide for detection of SNP TSC0029158
aaggtattagaaa

SEQ ID NO: 116490 - DNA, 13 bp, Artificial Sequence
  Oligonucleotide for detection of SNP TSC0029158
tttctaatacctt

SEQ ID NO: 116491 - DNA, 13 bp, Artificial Sequence
  Oligonucleotide for detection of SNP TSC0029158
aaggtaatagaaa

SEQ ID NO: 116492 - DNA, 13 bp, Artificial Sequence
  Oligonucleotide for detection of SNP TSC0029158
tttctattacctt

SEQ ID NO: 116493 - DNA, 13 bp, Artificial Sequence
  Oligonucleotide for detection of SNP TSC0029159
taaaagttaagag

SEQ ID NO: 116494 - DNA, 13 bp, Artificial Sequence
  Oligonucleotide for detection of SNP TSC0029159
ctcttaactttta

SEQ ID NO: 116495 - DNA, 13 bp, Artificial Sequence
  Oligonucleotide for detection of SNP TSC0029159
taaaagataagag

SEQ ID NO: 116496 - DNA, 13 bp, Artificial Sequence
  Oligonucleotide for detection of SNP TSC0029159
ctcttatctttta

SEQ ID NO: 116497 - DNA, 13 bp, Artificial Sequence
  Oligonucleotide for detection of SNP TSC0029160
taataggttttty

SEQ ID NO: 116498 - DNA, 13 bp, Artificial Sequence
  Oligonucleotide for detection of SNP TSC0029160
raaaaacctatta

SEQ ID NO: 116499 - DNA, 13 bp, Artificial Sequence
  Oligonucleotide for detection of SNP TSC0029160
taatagtttttty

SEQ ID NO: 116500 - DNA, 13 bp, Artificial Sequence
  Oligonucleotide for detection of SNP TSC0029160
raaaaaactatta

SEQ ID NO: 116501 - DNA, 13 bp, Artificial Sequence
  Oligonucleotide for detection of SNP TSC0029160
ggggagtttgtta

SEQ ID NO: 116502 - DNA, 13 bp, Artificial Sequence
  Oligonucleotide for detection of SNP TSC0029160
taacaaactcccc

SEQ ID NO: 116503 - DNA, 13 bp, Artificial Sequence
  Oligonucleotide for detection of SNP TSC0029160
ggggagattgtta

SEQ ID NO: 116504 - DNA, 13 bp, Artificial Sequence
  Oligonucleotide for detection of SNP TSC0029160
taacaatctcccc

SEQ ID NO: 116505 - DNA, 13 bp, Artificial Sequence
  Oligonucleotide for detection of SNP TSC0029161
agagtataaagay

SEQ ID NO: 116506 - DNA, 13 bp, Artificial Sequence
  Oligonucleotide for detection of SNP TSC0029161
rtctttatactct

SEQ ID NO: 116507 - DNA, 13 bp, Artificial Sequence
  Oligonucleotide for detection of SNP TSC0029161
agagtagaaagay

SEQ ID NO: 116508 - DNA, 13 bp, Artificial Sequence
  Oligonucleotide for detection of SNP TSC0029161
rtctttctactct

SEQ ID NO: 116509 - DNA, 13 bp, Artificial Sequence
  Oligonucleotide for detection of SNP TSC0029162
tgtgtggagatgt

SEQ ID NO: 116510 - DNA, 13 bp, Artificial Sequence
  Oligonucleotide for detection of SNP TSC0029162
acatctccacaca

SEQ ID NO: 116511 - DNA, 13 bp, Artificial Sequence
  Oligonucleotide for detection of SNP TSC0029162
tgtgtgaagatgt

SEQ ID NO: 116512 - DNA, 13 bp, Artificial Sequence
  Oligonucleotide for detection of SNP TSC0029162
acatcttcacaca

SEQ ID NO: 116513 - DNA, 13 bp, Artificial Sequence
  Oligonucleotide for detection of SNP TSC0029164
tatataatttaga

SEQ ID NO: 116514 - DNA, 13 bp, Artificial Sequence
  Oligonucleotide for detection of SNP TSC0029164
tctaaattatata

SEQ ID NO: 116515 - DNA, 13 bp, Artificial Sequence
  Oligonucleotide for detection of SNP TSC0029164
tttggattgtgta

SEQ ID NO: 116516 - DNA, 13 bp, Artificial Sequence
  Oligonucleotide for detection of SNP TSC0029164
tacacaatccaaa

SEQ ID NO: 116517 - DNA, 13 bp, Artificial Sequence
  Oligonucleotide for detection of SNP TSC0029167
gaatttaggaggt

SEQ ID NO: 116518 - DNA, 13 bp, Artificial Sequence
  Oligonucleotide for detection of SNP TSC0029167
acctcctaaattc

SEQ ID NO: 116519 - DNA, 13 bp, Artificial Sequence
  Oligonucleotide for detection of SNP TSC0029167
gaatttgggaggt

SEQ ID NO: 116520 - DNA, 13 bp, Artificial Sequence
  Oligonucleotide for detection of SNP TSC0029167
acctcccaaattc

SEQ ID NO: 116521 - DNA, 13 bp, Artificial Sequence
  Oligonucleotide for detection of SNP TSC0029167
gaattcgggaggt

SEQ ID NO: 116522 - DNA, 13 bp, Artificial Sequence
  Oligonucleotide for detection of SNP TSC0029167
acctcccgaattc

SEQ ID NO: 116523 - DNA, 13 bp, Artificial Sequence
  Oligonucleotide for detection of SNP TSC0029167
attttttgggtty

SEQ ID NO: 116524 - DNA, 13 bp, Artificial Sequence
  Oligonucleotide for detection of SNP TSC0029167
raacccaaaaaat

SEQ ID NO: 116525 - DNA, 13 bp, Artificial Sequence
  Oligonucleotide for detection of SNP TSC0029167
atttttcgggtty

SEQ ID NO: 116526 - DNA, 13 bp, Artificial Sequence
  Oligonucleotide for detection of SNP TSC0029167
raacccgaaaaat

SEQ ID NO: 116527 - DNA, 13 bp, Artificial Sequence
  Oligonucleotide for detection of SNP TSC0029169
gtagttatgaagy

SEQ ID NO: 116528 - DNA, 13 bp, Artificial Sequence
  Oligonucleotide for detection of SNP TSC0029169
rcttcataactac

SEQ ID NO: 116529 - DNA, 13 bp, Artificial Sequence
  Oligonucleotide for detection of SNP TSC0029169
gtagttgtgaagy

SEQ ID NO: 116530 - DNA, 13 bp, Artificial Sequence
  Oligonucleotide for detection of SNP TSC0029169
rcttcacaactac

SEQ ID NO: 116531 - DNA, 13 bp, Artificial Sequence
  Oligonucleotide for detection of SNP TSC0029169
gtagtcgtgaagy

SEQ ID NO: 116532 - DNA, 13 bp, Artificial Sequence
  Oligonucleotide for detection of SNP TSC0029169
rcttcacgactac

SEQ ID NO: 116533 - DNA, 13 bp, Artificial Sequence
  Oligonucleotide for detection of SNP TSC0029169
gttttatggttay

SEQ ID NO: 116534 - DNA, 13 bp, Artificial Sequence
  Oligonucleotide for detection of SNP TSC0029169
rtaaccataaaac

SEQ ID NO: 116535 - DNA, 13 bp, Artificial Sequence
  Oligonucleotide for detection of SNP TSC0029169
gttttacggttay

SEQ ID NO: 116536 - DNA, 13 bp, Artificial Sequence
  Oligonucleotide for detection of SNP TSC0029169
rtaaccgtaaaac

SEQ ID NO: 116537 - DNA, 13 bp, Artificial Sequence
  Oligonucleotide for detection of SNP TSC0029170
ggtgattagtttg

SEQ ID NO: 116538 - DNA, 13 bp, Artificial Sequence
  Oligonucleotide for detection of SNP TSC0029170
caaactaatcacc

SEQ ID NO: 116539 - DNA, 13 bp, Artificial Sequence
  Oligonucleotide for detection of SNP TSC0029170
taggttgattaty

SEQ ID NO: 116540 - DNA, 13 bp, Artificial Sequence
  Oligonucleotide for detection of SNP TSC0029170
rataatcaaccta

SEQ ID NO: 116541 - DNA, 13 bp, Artificial Sequence
  Oligonucleotide for detection of SNP TSC0029170
taggtttattaty

SEQ ID NO: 116542 - DNA, 13 bp, Artificial Sequence
  Oligonucleotide for detection of SNP TSC0029170
rataataaaccta

SEQ ID NO: 116543 - DNA, 13 bp, Artificial Sequence
  Oligonucleotide for detection of SNP TSC0029171
gaatgggggaaga

SEQ ID NO: 116544 - DNA, 13 bp, Artificial Sequence
  Oligonucleotide for detection of SNP TSC0029171
tcttcccccattc

SEQ ID NO: 116545 - DNA, 13 bp, Artificial Sequence
  Oligonucleotide for detection of SNP TSC0029171
gaatggtggaaga

SEQ ID NO: 116546 - DNA, 13 bp, Artificial Sequence
  Oligonucleotide for detection of SNP TSC0029171
tcttccaccattc

SEQ ID NO: 116547 - DNA, 13 bp, Artificial Sequence
  Oligonucleotide for detection of SNP TSC0029172
gatttttggaatg

SEQ ID NO: 116548 - DNA, 13 bp, Artificial Sequence
  Oligonucleotide for detection of SNP TSC0029172
cattccaaaaatc

SEQ ID NO: 116549 - DNA, 13 bp, Artificial Sequence
  Oligonucleotide for detection of SNP TSC0029172
gattttcggaatg

SEQ ID NO: 116550 - DNA, 13 bp, Artificial Sequence
  Oligonucleotide for detection of SNP TSC0029172
cattccgaaaatc

SEQ ID NO: 116551 - DNA, 13 bp, Artificial Sequence
  Oligonucleotide for detection of SNP TSC0029172
tatttcgggaaty

SEQ ID NO: 116552 - DNA, 13 bp, Artificial Sequence
  Oligonucleotide for detection of SNP TSC0029172
rattcccgaaata

SEQ ID NO: 116553 - DNA, 13 bp, Artificial Sequence
  Oligonucleotide for detection of SNP TSC0029174
tttatttgaagag

SEQ ID NO: 116554 - DNA, 13 bp, Artificial Sequence
  Oligonucleotide for detection of SNP TSC0029174
ctcttcaaataaa

SEQ ID NO: 116555 - DNA, 13 bp, Artificial Sequence
  Oligonucleotide for detection of SNP TSC0029174
tttattcgaagag

SEQ ID NO: 116556 - DNA, 13 bp, Artificial Sequence
  Oligonucleotide for detection of SNP TSC0029174
ctcttcgaataaa

SEQ ID NO: 116557 - DNA, 13 bp, Artificial Sequence
  Oligonucleotide for detection of SNP TSC0029174
ttttttggatgga

SEQ ID NO: 116558 - DNA, 13 bp, Artificial Sequence
  Oligonucleotide for detection of SNP TSC0029174
tccatccaaaaaa

SEQ ID NO: 116559 - DNA, 13 bp, Artificial Sequence
  Oligonucleotide for detection of SNP TSC0029174
ttttttagatgga

SEQ ID NO: 116560 - DNA, 13 bp, Artificial Sequence
  Oligonucleotide for detection of SNP TSC0029174
tccatctaaaaaa

SEQ ID NO: 116561 - DNA, 13 bp, Artificial Sequence
  Oligonucleotide for detection of SNP TSC0029174
tttttcggatgga

SEQ ID NO: 116562 - DNA, 13 bp, Artificial Sequence
  Oligonucleotide for detection of SNP TSC0029174
tccatccgaaaaa

SEQ ID NO: 116563 - DNA, 13 bp, Artificial Sequence
  Oligonucleotide for detection of SNP TSC0029175
tttttaaattaat

SEQ ID NO: 116564 - DNA, 13 bp, Artificial Sequence
  Oligonucleotide for detection of SNP TSC0029175
attaatttaaaaa

SEQ ID NO: 116565 - DNA, 13 bp, Artificial Sequence
  Oligonucleotide for detection of SNP TSC0029175
tttttatattaat

SEQ ID NO: 116566 - DNA, 13 bp, Artificial Sequence
  Oligonucleotide for detection of SNP TSC0029175
attaatataaaaa

SEQ ID NO: 116567 - DNA, 13 bp, Artificial Sequence
  Oligonucleotide for detection of SNP TSC0029175
attagtttggaaa

SEQ ID NO: 116568 - DNA, 13 bp, Artificial Sequence
  Oligonucleotide for detection of SNP TSC0029175
tttccaaactaat

SEQ ID NO: 116569 - DNA, 13 bp, Artificial Sequence
  Oligonucleotide for detection of SNP TSC0029175
attagtgtggaaa

SEQ ID NO: 116570 - DNA, 13 bp, Artificial Sequence
  Oligonucleotide for detection of SNP TSC0029175
tttccacactaat

SEQ ID NO: 116571 - DNA, 13 bp, Artificial Sequence
  Oligonucleotide for detection of SNP TSC0029176
tttatttttagta

SEQ ID NO: 116572 - DNA, 13 bp, Artificial Sequence
  Oligonucleotide for detection of SNP TSC0029176
tactaaaaataaa

SEQ ID NO: 116573 - DNA, 13 bp, Artificial Sequence
  Oligonucleotide for detection of SNP TSC0029176
tattggtggtgag

SEQ ID NO: 116574 - DNA, 13 bp, Artificial Sequence
  Oligonucleotide for detection of SNP TSC0029176
ctcaccaccaata

SEQ ID NO: 116575 - DNA, 13 bp, Artificial Sequence
  Oligonucleotide for detection of SNP TSC0029176
tattgggggtgag

SEQ ID NO: 116576 - DNA, 13 bp, Artificial Sequence
  Oligonucleotide for detection of SNP TSC0029176
ctcacccccaata

SEQ ID NO: 116577 - DNA, 13 bp, Artificial Sequence
  Oligonucleotide for detection of SNP TSC0029177
attttgggtttty

SEQ ID NO: 116578 - DNA, 13 bp, Artificial Sequence
  Oligonucleotide for detection of SNP TSC0029177
raaaacccaaaat

SEQ ID NO: 116579 - DNA, 13 bp, Artificial Sequence
  Oligonucleotide for detection of SNP TSC0029177
gggagtttaaggt

SEQ ID NO: 116580 - DNA, 13 bp, Artificial Sequence
  Oligonucleotide for detection of SNP TSC0029177
accttaaactccc

SEQ ID NO: 116581 - DNA, 13 bp, Artificial Sequence
  Oligonucleotide for detection of SNP TSC0029177
gggagtataaggt

SEQ ID NO: 116582 - DNA, 13 bp, Artificial Sequence
  Oligonucleotide for detection of SNP TSC0029177
accttatactccc

SEQ ID NO: 116583 - DNA, 13 bp, Artificial Sequence
  Oligonucleotide for detection of SNP TSC0029179
tgatgtaggatay

SEQ ID NO: 116584 - DNA, 13 bp, Artificial Sequence
  Oligonucleotide for detection of SNP TSC0029179
rtatcctacatca

SEQ ID NO: 116585 - DNA, 13 bp, Artificial Sequence
  Oligonucleotide for detection of SNP TSC0029179
tgatgtgggatay

SEQ ID NO: 116586 - DNA, 13 bp, Artificial Sequence
  Oligonucleotide for detection of SNP TSC0029179
rtatcccacatca

SEQ ID NO: 116587 - DNA, 13 bp, Artificial Sequence
  Oligonucleotide for detection of SNP TSC0029180
tttgggtttaaga

SEQ ID NO: 116588 - DNA, 13 bp, Artificial Sequence
  Oligonucleotide for detection of SNP TSC0029180
tcttaaacccaaa

SEQ ID NO: 116589 - DNA, 13 bp, Artificial Sequence
  Oligonucleotide for detection of SNP TSC0029180
tttggggttaaga

SEQ ID NO: 116590 - DNA, 13 bp, Artificial Sequence
  Oligonucleotide for detection of SNP TSC0029180
tcttaaccccaaa

SEQ ID NO: 116591 - DNA, 13 bp, Artificial Sequence
  Oligonucleotide for detection of SNP TSC0029180
ttttgagtttagg

SEQ ID NO: 116592 - DNA, 13 bp, Artificial Sequence
  Oligonucleotide for detection of SNP TSC0029180
cctaaactcaaaa

SEQ ID NO: 116593 - DNA, 13 bp, Artificial Sequence
  Oligonucleotide for detection of SNP TSC0029180
ttttgattttagg

SEQ ID NO: 116594 - DNA, 13 bp, Artificial Sequence
  Oligonucleotide for detection of SNP TSC0029180
cctaaaatcaaaa

SEQ ID NO: 116595 - DNA, 13 bp, Artificial Sequence
  Oligonucleotide for detection of SNP TSC0029181
atagaaggaagag

SEQ ID NO: 116596 - DNA, 13 bp, Artificial Sequence
  Oligonucleotide for detection of SNP TSC0029181
ctcttccttctat

SEQ ID NO: 116597 - DNA, 13 bp, Artificial Sequence
  Oligonucleotide for detection of SNP TSC0029181
atagaaagaagag

SEQ ID NO: 116598 - DNA, 13 bp, Artificial Sequence
  Oligonucleotide for detection of SNP TSC0029181
ctcttctttctat

SEQ ID NO: 116599 - DNA, 13 bp, Artificial Sequence
  Oligonucleotide for detection of SNP TSC0029182
gttatagtgtata

SEQ ID NO: 116600 - DNA, 13 bp, Artificial Sequence
  Oligonucleotide for detection of SNP TSC0029182
tatacactataac

SEQ ID NO: 116601 - DNA, 13 bp, Artificial Sequence
  Oligonucleotide for detection of SNP TSC0029182
gttataatgtata

SEQ ID NO: 116602 - DNA, 13 bp, Artificial Sequence
  Oligonucleotide for detection of SNP TSC0029182
tatacattataac

SEQ ID NO: 116603 - DNA, 13 bp, Artificial Sequence
  Oligonucleotide for detection of SNP TSC0029183
aatataattggat

SEQ ID NO: 116604 - DNA, 13 bp, Artificial Sequence
  Oligonucleotide for detection of SNP TSC0029183
atccaattatatt

SEQ ID NO: 116605 - DNA, 13 bp, Artificial Sequence
  Oligonucleotide for detection of SNP TSC0029183
aatatatttggat

SEQ ID NO: 116606 - DNA, 13 bp, Artificial Sequence
  Oligonucleotide for detection of SNP TSC0029183
atccaaatatatt

SEQ ID NO: 116607 - DNA, 13 bp, Artificial Sequence
  Oligonucleotide for detection of SNP TSC0029183
atttaattatgtt

SEQ ID NO: 116608 - DNA, 13 bp, Artificial Sequence
  Oligonucleotide for detection of SNP TSC0029183
aacataattaaat

SEQ ID NO: 116609 - DNA, 13 bp, Artificial Sequence
  Oligonucleotide for detection of SNP TSC0029183
atttaaatatgtt

SEQ ID NO: 116610 - DNA, 13 bp, Artificial Sequence
  Oligonucleotide for detection of SNP TSC0029183
aacatatttaaat

SEQ ID NO: 116611 - DNA, 13 bp, Artificial Sequence
  Oligonucleotide for detection of SNP TSC0029184
gttatgtgtttta

SEQ ID NO: 116612 - DNA, 13 bp, Artificial Sequence
  Oligonucleotide for detection of SNP TSC0029184
taaaacacataac

SEQ ID NO: 116613 - DNA, 13 bp, Artificial Sequence
  Oligonucleotide for detection of SNP TSC0029184
gttatgggtttta

SEQ ID NO: 116614 - DNA, 13 bp, Artificial Sequence
  Oligonucleotide for detection of SNP TSC0029184
taaaacccataac

SEQ ID NO: 116615 - DNA, 13 bp, Artificial Sequence
  Oligonucleotide for detection of SNP TSC0029184
gttatgcgtttta

SEQ ID NO: 116616 - DNA, 13 bp, Artificial Sequence
  Oligonucleotide for detection of SNP TSC0029184
taaaacgcataac

SEQ ID NO: 116617 - DNA, 13 bp, Artificial Sequence
  Oligonucleotide for detection of SNP TSC0029184
tggagtgtatagy

SEQ ID NO: 116618 - DNA, 13 bp, Artificial Sequence
  Oligonucleotide for detection of SNP TSC0029184
rctatacactcca

SEQ ID NO: 116619 - DNA, 13 bp, Artificial Sequence
  Oligonucleotide for detection of SNP TSC0029184
tggagtttatagy

SEQ ID NO: 116620 - DNA, 13 bp, Artificial Sequence
  Oligonucleotide for detection of SNP TSC0029184
rctataaactcca

SEQ ID NO: 116621 - DNA, 13 bp, Artificial Sequence
  Oligonucleotide for detection of SNP TSC0029184
tggagcgtatagy

SEQ ID NO: 116622 - DNA, 13 bp, Artificial Sequence
  Oligonucleotide for detection of SNP TSC0029184
rctatacgctcca

SEQ ID NO: 116623 - DNA, 13 bp, Artificial Sequence
  Oligonucleotide for detection of SNP TSC0029185
ttagagagattgt

SEQ ID NO: 116624 - DNA, 13 bp, Artificial Sequence
  Oligonucleotide for detection of SNP TSC0029185
acaatctctctaa

SEQ ID NO: 116625 - DNA, 13 bp, Artificial Sequence
  Oligonucleotide for detection of SNP TSC0029185
ttagagggattgt

SEQ ID NO: 116626 - DNA, 13 bp, Artificial Sequence
  Oligonucleotide for detection of SNP TSC0029185
acaatccctctaa

SEQ ID NO: 116627 - DNA, 13 bp, Artificial Sequence
  Oligonucleotide for detection of SNP TSC0029185
ttagagagatcgt

SEQ ID NO: 116628 - DNA, 13 bp, Artificial Sequence
  Oligonucleotide for detection of SNP TSC0029185
acgatctctctaa

SEQ ID NO: 116629 - DNA, 13 bp, Artificial Sequence
  Oligonucleotide for detection of SNP TSC0029185
ttagagggatcgt

SEQ ID NO: 116630 - DNA, 13 bp, Artificial Sequence
  Oligonucleotide for detection of SNP TSC0029185
acgatccctctaa

SEQ ID NO: 116631 - DNA, 13 bp, Artificial Sequence
  Oligonucleotide for detection of SNP TSC0029186
aataatgttataa

SEQ ID NO: 116632 - DNA, 13 bp, Artificial Sequence
  Oligonucleotide for detection of SNP TSC0029186
ttataacattatt

SEQ ID NO: 116633 - DNA, 13 bp, Artificial Sequence
  Oligonucleotide for detection of SNP TSC0029186
aataatattataa

SEQ ID NO: 116634 - DNA, 13 bp, Artificial Sequence
  Oligonucleotide for detection of SNP TSC0029186
ttataatattatt

SEQ ID NO: 116635 - DNA, 13 bp, Artificial Sequence
  Oligonucleotide for detection of SNP TSC0029187
atttttaagatga

SEQ ID NO: 116636 - DNA, 13 bp, Artificial Sequence
  Oligonucleotide for detection of SNP TSC0029187
tcatcttaaaaat

SEQ ID NO: 116637 - DNA, 13 bp, Artificial Sequence
  Oligonucleotide for detection of SNP TSC0029187
attttttagatga

SEQ ID NO: 116638 - DNA, 13 bp, Artificial Sequence
  Oligonucleotide for detection of SNP TSC0029187
tcatctaaaaaat

SEQ ID NO: 116639 - DNA, 13 bp, Artificial Sequence
  Oligonucleotide for detection of SNP TSC0029187
ttattttgaaaat

SEQ ID NO: 116640 - DNA, 13 bp, Artificial Sequence
  Oligonucleotide for detection of SNP TSC0029187
attttcaaaataa

SEQ ID NO: 116641 - DNA, 13 bp, Artificial Sequence
  Oligonucleotide for detection of SNP TSC0029187
ttatttggaaaat

SEQ ID NO: 116642 - DNA, 13 bp, Artificial Sequence
  Oligonucleotide for detection of SNP TSC0029187
attttccaaataa

SEQ ID NO: 116643 - DNA, 13 bp, Artificial Sequence
  Oligonucleotide for detection of SNP TSC0029188
ttatatgtttttt

SEQ ID NO: 116644 - DNA, 13 bp, Artificial Sequence
  Oligonucleotide for detection of SNP TSC0029188
aaaaaacatataa

SEQ ID NO: 116645 - DNA, 13 bp, Artificial Sequence
  Oligonucleotide for detection of SNP TSC0029188
aagggggatgtga

SEQ ID NO: 116646 - DNA, 13 bp, Artificial Sequence
  Oligonucleotide for detection of SNP TSC0029188
tcacatccccctt

SEQ ID NO: 116647 - DNA, 13 bp, Artificial Sequence
  Oligonucleotide for detection of SNP TSC0029188
aaggggtatgtga

SEQ ID NO: 116648 - DNA, 13 bp, Artificial Sequence
  Oligonucleotide for detection of SNP TSC0029188
tcacatacccctt

SEQ ID NO: 116649 - DNA, 13 bp, Artificial Sequence
  Oligonucleotide for detection of SNP TSC0029189
agggagtagttgg

SEQ ID NO: 116650 - DNA, 13 bp, Artificial Sequence
  Oligonucleotide for detection of SNP TSC0029189
ccaactactccct

SEQ ID NO: 116651 - DNA, 13 bp, Artificial Sequence
  Oligonucleotide for detection of SNP TSC0029189
agggaggagttgg

SEQ ID NO: 116652 - DNA, 13 bp, Artificial Sequence
  Oligonucleotide for detection of SNP TSC0029189
ccaactcctccct

SEQ ID NO: 116653 - DNA, 13 bp, Artificial Sequence
  Oligonucleotide for detection of SNP TSC0029191
tggtagaattagt

SEQ ID NO: 116654 - DNA, 13 bp, Artificial Sequence
  Oligonucleotide for detection of SNP TSC0029191
actaattctacca

SEQ ID NO: 116655 - DNA, 13 bp, Artificial Sequence
  Oligonucleotide for detection of SNP TSC0029191
tggtaggattagt

SEQ ID NO: 116656 - DNA, 13 bp, Artificial Sequence
  Oligonucleotide for detection of SNP TSC0029191
actaatcctacca

SEQ ID NO: 116657 - DNA, 13 bp, Artificial Sequence
  Oligonucleotide for detection of SNP TSC0029192
atagtaattttgg

SEQ ID NO: 116658 - DNA, 13 bp, Artificial Sequence
  Oligonucleotide for detection of SNP TSC0029192
ccaaaattactat

SEQ ID NO: 116659 - DNA, 13 bp, Artificial Sequence
  Oligonucleotide for detection of SNP TSC0029192
atagtagttttgg

SEQ ID NO: 116660 - DNA, 13 bp, Artificial Sequence
  Oligonucleotide for detection of SNP TSC0029192
ccaaaactactat

SEQ ID NO: 116661 - DNA, 13 bp, Artificial Sequence
  Oligonucleotide for detection of SNP TSC0029193
atatgatagttta

SEQ ID NO: 116662 - DNA, 13 bp, Artificial Sequence
  Oligonucleotide for detection of SNP TSC0029193
taaactatcatat

SEQ ID NO: 116663 - DNA, 13 bp, Artificial Sequence
  Oligonucleotide for detection of SNP TSC0029193
atatgagagttta

SEQ ID NO: 116664 - DNA, 13 bp, Artificial Sequence
  Oligonucleotide for detection of SNP TSC0029193
taaactctcatat

SEQ ID NO: 116665 - DNA, 13 bp, Artificial Sequence
  Oligonucleotide for detection of SNP TSC0029193
tgggttgttatgt

SEQ ID NO: 116666 - DNA, 13 bp, Artificial Sequence
  Oligonucleotide for detection of SNP TSC0029193
acataacaaccca

SEQ ID NO: 116667 - DNA, 13 bp, Artificial Sequence
  Oligonucleotide for detection of SNP TSC0029193
tgggtttttatgt

SEQ ID NO: 116668 - DNA, 13 bp, Artificial Sequence
  Oligonucleotide for detection of SNP TSC0029193
acataaaaaccca

SEQ ID NO: 116669 - DNA, 13 bp, Artificial Sequence
  Oligonucleotide for detection of SNP TSC0029194
ttgaatattttat

SEQ ID NO: 116670 - DNA, 13 bp, Artificial Sequence
  Oligonucleotide for detection of SNP TSC0029194
ataaaatattcaa

SEQ ID NO: 116671 - DNA, 13 bp, Artificial Sequence
  Oligonucleotide for detection of SNP TSC0029194
ttgaatgttttat

SEQ ID NO: 116672 - DNA, 13 bp, Artificial Sequence
  Oligonucleotide for detection of SNP TSC0029194
ataaaacattcaa

SEQ ID NO: 116673 - DNA, 13 bp, Artificial Sequence
  Oligonucleotide for detection of SNP TSC0029194
ttgaacgttttat

SEQ ID NO: 116674 - DNA, 13 bp, Artificial Sequence
  Oligonucleotide for detection of SNP TSC0029194
ataaaacgttcaa

SEQ ID NO: 116675 - DNA, 13 bp, Artificial Sequence
  Oligonucleotide for detection of SNP TSC0029194
atagggtgtttag

SEQ ID NO: 116676 - DNA, 13 bp, Artificial Sequence
  Oligonucleotide for detection of SNP TSC0029194
ctaaacaccctat

SEQ ID NO: 116677 - DNA, 13 bp, Artificial Sequence
  Oligonucleotide for detection of SNP TSC0029194
atagggcgtttag

SEQ ID NO: 116678 - DNA, 13 bp, Artificial Sequence
  Oligonucleotide for detection of SNP TSC0029194
ctaaacgccctat

SEQ ID NO: 116679 - DNA, 13 bp, Artificial Sequence
  Oligonucleotide for detection of SNP TSC0029195
ttagtttgggtaa

SEQ ID NO: 116680 - DNA, 13 bp, Artificial Sequence
  Oligonucleotide for detection of SNP TSC0029195
ttacccaaactaa

SEQ ID NO: 116681 - DNA, 13 bp, Artificial Sequence
  Oligonucleotide for detection of SNP TSC0029195
ttagttcgggtaa

SEQ ID NO: 116682 - DNA, 13 bp, Artificial Sequence
  Oligonucleotide for detection of SNP TSC0029195
ttacccgaactaa

SEQ ID NO: 116683 - DNA, 13 bp, Artificial Sequence
  Oligonucleotide for detection of SNP TSC0029195
ttgtttgggttgg

SEQ ID NO: 116684 - DNA, 13 bp, Artificial Sequence
  Oligonucleotide for detection of SNP TSC0029195
ccaacccaaacaa

SEQ ID NO: 116685 - DNA, 13 bp, Artificial Sequence
  Oligonucleotide for detection of SNP TSC0029195
ttgttcgggttgg

SEQ ID NO: 116686 - DNA, 13 bp, Artificial Sequence
  Oligonucleotide for detection of SNP TSC0029195
ccaacccgaacaa

SEQ ID NO: 116687 - DNA, 13 bp, Artificial Sequence
  Oligonucleotide for detection of SNP TSC0029196
tttgaagttttaa

SEQ ID NO: 116688 - DNA, 13 bp, Artificial Sequence
  Oligonucleotide for detection of SNP TSC0029196
ttaaaacttcaaa

SEQ ID NO: 116689 - DNA, 13 bp, Artificial Sequence
  Oligonucleotide for detection of SNP TSC0029196
tttgaatttttaa

SEQ ID NO: 116690 - DNA, 13 bp, Artificial Sequence
  Oligonucleotide for detection of SNP TSC0029196
ttaaaaattcaaa

SEQ ID NO: 116691 - DNA, 13 bp, Artificial Sequence
  Oligonucleotide for detection of SNP TSC0029196
ttggaattttagg

SEQ ID NO: 116692 - DNA, 13 bp, Artificial Sequence
  Oligonucleotide for detection of SNP TSC0029196
cctaaaattccaa

SEQ ID NO: 116693 - DNA, 13 bp, Artificial Sequence
  Oligonucleotide for detection of SNP TSC0029197
tattatattcggy

SEQ ID NO: 116694 - DNA, 13 bp, Artificial Sequence
  Oligonucleotide for detection of SNP TSC0029197
rccgaatataata

SEQ ID NO: 116695 - DNA, 13 bp, Artificial Sequence
  Oligonucleotide for detection of SNP TSC0029197
tattatgttcggy

SEQ ID NO: 116696 - DNA, 13 bp, Artificial Sequence
  Oligonucleotide for detection of SNP TSC0029197
rccgaacataata

SEQ ID NO: 116697 - DNA, 13 bp, Artificial Sequence
  Oligonucleotide for detection of SNP TSC0029197
tattacgttcggy

SEQ ID NO: 116698 - DNA, 13 bp, Artificial Sequence
  Oligonucleotide for detection of SNP TSC0029197
rccgaacgtaata

SEQ ID NO: 116699 - DNA, 13 bp, Artificial Sequence
  Oligonucleotide for detection of SNP TSC0029197
gtcgggtgtggtg

SEQ ID NO: 116700 - DNA, 13 bp, Artificial Sequence
  Oligonucleotide for detection of SNP TSC0029197
caccacacccgac

SEQ ID NO: 116701 - DNA, 13 bp, Artificial Sequence
  Oligonucleotide for detection of SNP TSC0029197
gtcgggcgtggtg

SEQ ID NO: 116702 - DNA, 13 bp, Artificial Sequence
  Oligonucleotide for detection of SNP TSC0029197
caccacgcccgac

SEQ ID NO: 116703 - DNA, 13 bp, Artificial Sequence
  Oligonucleotide for detection of SNP TSC0029199
ttttatgtgggga

SEQ ID NO: 116704 - DNA, 13 bp, Artificial Sequence
  Oligonucleotide for detection of SNP TSC0029199
tccccacataaaa

SEQ ID NO: 116705 - DNA, 13 bp, Artificial Sequence
  Oligonucleotide for detection of SNP TSC0029199
ttttatatgggga

SEQ ID NO: 116706 - DNA, 13 bp, Artificial Sequence
  Oligonucleotide for detection of SNP TSC0029199
tccccatataaaa

SEQ ID NO: 116707 - DNA, 13 bp, Artificial Sequence
  Oligonucleotide for detection of SNP TSC0029200
atatgttgttgtt

SEQ ID NO: 116708 - DNA, 13 bp, Artificial Sequence
  Oligonucleotide for detection of SNP TSC0029200
aacaacaacatat

SEQ ID NO: 116709 - DNA, 13 bp, Artificial Sequence
  Oligonucleotide for detection of SNP TSC0029200
atatgtcgttgtt

SEQ ID NO: 116710 - DNA, 13 bp, Artificial Sequence
  Oligonucleotide for detection of SNP TSC0029200
aacaacgacatat

SEQ ID NO: 116711 - DNA, 13 bp, Artificial Sequence
  Oligonucleotide for detection of SNP TSC0029200
aataatggtatgt

SEQ ID NO: 116712 - DNA, 13 bp, Artificial Sequence
  Oligonucleotide for detection of SNP TSC0029200
acataccattatt

SEQ ID NO: 116713 - DNA, 13 bp, Artificial Sequence
  Oligonucleotide for detection of SNP TSC0029200
aataatagtatgt

SEQ ID NO: 116714 - DNA, 13 bp, Artificial Sequence
  Oligonucleotide for detection of SNP TSC0029200
acatactattatt

SEQ ID NO: 116715 - DNA, 13 bp, Artificial Sequence
  Oligonucleotide for detection of SNP TSC0029200
aataacggtatgt

SEQ ID NO: 116716 - DNA, 13 bp, Artificial Sequence
  Oligonucleotide for detection of SNP TSC0029200
acataccgttatt

SEQ ID NO: 116717 - DNA, 13 bp, Artificial Sequence
  Oligonucleotide for detection of SNP TSC0029205
taataaatagatg

SEQ ID NO: 116718 - DNA, 13 bp, Artificial Sequence
  Oligonucleotide for detection of SNP TSC0029205
catctatttatta

SEQ ID NO: 116719 - DNA, 13 bp, Artificial Sequence
  Oligonucleotide for detection of SNP TSC0029205
taataattagatg

SEQ ID NO: 116720 - DNA, 13 bp, Artificial Sequence
  Oligonucleotide for detection of SNP TSC0029205
catctaattatta

SEQ ID NO: 116721 - DNA, 13 bp, Artificial Sequence
  Oligonucleotide for detection of SNP TSC0029205
tatttgtttattg

SEQ ID NO: 116722 - DNA, 13 bp, Artificial Sequence
  Oligonucleotide for detection of SNP TSC0029205
caataaacaaata

SEQ ID NO: 116723 - DNA, 13 bp, Artificial Sequence
  Oligonucleotide for detection of SNP TSC0029205
tatttggttattg

SEQ ID NO: 116724 - DNA, 13 bp, Artificial Sequence
  Oligonucleotide for detection of SNP TSC0029205
caataaccaaata

SEQ ID NO: 116725 - DNA, 13 bp, Artificial Sequence
  Oligonucleotide for detection of SNP TSC0029206
gtaggttgttttt

SEQ ID NO: 116726 - DNA, 13 bp, Artificial Sequence
  Oligonucleotide for detection of SNP TSC0029206
aaaaacaacctac

SEQ ID NO: 116727 - DNA, 13 bp, Artificial Sequence
  Oligonucleotide for detection of SNP TSC0029206
gtaggtcgttttt

SEQ ID NO: 116728 - DNA, 13 bp, Artificial Sequence
  Oligonucleotide for detection of SNP TSC0029206
aaaaacgacctac

SEQ ID NO: 116729 - DNA, 13 bp, Artificial Sequence
  Oligonucleotide for detection of SNP TSC0029206
aaggatgatttgy

SEQ ID NO: 116730 - DNA, 13 bp, Artificial Sequence
  Oligonucleotide for detection of SNP TSC0029206
rcaaatcatcctt

SEQ ID NO: 116731 - DNA, 13 bp, Artificial Sequence
  Oligonucleotide for detection of SNP TSC0029206
aaggataatttgy

SEQ ID NO: 116732 - DNA, 13 bp, Artificial Sequence
  Oligonucleotide for detection of SNP TSC0029206
rcaaattatcctt

SEQ ID NO: 116733 - DNA, 13 bp, Artificial Sequence
  Oligonucleotide for detection of SNP TSC0029206
aaggacgatttgy

SEQ ID NO: 116734 - DNA, 13 bp, Artificial Sequence
  Oligonucleotide for detection of SNP TSC0029206
rcaaatcgtcctt

SEQ ID NO: 116735 - DNA, 13 bp, Artificial Sequence
  Oligonucleotide for detection of SNP TSC0029208
ttattatattaty

SEQ ID NO: 116736 - DNA, 13 bp, Artificial Sequence
  Oligonucleotide for detection of SNP TSC0029208
rataatataataa

SEQ ID NO: 116737 - DNA, 13 bp, Artificial Sequence
  Oligonucleotide for detection of SNP TSC0029208
ttattagattaty

SEQ ID NO: 116738 - DNA, 13 bp, Artificial Sequence
  Oligonucleotide for detection of SNP TSC0029208
rataatctaataa

SEQ ID NO: 116739 - DNA, 13 bp, Artificial Sequence
  Oligonucleotide for detection of SNP TSC0029208
gatggtgtaataa

SEQ ID NO: 116740 - DNA, 13 bp, Artificial Sequence
  Oligonucleotide for detection of SNP TSC0029208
ttattacaccatc

SEQ ID NO: 116741 - DNA, 13 bp, Artificial Sequence
  Oligonucleotide for detection of SNP TSC0029208
gatggtttaataa

SEQ ID NO: 116742 - DNA, 13 bp, Artificial Sequence
  Oligonucleotide for detection of SNP TSC0029208
ttattaaaccatc

SEQ ID NO: 116743 - DNA, 13 bp, Artificial Sequence
  Oligonucleotide for detection of SNP TSC0029209
tattggggtttgg

SEQ ID NO: 116744 - DNA, 13 bp, Artificial Sequence
  Oligonucleotide for detection of SNP TSC0029209
ccaaaccccaata

SEQ ID NO: 116745 - DNA, 13 bp, Artificial Sequence
  Oligonucleotide for detection of SNP TSC0029209
tattggtgtttgg

SEQ ID NO: 116746 - DNA, 13 bp, Artificial Sequence
  Oligonucleotide for detection of SNP TSC0029209
ccaaacaccaata

SEQ ID NO: 116747 - DNA, 13 bp, Artificial Sequence
  Oligonucleotide for detection of SNP TSC0029209
ttaggttttagta

SEQ ID NO: 116748 - DNA, 13 bp, Artificial Sequence
  Oligonucleotide for detection of SNP TSC0029209
tactaaaacctaa

SEQ ID NO: 116749 - DNA, 13 bp, Artificial Sequence
  Oligonucleotide for detection of SNP TSC0029209
ttaggtattagta

SEQ ID NO: 116750 - DNA, 13 bp, Artificial Sequence
  Oligonucleotide for detection of SNP TSC0029209
tactaatacctaa

SEQ ID NO: 116751 - DNA, 13 bp, Artificial Sequence
  Oligonucleotide for detection of SNP TSC0029210
agaagtagtaaag

SEQ ID NO: 116752 - DNA, 13 bp, Artificial Sequence
  Oligonucleotide for detection of SNP TSC0029210
ctttactacttct

SEQ ID NO: 116753 - DNA, 13 bp, Artificial Sequence
  Oligonucleotide for detection of SNP TSC0029210
agaagtggtaaag

SEQ ID NO: 116754 - DNA, 13 bp, Artificial Sequence
  Oligonucleotide for detection of SNP TSC0029210
ctttaccacttct

SEQ ID NO: 116755 - DNA, 13 bp, Artificial Sequence
  Oligonucleotide for detection of SNP TSC0029210
agaagcggtaaag

SEQ ID NO: 116756 - DNA, 13 bp, Artificial Sequence
  Oligonucleotide for detection of SNP TSC0029210
ctttaccgcttct

SEQ ID NO: 116757 - DNA, 13 bp, Artificial Sequence
  Oligonucleotide for detection of SNP TSC0029212
gataaggaaaagg

SEQ ID NO: 116758 - DNA, 13 bp, Artificial Sequence
  Oligonucleotide for detection of SNP TSC0029212
ccttttccttatc

SEQ ID NO: 116759 - DNA, 13 bp, Artificial Sequence
  Oligonucleotide for detection of SNP TSC0029212
gataagaaaaagg

SEQ ID NO: 116760 - DNA, 13 bp, Artificial Sequence
  Oligonucleotide for detection of SNP TSC0029212
cctttttcttatc

SEQ ID NO: 116761 - DNA, 13 bp, Artificial Sequence
  Oligonucleotide for detection of SNP TSC0029213
tttagagagaggy

SEQ ID NO: 116762 - DNA, 13 bp, Artificial Sequence
  Oligonucleotide for detection of SNP TSC0029213
rcctctctctaaa

SEQ ID NO: 116763 - DNA, 13 bp, Artificial Sequence
  Oligonucleotide for detection of SNP TSC0029213
tttagaaagaggy

SEQ ID NO: 116764 - DNA, 13 bp, Artificial Sequence
  Oligonucleotide for detection of SNP TSC0029213
rcctctttctaaa

SEQ ID NO: 116765 - DNA, 13 bp, Artificial Sequence
  Oligonucleotide for detection of SNP TSC0029218
ttagaaatatggg

SEQ ID NO: 116766 - DNA, 13 bp, Artificial Sequence
  Oligonucleotide for detection of SNP TSC0029218
cccatatttctaa

SEQ ID NO: 116767 - DNA, 13 bp, Artificial Sequence
  Oligonucleotide for detection of SNP TSC0029218
ttagaagtatggg

SEQ ID NO: 116768 - DNA, 13 bp, Artificial Sequence
  Oligonucleotide for detection of SNP TSC0029218
cccatacttctaa

SEQ ID NO: 116769 - DNA, 13 bp, Artificial Sequence
  Oligonucleotide for detection of SNP TSC0029218
ttagaaatacggg

SEQ ID NO: 116770 - DNA, 13 bp, Artificial Sequence
  Oligonucleotide for detection of SNP TSC0029218
cccgtatttctaa

SEQ ID NO: 116771 - DNA, 13 bp, Artificial Sequence
  Oligonucleotide for detection of SNP TSC0029218
ttagaagtacggg

SEQ ID NO: 116772 - DNA, 13 bp, Artificial Sequence
  Oligonucleotide for detection of SNP TSC0029218
cccgtacttctaa

SEQ ID NO: 116773 - DNA, 13 bp, Artificial Sequence
  Oligonucleotide for detection of SNP TSC0029219
tgttgtgttaggg

SEQ ID NO: 116774 - DNA, 13 bp, Artificial Sequence
  Oligonucleotide for detection of SNP TSC0029219
ccctaacacaaca

SEQ ID NO: 116775 - DNA, 13 bp, Artificial Sequence
  Oligonucleotide for detection of SNP TSC0029219
tgttgttttaggg

SEQ ID NO: 116776 - DNA, 13 bp, Artificial Sequence
  Oligonucleotide for detection of SNP TSC0029219
ccctaaaacaaca

SEQ ID NO: 116777 - DNA, 13 bp, Artificial Sequence
  Oligonucleotide for detection of SNP TSC0029219
ttttagtatagta

SEQ ID NO: 116778 - DNA, 13 bp, Artificial Sequence
  Oligonucleotide for detection of SNP TSC0029219
tactatactaaaa

SEQ ID NO: 116779 - DNA, 13 bp, Artificial Sequence
  Oligonucleotide for detection of SNP TSC0029219
ttttagaatagta

SEQ ID NO: 116780 - DNA, 13 bp, Artificial Sequence
  Oligonucleotide for detection of SNP TSC0029219
tactattctaaaa

SEQ ID NO: 116781 - DNA, 13 bp, Artificial Sequence
  Oligonucleotide for detection of SNP TSC0029220
ttggttagagatg

SEQ ID NO: 116782 - DNA, 13 bp, Artificial Sequence
  Oligonucleotide for detection of SNP TSC0029220
catctctaaccaa

SEQ ID NO: 116783 - DNA, 13 bp, Artificial Sequence
  Oligonucleotide for detection of SNP TSC0029220
ttggttggagatg

SEQ ID NO: 116784 - DNA, 13 bp, Artificial Sequence
  Oligonucleotide for detection of SNP TSC0029220
catctccaaccaa

SEQ ID NO: 116785 - DNA, 13 bp, Artificial Sequence
  Oligonucleotide for detection of SNP TSC0029220
ttggtcggagatg

SEQ ID NO: 116786 - DNA, 13 bp, Artificial Sequence
  Oligonucleotide for detection of SNP TSC0029220
catctccgaccaa

SEQ ID NO: 116787 - DNA, 13 bp, Artificial Sequence
  Oligonucleotide for detection of SNP TSC0029221
tttttataagtty

SEQ ID NO: 116788 - DNA, 13 bp, Artificial Sequence
  Oligonucleotide for detection of SNP TSC0029221
raacttataaaaa

SEQ ID NO: 116789 - DNA, 13 bp, Artificial Sequence
  Oligonucleotide for detection of SNP TSC0029221
tttttagaagtty

SEQ ID NO: 116790 - DNA, 13 bp, Artificial Sequence
  Oligonucleotide for detection of SNP TSC0029221
raacttctaaaaa

SEQ ID NO: 116791 - DNA, 13 bp, Artificial Sequence
  Oligonucleotide for detection of SNP TSC0029221
gagtttgtagagg

SEQ ID NO: 116792 - DNA, 13 bp, Artificial Sequence
  Oligonucleotide for detection of SNP TSC0029221
cctctacaaactc

SEQ ID NO: 116793 - DNA, 13 bp, Artificial Sequence
  Oligonucleotide for detection of SNP TSC0029221
gagtttttagagg

SEQ ID NO: 116794 - DNA, 13 bp, Artificial Sequence
  Oligonucleotide for detection of SNP TSC0029221
cctctaaaaactc

SEQ ID NO: 116795 - DNA, 13 bp, Artificial Sequence
  Oligonucleotide for detection of SNP TSC0029223
tttaggagatgga

SEQ ID NO: 116796 - DNA, 13 bp, Artificial Sequence
  Oligonucleotide for detection of SNP TSC0029223
tccatctcctaaa

SEQ ID NO: 116797 - DNA, 13 bp, Artificial Sequence
  Oligonucleotide for detection of SNP TSC0029223
tttaggggatgga

SEQ ID NO: 116798 - DNA, 13 bp, Artificial Sequence
  Oligonucleotide for detection of SNP TSC0029223
tccatcccctaaa

SEQ ID NO: 116799 - DNA, 13 bp, Artificial Sequence
  Oligonucleotide for detection of SNP TSC0029225
agggggtgtttgg

SEQ ID NO: 116800 - DNA, 13 bp, Artificial Sequence
  Oligonucleotide for detection of SNP TSC0029225
ccaaacaccccct

SEQ ID NO: 116801 - DNA, 13 bp, Artificial Sequence
  Oligonucleotide for detection of SNP TSC0029225
agggggcgtttgg

SEQ ID NO: 116802 - DNA, 13 bp, Artificial Sequence
  Oligonucleotide for detection of SNP TSC0029225
ccaaacgccccct

SEQ ID NO: 116803 - DNA, 13 bp, Artificial Sequence
  Oligonucleotide for detection of SNP TSC0029225
ttagatgtttttt

SEQ ID NO: 116804 - DNA, 13 bp, Artificial Sequence
  Oligonucleotide for detection of SNP TSC0029225
aaaaaacatctaa

SEQ ID NO: 116805 - DNA, 13 bp, Artificial Sequence
  Oligonucleotide for detection of SNP TSC0029225
ttagatatttttt

SEQ ID NO: 116806 - DNA, 13 bp, Artificial Sequence
  Oligonucleotide for detection of SNP TSC0029225
aaaaaatatctaa

SEQ ID NO: 116807 - DNA, 13 bp, Artificial Sequence
  Oligonucleotide for detection of SNP TSC0029225
ttagacgtttttt

SEQ ID NO: 116808 - DNA, 13 bp, Artificial Sequence
  Oligonucleotide for detection of SNP TSC0029225
aaaaaacgtctaa

SEQ ID NO: 116809 - DNA, 13 bp, Artificial Sequence
  Oligonucleotide for detection of SNP TSC0029226
taagtggtattty

SEQ ID NO: 116810 - DNA, 13 bp, Artificial Sequence
  Oligonucleotide for detection of SNP TSC0029226
raaataccactta

SEQ ID NO: 116811 - DNA, 13 bp, Artificial Sequence
  Oligonucleotide for detection of SNP TSC0029226
taagtgatattty

SEQ ID NO: 116812 - DNA, 13 bp, Artificial Sequence
  Oligonucleotide for detection of SNP TSC0029226
raaatatcactta

SEQ ID NO: 116813 - DNA, 13 bp, Artificial Sequence
  Oligonucleotide for detection of SNP TSC0029229
gtaagaaggagaa

SEQ ID NO: 116814 - DNA, 13 bp, Artificial Sequence
  Oligonucleotide for detection of SNP TSC0029229
ttctccttcttac

SEQ ID NO: 116815 - DNA, 13 bp, Artificial Sequence
  Oligonucleotide for detection of SNP TSC0029229
gtaagagggagaa

SEQ ID NO: 116816 - DNA, 13 bp, Artificial Sequence
  Oligonucleotide for detection of SNP TSC0029229
ttctccctcttac

SEQ ID NO: 116817 - DNA, 13 bp, Artificial Sequence
  Oligonucleotide for detection of SNP TSC0029232
ggaatttaaggag

SEQ ID NO: 116818 - DNA, 13 bp, Artificial Sequence
  Oligonucleotide for detection of SNP TSC0029232
ctccttaaattcc

SEQ ID NO: 116819 - DNA, 13 bp, Artificial Sequence
  Oligonucleotide for detection of SNP TSC0029232
ggaattaaaggag

SEQ ID NO: 116820 - DNA, 13 bp, Artificial Sequence
  Oligonucleotide for detection of SNP TSC0029232
ctcctttaattcc

SEQ ID NO: 116821 - DNA, 13 bp, Artificial Sequence
  Oligonucleotide for detection of SNP TSC0029233
tgaggagggagty

SEQ ID NO: 116822 - DNA, 13 bp, Artificial Sequence
  Oligonucleotide for detection of SNP TSC0029233
ractccctcctca

SEQ ID NO: 116823 - DNA, 13 bp, Artificial Sequence
  Oligonucleotide for detection of SNP TSC0029233
tgaggaaggagty

SEQ ID NO: 116824 - DNA, 13 bp, Artificial Sequence
  Oligonucleotide for detection of SNP TSC0029233
ractccttcctca

SEQ ID NO: 116825 - DNA, 13 bp, Artificial Sequence
  Oligonucleotide for detection of SNP TSC0029233
cgaggagggagty

SEQ ID NO: 116826 - DNA, 13 bp, Artificial Sequence
  Oligonucleotide for detection of SNP TSC0029233
ractccctcctcg

SEQ ID NO: 116827 - DNA, 13 bp, Artificial Sequence
  Oligonucleotide for detection of SNP TSC0029233
cgaggaaggagty

SEQ ID NO: 116828 - DNA, 13 bp, Artificial Sequence
  Oligonucleotide for detection of SNP TSC0029233
ractccttcctcg

SEQ ID NO: 116829 - DNA, 13 bp, Artificial Sequence
  Oligonucleotide for detection of SNP TSC0029234
taaggagtgtgag

SEQ ID NO: 116830 - DNA, 13 bp, Artificial Sequence
  Oligonucleotide for detection of SNP TSC0029234
ctcacactcctta

SEQ ID NO: 116831 - DNA, 13 bp, Artificial Sequence
  Oligonucleotide for detection of SNP TSC0029234
taaggaatgtgag

SEQ ID NO: 116832 - DNA, 13 bp, Artificial Sequence
  Oligonucleotide for detection of SNP TSC0029234
ctcacattcctta

SEQ ID NO: 116833 - DNA, 13 bp, Artificial Sequence
  Oligonucleotide for detection of SNP TSC0029237
tggattatttttt

SEQ ID NO: 116834 - DNA, 13 bp, Artificial Sequence
  Oligonucleotide for detection of SNP TSC0029237
aaaaaataatcca

SEQ ID NO: 116835 - DNA, 13 bp, Artificial Sequence
  Oligonucleotide for detection of SNP TSC0029237
tggattttttttt

SEQ ID NO: 116836 - DNA, 13 bp, Artificial Sequence
  Oligonucleotide for detection of SNP TSC0029237
aaaaaaaaatcca

SEQ ID NO: 116837 - DNA, 13 bp, Artificial Sequence
  Oligonucleotide for detection of SNP TSC0029237
agaaaataattta

SEQ ID NO: 116838 - DNA, 13 bp, Artificial Sequence
  Oligonucleotide for detection of SNP TSC0029237
taaattattttct

SEQ ID NO: 116839 - DNA, 13 bp, Artificial Sequence
  Oligonucleotide for detection of SNP TSC0029237
agaaaaaaattta

SEQ ID NO: 116840 - DNA, 13 bp, Artificial Sequence
  Oligonucleotide for detection of SNP TSC0029237
taaatttttttct

SEQ ID NO: 116841 - DNA, 13 bp, Artificial Sequence
  Oligonucleotide for detection of SNP TSC0029239
ttaaatgagaata

SEQ ID NO: 116842 - DNA, 13 bp, Artificial Sequence
  Oligonucleotide for detection of SNP TSC0029239
tattctcatttaa

SEQ ID NO: 116843 - DNA, 13 bp, Artificial Sequence
  Oligonucleotide for detection of SNP TSC0029239
ttaaattagaata

SEQ ID NO: 116844 - DNA, 13 bp, Artificial Sequence
  Oligonucleotide for detection of SNP TSC0029239
tattctaatttaa

SEQ ID NO: 116845 - DNA, 13 bp, Artificial Sequence
  Oligonucleotide for detection of SNP TSC0029239
ttaaacgagaata

SEQ ID NO: 116846 - DNA, 13 bp, Artificial Sequence
  Oligonucleotide for detection of SNP TSC0029239
tattctcgtttaa

SEQ ID NO: 116847 - DNA, 13 bp, Artificial Sequence
  Oligonucleotide for detection of SNP TSC0029239
tattttcgtttga

SEQ ID NO: 116848 - DNA, 13 bp, Artificial Sequence
  Oligonucleotide for detection of SNP TSC0029239
tcaaacgaaaata

SEQ ID NO: 116849 - DNA, 13 bp, Artificial Sequence
  Oligonucleotide for detection of SNP TSC0029240
aaaattgtttagg

SEQ ID NO: 116850 - DNA, 13 bp, Artificial Sequence
  Oligonucleotide for detection of SNP TSC0029240
cctaaacaatttt

SEQ ID NO: 116851 - DNA, 13 bp, Artificial Sequence
  Oligonucleotide for detection of SNP TSC0029240
aaaattatttagg

SEQ ID NO: 116852 - DNA, 13 bp, Artificial Sequence
  Oligonucleotide for detection of SNP TSC0029240
cctaaataatttt

SEQ ID NO: 116853 - DNA, 13 bp, Artificial Sequence
  Oligonucleotide for detection of SNP TSC0029242
gatagtgatagaa

SEQ ID NO: 116854 - DNA, 13 bp, Artificial Sequence
  Oligonucleotide for detection of SNP TSC0029242
ttctatcactatc

SEQ ID NO: 116855 - DNA, 13 bp, Artificial Sequence
  Oligonucleotide for detection of SNP TSC0029242
gatagttatagaa

SEQ ID NO: 116856 - DNA, 13 bp, Artificial Sequence
  Oligonucleotide for detection of SNP TSC0029242
ttctataactatc

SEQ ID NO: 116857 - DNA, 13 bp, Artificial Sequence
  Oligonucleotide for detection of SNP TSC0029242
ttttgttattaty

SEQ ID NO: 116858 - DNA, 13 bp, Artificial Sequence
  Oligonucleotide for detection of SNP TSC0029242
rataataacaaaa

SEQ ID NO: 116859 - DNA, 13 bp, Artificial Sequence
  Oligonucleotide for detection of SNP TSC0029242
ttttgtaattaty

SEQ ID NO: 116860 - DNA, 13 bp, Artificial Sequence
  Oligonucleotide for detection of SNP TSC0029242
rataattacaaaa

SEQ ID NO: 116861 - DNA, 13 bp, Artificial Sequence
  Oligonucleotide for detection of SNP TSC0029248
ttggtgattaatt

SEQ ID NO: 116862 - DNA, 13 bp, Artificial Sequence
  Oligonucleotide for detection of SNP TSC0029248
aattaatcaccaa

SEQ ID NO: 116863 - DNA, 13 bp, Artificial Sequence
  Oligonucleotide for detection of SNP TSC0029248
ttggtgtttaatt

SEQ ID NO: 116864 - DNA, 13 bp, Artificial Sequence
  Oligonucleotide for detection of SNP TSC0029248
aattaaacaccaa

SEQ ID NO: 116865 - DNA, 13 bp, Artificial Sequence
  Oligonucleotide for detection of SNP TSC0029248
agttgattattaa

SEQ ID NO: 116866 - DNA, 13 bp, Artificial Sequence
  Oligonucleotide for detection of SNP TSC0029248
ttaataatcaact

SEQ ID NO: 116867 - DNA, 13 bp, Artificial Sequence
  Oligonucleotide for detection of SNP TSC0029248
agttgaatattaa

SEQ ID NO: 116868 - DNA, 13 bp, Artificial Sequence
  Oligonucleotide for detection of SNP TSC0029248
ttaatattcaact

SEQ ID NO: 116869 - DNA, 13 bp, Artificial Sequence
  Oligonucleotide for detection of SNP TSC0029249
aagtatattttgt

SEQ ID NO: 116870 - DNA, 13 bp, Artificial Sequence
  Oligonucleotide for detection of SNP TSC0029249
acaaaatatactt

SEQ ID NO: 116871 - DNA, 13 bp, Artificial Sequence
  Oligonucleotide for detection of SNP TSC0029249
aagtatgttttgt

SEQ ID NO: 116872 - DNA, 13 bp, Artificial Sequence
  Oligonucleotide for detection of SNP TSC0029249
acaaaacatactt

SEQ ID NO: 116873 - DNA, 13 bp, Artificial Sequence
  Oligonucleotide for detection of SNP TSC0029250
ttagatatattty

SEQ ID NO: 116874 - DNA, 13 bp, Artificial Sequence
  Oligonucleotide for detection of SNP TSC0029250
raaatatatctaa

SEQ ID NO: 116875 - DNA, 13 bp, Artificial Sequence
  Oligonucleotide for detection of SNP TSC0029250
ttagatgtattty

SEQ ID NO: 116876 - DNA, 13 bp, Artificial Sequence
  Oligonucleotide for detection of SNP TSC0029250
raaatacatctaa

SEQ ID NO: 116877 - DNA, 13 bp, Artificial Sequence
  Oligonucleotide for detection of SNP TSC0029251
aattaagaggtag

SEQ ID NO: 116878 - DNA, 13 bp, Artificial Sequence
  Oligonucleotide for detection of SNP TSC0029251
ctacctcttaatt

SEQ ID NO: 116879 - DNA, 13 bp, Artificial Sequence
  Oligonucleotide for detection of SNP TSC0029251
aattaaaaggtag

SEQ ID NO: 116880 - DNA, 13 bp, Artificial Sequence
  Oligonucleotide for detection of SNP TSC0029251
ctaccttttaatt

SEQ ID NO: 116881 - DNA, 13 bp, Artificial Sequence
  Oligonucleotide for detection of SNP TSC0029253
atggtggtgtttt

SEQ ID NO: 116882 - DNA, 13 bp, Artificial Sequence
  Oligonucleotide for detection of SNP TSC0029253
aaaacaccaccat

SEQ ID NO: 116883 - DNA, 13 bp, Artificial Sequence
  Oligonucleotide for detection of SNP TSC0029253
atggtgatgtttt

SEQ ID NO: 116884 - DNA, 13 bp, Artificial Sequence
  Oligonucleotide for detection of SNP TSC0029253
aaaacatcaccat

SEQ ID NO: 116885 - DNA, 13 bp, Artificial Sequence
  Oligonucleotide for detection of SNP TSC0029254
atttttattatgt

SEQ ID NO: 116886 - DNA, 13 bp, Artificial Sequence
  Oligonucleotide for detection of SNP TSC0029254
acataataaaaat

SEQ ID NO: 116887 - DNA, 13 bp, Artificial Sequence
  Oligonucleotide for detection of SNP TSC0029254
atttttgttatgt

SEQ ID NO: 116888 - DNA, 13 bp, Artificial Sequence
  Oligonucleotide for detection of SNP TSC0029254
acataacaaaaat

SEQ ID NO: 116889 - DNA, 13 bp, Artificial Sequence
  Oligonucleotide for detection of SNP TSC0029254
attttcgttatgt

SEQ ID NO: 116890 - DNA, 13 bp, Artificial Sequence
  Oligonucleotide for detection of SNP TSC0029254
acataacgaaaat

SEQ ID NO: 116891 - DNA, 13 bp, Artificial Sequence
  Oligonucleotide for detection of SNP TSC0029254
atatgatgaaaat

SEQ ID NO: 116892 - DNA, 13 bp, Artificial Sequence
  Oligonucleotide for detection of SNP TSC0029254
attttcatcatat

SEQ ID NO: 116893 - DNA, 13 bp, Artificial Sequence
  Oligonucleotide for detection of SNP TSC0029254
atatgacgaaaat

SEQ ID NO: 116894 - DNA, 13 bp, Artificial Sequence
  Oligonucleotide for detection of SNP TSC0029254
attttcgtcatat

SEQ ID NO: 116895 - DNA, 13 bp, Artificial Sequence
  Oligonucleotide for detection of SNP TSC0029262
tttagggggtttt

SEQ ID NO: 116896 - DNA, 13 bp, Artificial Sequence
  Oligonucleotide for detection of SNP TSC0029262
aaaaccccctaaa

SEQ ID NO: 116897 - DNA, 13 bp, Artificial Sequence
  Oligonucleotide for detection of SNP TSC0029262
tttaggtggtttt

SEQ ID NO: 116898 - DNA, 13 bp, Artificial Sequence
  Oligonucleotide for detection of SNP TSC0029262
aaaaccacctaaa

SEQ ID NO: 116899 - DNA, 13 bp, Artificial Sequence
  Oligonucleotide for detection of SNP TSC0029262
aaggttttttggg

SEQ ID NO: 116900 - DNA, 13 bp, Artificial Sequence
  Oligonucleotide for detection of SNP TSC0029262
cccaaaaaacctt

SEQ ID NO: 116901 - DNA, 13 bp, Artificial Sequence
  Oligonucleotide for detection of SNP TSC0029262
aaggttatttggg

SEQ ID NO: 116902 - DNA, 13 bp, Artificial Sequence
  Oligonucleotide for detection of SNP TSC0029262
cccaaataacctt

SEQ ID NO: 116903 - DNA, 13 bp, Artificial Sequence
  Oligonucleotide for detection of SNP TSC0029263
ggatttaagttty

SEQ ID NO: 116904 - DNA, 13 bp, Artificial Sequence
  Oligonucleotide for detection of SNP TSC0029263
raaacttaaatcc

SEQ ID NO: 116905 - DNA, 13 bp, Artificial Sequence
  Oligonucleotide for detection of SNP TSC0029263
ggatttgagttty

SEQ ID NO: 116906 - DNA, 13 bp, Artificial Sequence
  Oligonucleotide for detection of SNP TSC0029263
raaactcaaatcc

SEQ ID NO: 116907 - DNA, 13 bp, Artificial Sequence
  Oligonucleotide for detection of SNP TSC0029263
ggattcgagttty

SEQ ID NO: 116908 - DNA, 13 bp, Artificial Sequence
  Oligonucleotide for detection of SNP TSC0029263
raaactcgaatcc

SEQ ID NO: 116909 - DNA, 13 bp, Artificial Sequence
  Oligonucleotide for detection of SNP TSC0029263
gaagtttgggtty

SEQ ID NO: 116910 - DNA, 13 bp, Artificial Sequence
  Oligonucleotide for detection of SNP TSC0029263
raacccaaacttc

SEQ ID NO: 116911 - DNA, 13 bp, Artificial Sequence
  Oligonucleotide for detection of SNP TSC0029263
gaagttcgggtty

SEQ ID NO: 116912 - DNA, 13 bp, Artificial Sequence
  Oligonucleotide for detection of SNP TSC0029263
raacccgaacttc

SEQ ID NO: 116913 - DNA, 13 bp, Artificial Sequence
  Oligonucleotide for detection of SNP TSC0029264
aggaaggggttty

SEQ ID NO: 116914 - DNA, 13 bp, Artificial Sequence
  Oligonucleotide for detection of SNP TSC0029264
raaaccccttcct

SEQ ID NO: 116915 - DNA, 13 bp, Artificial Sequence
  Oligonucleotide for detection of SNP TSC0029264
aggaagtggttty

SEQ ID NO: 116916 - DNA, 13 bp, Artificial Sequence
  Oligonucleotide for detection of SNP TSC0029264
raaaccacttcct

SEQ ID NO: 116917 - DNA, 13 bp, Artificial Sequence
  Oligonucleotide for detection of SNP TSC0029264
ggggttttttttt

SEQ ID NO: 116918 - DNA, 13 bp, Artificial Sequence
  Oligonucleotide for detection of SNP TSC0029264
aaaaaaaaacccc

SEQ ID NO: 116919 - DNA, 13 bp, Artificial Sequence
  Oligonucleotide for detection of SNP TSC0029264
ggggttatttttt

SEQ ID NO: 116920 - DNA, 13 bp, Artificial Sequence
  Oligonucleotide for detection of SNP TSC0029264
aaaaaataacccc

SEQ ID NO: 116921 - DNA, 13 bp, Artificial Sequence
  Oligonucleotide for detection of SNP TSC0029265
tagtagggggggt

SEQ ID NO: 116922 - DNA, 13 bp, Artificial Sequence
  Oligonucleotide for detection of SNP TSC0029265
accccccctacta

SEQ ID NO: 116923 - DNA, 13 bp, Artificial Sequence
  Oligonucleotide for detection of SNP TSC0029265
tagtagtgggggt

SEQ ID NO: 116924 - DNA, 13 bp, Artificial Sequence
  Oligonucleotide for detection of SNP TSC0029265
acccccactacta

SEQ ID NO: 116925 - DNA, 13 bp, Artificial Sequence
  Oligonucleotide for detection of SNP TSC0029265
attttttttgttg

SEQ ID NO: 116926 - DNA, 13 bp, Artificial Sequence
  Oligonucleotide for detection of SNP TSC0029265
caacaaaaaaaat

SEQ ID NO: 116927 - DNA, 13 bp, Artificial Sequence
  Oligonucleotide for detection of SNP TSC0029266
ttgtgaatattay

SEQ ID NO: 116928 - DNA, 13 bp, Artificial Sequence
  Oligonucleotide for detection of SNP TSC0029266
rtaatattcacaa

SEQ ID NO: 116929 - DNA, 13 bp, Artificial Sequence
  Oligonucleotide for detection of SNP TSC0029266
ttgtgagtattay

SEQ ID NO: 116930 - DNA, 13 bp, Artificial Sequence
  Oligonucleotide for detection of SNP TSC0029266
rtaatactcacaa

SEQ ID NO: 116931 - DNA, 13 bp, Artificial Sequence
  Oligonucleotide for detection of SNP TSC0029266
tcgtgaatattay

SEQ ID NO: 116932 - DNA, 13 bp, Artificial Sequence
  Oligonucleotide for detection of SNP TSC0029266
rtaatattcacga

SEQ ID NO: 116933 - DNA, 13 bp, Artificial Sequence
  Oligonucleotide for detection of SNP TSC0029266
tcgtgagtattay

SEQ ID NO: 116934 - DNA, 13 bp, Artificial Sequence
  Oligonucleotide for detection of SNP TSC0029266
rtaatactcacga

SEQ ID NO: 116935 - DNA, 13 bp, Artificial Sequence
  Oligonucleotide for detection of SNP TSC0029270
taattttggttay

SEQ ID NO: 116936 - DNA, 13 bp, Artificial Sequence
  Oligonucleotide for detection of SNP TSC0029270
rtaaccaaaatta

SEQ ID NO: 116937 - DNA, 13 bp, Artificial Sequence
  Oligonucleotide for detection of SNP TSC0029270
taatttcggttay

SEQ ID NO: 116938 - DNA, 13 bp, Artificial Sequence
  Oligonucleotide for detection of SNP TSC0029270
rtaaccgaaatta

SEQ ID NO: 116939 - DNA, 13 bp, Artificial Sequence
  Oligonucleotide for detection of SNP TSC0029270
gtagttgggattg

SEQ ID NO: 116940 - DNA, 13 bp, Artificial Sequence
  Oligonucleotide for detection of SNP TSC0029270
caatcccaactac

SEQ ID NO: 116941 - DNA, 13 bp, Artificial Sequence
  Oligonucleotide for detection of SNP TSC0029270
gtagttaggattg

SEQ ID NO: 116942 - DNA, 13 bp, Artificial Sequence
  Oligonucleotide for detection of SNP TSC0029270
caatcctaactac

SEQ ID NO: 116943 - DNA, 13 bp, Artificial Sequence
  Oligonucleotide for detection of SNP TSC0029270
gtagtcgggattg

SEQ ID NO: 116944 - DNA, 13 bp, Artificial Sequence
  Oligonucleotide for detection of SNP TSC0029270
caatcccgactac

SEQ ID NO: 116945 - DNA, 13 bp, Artificial Sequence
  Oligonucleotide for detection of SNP TSC0029271
aaaagggtgtatt

SEQ ID NO: 116946 - DNA, 13 bp, Artificial Sequence
  Oligonucleotide for detection of SNP TSC0029271
aatacaccctttt

SEQ ID NO: 116947 - DNA, 13 bp, Artificial Sequence
  Oligonucleotide for detection of SNP TSC0029271
aaaaggttgtatt

SEQ ID NO: 116948 - DNA, 13 bp, Artificial Sequence
  Oligonucleotide for detection of SNP TSC0029271
aatacaacctttt

SEQ ID NO: 116949 - DNA, 13 bp, Artificial Sequence
  Oligonucleotide for detection of SNP TSC0029271
agtgtattttttt

SEQ ID NO: 116950 - DNA, 13 bp, Artificial Sequence
  Oligonucleotide for detection of SNP TSC0029271
aaaaaaatacact

SEQ ID NO: 116951 - DNA, 13 bp, Artificial Sequence
  Oligonucleotide for detection of SNP TSC0029271
agtgtaatttttt

SEQ ID NO: 116952 - DNA, 13 bp, Artificial Sequence
  Oligonucleotide for detection of SNP TSC0029271
aaaaaattacact

SEQ ID NO: 116953 - DNA, 13 bp, Artificial Sequence
  Oligonucleotide for detection of SNP TSC0029276
ggttttatgatay

SEQ ID NO: 116954 - DNA, 13 bp, Artificial Sequence
  Oligonucleotide for detection of SNP TSC0029276
rtatcataaaacc

SEQ ID NO: 116955 - DNA, 13 bp, Artificial Sequence
  Oligonucleotide for detection of SNP TSC0029276
ggttttgtgatay

SEQ ID NO: 116956 - DNA, 13 bp, Artificial Sequence
  Oligonucleotide for detection of SNP TSC0029276
rtatcacaaaacc

SEQ ID NO: 116957 - DNA, 13 bp, Artificial Sequence
  Oligonucleotide for detection of SNP TSC0029279
atatagtagaaay

SEQ ID NO: 116958 - DNA, 13 bp, Artificial Sequence
  Oligonucleotide for detection of SNP TSC0029279
rtttctactatat

SEQ ID NO: 116959 - DNA, 13 bp, Artificial Sequence
  Oligonucleotide for detection of SNP TSC0029279
atataggagaaay

SEQ ID NO: 116960 - DNA, 13 bp, Artificial Sequence
  Oligonucleotide for detection of SNP TSC0029279
rtttctcctatat

SEQ ID NO: 116961 - DNA, 13 bp, Artificial Sequence
  Oligonucleotide for detection of SNP TSC0029279
gtttttgttgtgt

SEQ ID NO: 116962 - DNA, 13 bp, Artificial Sequence
  Oligonucleotide for detection of SNP TSC0029279
acacaacaaaaac

SEQ ID NO: 116963 - DNA, 13 bp, Artificial Sequence
  Oligonucleotide for detection of SNP TSC0029279
gttttttttgtgt

SEQ ID NO: 116964 - DNA, 13 bp, Artificial Sequence
  Oligonucleotide for detection of SNP TSC0029279
acacaaaaaaaac

SEQ ID NO: 116965 - DNA, 13 bp, Artificial Sequence
  Oligonucleotide for detection of SNP TSC0029280
tttattatagttg

SEQ ID NO: 116966 - DNA, 13 bp, Artificial Sequence
  Oligonucleotide for detection of SNP TSC0029280
caactataataaa

SEQ ID NO: 116967 - DNA, 13 bp, Artificial Sequence
  Oligonucleotide for detection of SNP TSC0029280
tttattgtagttg

SEQ ID NO: 116968 - DNA, 13 bp, Artificial Sequence
  Oligonucleotide for detection of SNP TSC0029280
caactacaataaa

SEQ ID NO: 116969 - DNA, 13 bp, Artificial Sequence
  Oligonucleotide for detection of SNP TSC0029280
tttatcgtagttg

SEQ ID NO: 116970 - DNA, 13 bp, Artificial Sequence
  Oligonucleotide for detection of SNP TSC0029280
caactacgataaa

SEQ ID NO: 116971 - DNA, 13 bp, Artificial Sequence
  Oligonucleotide for detection of SNP TSC0029280
taattatggtgga

SEQ ID NO: 116972 - DNA, 13 bp, Artificial Sequence
  Oligonucleotide for detection of SNP TSC0029280
tccaccataatta

SEQ ID NO: 116973 - DNA, 13 bp, Artificial Sequence
  Oligonucleotide for detection of SNP TSC0029280
taattacggtgga

SEQ ID NO: 116974 - DNA, 13 bp, Artificial Sequence
  Oligonucleotide for detection of SNP TSC0029280
tccaccgtaatta

SEQ ID NO: 116975 - DNA, 13 bp, Artificial Sequence
  Oligonucleotide for detection of SNP TSC0029281
atgtgtaattaty

SEQ ID NO: 116976 - DNA, 13 bp, Artificial Sequence
  Oligonucleotide for detection of SNP TSC0029281
rataattacacat

SEQ ID NO: 116977 - DNA, 13 bp, Artificial Sequence
  Oligonucleotide for detection of SNP TSC0029281
atgtgtgattaty

SEQ ID NO: 116978 - DNA, 13 bp, Artificial Sequence
  Oligonucleotide for detection of SNP TSC0029281
rataatcacacat

SEQ ID NO: 116979 - DNA, 13 bp, Artificial Sequence
  Oligonucleotide for detection of SNP TSC0029281
atgcgtaattaty

SEQ ID NO: 116980 - DNA, 13 bp, Artificial Sequence
  Oligonucleotide for detection of SNP TSC0029281
rataattacgcat

SEQ ID NO: 116981 - DNA, 13 bp, Artificial Sequence
  Oligonucleotide for detection of SNP TSC0029281
atgcgtgattaty

SEQ ID NO: 116982 - DNA, 13 bp, Artificial Sequence
  Oligonucleotide for detection of SNP TSC0029281
rataatcacgcat

SEQ ID NO: 116983 - DNA, 13 bp, Artificial Sequence
  Oligonucleotide for detection of SNP TSC0029282
tgttggagtttay

SEQ ID NO: 116984 - DNA, 13 bp, Artificial Sequence
  Oligonucleotide for detection of SNP TSC0029282
rtaaactccaaca

SEQ ID NO: 116985 - DNA, 13 bp, Artificial Sequence
  Oligonucleotide for detection of SNP TSC0029282
tgttggggtttay

SEQ ID NO: 116986 - DNA, 13 bp, Artificial Sequence
  Oligonucleotide for detection of SNP TSC0029282
rtaaaccccaaca

SEQ ID NO: 116987 - DNA, 13 bp, Artificial Sequence
  Oligonucleotide for detection of SNP TSC0029282
cgttggagtttay

SEQ ID NO: 116988 - DNA, 13 bp, Artificial Sequence
  Oligonucleotide for detection of SNP TSC0029282
rtaaactccaacg

SEQ ID NO: 116989 - DNA, 13 bp, Artificial Sequence
  Oligonucleotide for detection of SNP TSC0029282
cgttggggtttay

SEQ ID NO: 116990 - DNA, 13 bp, Artificial Sequence
  Oligonucleotide for detection of SNP TSC0029282
rtaaaccccaacg

SEQ ID NO: 116991 - DNA, 13 bp, Artificial Sequence
  Oligonucleotide for detection of SNP TSC0029288
attttaatggttg

SEQ ID NO: 116992 - DNA, 13 bp, Artificial Sequence
  Oligonucleotide for detection of SNP TSC0029288
caaccattaaaat

SEQ ID NO: 116993 - DNA, 13 bp, Artificial Sequence
  Oligonucleotide for detection of SNP TSC0029288
attttattggttg

SEQ ID NO: 116994 - DNA, 13 bp, Artificial Sequence
  Oligonucleotide for detection of SNP TSC0029288
caaccaataaaat

SEQ ID NO: 116995 - DNA, 13 bp, Artificial Sequence
  Oligonucleotide for detection of SNP TSC0029288
tagttattggggt

SEQ ID NO: 116996 - DNA, 13 bp, Artificial Sequence
  Oligonucleotide for detection of SNP TSC0029288
accccaataacta

SEQ ID NO: 116997 - DNA, 13 bp, Artificial Sequence
  Oligonucleotide for detection of SNP TSC0029288
tagttagtggggt

SEQ ID NO: 116998 - DNA, 13 bp, Artificial Sequence
  Oligonucleotide for detection of SNP TSC0029288
accccactaacta

SEQ ID NO: 116999 - DNA, 13 bp, Artificial Sequence
  Oligonucleotide for detection of SNP TSC0029289
tagttagttattg

SEQ ID NO: 117000 - DNA, 13 bp, Artificial Sequence
  Oligonucleotide for detection of SNP TSC0029289
caataactaacta

SEQ ID NO: 117001 - DNA, 13 bp, Artificial Sequence
  Oligonucleotide for detection of SNP TSC0029289
tagttaattattg

SEQ ID NO: 117002 - DNA, 13 bp, Artificial Sequence
  Oligonucleotide for detection of SNP TSC0029289
caataattaacta

SEQ ID NO: 117003 - DNA, 13 bp, Artificial Sequence
  Oligonucleotide for detection of SNP TSC0029290
tgagttatttttg

SEQ ID NO: 117004 - DNA, 13 bp, Artificial Sequence
  Oligonucleotide for detection of SNP TSC0029290
caaaaataactca

SEQ ID NO: 117005 - DNA, 13 bp, Artificial Sequence
  Oligonucleotide for detection of SNP TSC0029290
tgagttgtttttg

SEQ ID NO: 117006 - DNA, 13 bp, Artificial Sequence
  Oligonucleotide for detection of SNP TSC0029290
caaaaacaactca

SEQ ID NO: 117007 - DNA, 13 bp, Artificial Sequence
  Oligonucleotide for detection of SNP TSC0029290
tgagtcgtttttg

SEQ ID NO: 117008 - DNA, 13 bp, Artificial Sequence
  Oligonucleotide for detection of SNP TSC0029290
caaaaacgactca

SEQ ID NO: 117009 - DNA, 13 bp, Artificial Sequence
  Oligonucleotide for detection of SNP TSC0029290
tagggatggttta

SEQ ID NO: 117010 - DNA, 13 bp, Artificial Sequence
  Oligonucleotide for detection of SNP TSC0029290
taaaccatcccta

SEQ ID NO: 117011 - DNA, 13 bp, Artificial Sequence
  Oligonucleotide for detection of SNP TSC0029290
tagggacggttta

SEQ ID NO: 117012 - DNA, 13 bp, Artificial Sequence
  Oligonucleotide for detection of SNP TSC0029290
taaaccgtcccta

SEQ ID NO: 117013 - DNA, 13 bp, Artificial Sequence
  Oligonucleotide for detection of SNP TSC0029291
taattgtgtgagy

SEQ ID NO: 117014 - DNA, 13 bp, Artificial Sequence
  Oligonucleotide for detection of SNP TSC0029291
rctcacacaatta

SEQ ID NO: 117015 - DNA, 13 bp, Artificial Sequence
  Oligonucleotide for detection of SNP TSC0029291
taattgcgtgagy

SEQ ID NO: 117016 - DNA, 13 bp, Artificial Sequence
  Oligonucleotide for detection of SNP TSC0029291
rctcacgcaatta

SEQ ID NO: 117017 - DNA, 13 bp, Artificial Sequence
  Oligonucleotide for detection of SNP TSC0029291
gtttatgtaatta

SEQ ID NO: 117018 - DNA, 13 bp, Artificial Sequence
  Oligonucleotide for detection of SNP TSC0029291
taattacataaac

SEQ ID NO: 117019 - DNA, 13 bp, Artificial Sequence
  Oligonucleotide for detection of SNP TSC0029291
gtttatataatta

SEQ ID NO: 117020 - DNA, 13 bp, Artificial Sequence
  Oligonucleotide for detection of SNP TSC0029291
taattatataaac

SEQ ID NO: 117021 - DNA, 13 bp, Artificial Sequence
  Oligonucleotide for detection of SNP TSC0029291
gtttacgtaatta

SEQ ID NO: 117022 - DNA, 13 bp, Artificial Sequence
  Oligonucleotide for detection of SNP TSC0029291
taattacgtaaac

SEQ ID NO: 117023 - DNA, 13 bp, Artificial Sequence
  Oligonucleotide for detection of SNP TSC0029292
gtgtttgtgtgtg

SEQ ID NO: 117024 - DNA, 13 bp, Artificial Sequence
  Oligonucleotide for detection of SNP TSC0029292
cacacacaaacac

SEQ ID NO: 117025 - DNA, 13 bp, Artificial Sequence
  Oligonucleotide for detection of SNP TSC0029292
gtgtttatgtgtg

SEQ ID NO: 117026 - DNA, 13 bp, Artificial Sequence
  Oligonucleotide for detection of SNP TSC0029292
cacacataaacac

SEQ ID NO: 117027 - DNA, 13 bp, Artificial Sequence
  Oligonucleotide for detection of SNP TSC0029293
ttaagtagattty

SEQ ID NO: 117028 - DNA, 13 bp, Artificial Sequence
  Oligonucleotide for detection of SNP TSC0029293
raaatctacttaa

SEQ ID NO: 117029 - DNA, 13 bp, Artificial Sequence
  Oligonucleotide for detection of SNP TSC0029293
ttaagtggattty

SEQ ID NO: 117030 - DNA, 13 bp, Artificial Sequence
  Oligonucleotide for detection of SNP TSC0029293
raaatccacttaa

SEQ ID NO: 117031 - DNA, 13 bp, Artificial Sequence
  Oligonucleotide for detection of SNP TSC0029294
tatttttggaaag

SEQ ID NO: 117032 - DNA, 13 bp, Artificial Sequence
  Oligonucleotide for detection of SNP TSC0029294
ctttccaaaaata

SEQ ID NO: 117033 - DNA, 13 bp, Artificial Sequence
  Oligonucleotide for detection of SNP TSC0029294
tattttcggaaag

SEQ ID NO: 117034 - DNA, 13 bp, Artificial Sequence
  Oligonucleotide for detection of SNP TSC0029294
ctttccgaaaata

SEQ ID NO: 117035 - DNA, 13 bp, Artificial Sequence
  Oligonucleotide for detection of SNP TSC0029294
ttttttgaagatg

SEQ ID NO: 117036 - DNA, 13 bp, Artificial Sequence
  Oligonucleotide for detection of SNP TSC0029294
catcttcaaaaaa

SEQ ID NO: 117037 - DNA, 13 bp, Artificial Sequence
  Oligonucleotide for detection of SNP TSC0029294
ttttttaaagatg

SEQ ID NO: 117038 - DNA, 13 bp, Artificial Sequence
  Oligonucleotide for detection of SNP TSC0029294
catctttaaaaaa

SEQ ID NO: 117039 - DNA, 13 bp, Artificial Sequence
  Oligonucleotide for detection of SNP TSC0029294
tttttcgaagatg

SEQ ID NO: 117040 - DNA, 13 bp, Artificial Sequence
  Oligonucleotide for detection of SNP TSC0029294
catcttcgaaaaa

SEQ ID NO: 117041 - DNA, 13 bp, Artificial Sequence
  Oligonucleotide for detection of SNP TSC0029295
ttttttgttaata

SEQ ID NO: 117042 - DNA, 13 bp, Artificial Sequence
  Oligonucleotide for detection of SNP TSC0029295
tattaacaaaaaa

SEQ ID NO: 117043 - DNA, 13 bp, Artificial Sequence
  Oligonucleotide for detection of SNP TSC0029295
tttttcgttaata

SEQ ID NO: 117044 - DNA, 13 bp, Artificial Sequence
  Oligonucleotide for detection of SNP TSC0029295
tattaacgaaaaa

SEQ ID NO: 117045 - DNA, 13 bp, Artificial Sequence
  Oligonucleotide for detection of SNP TSC0029295
tgttaaggagaaa

SEQ ID NO: 117046 - DNA, 13 bp, Artificial Sequence
  Oligonucleotide for detection of SNP TSC0029295
tttctccttaaca

SEQ ID NO: 117047 - DNA, 13 bp, Artificial Sequence
  Oligonucleotide for detection of SNP TSC0029295
tgttaatgagaaa

SEQ ID NO: 117048 - DNA, 13 bp, Artificial Sequence
  Oligonucleotide for detection of SNP TSC0029295
tttctcattaaca

SEQ ID NO: 117049 - DNA, 13 bp, Artificial Sequence
  Oligonucleotide for detection of SNP TSC0029295
tgttaacgagaaa

SEQ ID NO: 117050 - DNA, 13 bp, Artificial Sequence
  Oligonucleotide for detection of SNP TSC0029295
tttctcgttaaca

SEQ ID NO: 117051 - DNA, 13 bp, Artificial Sequence
  Oligonucleotide for detection of SNP TSC0029296
attattgggttty

SEQ ID NO: 117052 - DNA, 13 bp, Artificial Sequence
  Oligonucleotide for detection of SNP TSC0029296
raaacccaataat

SEQ ID NO: 117053 - DNA, 13 bp, Artificial Sequence
  Oligonucleotide for detection of SNP TSC0029296
attattaggttty

SEQ ID NO: 117054 - DNA, 13 bp, Artificial Sequence
  Oligonucleotide for detection of SNP TSC0029296
raaacctaataat

SEQ ID NO: 117055 - DNA, 13 bp, Artificial Sequence
  Oligonucleotide for detection of SNP TSC0029297
aaaggatgtaaat

SEQ ID NO: 117056 - DNA, 13 bp, Artificial Sequence
  Oligonucleotide for detection of SNP TSC0029297
atttacatccttt

SEQ ID NO: 117057 - DNA, 13 bp, Artificial Sequence
  Oligonucleotide for detection of SNP TSC0029297
aaaggacgtaaat

SEQ ID NO: 117058 - DNA, 13 bp, Artificial Sequence
  Oligonucleotide for detection of SNP TSC0029297
atttacgtccttt

SEQ ID NO: 117059 - DNA, 13 bp, Artificial Sequence
  Oligonucleotide for detection of SNP TSC0029298
tagtttagtaata

SEQ ID NO: 117060 - DNA, 13 bp, Artificial Sequence
  Oligonucleotide for detection of SNP TSC0029298
tattactaaacta

SEQ ID NO: 117061 - DNA, 13 bp, Artificial Sequence
  Oligonucleotide for detection of SNP TSC0029298
tagtttggtaata

SEQ ID NO: 117062 - DNA, 13 bp, Artificial Sequence
  Oligonucleotide for detection of SNP TSC0029298
tattaccaaacta

SEQ ID NO: 117063 - DNA, 13 bp, Artificial Sequence
  Oligonucleotide for detection of SNP TSC0029299
gtgatgtggttgy

SEQ ID NO: 117064 - DNA, 13 bp, Artificial Sequence
  Oligonucleotide for detection of SNP TSC0029299
rcaaccacatcac

SEQ ID NO: 117065 - DNA, 13 bp, Artificial Sequence
  Oligonucleotide for detection of SNP TSC0029299
gtgatgcggttgy

SEQ ID NO: 117066 - DNA, 13 bp, Artificial Sequence
  Oligonucleotide for detection of SNP TSC0029299
rcaaccgcatcac

SEQ ID NO: 117067 - DNA, 13 bp, Artificial Sequence
  Oligonucleotide for detection of SNP TSC0029299
gtagttgtattay

SEQ ID NO: 117068 - DNA, 13 bp, Artificial Sequence
  Oligonucleotide for detection of SNP TSC0029299
rtaatacaactac

SEQ ID NO: 117069 - DNA, 13 bp, Artificial Sequence
  Oligonucleotide for detection of SNP TSC0029299
gtagttatattay

SEQ ID NO: 117070 - DNA, 13 bp, Artificial Sequence
  Oligonucleotide for detection of SNP TSC0029299
rtaatataactac

SEQ ID NO: 117071 - DNA, 13 bp, Artificial Sequence
  Oligonucleotide for detection of SNP TSC0029299
gtagtcgtattay

SEQ ID NO: 117072 - DNA, 13 bp, Artificial Sequence
  Oligonucleotide for detection of SNP TSC0029299
rtaatacgactac

SEQ ID NO: 117073 - DNA, 13 bp, Artificial Sequence
  Oligonucleotide for detection of SNP TSC0029300
ttttggggtttgg

SEQ ID NO: 117074 - DNA, 13 bp, Artificial Sequence
  Oligonucleotide for detection of SNP TSC0029300
ccaaaccccaaaa

SEQ ID NO: 117075 - DNA, 13 bp, Artificial Sequence
  Oligonucleotide for detection of SNP TSC0029300
ttttggtgtttgg

SEQ ID NO: 117076 - DNA, 13 bp, Artificial Sequence
  Oligonucleotide for detection of SNP TSC0029300
ccaaacaccaaaa

SEQ ID NO: 117077 - DNA, 13 bp, Artificial Sequence
  Oligonucleotide for detection of SNP TSC0029300
ttagattttagaa

SEQ ID NO: 117078 - DNA, 13 bp, Artificial Sequence
  Oligonucleotide for detection of SNP TSC0029300
ttctaaaatctaa

SEQ ID NO: 117079 - DNA, 13 bp, Artificial Sequence
  Oligonucleotide for detection of SNP TSC0029300
ttagatattagaa

SEQ ID NO: 117080 - DNA, 13 bp, Artificial Sequence
  Oligonucleotide for detection of SNP TSC0029300
ttctaatatctaa

SEQ ID NO: 117081 - DNA, 13 bp, Artificial Sequence
  Oligonucleotide for detection of SNP TSC0029302
ttatttgttaaat

SEQ ID NO: 117082 - DNA, 13 bp, Artificial Sequence
  Oligonucleotide for detection of SNP TSC0029302
atttaacaaataa

SEQ ID NO: 117083 - DNA, 13 bp, Artificial Sequence
  Oligonucleotide for detection of SNP TSC0029302
atttaggaaataa

SEQ ID NO: 117084 - DNA, 13 bp, Artificial Sequence
  Oligonucleotide for detection of SNP TSC0029302
ttatttcctaaat

SEQ ID NO: 117085 - DNA, 13 bp, Artificial Sequence
  Oligonucleotide for detection of SNP TSC0029302
atttagtaaataa

SEQ ID NO: 117086 - DNA, 13 bp, Artificial Sequence
  Oligonucleotide for detection of SNP TSC0029302
ttatttactaaat

SEQ ID NO: 117087 - DNA, 13 bp, Artificial Sequence
  Oligonucleotide for detection of SNP TSC0029303
aagggtgtataay

SEQ ID NO: 117088 - DNA, 13 bp, Artificial Sequence
  Oligonucleotide for detection of SNP TSC0029303
rttatacaccctt

SEQ ID NO: 117089 - DNA, 13 bp, Artificial Sequence
  Oligonucleotide for detection of SNP TSC0029303
aagggtatataay

SEQ ID NO: 117090 - DNA, 13 bp, Artificial Sequence
  Oligonucleotide for detection of SNP TSC0029303
rttatataccctt

SEQ ID NO: 117091 - DNA, 13 bp, Artificial Sequence
  Oligonucleotide for detection of SNP TSC0029305
tgtaggtgggtag

SEQ ID NO: 117092 - DNA, 13 bp, Artificial Sequence
  Oligonucleotide for detection of SNP TSC0029305
ctacccacctaca

SEQ ID NO: 117093 - DNA, 13 bp, Artificial Sequence
  Oligonucleotide for detection of SNP TSC0029305
tgtaggggggtag

SEQ ID NO: 117094 - DNA, 13 bp, Artificial Sequence
  Oligonucleotide for detection of SNP TSC0029305
ctacccccctaca

SEQ ID NO: 117095 - DNA, 13 bp, Artificial Sequence
  Oligonucleotide for detection of SNP TSC0029305
tgtaggcgggtag

SEQ ID NO: 117096 - DNA, 13 bp, Artificial Sequence
  Oligonucleotide for detection of SNP TSC0029305
ctacccgcctaca

SEQ ID NO: 117097 - DNA, 13 bp, Artificial Sequence
  Oligonucleotide for detection of SNP TSC0029305
ttgtttttttata

SEQ ID NO: 117098 - DNA, 13 bp, Artificial Sequence
  Oligonucleotide for detection of SNP TSC0029305
tataaaaaaacaa

SEQ ID NO: 117099 - DNA, 13 bp, Artificial Sequence
  Oligonucleotide for detection of SNP TSC0029305
ttgttcgtttata

SEQ ID NO: 117100 - DNA, 13 bp, Artificial Sequence
  Oligonucleotide for detection of SNP TSC0029305
tataaacgaacaa

SEQ ID NO: 117101 - DNA, 13 bp, Artificial Sequence
  Oligonucleotide for detection of SNP TSC0029306
gttgtgttgaagg

SEQ ID NO: 117102 - DNA, 13 bp, Artificial Sequence
  Oligonucleotide for detection of SNP TSC0029306
ccttcaacacaac

SEQ ID NO: 117103 - DNA, 13 bp, Artificial Sequence
  Oligonucleotide for detection of SNP TSC0029306
gttgtggtgaagg

SEQ ID NO: 117104 - DNA, 13 bp, Artificial Sequence
  Oligonucleotide for detection of SNP TSC0029306
ccttcaccacaac

SEQ ID NO: 117105 - DNA, 13 bp, Artificial Sequence
  Oligonucleotide for detection of SNP TSC0029306
gtcgtgttgaagg

SEQ ID NO: 117106 - DNA, 13 bp, Artificial Sequence
  Oligonucleotide for detection of SNP TSC0029306
ccttcaacacgac

SEQ ID NO: 117107 - DNA, 13 bp, Artificial Sequence
  Oligonucleotide for detection of SNP TSC0029306
gtcgtggtgaagg

SEQ ID NO: 117108 - DNA, 13 bp, Artificial Sequence
  Oligonucleotide for detection of SNP TSC0029306
ccttcaccacgac

SEQ ID NO: 117109 - DNA, 13 bp, Artificial Sequence
  Oligonucleotide for detection of SNP TSC0029306
gttgcgttgaagg

SEQ ID NO: 117110 - DNA, 13 bp, Artificial Sequence
  Oligonucleotide for detection of SNP TSC0029306
ccttcaacgcaac

SEQ ID NO: 117111 - DNA, 13 bp, Artificial Sequence
  Oligonucleotide for detection of SNP TSC0029306
gttgcggtgaagg

SEQ ID NO: 117112 - DNA, 13 bp, Artificial Sequence
  Oligonucleotide for detection of SNP TSC0029306
ccttcaccgcaac

SEQ ID NO: 117113 - DNA, 13 bp, Artificial Sequence
  Oligonucleotide for detection of SNP TSC0029306
gtcgcgttgaagg

SEQ ID NO: 117114 - DNA, 13 bp, Artificial Sequence
  Oligonucleotide for detection of SNP TSC0029306
ccttcaacgcgac

SEQ ID NO: 117115 - DNA, 13 bp, Artificial Sequence
  Oligonucleotide for detection of SNP TSC0029306
gtcgcggtgaagg

SEQ ID NO: 117116 - DNA, 13 bp, Artificial Sequence
  Oligonucleotide for detection of SNP TSC0029306
ccttcaccgcgac

SEQ ID NO: 117117 - DNA, 13 bp, Artificial Sequence
  Oligonucleotide for detection of SNP TSC0029306
tttttagtgtggy

SEQ ID NO: 117118 - DNA, 13 bp, Artificial Sequence
  Oligonucleotide for detection of SNP TSC0029306
rccacactaaaaa

SEQ ID NO: 117119 - DNA, 13 bp, Artificial Sequence
  Oligonucleotide for detection of SNP TSC0029306
tttttattgtggy

SEQ ID NO: 117120 - DNA, 13 bp, Artificial Sequence
  Oligonucleotide for detection of SNP TSC0029306
rccacaataaaaa

SEQ ID NO: 117121 - DNA, 13 bp, Artificial Sequence
  Oligonucleotide for detection of SNP TSC0029306
tttttagcgtggy

SEQ ID NO: 117122 - DNA, 13 bp, Artificial Sequence
  Oligonucleotide for detection of SNP TSC0029306
rccacgctaaaaa

SEQ ID NO: 117123 - DNA, 13 bp, Artificial Sequence
  Oligonucleotide for detection of SNP TSC0029306
tttttatcgtggy

SEQ ID NO: 117124 - DNA, 13 bp, Artificial Sequence
  Oligonucleotide for detection of SNP TSC0029306
rccacgataaaaa

SEQ ID NO: 117125 - DNA, 13 bp, Artificial Sequence
  Oligonucleotide for detection of SNP TSC0029306
tttttagtgcggy

SEQ ID NO: 117126 - DNA, 13 bp, Artificial Sequence
  Oligonucleotide for detection of SNP TSC0029306
rccgcactaaaaa

SEQ ID NO: 117127 - DNA, 13 bp, Artificial Sequence
  Oligonucleotide for detection of SNP TSC0029306
tttttattgcggy

SEQ ID NO: 117128 - DNA, 13 bp, Artificial Sequence
  Oligonucleotide for detection of SNP TSC0029306
rccgcaataaaaa

SEQ ID NO: 117129 - DNA, 13 bp, Artificial Sequence
  Oligonucleotide for detection of SNP TSC0029306
tttttagcgcggy

SEQ ID NO: 117130 - DNA, 13 bp, Artificial Sequence
  Oligonucleotide for detection of SNP TSC0029306
rccgcgctaaaaa

SEQ ID NO: 117131 - DNA, 13 bp, Artificial Sequence
  Oligonucleotide for detection of SNP TSC0029306
tttttatcgcggy

SEQ ID NO: 117132 - DNA, 13 bp, Artificial Sequence
  Oligonucleotide for detection of SNP TSC0029306
rccgcgataaaaa

SEQ ID NO: 117133 - DNA, 13 bp, Artificial Sequence
  Oligonucleotide for detection of SNP TSC0029307
aaataggtaagtg

SEQ ID NO: 117134 - DNA, 13 bp, Artificial Sequence
  Oligonucleotide for detection of SNP TSC0029307
cacttacctattt

SEQ ID NO: 117135 - DNA, 13 bp, Artificial Sequence
  Oligonucleotide for detection of SNP TSC0029307
aaatagataagtg

SEQ ID NO: 117136 - DNA, 13 bp, Artificial Sequence
  Oligonucleotide for detection of SNP TSC0029307
cacttatctattt

SEQ ID NO: 117137 - DNA, 13 bp, Artificial Sequence
  Oligonucleotide for detection of SNP TSC0029311
attttgatttgga

SEQ ID NO: 117138 - DNA, 13 bp, Artificial Sequence
  Oligonucleotide for detection of SNP TSC0029311
tccaaatcaaaat

SEQ ID NO: 117139 - DNA, 13 bp, Artificial Sequence
  Oligonucleotide for detection of SNP TSC0029311
attttggtttgga

SEQ ID NO: 117140 - DNA, 13 bp, Artificial Sequence
  Oligonucleotide for detection of SNP TSC0029311
tccaaaccaaaat

SEQ ID NO: 117141 - DNA, 13 bp, Artificial Sequence
  Oligonucleotide for detection of SNP TSC0029312
ttttgagtggtaa

SEQ ID NO: 117142 - DNA, 13 bp, Artificial Sequence
  Oligonucleotide for detection of SNP TSC0029312
ttaccactcaaaa

SEQ ID NO: 117143 - DNA, 13 bp, Artificial Sequence
  Oligonucleotide for detection of SNP TSC0029312
ttttgaatggtaa

SEQ ID NO: 117144 - DNA, 13 bp, Artificial Sequence
  Oligonucleotide for detection of SNP TSC0029312
ttaccattcaaaa

SEQ ID NO: 117145 - DNA, 13 bp, Artificial Sequence
  Oligonucleotide for detection of SNP TSC0029313
ggagtgtggtggg

SEQ ID NO: 117146 - DNA, 13 bp, Artificial Sequence
  Oligonucleotide for detection of SNP TSC0029313
cccaccacactcc

SEQ ID NO: 117147 - DNA, 13 bp, Artificial Sequence
  Oligonucleotide for detection of SNP TSC0029313
ggagtggggtggg

SEQ ID NO: 117148 - DNA, 13 bp, Artificial Sequence
  Oligonucleotide for detection of SNP TSC0029313
cccaccccactcc

SEQ ID NO: 117149 - DNA, 13 bp, Artificial Sequence
  Oligonucleotide for detection of SNP TSC0029313
ggagcgtggtggg

SEQ ID NO: 117150 - DNA, 13 bp, Artificial Sequence
  Oligonucleotide for detection of SNP TSC0029313
cccaccacgctcc

SEQ ID NO: 117151 - DNA, 13 bp, Artificial Sequence
  Oligonucleotide for detection of SNP TSC0029313
ggagcggggtggg

SEQ ID NO: 117152 - DNA, 13 bp, Artificial Sequence
  Oligonucleotide for detection of SNP TSC0029313
cccaccccgctcc

SEQ ID NO: 117153 - DNA, 13 bp, Artificial Sequence
  Oligonucleotide for detection of SNP TSC0029313
ggagtgcggtggg

SEQ ID NO: 117154 - DNA, 13 bp, Artificial Sequence
  Oligonucleotide for detection of SNP TSC0029313
cccaccgcactcc

SEQ ID NO: 117155 - DNA, 13 bp, Artificial Sequence
  Oligonucleotide for detection of SNP TSC0029313
ggagcgcggtggg

SEQ ID NO: 117156 - DNA, 13 bp, Artificial Sequence
  Oligonucleotide for detection of SNP TSC0029313
cccaccgcgctcc

SEQ ID NO: 117157 - DNA, 13 bp, Artificial Sequence
  Oligonucleotide for detection of SNP TSC0029313
tttattttgttty

SEQ ID NO: 117158 - DNA, 13 bp, Artificial Sequence
  Oligonucleotide for detection of SNP TSC0029313
raaacaaaataaa

SEQ ID NO: 117159 - DNA, 13 bp, Artificial Sequence
  Oligonucleotide for detection of SNP TSC0029313
tttatcgtgttty

SEQ ID NO: 117160 - DNA, 13 bp, Artificial Sequence
  Oligonucleotide for detection of SNP TSC0029313
raaacacgataaa

SEQ ID NO: 117161 - DNA, 13 bp, Artificial Sequence
  Oligonucleotide for detection of SNP TSC0029313
tttatttcgttty

SEQ ID NO: 117162 - DNA, 13 bp, Artificial Sequence
  Oligonucleotide for detection of SNP TSC0029313
raaacgaaataaa

SEQ ID NO: 117163 - DNA, 13 bp, Artificial Sequence
  Oligonucleotide for detection of SNP TSC0029313
tttattgcgttty

SEQ ID NO: 117164 - DNA, 13 bp, Artificial Sequence
  Oligonucleotide for detection of SNP TSC0029313
raaacgcaataaa

SEQ ID NO: 117165 - DNA, 13 bp, Artificial Sequence
  Oligonucleotide for detection of SNP TSC0029313
tttatcgcgttty

SEQ ID NO: 117166 - DNA, 13 bp, Artificial Sequence
  Oligonucleotide for detection of SNP TSC0029313
raaacgcgataaa

SEQ ID NO: 117167 - DNA, 13 bp, Artificial Sequence
  Oligonucleotide for detection of SNP TSC0029315
taggtagataaaa

SEQ ID NO: 117168 - DNA, 13 bp, Artificial Sequence
  Oligonucleotide for detection of SNP TSC0029315
ttttatctaccta

SEQ ID NO: 117169 - DNA, 13 bp, Artificial Sequence
  Oligonucleotide for detection of SNP TSC0029315
taggtaaataaaa

SEQ ID NO: 117170 - DNA, 13 bp, Artificial Sequence
  Oligonucleotide for detection of SNP TSC0029315
ttttatttaccta

SEQ ID NO: 117171 - DNA, 13 bp, Artificial Sequence
  Oligonucleotide for detection of SNP TSC0029317
gaatttaaaaaaa

SEQ ID NO: 117172 - DNA, 13 bp, Artificial Sequence
  Oligonucleotide for detection of SNP TSC0029317
tttttttaaattc

SEQ ID NO: 117173 - DNA, 13 bp, Artificial Sequence
  Oligonucleotide for detection of SNP TSC0029317
gaattttaaaaaa

SEQ ID NO: 117174 - DNA, 13 bp, Artificial Sequence
  Oligonucleotide for detection of SNP TSC0029317
ttttttaaaattc

SEQ ID NO: 117175 - DNA, 13 bp, Artificial Sequence
  Oligonucleotide for detection of SNP TSC0029317
tttttttaaatty

SEQ ID NO: 117176 - DNA, 13 bp, Artificial Sequence
  Oligonucleotide for detection of SNP TSC0029317
raatttaaaaaaa

SEQ ID NO: 117177 - DNA, 13 bp, Artificial Sequence
  Oligonucleotide for detection of SNP TSC0029318
gagattatgttay

SEQ ID NO: 117178 - DNA, 13 bp, Artificial Sequence
  Oligonucleotide for detection of SNP TSC0029318
rtaacataatctc

SEQ ID NO: 117179 - DNA, 13 bp, Artificial Sequence
  Oligonucleotide for detection of SNP TSC0029318
gagattacgttay

SEQ ID NO: 117180 - DNA, 13 bp, Artificial Sequence
  Oligonucleotide for detection of SNP TSC0029318
rtaacgtaatctc

SEQ ID NO: 117181 - DNA, 13 bp, Artificial Sequence
  Oligonucleotide for detection of SNP TSC0029322
tatttgggagtta

SEQ ID NO: 117182 - DNA, 13 bp, Artificial Sequence
  Oligonucleotide for detection of SNP TSC0029322
taactcccaaata

SEQ ID NO: 117183 - DNA, 13 bp, Artificial Sequence
  Oligonucleotide for detection of SNP TSC0029322
tatttgtgagtta

SEQ ID NO: 117184 - DNA, 13 bp, Artificial Sequence
  Oligonucleotide for detection of SNP TSC0029322
taactcacaaata

SEQ ID NO: 117185 - DNA, 13 bp, Artificial Sequence
  Oligonucleotide for detection of SNP TSC0029322
tgatttttaagtg

SEQ ID NO: 117186 - DNA, 13 bp, Artificial Sequence
  Oligonucleotide for detection of SNP TSC0029322
cacttaaaaatca

SEQ ID NO: 117187 - DNA, 13 bp, Artificial Sequence
  Oligonucleotide for detection of SNP TSC0029322
tgatttataagtg

SEQ ID NO: 117188 - DNA, 13 bp, Artificial Sequence
  Oligonucleotide for detection of SNP TSC0029322
cacttataaatca

SEQ ID NO: 117189 - DNA, 13 bp, Artificial Sequence
  Oligonucleotide for detection of SNP TSC0029325
ttataaagttatt

SEQ ID NO: 117190 - DNA, 13 bp, Artificial Sequence
  Oligonucleotide for detection of SNP TSC0029325
aataactttataa

SEQ ID NO: 117191 - DNA, 13 bp, Artificial Sequence
  Oligonucleotide for detection of SNP TSC0029325
ttataaggttatt

SEQ ID NO: 117192 - DNA, 13 bp, Artificial Sequence
  Oligonucleotide for detection of SNP TSC0029325
aataaccttataa

SEQ ID NO: 117193 - DNA, 13 bp, Artificial Sequence
  Oligonucleotide for detection of SNP TSC0029326
aaaatttgaaagt

SEQ ID NO: 117194 - DNA, 13 bp, Artificial Sequence
  Oligonucleotide for detection of SNP TSC0029326
actttcaaatttt

SEQ ID NO: 117195 - DNA, 13 bp, Artificial Sequence
  Oligonucleotide for detection of SNP TSC0029326
aaaattcgaaagt

SEQ ID NO: 117196 - DNA, 13 bp, Artificial Sequence
  Oligonucleotide for detection of SNP TSC0029326
actttcgaatttt

SEQ ID NO: 117197 - DNA, 13 bp, Artificial Sequence
  Oligonucleotide for detection of SNP TSC0029326
attttcgaatttt

SEQ ID NO: 117198 - DNA, 13 bp, Artificial Sequence
  Oligonucleotide for detection of SNP TSC0029326
aaaattcgaaaat

SEQ ID NO: 117199 - DNA, 13 bp, Artificial Sequence
  Oligonucleotide for detection of SNP TSC0029327
tattagggttatg

SEQ ID NO: 117200 - DNA, 13 bp, Artificial Sequence
  Oligonucleotide for detection of SNP TSC0029327
cataaccctaata

SEQ ID NO: 117201 - DNA, 13 bp, Artificial Sequence
  Oligonucleotide for detection of SNP TSC0029327
tattagagttatg

SEQ ID NO: 117202 - DNA, 13 bp, Artificial Sequence
  Oligonucleotide for detection of SNP TSC0029327
cataactctaata

SEQ ID NO: 117203 - DNA, 13 bp, Artificial Sequence
  Oligonucleotide for detection of SNP TSC0029329
gaatgtatgtgtg

SEQ ID NO: 117204 - DNA, 13 bp, Artificial Sequence
  Oligonucleotide for detection of SNP TSC0029329
cacacatacattc

SEQ ID NO: 117205 - DNA, 13 bp, Artificial Sequence
  Oligonucleotide for detection of SNP TSC0029329
gaatgtgtgtgtg

SEQ ID NO: 117206 - DNA, 13 bp, Artificial Sequence
  Oligonucleotide for detection of SNP TSC0029329
cacacacacattc

SEQ ID NO: 117207 - DNA, 13 bp, Artificial Sequence
  Oligonucleotide for detection of SNP TSC0029329
gaacgtatgtgtg

SEQ ID NO: 117208 - DNA, 13 bp, Artificial Sequence
  Oligonucleotide for detection of SNP TSC0029329
cacacatacgttc

SEQ ID NO: 117209 - DNA, 13 bp, Artificial Sequence
  Oligonucleotide for detection of SNP TSC0029329
gaacgtgtgtgtg

SEQ ID NO: 117210 - DNA, 13 bp, Artificial Sequence
  Oligonucleotide for detection of SNP TSC0029329
cacacacacgttc

SEQ ID NO: 117211 - DNA, 13 bp, Artificial Sequence
  Oligonucleotide for detection of SNP TSC0029329
gaatgcgtgtgtg

SEQ ID NO: 117212 - DNA, 13 bp, Artificial Sequence
  Oligonucleotide for detection of SNP TSC0029329
cacacacgcattc

SEQ ID NO: 117213 - DNA, 13 bp, Artificial Sequence
  Oligonucleotide for detection of SNP TSC0029329
gaacgcgtgtgtg

SEQ ID NO: 117214 - DNA, 13 bp, Artificial Sequence
  Oligonucleotide for detection of SNP TSC0029329
cacacacgcgttc

SEQ ID NO: 117215 - DNA, 13 bp, Artificial Sequence
  Oligonucleotide for detection of SNP TSC0029329
tatatatgtgtty

SEQ ID NO: 117216 - DNA, 13 bp, Artificial Sequence
  Oligonucleotide for detection of SNP TSC0029329
raacacatatata

SEQ ID NO: 117217 - DNA, 13 bp, Artificial Sequence
  Oligonucleotide for detection of SNP TSC0029329
tatatatgcgtty

SEQ ID NO: 117218 - DNA, 13 bp, Artificial Sequence
  Oligonucleotide for detection of SNP TSC0029329
raacgcatatata

SEQ ID NO: 117219 - DNA, 13 bp, Artificial Sequence
  Oligonucleotide for detection of SNP TSC0029329
tatatacgtgtty

SEQ ID NO: 117220 - DNA, 13 bp, Artificial Sequence
  Oligonucleotide for detection of SNP TSC0029329
raacacgtatata

SEQ ID NO: 117221 - DNA, 13 bp, Artificial Sequence
  Oligonucleotide for detection of SNP TSC0029329
tatatacgcgtty

SEQ ID NO: 117222 - DNA, 13 bp, Artificial Sequence
  Oligonucleotide for detection of SNP TSC0029329
raacgcgtatata

SEQ ID NO: 117223 - DNA, 13 bp, Artificial Sequence
  Oligonucleotide for detection of SNP TSC0029333
atttagtgagttg

SEQ ID NO: 117224 - DNA, 13 bp, Artificial Sequence
  Oligonucleotide for detection of SNP TSC0029333
caactcactaaat

SEQ ID NO: 117225 - DNA, 13 bp, Artificial Sequence
  Oligonucleotide for detection of SNP TSC0029333
atttagcgagttg

SEQ ID NO: 117226 - DNA, 13 bp, Artificial Sequence
  Oligonucleotide for detection of SNP TSC0029333
caactcgctaaat

SEQ ID NO: 117227 - DNA, 13 bp, Artificial Sequence
  Oligonucleotide for detection of SNP TSC0029333
tagtttgttggat

SEQ ID NO: 117228 - DNA, 13 bp, Artificial Sequence
  Oligonucleotide for detection of SNP TSC0029333
atccaacaaacta

SEQ ID NO: 117229 - DNA, 13 bp, Artificial Sequence
  Oligonucleotide for detection of SNP TSC0029333
tagtttattggat

SEQ ID NO: 117230 - DNA, 13 bp, Artificial Sequence
  Oligonucleotide for detection of SNP TSC0029333
atccaataaacta

SEQ ID NO: 117231 - DNA, 13 bp, Artificial Sequence
  Oligonucleotide for detection of SNP TSC0029333
tagttcgttggat

SEQ ID NO: 117232 - DNA, 13 bp, Artificial Sequence
  Oligonucleotide for detection of SNP TSC0029333
atccaacgaacta

SEQ ID NO: 117233 - DNA, 13 bp, Artificial Sequence
  Oligonucleotide for detection of SNP TSC0029334
ggtgatattattg

SEQ ID NO: 117234 - DNA, 13 bp, Artificial Sequence
  Oligonucleotide for detection of SNP TSC0029334
caataatatcacc

SEQ ID NO: 117235 - DNA, 13 bp, Artificial Sequence
  Oligonucleotide for detection of SNP TSC0029334
ggtgatgttattg

SEQ ID NO: 117236 - DNA, 13 bp, Artificial Sequence
  Oligonucleotide for detection of SNP TSC0029334
caataacatcacc

SEQ ID NO: 117237 - DNA, 13 bp, Artificial Sequence
  Oligonucleotide for detection of SNP TSC0029334
ggtgatattatcg

SEQ ID NO: 117238 - DNA, 13 bp, Artificial Sequence
  Oligonucleotide for detection of SNP TSC0029334
cgataatatcacc

SEQ ID NO: 117239 - DNA, 13 bp, Artificial Sequence
  Oligonucleotide for detection of SNP TSC0029334
ggtgacgttattg

SEQ ID NO: 117240 - DNA, 13 bp, Artificial Sequence
  Oligonucleotide for detection of SNP TSC0029334
caataacgtcacc

SEQ ID NO: 117241 - DNA, 13 bp, Artificial Sequence
  Oligonucleotide for detection of SNP TSC0029334
ggtgatgttatcg

SEQ ID NO: 117242 - DNA, 13 bp, Artificial Sequence
  Oligonucleotide for detection of SNP TSC0029334
cgataacatcacc

SEQ ID NO: 117243 - DNA, 13 bp, Artificial Sequence
  Oligonucleotide for detection of SNP TSC0029334
ggtgacgttatcg

SEQ ID NO: 117244 - DNA, 13 bp, Artificial Sequence
  Oligonucleotide for detection of SNP TSC0029334
cgataacgtcacc

SEQ ID NO: 117245 - DNA, 13 bp, Artificial Sequence
  Oligonucleotide for detection of SNP TSC0029334
tggtggtgttaty

SEQ ID NO: 117246 - DNA, 13 bp, Artificial Sequence
  Oligonucleotide for detection of SNP TSC0029334
rataacaccacca

SEQ ID NO: 117247 - DNA, 13 bp, Artificial Sequence
  Oligonucleotide for detection of SNP TSC0029334
cggtggtgttaty

SEQ ID NO: 117248 - DNA, 13 bp, Artificial Sequence
  Oligonucleotide for detection of SNP TSC0029334
rataacaccaccg

SEQ ID NO: 117249 - DNA, 13 bp, Artificial Sequence
  Oligonucleotide for detection of SNP TSC0029334
tggtggcgttaty

SEQ ID NO: 117250 - DNA, 13 bp, Artificial Sequence
  Oligonucleotide for detection of SNP TSC0029334
rataacgccacca

SEQ ID NO: 117251 - DNA, 13 bp, Artificial Sequence
  Oligonucleotide for detection of SNP TSC0029334
cggtggcgttaty

SEQ ID NO: 117252 - DNA, 13 bp, Artificial Sequence
  Oligonucleotide for detection of SNP TSC0029334
rataacgccaccg

SEQ ID NO: 117253 - DNA, 13 bp, Artificial Sequence
  Oligonucleotide for detection of SNP TSC0029335
attgttgtaatta

SEQ ID NO: 117254 - DNA, 13 bp, Artificial Sequence
  Oligonucleotide for detection of SNP TSC0029335
taattacaacaat

SEQ ID NO: 117255 - DNA, 13 bp, Artificial Sequence
  Oligonucleotide for detection of SNP TSC0029335
attgttataatta

SEQ ID NO: 117256 - DNA, 13 bp, Artificial Sequence
  Oligonucleotide for detection of SNP TSC0029335
taattataacaat

SEQ ID NO: 117257 - DNA, 13 bp, Artificial Sequence
  Oligonucleotide for detection of SNP TSC0029337
ttgtttagggata

SEQ ID NO: 117258 - DNA, 13 bp, Artificial Sequence
  Oligonucleotide for detection of SNP TSC0029337
tatccctaaacaa

SEQ ID NO: 117259 - DNA, 13 bp, Artificial Sequence
  Oligonucleotide for detection of SNP TSC0029337
ttgtttggggata

SEQ ID NO: 117260 - DNA, 13 bp, Artificial Sequence
  Oligonucleotide for detection of SNP TSC0029337
tatccccaaacaa

SEQ ID NO: 117261 - DNA, 13 bp, Artificial Sequence
  Oligonucleotide for detection of SNP TSC0029337
ttgttcggggata

SEQ ID NO: 117262 - DNA, 13 bp, Artificial Sequence
  Oligonucleotide for detection of SNP TSC0029337
tatccccgaacaa

SEQ ID NO: 117263 - DNA, 13 bp, Artificial Sequence
  Oligonucleotide for detection of SNP TSC0029337
tgtttttgggtaa

SEQ ID NO: 117264 - DNA, 13 bp, Artificial Sequence
  Oligonucleotide for detection of SNP TSC0029337
ttacccaaaaaca

SEQ ID NO: 117265 - DNA, 13 bp, Artificial Sequence
  Oligonucleotide for detection of SNP TSC0029337
tgttttcgggtaa

SEQ ID NO: 117266 - DNA, 13 bp, Artificial Sequence
  Oligonucleotide for detection of SNP TSC0029337
ttacccgaaaaca

SEQ ID NO: 117267 - DNA, 13 bp, Artificial Sequence
  Oligonucleotide for detection of SNP TSC0029341
tttaataaaaatg

SEQ ID NO: 117268 - DNA, 13 bp, Artificial Sequence
  Oligonucleotide for detection of SNP TSC0029341
catttttattaaa

SEQ ID NO: 117269 - DNA, 13 bp, Artificial Sequence
  Oligonucleotide for detection of SNP TSC0029341
tttaatgaaaatg

SEQ ID NO: 117270 - DNA, 13 bp, Artificial Sequence
  Oligonucleotide for detection of SNP TSC0029341
cattttcattaaa

SEQ ID NO: 117271 - DNA, 13 bp, Artificial Sequence
  Oligonucleotide for detection of SNP TSC0029341
tttaacgaaaatg

SEQ ID NO: 117272 - DNA, 13 bp, Artificial Sequence
  Oligonucleotide for detection of SNP TSC0029341
cattttcgttaaa

SEQ ID NO: 117273 - DNA, 13 bp, Artificial Sequence
  Oligonucleotide for detection of SNP TSC0029341
tatttttgttgaa

SEQ ID NO: 117274 - DNA, 13 bp, Artificial Sequence
  Oligonucleotide for detection of SNP TSC0029341
ttcaacaaaaata

SEQ ID NO: 117275 - DNA, 13 bp, Artificial Sequence
  Oligonucleotide for detection of SNP TSC0029341
tattttcgttgaa

SEQ ID NO: 117276 - DNA, 13 bp, Artificial Sequence
  Oligonucleotide for detection of SNP TSC0029341
ttcaacgaaaata

SEQ ID NO: 117277 - DNA, 13 bp, Artificial Sequence
  Oligonucleotide for detection of SNP TSC0029343
aggagtgtattty

SEQ ID NO: 117278 - DNA, 13 bp, Artificial Sequence
  Oligonucleotide for detection of SNP TSC0029343
raaatacactcct

SEQ ID NO: 117279 - DNA, 13 bp, Artificial Sequence
  Oligonucleotide for detection of SNP TSC0029343
aggagtatattty

SEQ ID NO: 117280 - DNA, 13 bp, Artificial Sequence
  Oligonucleotide for detection of SNP TSC0029343
raaatatactcct

SEQ ID NO: 117281 - DNA, 13 bp, Artificial Sequence
  Oligonucleotide for detection of SNP TSC0029344
attaaaggttttg

SEQ ID NO: 117282 - DNA, 13 bp, Artificial Sequence
  Oligonucleotide for detection of SNP TSC0029344
caaaacctttaat

SEQ ID NO: 117283 - DNA, 13 bp, Artificial Sequence
  Oligonucleotide for detection of SNP TSC0029344
attaaaagttttg

SEQ ID NO: 117284 - DNA, 13 bp, Artificial Sequence
  Oligonucleotide for detection of SNP TSC0029344
caaaacttttaat

SEQ ID NO: 117285 - DNA, 13 bp, Artificial Sequence
  Oligonucleotide for detection of SNP TSC0029345
gaagttatagttg

SEQ ID NO: 117286 - DNA, 13 bp, Artificial Sequence
  Oligonucleotide for detection of SNP TSC0029345
caactataacttc

SEQ ID NO: 117287 - DNA, 13 bp, Artificial Sequence
  Oligonucleotide for detection of SNP TSC0029345
gaagttgtagttg

SEQ ID NO: 117288 - DNA, 13 bp, Artificial Sequence
  Oligonucleotide for detection of SNP TSC0029345
caactacaacttc

SEQ ID NO: 117289 - DNA, 13 bp, Artificial Sequence
  Oligonucleotide for detection of SNP TSC0029345
gaagtcgtagttg

SEQ ID NO: 117290 - DNA, 13 bp, Artificial Sequence
  Oligonucleotide for detection of SNP TSC0029345
caactacgacttc

SEQ ID NO: 117291 - DNA, 13 bp, Artificial Sequence
  Oligonucleotide for detection of SNP TSC0029345
taattatgattty

SEQ ID NO: 117292 - DNA, 13 bp, Artificial Sequence
  Oligonucleotide for detection of SNP TSC0029345
raaatcataatta

SEQ ID NO: 117293 - DNA, 13 bp, Artificial Sequence
  Oligonucleotide for detection of SNP TSC0029345
taattacgattty

SEQ ID NO: 117294 - DNA, 13 bp, Artificial Sequence
  Oligonucleotide for detection of SNP TSC0029345
raaatcgtaatta

SEQ ID NO: 117295 - DNA, 13 bp, Artificial Sequence
  Oligonucleotide for detection of SNP TSC0029347
tgtttttattgtg

SEQ ID NO: 117296 - DNA, 13 bp, Artificial Sequence
  Oligonucleotide for detection of SNP TSC0029347
cacaataaaaaca

SEQ ID NO: 117297 - DNA, 13 bp, Artificial Sequence
  Oligonucleotide for detection of SNP TSC0029347
tgttttgattgtg

SEQ ID NO: 117298 - DNA, 13 bp, Artificial Sequence
  Oligonucleotide for detection of SNP TSC0029347
cacaatcaaaaca

SEQ ID NO: 117299 - DNA, 13 bp, Artificial Sequence
  Oligonucleotide for detection of SNP TSC0029347
tgtttttatcgtg

SEQ ID NO: 117300 - DNA, 13 bp, Artificial Sequence
  Oligonucleotide for detection of SNP TSC0029347
cacgataaaaaca

SEQ ID NO: 117301 - DNA, 13 bp, Artificial Sequence
  Oligonucleotide for detection of SNP TSC0029347
tgtttcgattgtg

SEQ ID NO: 117302 - DNA, 13 bp, Artificial Sequence
  Oligonucleotide for detection of SNP TSC0029347
cacaatcgaaaca

SEQ ID NO: 117303 - DNA, 13 bp, Artificial Sequence
  Oligonucleotide for detection of SNP TSC0029347
tgttttgatcgtg

SEQ ID NO: 117304 - DNA, 13 bp, Artificial Sequence
  Oligonucleotide for detection of SNP TSC0029347
cacgatcaaaaca

SEQ ID NO: 117305 - DNA, 13 bp, Artificial Sequence
  Oligonucleotide for detection of SNP TSC0029347
tgtttcgatcgtg

SEQ ID NO: 117306 - DNA, 13 bp, Artificial Sequence
  Oligonucleotide for detection of SNP TSC0029347
cacgatcgaaaca

SEQ ID NO: 117307 - DNA, 13 bp, Artificial Sequence
  Oligonucleotide for detection of SNP TSC0029347
tatggtgggggta

SEQ ID NO: 117308 - DNA, 13 bp, Artificial Sequence
  Oligonucleotide for detection of SNP TSC0029347
tacccccaccata

SEQ ID NO: 117309 - DNA, 13 bp, Artificial Sequence
  Oligonucleotide for detection of SNP TSC0029347
tatggttggggta

SEQ ID NO: 117310 - DNA, 13 bp, Artificial Sequence
  Oligonucleotide for detection of SNP TSC0029347
taccccaaccata

SEQ ID NO: 117311 - DNA, 13 bp, Artificial Sequence
  Oligonucleotide for detection of SNP TSC0029347
tacggtgggggta

SEQ ID NO: 117312 - DNA, 13 bp, Artificial Sequence
  Oligonucleotide for detection of SNP TSC0029347
tacccccaccgta

SEQ ID NO: 117313 - DNA, 13 bp, Artificial Sequence
  Oligonucleotide for detection of SNP TSC0029347
tacggttggggta

SEQ ID NO: 117314 - DNA, 13 bp, Artificial Sequence
  Oligonucleotide for detection of SNP TSC0029347
taccccaaccgta

SEQ ID NO: 117315 - DNA, 13 bp, Artificial Sequence
  Oligonucleotide for detection of SNP TSC0029347
tatggtcggggta

SEQ ID NO: 117316 - DNA, 13 bp, Artificial Sequence
  Oligonucleotide for detection of SNP TSC0029347
taccccgaccata

SEQ ID NO: 117317 - DNA, 13 bp, Artificial Sequence
  Oligonucleotide for detection of SNP TSC0029347
tacggtcggggta

SEQ ID NO: 117318 - DNA, 13 bp, Artificial Sequence
  Oligonucleotide for detection of SNP TSC0029347
taccccgaccgta

SEQ ID NO: 117319 - DNA, 13 bp, Artificial Sequence
  Oligonucleotide for detection of SNP TSC0029349
atttttggtagag

SEQ ID NO: 117320 - DNA, 13 bp, Artificial Sequence
  Oligonucleotide for detection of SNP TSC0029349
ctctaccaaaaat

SEQ ID NO: 117321 - DNA, 13 bp, Artificial Sequence
  Oligonucleotide for detection of SNP TSC0029349
ttttataaaaaat

SEQ ID NO: 117322 - DNA, 13 bp, Artificial Sequence
  Oligonucleotide for detection of SNP TSC0029349
attttttataaaa

SEQ ID NO: 117323 - DNA, 13 bp, Artificial Sequence
  Oligonucleotide for detection of SNP TSC0029350
taagtgaatttty

SEQ ID NO: 117324 - DNA, 13 bp, Artificial Sequence
  Oligonucleotide for detection of SNP TSC0029350
raaaattcactta

SEQ ID NO: 117325 - DNA, 13 bp, Artificial Sequence
  Oligonucleotide for detection of SNP TSC0029350
taagtggatttty

SEQ ID NO: 117326 - DNA, 13 bp, Artificial Sequence
  Oligonucleotide for detection of SNP TSC0029350
raaaatccactta

SEQ ID NO: 117327 - DNA, 13 bp, Artificial Sequence
  Oligonucleotide for detection of SNP TSC0029350
taagcgaatttty

SEQ ID NO: 117328 - DNA, 13 bp, Artificial Sequence
  Oligonucleotide for detection of SNP TSC0029350
raaaattcgctta

SEQ ID NO: 117329 - DNA, 13 bp, Artificial Sequence
  Oligonucleotide for detection of SNP TSC0029350
taagcggatttty

SEQ ID NO: 117330 - DNA, 13 bp, Artificial Sequence
  Oligonucleotide for detection of SNP TSC0029350
raaaatccgctta

SEQ ID NO: 117331 - DNA, 13 bp, Artificial Sequence
  Oligonucleotide for detection of SNP TSC0029351
gtagggtgatttg

SEQ ID NO: 117332 - DNA, 13 bp, Artificial Sequence
  Oligonucleotide for detection of SNP TSC0029351
caaatcaccctac

SEQ ID NO: 117333 - DNA, 13 bp, Artificial Sequence
  Oligonucleotide for detection of SNP TSC0029351
gtagggcgatttg

SEQ ID NO: 117334 - DNA, 13 bp, Artificial Sequence
  Oligonucleotide for detection of SNP TSC0029351
caaatcgccctac

SEQ ID NO: 117335 - DNA, 13 bp, Artificial Sequence
  Oligonucleotide for detection of SNP TSC0029351
taaattgttttgy

SEQ ID NO: 117336 - DNA, 13 bp, Artificial Sequence
  Oligonucleotide for detection of SNP TSC0029351
rcaaaacaattta

SEQ ID NO: 117337 - DNA, 13 bp, Artificial Sequence
  Oligonucleotide for detection of SNP TSC0029351
taaattattttgy

SEQ ID NO: 117338 - DNA, 13 bp, Artificial Sequence
  Oligonucleotide for detection of SNP TSC0029351
rcaaaataattta

SEQ ID NO: 117339 - DNA, 13 bp, Artificial Sequence
  Oligonucleotide for detection of SNP TSC0029351
taaatcgttttgy

SEQ ID NO: 117340 - DNA, 13 bp, Artificial Sequence
  Oligonucleotide for detection of SNP TSC0029351
rcaaaacgattta

SEQ ID NO: 117341 - DNA, 13 bp, Artificial Sequence
  Oligonucleotide for detection of SNP TSC0029352
aaggatgggaaat

SEQ ID NO: 117342 - DNA, 13 bp, Artificial Sequence
  Oligonucleotide for detection of SNP TSC0029352
atttcccatcctt

SEQ ID NO: 117343 - DNA, 13 bp, Artificial Sequence
  Oligonucleotide for detection of SNP TSC0029352
aaggataggaaat

SEQ ID NO: 117344 - DNA, 13 bp, Artificial Sequence
  Oligonucleotide for detection of SNP TSC0029352
atttcctatcctt

SEQ ID NO: 117345 - DNA, 13 bp, Artificial Sequence
  Oligonucleotide for detection of SNP TSC0029352
aaggacgggaaat

SEQ ID NO: 117346 - DNA, 13 bp, Artificial Sequence
  Oligonucleotide for detection of SNP TSC0029352
atttcccgtcctt

SEQ ID NO: 117347 - DNA, 13 bp, Artificial Sequence
  Oligonucleotide for detection of SNP TSC0029353
atgtgtgtttgta

SEQ ID NO: 117348 - DNA, 13 bp, Artificial Sequence
  Oligonucleotide for detection of SNP TSC0029353
tacaaacacacat

SEQ ID NO: 117349 - DNA, 13 bp, Artificial Sequence
  Oligonucleotide for detection of SNP TSC0029353
atgtgtatttgta

SEQ ID NO: 117350 - DNA, 13 bp, Artificial Sequence
  Oligonucleotide for detection of SNP TSC0029353
tacaaatacacat

SEQ ID NO: 117351 - DNA, 13 bp, Artificial Sequence
  Oligonucleotide for detection of SNP TSC0029354
ttagttatataat

SEQ ID NO: 117352 - DNA, 13 bp, Artificial Sequence
  Oligonucleotide for detection of SNP TSC0029354
attatataactaa

SEQ ID NO: 117353 - DNA, 13 bp, Artificial Sequence
  Oligonucleotide for detection of SNP TSC0029354
ttagttgtataat

SEQ ID NO: 117354 - DNA, 13 bp, Artificial Sequence
  Oligonucleotide for detection of SNP TSC0029354
attatacaactaa

SEQ ID NO: 117355 - DNA, 13 bp, Artificial Sequence
  Oligonucleotide for detection of SNP TSC0029354
ttagtcgtataat

SEQ ID NO: 117356 - DNA, 13 bp, Artificial Sequence
  Oligonucleotide for detection of SNP TSC0029354
attatacgactaa

SEQ ID NO: 117357 - DNA, 13 bp, Artificial Sequence
  Oligonucleotide for detection of SNP TSC0029354
attatatgattag

SEQ ID NO: 117358 - DNA, 13 bp, Artificial Sequence
  Oligonucleotide for detection of SNP TSC0029354
ctaatcatataat

SEQ ID NO: 117359 - DNA, 13 bp, Artificial Sequence
  Oligonucleotide for detection of SNP TSC0029354
attatacgattag

SEQ ID NO: 117360 - DNA, 13 bp, Artificial Sequence
  Oligonucleotide for detection of SNP TSC0029354
ctaatcgtataat

SEQ ID NO: 117361 - DNA, 13 bp, Artificial Sequence
  Oligonucleotide for detection of SNP TSC0029357
tttagagttttgt

SEQ ID NO: 117362 - DNA, 13 bp, Artificial Sequence
  Oligonucleotide for detection of SNP TSC0029357
acaaaactctaaa

SEQ ID NO: 117363 - DNA, 13 bp, Artificial Sequence
  Oligonucleotide for detection of SNP TSC0029357
tttagaattttgt

SEQ ID NO: 117364 - DNA, 13 bp, Artificial Sequence
  Oligonucleotide for detection of SNP TSC0029357
acaaaattctaaa

SEQ ID NO: 117365 - DNA, 13 bp, Artificial Sequence
  Oligonucleotide for detection of SNP TSC0029358
atagttataggaa

SEQ ID NO: 117366 - DNA, 13 bp, Artificial Sequence
  Oligonucleotide for detection of SNP TSC0029358
ttcctataactat

SEQ ID NO: 117367 - DNA, 13 bp, Artificial Sequence
  Oligonucleotide for detection of SNP TSC0029358
atagttgtaggaa

SEQ ID NO: 117368 - DNA, 13 bp, Artificial Sequence
  Oligonucleotide for detection of SNP TSC0029358
ttcctacaactat

SEQ ID NO: 117369 - DNA, 13 bp, Artificial Sequence
  Oligonucleotide for detection of SNP TSC0029358
atagtcgtaggaa

SEQ ID NO: 117370 - DNA, 13 bp, Artificial Sequence
  Oligonucleotide for detection of SNP TSC0029358
ttcctacgactat

SEQ ID NO: 117371 - DNA, 13 bp, Artificial Sequence
  Oligonucleotide for detection of SNP TSC0029358
tttttgtgattgt

SEQ ID NO: 117372 - DNA, 13 bp, Artificial Sequence
  Oligonucleotide for detection of SNP TSC0029358
acaatcacaaaaa

SEQ ID NO: 117373 - DNA, 13 bp, Artificial Sequence
  Oligonucleotide for detection of SNP TSC0029358
tttttgcgattgt

SEQ ID NO: 117374 - DNA, 13 bp, Artificial Sequence
  Oligonucleotide for detection of SNP TSC0029358
acaatcgcaaaaa

SEQ ID NO: 117375 - DNA, 13 bp, Artificial Sequence
  Oligonucleotide for detection of SNP TSC0029359
atataggtttgtg

SEQ ID NO: 117376 - DNA, 13 bp, Artificial Sequence
  Oligonucleotide for detection of SNP TSC0029359
cacaaacctatat

SEQ ID NO: 117377 - DNA, 13 bp, Artificial Sequence
  Oligonucleotide for detection of SNP TSC0029359
atatagatttgtg

SEQ ID NO: 117378 - DNA, 13 bp, Artificial Sequence
  Oligonucleotide for detection of SNP TSC0029359
cacaaatctatat

SEQ ID NO: 117379 - DNA, 13 bp, Artificial Sequence
  Oligonucleotide for detection of SNP TSC0029360
tgtttgataaaay

SEQ ID NO: 117380 - DNA, 13 bp, Artificial Sequence
  Oligonucleotide for detection of SNP TSC0029360
rttttatcaaaca

SEQ ID NO: 117381 - DNA, 13 bp, Artificial Sequence
  Oligonucleotide for detection of SNP TSC0029360
tgtttggtaaaay

SEQ ID NO: 117382 - DNA, 13 bp, Artificial Sequence
  Oligonucleotide for detection of SNP TSC0029360
rttttaccaaaca

SEQ ID NO: 117383 - DNA, 13 bp, Artificial Sequence
  Oligonucleotide for detection of SNP TSC0029362
gtttaggggaagy

SEQ ID NO: 117384 - DNA, 13 bp, Artificial Sequence
  Oligonucleotide for detection of SNP TSC0029362
rcttcccctaaac

SEQ ID NO: 117385 - DNA, 13 bp, Artificial Sequence
  Oligonucleotide for detection of SNP TSC0029362
gtttagaggaagy

SEQ ID NO: 117386 - DNA, 13 bp, Artificial Sequence
  Oligonucleotide for detection of SNP TSC0029362
rcttcctctaaac

SEQ ID NO: 117387 - DNA, 13 bp, Artificial Sequence
  Oligonucleotide for detection of SNP TSC0029363
gtgtatagtggty

SEQ ID NO: 117388 - DNA, 13 bp, Artificial Sequence
  Oligonucleotide for detection of SNP TSC0029363
raccactatacac

SEQ ID NO: 117389 - DNA, 13 bp, Artificial Sequence
  Oligonucleotide for detection of SNP TSC0029363
gtgtatggtggty

SEQ ID NO: 117390 - DNA, 13 bp, Artificial Sequence
  Oligonucleotide for detection of SNP TSC0029363
raccaccatacac

SEQ ID NO: 117391 - DNA, 13 bp, Artificial Sequence
  Oligonucleotide for detection of SNP TSC0029363
gtgtacggtggty

SEQ ID NO: 117392 - DNA, 13 bp, Artificial Sequence
  Oligonucleotide for detection of SNP TSC0029363
raccaccgtacac

SEQ ID NO: 117393 - DNA, 13 bp, Artificial Sequence
  Oligonucleotide for detection of SNP TSC0029363
ggttattgtgtay

SEQ ID NO: 117394 - DNA, 13 bp, Artificial Sequence
  Oligonucleotide for detection of SNP TSC0029363
rtacacaataacc

SEQ ID NO: 117395 - DNA, 13 bp, Artificial Sequence
  Oligonucleotide for detection of SNP TSC0029363
ggttatcgtgtay

SEQ ID NO: 117396 - DNA, 13 bp, Artificial Sequence
  Oligonucleotide for detection of SNP TSC0029363
rtacacgataacc

SEQ ID NO: 117397 - DNA, 13 bp, Artificial Sequence
  Oligonucleotide for detection of SNP TSC0029366
ttttttatgaaay

SEQ ID NO: 117398 - DNA, 13 bp, Artificial Sequence
  Oligonucleotide for detection of SNP TSC0029366
rtttcataaaaaa

SEQ ID NO: 117399 - DNA, 13 bp, Artificial Sequence
  Oligonucleotide for detection of SNP TSC0029366
ttttttgtgaaay

SEQ ID NO: 117400 - DNA, 13 bp, Artificial Sequence
  Oligonucleotide for detection of SNP TSC0029366
rtttcacaaaaaa

SEQ ID NO: 117401 - DNA, 13 bp, Artificial Sequence
  Oligonucleotide for detection of SNP TSC0029367
aatttgaaaaaaa

SEQ ID NO: 117402 - DNA, 13 bp, Artificial Sequence
  Oligonucleotide for detection of SNP TSC0029367
tttttttcaaatt

SEQ ID NO: 117403 - DNA, 13 bp, Artificial Sequence
  Oligonucleotide for detection of SNP TSC0029367
aatttgtaaaaaa

SEQ ID NO: 117404 - DNA, 13 bp, Artificial Sequence
  Oligonucleotide for detection of SNP TSC0029367
ttttttacaaatt

SEQ ID NO: 117405 - DNA, 13 bp, Artificial Sequence
  Oligonucleotide for detection of SNP TSC0029367
ttttttttaaatt

SEQ ID NO: 117406 - DNA, 13 bp, Artificial Sequence
  Oligonucleotide for detection of SNP TSC0029367
aatttaaaaaaaa

SEQ ID NO: 117407 - DNA, 13 bp, Artificial Sequence
  Oligonucleotide for detection of SNP TSC0029368
aagtagggaaaaa

SEQ ID NO: 117408 - DNA, 13 bp, Artificial Sequence
  Oligonucleotide for detection of SNP TSC0029368
tttttccctactt

SEQ ID NO: 117409 - DNA, 13 bp, Artificial Sequence
  Oligonucleotide for detection of SNP TSC0029368
aagtagagaaaaa

SEQ ID NO: 117410 - DNA, 13 bp, Artificial Sequence
  Oligonucleotide for detection of SNP TSC0029368
tttttctctactt

SEQ ID NO: 117411 - DNA, 13 bp, Artificial Sequence
  Oligonucleotide for detection of SNP TSC0029372
gtttttaggatat

SEQ ID NO: 117412 - DNA, 13 bp, Artificial Sequence
  Oligonucleotide for detection of SNP TSC0029372
atatcctaaaaac

SEQ ID NO: 117413 - DNA, 13 bp, Artificial Sequence
  Oligonucleotide for detection of SNP TSC0029372
gtttttgggatat

SEQ ID NO: 117414 - DNA, 13 bp, Artificial Sequence
  Oligonucleotide for detection of SNP TSC0029372
atatcccaaaaac

SEQ ID NO: 117415 - DNA, 13 bp, Artificial Sequence
  Oligonucleotide for detection of SNP TSC0029372
gttttcgggatat

SEQ ID NO: 117416 - DNA, 13 bp, Artificial Sequence
  Oligonucleotide for detection of SNP TSC0029372
atatcccgaaaac

SEQ ID NO: 117417 - DNA, 13 bp, Artificial Sequence
  Oligonucleotide for detection of SNP TSC0029372
atattttgaaggy

SEQ ID NO: 117418 - DNA, 13 bp, Artificial Sequence
  Oligonucleotide for detection of SNP TSC0029372
rccttcaaaatat

SEQ ID NO: 117419 - DNA, 13 bp, Artificial Sequence
  Oligonucleotide for detection of SNP TSC0029372
atatttcgaaggy

SEQ ID NO: 117420 - DNA, 13 bp, Artificial Sequence
  Oligonucleotide for detection of SNP TSC0029372
rccttcgaaatat

SEQ ID NO: 117421 - DNA, 13 bp, Artificial Sequence
  Oligonucleotide for detection of SNP TSC0029373
aatattgtatttg

SEQ ID NO: 117422 - DNA, 13 bp, Artificial Sequence
  Oligonucleotide for detection of SNP TSC0029373
caaatacaatatt

SEQ ID NO: 117423 - DNA, 13 bp, Artificial Sequence
  Oligonucleotide for detection of SNP TSC0029373
aatattatatttg

SEQ ID NO: 117424 - DNA, 13 bp, Artificial Sequence
  Oligonucleotide for detection of SNP TSC0029373
caaatataatatt

SEQ ID NO: 117425 - DNA, 13 bp, Artificial Sequence
  Oligonucleotide for detection of SNP TSC0029374
gggagggagttta

SEQ ID NO: 117426 - DNA, 13 bp, Artificial Sequence
  Oligonucleotide for detection of SNP TSC0029374
taaactccctccc

SEQ ID NO: 117427 - DNA, 13 bp, Artificial Sequence
  Oligonucleotide for detection of SNP TSC0029374
gggaggaagttta

SEQ ID NO: 117428 - DNA, 13 bp, Artificial Sequence
  Oligonucleotide for detection of SNP TSC0029374
taaacttcctccc

SEQ ID NO: 117429 - DNA, 13 bp, Artificial Sequence
  Oligonucleotide for detection of SNP TSC0029375
tagttgaagaagt

SEQ ID NO: 117430 - DNA, 13 bp, Artificial Sequence
  Oligonucleotide for detection of SNP TSC0029375
acttcttcaacta

SEQ ID NO: 117431 - DNA, 13 bp, Artificial Sequence
  Oligonucleotide for detection of SNP TSC0029375
tagttgtagaagt

SEQ ID NO: 117432 - DNA, 13 bp, Artificial Sequence
  Oligonucleotide for detection of SNP TSC0029375
acttctacaacta

SEQ ID NO: 117433 - DNA, 13 bp, Artificial Sequence
  Oligonucleotide for detection of SNP TSC0029375
tagtcgaagaagt

SEQ ID NO: 117434 - DNA, 13 bp, Artificial Sequence
  Oligonucleotide for detection of SNP TSC0029375
acttcttcgacta

SEQ ID NO: 117435 - DNA, 13 bp, Artificial Sequence
  Oligonucleotide for detection of SNP TSC0029375
tagtcgtagaagt

SEQ ID NO: 117436 - DNA, 13 bp, Artificial Sequence
  Oligonucleotide for detection of SNP TSC0029375
acttctacgacta

SEQ ID NO: 117437 - DNA, 13 bp, Artificial Sequence
  Oligonucleotide for detection of SNP TSC0029375
atttttttggtta

SEQ ID NO: 117438 - DNA, 13 bp, Artificial Sequence
  Oligonucleotide for detection of SNP TSC0029375
taaccaaaaaaat

SEQ ID NO: 117439 - DNA, 13 bp, Artificial Sequence
  Oligonucleotide for detection of SNP TSC0029375
attttttcggtta

SEQ ID NO: 117440 - DNA, 13 bp, Artificial Sequence
  Oligonucleotide for detection of SNP TSC0029375
taaccgaaaaaat

SEQ ID NO: 117441 - DNA, 13 bp, Artificial Sequence
  Oligonucleotide for detection of SNP TSC0029376
gtgaagaagggag

SEQ ID NO: 117442 - DNA, 13 bp, Artificial Sequence
  Oligonucleotide for detection of SNP TSC0029376
ctcccttcttcac

SEQ ID NO: 117443 - DNA, 13 bp, Artificial Sequence
  Oligonucleotide for detection of SNP TSC0029376
gtgaaggagggag

SEQ ID NO: 117444 - DNA, 13 bp, Artificial Sequence
  Oligonucleotide for detection of SNP TSC0029376
ctccctccttcac

SEQ ID NO: 117445 - DNA, 13 bp, Artificial Sequence
  Oligonucleotide for detection of SNP TSC0029377
atagttatatgta

SEQ ID NO: 117446 - DNA, 13 bp, Artificial Sequence
  Oligonucleotide for detection of SNP TSC0029377
tacatataactat

SEQ ID NO: 117447 - DNA, 13 bp, Artificial Sequence
  Oligonucleotide for detection of SNP TSC0029377
atagttttatgta

SEQ ID NO: 117448 - DNA, 13 bp, Artificial Sequence
  Oligonucleotide for detection of SNP TSC0029377
tacataaaactat

SEQ ID NO: 117449 - DNA, 13 bp, Artificial Sequence
  Oligonucleotide for detection of SNP TSC0029377
tatatataattat

SEQ ID NO: 117450 - DNA, 13 bp, Artificial Sequence
  Oligonucleotide for detection of SNP TSC0029377
ataattatatata

SEQ ID NO: 117451 - DNA, 13 bp, Artificial Sequence
  Oligonucleotide for detection of SNP TSC0029377
tatataaaattat

SEQ ID NO: 117452 - DNA, 13 bp, Artificial Sequence
  Oligonucleotide for detection of SNP TSC0029377
ataattttatata

SEQ ID NO: 117453 - DNA, 13 bp, Artificial Sequence
  Oligonucleotide for detection of SNP TSC0029378
gttgttagtattt

SEQ ID NO: 117454 - DNA, 13 bp, Artificial Sequence
  Oligonucleotide for detection of SNP TSC0029378
aaatactaacaac

SEQ ID NO: 117455 - DNA, 13 bp, Artificial Sequence
  Oligonucleotide for detection of SNP TSC0029378
gttgttggtattt

SEQ ID NO: 117456 - DNA, 13 bp, Artificial Sequence
  Oligonucleotide for detection of SNP TSC0029378
aaataccaacaac

SEQ ID NO: 117457 - DNA, 13 bp, Artificial Sequence
  Oligonucleotide for detection of SNP TSC0029378
gtcgttagtattt

SEQ ID NO: 117458 - DNA, 13 bp, Artificial Sequence
  Oligonucleotide for detection of SNP TSC0029378
aaatactaacgac

SEQ ID NO: 117459 - DNA, 13 bp, Artificial Sequence
  Oligonucleotide for detection of SNP TSC0029378
gtcgttggtattt

SEQ ID NO: 117460 - DNA, 13 bp, Artificial Sequence
  Oligonucleotide for detection of SNP TSC0029378
aaataccaacgac

SEQ ID NO: 117461 - DNA, 13 bp, Artificial Sequence
  Oligonucleotide for detection of SNP TSC0029380
tttttgattttga

SEQ ID NO: 117462 - DNA, 13 bp, Artificial Sequence
  Oligonucleotide for detection of SNP TSC0029380
tcaaaatcaaaaa

SEQ ID NO: 117463 - DNA, 13 bp, Artificial Sequence
  Oligonucleotide for detection of SNP TSC0029380
tttttgtttttga

SEQ ID NO: 117464 - DNA, 13 bp, Artificial Sequence
  Oligonucleotide for detection of SNP TSC0029380
tcaaaaacaaaaa

SEQ ID NO: 117465 - DNA, 13 bp, Artificial Sequence
  Oligonucleotide for detection of SNP TSC0029380
ttagggttaggaa

SEQ ID NO: 117466 - DNA, 13 bp, Artificial Sequence
  Oligonucleotide for detection of SNP TSC0029380
ttcctaaccctaa

SEQ ID NO: 117467 - DNA, 13 bp, Artificial Sequence
  Oligonucleotide for detection of SNP TSC0029380
ttaggggtaggaa

SEQ ID NO: 117468 - DNA, 13 bp, Artificial Sequence
  Oligonucleotide for detection of SNP TSC0029380
ttcctacccctaa

SEQ ID NO: 117469 - DNA, 13 bp, Artificial Sequence
  Oligonucleotide for detection of SNP TSC0029381
aggttgtgggggg

SEQ ID NO: 117470 - DNA, 13 bp, Artificial Sequence
  Oligonucleotide for detection of SNP TSC0029381
ccccccacaacct

SEQ ID NO: 117471 - DNA, 13 bp, Artificial Sequence
  Oligonucleotide for detection of SNP TSC0029381
aggttgcgggggg

SEQ ID NO: 117472 - DNA, 13 bp, Artificial Sequence
  Oligonucleotide for detection of SNP TSC0029381
ccccccgcaacct

SEQ ID NO: 117473 - DNA, 13 bp, Artificial Sequence
  Oligonucleotide for detection of SNP TSC0029381
ttttttgtaattt

SEQ ID NO: 117474 - DNA, 13 bp, Artificial Sequence
  Oligonucleotide for detection of SNP TSC0029381
aaattacaaaaaa

SEQ ID NO: 117475 - DNA, 13 bp, Artificial Sequence
  Oligonucleotide for detection of SNP TSC0029381
ttttttataattt

SEQ ID NO: 117476 - DNA, 13 bp, Artificial Sequence
  Oligonucleotide for detection of SNP TSC0029381
aaattataaaaaa

SEQ ID NO: 117477 - DNA, 13 bp, Artificial Sequence
  Oligonucleotide for detection of SNP TSC0029381
tttttcgtaattt

SEQ ID NO: 117478 - DNA, 13 bp, Artificial Sequence
  Oligonucleotide for detection of SNP TSC0029381
aaattacgaaaaa

SEQ ID NO: 117479 - DNA, 13 bp, Artificial Sequence
  Oligonucleotide for detection of SNP TSC0029382
tttgtgatgggta

SEQ ID NO: 117480 - DNA, 13 bp, Artificial Sequence
  Oligonucleotide for detection of SNP TSC0029382
tacccatcacaaa

SEQ ID NO: 117481 - DNA, 13 bp, Artificial Sequence
  Oligonucleotide for detection of SNP TSC0029382
tttgtggtgggta

SEQ ID NO: 117482 - DNA, 13 bp, Artificial Sequence
  Oligonucleotide for detection of SNP TSC0029382
tacccaccacaaa

SEQ ID NO: 117483 - DNA, 13 bp, Artificial Sequence
  Oligonucleotide for detection of SNP TSC0029382
tttgcgatgggta

SEQ ID NO: 117484 - DNA, 13 bp, Artificial Sequence
  Oligonucleotide for detection of SNP TSC0029382
tacccatcgcaaa

SEQ ID NO: 117485 - DNA, 13 bp, Artificial Sequence
  Oligonucleotide for detection of SNP TSC0029382
tttgcggtgggta

SEQ ID NO: 117486 - DNA, 13 bp, Artificial Sequence
  Oligonucleotide for detection of SNP TSC0029382
tacccaccgcaaa

SEQ ID NO: 117487 - DNA, 13 bp, Artificial Sequence
  Oligonucleotide for detection of SNP TSC0029382
tttgtgacgggta

SEQ ID NO: 117488 - DNA, 13 bp, Artificial Sequence
  Oligonucleotide for detection of SNP TSC0029382
tacccgtcacaaa

SEQ ID NO: 117489 - DNA, 13 bp, Artificial Sequence
  Oligonucleotide for detection of SNP TSC0029382
tttgtggcgggta

SEQ ID NO: 117490 - DNA, 13 bp, Artificial Sequence
  Oligonucleotide for detection of SNP TSC0029382
tacccgccacaaa

SEQ ID NO: 117491 - DNA, 13 bp, Artificial Sequence
  Oligonucleotide for detection of SNP TSC0029382
tttgcgacgggta

SEQ ID NO: 117492 - DNA, 13 bp, Artificial Sequence
  Oligonucleotide for detection of SNP TSC0029382
tacccgtcgcaaa

SEQ ID NO: 117493 - DNA, 13 bp, Artificial Sequence
  Oligonucleotide for detection of SNP TSC0029382
tttgcggcgggta

SEQ ID NO: 117494 - DNA, 13 bp, Artificial Sequence
  Oligonucleotide for detection of SNP TSC0029382
tacccgccgcaaa

SEQ ID NO: 117495 - DNA, 13 bp, Artificial Sequence
  Oligonucleotide for detection of SNP TSC0029383
tgttgtatggttt

SEQ ID NO: 117496 - DNA, 13 bp, Artificial Sequence
  Oligonucleotide for detection of SNP TSC0029383
aaaccatacaaca

SEQ ID NO: 117497 - DNA, 13 bp, Artificial Sequence
  Oligonucleotide for detection of SNP TSC0029383
tgttgtgtggttt

SEQ ID NO: 117498 - DNA, 13 bp, Artificial Sequence
  Oligonucleotide for detection of SNP TSC0029383
aaaccacacaaca

SEQ ID NO: 117499 - DNA, 13 bp, Artificial Sequence
  Oligonucleotide for detection of SNP TSC0029384
ttttgtagggggg

SEQ ID NO: 117500 - DNA, 13 bp, Artificial Sequence
  Oligonucleotide for detection of SNP TSC0029384
cccccctacaaaa

SEQ ID NO: 117501 - DNA, 13 bp, Artificial Sequence
  Oligonucleotide for detection of SNP TSC0029384
ttttgtggggggg

SEQ ID NO: 117502 - DNA, 13 bp, Artificial Sequence
  Oligonucleotide for detection of SNP TSC0029384
cccccccacaaaa

SEQ ID NO: 117503 - DNA, 13 bp, Artificial Sequence
  Oligonucleotide for detection of SNP TSC0029385
tagttttggttta

SEQ ID NO: 117504 - DNA, 13 bp, Artificial Sequence
  Oligonucleotide for detection of SNP TSC0029385
taaaccaaaacta

SEQ ID NO: 117505 - DNA, 13 bp, Artificial Sequence
  Oligonucleotide for detection of SNP TSC0029385
tagtttgggttta

SEQ ID NO: 117506 - DNA, 13 bp, Artificial Sequence
  Oligonucleotide for detection of SNP TSC0029385
taaacccaaacta

SEQ ID NO: 117507 - DNA, 13 bp, Artificial Sequence
  Oligonucleotide for detection of SNP TSC0029385
tagtttcggttta

SEQ ID NO: 117508 - DNA, 13 bp, Artificial Sequence
  Oligonucleotide for detection of SNP TSC0029385
taaaccgaaacta

SEQ ID NO: 117509 - DNA, 13 bp, Artificial Sequence
  Oligonucleotide for detection of SNP TSC0029385
tgagttgaaattg

SEQ ID NO: 117510 - DNA, 13 bp, Artificial Sequence
  Oligonucleotide for detection of SNP TSC0029385
caatttcaactca

SEQ ID NO: 117511 - DNA, 13 bp, Artificial Sequence
  Oligonucleotide for detection of SNP TSC0029385
tgagtttaaattg

SEQ ID NO: 117512 - DNA, 13 bp, Artificial Sequence
  Oligonucleotide for detection of SNP TSC0029385
caatttaaactca

SEQ ID NO: 117513 - DNA, 13 bp, Artificial Sequence
  Oligonucleotide for detection of SNP TSC0029385
tgagtcgaaattg

SEQ ID NO: 117514 - DNA, 13 bp, Artificial Sequence
  Oligonucleotide for detection of SNP TSC0029385
caatttcgactca

SEQ ID NO: 117515 - DNA, 13 bp, Artificial Sequence
  Oligonucleotide for detection of SNP TSC0029386
atatgggtttttt

SEQ ID NO: 117516 - DNA, 13 bp, Artificial Sequence
  Oligonucleotide for detection of SNP TSC0029386
aaaaaacccatat

SEQ ID NO: 117517 - DNA, 13 bp, Artificial Sequence
  Oligonucleotide for detection of SNP TSC0029386
atatggatttttt

SEQ ID NO: 117518 - DNA, 13 bp, Artificial Sequence
  Oligonucleotide for detection of SNP TSC0029386
aaaaaatccatat

SEQ ID NO: 117519 - DNA, 13 bp, Artificial Sequence
  Oligonucleotide for detection of SNP TSC0029388
tttagatatattt

SEQ ID NO: 117520 - DNA, 13 bp, Artificial Sequence
  Oligonucleotide for detection of SNP TSC0029388
aaatatatctaaa

SEQ ID NO: 117521 - DNA, 13 bp, Artificial Sequence
  Oligonucleotide for detection of SNP TSC0029389
tattttgtagtty

SEQ ID NO: 117522 - DNA, 13 bp, Artificial Sequence
  Oligonucleotide for detection of SNP TSC0029389
raactacaaaata

SEQ ID NO: 117523 - DNA, 13 bp, Artificial Sequence
  Oligonucleotide for detection of SNP TSC0029389
tattttatagtty

SEQ ID NO: 117524 - DNA, 13 bp, Artificial Sequence
  Oligonucleotide for detection of SNP TSC0029389
raactataaaata

SEQ ID NO: 117525 - DNA, 13 bp, Artificial Sequence
  Oligonucleotide for detection of SNP TSC0029390
ttattgaggtggy

SEQ ID NO: 117526 - DNA, 13 bp, Artificial Sequence
  Oligonucleotide for detection of SNP TSC0029390
rccacctcaataa

SEQ ID NO: 117527 - DNA, 13 bp, Artificial Sequence
  Oligonucleotide for detection of SNP TSC0029390
ttattgtggtggy

SEQ ID NO: 117528 - DNA, 13 bp, Artificial Sequence
  Oligonucleotide for detection of SNP TSC0029390
rccaccacaataa

SEQ ID NO: 117529 - DNA, 13 bp, Artificial Sequence
  Oligonucleotide for detection of SNP TSC0029390
ttattgcggtggy

SEQ ID NO: 117530 - DNA, 13 bp, Artificial Sequence
  Oligonucleotide for detection of SNP TSC0029390
rccaccgcaataa

SEQ ID NO: 117531 - DNA, 13 bp, Artificial Sequence
  Oligonucleotide for detection of SNP TSC0029390
gttattttaatga

SEQ ID NO: 117532 - DNA, 13 bp, Artificial Sequence
  Oligonucleotide for detection of SNP TSC0029390
tcattaaaataac

SEQ ID NO: 117533 - DNA, 13 bp, Artificial Sequence
  Oligonucleotide for detection of SNP TSC0029390
gttattgtaatga

SEQ ID NO: 117534 - DNA, 13 bp, Artificial Sequence
  Oligonucleotide for detection of SNP TSC0029390
tcattacaataac

SEQ ID NO: 117535 - DNA, 13 bp, Artificial Sequence
  Oligonucleotide for detection of SNP TSC0029390
gttatcgtaatga

SEQ ID NO: 117536 - DNA, 13 bp, Artificial Sequence
  Oligonucleotide for detection of SNP TSC0029390
tcattacgataac

SEQ ID NO: 117537 - DNA, 13 bp, Artificial Sequence
  Oligonucleotide for detection of SNP TSC0029391
ttagaagggaatt

SEQ ID NO: 117538 - DNA, 13 bp, Artificial Sequence
  Oligonucleotide for detection of SNP TSC0029391
aattcccttctaa

SEQ ID NO: 117539 - DNA, 13 bp, Artificial Sequence
  Oligonucleotide for detection of SNP TSC0029391
ttagaaaggaatt

SEQ ID NO: 117540 - DNA, 13 bp, Artificial Sequence
  Oligonucleotide for detection of SNP TSC0029391
aattcctttctaa

SEQ ID NO: 117541 - DNA, 13 bp, Artificial Sequence
  Oligonucleotide for detection of SNP TSC0029392
tggttatgtttgt

SEQ ID NO: 117542 - DNA, 13 bp, Artificial Sequence
  Oligonucleotide for detection of SNP TSC0029392
acaaacataacca

SEQ ID NO: 117543 - DNA, 13 bp, Artificial Sequence
  Oligonucleotide for detection of SNP TSC0029392
tggttacgtttgt

SEQ ID NO: 117544 - DNA, 13 bp, Artificial Sequence
  Oligonucleotide for detection of SNP TSC0029392
acaaacgtaacca

SEQ ID NO: 117545 - DNA, 13 bp, Artificial Sequence
  Oligonucleotide for detection of SNP TSC0029392
ataggtgtgatta

SEQ ID NO: 117546 - DNA, 13 bp, Artificial Sequence
  Oligonucleotide for detection of SNP TSC0029392
taatcacacctat

SEQ ID NO: 117547 - DNA, 13 bp, Artificial Sequence
  Oligonucleotide for detection of SNP TSC0029392
ataggtatgatta

SEQ ID NO: 117548 - DNA, 13 bp, Artificial Sequence
  Oligonucleotide for detection of SNP TSC0029392
taatcatacctat

SEQ ID NO: 117549 - DNA, 13 bp, Artificial Sequence
  Oligonucleotide for detection of SNP TSC0029392
ataggcgtgatta

SEQ ID NO: 117550 - DNA, 13 bp, Artificial Sequence
  Oligonucleotide for detection of SNP TSC0029392
taatcacgcctat

SEQ ID NO: 117551 - DNA, 13 bp, Artificial Sequence
  Oligonucleotide for detection of SNP TSC0029396
taatagatgaggt

SEQ ID NO: 117552 - DNA, 13 bp, Artificial Sequence
  Oligonucleotide for detection of SNP TSC0029396
acctcatctatta

SEQ ID NO: 117553 - DNA, 13 bp, Artificial Sequence
  Oligonucleotide for detection of SNP TSC0029396
taataggtgaggt

SEQ ID NO: 117554 - DNA, 13 bp, Artificial Sequence
  Oligonucleotide for detection of SNP TSC0029396
acctcacctatta

SEQ ID NO: 117555 - DNA, 13 bp, Artificial Sequence
  Oligonucleotide for detection of SNP TSC0029397
ttttttatataga

SEQ ID NO: 117556 - DNA, 13 bp, Artificial Sequence
  Oligonucleotide for detection of SNP TSC0029397
tctatataaaaaa

SEQ ID NO: 117557 - DNA, 13 bp, Artificial Sequence
  Oligonucleotide for detection of SNP TSC0029397
ttttttttataga

SEQ ID NO: 117558 - DNA, 13 bp, Artificial Sequence
  Oligonucleotide for detection of SNP TSC0029397
tctataaaaaaaa

SEQ ID NO: 117559 - DNA, 13 bp, Artificial Sequence
  Oligonucleotide for detection of SNP TSC0029397
tttatataaaggg

SEQ ID NO: 117560 - DNA, 13 bp, Artificial Sequence
  Oligonucleotide for detection of SNP TSC0029397
ccctttatataaa

SEQ ID NO: 117561 - DNA, 13 bp, Artificial Sequence
  Oligonucleotide for detection of SNP TSC0029397
tttatagaaaggg

SEQ ID NO: 117562 - DNA, 13 bp, Artificial Sequence
  Oligonucleotide for detection of SNP TSC0029397
ccctttctataaa

SEQ ID NO: 117563 - DNA, 13 bp, Artificial Sequence
  Oligonucleotide for detection of SNP TSC0029398
tgttttgtagaag

SEQ ID NO: 117564 - DNA, 13 bp, Artificial Sequence
  Oligonucleotide for detection of SNP TSC0029398
cttctacaaaaca

SEQ ID NO: 117565 - DNA, 13 bp, Artificial Sequence
  Oligonucleotide for detection of SNP TSC0029398
tgttttatagaag

SEQ ID NO: 117566 - DNA, 13 bp, Artificial Sequence
  Oligonucleotide for detection of SNP TSC0029398
cttctataaaaca

SEQ ID NO: 117567 - DNA, 13 bp, Artificial Sequence
  Oligonucleotide for detection of SNP TSC0029399
ttgtgaagatagy

SEQ ID NO: 117568 - DNA, 13 bp, Artificial Sequence
  Oligonucleotide for detection of SNP TSC0029399
rctatcttcacaa

SEQ ID NO: 117569 - DNA, 13 bp, Artificial Sequence
  Oligonucleotide for detection of SNP TSC0029399
ttgtgaggatagy

SEQ ID NO: 117570 - DNA, 13 bp, Artificial Sequence
  Oligonucleotide for detection of SNP TSC0029399
rctatcctcacaa

SEQ ID NO: 117571 - DNA, 13 bp, Artificial Sequence
  Oligonucleotide for detection of SNP TSC0029401
attttttgtaaga

SEQ ID NO: 117572 - DNA, 13 bp, Artificial Sequence
  Oligonucleotide for detection of SNP TSC0029401
tcttacaaaaaat

SEQ ID NO: 117573 - DNA, 13 bp, Artificial Sequence
  Oligonucleotide for detection of SNP TSC0029401
atttttcgtaaga

SEQ ID NO: 117574 - DNA, 13 bp, Artificial Sequence
  Oligonucleotide for detection of SNP TSC0029401
tcttacgaaaaat

SEQ ID NO: 117575 - DNA, 13 bp, Artificial Sequence
  Oligonucleotide for detection of SNP TSC0029401
ttttatgggaaat

SEQ ID NO: 117576 - DNA, 13 bp, Artificial Sequence
  Oligonucleotide for detection of SNP TSC0029401
atttcccataaaa

SEQ ID NO: 117577 - DNA, 13 bp, Artificial Sequence
  Oligonucleotide for detection of SNP TSC0029401
ttttataggaaat

SEQ ID NO: 117578 - DNA, 13 bp, Artificial Sequence
  Oligonucleotide for detection of SNP TSC0029401
atttcctataaaa

SEQ ID NO: 117579 - DNA, 13 bp, Artificial Sequence
  Oligonucleotide for detection of SNP TSC0029401
ttttacgggaaat

SEQ ID NO: 117580 - DNA, 13 bp, Artificial Sequence
  Oligonucleotide for detection of SNP TSC0029401
atttcccgtaaaa

SEQ ID NO: 117581 - DNA, 13 bp, Artificial Sequence
  Oligonucleotide for detection of SNP TSC0029402
gtttgtaagtagy

SEQ ID NO: 117582 - DNA, 13 bp, Artificial Sequence
  Oligonucleotide for detection of SNP TSC0029402
rctacttacaaac

SEQ ID NO: 117583 - DNA, 13 bp, Artificial Sequence
  Oligonucleotide for detection of SNP TSC0029402
gtttgtgagtagy

SEQ ID NO: 117584 - DNA, 13 bp, Artificial Sequence
  Oligonucleotide for detection of SNP TSC0029402
rctactcacaaac

SEQ ID NO: 117585 - DNA, 13 bp, Artificial Sequence
  Oligonucleotide for detection of SNP TSC0029402
gtttgcgagtagy

SEQ ID NO: 117586 - DNA, 13 bp, Artificial Sequence
  Oligonucleotide for detection of SNP TSC0029402
rctactcgcaaac

SEQ ID NO: 117587 - DNA, 13 bp, Artificial Sequence
  Oligonucleotide for detection of SNP TSC0029402
gttgtttgtaggy

SEQ ID NO: 117588 - DNA, 13 bp, Artificial Sequence
  Oligonucleotide for detection of SNP TSC0029402
rcctacaaacaac

SEQ ID NO: 117589 - DNA, 13 bp, Artificial Sequence
  Oligonucleotide for detection of SNP TSC0029402
gttgttcgtaggy

SEQ ID NO: 117590 - DNA, 13 bp, Artificial Sequence
  Oligonucleotide for detection of SNP TSC0029402
rcctacgaacaac

SEQ ID NO: 117591 - DNA, 13 bp, Artificial Sequence
  Oligonucleotide for detection of SNP TSC0029403
tttgtgtttttty

SEQ ID NO: 117592 - DNA, 13 bp, Artificial Sequence
  Oligonucleotide for detection of SNP TSC0029403
raaaaaacacaaa

SEQ ID NO: 117593 - DNA, 13 bp, Artificial Sequence
  Oligonucleotide for detection of SNP TSC0029403
ttcgtgtttttty

SEQ ID NO: 117594 - DNA, 13 bp, Artificial Sequence
  Oligonucleotide for detection of SNP TSC0029403
raaaaaacacgaa

SEQ ID NO: 117595 - DNA, 13 bp, Artificial Sequence
  Oligonucleotide for detection of SNP TSC0029403
ttcgtggttttty

SEQ ID NO: 117596 - DNA, 13 bp, Artificial Sequence
  Oligonucleotide for detection of SNP TSC0029403
raaaaaccacgaa

SEQ ID NO: 117597 - DNA, 13 bp, Artificial Sequence
  Oligonucleotide for detection of SNP TSC0029403
gggagagtatgag

SEQ ID NO: 117598 - DNA, 13 bp, Artificial Sequence
  Oligonucleotide for detection of SNP TSC0029403
ctcatactctccc

SEQ ID NO: 117599 - DNA, 13 bp, Artificial Sequence
  Oligonucleotide for detection of SNP TSC0029403
gggagattatgag

SEQ ID NO: 117600 - DNA, 13 bp, Artificial Sequence
  Oligonucleotide for detection of SNP TSC0029403
ctcataatctccc

SEQ ID NO: 117601 - DNA, 13 bp, Artificial Sequence
  Oligonucleotide for detection of SNP TSC0029403
gggagagtacgag

SEQ ID NO: 117602 - DNA, 13 bp, Artificial Sequence
  Oligonucleotide for detection of SNP TSC0029403
ctcgtactctccc

SEQ ID NO: 117603 - DNA, 13 bp, Artificial Sequence
  Oligonucleotide for detection of SNP TSC0029403
gggagattacgag

SEQ ID NO: 117604 - DNA, 13 bp, Artificial Sequence
  Oligonucleotide for detection of SNP TSC0029403
ctcgtaatctccc

SEQ ID NO: 117605 - DNA, 13 bp, Artificial Sequence
  Oligonucleotide for detection of SNP TSC0029404
ttgaggatggagg

SEQ ID NO: 117606 - DNA, 13 bp, Artificial Sequence
  Oligonucleotide for detection of SNP TSC0029404
cctccatcctcaa

SEQ ID NO: 117607 - DNA, 13 bp, Artificial Sequence
  Oligonucleotide for detection of SNP TSC0029404
ttgagggtggagg

SEQ ID NO: 117608 - DNA, 13 bp, Artificial Sequence
  Oligonucleotide for detection of SNP TSC0029404
cctccaccctcaa

SEQ ID NO: 117609 - DNA, 13 bp, Artificial Sequence
  Oligonucleotide for detection of SNP TSC0029404
tcgaggatggagg

SEQ ID NO: 117610 - DNA, 13 bp, Artificial Sequence
  Oligonucleotide for detection of SNP TSC0029404
cctccatcctcga

SEQ ID NO: 117611 - DNA, 13 bp, Artificial Sequence
  Oligonucleotide for detection of SNP TSC0029404
tcgagggtggagg

SEQ ID NO: 117612 - DNA, 13 bp, Artificial Sequence
  Oligonucleotide for detection of SNP TSC0029404
cctccaccctcga

SEQ ID NO: 117613 - DNA, 13 bp, Artificial Sequence
  Oligonucleotide for detection of SNP TSC0029405
gttatggttatta

SEQ ID NO: 117614 - DNA, 13 bp, Artificial Sequence
  Oligonucleotide for detection of SNP TSC0029405
taataaccataac

SEQ ID NO: 117615 - DNA, 13 bp, Artificial Sequence
  Oligonucleotide for detection of SNP TSC0029405
gttatgattatta

SEQ ID NO: 117616 - DNA, 13 bp, Artificial Sequence
  Oligonucleotide for detection of SNP TSC0029405
taataatcataac

SEQ ID NO: 117617 - DNA, 13 bp, Artificial Sequence
  Oligonucleotide for detection of SNP TSC0029405
gttacggttatta

SEQ ID NO: 117618 - DNA, 13 bp, Artificial Sequence
  Oligonucleotide for detection of SNP TSC0029405
taataaccgtaac

SEQ ID NO: 117619 - DNA, 13 bp, Artificial Sequence
  Oligonucleotide for detection of SNP TSC0029405
gttacgattatta

SEQ ID NO: 117620 - DNA, 13 bp, Artificial Sequence
  Oligonucleotide for detection of SNP TSC0029405
taataatcgtaac

SEQ ID NO: 117621 - DNA, 13 bp, Artificial Sequence
  Oligonucleotide for detection of SNP TSC0029406
gatattggtttty

SEQ ID NO: 117622 - DNA, 13 bp, Artificial Sequence
  Oligonucleotide for detection of SNP TSC0029406
raaaaccaatatc

SEQ ID NO: 117623 - DNA, 13 bp, Artificial Sequence
  Oligonucleotide for detection of SNP TSC0029406
gatattagtttty

SEQ ID NO: 117624 - DNA, 13 bp, Artificial Sequence
  Oligonucleotide for detection of SNP TSC0029406
raaaactaatatc

SEQ ID NO: 117625 - DNA, 13 bp, Artificial Sequence
  Oligonucleotide for detection of SNP TSC0029407
agaaatgtaatta

SEQ ID NO: 117626 - DNA, 13 bp, Artificial Sequence
  Oligonucleotide for detection of SNP TSC0029407
taattacatttct

SEQ ID NO: 117627 - DNA, 13 bp, Artificial Sequence
  Oligonucleotide for detection of SNP TSC0029407
agaaatataatta

SEQ ID NO: 117628 - DNA, 13 bp, Artificial Sequence
  Oligonucleotide for detection of SNP TSC0029407
taattatatttct

SEQ ID NO: 117629 - DNA, 13 bp, Artificial Sequence
  Oligonucleotide for detection of SNP TSC0029412
attgttgtatatg

SEQ ID NO: 117630 - DNA, 13 bp, Artificial Sequence
  Oligonucleotide for detection of SNP TSC0029412
catatacaacaat

SEQ ID NO: 117631 - DNA, 13 bp, Artificial Sequence
  Oligonucleotide for detection of SNP TSC0029412
attgttatatatg

SEQ ID NO: 117632 - DNA, 13 bp, Artificial Sequence
  Oligonucleotide for detection of SNP TSC0029412
catatataacaat

SEQ ID NO: 117633 - DNA, 13 bp, Artificial Sequence
  Oligonucleotide for detection of SNP TSC0029412
attgttgtatacg

SEQ ID NO: 117634 - DNA, 13 bp, Artificial Sequence
  Oligonucleotide for detection of SNP TSC0029412
cgtatacaacaat

SEQ ID NO: 117635 - DNA, 13 bp, Artificial Sequence
  Oligonucleotide for detection of SNP TSC0029412
attgttatatacg

SEQ ID NO: 117636 - DNA, 13 bp, Artificial Sequence
  Oligonucleotide for detection of SNP TSC0029412
cgtatataacaat

SEQ ID NO: 117637 - DNA, 13 bp, Artificial Sequence
  Oligonucleotide for detection of SNP TSC0029414
ggtgggggagtgg

SEQ ID NO: 117638 - DNA, 13 bp, Artificial Sequence
  Oligonucleotide for detection of SNP TSC0029414
ccactcccccacc

SEQ ID NO: 117639 - DNA, 13 bp, Artificial Sequence
  Oligonucleotide for detection of SNP TSC0029414
ggtgggagagtgg

SEQ ID NO: 117640 - DNA, 13 bp, Artificial Sequence
  Oligonucleotide for detection of SNP TSC0029414
ccactctcccacc

SEQ ID NO: 117641 - DNA, 13 bp, Artificial Sequence
  Oligonucleotide for detection of SNP TSC0029416
taatttgttaaty

SEQ ID NO: 117642 - DNA, 13 bp, Artificial Sequence
  Oligonucleotide for detection of SNP TSC0029416
rattaacaaatta

SEQ ID NO: 117643 - DNA, 13 bp, Artificial Sequence
  Oligonucleotide for detection of SNP TSC0029416
taatttattaaty

SEQ ID NO: 117644 - DNA, 13 bp, Artificial Sequence
  Oligonucleotide for detection of SNP TSC0029416
rattaataaatta

SEQ ID NO: 117645 - DNA, 13 bp, Artificial Sequence
  Oligonucleotide for detection of SNP TSC0029417
tattagaaagtgg

SEQ ID NO: 117646 - DNA, 13 bp, Artificial Sequence
  Oligonucleotide for detection of SNP TSC0029417
ccactttctaata

SEQ ID NO: 117647 - DNA, 13 bp, Artificial Sequence
  Oligonucleotide for detection of SNP TSC0029417
tattaggaagtgg

SEQ ID NO: 117648 - DNA, 13 bp, Artificial Sequence
  Oligonucleotide for detection of SNP TSC0029417
ccacttcctaata

SEQ ID NO: 117649 - DNA, 13 bp, Artificial Sequence
  Oligonucleotide for detection of SNP TSC0029418
tttaggggtattg

SEQ ID NO: 117650 - DNA, 13 bp, Artificial Sequence
  Oligonucleotide for detection of SNP TSC0029418
caatacccctaaa

SEQ ID NO: 117651 - DNA, 13 bp, Artificial Sequence
  Oligonucleotide for detection of SNP TSC0029418
tttaggagtattg

SEQ ID NO: 117652 - DNA, 13 bp, Artificial Sequence
  Oligonucleotide for detection of SNP TSC0029418
caatactcctaaa

SEQ ID NO: 117653 - DNA, 13 bp, Artificial Sequence
  Oligonucleotide for detection of SNP TSC0029422
ttttgtattgaty

SEQ ID NO: 117654 - DNA, 13 bp, Artificial Sequence
  Oligonucleotide for detection of SNP TSC0029422
ratcaatacaaaa

SEQ ID NO: 117655 - DNA, 13 bp, Artificial Sequence
  Oligonucleotide for detection of SNP TSC0029422
ttttgttttgaty

SEQ ID NO: 117656 - DNA, 13 bp, Artificial Sequence
  Oligonucleotide for detection of SNP TSC0029422
ratcaaaacaaaa

SEQ ID NO: 117657 - DNA, 13 bp, Artificial Sequence
  Oligonucleotide for detection of SNP TSC0029422
gattagtgtaaaa

SEQ ID NO: 117658 - DNA, 13 bp, Artificial Sequence
  Oligonucleotide for detection of SNP TSC0029422
ttttacactaatc

SEQ ID NO: 117659 - DNA, 13 bp, Artificial Sequence
  Oligonucleotide for detection of SNP TSC0029422
gattagggtaaaa

SEQ ID NO: 117660 - DNA, 13 bp, Artificial Sequence
  Oligonucleotide for detection of SNP TSC0029422
ttttaccctaatc

SEQ ID NO: 117661 - DNA, 13 bp, Artificial Sequence
  Oligonucleotide for detection of SNP TSC0029423
aagtagagttgtt

SEQ ID NO: 117662 - DNA, 13 bp, Artificial Sequence
  Oligonucleotide for detection of SNP TSC0029423
aacaactctactt

SEQ ID NO: 117663 - DNA, 13 bp, Artificial Sequence
  Oligonucleotide for detection of SNP TSC0029423
aagtagggttgtt

SEQ ID NO: 117664 - DNA, 13 bp, Artificial Sequence
  Oligonucleotide for detection of SNP TSC0029423
aacaaccctactt

SEQ ID NO: 117665 - DNA, 13 bp, Artificial Sequence
  Oligonucleotide for detection of SNP TSC0029425
aagtagtaagtag

SEQ ID NO: 117666 - DNA, 13 bp, Artificial Sequence
  Oligonucleotide for detection of SNP TSC0029425
ctacttactactt

SEQ ID NO: 117667 - DNA, 13 bp, Artificial Sequence
  Oligonucleotide for detection of SNP TSC0029425
aagtaggaagtag

SEQ ID NO: 117668 - DNA, 13 bp, Artificial Sequence
  Oligonucleotide for detection of SNP TSC0029425
ctacttcctactt

SEQ ID NO: 117669 - DNA, 13 bp, Artificial Sequence
  Oligonucleotide for detection of SNP TSC0029426
ttggaaattataa

SEQ ID NO: 117670 - DNA, 13 bp, Artificial Sequence
  Oligonucleotide for detection of SNP TSC0029426
ttataatttccaa

SEQ ID NO: 117671 - DNA, 13 bp, Artificial Sequence
  Oligonucleotide for detection of SNP TSC0029426
ttggaatttataa

SEQ ID NO: 117672 - DNA, 13 bp, Artificial Sequence
  Oligonucleotide for detection of SNP TSC0029426
ttataaattccaa

SEQ ID NO: 117673 - DNA, 13 bp, Artificial Sequence
  Oligonucleotide for detection of SNP TSC0029426
ttataaattttaa

SEQ ID NO: 117674 - DNA, 13 bp, Artificial Sequence
  Oligonucleotide for detection of SNP TSC0029426
ttaaaatttataa

SEQ ID NO: 117675 - DNA, 13 bp, Artificial Sequence
  Oligonucleotide for detection of SNP TSC0029427
gtattaataatgy

SEQ ID NO: 117676 - DNA, 13 bp, Artificial Sequence
  Oligonucleotide for detection of SNP TSC0029427
rcattattaatac

SEQ ID NO: 117677 - DNA, 13 bp, Artificial Sequence
  Oligonucleotide for detection of SNP TSC0029427
gtattagtaatgy

SEQ ID NO: 117678 - DNA, 13 bp, Artificial Sequence
  Oligonucleotide for detection of SNP TSC0029427
rcattactaatac

SEQ ID NO: 117679 - DNA, 13 bp, Artificial Sequence
  Oligonucleotide for detection of SNP TSC0029428
taaataattatty

SEQ ID NO: 117680 - DNA, 13 bp, Artificial Sequence
  Oligonucleotide for detection of SNP TSC0029428
raataattattta

SEQ ID NO: 117681 - DNA, 13 bp, Artificial Sequence
  Oligonucleotide for detection of SNP TSC0029428
taaatagttatty

SEQ ID NO: 117682 - DNA, 13 bp, Artificial Sequence
  Oligonucleotide for detection of SNP TSC0029428
raataactattta

SEQ ID NO: 117683 - DNA, 13 bp, Artificial Sequence
  Oligonucleotide for detection of SNP TSC0029431
ttttatatagagg

SEQ ID NO: 117684 - DNA, 13 bp, Artificial Sequence
  Oligonucleotide for detection of SNP TSC0029431
cctctatataaaa

SEQ ID NO: 117685 - DNA, 13 bp, Artificial Sequence
  Oligonucleotide for detection of SNP TSC0029431
ttttatttagagg

SEQ ID NO: 117686 - DNA, 13 bp, Artificial Sequence
  Oligonucleotide for detection of SNP TSC0029431
cctctaaataaaa

SEQ ID NO: 117687 - DNA, 13 bp, Artificial Sequence
  Oligonucleotide for detection of SNP TSC0029431
tttttgtatggga

SEQ ID NO: 117688 - DNA, 13 bp, Artificial Sequence
  Oligonucleotide for detection of SNP TSC0029431
tcccatacaaaaa

SEQ ID NO: 117689 - DNA, 13 bp, Artificial Sequence
  Oligonucleotide for detection of SNP TSC0029431
tttttggatggga

SEQ ID NO: 117690 - DNA, 13 bp, Artificial Sequence
  Oligonucleotide for detection of SNP TSC0029431
tcccatccaaaaa

SEQ ID NO: 117691 - DNA, 13 bp, Artificial Sequence
  Oligonucleotide for detection of SNP TSC0029434
atttgttttttay

SEQ ID NO: 117692 - DNA, 13 bp, Artificial Sequence
  Oligonucleotide for detection of SNP TSC0029434
rtaaaaaacaaat

SEQ ID NO: 117693 - DNA, 13 bp, Artificial Sequence
  Oligonucleotide for detection of SNP TSC0029434
atttgtgttttay

SEQ ID NO: 117694 - DNA, 13 bp, Artificial Sequence
  Oligonucleotide for detection of SNP TSC0029434
rtaaaacacaaat

SEQ ID NO: 117695 - DNA, 13 bp, Artificial Sequence
  Oligonucleotide for detection of SNP TSC0029434
gtaagagataaat

SEQ ID NO: 117696 - DNA, 13 bp, Artificial Sequence
  Oligonucleotide for detection of SNP TSC0029434
atttatctcttac

SEQ ID NO: 117697 - DNA, 13 bp, Artificial Sequence
  Oligonucleotide for detection of SNP TSC0029434
gtaagatataaat

SEQ ID NO: 117698 - DNA, 13 bp, Artificial Sequence
  Oligonucleotide for detection of SNP TSC0029434
atttatatcttac

SEQ ID NO: 117699 - DNA, 13 bp, Artificial Sequence
  Oligonucleotide for detection of SNP TSC0029435
tagtggtgtaaaa

SEQ ID NO: 117700 - DNA, 13 bp, Artificial Sequence
  Oligonucleotide for detection of SNP TSC0029435
ttttacaccacta

SEQ ID NO: 117701 - DNA, 13 bp, Artificial Sequence
  Oligonucleotide for detection of SNP TSC0029435
tagtggcgtaaaa

SEQ ID NO: 117702 - DNA, 13 bp, Artificial Sequence
  Oligonucleotide for detection of SNP TSC0029435
ttttacgccacta

SEQ ID NO: 117703 - DNA, 13 bp, Artificial Sequence
  Oligonucleotide for detection of SNP TSC0029435
ttttgtgttatta

SEQ ID NO: 117704 - DNA, 13 bp, Artificial Sequence
  Oligonucleotide for detection of SNP TSC0029435
taataacacaaaa

SEQ ID NO: 117705 - DNA, 13 bp, Artificial Sequence
  Oligonucleotide for detection of SNP TSC0029435
ttttgtattatta

SEQ ID NO: 117706 - DNA, 13 bp, Artificial Sequence
  Oligonucleotide for detection of SNP TSC0029435
taataatacaaaa

SEQ ID NO: 117707 - DNA, 13 bp, Artificial Sequence
  Oligonucleotide for detection of SNP TSC0029435
ttttgcgttatta

SEQ ID NO: 117708 - DNA, 13 bp, Artificial Sequence
  Oligonucleotide for detection of SNP TSC0029435
taataacgcaaaa

SEQ ID NO: 117709 - DNA, 13 bp, Artificial Sequence
  Oligonucleotide for detection of SNP TSC0029437
gtataaatgagaa

SEQ ID NO: 117710 - DNA, 13 bp, Artificial Sequence
  Oligonucleotide for detection of SNP TSC0029437
ttctcatttatac

SEQ ID NO: 117711 - DNA, 13 bp, Artificial Sequence
  Oligonucleotide for detection of SNP TSC0029437
gtataagtgagaa

SEQ ID NO: 117712 - DNA, 13 bp, Artificial Sequence
  Oligonucleotide for detection of SNP TSC0029437
ttctcacttatac

SEQ ID NO: 117713 - DNA, 13 bp, Artificial Sequence
  Oligonucleotide for detection of SNP TSC0029438
tagggtggtgtay

SEQ ID NO: 117714 - DNA, 13 bp, Artificial Sequence
  Oligonucleotide for detection of SNP TSC0029438
rtacaccacccta

SEQ ID NO: 117715 - DNA, 13 bp, Artificial Sequence
  Oligonucleotide for detection of SNP TSC0029438
tagggttgtgtay

SEQ ID NO: 117716 - DNA, 13 bp, Artificial Sequence
  Oligonucleotide for detection of SNP TSC0029438
rtacacaacccta

SEQ ID NO: 117717 - DNA, 13 bp, Artificial Sequence
  Oligonucleotide for detection of SNP TSC0029438
tagggcggtgtay

SEQ ID NO: 117718 - DNA, 13 bp, Artificial Sequence
  Oligonucleotide for detection of SNP TSC0029438
rtacaccgcccta

SEQ ID NO: 117719 - DNA, 13 bp, Artificial Sequence
  Oligonucleotide for detection of SNP TSC0029438
gtgtattgttttg

SEQ ID NO: 117720 - DNA, 13 bp, Artificial Sequence
  Oligonucleotide for detection of SNP TSC0029438
caaaacaatacac

SEQ ID NO: 117721 - DNA, 13 bp, Artificial Sequence
  Oligonucleotide for detection of SNP TSC0029438
gtgtatagttttg

SEQ ID NO: 117722 - DNA, 13 bp, Artificial Sequence
  Oligonucleotide for detection of SNP TSC0029438
caaaactatacac

SEQ ID NO: 117723 - DNA, 13 bp, Artificial Sequence
  Oligonucleotide for detection of SNP TSC0029438
gtgtatcgttttg

SEQ ID NO: 117724 - DNA, 13 bp, Artificial Sequence
  Oligonucleotide for detection of SNP TSC0029438
caaaacgatacac

SEQ ID NO: 117725 - DNA, 13 bp, Artificial Sequence
  Oligonucleotide for detection of SNP TSC0029439
tataagaattgtt

SEQ ID NO: 117726 - DNA, 13 bp, Artificial Sequence
  Oligonucleotide for detection of SNP TSC0029439
aacaattcttata

SEQ ID NO: 117727 - DNA, 13 bp, Artificial Sequence
  Oligonucleotide for detection of SNP TSC0029440
ttgttatagaaat

SEQ ID NO: 117728 - DNA, 13 bp, Artificial Sequence
  Oligonucleotide for detection of SNP TSC0029440
atttctataacaa

SEQ ID NO: 117729 - DNA, 13 bp, Artificial Sequence
  Oligonucleotide for detection of SNP TSC0029440
ttgttagagaaat

SEQ ID NO: 117730 - DNA, 13 bp, Artificial Sequence
  Oligonucleotide for detection of SNP TSC0029440
atttctctaacaa

SEQ ID NO: 117731 - DNA, 13 bp, Artificial Sequence
  Oligonucleotide for detection of SNP TSC0029440
atttttgtgatag

SEQ ID NO: 117732 - DNA, 13 bp, Artificial Sequence
  Oligonucleotide for detection of SNP TSC0029440
ctatcacaaaaat

SEQ ID NO: 117733 - DNA, 13 bp, Artificial Sequence
  Oligonucleotide for detection of SNP TSC0029440
atttttttgatag

SEQ ID NO: 117734 - DNA, 13 bp, Artificial Sequence
  Oligonucleotide for detection of SNP TSC0029440
ctatcaaaaaaat

SEQ ID NO: 117735 - DNA, 13 bp, Artificial Sequence
  Oligonucleotide for detection of SNP TSC0029441
attttttgtaggg

SEQ ID NO: 117736 - DNA, 13 bp, Artificial Sequence
  Oligonucleotide for detection of SNP TSC0029441
ccctacaaaaaat

SEQ ID NO: 117737 - DNA, 13 bp, Artificial Sequence
  Oligonucleotide for detection of SNP TSC0029441
atttttcgtaggg

SEQ ID NO: 117738 - DNA, 13 bp, Artificial Sequence
  Oligonucleotide for detection of SNP TSC0029441
ccctacgaaaaat

SEQ ID NO: 117739 - DNA, 13 bp, Artificial Sequence
  Oligonucleotide for detection of SNP TSC0029441
ttttgtggggagt

SEQ ID NO: 117740 - DNA, 13 bp, Artificial Sequence
  Oligonucleotide for detection of SNP TSC0029441
actccccacaaaa

SEQ ID NO: 117741 - DNA, 13 bp, Artificial Sequence
  Oligonucleotide for detection of SNP TSC0029441
ttttgtagggagt

SEQ ID NO: 117742 - DNA, 13 bp, Artificial Sequence
  Oligonucleotide for detection of SNP TSC0029441
actccctacaaaa

SEQ ID NO: 117743 - DNA, 13 bp, Artificial Sequence
  Oligonucleotide for detection of SNP TSC0029441
ttttgcggggagt

SEQ ID NO: 117744 - DNA, 13 bp, Artificial Sequence
  Oligonucleotide for detection of SNP TSC0029441
actccccgcaaaa

SEQ ID NO: 117745 - DNA, 13 bp, Artificial Sequence
  Oligonucleotide for detection of SNP TSC0029442
taattaatatatt

SEQ ID NO: 117746 - DNA, 13 bp, Artificial Sequence
  Oligonucleotide for detection of SNP TSC0029442
aatatattaatta

SEQ ID NO: 117747 - DNA, 13 bp, Artificial Sequence
  Oligonucleotide for detection of SNP TSC0029442
taattagtatatt

SEQ ID NO: 117748 - DNA, 13 bp, Artificial Sequence
  Oligonucleotide for detection of SNP TSC0029442
aatatactaatta

SEQ ID NO: 117749 - DNA, 13 bp, Artificial Sequence
  Oligonucleotide for detection of SNP TSC0029443
ttaaattgagtag

SEQ ID NO: 117750 - DNA, 13 bp, Artificial Sequence
  Oligonucleotide for detection of SNP TSC0029443
ctactcaatttaa

SEQ ID NO: 117751 - DNA, 13 bp, Artificial Sequence
  Oligonucleotide for detection of SNP TSC0029443
ttaaatggagtag

SEQ ID NO: 117752 - DNA, 13 bp, Artificial Sequence
  Oligonucleotide for detection of SNP TSC0029443
ctactccatttaa

SEQ ID NO: 117753 - DNA, 13 bp, Artificial Sequence
  Oligonucleotide for detection of SNP TSC0029443
ttaaatcgagtag

SEQ ID NO: 117754 - DNA, 13 bp, Artificial Sequence
  Oligonucleotide for detection of SNP TSC0029443
ctactcgatttaa

SEQ ID NO: 117755 - DNA, 13 bp, Artificial Sequence
  Oligonucleotide for detection of SNP TSC0029443
ttgtttgatttgg
